United States Patent Application Publication US 2007/0067865 A1 - sequence listing, part 11

SEQ ID NO: 57961 - DNA, 400 bp, Glycine max
ggcacaagtgagtttgttgatcgagataactagaaacagtgtgatgaaaatgaaggtccttgttttcttcgttgctacaattttggtagcatggcaatgccatgcgtacgatatgttccctctccgaatgaacactggctatggtgcccgtactccggaggtgaaatgcgcaagttggaggcttgctgtggaagcacacaacatctttggctttgagaccattcctgaagagtgcgttgaagcaacaaaagaatacatccatggcgaacaatatagatcagactccaaaacagtttaccaacaagcttacttttatgccagagacctcgaagtccatcccaaagacacatttgtgttcagtatagatggcaacgtactctctaatattccatactacaaa

SEQ ID NO: 57962 - DNA, 398 bp, Glycine max
ggcacaagtttgttgagatagctagaagcaataagatgaaaatgaaagtgcttgttttgtttgttgctacagttttggtagcatatgaatgccatggctcagactaccagaagttccctctccgaatgaaaactgggtttggtgggcaatacagcaatgaggtggcatgtgccagttggaggcttggcgtggaagcaaacaacgtagtcaagtggcaaactgttcctgcagcttgcggagagtacatagctgactacgttctaggagaccaatatagatcagattccaaaacagttaaccaacaagcttatttctatgctaaatccctcaaactcaccaacaaagatgtctttgtcttggacgttgacgacactactctctctaatctccagtatttt

SEQ ID NO: 57963 - DNA, 397 bp, Glycine max
ggcacaagtgagtttgttgatcgagataactagaaacagtgtgatgaaaatgaaggtccttgttttcttcgttgccacaattttggtagcatggcaatgccatgcgtacgatatgttccctctccgaatgaacactggctatggtgcccgtactccggaggtgaaatgcgcaagttggaggcttgctgtggaagcacacaacatctttggctttgagaccattcctgaagagtgcgttgaagcaacaaaggaatacatccatggcgaacaatatagatcagactccaaaacagttaaccaacaagcttacttttatgccagagacctcgaagtccatcccaaggacacatttgtgttcagtatagatggcaccgtactctctaatattccatactac

SEQ ID NO: 57964 - DNA, 354 bp, Glycine max
ggcacaagtgagtttgttgatcgagataactagaaacagtgtgatgaaaatgaaggtccatgttttcatcgatgctacaatttcggtagcatggcaatgccatgcgtacgataagttccctccccgcaagaacactggctaaggtgtccgtactccggaggtgaaatgcgcaagttggaggcttgctgtggaagcacacaacatctttggctttgagaccattcctgaagagtgcgttgaagcaacaaaagaatacatccatggcgaacaatatagatcagactccagaacagttaaccaacaagcttacttttatgccagagacctccaaatccatcccaaagacacatttgt

SEQ ID NO: 57965 - DNA, 392 bp, Glycine max
  unsure (1)..(392): unsure at all n locations
ggtgcacaagtgagtttgttgatcgagataactagaaacagtgtgatgaaaatgaaggtccttgttttcttcgttgctacaattttggtagcatggcaatgccatgcgtacgatatgttccctctccgaatgaacactggctatggtgcccgtactccggaggtgaaatgcgcaagttggaggcttgctgtggaagcacacaacatctttggctttgagaccattcctgaagagtgcgttgaaacaacaaaggaatacatccatggcgaacaatatagatcagactccanaacagttaaccaacaagcttacttttatgccagagacctcgaagtccatcccaaggacacatttgtgttcagtatagatggcaccgtactctctaatattcc

SEQ ID NO: 57966 - DNA, 402 bp, Glycine max
ggcacaagtgagtttgttgatcgagataactagaaacagtgtgatgaaaatgaaggtccttgttttcttcgttgctacaattttggtagcatggcaatgccatgcgtacgatatgttccctctccgaatgaacactggctatggtgcccgtactccggaggtgaaatgcgcaagttggaggcttgctgtggaagcacacaacatctttggctttgagaacattcctgaagagtgcgttgaagcaacaaaggaatacatccatggcgaacaatatagatcagactccaaaacagttaaccaacaagcttacttttatgccagagacctcgaagtccatcccaaggacacatttgtgttcagtatagatggcaccgtactctctaatattccatactacaaaaa

SEQ ID NO: 57967 - DNA, 364 bp, Glycine max
gaaggtgcaagagtttgttgtgagctataagctagtttatcgtgaggagaatatgaagttgtttgttttctttgttgctgcagtagttttggtagcatggccatgccatggcgcaggctaccaaaggttccctctccgaatgaaaactggctatggtgagcgttcttcggaggtaaaatgcgcaagttttaggcttgctgtggaagcacacaacatccgagcctttaaaaccattcctgaagagtgcgttgaaccaacaaaggactacattaatggcgaacaatttagatcagactctaaaacagttaaccaacaagctttcttttatgctagtgaacgcgaagtccatcacaacgacatattt

SEQ ID NO: 57968 - DNA, 397 bp, Glycine max
ggcacaagtgagtttgttgatcgagataactagaaacagtgtgatgaaaatgaaggtccttgttttcttcgttgctacaattttggtagcatggcaatgccatgcgtacgatatgttccctctccgaatgaacactggctatggtgcccgtactccggaggtgaaatgcgcaagttggaggcttgctgtggaagcacacaacatctttggctttgagaccattcctgaagagtgcgttgaaccaacaaaggaatacatccatggcgaacaatatagattagactccaaaacagttaaccaacaagcttactttgatgccagagacctcgaagtccatcccaacgacacatttgtgttcagtatagatggcaccgtactctccaatgatccatactac

SEQ ID NO: 57969 - DNA, 401 bp, Glycine max
ggcacaagtgagtttgttgatcgagataactagaaacagtgtgatgaaaatgaaggtccttgttttcttcgttgctacaattttggtagcatggcaatgccatgcgtacgatatgttccctctccgaatgaacactggctatggtgcccgtactccggaggtgaaatgcgcaagttggaggcttgctgtggaagcacacaacatctttggctttgagaccattcctgaagagtgcgttgaagcaacaaagggaatacatccatggcgaacaatatagatcagactccaaaacagttaaccaacaagcttacttttatgccagagacctcgaagtccatcccaaggacacatttgtgttcagtatagatggcaccgtactctctaatattccatactacaaa

SEQ ID NO: 57970 - DNA, 311 bp, Glycine max
gacgaatactaccaagtgaaaaagcaattaactgagcatatatagcgtgtaagaaagtgagaaaaaaaatcttctgtacaaagaaaagggcaagtggggcaaccttgggggtcctggccctgtccttgttaccacttccagaaaaatgccccaataagcaagttttgagggacacaaaaactttctccagtcaagggtccctggaatttggaaccaaagggcttcctttggaagaattggttctgggttttaatggcatatcagttgggccttttggacccgtggaatttgatgaatccgatgggccaacc

SEQ ID NO: 57971 - DNA, 361 bp, Glycine max
ggcacaagtttgtcgagatagctagaagcaataagatgaaaatgaaagtgcttgttttgtttgttgctacagttttggtagcatatgaatgccatggctcagactaccagaagttccctctccaaatgaaaactgggtttggtgggcaatacagcaatgaggtggcatgtgccagttggaggcttggcgtggaagcaaacaacgtagtcaagtggcaaactgttcctgcagcttgcggagagtacatagctgactacgttctaggagaccaatatagatcagattccaaaacagttaaccagcaagcttatttctatgctaaatccctcaaactcaccaacaaagatgtcttcgtcttgga

SEQ ID NO: 57972 - DNA, 393 bp, Glycine max
gactcaccacttcaaaacactcataacacaaagcacaaagcaaagctcatccttgagttaaaaaatggcagcagcttcttccatggctctctcatccccatccttggctggcaaggccgtgaagctgggcccatcagccccagaagtgggaagggtgagcatgaggaagaccgtcaccaagcaggtctcctcaggaagcccatggtacggcccagaccgagtcaagtacttgggcccattctctggcgagcccccgtcctacctaaccggtgagttcccaggcgactacggctgggacactgctgggctttccgcagacccagaaaccttcgccaagaaccgtgaactcgaagtgatccactccaggtgggccatgctcggagccttgggctg

SEQ ID NO: 57973 - DNA, 400 bp, Glycine max
ggcacaagtgagtttgttgatcgagataactagaaacagtgtgatgaaaatgaaggtccttgttttcttcgttgctacaattttggtagcatggcaatgccatgcgtacgatatgttccctctccgaatgaacactggctatggtgcccgtactccggaggtgaaatgcgcaagttggaggcttgctgtggaagcacacaacatctttggctttgagaccattcctgaagagtgcgttgaagcaacaaaggaatacatccatggcgaacaatatagatcagactccaaaacagttaaccaacaagcttacttttatgccagagacctcgaagtccatcccaaggacacatttgtgttcagtatagatggcaccgtactctctaatattccatactacaaa

SEQ ID NO: 57974 - DNA, 390 bp, Glycine max
ggcacaagtgagtttgttgatcgagataactagaaacagtgtgatgaaaatgaaggtccttgttttcttcgttgctacaattttggtagcatggcaatgccatgcgtacgatatgttccctctccgaatgaacactggctatggtgcccgtactccggaggtgaaatgcgcaagttggaggcttgctgtggaagcacacaacatctttggctttgagaccattcctgaagagtgcgttgaagcaacaaaggaatacatccatggcgaacaatatagatcagactccaaaacagttaaccaacaagcttacttttatgccagagacctcgaagtccatcccaaggacacatttgtgttcagtatagatggcaccgtactctctaatattcc

SEQ ID NO: 57975 - DNA, 403 bp, Glycine max
ggtgcacaagtgagtttgttgatcgagataactagaaacagtgtgatgaaaatgaaggtccttgttttcttcgttgctacaattttggtagcatggcaatgccatgcgtacgatatgttccctctccgaatgaacactggctatggtgcccgtactccggaggtgaaatgcgcaagttggaggcttgctgtggaagcacacaacatctttggctttgagaccattcctgaagagtgcgttgaagcaacaaaggaatacatccatggcgaacaatatagatcagactccataacagttaaccaacaagcttacttttatgccagagacctcgaagtccatcccaaggacacatttgtgttcagtatagatggcaccgtactctctaatattccatactacaaaa

SEQ ID NO: 57976 - DNA, 401 bp, Glycine max
ggcacaagtgagtttgttgatcgagataactagaaacagtgtgatgaaaatgaaggtccttgttttcttcgttgctacaattttggtagcatggcaatgccgtgcgtacgatatgttccctctccgaatgaacactggctatggtgcccgtactccggaggtgaaatgcgcaagttggaggcttgctgtggaaacacacaacatctttggctttgagaccattcctgaagagtgcgttgaagcaacaaaggaatacatccatggcgaacaatatagatcagactccaaaacagttaaccaacaagcttacttttatgccagagacctcgaagtccatcccaaggacacatttgtgttcagtatagatggcaccgtactctctaatattccatactacaaaa

SEQ ID NO: 57977 - DNA, 365 bp, Glycine max
ggcacaagtgagtttgttgatcgagataactagaaacagtgtgatgaaaatgaaggtccttgttttcttcgttgctacaattttggtagcatggcaatgccatgcgtacgatatgttccctctccgaatgaacactggctatggtgcccgtactccggaggtgaaatgcgcaagttggaggcttgctgtggaagcacacaacatctttggctttgagaccattcctgaagagtgcgttgaagcaacaaaggaatacatccatggcgaacaatatagatcagactccaaaacagttaaccaacaagcttacttttatgccagagacctcgaagtccatcccaaggacacatttgtgttcagtatag

SEQ ID NO: 57978 - DNA, 363 bp, Glycine max
ggcacaagtttgttgagatagctagaagcaataagatgaaaatgaaagtgcttgttttgtttgttgctacagttttggtagcatatgaatgccatggctcagactaccagaagttccctctccaaatgaaaactgggtttggtgggcaatacagcaatgaggtggcatgtgccagttggaggcttggcgtggaagcaaacaacgtagtcaagtggcaaactgttcctgcagcttgcggagagtacatagctgactacgttctaggagaccaatatagatcagattccaaaacagttaaccaacaagcttatttctatgctaaatccctcaaactcaccaacaaagatgtctttgtcttggacg

SEQ ID NO: 57979 - DNA, 397 bp, Glycine max
ggcacaagtgagtttgttgatcgagataactagaaacagtgtgatgaaaatgaaggtccttgttttcttcgttgctacaattttggtagcatggcaatgccatgcgtacgatatgttccctctccgaatgaacactggctatggtgcccgtactccggaggtgaaatgcgcaagttggaggcttgctgtggaagcacacaacatctttggctttgagaccattcctgaagagtgcgttgaagcaacaaaggaatacatccatggcgaacaatatagatcagactccaaaacagttaaccaacaggcttacttttatgccagagacctcgaagtccatcccaaggacacatttgtgttcagtatagatggcaccgtactctctaatattccatactac

SEQ ID NO: 57980 - DNA, 397 bp, Glycine max
gaaggtgcaagagtttgttgtgagctataagctagtttatcgtgaggagaatatgaagttgtttgttttctttgttgctgcagtagttttggtagcatggccatgccatggcgcaggctaccaaaggttccctctccgaatgaaaactggctatggtgagcgttcttcggaggtaaaatgcgcaagttttaggcttgctgtggaagcacacaacatccgagcctttaaaaccattcctgaagagtgcgttgaaccaacaaaggactacattaatggcgaacaatttagatcagactctaaaacagttaaccaacaagctttcttttatgctagtgaacgcgaagtccatcacaacgacatatttatattcggcatagataacaccgtactctctaat

SEQ ID NO: 57981 - DNA, 402 bp, Glycine max
gatgcacaagtttgttgagatagctagaagcaataagatgaaaatgaaagtgcttgttttgtttgttgccacagttttggtagcatatgaatgccatggctcagactaccagaagttccctctccaaatgaaaactgggtttggtgggcaatacagcaatgaggtggcatgtgccagttggaggcttggcgtggaagcaaacaacgtagtcaagtggcaaactgttcctgcagcttgcggagagtacatagctgactacgttctaggagaccaatatagatcagattccaaaacagttaaccaacaagcttatttctatgctaaatccctcaaactcaccaacaaagatgtctttgtcttggacgttgacgacactactctctctaatctccagtattttgc

SEQ ID NO: 57982 - DNA, 399 bp, Glycine max
ggcacaagtgagtttgttgatcgagataactagaaacagtgtgatgaaaatgaaggtccttgttttcttcgttgctacaattttggtagcatggcaatgccatgcgtacgatatgttccctctccgaatgaacactggctatggtgcccgtactccggaggtgaaatgcgcaagttggaggcttgctgtggaagcacacaacatctttggctttgagaccattcctgaagagtgcgttgaagcaacaaaggaatacatccatggcgaacaatatagattagactccaaaacagttaaccaacaagcttacttttatgccagagacctcgaagtccatcccaaggacacatttgtgttcagtatagatggcaccgtactctctaatattccatactacaa

SEQ ID NO: 57983 - DNA, 399 bp, Glycine max
ggcacaagtttgttgagatatctagaagcaataagatgatgatgaaagtgcttgtgttgtttgttgctacagttttggtagcatatgaatgccatggctcaaactaccagaagttccctctccaaatgaaaactgggtttggtgggcactacagcaatgaggtggcatgtgccagttggaggcttggcgtggaagcaaacaacgtagtcaagtggcaaactgttcctgcagcttgcggagagtacatagctgactacgttctaggagaccaatatagatcagattccaaaacagttaaccaacaagcttatttctatgctaaatccctcaaactcaccaacagggatgtctttgtcttagtcgttgacgacactactctctctaatctccagtattttg

SEQ ID NO: 57984 - DNA, 363 bp, Glycine max
gagaaatcgaattcaccatccaaatgtgacacgtagattcagcaatgggaactccatcatcgaaccctctcttcatcttcttccttttctattcctctgtatcacttaatccttcagatttgactttcgaatcgacctacgctcgcctctgcaaccaccatgtccctgcaccgccctctcgttccgccgaaggaaccttccccggcgtcgccgacgagctccggttccaatttggctactttgccggcggccaccgattcttcaaccgatccgtctcgatgaagaaccgcgcgtcgtgacgcgtgacctccgttcgccgaagcgcgagcgacggcgtgttcgaattacacgggcgaatgcttc

SEQ ID NO: 57985 - DNA, 406 bp, Glycine max
ggaaggtgcaagagtttgttgtgagctataagctagtttatcgtgaggagaatatgaagttgtttgttttctttgttgctgcagtagttttggtagcatggccatgccatggcgcaggctaccaaaggttccctctccgaatgaaaactggctatggtgagcgttcttcggaggtaaaatgcgcaagttttaggcttgctgtggaagcacacaacatccgagcctttaaaaccattcctgaagagtgcgttgaaccaacaaaggactacattaatggcgaacaatttagatcagactctaaaacagttaaccaacaagctttcttttatgctagtgaacgcgaagtccatcacaacgacatatttatattcggcatagataacaccgtactctctaatatcccata

SEQ ID NO: 57986 - DNA, 403 bp, Glycine max
ggaaacagagagtgatttcagtgagtgatcggtgttcacttgatctcatcataatcgtcagcgtcaattgaagaagatgccgatcagaaacatcgccgtcggaaggcctgaagaggcgactcaccccgacacgttgaaggcggctttggctgagttcatctcaaccttcatcttcgtgttcgccggctcaggctccggcatcgcctacaacaagctcaccgacaacggcgctgccacccctgccggcctcatctccgcctccatcgcccatgcattcgccctcttcgtcgccgtctccgtcggcgccaacatctccggcggccacgtcaaccccgccgtcaccttcggcgccttcgtcggcggcaacatcaccttcctccgcggcatcgtctacgtcatcgcc

SEQ ID NO: 57987 - DNA, 397 bp, Glycine max
ggcacaagtgagtttgttgatcgagataactagaaacagtgtgatgaaaatgaaggtccttgttttcttcgttgctacaattttggtagcatggcaatgccatgcgtacgatatgttccctctccgaatgaacactggctatggtgcccgtactccggaggtgaaatgcgcaagttggaggcttgctgtggaagcacacaacatctttggctttgagaccattcctgaagagcgcgttgaagcaacaaaggaatacatccatggcgaacaatatagatcagactccaaaacagttaaccaacaagcttacttttatgccagagacctcgaagtccatcccaaggacacatttgtgttcagtatagatggcaccgtactctctaatattccatactac

SEQ ID NO: 57988 - DNA, 348 bp, Glycine max
ggcacaagtgagtttgttgatcgagataactagaaacagtgtgatgaaaatgaaggtccttgttttcttcgttgctacaattttggtagcatggcaatgccatgcgtacgatatgttccctctccgaatgaacactggctatggtgcccgtactccggaggtgaaatgcgcaagttggaggcttgctgtggaagcacacaacatctttggctttgagaccattcctgaagagtgcgttgaagcaacaaaggaatacatccatggcgaacaatatagatcagactccaaaacagttaaccaacaagcttacttttatgccagagacctcgaagtccatcccaaggacac

SEQ ID NO: 57989 - DNA, 365 bp, Glycine max
ggcacaagtgagtttgttgatcgagataactagaaacagtgtgatgaaaatgaaggtccttgttttcttcgttgctacaattttggtagcatggcaatgccatgcgtacgatatgttccctctccgaatgaacactggctatggtgcccgtactccggaggtgaaatgcgcaagttggaggcttgctgtggaagcacacaacatctttggctttgagaccattcctgaagagtgcgttgaagcaacaaaggaatacatccatggcgaacaatatagattagactccaaaacagttaaccaacaagcttacttttatgccagagacctcgaagtccatcccaaggacacatttgtgttcagtatag

SEQ ID NO: 57990 - DNA, 325 bp, Glycine max
aaggtcaaaattttggttttagcctataacctagtttatcgttaggagaatatgaaattgtttgttttctttgttgctgcagtagttttggtagcatggccatgccatggcgcaggctaccaaaggttccctctccgaatgaaaactggctatggtgagcgttcttcggaggtaaaatgcgcaagttttaggcttgctgtggaagcacacaacatccgagcctttaaaaccattcctgaagagtgcgttgaaccaacaaaggactacattaatggcgaacaatttagattagactctaaaacagttaaccaacaagctttctttt

SEQ ID NO: 57991 - DNA, 359 bp, Glycine max
ggcacaagtgagtttgttgatcgagataaccagaaacagtgtgatgaacatgaacgtccttgctttcctcgctgcgacaattttggtagcatggcaatgccatgcgtacgacatgttccctctccgaatgaacactggctatggtgcccgtactccggaggtgaaatgcgcaagttggaggcttgctgtggaagcacacaacatctttggctttgagagcattcctgaagagtgcgttgaagcaccacaggaatacatccatggcgaacaatatagattagactccaaagcagttaagcaccacgcttacttttacgccagagacctcgaagtccatcccaaggacacatttgtgttca

SEQ ID NO: 57992 - DNA, 368 bp, Glycine max
gtgcacaagtgagtttgttgatcgagataactagaaacagtgtgatgaaaatgaaggtccttgttttcttcgttgctacaattttggtagcatggcaatgccatgcgtacgatatgttccctctccgaatgaacactggctatggtgcccgtactccggaggtgaaatgcgcaagttggaggcttgctgtggaagcacacaacatctttggctttgagaccattcctgaagagtgcgttgaagcaacaaaggaatacatccatggcgaacaatatagatcagactccaaaacagttaaccaacaagcttacttttatgccagagacctcgaagtccatcccaaggacacatttgtgttcagtatagat

SEQ ID NO: 57993 - DNA, 58 bp, Glycine max
ggtagttccacttcgtatcaatcatgtcgaagggaagtccctgagtctctattgttct

SEQ ID NO: 57994 - DNA, 65 bp, Glycine max
ggtagcgcttgatttctctacgggtcctctgatcctgcgtctgccttctccgccgttgtcttcgt

SEQ ID NO: 57995 - DNA, 361 bp, Glycine max
ggcacaagtgagtttgttgatcgagataactagaaacagtgtgatgaaaatgaaggtccttgttttcttcgttgctacaattttggtagcatggcaatgccatgcgtacgatatgttccctctccgaatgaacactggctatggtgcccgtactccggaggtgaaatgcgcaagttggaggcttgctgtggaagcacacaacatctttggctttgagaccattcctgaagagtgcgttgaagcaacaaaggaatacatccatggcgaacaatatagatcagactccaaaacagttaaccaacaagcttacttttatgccagagacctcgaagtccatcccaaggacacatttgtgttcagt

SEQ ID NO: 57996 - DNA, 303 bp, Glycine max
gaggaacataaatctaactgcagtaacaaatctactgagattaaaagattccctcctgcttctgagaactgcgatgaggcttacaaaagaaaaacacctgagaatacatggaagcctccacggtctgagattgttctcaatcaagaggatcatcttcatgacccttggagggtgttggttacttgtatgcttctcaatcggactgctggtggccagacaaaaaatgttgtgtcaaacttcttcaagttatgtccatatgcataatcctgtacacaagttacaagataggaaatacagaagaca

SEQ ID NO: 57997 - DNA, 404 bp, Glycine max
  unsure (1)..(404): unsure at all n locations
agaagggggcacaaagtggagtttgtttgattcgnagataaactagaaaacagtgtgattaaaaatgaaggtccttgttttcttcgttgctacaattttggtagcatggcaatgccatgcgtacgatatgttccctctccgaatgaacactggctatggtgcccgtactccggaggtgaaatgcgcaagttggaggcttgctgtggaagcacacaacatctttggctttgagaccattcctgaagagtgcgttgaagcaacaaaggaatacatccatggcgaacaatatagatcagactccaaaacagttaaccaacaagcttacttttatgccagagacctcgaagtccatcncaaggacacatttgtgttcagtatagatggcaccgtactctctaatattc

SEQ ID NO: 57998 - DNA, 376 bp, Glycine max
gcacaagtgagtttgttgatcgagataactagaaacagtgtgatgaaaatgaaggtccatgttttcttcgttgctacaattttggtagcatggcaatgccatgcgtaagatatgttccctctccgaatgaacactggctatggtgcccgtaatccggaagtgaaatgcgcaagttggaggcttgctgtggaagcacacaacatctttggctttgagaccattcctgaagagtgcgttgaagcaacaaaggaatacatccatggcgaacaatatagatcagactccaaaacagttaaccaagaagcttacttttatgcaagagacctccatgtccatcccaaggacacatttgtgttcagtatagaaggcaccgtac

SEQ ID NO: 57999 - DNA, 94 bp, Glycine max
acccacacgtcagtcgggttgcaaaaaaacgacaaaggggggattcatcttctttttcatcctttctctctcactcactcattcataagtatcc

SEQ ID NO: 58000 - DNA, 398 bp, Glycine max
  unsure (1)..(398): unsure at all n locations
gcacaagtgagtttgttgatcgagataactagaaacagtgtgatgaaaatgaaggtccttgttttcttcgttgctacaattttggtagcatggcaatgccatgcgtacgatatgttccctctccgaatgaacactggctatggtgcccgtactccggaggtgaaatgcgcaagttggaggcttgctgtggaagcacacaacatctttggctttgagaccattcctgaagagtgcgttgaagcaacaaaggaatacatccatggcgaacaatatagatcagactccanaacagttaaccaacaagcttacttttatgccagagacctcgaagtcaatcccaaggacacatttgtgttcagtatagatggcaccgtactctctaatatttcatactacaa

SEQ ID NO: 58001 - DNA, 397 bp, Glycine max
gaaggtgcaagagtttgttgtgagctataagctagtttatcgtgaggagaatatgaagttgtttgttttctttgttgctgcagtagttttggtagcatggccatgccatggcgcaggctaccaaaggttccctctccgaatgaaaactggctatggtgagcgttcttcggaggtaaaatgcgcaagttttaggcttgctgtggaagcacacaacatccgagcctttaaaaccattcctgaagagtgcgttgaaccaacaaaggactacattaatggcgaacaatttagatcagactctaaaacagttaaccaacaagctttcttttatgctagtgaacgcgaagtccatcacaacgacatatttatattcggcatagataacaccgcactctctaat

SEQ ID NO: 58002 - DNA, 293 bp, Glycine max
gaatttagctttgccttagatgcatgtcagctttttcttgcttccatagttcagggcgtgtgttcaagtcagtatagttcctctctttgcattgggtcttgcacaaattgacttctcaccatgccaaatggtgcagggtagagtcctctgcgttgactgcactcacaattatgacttatctgcatagtaaggtttcagtcaggtgtgacggtgtgaaaacagtgtgctttggcatgtagagaataagaatgcgccttcatggttgatcatcccttatactacgcttccgcttc

SEQ ID NO: 58003 - DNA, 338 bp, Glycine max
gactcaccacttcagaacactcataacacaaagcacaaagcaaagctcatccttgagttaaaaaatggcagcagcttcttccatggctctctcatccccatccttggctggcaaggccgtgaagctgggcccatcagccccagaagtgggaagggtgagcatgaggaagaccgtcaccaagcaggtctcctcaggaagcccatggtacggcccagaccgagtcaagtacttgggcccattctctggcgagcccccgtcctacctaaccggtgagttcccaggcgactacggctgggacactgctgggctttccgcagacccagaaaccttcgccaaga

SEQ ID NO: 58004 - DNA, 354 bp, Glycine max
ggcacaagtgagtttgttgatcgagataactagaaacagtgtgatgaaaatgaaggtccttgttttcttcgttgctacaattttggtagcatggcaatgccatgcgtacgatatgttccctctccgaatgaacactggctatggtgcccgtactccggaggtgaaatgcgcaagttggaggcttgctgtggaagcacacaacatctttggctttgagaccattcctgaagagtgcgttgatgcaacacaggaatacatccatggcgaacaatatagatcagactccaaaacagttaaccaacaagcttacttttatgccagagacctcgacgtccatcccaaggacacatttgt

SEQ ID NO: 58005 - DNA, 367 bp, Glycine max
ggtgcacaagtgagtttgttgatcgagataactagaaacagtgtgatgaaaatgaaggtccttgttttcttcgttgctacaattttggtagcatggcaatgccatgcgtacgatatgttccctctccgaatgaacactggctatggtgcccgtactccggaggtgaaatgcgcaagttggaggcttgctgtagaagcacacaacatctttggctttgagaccattcctgaagagtgcgttgaagcaacaaaggaatacatccatggcgaacaatatagatcagactccaaaacagttaaccaacaagcttacttttatgccaaagaactccaagtccaacccaaaggcacaattggggtcaattaaa

SEQ ID NO: 58006 - DNA, 388 bp, Glycine max
  unsure (1)..(388): unsure at all n locations
agggcacaagtgagtttgttgatcgagataactagaaacagtgtgatgaaaatgaaggtccttgttttcttcgttgctacaattttggtagcatggcaatgccatgcgtacgatatgttccctctccgaatgaacactggctatggtgcccgtactccggaggtgaaatgcgcaagttggaggcttgctgtggaagcacacaacatctttggctttgagaccattcctgaagagtgcgttgaagcaacaaaggaatacatccatggcgaacaatatagattagacaacanaacagtttaccaacaagcttacttttatgccagagacctcgaagtccatcccaaggacacatttgtgttcagtatagatggcaccgtactctctaata

SEQ ID NO: 58007 - DNA, 309 bp, Glycine max
aaaaggggcacaagtttgtttagataactagaaacaataagatgaaaatgaaagtgcttgttttgtttgttgctacagttttggtagcatatgaatgccatggctcagactaccagaagttccctctccaaatgaaaactgggtttggtgggcaatacagcaatgaagtggcatgtgccagttggaggcttggcgtggaagcaaacaacgtagtcaagtggcaaactgttcctgcagcttgcggagagtacatagctgactacgttctaggagaccaatatagatcagattccaaaacagttaaccaac

SEQ ID NO: 58008 - DNA, 337 bp, Glycine max
gactcaccacttcaaaacactcataacacaaagcacaaagcaaagctcatccttgagttaaaaaatggcagcagcttcttccatggctctctcatccccatccttggctggcaaggccgtgaagctgggcccatcagccccagaagtgggaagggtgagcatgaggaagaccgtcaccaagcaggtctcctcaggaagcccatggtacggcccagaccgagtcaagtacttgggcccattctctggcgagcccccgtcctacctaaccggtgagttcccaggcgactacggctgggacactgctgggctttccgcagaccagaaaccttcgccaaga

SEQ ID NO: 58009 - DNA, 288 bp, Glycine max
gatctggcagcagaagaacaagtagttgagaactaagaaggagaagcaaatggcttcctcaatgatctcttccccagctgttaccactgtcaagcgtgccggtgccggcatggttgctccattcactggcctcaagtccatggctggcttccccaccagatagaccagcaatgacattacctccattgctagcaacggtggaagagtgcaatgcatgcatgtgtggccaccagttggcaagaagaagtttgagactcgttcctacctgccagaccttgatgatgcaca

SEQ ID NO: 58010 - DNA, 361 bp, Glycine max
ggcgaaacagagagtgatttcagtgagtgatcggtgttcacttgatctcatcataatcgtcagcgtcaattgaagaagatgccgatcagaaacatcgccgtcggaaggtctgaagaggcgactcaccccgacacgttgaaagcggctttggctgagttcatctcaaccttcatcttcgtgttcgccggctcaggctccggcatcgcctacaacaagctcaccgagaacggcgctgccacccctgccggcctcatctccgcctccatcgcccatgcattcgccctcttcgtcgccgtctccgtcggcgccaacatctccggcggccacgtcaaccccgccgtcaccttcggcgccttcgtcg

SEQ ID NO: 58011 - DNA, 385 bp, Glycine max
ggcacaagtgagtttgttgatcgagataactagaaacagtgtgatgaaaatgaaggtccttgttttcttcgttgctacaattttggtagcatggcaatgccatgcgtacgatatgttccctctccgaatgaacactggctatggtgcccgtactccggaggtgaaatgcgcaagttggaggcttgctgtggaagcacacaacatctttggctttgagaccattcctgaagagtgcgttgaagcaacaaaggaatacatccatggcgaacaatatagatcagactccaaaacagttaaccaacaagcttacttttatgccagagacctcgaagtccatcccaaggacacatttgtgttcagtatagatggcaacgtactctctaat

SEQ ID NO: 58012 - DNA, 348 bp, Glycine max
ggcacaagtgagtttgttgatcgagataactagaaacagtgtgatgaaaatgaaggtccttgttttcttcgttgctacaattttggtagcatgacaatgccatgcgtacgatatgttccctctccgaatgaacactggctatggtgcccgtactccggaggtgaaatgcgcaagttggaggcttgctgtggaagcacacaacatctttggctttgagaccattcctgaagagtgcgttgaagcaacaaaggaatacatccatggcgaacagtatagatcagactccaaaacagttaaccaacaagcttacttttatgccagagacctcgaagtccatcccaaagacac

SEQ ID NO: 58013 - DNA, 300 bp, Glycine max
ggcacaagttcctctattgctgctcactcataaaaacattgtcgcggccgttgaagtccgatgatttcatcattactatcatcatcgcaagacgcacaagtgaatgctacaatacgttcgatactcaagatgatcactgactacgggacaccgtgggacactggggtctcacacgaagtcgacgcttatcgtcatgtcgcagaatatcatgggtatctcgaccattctacaagacgttgttacaggcacagagtcacgcatgcacagggagtgcttactattagactcgatcacaatttg

SEQ ID NO: 58014 - DNA, 397 bp, Glycine max
ggcacaagtttgttgagatagctagaagcaataagatgaaaatgaaagtgcttgttttgtttgttgctacagttttggtagcatatgaatgccatggctcagactaccagaagttccctctccaaatgaaaactgggtttggtgggcaatacagcaatgaggtggcatgtgccagttggaggcttggcgtggaagcaaacaacgtagtcaagtggcaaactgttcctgcagcttgcggagagtacatagctgactacgttctaggagaccaatatagatcagattccagaacagttaaccaacaagattatttctatgctaaatccctcaaactcaccaacaaagatgtctttggcttggacgttgacgacactactctctctaatctccagtattt

SEQ ID NO: 58015 - DNA, 384 bp, Glycine max
  unsure (1)..(384): unsure at all n locations
gaaggtgcaagagtttgttgtgagctataagctagtttatcgtgaggagaatatgaagttgtttgttttctttgttgctgcagtagttttggtagcatggccatgccatggcgcaggctaccaaaggttccctctccgaatgaaaactggctatggtgagcgttcttcggaggtaaaatgcgcangttttaggcttgctgtggaagcacacaacatccgagcctttanaaccattcctgaagagtgcgttgaaccaacanaggactacattaatggcgaacaatttagatcagactctanaacagttaaccaacaagctttcttttatgctagtgaacgcgaagtccatcacaacgacatatttatattcggcatagataacac

SEQ ID NO: 58016 - DNA, 389 bp, Glycine max
  unsure (1)..(389): unsure at all n locations
gattgtgaaatcatcatcatcatgggttgctcagcctcaagaaccatcaccatagtggccaacaacaataaccaattagaggatccatcttctgcttctcttgcttcttctttctcttcctcttctgcctcacacaaatccattaactctacttcttcaccagcagcagcaccagttagaagaagagctctttctctcccaatgcctcttgttcatcaccctcccataaaaaagggtgacacacaccaccttgtctccctcacctccaccacctatggctcccttctcctcattgaccaaaaagacccaaacttgacccaaaaaaaccaaccccgcctcaccaaaacctcaaaccaaactgacccagcacactcactctncccagactc

SEQ ID NO: 58017 - DNA, 355 bp, Glycine max
ggcacaagtgagtttgttgatggacataactagaaacagtgtgatgaaaatggaggtccttgttttcttcgttgctacaattttggtagcatggcaatgccatgcgtacgatatgttccctctccgaatgaacactggctatggtgcccgtactccggaggtgaaatgcgcaagttggaggcttgctgtggaggcacacaacatctttgggtttgagaccattcctgaagagtgcgttgaagcaacaaaggaatacatccatggcgaacagtatagatcagactccaaaacagttaaccaacaagcttacttttatgccagagacctcgaagtccatcccaaggacacatttgtg

SEQ ID NO: 58018 - DNA, 175 bp, Glycine max
caaaggggcacaagtgagtttgttggtctagatgagtagaaagagtgtgaggaaaatgaaggtccgtgttgtcttcgttgctacaattttggtagcatggcaactgccaggggtgacacgtgttccctctccgaatgaacagtggctatggtgcccgtactccggatgtgaaatt

SEQ ID NO: 58019 - DNA, 333 bp, Glycine max
ggcacaagtgagtttgttgatcgagataactagaaacagtgtgatgaaaatgaaggtccttgttttcctcgttgctacaattttggtagcatggcaatgccatgcgtacgatatgttccctctccgaatgaacactggctatggtgcccgtactccggaggtgaaatgcgcaagttggaggcttgctgtggaagcacacaacatccttggctttgagaccattcctgaagagtgcgttgaagcaacaaaggaatacatccatggcaaacaatatagatcagactccaaaacagttaaccaacaagcttacttttatgccagagacctcgaagt

SEQ ID NO: 58020 - DNA, 378 bp, Glycine max
ggcacaagtgagtttgttgatcgagataactagaaacagtgtgatgaaaatgaaggtccttgttttcttcgttgctacaattttggtagcatggcaatgccatgcgtacgatatgttccctctccgaatgaacactggctatggtgcccgtactccggaggtgaaatgcgcaagttggaggcttgctgtggaagcacacaacatctttggctttgagaccattcctgaagagtgcgttgaagcaacaaaggaatacatccatggcgaacaatatagatcagactccaaaacagttaaccaacaagcttacttttatgccagagacctcgaagtccatcccaaggacacatttgttgtcagtatagatggcaccgtact

SEQ ID NO: 58021 - DNA, 357 bp, Glycine max
ggcacaagtgagtttgttgatcgagataactagagacagtgtgatgaaaatgaaggtccttgttttcttcgttgctacaattttggtagcatggcaatgccatgcgtacgatatgttccctctccgaatgaacactggctatggtgcccgtactccggaggtgaaatgcgcaagttggaggcttgctgtggaagcacacaacatctttggctttgaaacaatcctgaagaattccttgaagcaaccaaagaatacatccatggcgaacaatatagattaagatccaaaacagtttaccaacaaacttacatttatgccagagacctctaagtccatcccaaggacacatttgtgttc

SEQ ID NO: 58022 - DNA, 224 bp, Glycine max
gaggagagggaacttggagaaaggtgcgaacgtttgctgcttctttgagggcatttttgtgccttgctaaaactttgggtgcacgggcatgacaggcggtaggaagatacgaccttcaaggactcatgcgcttcagtagcagttcctcgttcatattcagagtcatctctgggctggaggtgtccatattctggaggactagagccacttccctgtgtcaaaat

SEQ ID NO: 58023 - DNA, 376 bp, Glycine max
ggcacaagtgagtttgttgatcgagataactagaaacagtgtgatgaaaatgaaggtccttgttttcttcgttgctacaattttggtagcatggcaatgccatgcgtacgatatgttccctctccgaatgaacactggctatggtgcccgtactccggaagtgaaatgcgcaagttggaagcttgctgtggaagcacacaacatctttggctttgagaccattcctgaagagtgcgttgaagcaacaaaggaatacatccatggcgaacaatatagatcagactccaaaacagttaaccaacaagcttacttttatgccagagacctcgaagtccatcccaaggacacatttgtgttcagtatagatggcaccgta

SEQ ID NO: 58024 - DNA, 187 bp, Glycine max
ggtggtggtgtgtgtacagccgcgtcacggttgcacttctaatctgcagacacggatcttcagttctgcgactgacagtattgtaggtttggtatgcatagccgtatgtatggctcattctcttcagatttgcctaacttttagaaactccttctcaggtacataatttcttctcatgatatctaat

SEQ ID NO: 58025 - DNA, 374 bp, Glycine max
gcacaagtgagtttgttgatcgagataactagaaacagtgtgatgaaaatgaaggtccttgttttcttcgttgctacaattttggtagcatggcaatgccatgcgtacgatatgttccctctccgaatgaacactggctatggtgcccgtactccggaggtgaaatgcgcaagttggaggcttgctgtggaagcacacaacatctttggctttgagaccattcctgaagagtgcgttgaagcaacaaaggaatacatccatggcgaacaatatagattagactccagaacagttaaccaacaagcttacttttaatgcagagacctcgaagtccatcgcaaggacacatttgtgttcagtagagatggcaccgt

SEQ ID NO: 58026 - DNA, 60 bp, Glycine max
ggtcaggaattcccgggccgacccacgcgtggaatcgaaaagaacgacagaaaggggaac

SEQ ID NO: 58027 - DNA, 358 bp, Glycine max
gcacaagtgagtttgttgatcgacataactagaaacactgtgatgaaaatgaaggtccttgttttcttcgttgctacaattttggtagcatggcaatgccatgcgtacgatatgttccctctccgaatgaacactggctatggtgcccgtactccggaggtgaaatgcgcaagttggaggcttgctgtggaggcacacaacatctttggctttgagaccattcctgaagagtgcgttgaagcagcagaggaatacatccatggcgaacactatagatcagactccagaacagttaaccaacaagcttacttttatgccagagacctcgaagtccatcccaaggacacatttgtgttca

SEQ ID NO: 58028 - DNA, 401 bp, Glycine max
ggcacaagtgagtttgttgatcgagataactagaaacagtgtgatgaaaatgaaggtccttgttttcttcgttgctacaattttggtagcatggcaatgccatgcgtacgatatgttccctctccgaatgaacactggctatggtgcccgtactccggaggtgaaatgcgcaagttggaggcttgctgtggaagcacacaacatctttggctttgagaccattcctgaagagtgcgttgaagcaacaaaggaatacatccatggcgaacaatatagatcagactccaaaacagttaaccaacaagcttacttttatgccagagacctcgaagtccatcccaaggacacatttgtgttcagtatagatggcaccgtactctctaatattccatactacaaaa

SEQ ID NO: 58029 - DNA, 376 bp, Glycine max
ggtgcacaagtgagtttgttgatcgagataactagaaacagtgtgatgaaaatgaacgtccttgtcttcttcgttgctacaattttggtatcatggcaatgccatgcgtacgagatgttccctctccgaatgaacactggctatggtgctcgtactccggaggtgaaatgcgcatgttggatgcctgctgtggaagcacacaacatcgttggctttgagaccattcctgaatactgcgttgaagcaacagaggaatacatccatggcgaacaatattgatcagactccacaatagttaaccaacaagcttacttttatgccagagacctcgacgtccatcccaaggacacatttgtgttcagtatagatggcatcg

SEQ ID NO: 58030 - DNA, 162 bp, Glycine max
tgggggagtgagagtcagaaaatggaggaatcacgatcagggggtgtgtggtcgtgttgtgccccattgaagatcaccgtggagtcgcgaaggagcaccagctgcaagaaagtcgtgttcgcatccatcatgcgccgcagcagccttcctcgatcgaccctg

SEQ ID NO: 58031 - DNA, 397 bp, Glycine max
ggcacaagtgagtttgttgatcgagataactagaaacagtgtgatgaaaatgaaggtccttgttttcttcgttgctacaattttggtagcatggcaatgccatgcgtacgatatgttccctctccgaatgaacactggctatggtgcccgtactccggaggtgaaatgcgcaagttggaggcttgctgtggaagcacacaacatctttggctttgagaccattcctgaagagtgcgttgaagcaacaaaggaatacatccatggcgaacaatatagatcagactccaaaacagttaaccaacaagcttacttttatgccagagacctcgaagtccatcccaaggacacatttgtgttcagtatagatgggcacgtactctctaatattccatactac

SEQ ID NO: 58032 - DNA, 372 bp, Glycine max
ggaaagagaattatttggggctgtaagatttgttttgttgtcctcatccttccttccaccatggcgtattctactctttccctctcaatttcaaaagtttgaaacgcaccgtaaaaactaaacgtctaaacgctgcgtctcagttcccatggacgacgaagctattgctaacgctaacggagctccgtcacctccatgtgtcgtttcggtgtctgcactctccggttcccgccgccgcctctcgacgagcttcctggagctgagccgccgccctgtctcgtcgtcggagaagctcaagcctatggcgtggatatctctccagggacggctcctcaacgccgacgaagccagctcggcatcgaacatctgccg

SEQ ID NO: 58033 - DNA, 392 bp, Glycine max
agggggcacaagtttgttgagatagctagaagcagtaagatgaaaatgaaagtgcttgttttgtttgttgctacagttttggtagcatatgaatgccatggctcagactaccagaagttccctctccaaatgaaaactgggtttggtgggcaatacagcaatgaggtggcatgtgccagttggaggcttggcgtggaagcaaacaacgtagtcaagtggcaaactgttcctgcagcttgcggagagtacatagctgactacgttctaggagaccaatatagatcagattccaaaacagttaaccaacaagcttatttctatgctaaatccctcaaactcaccaacaaagatgtctttgtcttggacgttgacgacactactctctctaatct

SEQ ID NO: 58034 - DNA, 386 bp, Glycine max
ggcacaagtgagtttgttgatcgagataactagaaacagtgtgatgaaaatgaaggtccttgttttcttcgttgctacaattttggtagcatggcaatgccatgcgtacgatatgttccctctccgaatgaacactggctatggtgcccgtactccggaggtgaaatgcgcaagttggaggcttgctgtggaagcacacaacatctttggctttgagaccattcctgaagagtgcgttgaagcaacaaaggaatacatccatggcgaacaatatagatcagactccaaaacagttaaccaacaagcttacttttatgccagagacctcaaagtccatcccaaggacacatttgtgttcagtatagatggcaccgtactctctaata

SEQ ID NO: 58035 - DNA, 394 bp, Glycine max
ggcacaagtgagtttgttgatcgagataactagaaacagtgtgatgaaaatgaaggtccttgttttcttcgttgctacaattttggtagcatggcaatgccatgcgtacgatatgttccctctccgaatgaacactggctatggtgcccgtactccggaggtgaaatgcgcaagttggaggcttgctgtggaagcacacaacatctttggctttgagaccattcctgaagaatgcgttgaagcaacaaaggaatacatccatggcgaacaatatagatcagactccaaaacagttaaccaacaagcttacttttatgccagagacctcgaagtccatcccaagaacacatttgtgttcagtatagatgggcacgtactctctaatattccatac

SEQ ID NO: 58036 - DNA, 379 bp, Glycine max
ggcacaagtgagtttgttgatcgatataactataaacagtgtgatgaaaatgaaggtccttgttttcttcgttgctacaattttggtagcatggcaatgccatgcgtacgatatgttccctctccgaatgaacactggctatggtgcccgtactccggaggtgaaatgcgcaagttggaggcttgctgtggaagcacacaacatctttggctttgagaccattcctgaagagtgcgttgaagcaacaaaggaatacatccatggcgaacaatatagatcagactccaaaacagttaaccaacaagcttacttttatgccagagacctcgaagtccatcccaaggacacatttgtgttcagtatagatgggaacgtactc

SEQ ID NO: 58037 - DNA, 273 bp, Glycine max
ggcacaagtgagtttgttgatcgagataactagaaacagtgtgatgaaaatgaaggtccttgttttcttcgttgctacaattttggtagcatggcaatgccatgcgtacgatatgttccctctccgaatgaacactggctatggtgcccgtactccggaggtgaaatgcgcaagttggaagcttgctgtggaagcacacaacatctttggctttgagaccattcctgaagagtgcgttgaagcaacaaaggaatacatccatggcgaacaata

SEQ ID NO: 58038 - DNA, 395 bp, Glycine max
gacaagtgagtttgttgatcgagataactagaaacagtgtgatgaaaatgaaggtccttgttttcttcgttgctacaattttggtagcatggcaatgccatgcgtacgatatgttccctctccgaatgaacactggctatggtgcccgtactccggaggtgaaatgcgcaagttggaggcttgctgtggaagcacacaacatctttggctttgagaccattcctgaagagtgcgttgaagcaacaaaggaatacatccatggcgaacaatatagatcagactccaaaacagttaaccaacaagcttacttttatgccagagacctcgaagtcgatcccaaggacacatttgtgttcagtatagatggcaccgtactctctaatattccatactac

SEQ ID NO: 58039 - DNA, 300 bp, Glycine max
ggttctcacaccatatatagcaataatctagtttatactatacctacattttgataattttctttgtaattgatagccatggctacacgtggaaagcttgacgttgacattgatctcaactccaacgcatacaagtattggcatacgcgtatgaattcgactgaaaaatacgctaccgccttccaacatgatcacaacatcattcacgttcatgacgctgatggtcattctcctgactctatccgccagattcgttctggtgaaagttcaccacatgtgacctcatcctttgccaagact

SEQ ID NO: 58040 - DNA, 397 bp, Glycine max
ggcacaagtgagtttgttgatcgagataactagaaacagtgtgatgaaaatgaaggtccttgttttcttcgttgctacaattttggtagcatggcaatgccatgcgtacgatatgttccctctccgaatgaacactggctatggtgcccgtactccggaggtgaaatgcgcaagttggaggcttgctgtggaagcacacaacatctttggctttgagaccattcctgaagagtgcgttgaagcaacaaaggaatacatccatggcgaacaatatagatcagactccaaaacagttaaccaacaagcttacttttatgccagagacctcgaagtcgatcccaaggacacatttgtgttcagtatagatggcaccgtactctctaatattcaatactac

SEQ ID NO: 58041 - DNA, 356 bp, Glycine max
  unsure (1)..(356): unsure at all n locations
ggcacaagtgagtttgttgatcgagataactagaaacagtgtgatgaaaatgaaggtccttgttttcttcgttgctacaattttggtagcatggcaatgccatgcgtacgatatgttccctctccgaatgaacactggctatggtgcccgtactccggaggtgaaatgcgcaagttggaggcttgctgtggaagcacacaacatctttggctttgagaccattcctgaagagtgcgttgaagcaacanacgaatacatccatggcgaacaatatagatcagactccaaaacagttaaccaacaagcttacttttatgccagagacctcgaagtccatcccaatgacacatttgtgt

SEQ ID NO: 58042 - DNA, 279 bp, Glycine max
gagttcaattccaatatattccattctctctgtgtatttccctacctctcccttcaagatgcagatcttcgtcaagaccctcaccggcaagaccatcacccttgaggtggaaagctctgacaccatcgacaacgtcaaggccaagatccaggacaaggaaggaatccccccggaccagcaacgtctcattttcgccggaaagcaacttgaggacggccgtacccttgctgactacaacattcagaaggagagtactcttcaactcgtcctccgtctccg

SEQ ID NO: 58043 - DNA, 398 bp, Glycine max
ggcacaagtgagtttgttgatcgagataactagaaacagtgtgatgaaaatgaaggtccttgttttcttcgttgctacaattttggtagcatggcaatgccatgcgtacgatatgttccctctccgaatgaacactggctatggtgcccgtactccggaggtgaaatgcgcaagttggaggcttgctgtggaagcacacaacatctttggctttgagaccattcctgaagagtgcgttgaagcaacaaaggaatacatccatggcgaacaatatagatcagactccaaaacagttaaccaacaagcttacttttatgccagagacctcgaagtccatcccaaggacacatttgtgttcagtatagatggcaccgtactctctaatattccatactaca

SEQ ID NO: 58044 - DNA, 428 bp, Glycine max
ttcattacggatggcaaaagaacaacaaaagggggaaaaattgattttgttgttcaagatacctaaaaaaattttaatgaaaatgaaggtccttgttttcttcgttgcaacaattttggtagcatggaaatgccatgcgtacgatatgttccctctccgaatgaacactggctatggtgcccgtactccggaggtgaaatgcgcaagttggaagcttgctgtggaagcacacaacatctttggctttgagaccattcctgaagagtgcgttgaagcaacaaaggaatacatccatggcgaacaatatagatcagactccaaaacagttaaccaacaagcttacttttatgccagagacctcgaagtccatcccaaagacacatttgtgttcagtatagatggcaacgtactctctaatattccatact

SEQ ID NO: 58045 - DNA, 344 bp, Glycine max
ggatttgtggtgtgaagagagattttgagagacacatatgtgtgttgtgttgtgtctcataggagagaaaatgtgagatgtggacagtgtgtcccctcgcgacatatagactcgcgttctcgtgcgatatcactctgttggcaaccagaataacaacacgcgtctcatgtgagacattctcgacaacatataagacacatctagtgatagtgattttgtgtcaaacactgtgtctcgtgaatatagatgtgctcgtgtggcgttttgagatagtgcagggcaagagagatttagatctcacactccgctctatatgagatactcctctggtgcggatagagtat

SEQ ID NO: 58046 - DNA, 382 bp, Glycine max
  unsure (1)..(382): unsure at all n locations
ggcacaagtttgttgagatagctagaagcaataagatgaaaatgaaagtgcttgttttgtttgttgctacagttttggtagcatatgaatgccatggctcagactaccagaagttccctctccaaatgaaaactgggtttggtgggcaatacagcaatgaggtggcatgtgccagttggaggcttggcgtggaagcaaacaacgtagtcaagtggcaaactgttcctgcagcttgcggagagtacatagctgactacgttctangagaacantatagatcagatttccaaaacagttaaccaacaagcttagttctatgctaaatccctcaaactcaccaacaaagatgtctttgtcttggacgttgacgacactactctct

SEQ ID NO: 58047 - DNA, 358 bp, Glycine max
  unsure (1)..(358): unsure at all n locations
ggcacaagtgagtttgttgatcgagataactagaaacagtgtgatgaaaatgaaggtccttgttttcttcgttgctacaattttggtagcatggcaatgccatgcgtacgatatgttccctctccgaatgaacactggctatggtgcccgtactccggaggtgaaatgcgcaagttggaggcttgctgtggaagcacacaacatctttggctttgagaccattcctgaagagtgcgttgaagcaacaaaggaatacatccatggcgaacaatatagatcagactccanaacagttaaccaacaagcttacttttatgccagagacctcgaagtccatcncaaggacacatttgtgttc

SEQ ID NO: 58048 - DNA, 368 bp, Glycine max
  unsure (1)..(368): unsure at all n locations
gttgtgagctataagctagtttatcgtgaggagaatatgaagttgtttgttttctttgttgctgcagtagttttggtagcatggtcatgccatggcgcaggctacgaaaggttccctctccgaatgaaaactggctatggtgagcgttcttcggaggtaaaatgcgcaagttttaggcttgctgtggaagcacacaacatccgagcctttatgaccattcctgaagagtgcgttgaaccaacaaaggactacattaatggcgaacaatttagatcagactctaaaacagttaaacaacaagctttcttttatgctagtgaacgcgaagtcgatcacaacgacatanttatattcggcatagataacac

SEQ ID NO: 58049 - DNA, 354 bp, Glycine max
ggcacaagtgagtttgttgatcgacataactagaaacagtgtgatgaaaatgaaggtccttgttttcttcgttgctacaattttggtagcatggcattgccatgcgtacgatatgttccctctccgaatgaacactggctatggtgcccgtactccggacgtgaaatgctcaagttggaggcttgctgtggaatcacacaacatctttggctttgagaccattcctgaagagtgcgttgaagcaacaaaggaatacatccatggcgaacaatatagatcagactccaaaacagttaaccaacaagcttacttttatgccagagacctcgaagtccattccaaagacacatttgt

SEQ ID NO: 58050 - DNA, 388 bp, Glycine max
gagtgcacaagtgagtttgttgatcgagataactagaaacagtgtgatgaaaatgaaggtccttgttttcttcgttgctacaattttggtagcatggcaatgccatgcgtacgatatgttccctctccgaatgaacactggctatggtgcccgtactccggaggtgaaatgcgcaagttggaggcttgctgtggaagcacacaacatctttggctttgagaccattcctgaagagtgcgttgaagcaacaaaggaatacatccatggcgaacaatatagatcagactccaaaacagttaaccaacaagcttacttttatgccagagacctcgaagtccatcccaaggacacatttgtgttcagtatagatggcaccgtactctctaat

SEQ ID NO: 58051 - DNA, 334 bp, Glycine max
ggcacaagtgagtttgttgatcgagataactagaaacagtgtgatgaaaatgaaggtccttgttttcttcgttgctacaattttggtagcatggcaatgccatgcgtacgatatgttccctctccgaatgaacactggctatggtgcccgtactccggaggtgaaatgcgcaagttggaggcttgctgtgggagcacacaacatctttggctttgagaccattcctgaagagtgcgttgatgcatcgaagagcagtggtcacttcggaaacataaagctaacctccgaactcgctcacggagctaacaacggtcatgacatcgatgttaagctt

SEQ ID NO: 58052 - DNA, 379 bp, Glycine max
gaaggtgcaagagtttgttgtgagctataagctagtttatcgtgaggagaatatgaagttgtttgttttctttgttgctgcagtagttttggtagcatggccatgccttggcgcaggctaccaaaggttccctctccgaatgaaaactggctatggtgagcgttcttcggaggtaaaatgcgcaagttttaagcttgctgtggaagcacacaacatccgagcctttaaaaccattcctgaagagtgcgttgaaccaacaaaggactacattaatggcgaacaatttagatcagactctaaaacagttaaccaacaagcttacttttatgccagagacctcgaagtccatcccaaggacacatttgtgttcagtatagat

SEQ ID NO: 58053 - DNA, 344 bp, Glycine max
ggtaggagaggctttgtttagcaacggcggtgttacgtgctaggtgggcggagccatggtggtgcctgaaacccctctctgttacgtaggtgtcaccaggcaatccgctgcttttcgcctcatgaagcaaatggggtgggaagaaggtggacgtctgggaaaagagaagcatgggattataggacacgttcgagtaaaaagcatacatgacactagtggtattggcctggagaagccaaacaactgggccttctacaccactcacattggtaatatccttaatagattgaaagttcaatctccgcaatcccatgacacagggtataatatattatcatgtcatt

SEQ ID NO: 58054 - DNA, 363 bp, Glycine max
ggcacaagtgagtttgttgatcgagataactagaaacagtgtgatgaaaatgaaggtccttgttttcttcgttgctacaattttggtagcatggcaatgccatgcgtacgatatgttccctctccgaatgaacactggctatggtgcccgtactccggaggtgaaatgcgcaagttggacgcttgctgtggaagcacacaacatctttggctttgagaccattcctgaagagtgcgttgaagcaacaaaggaatacatccatggcgaacaatatagatcagactccaaaacagttaaccaacaagcttacttttatgccagagacctcgacatccatcccaatgacacatttgtgttcagtat

SEQ ID NO: 58055 - DNA, 328 bp, Glycine max
ggtgcacaagtgagtttgttgatcgacataactagacacagtgtgatgaaaatgaaggtccttgttttcttcgttgctacaattttggtagcatggcaatgccatgcgtacgatatgttccctctcagactgaacactggctatggtgcccgtactccggatgtgaaatgcgcaagttggaggcatgctgtggaagcacacaccatctttggctttgagaccattcctgaagagtgcgtagaagcaacaaaggaatacatccatggcgagcaatatagattagactccatgacagttaaccaccaggcttacttttatgccagagacc

SEQ ID NO: 58056 - DNA, 361 bp, Glycine max
gcacaagtgagtttgttgatcgagataactagaaacagtgtgatgaaaatgaaggtccttgttttcttcgttgctacaattttggtagcatggcaatgccatgcgtacgatatgttccctctccgaatgaacactggctatggtgcccgtactccggaggtgaaatgcgcaagttggaggcttgctgtggaagcacacaacatctttggctttgagaccattcctgaagagtgcgttgaagcaacaaaggaatacatccatggcgaacaatatagatcagactccaaaacagttaaccaacaagcttacttttatgccagagacctcgaagtccatcccaaggacacatttgtgttcagta

SEQ ID NO: 58057 - DNA, 358 bp, Glycine max
ggcacaagtgagtttgttgatcgagataactagaaacagtgtgatgaaaatgaaggtccttgttttcttcgttgctacaattttggtagcatggcaatgccatgcgtacgatatgttccctctccgaatgaacactggctatggtgcccgtactccggaggtgaaatgcgcaagttggaggcttgctgtggaagcacacaacatctttggctttgagaccattcctgaagagtgcgttgaagcaacaaaggaatacatccatggcgaacaatatagatcagactccaaaacagttaaccaacaagcttacttttatgccagagacctcgaagtccatcccaaagacacatttgtgttc

SEQ ID NO: 58058 - DNA, 383 bp, Glycine max
ggcacaagtttgttgagatagctagaagcaataagatgaaaatgaaagtgcttgttttgtttgttgctacagttttggtagcatatgaatgccgtggctcagactaccagaagttccctctccaaatgaaaactgggtttggtgggcaatacagcaatgaggtggcatgtgccagttggaggcttggcgtggaagcaaacaacgtagtcaagtggcaaactgttcctgcagcttgcggagagtacatagctgactacgttctaggagaccaatatagatcagattccaaaacagttaaccaacaagcttatttctatgctaaatccctcaaactcaccaacaaagatgtctttgtctcggacgttgacgacactactctctct

SEQ ID NO: 58059 - DNA, 343 bp, Glycine max
ggcacaagtgagtttgttgatcgagataactagaaacagtgtgatgaaaatgaaggtccttgttttcttcgttgctacaattttggtagcatggcaatgccatgcgtacgatatgttccctctccgaatgaacactggctatggtgcccgtactccggaggtgaaatgcgcaagttggaggcttgctgtggaagcacacaacatctttggctttgagaccattcctgaaaagtgcgttgaagcaacaaaggaatacatccatggcgaacaatatagatcagactccaaaacagttaaccaacaagcttacttttatgccagagacctcgaagtccatcccaag

SEQ ID NO: 58060 - DNA, 348 bp, Glycine max
ggcacaagtttgttgagatagctagaagcaataagatgaaaatgaaagtgcttgttttgtttgttgctacagttttggtagcatatgaatgccatggctcagactaccagaagttccctctccaaatgaaaactgggtttggtgggcaatacagcaatgaggtggcatgtgccagttggaggcttggcgtggaagcaaacaacgtagtcaagtggcaaactgttcctgcagcttgcggagagtacatagctgactacgttctaggagaccaatatagatcagattccaaaacagttaaccaacaagcttatttctatgctaaatccctcaaactcaccaacaaagatg

SEQ ID NO: 58061 - DNA, 363 bp, Glycine max
gagtgtgtgattgtttgttgttgtaactcgttcttcttcttttgttgttctgtgtttgtgtttgttttttctctcacctgaaaatgtcttgctgcggtggtaactgtggttgcggaagctcctgcaagtgcggcaacggctgcggaggctgcaagatgtacccagacttgagctacactgagtcaaccaccaccgagaccttggtcatgggagtggcacctgttaaggctcaatttgagggtgctgaaatgggtgtgcccgctgagaacgatggctgcaaatgtggaccaaactgctcctgcaacccctgcacttgcaagtgaggtgttgggagagcaagcttcaagcagagatagcccttaa

SEQ ID NO: 58062 - DNA, 377 bp, Glycine max
ggcacaagtttgttgagatagctagaagcaataagatgaaaatgaaagtgcttgttttgtttgttgctacagttttggtagcatatgaatgccatggctcagactaccagaagttccctctccaaatgaaaactgggtttggtgggcaatacagcaatgaggtggcatgtgccagttggaggcttggcgtggaagcaaacaacgtagtcaagtggcaaactgttcctgcagcttgcggagagtacatagctgactacgttctatgagaccaatatagatcagattccaaaacagttaaccaacaagcttatttctatgctaaatccctcaaactcaccaacaaagatgtctttgtcttggacgttgacgacactact

SEQ ID NO: 58063 - DNA, 359 bp, Glycine max
gatagtattatcattcattctcatctttctctcttctctctccacccaaaccctaactcccgaccctgttcccctctcgtatccgtcatgaaaggaggaaagtccaagaccgaatctaagagagccgatcccaaacttgctgtgaataagaagggagccgccaccaaggctaggaaacccgccggcaaggggaaggcagcgaaagaccctaacaagccaaagaggcctccaagtgctttcttcgttttcatggaggagttcaggaaggtattcaacaaagaacatcctgaaaacaaagcagtgtctgctgtgggcaaagctgctggagcaaaatggaagaccatgtctgatgctgaaaa

SEQ ID NO: 58064 - DNA, 382 bp, Glycine max
ggaaacagagagtgatttcagtgagtgatcggtgttcacttgatctcatcataatcgtcagcgtcaattgaagaagatgccgatcagaaacatcgccgtcggaaggcctgaagaggcgactcaccccgacacgttgaaggcggctttggctgagttcatctcaaccttcatcttcgtgttcgccggctcaggctccggcatcgcctacaacaagctcaccgacaacggcgctgccacccctgccggcctcatctccgcctccatcgcccatgcattcgccctcttcgtcgccgtctccgtcggcgccaacatctccggcgggcacgtcaaccccgccgtcaccttcggcgccttcgtcggcggcaacatcaccttcctccgc

SEQ ID NO: 58065 - DNA, 360 bp, Glycine max
ggcacaagtgagtttgttgatcgagataactagaaacagtgtgatgaaaatgaaggtccttgttttcttcgttgctacaattttggtagcatggcaatgccatgcgtacgatatgttccctctccgaatgaacactggctatggtgcccgtactccggaggtgaaatgcgcaagttggaggcttgctgtggaagcacacaacatctttggctttgagaccattcctgaagagtgcgttgaagcaacaaaggaatacatccatggcgaacaatatagattagactccaaaacagttaaccaacaagcttacttttatgccagagacctcgaagtccatcccaaggacacatttgtgttcag

SEQ ID NO: 58066 - DNA, 349 bp, Glycine max
ggcacaagtgagtttgttgatcgagataactagaaacagtgtgatgaaaatgaaggtccttgttttcttcgttgctacaattttggtagcatggcaatgccatgcgtacgatatgttccctctccgaatgaacactggctatggtgcccgtactccggaggtgaaatgcgcaagttggaggcttgctgtggaagcacacaacatctttggctttgagaccattcctgaagagtgcgttgaagcaacaaaggaatacatccatggcgaacaatatagatcagactccaaaacagttaaccaacaagcttacttttatgccagagacctcgaagtccatcccaaggacaca

SEQ ID NO: 58067 - DNA, 378 bp, Glycine max
ggaacaagggtttctctttctctttctctgtctgcttcttcactttctctcgtttcaatcgaaaaaaatcatgggcagaaaattcttcgtcggtggcaactggaaatgcaatgggaccactgaggaggtgaagaagattgttactactttaaatgaagctaaagtccctggagaagatgttgtagaagttgttgtgagccctccttttgtgttccttccttttgtaaaaagtttgctgcgccctgatttccatgtctcggcccaaaattgttgggttcgcaaaggtggtgcttatactggagaggttagtgctgaaatgcttgttaatttgggaattccttgggttattattggtcactctgaacggaggcagctttt

SEQ ID NO: 58068 - DNA, 358 bp, Glycine max
ggcacaagtgcgtttgttgatcgagataactagaaacagtgtgatgaaaatgaaggtccttgttttcttcgttgctacaattttggtagcatggcaatgccatgcgtacgatatgttccctctccgaatgaacactggctatggtgcccgtactccggaggtgaaatgcgcaagttggaggcttgctgtggaagcacacaacatctctggctttgagaccattcctgaagagtgcgttgaagcaacaaaggaatacatccatggcgaacaatatagatcagactccaaaacagttaaccaacaagcttacttttatgccagagacctcgaagtccatcccaaggacacatttgtgttc

SEQ ID NO: 58069 - DNA, 404 bp, Glycine max
gcacaagtgagtttgttgatcgagataactagaaacagtgtgatgaaaatgaaggtccttgttttcttcgttgctacaattttggtagcatggcaatgccatgcgtacgatatgttccctctccgaatgaacactggctatggtgcccgtactccggaggtgaaatgcgcaagttggaggcttgctgtggaagcacacaacatctttggctttgagaccattcctgaagagtgcgttgaagcaacaaaggaatacatccatggcgaacaatatagatcagactccaaaacagttaaccaacaagcttacttttatgccagagacctcgaagtccatcccaaggacacatttgtgttcagtatagatggcaccgtactctctaatatttcatactacaaaaaaca

SEQ ID NO: 58070 - DNA, 381 bp, Glycine max
ggcacaagtgagtttgttgatcgagataactagaaacagtgtgatgaaaatgaaggtccttgttttcttcgttgctacaattttggtagcatggcaatgccatgcgtacgatatgttccctctccgaatgaacactggctatggtgcccgtactccggaggtgaaatgcgcaagttggaggcttgctgtggaagcacacaacatctttggctttgagaccattcctgaagagtgcgttgaggcaacaaaggaatacatccatggcgaacaatatagatcagactccaaaacagttaaccaacaagcttacttttatgccagagacctcgaagtccatcccaaggacacatttgtgttcagtatagatggcaccgtactccc

SEQ ID NO: 58071 - DNA, 220 bp, Glycine max
gacagcactggatgagttgatcagaatagtcgatagccttctgatcgaacctcaaggtcgctagtgctcctgcgagagccacagcgtattgatgcattcttcgagcaatacttcggtcaggtcgtctctctcaatgctcactgcatatgattcgcttactccgaaggcgatctcctcacgttcaaagcctactgtcatatcacactcaatgcttgcactt

SEQ ID NO: 58072 - DNA, 413 bp, Glycine max
agagttcccatgtgagatggagcattacttgccagtggtgttttcaccgcctcgagatgggaaagaactgacggagccacttccactagtggggaacaagcagcagcagcagcaacaagccattccaattccaatctcaagtggcggtgatggtgacgtggctagcagcaaaagtggtggcgtaggtggtgatgatgagacaaatgaagaagaagtggcctagtgagttctcaagggtagtgttgtgattgtgaatcagtgttagcaggagaaccagacagacagcatttaaggtggttgggcaacgacccacacctctgttccaaccaacctacaactacagcaaccatttctcaatctctctcatcaactcaacctttcctccattatccttaatttttcctttttaaaat

SEQ ID NO: 58073 - DNA, 371 bp, Glycine max
ggcacaagtgagtttgttgatcgagataactagaaacagtgtgatgaaaatgaaggtccttgttttcttcgttgctacaattttggtagcatggcaatgccatgcgtacgatatgttccctctccgaatgaacactggctatggtgcccgtactccggaggtgagatgcgcaagttggaggcttgctgtggaagcacacaacatctttggctttgagaccattcctgaagagtgcgttgaagcaacaaaggaatacatccatggcgaacaatatagattagactccaaaacagttaaccaacaagcttacttttatgccagagacctccaagtccatcccaacgacacatttgtgttcagtatacatggca

SEQ ID NO: 58074 - DNA, 377 bp, Glycine max
ggcacaagtttgttgagatagctagaagcaataagatgaaaatgaaagtgcttgttttgtttgttgctacagttttggtagcatatgaatgccatggctcagactaccagaagttccctctccaaatgaaaactgggtttggtgggcaatacagcaatgaggtggcatgtgccagttggaggcttggcgtggaagcaaacaacgtagtcaagtggcaaactgttcctgcagcttgcggagagtacataactgactacgttctacgagaccaatatagatcagattccaaaacagttaaccaacaagcttatttctatgctaaatccctcacactcaccaacaaagatgtctttgtcttggacgttgacgacactact

SEQ ID NO: 58075 - DNA, 383 bp, Glycine max
gaaggtgcaagagtttgttgtgagctataagctagtttatcgtgaggagaatatgaagttgtttgttttctttgttgctgcagtagttttggtagcatggccatgccatggcgcaggctaccaaaggttccctctccgaatgaaaactggctatggtgagcgttcttcggaggtaaaatgcgcaagttttaggcttgctgtggaagcacacaacatccgagcctttaaaaccattcctgaagagtgcgttgaaccaacaaaggactacattaatggcgaacaatttagatcagactctaaaacagttaaccaacaagctttcttttatgctagtgaacgcgaagtccatcacaacgacatatttatattcggcatagataaca

SEQ ID NO: 58076 - DNA, 221 bp, Glycine max
caaaaagaggggaagaggtgggtttgtgtagccatctacgcagtttgagtacatctgcactcactgttcttgctgtcctgcatgctgcgcttgtagattcgcgtcaggactctgcagacttcgcgttcccgctctgcactattagttgtcggagaatttgttggcgtcatgagaataacgtcagttcgatcgttgttgaagaccgccattcggccataggt

SEQ ID NO: 58077 - DNA, 355 bp, Glycine max
ggcacaagtgagtttgttgatcgagataactagaaacagtgtgatgaaaatgaaggtccttgttttcttcgttgctacaattttggtagcatggcaatgccatgcgtacgatatgttccctctccgaatgaacactggctatggtgcccgtactccggaggtgaaatgcgcaagttggaggcttgctgtggaagcacacaacatctttggctttgagaccattcctgaagagtgcgttgaagcaacaaaggaatacatccatggcgaacaatatagattagactccaaaacagttaaccaacaagcttacttttatgccagagacctcgaagtccatcccaaggacacatttgtg

SEQ ID NO: 58078 - DNA, 391 bp, Glycine max
ggcacaagtttgttgagatagctagaagcaataagatgaaaatgaaagtgcttgttttgtttgttgctacagttttggtagcatatgaatgccatggctcagactaccagaagttccctctccaaatgaaaactgggtttggtgggcaatacagcaatgaggtggcatgtgccagttggaggcttggcgtggaagcaaacaacgtagtcaagtggcaaactgttcctgcagcttgcggagagtacatagctgactgcgttctaagagaccaatatagatcagattccaaaacagttaaccaacaagcttatttctatgctaaatccctcaaactcaccaacaaagatgtccttgtcctggacgttgacgacactactctccccaaacccca

SEQ ID NO: 58079 - DNA, 364 bp, Glycine max
ggcacttcaattgcaatcaaattagttcattctctttgcgcagttccctacctctcctttcaagatgcagatcttcgtcaagaccctcaccggaaagaccatcacccttgaggtggaaagctctgacaccatcgacaacgtcaaggccaagatccaggacaaggaaggaattcccccggatcagcaacgtctcatcttcgccggaaagcagctcgaggacggccgtaccctcgccgactacaacatccagaaggagtcaacccttcaccttgtccttcgtctccgtggtggcatgcagatcttcgtcaagactctcactgggaaaaccataaccctagaggtcgaaagctctgacaccattgac

SEQ ID NO: 58080 - DNA, 355 bp, Glycine max
ggcacaagtgagtttgttgatcgagataactagaaacagtgtgatgaaaatgaaggtccttgttttcttcgttgctacaattttggtagcatggcaatgccatgcgtacgatatgttccctctccgaatgaacactggctatggtgcccgtactccggaggtgaaatgcgcaagttggaggcttgctgtggaagcacacaacatctttggctttgagaccattcctgaagagtgcgttgaagcaacaaaggaatacatccatggcgaacaatatagatcagactccaaaacagttaaccaacaagcttacttttatgccagagacctcgaagtccatcccaatgacacatttgtg

SEQ ID NO: 58081 - DNA, 349 bp, Glycine max
ggcacaagtgagtttgttgatcgagataactagaaacagtgtgatgaaaatgaaggtccttgttttcttcgttgctacaattttggtagcatggcaatgccatgcgtacgatatgttccctctccgaatgaacactggctatggtgcccgtactccggaggtgaaatgcgcaagttggaggcttgctgtggaagcacacaacatctttggctttgagaccattcctgaagagtgcgttgaagcaacaaaggaatacatccatggcgaacaatatagattagactccaaaacagttaaccaacaagcttacttttatgccagagacctcgaagtccatcccaaggacaca

SEQ ID NO: 58082 - DNA, 366 bp, Glycine max
gcacaagtgagtttgttgatcgagataactagaaacagtgtgatgaaaatgaaggtccttgttttcttcgttgctacaattttggtagcatggcaatgccatgcgtacgatatgttccctctccgaatgaacactggctatggtgcccgtactccggaggtgaaatgcgcaagttggaggcttgctgtggaagcacacaacatctttggctttgagaccattcctgaagagtgcgttgaagcaacaaaggaatacatccatggcgaacaatatagatcagactccaaaacagttaaccaacaagcttacttttatgccagagacctcgaagtccatcccaaggacacatttgtgttcagtatagat

SEQ ID NO: 58083 - DNA, 359 bp, Glycine max
ggcacaagtgagtttgttgatcgagataactagaaacagtgtgatgaaaatgaaggtccttgttttcttcgttgctacaattttggtagcatggcaatgccatgcgtacgatatgttccctctccgaatgaacactggctatggtgcccgtactccggaggtgaaatgcgcaagttggaggcttgctgtggaagcacacaacatctttggctttgagaccattcctgaagagtgcgttgaagcaacaaaggaatacatccatggcgaacaatatacatcagactccaaaacagttaaccaacaagcttacttttatgccagagacctcgaagtccatcccaaggacacatttgtgttca

SEQ ID NO: 58084 - DNA, 338 bp, Glycine max
gaacgcatgaatatggtaaggttgacgtcttcatcgactatcgcgcagatgaaagtcgatgtctacatcaatagcatccctatggacacactgggactgcccgctatactcatcgattgcctctacgactaccaactgggaatagtcgatgttctacgacggtgaagtggggcagttcgaggtctaccgtgacaagccctgggatcattaggctagtaactaatcctgatgaatgattccgcactcgcgctgctcacaatggtcgtcaacactcgctctggcagtcccatccaggtcatcggcctcattcattgtatgaccgacacctacaccttcat

SEQ ID NO: 58085 - DNA, 342 bp, Glycine max
ggcgaaacagagagtgatttcagtgagtgatcggtgttcacttgatctcatcataatcgtcagcgtcaattgaagaagatgccgatcagaaacatcgccgtcggaaggcctgaagaggcgactcaccccgacacgttgaaggcggctttggctgagttcatctcaaccttcatcttcgtgttcgccggctcaggctccggcatcgcctacaacaagctcaccgacaacggcgctgccacccctgccggcctcatctccgcctccatcgcccatgcattcgccctcttcgtcgccgtctccgtcggcgccaacatctccggcggccacgtcaaccccgccgtc

SEQ ID NO: 58086 - DNA, 359 bp, Glycine max
gcacaagtgagtttgttgatcgagataactagaaacagtgtgatgaaaatgaaggtccttgttttcttcgttgctacaattttggtagcatggcaatgccatgcgtacgatatgttccctctccgaatgaacactggctatggtgcccgtactccggaggtgaaatgcgcaagttggaggcttgctgtggaagcacacaacatctttggctttgagaccattcctgaagagtgcgttgaagcaacaaaggaatacatccatggcgaacaatatagatcagactccaaaacagttaaccaacaagcttacttttatgccagagacctcgaagtccatcccaaggacacatttgtgttcag

SEQ ID NO: 58087 - DNA, 383 bp, Glycine max
ggcacaagtgagtttgttgatcgagataactagaaacagtgtgatgaaaatgaaggtccttgttttcttcgttgctacaattttggtagcatggcaatgccatgcgtacgatatgttccctctccgaatgaacactggctatggtgcccgtactccggaggtgaaatgcgcaagttggaggcttgctgtggaagcacacaacatctttggctttgagaccattcctgaagagtgcgttgaagcaacaaaggaatacatccatggcgaacaatatagatcagactccaaaacagttaaccaacaagcttacttttatgccagagacctcgaagtccatcccaaggacacatttgtgttcagtatagatggcaccgtactctcta

SEQ ID NO: 58088 - DNA, 349 bp, Glycine max
  unsure (1)..(349): unsure at all n locations
ggcacaagtttgttgagatagctagaagcaataagatgaaaatgaaagtgcttgttttgtttgttgctaccgttttggtagcatatgaatgccatggctcagactaccagaagttccctctccaaatgaaaactgggtttggtgggcaatacagcaatgaggtggcatgtgccagttggaggcttggcgtggaggcaaacaacgtagtcaagtggcaaactgttcctgcagcttgcggagagtacatagctgactacgttctangagaacaatatagatcagattccanaacagttaaccaacaagcttatttctatgctaaatccctcaaactcaccaacaaagatgt

SEQ ID NO: 58089 - DNA, 365 bp, Glycine max
gaaggtgcaagagtttgttgtgagctataagctagtttatcgtgaggagaatatgaagttgtttgttttctttgttgctgcagtagttttggtagcatggccatgccatggcgcaggctaccaaaggttccctctccgaatgaaaactggctatggtgagcgttcttcggaggtaaaatgcgcaagttttaggcttgctgtggaagcacacaacatccgagcctttaaaaccattcctgaagagtgcgttgaaccaacaaaggactacattaatggcgaacaatttagatcagactctaaaacagttaaccaacaagctttcttttatgctagtgaacgcgaagtccatcacaacgacatattta

SEQ ID NO: 58090 - DNA, 85 bp, Glycine max
ggcacaagtgagtttgttgatcgaaataactagaaacagtgtgatgaaaatgaaaggccttgatttcttcgttgctagaattttg

SEQ ID NO: 58091 - DNA, 368 bp, Glycine max
ggcacaagtgagtttgttgatcgagataactagaaacagtgtgatgaaaatgaaggtccttgttttcttcgttgctacaattttggtagcatggcaatgccatgcgtacgatatgttccctctccgaatgaacactggctatggtgcccgtactccggaggtgaaatgcgcaagttggaggcttgctgtggaagcacacaacatctttggctttgagaccattcctgaagagtgcgttgaagcaacaaaggaatacatccatggcgaacaatatagatcagactccaaaacagttaaccaacaagcttacttttatgccagagacctcgaagtccatcccaaggacacatttgtgttcagtatagatg

SEQ ID NO: 58092 - DNA, 385 bp, Glycine max
ggcacaagtgagtttgttgatcgagataactagaaacagtgtgatgaaaatgaaggtccttgttttcttcgttgctacaattttggtagcatggcaatgccatgcgtacgatatgttccctctccgaatgaacactggctatggtgcccgtactccggaggtgaaatgcgcaagttggaggcttgctgtggaggcacacaacatctttggctttgagaccattcctgaagagtgcgttgaagcaacaaaggaatacatccatggcgaacaatatagatcagactccaaaacagttaaccaacaagcttacttttatgccagagacctcgaagtccatcccagggacacatttgtgttcagtatagatggcaccgtactctctaat

SEQ ID NO: 58093 - DNA, 436 bp, Glycine max
tcccgggccgacccacgagtcagtcggatacgacaacagaagggggaaaagttgatttggttgttcaaaataactagaaccattgtgatgaaaatgaaggcccttgttttcttcgttgctacaattttggtaccatggaaatgccatgcgtacaatatgttccctctccgaatgaacactggctatggtgcccgtactccggaggtgaaatgcgcaagttggaggcttgctgtggaagcacacaacatctttggctttgagaccattcctgaagagtgcgttgaagcaacaaaggaatacgtccatggcgaacaatatagatcagactccaaaacagttaaccaacaagcttacttttatgccagagacctcgaagtccatcccaaggacacatttgtgttcagtatagatggcaccgtactctctaatattccaa

SEQ ID NO: 58094 - DNA, 326 bp, Glycine max
gactcacttcagtgtcattttttcttactctcttcctctctctccactctgagatacatgggaaaattacattacattatggctggttattcataagcttcagctctttggattctttttcgtctctttggcttctctgtatctagtgaaattctggttggacgtaagactgatgaatggaaggtttcagcctctgattcaaattcactcatccaatgtgcaaatgagtctcgtttccaagttgagacactatcttgtctggatatatcatggtggaatagatccagtgttgcatgtgtacactgagaactatgtgagatgcagca

SEQ ID NO: 58095 - DNA, 385 bp, Glycine max
gatgcacaagtttgttgagatagctagaagcaataagatgaaaatgaaagtgcttgttttgtttgttgctacagttttggtagcatatgaatgccatggctcagactaccagaagttccctctccaaatgaaaactgggtttggtgggcaatacagcaatgaggtggcatgtgccagttggaggcttggcgtggaagcaaacaacgtagtcaagtggcaaactgttcctgcagcttgcggagagtacatagctgactacgttctaggagaccaatatagatcagattccaaaacagttaaccaacaagcttatttctatgctaaatccctcaaactcaccaacaaagatgtctttgtcttggacgttgacgacactactctctct

SEQ ID NO: 58096 - DNA, 291 bp, Glycine max
aaccactcctccacacaagcgtccgtggcgcagctaaatttgtagatcaaggggcacctctttcgcgttttgtcaaagtctgccgttgaacacgtctgtgctttggtatcagcattagggtaattggacgttgacaatgggtgccaactccgatgtaacactgatgaaggcgtccgtacacgttcagttttctggacatcatatgggcgtgttttagcaacacacagcatccatggcattgccaacaatctcaaaaactgagatgtatcaacaaccgtttgtcaccagtgt

SEQ ID NO: 58097 - DNA, 381 bp, Glycine max
gacaagtgagtttgttgatcgagataactagaaacagtgtgatgaaaatgaaggtccttgttttcttcgttgctacaattttggtagcatggcaatgccatgcgtacgatatgttccctctccgaatgaacactggctatggtgcccgtactccggaggtgaaatgcgcaagttggaggcttgctgtggaagcacacaacatctttggctttgagaccattcctgaagagtgcgttgaagcaacaaaggaatacatccatggcgaacaatatagatcagactccaaaacagttaaccaacaagcttacttttatgccagagacctcgaagtccatcccaaggacacatttgtgttcagtatagatggcaccgtactctcta

SEQ ID NO: 58098 - DNA, 369 bp, Glycine max
ggcacaagtgagtttgttgatcgagataactagaaacagtgtgatgaaaatgaaggtccttgttttcttcgttgctacaattttggtagcatggcaatgccatgcgtacgatatgttccctctccgaatgaacactggctatggtgcccgtactccggaggtgaaatgcgcaagttggaggcttgctgtggaagcacacaacatctttggctttgagaccattcctgaagagtgcgttgaagcaacaaaggaatacatccatggcgaacaatatagatcagactccaaaacagttaaccaacaagcttacttttatgccagagacctcgaagtccatcccaaggacacatttgtgttcagtatagatgg

SEQ ID NO: 58099 - DNA, 389 bp, Glycine max
ggcttcacgtccactctgtctctctcggtctctcctctcacacccccactcacagttcccttctcttgtcgttcttgagcatcaccactttctttcgtctcactctcacaggaaaacccagttctcgccgcctctgttgttgtctcttccattcacgtgaagagaattgcgtagactggtagccaaacagaatggcagaagcagcgaagagcagagacgcccgaagacgaagaagaatcctccaacaaggttccgaccgtctcgctttcatcacgggtcggatccaaacactgccggatccactttcatcttcccaaccccaatcccaatcccaccatccaaacgttgatgactccgattccatttcgcaaaattccgaacccgacaac

SEQ ID NO: 58100 - DNA, 378 bp, Glycine max
gaaggtgcaagagtttgttgtgagctataagctagtttatcgtgaggagaatatgaagttgtttgttttctttgttgctgcagtagttttggtagcatggccatgccatggcgcaggctaccaaaggttccctctccgaatgaaaactggctatggtgagcgttcttcggaggtaaaatgcgcaagttttaggcttgctgtggaagcacacaacatccgagcctttaaaaccattcctgaagagtgcgttgaaccaacaaaggactacattaatggcgaacaatttagatcagactctaaaacagttaaccaacaagctttcttttatgctagtgaacgcgaagtccatcacaacgacatatttatattcggcataga

SEQ ID NO: 58101 - DNA, 386 bp, Glycine max
ggcacaagtgagtttgttgatcgagataactagaaacagtgtgatgaaaatgaaggtccttgttttcttcgttgctacaattttggtagcatggcaatgccatgcgtacgatatgttccctctccgaatgaacactggctatggtgcccgtactccggaggtgaaatgcgcaagttggaggcttgctgtggaagcacacaacatctttggctttgagaccattcctgaagagtgcgttgaagcaacaaaggaatacatccatggcgaacaatatagatcagactccaaaacagttaaccaacaagcttacttttatgccagagacctcgaagtccatcccaaggacacatttgtgttcagtatagatggcaccgtactctcaaata

SEQ ID NO: 58102 - DNA, 375 bp, Glycine max
ggcacaagtgagtttgttgatcgagataactagaaacagtgtgatgaaaatgaaggtccttgttttcttcgttgctacaattttggtagcatggcaatgccatgcgtacgatatgttccctctccgaatgaacactggctatggtgcccgtactccggaggtgaaatgcgcaagttggaggcttgctgtggaagcacacaacatctttggctttgagaccattcctgaagagtgcgttgaagcaacaaaggaatacatccatggcgaacaatatagatcagactccaaaacagttaaccaacaagcttacttttatgccagagacctcgaagtccatcccaaggacacatttgtgttcagtataaatggcaccgg

SEQ ID NO: 58103 - DNA, 391 bp, Glycine max
ggcacaagtgagtttgttgatcgagataactagaaacagtgtgatgaaaatgaaggtccttgttttcttcgttgctacaattttggtagcatggcaatgccatgcgtacgatatgttccctctccgaatgaacactggctatggtgcccgtactccggaggtgaaatgcgcaagttggaggcttgctgtggaagcacacaacatctttggctttgagaccattcctgaagagtgcgttgaagcaacaaaggaatacatccatggcgaacaatatagatcagactccaaaacagttaaccaacaagcttacttttatgccagagacctcgaagtccatcccaaggacacatttgtgttcagtatagatggcaccgtactctctaatattcca

SEQ ID NO: 58104 - DNA, 371 bp, Glycine max
ggcacttcaattgcaatcaaattagttcattctctttgcgcagttccctacctctcctttcaagatgcagatcttcgtcaagaccctcaccggaaagaccatcacccttgaggtggaaagctctgacaccatcgacaacgtcaaggccaagatccaggacaaggaaggaattcccccggatcagcaacgtctcatcttcgccggaaagcagctcgaggacggacgtaccctcgccgactacaacatccagaaggagtcaacccttcaccttgtccttcgtctccgtggtggcatgcagatcttcgtcaagactctcactggcaaaaccataaccctagaggtcgaaagctctgacaccattgacaacgtca

SEQ ID NO: 58105 - DNA, 268 bp, Glycine max
aacagtttgtattgcaggcaaagctgtgttactccgaaacctatacttcatgagcaggtagcatctttccaaaaagcaatatggtcatcatatgattcatctacagagtgtgtggagtttccaacgttgaaattggagagaacggtcatacgatgtatcaatttgttggaactagatactgtcactgtcatcaaattctaagcacattttggctgttgcaaatccagtgaagttggtcagatttatcatacagtggacaatgccatta

SEQ ID NO: 58106 - DNA, 385 bp, Glycine max
gcacaagtgagtttgttgatcgagataactagaaacagtgtgatgaaaatgaaggtccttgttttcttcgttgctacaattttggtagcatggcaatgccatgcgtacgatatgttccctctccgaatgaacactggctatggtgcccgtactccggaggtgaaatgcgcaagttggaggcttgctgtggaagcacacaacatctttggctttgagaccattcctgaagagtgcgttgaagcaacaaaggaatacatccatggtgaacaatatagatcagactccaaaacagttaaccaacaagcttacttttatgccagagacctcgaagtccatcccaaggacacatttgtgttcagtatagatggcaccgtactctctaata

SEQ ID NO: 58107 - DNA, 387 bp, Glycine max
gacaatgtaaaaagttttacacggtcatctaatcataacccatcatgtatgataagtttattgacttttaaaataattattttaaaatgatttaaatgataatttgttattagatgacggtgtaaccgttagtacatatacattaaattcatgcaaaagtattagtaagatataaaaaaaaattgcaatgaatttaacataggtagccccaacgttgaagatggagtaaaattgtaaaaatgaagagattttcatgttttcagagaccttcacagttcacacttggtagagccatagaaattagaaaatgaaacagaataggtcaacttcaatcctttgcaagaatgaagtagatgcaaaataaagaattgcaaatatcataatttt

SEQ ID NO: 58108 - DNA, 353 bp, Glycine max
ggcagttgaattacagatgcagtctacaatcatccatcgttcatcatctgtctacgatgagctgtcactgagttgcgcagatatcgcgcgtgtacacagcctgctcacatccatcacgcatacttcatgaatatagcagcagtgtaaatgatgacattattagcaacttgttgagttctactaaagttccagtagacactcatgggtgaaacatgtgtgcaaaacatgctgctaggagatatcatggcaaattgagaacgcattcgtgaagcagttgcggatgaattgctgttacatccggctgatttgctgctgccgctggtcgtactgctacctgatcacgagatgctgaa

SEQ ID NO: 58109 - DNA, 375 bp, Glycine max
gaaggtgcaagagtttgttgtgagctataagctagtttatcgtgaggagaatatgaagttgtttgctttctttgttgctgcagtagttttggtagcatggccatgccatggcgcaggctaccaaaggttccctctccgaatgaaaactggctatggtgagcgttcttcggaggtaaaatgcgcaagttttaggcttgctgtggaagcacacaacatccgagcctttaaaaccattcctgaagagtgcgttgaaccaacaaaggactacattaatggcgaacaatttagatcagactctaaaacagttaaccaacaagctttcttttatgctagtgaacgcgaagtccatcacaacgacatatttatattcggcat

SEQ ID NO: 58110 - DNA, 389 bp, Glycine max
ggcagttcaattccaatatattccattctctctgtgtacttccctacctctcccttcaagatgcagatcttcgtcaagaccctcaccggcatgaccatcacccttgaggtggaaagctctgacaccatcgacaacgtcaaggccaagatccaggacaaggaaggaatccccccggaccagcaacgtctcattttcgccggaaagcaacttgaggacggccgtacccttgctgactacaacattcagaaggagagtactcttcacctcgtcctccgtctccgtggtggcatgcagatcttcgttaagacactcaccggcaagaccataaccctagaggttgaaagctccgacaccatcgataacgtcaaggccaagatccaggacaagga

SEQ ID NO: 58111 - DNA, 385 bp, Glycine max
ggcacaagtgagtttgttgatcgagataactagaaacagtgtgatgaaaatgaaggtccttgttttcttcgttgctacaattttggtagcatggcaatgccatgcgtacgatatgttccctctccgaatgaacactggctatggtgcccgtactccggaggtgaaatgcgcaagttggaggcttgctgtggaagcacacaacatctttggctttgagaccattcctgaagagtgcgttgaagcaacaaaggaatacatccatggcgaacaatatagatcagactccaaaacagttaaccaacaagcttacttttatgccagagacctcgaagtccatcccaaggacacatttgtgttcagtatagatggcaccgtactctctaat

SEQ ID NO: 58112 - DNA, 379 bp, Glycine max
gcacaagtgagtttgttgatcgagataactagaaacagtgtgatgaaaatgaaggtccttgttttcttcgttgctacaattttggtagcatggcaatgccatgcgtacgatatgttccctctccgaatgaacactggctatggtgcccgtactccggaggtgaaatgcgcaagttggaggcttgctgtggaagcacacaacatctttggctttgagaccattcctgaagagtgcgttgaagcaacaaaggaatacatccatggcgaacaatatagatcagactccaaaacagttaaccaacaagcttacttttatgccagagacctcgaagtccatcccaaggacacatttgtgttcagtatagatggcaccgtactct

SEQ ID NO: 58113 - DNA, 379 bp, Glycine max
ggcacaagtgagtttgttgatcgagataactagaaacagtgtgatgaaaatgaaggtccttgttttcttcgttgctacaattttggtagcatggcaatgccatgcgtacgatatgttccctctccgaatgaacactggctatggtgcccgtactccggaggtgaaatgcgcaagttggaggcttgctgtggaagcacacaacatctttggctttgagaccattcctgaagagtgcgttgaagcaacaaaggaatacatccatggcgaacaatatagatcagactccaaaacagttaaccaacaagcttacttttatgccagagacctcgaagtccatcccaaggacacatttgtgttcagtatagatggcaccgtactc

SEQ ID NO: 58114 - DNA, 196 bp, Glycine max
gacgacattccaaaacacaaacacatacattgtagtatcacttgtgtctcggaacttgttcgtttgagttatggcaagcttaaaggttgcatgtgtggatttgacgtgcctggctgtgatgagtgcaccaatgatggtgcaacccgtgtcatgcaatgcagtttctgtgaatctagcaccgtgcctaacttacctg

SEQ ID NO: 58115 - DNA, 385 bp, Glycine max
ggttctagtgtgtgattgtttgttgttgtaactcgttcttcttcttttgttgttctgtgtttgtgtttgttttttctctcacctgaaaatgtcttgctgcggtggtaactgtggttgcagaagctcctgcaagtgctgcaacagctgcagaggctgcaatatgtacccacacttgagctacactgattcaaacaccaccgagaccttggtcatgggagtggcacctgttaaggctcaatttgacggtgctgaaatgggtgtgcccgctgagaacgatggctgcaaatgtggaccaaactgctcctgcaacacctgcacttgcaagtgagatgttgggagagcaagcttcatgcagagatagcccttaattatgaataatgataaa

SEQ ID NO: 58116 - DNA, 392 bp, Glycine max
gagcgaaacagagagtgatttcagtgagtgatcggtgttcacttgatctcatcataatcgtcagcgtcaattgaagaagatgccgatcagaaacatcgccgtcggaaggcctgaagaggcgacccaccccgacacgttgaaggcggctttggctgagttcatctcaaccttcatcttcgtgttcgccggctcaggctccggcatcgcctacaacaagctcaccgacaacggcgctgccacccctgccggcctcatctccgcctccatcgcccatgcattcgccctcttcgtcgccgtctccgtcggcgccaacatctccggcggccacgtcaaccccgccgtcaccttcggcgccttcgtcgggggcaacatcaccttcctccgcgggaacg

SEQ ID NO: 58117 - DNA, 387 bp, Glycine max
ggcacaagtttgttgagatagctagaagcaataagatgaaaatgaaagtgcttgttttgtttgttgctacagttttggtagcatatgaatgccatggctcagactaccagaagttccctctccaaatgaaaactgggtttggtgggcaatacagcaatgaggtggcatgtgccagttggaggcttggcgtggaagcaaacaacgtagtcaagtggcaaactgttcctgcagcttgcggagagtacatagctgactacgttctaggagaccaatatagatcagattccaaaacagttaaccaacaagcttatttctatgctaaatccctcaaactcaccaacaaagatgtctttgtcttggacgttgacgacactactctctctaatc

SEQ ID NO: 58118 - DNA, 388 bp, Glycine max
gaaggtgcaagagtttgttgtgagctataagctagtttatcgtgaggagaatatgaagttgtttgttttctttgttgctgcagtagttttggtagcatggccatgccatggcgcaggctaccaaaggttccctctccgaatgaaaactggctatggtgagcgttcttcggaggtaaaatgcgcaagttttaggcttgctgtggaagcacacaacatccgagcctttaaaaccattcctgaagagtgcgttgaaccaacaaaggactacattaatggcgaacaatttagatcagactctaaaacagttaaccaacaagctttcttttatgctagtgaacgcgaagtccatcacaacgacatatttatattcggcatagataacaccgtt

SEQ ID NO: 58119 - DNA, 381 bp, Glycine max
ggagcaagagtgaagagcgaagagaatggctcccaagggtttaatctttttggctgtgttatgcttctcagcactgtcactgagtcgttgtcttgcggaggataatggacttgttatgaacttctacaaggaatcatgccctcaggctgaagacatcatcaaagaacaagtcaagcttctctacaagcgccacaagaacactgctttctcctggctcagaaacatcttccatgactgtgctgttcagagttgtgatgcttcactgttgctggactccacaagaaggagcttgtctgagaaggaaacagatagaagctttgggttgagaaatttcaggtacattgagaccatcaaagaagctttggaaagggaatgcccagg

SEQ ID NO: 58120 - DNA, 294 bp, Glycine max
  unsure (1)..(294): unsure at all n locations
ggcacaagtttgttgagatagctagaagcaataagatgaaaatgaaagtgcttgttttgtttgttgctacagttttggtagcatatgaatgccatggctcagactaccagaagttccctctccaaatgaaaactgggtttggtgggcaatacagcaatgaggtggcatgtgccagttggaggcttggcgtggaagcaaacaacgtagtcaagtggcaaactgttcctgcagcttgcggagagtacatagctgactacgttctangagaacaatatagatcagattccaaaacag

SEQ ID NO: 58121 - DNA, 85 bp, Glycine max
gaaggtgcaagagtttgttgtgagctataagctagtttatcgtgaggagaacatgaatttgttggttgtcgctgttgctttggta

SEQ ID NO: 58122 - DNA, 67 bp, Glycine max
ggcacaagtttgttgagatagctagaagcaataagatgaatatgaaagtgcctgttttgtttgttgc

SEQ ID NO: 58123 - DNA, 71 bp, Glycine max
ggcacaagtgagtttgttgatcgagatcactagaaacagtgtgatgaaaatgaacgtccttgttttcttcg

SEQ ID NO: 58124 - DNA, 259 bp, Glycine max
cgagaagacacagatgggactctggagcagcacttttgatcgccaagacatttatccaatctccgaatcccttcagcgcttttttatcacgtcgatacgacttgtgttccatcgtcatgatcttcgtctgacttgggccctctccgttgcacatctggctcatgtgtccgtactccgtaggtgatgtgcgccctttgctggcttgcctgttccagtacactttttcttttgctttgccactcttcctgcttagtgcctt

SEQ ID NO: 58125 - DNA, 85 bp, Glycine max
tgggaggaacaacaagcgaaaataggccacatcgcttgtactttcatcatcgcataatcccgttgtagttttctcacatggctcg

SEQ ID NO: 58126 - DNA, 96 bp, Glycine max
gacagcatagcactaatctattttacacgacacccacattttgatcattacttttctagttggtaagccatggctacgcgaggagagcttgaggtt

SEQ ID NO: 58127 - DNA, 212 bp, Glycine max
gacccacacgtccagcggacagaagggttaccctcgaagagtacaaagcagcagtgagaacaatggggtggggaatccatggcactgatatcgattagtcttctcacgtgatcgactctgatggacattgcgacactcacatccaagcgtgcatcgcagattatcaggctgacgttgatgatgcgaccaacaagctcagaggcttcatcgct

SEQ ID NO: 58128 - DNA, 68 bp, Glycine max
ggcacaagtgagtttgttgatcgagataactataaacagtgtgatgaatatgaaggtcgttgttttct

SEQ ID NO: 58129 - DNA, 56 bp, Glycine max
ggtgcacaagtgagtttgttgctggagatatctacaaagtgtgtgatcagtgctca

SEQ ID NO: 58130 - DNA, 358 bp, Glycine max
tgtgatggtaatgaaggtccttgatttcttcgatgctacaattttggtagcatggcaatgccatgcgtacgcattgttcccactccgaatgaacactggctatggtgcccgtactccggatgtgaaatgcgcaagttggaagcttgctgtggaatcacacaacatctttggctttgagaccattcctgaagagtgcgttgaagcaacaaacgaatacatccatggcgaacaatatagatcagactccaaaacagttaaccaacaagcttacttttatgccagatacctcgaggtccatcccaacgacacatttgtgttcagtatagatggcaccgtactctctaatattccatactac

SEQ ID NO: 58131 - DNA, 233 bp, Glycine max
ggaccacattccaaaacacaaacacatacattgtagtatcacttttgtctcggaatttgttcttttgagtcatcgcaagcttaaaggttgcatgtgtggttttgacgtcgctggctgtgatcagtgcatcactgatggtccaagccgtgtcatgcaatgatctctctgtgaacctagtactgtgcctatggtacctcatgccaggtgtagatgtgccacaagctttgaatttc

SEQ ID NO: 58132 - DNA, 77 bp, Glycine max
gcacccagaaaatacaggttcaatttcaactgtttcacccccttcatgtactatctttgtgcacgtcagtccgagtg

SEQ ID NO: 58133 - DNA, 159 bp, Glycine max
ggagcataaccctaatccctacttttcttcctcactactgtcatttacgcttctcttctctgcagcaactattcctaaccctaaggtcttccttgacatgactatcggcggtcaatctgctggccgcatcgtgatggacctctacgctcacatgtctcc

SEQ ID NO: 58134 - DNA, 75 bp, Glycine max
ggcacaagtgagtttgttgatccagataaccacaaacactctgatgaacatgaaggtcctcgttttcttcgttgc

SEQ ID NO: 58135 - DNA, 66 bp, Glycine max
ctatcataaccatacagaatttgactacaaaagtggattttatgagacttaatcatgactctcagc

SEQ ID NO: 58136 - DNA, 189 bp, Glycine max
gagacacgtgatctaagatctctctctatctgggatctgcttccttctcttctctttctcaaatctcactcatagtcctaatgcagtcctcggatctgctacgttctaattctccttcaacgcatcacgagactacatgttcctctttcactcgggctatggcattcgtgcttccctcgtgtctctggc

SEQ ID NO: 58137 - DNA, 80 bp, Glycine max
ggctcaagtgagtttgtcgcttgagattttcatcacaattcttacgaccgtctacgtcgttgtatggttttctgacacgg

SEQ ID NO: 58138 - DNA, 60 bp, Glycine max
tggggctctttcgtggttgtgccacctctataattctcttgtactgtgctgtgttctcct

SEQ ID NO: 58139 - DNA, 71 bp, Glycine max
ggcagtgcaattccattaatctcgatactcactgtgaatttcttcaccttgctcgtcaatattttcatcgt

SEQ ID NO: 58140 - DNA, 216 bp, Glycine max
atgtgttctttctttttttttttctgtttttttttctttttattttttttcttttttctttcctttttttttttgtcttctttttttttttcttttttgtctttttactattctttgtttttcttcttgtttttttttttcctattttttgtttttttttttttttgtttttctttctctttctttcctctttcttttttttttcgcttttttttt

SEQ ID NO: 58141 - DNA, 85 bp, Glycine max
ggcacaagtgagtttgttcatcgagatttctctaaacagtgtgatgaacatgaccgtccttgttttcttcgttcctataattttg

SEQ ID NO: 58142 - DNA, 70 bp, Glycine max
gaccacacgacagacacatctcattattcattagacacgaaggatgagtccaagatgggtttttgtgtca

SEQ ID NO: 58143 - DNA, 291 bp, Glycine max
tcatcggtatcggtcatcgtaagggatactctcagtctctgcaaacctctcaatttctctcctctgtctttttcactctcttgctatccttttggctagttgcactgctgcaagtgcaactccagagaagcacattgccaagccagcatgtttcaacattcaacagaatcctttttccttccatttttctctttggcattggatcttctgcgtaacaagcagcaggagcagcaagtttaaatgggataggtccattcatatgagacacctacactacacagcatactgaaa

SEQ ID NO: 58144 - DNA, 66 bp, Glycine max
gaaagcagtcaccacagagagagaggttttgatgcaacgctgtcactgacaacggatctctatcta

SEQ ID NO: 58145 - DNA, 232 bp, Glycine max
tgggactcaggcacattcatctctatcgagtaaattaactatgaagcctatcctactattatccctttccgtcctgcctctctttgctttcgtggctctttcagaagatcttgacctcgttgtggacatcactggctcttccattttcgcaggtggcacatattacattgtgccatgaacttggggcgctgccggtggtggactgtgttgttgtcggatcggatgactcctt

SEQ ID NO: 58146 - DNA, 385 bp, Glycine max
gagcgaaacagagagtgatttcagtgagtgatcggtgttcacttgatctcatcataatcgtcagcgtcaattgaagaagatgccgatcagaaacatcgccgtcggaaggcctgaagaggcgactcaccccgacacgttgaaggcggctttggctgagttcatctcaaccttcatcttcgtgttcgccggctcaggctccggcatcgcctacaacaagctcaccgacaacggcgctgccacccctgccggcctcatctccgcctccatcgcccatgcattcgccctcttcgtcgccgtctccgtcggcgccaacatctccggcggccacgtcaaccccgccgtcaccttccgcgccttcgtcggcggcaacatcaccttcctccgc

SEQ ID NO: 58147 - DNA, 231 bp, Glycine max
acccacacgtcaaataggtgccagacaaatagagaagggtggcctgttatcggctaaggtcgaattcgacaaccttgactcggtccaattatggacatattggaaggtgtatacagcattagtgccagtgcctggtaatatcgtggctctgacggttactcgtctcgactatgatgatctccgtcttcctcccagcatctctccgtgacgtttccaccccgccaatgctct

SEQ ID NO: 58148 - DNA, 87 bp, Glycine max
tggggcatcaattcagaatatatcatcaattataatcatgggtttgtgtaacagttcgaatgctctctcctgccgcgttcacatctt

SEQ ID NO: 58149 - DNA, 59 bp, Glycine max
gagagtggtggattgcgccaacttccgtcgtatcctcatccctccgcacttctgctcca

SEQ ID NO: 58150 - DNA, 71 bp, Glycine max
gggcacaagtgagtttgttgatcgagataactagagcccgtgtgattacaatgatggttcctgttctcttc

SEQ ID NO: 58151 - DNA, 187 bp, Glycine max
cgacgcgtcaagagaaaacacatatgggacacacagaacaggacatacattgttcaaacccttacccaacacaaccatcatggccacctctgctattcagcactcagcattcactggtcaaactgctctgaagcagctcaatcagttcgtctgcaacaccggtggcgccggtacatgtcgcactaat

SEQ ID NO: 58152 - DNA, 170 bp, Glycine max
cgtttccgcttttagtccacaacatatcggtaatgttacaacaagactattcatgcgtatggtttcaagcttccgatggtggtcttttgacactacatttgggtctttagtcgctatcctgtttgttgtgtacattccttagaggtttgggtgtgatttgtggtatggtc

SEQ ID NO: 58153 - DNA, 57 bp, Glycine max
tcctgggacattcctactttcctttcgtttcctttccttttccctcactttctcgct

SEQ ID NO: 58154 - DNA, 90 bp, Glycine max
gaccacacttcaaaatcctctggtaacacttattttatctattctctctctttcttttgtgttccaagcagctacaagcaatggagagga

SEQ ID NO: 58155 - DNA, 158 bp, Glycine max
gatgcacaagtttgttgagatatcttccagcaatatgatgacactgtgagtactcgatatgtccctgttttcttccttgctagacttttgggtgcatctgcatgccctacgctcgatattttccctctctcaatgtcaactgtcgctagtgctcctac

SEQ ID NO: 58156 - DNA, 405 bp, Glycine max
gacagaacggggcacaagtgagtttgttgatcgagataactagaaacagtgtgatgaaaatgaaggtccttgttttcttcgttgctacaattttggtagcatggcaatgccatgcgtacgatatgttccctctccgaatgaacactggctatggtgcccgtactccggatgtgaaatgcgcaagttggaggcttgctgtggaagcacacaacatctttggctttgagaccattcctgaagagtgcgttgaagcaacaaaggaatacatccatggccaacaatatagatcagactccaaaacagttaaccaacaagcttacttttatgccagagacctcgaagtccatcccaatgacacatttgtgtttagtatagatgggcacgtactctctaatattccatact

SEQ ID NO: 58157 - DNA, 290 bp, Glycine max
tttttgttttttttttttttgtttgtttatttgtttctctcttttttttctcttttttttcttgttcttttttttttttttctttttgtttttgtttctttttttttgttgttttgttttgttgttcttttctttcttttgtttttgtgttttttgttttttgtttttgttttttgtttttcttttttcttttcttgttttttttttttgttttttctctttcttctttttttgtttttttttctttcttttttttttgttttttttcttttttgtttgttttttttttt

SEQ ID NO: 58158 - DNA, 72 bp, Glycine max
gatcgcagctaagtttcttgatgatgaggttgatgttgtgtatcagtaagtggtaggtccattgttatcttc

SEQ ID NO: 58159 - DNA, 88 bp, Glycine max
cgtccaccggcaccaagagaacatccgatggggaacgttcacgagtttgttgttcgctattccgtattttatttttgggagcatacac

SEQ ID NO: 58160 - DNA, 124 bp, Glycine max
gaagcattaccctaatccctctttcttcctcttcctcagtactgcgattttcgattctctcctccgcgactatgcctaatcctacggtcgtcttcgacatgaccatcgtcggtcaaccctgcgg

SEQ ID NO: 58161 - DNA, 344 bp, Glycine max
ggaggtgcaagagtttgttgtgagctataagctagtttatcgtgaggagaatatgaagttgtttgttttctttgttgctgcagtagttttggtagcatggccatgccatggcgcaggctaccaaaggttccctctccgaatgaaaactggctatggtgagcgttcttcggaggtaaaatgcgcaagttttaggcttgctgtggaagcacacaacatccgagcctttaaaaccattcctgaagagtgcgttgaaccaacaaaggactacattaatggcgaacaatttagatcagactctaaaacagtttaacaacaagctttcgtttatgctagtgaacgcgaag

SEQ ID NO: 58162 - DNA, 406 bp, Glycine max
  unsure (1)..(406): unsure at all n locations
ggcacaagtgagtttgttgatcgagataactagaaacagtgtgatgaaaatgaaggtccttgttttcttcgttgctacaattttggtagcatggcaatgccatgcgtacgatatgttccctctccgaatgaacactggctatggtgcccgtactccggaggtgaaatgcgcaagttggaggcttgctgtggaagcacacaacatctttggctttgagaccattcctgaagagtgcgttgaagcaacaaaggaatacatccatggcgaacaatatagatcagactccaaaacagttaaccaacaagcttacttttatgccagagacctcgaagtcaatctccaagacacatttgtgttcagtatagatggcaacgtactctctaatattccatactacanaaaacat

SEQ ID NO: 58163 - DNA, 358 bp, Glycine max
ggcacaagtgagtttgttgatcgagataactagaaacagtgtgatgaaaatgaaggtccttgttttcttcgttgctacaattttggtggcatggcaatgccatgcgtacgatatgttccctctccgaatgaacactggctatggtgcccgtactccggaggtgaaatgcgcaagttggaggcttgctgtggaagcacacaacatctttggctttgagaccattcctgaagagtgcgttgaagcaacaaaggaatacatccatggcgaacaatatagatcagactccaaaacagttaaccaacaagcttacttttatgccagagacctcgaagtccatcccaaggacacatttgtgttc

SEQ ID NO: 58164 - DNA, 350 bp, Glycine max
ggcacaagtgagtttgttgatcgagataactagaaacagtgtgatgaaaatgaaggtccttgttttcttcgttgctacaattttggtaacatggcaatgccatgcgtacgatatgttccctctccgaatgaacactggctatggtgcccgtactccggaggtgaaatgcgcaagttggaggcttgctgtggaagcacacaacatctttggctttgagaccattcctgaagagtgcgttgaagcaacaaaggaatacatccatggcgaacaatatagatcagactccaaaacagttaaccaacaagcttacgtttatgccagagacctcgaagtccatcccaaggacacat

SEQ ID NO: 58165 - DNA, 410 bp, Glycine max
  unsure (1)..(410): unsure at all n locations
ggcacaagtgagtttgttgatcgagataactagaaacagtgtgatgaaaatgaaggtccttgttttcttcgttgctacaattttggtagcatggcaatgccatgcgtacgatgtgttccctctccgaatgaacactggctatggtgcccgtactccggaggtgaaatgcgcaagttggaggcttgctgtggaagcacacaacatctttggctttgagaccattcctgaagagtgcgttgaagcaacaaaggaatacatccatggcgaacaatatagatcagactccaaaacagttaaccaacaagcttacttttatgccaaagacctcgaagtccatcccaaggacacatttgtgttcagtatagatggcaccgtactctctaatattccatactacaanaaacatggat

SEQ ID NO: 58166 - DNA, 395 bp, Glycine max
ggcacaagtgagtttgttgatcgagataactagaaacagtgtgatgaaaatgaaggtccttgttttcttcgttgctacaattttggtagcatggcaatgccatgcgtacgatatgttccctctccgaatgaacactggctatggtgcccgtactccggaggtgaaatgcgcaagttggaggcttgctgtggaagcacacaacatctttggctttgagaccattcctgaagagtgcgttgaagcaacaaaggaatacatccatggcgaacaatatagatcagactccaaaacagttaaccaacaagcttacttttatgccagagacctcgaagtcaatcccaaggacatttgtgttcagtatagatggcaccgtactctctaatattccatactac

SEQ ID NO: 58167 - DNA, 177 bp, Glycine max
ggcacaagtgagtttgttgatcgagataactagaaacagtgtgatgaaaatgaaggtccttgttttcgtcgttgctacaattttggtagcatggcaatgccatgcgtacgatatgttccctctccgaatgaacactggctatggtgcccgtactccggaggtgaaatgcgcaagttg

SEQ ID NO: 58168 - DNA, 352 bp, Glycine max
ggcacaagtgagtttgttgatcgagataactagaaacagtgtgatgaaaatgaaggtccttgttttcttcgttgctacaattttggtagcatggcaatgccatgcgtacgatatgttccctctccgaatgaacactggctatggtgcccgtactccggaggtgaaatgcgcaagttggaggcttgctgtggaagcacacaacatctttggctttgagaccattcctgaagagtgcgttgaagcaacaaaggaatacatccatggcgaacaatatagatcagactccaaaacagttaaccaacaagcttacttttatgccagagacctcgaagtccaacccaaggacacattt

SEQ ID NO: 58169 - DNA, 205 bp, Glycine max
ggcacaagtgagtttgttgatcgagataactagaaacagtgtgatgaaaatgaaggtccttgttttcttcgttgcgacaattttggtagcatggcagtgccatgcgtacgatatgttccctctccgaatgaacactggctatggtgcccgtactccggaggtgaaatgcgcaagttggaagcttgctgtggaagcacacaacatc

SEQ ID NO: 58170 - DNA, 367 bp, Glycine max
ggttctagtgtgtgattgtttgttgttgtcactcgttcttcttcttttgttgttctgtgtttgtgtttgttttttcgctcacctgaaaatgtcttgctgcggtggtaactgtggttgcggaagctcctgcaagtgcggcaacggctgcggaggctgcaagatgtacccatacttgagctacactgagtcaaccaccaccgagaccttggtcatgggagtggcacctgttaaggctcaatttgagggtgctgaaatgggtgtgcccgctgagaactatggctgcaaatgtggaccaaactgctcctgcaacccctgcacttgcaagtgaggtgttgggagagcaagcttcaagcagagatagccctta

SEQ ID NO: 58171 - DNA, 307 bp, Glycine max
ctacaattttggtagcatggcaatgccatgcgtacgatatgttccctctccgaatgaacactggctatggtgcccgtactccggaggtgaggtgcgcaagttggaggcttgctgtggaagcacacaacatctttggctttgggaccattcctgaagagtgcgttgaagcaacaaaggaatacatccatggcgaacaatatagatcagactccaaaacagttaaccaacaagcttacttttatgccagagacctcgaagtccatcccaaggacacatttgtgttcagtatacgtggcagcgtactcgc

SEQ ID NO: 58172 - DNA, 320 bp, Glycine max
ggcacaagtgagtttgttgatcgagataactagaaacagtgtgatgaaaatgaaggtccttgttttcttcgttgctacaattttggtagcatggcaatgccatgcgtacgatatgttccctctccgaatgaacactggctatggtgcccgtactccggaggtgaaatgcgcaagttggaggcttgctgtggaagcacacaacatctttggctttgagaccattcctgaagagtgcgttgaagcaacaaaggaatacatccatggcgaacaatatagatcagactccaagacagttaaccaacaagcttacttttaagcca

SEQ ID NO: 58173 - DNA, 352 bp, Glycine max
ggcacaagtgagtttgtagatcgagataactagaaacagtgtgatgaaaatgaaggtccttgttttcttcgttgctacaattttggtagcatggcaatgccatgcgtacgatatgttccctctccgaatgaacactggctatggtgcccgtactccggaggtgaaatgcgcaagttggaggcttgctgtggaagcacacaacatctttggctttgagaccattcctgaagagtgcgttgaagcaacaaaggaatacatccatggcgaacaatatagatcagactccaaaacagttaaccaacaagcttacttttatgccagagacctcgaagtccatcccaaggacacattt

SEQ ID NO: 58174 - DNA, 371 bp, Glycine max
  unsure (1)..(371): unsure at all n locations
ggaacttggatgttacggtacctaaattgcttttcacaccgtttaaggatatanggtttcatggaaagaccgtgagtgtaaagattggaggggtgcatgcattgggtgataatcggtgaaaagatagtgagtaagtattcctgtttcaaaggaggacactgctattgttaaaggaaaatgggacctgctttggtcacgattgacttggatgattatgatgatgtgagagagattccgaaaccgaaaggtcctaattctgaggattataggttagaaagacgatggaagagatttgaacattcaagttcaaataaacgattgaagcaaaatcacagtgacagtggtacaagaactgtgaagagtcatggaaa

SEQ ID NO: 58175 - DNA, 407 bp, Glycine max
gaaggtgcaagagtttgttgtgagctataagctagtttatcgtgaggagaatatgaagttgtttgttttctttgttgctgcagtagttttggtagcatggccatgccatggcgcaggctaccaaaggttccctctccgaatgaaaactggctatggtgagcgttcttcggaggtaaaatgcgcaagttttaggcttgctgtggaagcacacaacatccgagcctttaaaaccattcctgaagagtgcgttgaaccaacaaaggactacattaatggcgaacaatttagatcagactctaaaacagttaaccaacaagctttcttttatgctagtgaacgcgaagtccatcacaacgacatatttatattcggcatagataacaccgtactctctaatatcccatact

SEQ ID NO: 58176 - DNA, 253 bp, Glycine max
  unsure (1)..(253): unsure at all n locations
ggcacaagtttgttgagatagctagaagcaataagatgaaaatgaaagtgcttgttttgtttgttgctacagttttggtagcatatgaatgccatggctcagactaccagaagttccctctccaaatgaaaactgggcttggtgggcaatacagcaatgaggtggcatgtaccagttggaggcttggcgtggaagcanacaacgtagtcaagtggcaaactgtccctgcagcttgcggagaatacatagctga

SEQ ID NO: 58177 - DNA, 348 bp, Glycine max
agcacaagtgagtttgttgatcgagataactagaaacagtgtgatgaaaatgaaggtccttgttttcttcgttgctacaattttggtagcatggcaatgccatgcgtacgatatgttccctctccgaatgaacactggctatggtgcccgtactccggaggtgaaatgcgcaagttggaggcttgctgtggaagcacacaacatctttggctttgagaccattcctgaagagtgcgttgaagcaacaaaggaatacatccatggcgaacaatatagatcagactccaaaacagttaaccaacaagcttacttttatgccagagacctcgaagtcaatccaaggacaca

SEQ ID NO: 58178 - DNA, 217 bp, Glycine max
ggcacaagtgagtttgttgatcgagataactagaaacagtgtgatgaaaatgaaggtccttgttttcttcgttgctacaattttggtagcatggcaatgccatgcgtacgatatgttccctctccgaatgaacactggctatggtgcccgtactccggaggtgaaatgcgcaagttggaggcttgctgtggaagcacacaacatctttggctttgag

SEQ ID NO: 58179 - DNA, 398 bp, Glycine max
ggcacaagtgagtttgttgatcgagataactagaaacagtgtgatgaaaatgaaggtccttgttttcttcgttgctacaattttggtagcatggcaatgccatgcgtacgatatgttccctctccgaatgaacactggctatggtgcccgtactccggaggtgaaatgcgcaagttggaggcttgctgtggaagcacacaacatctttggctttgagaccattcctgaagagtgcgttgaagcaacaaaggaatacatccatggcgaacaatatagatcagactccaaaacagttaaccaacaagcttacttttatgccagagacctcgaagtccatcccaaggacacatttgtgttcagtatagatggcaccgtactctctaatatttcatactaca

SEQ ID NO: 58180 - DNA, 290 bp, Glycine max
gcacaagtgagtttgttgatcgagataactagaaacagtgtgatgaaaatgaaggtccttgttttcttcgttgctacaattttggtagcatggcaatgccatgcgtacgatatgttccctctccgaatgaacactggctatggtgcccgtactccggaggtgaaatgcgcaagttggaggcttgctgtggaagcacacaacatctttggctttgagaccattcctgaagagtgcgtttaagcaacaaaagaatacatccatggcgaacaatatagattagactccaaaac

SEQ ID NO: 58181 - DNA, 91 bp, Glycine max
gaaggtgcaagagtttgttgtgagctataagctagtttatcgtgaggagaatatgaagttggttgtgttcgttgctagcgcagtagttttg

SEQ ID NO: 58182 - DNA, 379 bp, Glycine max
gaaggtgcaagagtttgttgtgagctataagctagtttatcgtgaggagaatatgaagttgtttgttttctttgttgctgcagtagttttggtagcatggccatgccatggcgcaggctaccaaaggttccctctccgaatgaaaactggctatggtgagcgttcttcggaggtaaaatgcgcaagttttacgcttgctgtggaagcacacaacatccgagcctttaaaaccattcctgaagagtgcgttgaaccaacaaaggactacattaatggcgaacaatttagatcagactctaaaacagttaaccaacaagctttcgtttatgcgattgaacgcgaagtccatcacaacgacatatttaaattccgcatagat

SEQ ID NO: 58183 - DNA, 219 bp, Glycine max
gatgcacaagtttgttgagatagctagaagcaataagatgaaaatgaaagtgcttgttttgtttgttgcgagaggttgtggtagcatatggagtgcatggcggcggactagcagaggttccctctccagatgaaaagtgggtttggtgggcaatagagcaatgaggtggcatgtgccagttgggggcgtggcgtgggagcagagaaggtagtcaagtgg

SEQ ID NO: 58184 - DNA, 290 bp, Glycine max
gacccacgcgtccacccacgcgtccgcccacgcgtccgcccacgcgtccgcccacgcgtccgcccacgcgtccgcccacgcgtccgcccacgcgtccgcggacgcgtgggcggacgcgtgggcggacgcaagatcagacgagggggaggtagaggatgaagccgcggaggagggagacggagagaagtagaggattgagacgcatattcacggagatgatggatgtgggcctcagtgcgaagaggatggtttgacgctctgttgtaaagatgcgaatcagtgaggtggag

SEQ ID NO: 58185 - DNA, 371 bp, Glycine max
gtcaagaattcacgggtcgacgcacgcgtccaatggcgtggatgatgccaaatatcccggtggaagctatggaaggggttacccaggtcatggtggtggcggttatcctggccatggcggtggcggttatcctggccatggaggtggtggtggctatcctggtcatggtggtggccaccctgttcatagtggctgctatgctggtcgtggtggtggatactgtacgcatggctgtttccgtgtgccggacatacaactgatgttgcataaggtgatgccatgacgctggggaagctgttgctgcagaaactcaagatgagactcacgattaatacgatgcagttctacttaattagtacctttgatatttt

SEQ ID NO: 58186 - DNA, 350 bp, Glycine max
ggtgcacaagtgagtttgttgatcgagataactagaaacagtgtgatgaaaatgaaggtccttgttttcttcgttgctacaattttggtagcatggcaatgccatgcgtacgatatgttccctctccgaatgaacactggctatggtgcccgtactccggaggtgaaatgcgcaagttggaggcttgctgtggaagcacacaacatctttggctttgagaccattcctgaagagtgcgttgaagcaacaaaggaatacatccatggcgaacaatatagatcagactccaaaacagttaaccaacaagcttacttttatgccagagacgccagagtccatcccaaggacac

SEQ ID NO: 58187 - DNA, 351 bp, Glycine max
ggtgcacaagtgagtttgttgatcgagataactagaaacagtgtgatgaaaatgaaggtccttgttttcttcgttgcgacaattttggtaccatggcaatgccatgcgtacgatatgttccctctccgaatgaacactggctatggtgcccgtactccggaggtgaaatgcgcaagttggaggcttgctgtggaagcacacaacatctttggctttgagaccattcctgaagagtgcgttgaagcaacaaaggaatacatccatggcgaacaatataaatcagactccaagacagttaaccaacaagcttacttttatgccagaagaactcgaagtccatcccaaggacac

SEQ ID NO: 58188 - DNA, 399 bp, Glycine max
ggcacaagtttgttgagatagctagaagcaataagatgaaaatgaaagtgcttgttttgtttgttgctacagttttggtagcatatgaatgccatggctcagactaccagaagttccctctccaaatgaaaactgggtttggtgggcaatacagcaatgaggtggcatgtgccagttggaggcttggcgtggaagcaaacaacgtagtcaagtggcaaactgttcctgcagcttgcggagagtacatagctgactacgttctaggagaccaatatagatcagattccaaaacagttaaccaacaagcttatttctatgctaaatccctcaaactcaccaacaaagatgtctttgtcttggacgttgacgacactactctctctaatctccagtattttg

SEQ ID NO: 58189 - DNA, 329 bp, Glycine max
gaggcacgcgtccaacggctactacgacgggagagaaagggagagcaacagggactcattccactgactacggtttgcggcttcagagattgcgacgcacgcacccacggtcaccacctagaacggtgcacgtatctccgtcgcgtcagctcacggagaaagtggtcgcatccagatgatgttggcaggagaatcgattgcagcagcaacgactgcaacttccatgtcgcatgtaacatcttcgaacgtcgcatcgacgggattgagactaggaaacttgggatcacatgggacaaccttcacttatcacctagggttactgttgcact

SEQ ID NO: 58190 - DNA, 326 bp, Glycine max
gaaggtgcaagagtttgttgtgagctataagctagtttatcgtgaggagaatatgaagttgtttgttttctttgttgctgcagtagttttggtagcatggccatgccatggcgcaggctagcaaaggttccctctccgaatgaaaactggctatggtgagcgttcttcggaggtaaaatgcgcaagttttaggcttgctgtggaagcacacaacatccgagcctttaaaaccattcctgaagagtgcgttgaaccaacaaaggactacattaatggcgaacaatttagattagactctaaaacagttaaccaacaagctttctttt

SEQ ID NO: 58191 - DNA, 303 bp, Glycine max
ggcacaagtgagtttgttgatcgagataactagaaacagtgtgatgaaaatgaaggtccttgttttcttcgttgctacaattttggtagcatggcaatgccatgcgtacgatatgttccctctccgaatgaacactggctatggtgcccgtactccggaggtgaaatgcgcaagttggaggcttgctgttgaaacacacagcatccttggctttgagaacattcctgaagagtgcgttgaagcatcaaagaatacatcaatggggacaatatagatcagactccaaaacagttaaccaacaag

SEQ ID NO: 58192 - DNA, 349 bp, Glycine max
ggcacaagtgagtttgttgatcgagataactagaaacagtgtgatgaaaatgaaggtccttgttttcgtcgttgctacaattttggtagcatggcaatgccatgcgtacgatatgttccctctccgaatgaacactggctatggtgcccgtactccggaggtgaaatgcgcaagttggaggcttgctgtggaagcacacaacatctttggctttgagaccattcctgaagagtgcgttgaagcaacaaaggaatacatccatggcgaacaatatagatcagactccaaaacagttaaccaacaacgctacgtttaggccagagacctcgaagtccatcccaaggacaca

SEQ ID NO: 58193 - DNA, 346 bp, Glycine max
gcacaagtttgttgagatagctagaagcaataagatgaaaatgaaagtgcttgttttgtttgttgctacagttttggtagcatatgaatgccatggctcagactaccagaagttccctctccaaatgaaaactgggtttggtgggcaatacagcaatgaggtggcatgtgccagttggaggcttggcgtggaagcaaacaacgtagtcaagtggcaaactgttcctgcagcttgcggagagtacatagctgactacgttctaggagaccaatatagatcagattccaaaacagttaaccaacaagcttatttctatgctaaatccctcaaactcacgagcaaagat

SEQ ID NO: 58194 - DNA, 350 bp, Glycine max
ggcacaagtgagtttgttgatcgagataactagaaacagtgtgatgaaaatgaaggtccttgttttcttcgttgctacaattttggtagcatggcaatgccatgcgtacgatatgttccctctccgaatgaacactggctatggtgcccgtactccggaggtgaaatgcgcaagttggaggcttgctgtggaagcacacaacatctttggctttgagaccattcctgaagagtgcgttgaagcaacaaaggaatacatccatggcgaacaatatagatcagactccaaaacagttaaccaacaagcttacttttatgccaggagacgtcgaagtccatcccaaggacaca

SEQ ID NO: 58195 - DNA, 352 bp, Glycine max
ggcacaagtgagtttgttgatcgagataactagaaacagtgtgatgaaaatgaaggtccttgttttcttcgttgctacaattttggtagcatggcaatgccatgcgtacgatatgttccctctccgaatgaacactggctatggtgcccgtactccggaggtgaaatgcgcaagttggtggcttgctgtggaagcacacaacatctttggctttgagaccattcctgaagagtgcgtggaagcaacaaaggaatacatccaaggcgaacaatatagattaaactccaagacagttaaccaacaagcttacttttaagccagaaaactcgaagtccatcccaaggacacattt

SEQ ID NO: 58196 - DNA, 396 bp, Glycine max
gcacaagtgagtttgttgatcgagataactagaaacagtgtgatgaaaatgaaggtccttgttttcttcgttgctacaattttggtagcatggcaatgccatgcgtacgatatgttccctctccgaatgaacactggctatggtgcccgtactccggaggtgaaatgcgcaagttggaggcttgctgtggaagcacacaacatctttggctttgagaccattcctgaagagtgcgttgaagcaacaaaggaatacatccatggcgaacaatatagatcagactccaaaacagttaaccaacaagcttacttttatgccagagacctcgaagtccatcccaaggacacatttgtgttcagtatagatggcaccgtactctccaatattccatactac

SEQ ID NO: 58197 - DNA, 314 bp, Glycine max
ggcacaagtgagtttgttgatcgagataactagaaacagtgtgatgaaaatgaaggtccttgttttcttcgttgctacaattttggtagcatggcaatgccatgcgtacgatatgttccctctccgaatgaacactggctatggtgcccgtactccggaggtgaaatgcgcaagttggaggcttgctgtggaagcacacaacatctttggctttgagaccattcctgaagagtgcgttgaagcaacaaaggaatacatccatggcgaacaatatagattagactccaaaacagttaaacaacaagcttaccttt

SEQ ID NO: 58198 - DNA, 127 bp, Glycine max
gggggggcataagtgagtttgttgatcgagatagctacagtctgtgtgatgtgaatgtccgtgcttgcttccgggcgacgcttttgggtaggtggcatggccatgccgtgcgatatgttccgtcccc

SEQ ID NO: 58199 - DNA, 353 bp, Glycine max
  unsure (1)..(353): unsure at all n locations
ggcacaagtgagtttgttgatcgagataactagaaacagtgtgatgaaaatgaaggtccttgttttcttcggtgcgacaattttggtancatggcaatgccatgcgtacgatatgttccctctccgaatgaacactggctatggtgcccgtactccggaggtgaaatgcgcaagttggaggcttgctgtggaagcacacaacatctttggctttgagaccattcctgaagagtgcgttgaagcaacaaaggaatacatccatggcgaacaatatagattagactccaaaacagttaaccaacaagcttacttttatggcgagagacctcgaagttcatcccaaggacacattt

SEQ ID NO: 58200 - DNA, 355 bp, Glycine max
gcacaagtgagtttgttgatcgagataactagaaacagtgtgatgaaaatgaaggtccttgttttcttcgttgctacaattttggtagcatggcaatgccatgcgtacgatatgttccctctccgaatgaacactggctatggtgcccgtactccggaggtgaaatgcgcaagttggaggcttgctgtggaagcacacaacatccttggctttgagaccattcctgaagagtgcgttgaagcaacaaaggaatacatccatggcgaacaatatagatcagactccaaaacagttaaccaacaagcttacttttatgccacagacctcgaagtccatcccaaggacacatttgtgt

SEQ ID NO: 58201 - DNA, 239 bp, Glycine max
  unsure (1)..(239): unsure at all n locations
gaaggtgcaagagtttgttgtgagctataagctagtttatcgtgaggagaatatgaagttgtttgttttctttgttgctgcagtagttttggtancatggccatgccatggcgcaggctaccaaaggttccctctccgaatgaaaactggctatggtgagcgttcttcggaggtaaaatgcgcaagttttaggcttgctgtggaagcacacaacatccgagcctttaaaaccattcctg

SEQ ID NO: 58202 - DNA, 404 bp, Glycine max
ggcacaagtgagtttgttgatcgagataactagaaacagtgtgatgaaaatgaaggtccttgttttcttcgttgctacaattttggtagcatggcaatgccatgcgtacgatatgttccctctccgaatgaacactggctatggtgcccgtactccggaggtgaaatgcgcaagttggaggcttgctgtggaagcacacaacatctttggctttgagaccattcctgaagagtgcgttgaagcaacaaaggaatacatccatggcgaacaatatagatcagactccaaaacagttaaccaacaagcttacttttatgccagagacctcgaagtccatcccaaggacacatttgtgttcagtatagatggcaccgtactctccaatattccataactacaaaaac

SEQ ID NO: 58203 - DNA, 152 bp, Glycine max
aaacaacacaaaggggggagtttgctgatcgcaatacatagaccaagtgtaatagctcatgcattgccctgctttcctcgcctcctagcagtttagcaccatagcaatgccacacgtatcagaagttccctctgcaaactcagacaggatat

SEQ ID NO: 58204 - DNA, 216 bp, Glycine max
ggcacaagtgagtttgttgatcgagataactagaaacagtgtgatgaaaatgaaggtccttgttttcttcgttgctacaattttggtagcatggcaatgccatgcgtacgatatgttccctctccgaatgaacactggctatggtgcccgtactccggaggtgaaatgcgcaagttggaggcttgctgtggaagcacacaacatctttggctttga

SEQ ID NO: 58205 - DNA, 408 bp, Glycine max
gaaggtgcaagagtttgttgtgagctataagctagtttatcgtgaggagaatatgaagttgtttgttttctttgttgctgcagtagttttggtagcatggccatgccatggcgcaggctaccaaaggttccctctccgaatgaaaactggctatggtgagcgttcttcggaggtaaaatgcgcaagttttaggcttgctgtggaagcacacaacatccgagcctttaaaaccattcctgaagagtgcgttgaaccaacaaaggactacattaatggcgaacaatttagatcagactctaaaacagttaaccaacaagctttcttttatgctagtgaacgcgaagtccatcacaacgacatatttatattcggcatagataacaccgtactctctaatatcccatacta

SEQ ID NO: 58206 - DNA, 396 bp, Glycine max
ggcacaagtgagtttgttgatcgagataactagaaacagtgtgatgaaaatgaaggtccttgttttcttcgttgctacaattttggtagcatggcaatgccatgcgtacgatatgttccctctccgaatgaacactggctatggtgcccgtactccggaggtgaaatgcgcaagttggaggcttgctgtggaagcacacaacatctttggctttgagaccattcctgaagagtgcgttgaagcaacaaaggaatacatccatggcgaacaatatagatcagactccaaaacagttaaccaacaagcttacttttatgccagagacctcgaagtccatcccaaggacacatttgtgttcagtatagatggcaccgtactctctaatattccatacta

SEQ ID NO: 58207 - DNA, 325 bp, Glycine max
gtacgcctcaggaattccaggctcgaccgacccgtccgttgcgaaacgacaacacaacggggcggaggtaactttgctgattgagacaactattatcagtgtgagtttgatgaacgtccttgatttcttcgcttgcagcattcaggtatcagggcaaggccatgcgtatcagatcttccactcgtcaagtgaacactgcttcaaggggccagtacaccagaagttaaatgcgcaagttggaagcatgctgtggcagtatacaggaactttgactttcatatcaatcctgactattgcattgatccaaaataggcatacatccatg

SEQ ID NO: 58208 - DNA, 396 bp, Glycine max
ggcagtccaattccaatatattccattctctctgtgtatttccctacctctcccttcaagatgcagatcttcgtcaagaccctcaccggcaagaccatcacccttgaggtggaaagctctgacaccatcgacaacgtcaaggccaagatccaggacaaggaaggaatccccccggaccagcaacgtctcattttcgccggaaagcaacttgaggacggccgtacccttgctgactacaacattcagaaggagagtactcttcacctcgtcctccgtctccgtggtggcatgcagatcttcgttaagacactcaccggcaagaccataaacctagaggttgaaagctccgacaccatcgataacgtcaaggccaagatccacgacaaggagggtatc

SEQ ID NO: 58209 - DNA, 325 bp, Glycine max
atactataacaattaaattaaataaataaaaatgtttgatttatcaatgtaatattttcctttaaaaaatgttctatcgggcattaatttatacaatatcaactgagagcttcgaaatgtctaattagtttttcagagttacgaattaatttgcgcttagtaaaaatttgactttaatatattttagcgttcgcaagagtactacatccagcatcatttgatctatgcatagctttcactcttttacaggcaatctcattgtaaatagttcaataaattatgatttctaaaccttgaagagtgcaacaatggctcccactcatac

SEQ ID NO: 58210 - DNA, 391 bp, Glycine max
ggcacaagtgagtttgttgatcgagataactagaaacagtgtgatgaaaatgaaggtccttgttttcttcgttgctacaattttggtagcatggcaatgccatgcgtacgatatgttccctctccgaatgaacactggctatggtgcccgtactccggaggtgaaatgcgcaagttggaggcttgctgtggaagcacacaacatcgttggctttgagaccattcctgaagagtgcgttgaagcaacaaaggaatacatccatggcgaacaatatagatcagactccaaaacagtgaaccaacaagcttacatttatgccagaaacctcgaagtctatcccaacgacacatttgtgttcactatagatggcaccgtactcgctaatattcca

SEQ ID NO: 58211 - DNA, 390 bp, Glycine max
ggttctagtgtatgtgattgttgtgactcgttcttcttcgtcgttatcttcttcttttgttgtttgtgtgtttgttttttctctcacctgaaaatgtcttgctgcggtggtaactgtggttgcggaagcgcctgcaagtgcggcaacggctgcggaggctgcaagatgtacccagacttgagctacaccgagtcaaccaccaccgagaccttggtcatgggagtggcaccagttaaggctcaattcgagagtgctgaaatgggtgttcccgctgagaacgatggctgcaaatgtggagctaactgcacctgcaacccctgcacttgcaagtgacgtgttggagagctaaagcttcaagcagaaatggccttagaaataatgataaaaact

SEQ ID NO: 58212 - DNA, 380 bp, Glycine max
ggcacaagtgagtttgttgatcgagataactagaaacagtgtgatgaaaatgaaggtccttgttttcttcgttgctacaattttggtagcatggcaatgccatgcgtacgatatgttccctctccgaatgaacactggctatggtgcccgtactccggaggtgaaatgcgcaagttggaggcttgctgtggaagcacacaacatctttggctttgagaccattcctgaagagtgcgttgaagcaacaaaggaatacatccatggcgaacaatatagatcagactccaaaacagttaaccaacaagcttacttttatgccagagacctcgaagtccatcccaaggacacatttgtgttcagtatagaatggcacgtactct

SEQ ID NO: 58213 - DNA, 394 bp, Glycine max
ggcacaagtgagtttgttgatcgagataactagaaacagtgtgatgaaaatgaaggtccttgttttcttcgttgctacaattttggtagcatggcaatgccatgcgtacgatatgttccctctccgaatgaacactggctatggtgcccgtactccggaggtgaaatgcgcaagttggaggcttgctgtggaagcacacaacatctttggctttgagaccattcctgaagagtgcgttgaagcaacaaaggaatacatccatggcgaacaatatagatcagactccaaaacagttaaccaacaagcttacttttatgccagaggcctcgaagtccatcccaaggacacatttgtgttcagtatagatggcaccgtactctctaatattccatac

SEQ ID NO: 58214 - DNA, 397 bp, Glycine max
ggcacaagtgagtttgttgatcgagataactagaaacagtgtgatgaaaatgaaggtccttgttttcttcgttgctacaattttggtagcatggcaatgccgtgcgtacgatatgttccctctccgaatgaacactggctatggtgcccgtactccggaggtgaaatgcgcaagttggaggcttgctgtggaagcacacaacatctttggctttgagaccattcctgaagagtgcgttgaagcaacaaaggaatacatccatggcgaacaatatagatcagactccaaaacagttaaccaacaagcttacttttatgccagagacctcgaagtccatcccaaggacaaatttgtgttcagtatagatggcaccgtactctctaatattccatactac

SEQ ID NO: 58215 - DNA, 356 bp, Glycine max
ggcacaagtgagtttgttgatcgagataactagaaacagtgtgatgaaaatgaaggtccttgttttcttcgttgctacaattttggtagcatggcaatgccatgcgtacgatatgttccctctccgaatgaacactggctatggtgcccgtactccggaggtgaaatgcgcaagttggaggcttgctgtggaagcacacaacatctttggctttgagaccattcctgaagagtgcgttgaagcaacaaaggaatacatccatggcgaacaatatagatcagactccaaaacagttaaccaacaagcttacttttatgccagagacctcgaagtccatcccaaggacacattttgtg

SEQ ID NO: 58216 - DNA, 391 bp, Glycine max
ggcacaagtttgttgagatagctagaagcaataagatgaaaatgaaagtgcttgttttgtttgttgctacagttttggtagcatatgaatgccatggctcagactaccagaagttccctctccaaatgaaaactgggtttggtgggcaatacagcaatgaggtggcatgtgccagttggaggcttggcgtggaagcaaacaacgtagtcaagtggcaaactgttcctgcagcttgcggagagtacatagctgactacgttctacgagaccaatatagatcagattccaaaacagttaaccaacaagcttatttctatgctaaatccctcaaactcaccaacaaagatgtctttgtcttggacgttgacgacactactctctctaatctcca

SEQ ID NO: 58217 - DNA, 395 bp, Glycine max
ggcacaagtgagtttgttgatcgagataactagaaacagtgtgatgaaaatgaaggtccttgttttcttcgttgctacaattttggtagcatggcaatgccatgcgtacgatatgttccctctccgaatgaacactggctatggtgcccgtactccggaggtgaaatgcgcaagttggaggcttgctgtggaagcacacaacatctttggctttgagaccattcctgaagagtgcgttgaagcaacaaaggaatacatccatggcgaacaatatagatcagactccaaaacagttaaccaacaagcttacttttatgccagagacctcgaagtccaatcccaaagacacattttgtgttcagtatagatggcaccgtactctctaatattccata

SEQ ID NO: 58218 - DNA, 379 bp, Glycine max
gcacaagtttgttgagatagctagaagcaataagatgaaaatgaaagtgcttgttttgtttgttgctacagttttggtagcatatgaatgccatggctcagactaccagaagttccctctccaaatgaaaactgggtttggtgggcaatacagcaatgaggtggcatgtgccagttggaggcttggcgtggaagcaaacaacgtagtcaagtggcaaactgttcctgcagcttgcggagagtacatagctgactacgttctaggagaccaatatagatcagattccaaaacagttaaccaacaagcttatttctatgctaaatcgctcaaactcaccaacaaagatgtctttgtcttggacgttgacgacactactctc

SEQ ID NO: 58219 - DNA, 394 bp, Glycine max
ggcacaagtgagtttgttgatcgagataactagaaacagtgtgatgaaaatgaaggtccttgttttcttcgttgctacaattttggtagcatggcaatgccatgcgtacgatatgttccctctccgaatgaacactggctatggtgcccgtactccggaggtgaaatgcgcaagttggaggcttgctgtggaagcacacaacatctttggctttgagaccattcctgaagagtgcgttgaagcaacaaaggaatacatccatggcgaacaatatagatcagactccaaaacagttaaccaacaagcttacttttatgccagagacctcgaagtccatcccaaagacacaattgtgttcagtatagatggcaccgtactctctaatattccatac

SEQ ID NO: 58220 - DNA, 400 bp, Glycine max
ggcacaagtgagtttgttgatcgagataactagaaacagtgtgatgaaaatgaaggtccttgttttcttcgttgctacaattttggtagcatggcaatgccatgcgtacgatatgttccctctccgaatgaacactggctatggtgcccgtactccggaggtgaaatgcgcaagttggaggcttgctgtggaagcacacaacatcttcggctttgagaccattcctgaagagtgcgttgaagcaacaaaggaatacatccatggcgaacaatatagatcagactccaaaacagttaaccaacaagcttacttttatgccagagacctcgaagtccatcccaacgacacatttgtgttcagtatagatggcaccgtactctctaataatccatactacaaa

SEQ ID NO: 58221 - DNA, 393 bp, Glycine max
ggcacaagtgagtttgttgatcgagataactagaaacagtgtgatgaaaatgaaggtccttgttttcttcgttgctacaattttggtagcatggcaatgccatgcgtacgatatgttccctctccgaatgaacactggctatggtgcccgtactccggaggtgaaatgcgcaagttggaggcttgctgtggaagcacacaacatctttggctttgagaccattcctgaagagtgcgttgaagcaacaaaggaatacatccatggcgaacaatatagatcagactccaaaacagttaaccaacaagcttacttttatgccagagacctcgaagtccatcccaaggacacatttgtgttcagtatagattgcaccgtactctctaatattccata

SEQ ID NO: 58222 - DNA, 393 bp, Glycine max
ggcacaagtgagtttgttgatcgagataactagaaacagtgtgatgaaaatgaaggtccttgttttcttcgttgctacaattttggtagcatggcaatgccatgcgtacgatatgttccctctccgaatgaacactggctatggtgcccgtactccggaggtgaaatgcgcaagttggaggcttgctgtggaagcacacaacatctttggctttgagaccattcctgaagagtgcgttgaagcaacaaaggaatacatccatggcgaacaatatagatcagactccaaaacagttaaccaacaagcttacttttatgccagagacctcgaagtccatcccaaggacacatttgtgttcagtatagatggcaccgtactctctaatattccata

SEQ ID NO: 58223 - DNA, 394 bp, Glycine max
ggcatctcaagccttgatctagatatttcacttttcaactttcattgccataccttggtgagtagtgtggccttggtatttgcacaatgaggaagagttacacttttcaaagggtgcctctgctgcttcttctttgcttttgttttgccaattctgctgctgtaactgctaatgaagactctacagctggaactgaggtgaacattgatggcaagcctttacatacaaagccatttccaatagaggaaaagacacttccaataccgttgtttaagcctctaccaaaattggttccaattgttacacctataccaaatcctctgcctatcccagttttccaaaagcctataacaaagtggattccagataataagcctatacaaaatccaattcc

SEQ ID NO: 58224 - DNA, 399 bp, Glycine max
ggcacaagtgagtttgttgatcgagataactagaaacagtgtgatgaaaatgaaggtccttgttttcttcgttgctacaattttggtagcatggcaatgccatgcgtacgatatgttccctctccgaatgaacactggctatggtgcccgtactccggaggtgaaatgcgcaagttggaggcttgctgtggaagcacacaacatctttggctttaagaccattcctgaagagtgcgttgaagcaacaaaggaatacatccatggcgaacaatatagatcagactccaaaacagttaaccaacaagcttacttttatgccagagacctcgaagtccatcccaaggacacatttgtgttcagtatagatggcaccgtactctctaatattccatactacaa

SEQ ID NO: 58225 - DNA, 395 bp, Glycine max
ggcagttcaattccaatatattccattctctctgtgtatttccctacctctcccttcaagatgcagatcttcgtcaagaccctcaccggcaagaccatcacccttgaagtggaaagctctgacaccatcgacaacgtcaaggccaagatccaggacaaggaaggaatccccccggaccagcaacgtctcattttcgccggaaagcaacttgaggacggccgtacccttgctgactacaacattcagaaggagagtactcttcacctcgtcctccgtctccgtggtggcatgcagatcttcgttaagacactcaccggcaagaccataaccctagaagttgaaagctccgacaccatcgataacgtcaaggccaagacccaggacaaggagggtat

SEQ ID NO: 58226 - DNA, 400 bp, Glycine max
ggcacaagtgagtttgttgatcgagataactagaaacagtgtgatgaaaatgaaggtccttgttttcttcgttgctacaattttggtagcatggcaatgccatgcgtacgatatgttccctctccgaatgaacactggctatggtgcccgtactccggaggtgaaatgcgcaagttggaggcttgctgtggaagcacacaacatctttggctttgagaccattcctgaagagtgcgttgaagcaacaaaggaatacatccatggcgaacaatatagatcagactccaaaacagttaaccaacaagcttacttttatgccagagacctcgaagtccatcccaaaggacacattttgtgttcagtatagatggcaccgtactctctaatattccatactaca

SEQ ID NO: 58227 - DNA, 397 bp, Glycine max
gaaggtgcaagagtttgttgtgagctataagctagtttatcgtgaggagaatatgaagttgtttgttttctttgttgctgcagtagttttggtagcatggccatgccatggcgcaggctaccaaaggttccctctccgaatgaaaactggctatggtgagcgttcttcggaggtaaaatgcgcaagttttaggcttgctgtggaagcacacaacatccgagcctttaaaaccattcctgaagagtgcgttgaaccaacaaaggactacattaatggcgaacaatttagatcagactctaaaacagttaaccaacaagctttcttttatgctagtgaacgcgaagtctatcacaacgacatatttatattcggcatagataacaccgtactctctaat

SEQ ID NO: 58228 - DNA, 382 bp, Glycine max
ggcacaagtgagtttgttgatcgagataactagaaacagtgtgatgaaaatgaaggtccttgttttcttcgttgctacaattttggtagcatggcaatgccatgcgtacgatatgttccctctccgaatgaacactggctatggtgcccgtactccggaggtgaaatgcgcaagttggaggcttgctgtggaagcacacaacatctttggctttgagaccattcctgaagagtgcgttgaagcaacaaaggaatacatccatggcgaacaatatagatcagactccaaaacagttaaccaacaagcttacttttatgccagagacctcgaagtccatcccaaggacacatttgtgttcagtatagattgcaccgtactctct

SEQ ID NO: 58229 - DNA, 329 bp, Glycine max
aagtacacaacactgggggacgtacttcctctacatcccacacggaaacccaagctcagtaagagtaatcgtgtttcgatcttcacttcctcaatctctctctcttccactacaatcatcagtactgctcacattggcatctgtcgcatcaccaacggaacagaacccatgacggccgtcatcattatcaatatcctcagtcacactcgtaacgaagtgaccgtcccttcctccacgttgaacctcccagtcaagtatctgcagcgatttcacatcaacaccaacggcatcatctacgacatcacgttcatcgccattaaactcctcac

SEQ ID NO: 58230 - DNA, 389 bp, Glycine max
ggcacaagtgagtttgttgatcgagataactagaaacagtgtgatgaaaatgaaggtccttgttttcttcgttgctacaattttggtagcatggcaatgccatgcgtacgatatgttccctctccgaatgaacactggctatggtgcccgtactccggaggtgaaatgcgcaagttggaggcttgctgtggaagcacacaacatctttggctttgagaccattcctgaagagtgcgttgaagcaacaaaggaatacatccatggcgaacaatatagatcagactccaaaacagttaaccaacaagcttacttttatgccagagacctcgaagtccatcccaaggacacatttgtgttcagtatagatggcaccgtactctccaatattc

SEQ ID NO: 58231 - DNA, 378 bp, Glycine max
ggcacaagtgagtttgttgatcgagataactagaaacagtgtgatgaaaatgaaggtccttgttttcttcgttgctacaattttggtagcatggcaatgccatgcgtacgatatgttccctctccgaatgaacactggctatggtgcccgtactccggaggtgaaatgcgcaagttggaggcttgctgtggaagcacacaacatctttggctttgagaccattcctgaagagtgcgttgaagcaacaaaggaatacatccatggcgaacaatatagatcagactccaaaacagttaaccaacaagcctacttttatgccaaagagctccaagtccatctcaaggacacatttgtgtccagtatacatggaaccgtact

SEQ ID NO: 58232 - DNA, 330 bp, Glycine max
gagtgcacaagtgagtttgttgatcgagataactagaaacagtgtgatgaaaatgaaggtccttgttttcttcgttgctacaattttggtagcatggcaatgccatgcgtacgatatgttccctctccgaatgaacactggctatggtgcccgtactccggaggtgaaatgcgcaagttggaggcttgctgtggaagcacacaacatctttggctttgagaccattcctgaagagtgcgttgaagcaacaaaggaatacatccatggcgaacaatatagatcagactccaaaacagttaaccaacaagcttacttttatgccagagacct

SEQ ID NO: 58233 - DNA, 374 bp, Glycine max
ggcacaagtgagtttgttgatcgagataactagaaacagtgtgatgaaaatgaaggtccttgttttcttcgttgctacaattttggtagcatggcaatgccatgcgtacgatatgttccctctccgaatgaacactggctatggtgcccgtactccggaggtgaaatgcgcaagttggaggcttgctgtggaagcacacaacatctttggctttgagaccattcctgaagagtgcgttgaaacaacaaaggaatacatccatggcgaacaatatagatcagactccaaaacagttaaccaacaagcttacttttatgccaaagacctcgaagtccatcccaaaggcacatttgtgttcagtatacatggcaccg

SEQ ID NO: 58234 - DNA, 386 bp, Glycine max
gaaggtgcaagagtttgttgtgagctataagctagtttatcgtgaggagaatatgaagttgtttgttttccttgttgctgcagtagttttggtagcatggccatgccatggcgcaggctaccaaaggttccctctccgaatgaaaactggctatggtgagcgttcttcggaggtaaaatgcgcaagttttaggcttgctgtggaagcacacaacatccgagcctttaaaaccattcctgaagagtgcgttgaaccaacaaaggactacattaatggcgaacaatttagatcagactctaaaacagttaaccaacaagctttcttttaggctagtgaacgcgaagtccatcacaacgacatatttatattcggcatagataacaccg

SEQ ID NO: 58235 - DNA, 397 bp, Glycine max
ggcacaagtgagtttgttgatcgagataactagaaacagtgtgatgaaaatgaaggtccttgttttcttcgttgctacaattttggtagcatggcaatgccatgcgtacgatatgttccctctccgaatgaacactggctatggtgcccgtactccggaggtgaaatgcgcaagttggaggcttgctgtggaagcacacaacatctttggctttgagaccattcctgaagagtgcgttgaagcaacaaaggaatacatccatggcgaacaatatagatcagactccaaaacagttaaccaacaagcttacttttatgccagagaccccgaagtccatcccaaggacacatttgtgttcagtatagatggcaccgtactccctaatattccatactac

SEQ ID NO: 58236 - DNA, 206 bp, Glycine max
tgttgcagcgagaaaatgacagatgggggcacacgtgacgtctgtctgatgatgattccgagtatgagtgtgattaatctcacagtcgatgatgtcttccttgcgagaaatttggtagcacgggaatgtcatgcatatgatatattcgctctccaagatgaaacaggtaatgatgcctgtactccaggaagtgaaatacgaaagtt

SEQ ID NO: 58237 - DNA, 404 bp, Glycine max
ggcacaagtgagtttgttgatcgagataactagaaacagtgtgatggaaatgaaggtccttgttttcttcgttgctacaattttggtagcatggcaatgccatgcgtacgatatgttccctctccgaatgaacactggctatggtgcccgtactccggaggtgaaatgcgcaagttggaggcttgctgtggaagcacacaacatctttggctttgagaccattcctgaagagtgcgttgaagcaacaaaggaatacatccatggcgaacaatatagatcagactccaaaacagttaaccaacaagcttacttttatgccagagaactcgaaatccatcccaaagacacatttgtgttcagtatacatggcaccgtactctctaatattccatactacacaaaac

SEQ ID NO: 58238 - DNA, 401 bp, Glycine max
ggcacaagtttgttgagatagctagaagcaataagatgaaaatgaaagtgcttgttttgtttgttgctacagttttggtagcatatgaatgccatggctcagactaccagaagttccctctccaaatgaaaactgggtttggtgggcaatacagcaatgaggtggcatgtgccagttggaggcttggcgtggaagcaaacaacgtagtcaagtggcaaactgttcctgcagcctgcggagagtacatagctgactacgttctaggagaccaatatagatcagattccaaaacagttaaccaacaagcttatttctatgctaaatccctcaaactcaccaacaaagatgtctttgtcttggacgttgacgacactactctctctaatctccagtattttgct

SEQ ID NO: 58239 - DNA, 395 bp, Glycine max
gaaggtgcaagagtttgttgtgagctataagctagtttatcgtgaggagaatatgaagttgtttgttttctttgttgctgcagtagttttggtagcatggccatgccatggcgcaggctaccaaaggttccctctccgaatgaaaactggctatggtgagcgttcttcggaggtaaaatgcgcaagttttaggcttgctgtggaagcacacaacatccgagcctttaaaaccattcctgaagagtgcgttgaaccaacaaaggactacattaatggcgaacaatttagatcagactctaaaacagttaaccaacaagctttcttttatgctagtgaacgccaagtccatcacaacgacatatttatattcggcatagataacaccgtactctcta

SEQ ID NO: 58240 - DNA, 260 bp, Glycine max
ggaacctttgcattctattcattcaagattcagcaagtgcgttttggaagcagagaccgaaatacttcgagatggcccgtacaaagcaaactgctcgtaagtcaactggaggaaaagctcccaggaagcagcttgcaaccaaggctgcacgtaagtctgcaccaacaactggtggtgtgaagaagcctcatcgttatcgccctggaactgttgctcttcgtgagattatgaaataccagaagagcactgagctcctaatc

SEQ ID NO: 58241 - DNA, 295 bp, Glycine max
gacgattactaccaagtgaaaaagcaattaactaaccatatataccgtgtaagacattgaaaaaaaaattgttgtgtaaaaagaaatggctaggtggtgcaccttggtggttcttgcccttgtcgtggttgcaattgccagaaacatgcccaatgacgcaggtttggaggaccagaagaacttcctcgggtatgggttctctggagttggaaacagggggtctctttttgggagagtggtttcggttttagaggaaaataggggtggcctctctgggctctgtatttttgggaga

SEQ ID NO: 58242 - DNA, 350 bp, Glycine max
ggcacaagtgagtttgttgatcgagataactagaaacagtgtgatgaaaatgaaggtccttgttttcttcgttgctacaattttggtagcatggcaatgccatgcgtacgatatgttccctctccgaatgaacactggctatggtgcccgtactccggaggtgaaatgcgcaagttggaggcttgctgtggaagcacacaacatctttggctttgagaccattcctgaagagtgcgttgaagcaataaaggaatacatccatggcgaacaatatatatcagactccaaaacagttaaccaataagcttaactttaggcaagagacctcgatgtccatcccaaggacacat

SEQ ID NO: 58243 - DNA, 140 bp, Glycine max
aaaaggggacacttcaaaatcctcctgggaaaccctaatttaatctattccctccctttcttttgtgttctaagcagctagaaccaatggagaggaaaagaagccatgcctctttcacaatgtttgcaatgcttgttgga

SEQ ID NO: 58244 - DNA, 294 bp, Glycine max
ggcacaagtgagtttgttgatcgagataactagaaacagtgtgatgaaaatgaaggtccttgttttcttcgttgctacaattttggtagcatggcaatgccatgcgtacgatatgttccctctccgaatgaacactggctatggtgcccgtactccggaggtgaaatgcgcaagttggaggcttgctgtggaagcacacaacatctttggctttgagaccattcctgaagagtgcgttgaagcaacaaaggaatacatccatggcgaacaatatagatcagactccaaaacagt

SEQ ID NO: 58245 - DNA, 369 bp, Glycine max
  unsure (1)..(369): unsure at all n locations
gacttctcttcacacctttgttcactcttcttctcttgcggctagggttttagcgcagcttcttctagatttaaggaagatgggtaaggaaaaggttcacatcagtattgtggtcattggccatgtcgactctgggaaatccactaccactggtcacctgatttacaagcttggaggcattgacaagcgtgttattgagaggtttgagaaggaagctgctgagatgaacaagaggtctttcaagtatgcctgggtgctggacaaacttaaggctgagcgtgaaagaggaatcaccattgatattgctttgtggaagtttgaaacaacanagttatattgcacagttattgatgcgcctggacataggga

SEQ ID NO: 58246 - DNA, 327 bp, Glycine max
agggggacaagttaatttgttgatcgagataactagaaacagtgtgatgaaaatgaaaggccttgttttcttcgttgccaaaattttggtagcatggcaatgccaatgcgtacgatatgttccctctccgaatgaacactggctatggtgcccgtactccggaggtgaaatgcgcaagttggaagcttgctgtggaagcacacaacatctttggctttgagaccattcctgaagagtgcgttgaagcaacaaaggaatacatccatggcgaacaatatagatcagactccaaaacagttaaccaacaagcttacttttatgccagag

SEQ ID NO: 58247 - DNA, 375 bp, Glycine max
ggttctagtgtgtgattgtttgttgttgtaactcgttcttcttcttttgttgttctgtgtttgtgtttgttttttctctcacctgaaaatgtcttgctgcggtggtaactgtggttgcggaagctcctgcgagtgcggcaacggctgcagaggctgcaagatgtacccagacttgagctacactgagtcaaccatcaccgagaccttggtcatgggagtggcacctgttaaggctcaatttgagggtgctgaaatgggtgtgcccgctgagaacgatggctgcaaatgtggatcaaactgctcctgcaacccctgcacttgcaagtgaagtgttgggagagcaaccttcaaccagagatagcccttaattaggaa

SEQ ID NO: 58248 - DNA, 363 bp, Glycine max
ggcacaagtgagtttgttgatcgagataactagaaacagtgtgatgaaaatgaaggtccttgttttcttcgttgctacaattttggtagcatggcaatgccatgcgtacgatatgttccctctccgaatgaacactggctatggtgcccgtactccggaggtgaaatgcgcaagttggaggcttgctgtggaagcacacaacatctttggctttgagaccattcctgaagagtgcgttgaagcaacaaaggaatacatccatggcgaacaatatagatcagactccaaaacagttaaccaacaggcttacttttatgccagagacctcgaagtccatcccaaggacacatttgtgttcagtat

SEQ ID NO: 58249 - DNA, 391 bp, Glycine max
ggcacaagtgagtttgttgatcgagataactagaaacagtgtgatgaaaatgaaggtccttgttttcttcgttgctacaattttggtagcatggcaatgccatgcgtacgatatgttccctctccgaatgaacactggctatggtgcccgtactccggaggtgaaatgcgcaagttggaggcttgctgtggaagcacacaacatctttggctttgagaccattcctgaagagtgcgttgaagcaacaaaggaatacatccatggcgaacaatatagatcagactccaaaacagttaaccaacaagcttacttttatgccagagacctccaagtccatcccaaggacacatttgtgttcagtatagatggcaccgtactctctaatattcca

SEQ ID NO: 58250 - DNA, 343 bp, Glycine max
aggggaagcacaagtttgtttagaaaaccaaaaacaataagatgaaaatgaaagtgcctgttttgtttgttgctacagttttggtagcatatgaatgccatggctcagactaccagaagttccctctccaaatgaaaactgggtttggtgggcaatacagcaatgaggtggcatgtgccagttggaggcttggcgtggaagcaaacaacgtagtcaagtggcaaactgttcctgcagcttgcggagagtacatagctgactacgttctacgagaccaatatagatcagattccaaaacagttaaccaacaagcttatttctatgctaaatccctcaaactcac

SEQ ID NO: 58251 - DNA, 381 bp, Glycine max
ggcacaagtgagtttgttgatcgagataactagaaacagtgtgatgaaaatgaaggtccttgttttcttcgttgctacaattttggtagcatggcaatgccatgcgtacgacatgttccctctccgaatgaacactggctatggtgcccgtactccggaggtgaaatgcgcaagttggaggcttgctgtggaagcacacaacatctttggctttgagaccattcctgaagagtgcgttgaagcaacaaaggaatacatccatggcgaacaatatagatcagactccaaaacagttaaccaacaagcttacttttatgccagagacctcgaagtccatcccaaggacacatttgtgttcagtatagatggcaccgtactctc

SEQ ID NO: 58252 - DNA, 393 bp, Glycine max
gaaggtgcaagagtttgttgtgagctataagctagtttatcgtgaggagaatatgaagttgtttgttttctttgttgctgcagtagttttggtagcatggccatgccatggcgcaggctaccaaaggttccctctccgaatgaaaactggctatggtgagcgttcttcggaggtaaaatgcgcaagttttaggcttgctgtggaagcacacaacatccgagcctttaaaaccattcctgaagagtgcgttgaaccaacaaaggactacattaatggcgaacaatttagatcagactctaaaacagttaaccaacaagctttcttttatgctagtgaacgcgaagtccatcacaacgacatatttatattcggcatagataacaccgtactctc

SEQ ID NO: 58253 - DNA, 311 bp, Glycine max
ggcacaagtgagtttgttgatcgagataactagaaacagtgtgatgaaaatgaaggtccttgttttcttcgttgctacaattttggtagcatggcaatgccatgcgtacgatatgttccctctccgaatgaacactggctatggtgcccgtactccggaggtgaaatgcgcaagttggaggcttgctgtggaagcacacaacatctttggctttgagaccattcctgaagagtgcgttgaagcaacaaaggaatacatccatggcgaacaatatagatcagactccaaaacagttaaccaacaagcttact

SEQ ID NO: 58254 - DNA, 387 bp, Glycine max
ggcacaagtttgttgagatagctagaagcaataagatgaaaatgaaagtgcttgttttgtttgttgctacagttttggtagcatatgaatgccatggctcagactaccagaagttccctctccaaatgaaaactgggtttggtgggcaatacagcaatgaggtggcatgtgccagttggaggcttggcgtggaagcaaacaacgtagtcaagtggcaaactgttcctgcagcttgcggagagtacatagctgactacgttctaggagaccaatatagatcagattccaaaacagttaaccaacaagcttatttctatgctaaatccctcaaactcaccaacaaagatgtccttgtcttggacgttgacgacactactctctctaatc

SEQ ID NO: 58255 - DNA, 298 bp, Glycine max
gaaggtgcaagagtttgttgtgagctagaagctagtttatcgtgaggagaatatgaagttgtttgttttctttgttgctgcagtagttttggtagcatggccatgccatggcacaggctaccaaaggttccctctccgagtgaaaactggctatggtgagcgttcttcggaggtaaaatgcgcaagttttaggcttgctgtggaagcacacaacatccgagcctttaaaaccattcctgaagagtgcgttgaaccaacaaaggactacattaatggcgaacaattttagatcagactc

SEQ ID NO: 58256 - DNA, 380 bp, Glycine max
ggcacaagtgagtttgttgatcgagataactagaaacagtgtgatgaaaatgaaggtccttgttttcttcgttgctacaattttggtagcatggcaatgccatgcgtacgatatgttccctctccgaatgaacactggctatggtgcccgtactccggaggtgaaatgcgcaagttggaggcttgctgtggaagcacacaacatctttggctttgagaccattcctgaagagtgcgttgaagcaacaaaggaatacatccatggcgaacaatatagatcagactccaaaacagttaaccaacaagcttacttttatggcagagaactcgaggtccaatccaaggacacatctgtgtccagtatagatggcaccgtactct

SEQ ID NO: 58257 - DNA, 425 bp, Glycine max
  unsure (1)..(425): unsure at all n locations
ccggctcgacccacgcgtacgacgcgagaagagacagaagggggcacaagtttgttgagatagctagaagcaataagatgaaaatgaaagtgcttgttttgtttgttgctacagttttggtagcatatgaatgccatggctcagactaccagaagttccctctccaaatgaaaactgggtttggtgggcaatacagcaatgaggtggcatgtgccagttggaggcttggcgtggaagcaaacaacgtagtcaagtggcaaactgttcctgcagcttgcggagagtacatagctgactacgttctaggagaccaatatagatcagattccaaaacagttaaccaacaagcttatttctatgctaaatccctcaaactcaacaacanagatgtctttgtcttggacgttgacgacactactctctct

SEQ ID NO: 58258 - DNA, 394 bp, Glycine max
agtgcacaagtgagtttgttgatcgagataactagaaacagtgtgatgaaaatgaaggtccttgttttcttcgttgctacaattttggtagcatggcaatgccatgcgtacgatatgttccctctccgaatgaacactggctatggtgcccgtactccggaggtgaaatgcgcaagttggaggcttgctgtggaagcacacaacatctttggctttgagaccattcctgaagagtgcgttgaagcaacaaaggaatacatccatggcgaacaatatagatcagactccaaaacagttaaccaacaagcttacttttatgccagagacctcgaagtccatcccaaggaaacatttgtgttcagtaaagatggcaccgtactctctaatattccat

SEQ ID NO: 58259 - DNA, 377 bp, Glycine max
ggcacaagtgagtttgttgatcgagataactagaaacagtgtgatgaaaatgaaggtccttgttttcttcgttgctacaattttggtagcatggcaatgccatgcgtacgatatgttccctctccgaatgaacactggctatggtgcccgtactccggaggtgaaatgcgcaagttggaggcttgctgtggaagcacacaacatctttggctttgagaccattcctgaagagtgcgttgaagcaacaaaggaatacatccatggcgaacaatatagatcagactccaaaacagttaaccaacaagcttacttttatgccagagacctcgaagtcaatcccaaggacacatttgtgttcagtatagatggcaccgtac

SEQ ID NO: 58260 - DNA, 375 bp, Glycine max
gcacaagtgagtttgttgatcgagataactagaaacagtgtgatgaaaatgaaggtccttgttttcttcgttgctacaattttggtagcatggcaatgccatgcgtacgatatgttccctctccgaatgaacactggctatggtgcccgtactccggaggtgaaatgcgcaagttggaggcttgctgtggaagcacacaacatctttggctttgagaccattcctgaagagtgcgttgaagcaacaaaggaatacatccatggcgaacaatatagatcagactccaaaacagttaaccaacaagcttacttttatgccagagacctcgaagtccatcccaaggacacatttgtgttcagtatagatggcaccgta

SEQ ID NO: 58261 - DNA, 380 bp, Glycine max
ggcacaagtgagtttgttgatcgagataactagaaacagtgtgatgaaaatgaaggtccttgttttcttcgttgctacaattttggtagcatggcaatgccatgcgtacgatatgttccctctccgaatgaacactggctatggtgcccgtactccggaggtgaaatgcgcaagttggaggcttgctgtggaagcacacaacatctttggctttgagaccattcctgaagagtgcgttgaagcaacaaaggaatacatccatggcgaacaatatagatcagactccaaaacagttaaccaacaagcttacttttatgccagagaactcgaagtcaatcccaaggacacatttgtgttcagtatagatggcaccgtactct

SEQ ID NO: 58262 - DNA, 378 bp, Glycine max
gggcacaagtgagtttgttgatcgagataactagaaacagtgtgatgaaaatgaaggtccttgttttcttcgttgctacaattttggtagcatggcaatgccatgcgtacgatatgttccctctccgaatgaacactggctatggtgcccgtactccggaggtgaaatgcgcaagttggaggcttgctgtggaagcacacaacatctttggctttgagaccattcctgaagagtgcgttgaagcaacaaaggaatacatccatggcgaacaatatagatcagactccaaaacagttaaccaacaagcttacttttatgccagagacctcgaagtccatcccaaggacacatttgtgttcagtatagatggcaccgtac

SEQ ID NO: 58263 - DNA, 388 bp, Glycine max
gaaggtgcaagagtttgttgtgagctataagctagtttatcgtgaggagaatatgaagttgtttgttttctttgttgctgcagtagttttggtagcatggccatgccatggcgcaggctaccaaaggttccctctccgaatgaaaactggctatggtgagcgttcttcggaggtaaaatgcgcaagttttaggcttgctgtggaagcacacaacatccgagcctttaaaaccattcctgaagagtgcgttgaaccaacaaaggactacattaatggcgaacaatttagatcagactctaaaacagttaaccaacaagctttcttttatgctagtgaacgcgaagtccatcacaacgacatatttatattcggcatacataacaccgta

SEQ ID NO: 58264 - DNA, 349 bp, Glycine max
agtcgggtgccaaaacaacacaaaggggggcacaagttcatttgttgatcaaaatcgctaccaacggtgggatgagaatgtaagtccttgtattcttcgctgctacggatttgtgatcatggtccagacattcgtagaatatgatgactctctcaataaaggatggcaatcgtgcccgtaatctgtgatgtgatatactgcagtttggtgcttgccatgccatcacattgcatcatttcctttgggaacagtcatgaagattgcgtttgtccacctcctgaatgtatccatggctaacattataaatgaatccacagactgttaacttgaagccatacttttattccaa

SEQ ID NO: 58265 - DNA, 390 bp, Glycine max
ggcacaagtgagtttgttgatcgagataactagaaacagtgtgatgaaaatgaaggtccttgttttcttcgttgctacaattttggtagcatggcaatgccatgcgtacgatatgttccctctccgaatgaacactggctatggtgcccgtactccggaggtgaaatgcgcaagttggaggcttgctgtggaagcacacaacatctttggctttgagaccattcctgaagagtgcgttgaagcaacaaaggaatacatccatggcgaacaatatagatcagactccaaaacagttaaccaacaagcttacttttatgccagagacctcgaagtccatcccaaggacacattttgtgtcagtttagatggcaccgtactctccaatattcc

SEQ ID NO: 58266 - DNA, 294 bp, Glycine max
tgggacacacagtctcttcttcttgcaattccttcctcgttatggagtcccgagtgctgtcactcgccgtgaacttgtcctccctggctcaggtccggaaggtgccgcgggaagacgtctcgatcgtctccctcgctctccgtgaatgacgtgggctccgtctcggacggcagaaacatgatttgggggaagcagcttcactcggatctctgatcaccagtgctgaagagtgatgctgtcctcctccggcaatgctactccgcagcctcttcgcctagcacgaaggtagtgatt

SEQ ID NO: 58267 - DNA, 394 bp, Glycine max
gaaggtgcaagagtttgttgtgagctataagctagtttatcgtgaggagaatatgaagttgtttgttttctttgttgctgcagtagttttggtagcatggccatgccatggcgcaggctaccaaaggttccctctccgaatgaaaactggctatggtgagcgttcttcggaggtaaaatgcgcaagttttaggcttgctgtggaagcacacaacatccgagcctttaaaaccattcctgaagagtgcgttgaaccaacacaggactacattaatggcgaacaatttagatcagactctaaaacagttaaccaacaagctttcttttatgccagttgaacccaagtccaaccacaacacatatttataattcggcatagataacaccgtactctc

SEQ ID NO: 58268 - DNA, 335 bp, Glycine max
gaaggtgcaagagtttgttgtgagctataagctagtttatcgtgaggagaatatgaagttgtttgttttctttgttgctgcagtagttttggtagcatggccatgccatggcgcaggctaccaaaggttccctctccgaatgaaaactggctatggtgagcgttcttcggaggtaaaatgcgcaagttttaggcttgctgtggaagcacacaacatccgagcctttaaaaccattcctgaagagtgcgttgaaccaacaaaggactacattaatggcgaacaatttagatcagactctaaaacagttaaccaacaagctttcttttatgctagtg

SEQ ID NO: 58269 - DNA, 398 bp, Glycine max
gcacaagtgagtttgttgatcgagataactagaaacagtgtgatgaaaatgaaggtccttgttttcttcgttgctacaattttggtagcatggcaatgccatgcgtacgatatgttccctctccgaatgaacactggctatggtgcccgtactccggaggtgaaatgcgcaagttggaggcttgctgtggaagcacacaacatctttggctttgagaccattcctgaagagtgcgttgaagcaacaaaggaatacatccatggcgaacaatatagatcagactccaaaacagttaaccaacaagcttacttttatgccagagacctcgaagtccatcccaaagacacatttgtgttcagtatagatggcaccgtaccctctaatattccatactacaa

SEQ ID NO: 58270 - DNA, 379 bp, Glycine max
ggcacaagtgagtttgttgatcgagataactagaaacagtgtgatgaaaatgaaggtccttgttttcttcgttgctacaattttggtagcatggcaatgccatgcgtacgatatgttccctctccgaatgaacactggctatggtgcccgtactccggaggtgaaatgcgcaagttggaggcttgctgtggaagcacacaacatctttggctttgagaccattcctgaagagtgcgttgaagcaacaaaggaatacatccatggcgaacaatatagatcagactccaaaacagttaaccaacaagcttacttttatgccagagaactcgaagtccatcccaaggacacatttgtgttcagtatagatggcaccgtactc

SEQ ID NO: 58271 - DNA, 379 bp, Glycine max
  unsure (1)..(379): unsure at all n locations
ggtgcacaagtgagtttgttgatcgagataactagaaacagtgtgatgaaaatgaaggtccttgttttcttcgttgctacaattttggtagcatggcaatgccatgcgtacgatatgttccctctccgaatgaacactggctatggtgcccgtactccggaggtgaaatgcgcaagttggaggcttgctgtggaagcacacaacatctttggctttgagaccattcctgaagagtgcgttgaagcaacanaggaatacatccatggcgaacaatatagatcagactccaaaacagttaaccaacaagcttacttttaatgcagagacctcgaagtcaatcccagggacacatttgtgttcagtatagatggcaccgtac

SEQ ID NO: 58272 - DNA, 351 bp, Glycine max
ggcacaagtgagtttgttgatcgagataactagaaacagtgtgatgaaaatgaaggtccttgttttcttcgttgctacaattttggtagcatggcaatgccatgcgtacgatatgttccctctccgaatgaacactggctatggtgcccgtactccggaggtgaaatgcgcaagttggaggcttgctgtggaagcacacaacatctttggctttgagaccattcctgaagagtgcgttgaagcaacaaaggaatacatccatggcgaacaatatagatcagactccaaaacagttaaccaacaagcttacttttatgccagagacctcgaagtccatcccaaagacacatt

SEQ ID NO: 58273 - DNA, 384 bp, Glycine max
  unsure (1)..(384): unsure at all n locations
ggcgaaacagagagtgatttcagtgagtgatcggtgttcacttgatctcatcataatcgtcagcgtcaattgaagaagatgccgatcagaaacatcgccgtcggaaggcctgaagaggcgactcaccccgacacgttgaaggcggctttggctgagttcatctcaaccttcatcttcgtgttcgccggctcaggctccggcatcgcctacaacaagctcaccgacaacggcgctgccacccctgccggcctcatctccgcctccatcgcccatgcattcgccctcttcgtcgccgtctccgtcggcgccaacatctccggcggccacgtcaaccccgccgtcaccttcggcgccttcgtcngcggcaacatcaacttccctcgc

SEQ ID NO: 58274 - DNA, 226 bp, Glycine max
cgggaaagtgcattaatttgttgtgagctatacactattttaacgttaagagaccatgaattcgtctgtgctacatgttgcgtgcacatagttttggtatcattgccatacgatggctcacgctatgaacagttcccactctgaatgtacactggctgtggtatgcgtacgttggaggcatgctgtgcaagtttacagcatccttggctttgacaccatacctgaa

SEQ ID NO: 58275 - DNA, 325 bp, Glycine max
gacaagtgagtttgttgatcgagataactagaaacagtgtgatgaaaatgaaggtccttgttttcttcgttgctacaattttggtagcatggcaatgccatgcgtacgatatgttccctctccgaatgaacactggctatggtgcccgtactccggaggtgaaatgcgcaagttggaggcttgctgtggaagcacacaacatctttggctttgagaccattcctgaagagtgcgttgaagcaacaaaggaatacatccatggcgaacaatatagatcagactccaaaacagttaaccaacaagcttacttttatgcaagagacct

SEQ ID NO: 58276 - DNA, 293 bp, Glycine max
tgggtgcacaagtgagtttgttgatcgagataactagaaacagtgtgatgaaaatgaaggtccttgttttcttcgttgctacaattttggtagcatggcaatgccatgcgtacgatatgttccctctccgaatgaacactggctatggtgcccgtactccggaagtgaaatgcgcaagttggaggcttgctgtggaagcacacaacatctttggctttgagaccattcctgaagagtgcgttgaaccaacaaacgaatacatccatggccaacaatatagattagactccaaa

SEQ ID NO: 58277 - DNA, 70 bp, Glycine max
gaccctcatattttcgcccatttcacatactagaacagattgtgtttcttgcaaagaccattctatcctc

SEQ ID NO: 58278 - DNA, 272 bp, Glycine max
ggcacaagtttgttgagatagctagatgcaataagatgaaaatgaaagtgcttgttttgttgtcgctacagttctggtagcatatgcatgccatggctcagagtagcagaatttccctcgccagatgaacactgggtttggtcagcaatgcaccaatgacgtggcatgtgccagttcgacgcgtggcttttacgcagccagcgtcgttgagtggcggaacgttcatgttgcttgcgtagaattgctctctgaccaggtacaatgagactgat

SEQ ID NO: 58279 - DNA, 312 bp, Glycine max
ggcagttcaattccaatatattccattctctctgtgtatttccctacctctcccttcaagatgcagatcttcgtcaagaccctcaccggcaagaccatcacccttgaggtggaaagctctgacaccatcgacaacgtcaaggccaagatccaggacaaggaaggaatccccccggaccagcaacgtctcattttcgccggaaagcaacttgaggacggccgtacccttgctgactacaacattcagaaggagagtactcttcacctcgtcctccgtctccgtggtggcatgcagatcttcgttaagacactc

SEQ ID NO: 58280 - DNA, 375 bp, Glycine max
ggcacaagtgagtttgttgatcgagataactagaaacagtgtgatgaaaatgaaggtccttgttttcttcgttgctacaattttggtagcatggcaatgccatgcgtacgatatgttccctctccgaatgaacactggctatggtgcccgtactccggaggtgaaatgcgcaagttggaggcttgctgtggaagcacacaacatctttggctttgagaccattcctgaagagtgcgttgaagcaacaaaggaatacatccatggcgaacaatatagatcagactccaaaacagttaaccaacaagcttacttttatgccagagacctcgaagtccatcccaaggacacatttgtgttcagtatagatggcaccgt

SEQ ID NO: 58281 - DNA, 93 bp, Glycine max
acagtagggggcactgattagtttgttgatcgacatttctagacacactgtgatgataattctgcgtcttgtcttcgtcgatgcgcaaatttt

SEQ ID NO: 58282 - DNA, 168 bp, Glycine max
tgggacaacaacaataacaatggctgcctcactacaagctgcatctagcttcatgcaacccatcaaggttggcatagtctctcgcatcctcaaatctacacaactcatttctaacgcttttggcttggaacctgttgcattcattttcacttgctccctctagcctga

SEQ ID NO: 58283 - DNA, 325 bp, Glycine max
gaaggtgcaagagtttgttgtgagctataagctagtttatcgtgaggagaatatgaagttgtttgttttctttgttgctgcagtagttttggtagcatggccatgccatggcgcaggctaccaaaggttccctctccgaatgaaaactggctatggtgagcgttcttcggaggtaaaatgcgcaagttttaggcttgctgtggaagcacacaacatccgagcctttaaaaccattcctgaagagtgcgttgaaccaacacaggactacattaatggcgaacaatttagattagactctaaaacagttaaccaacaagccttcttt

SEQ ID NO: 58284 - DNA, 233 bp, Glycine max
aagacgacagaagggggatgtgagagaaaaaggaggaacgcagaccgaggcgtttccagttcgaaaggtgaggaggaagtgtacgagttgtcgtcgttgcaactaatttaggtgcatgactggttgggacctacaattcgttcgatctccggtagctctgtgtgaacggtctctatacgcgggacgtgcactgcacccgttggaagcttgctctcggaccaactgcatctttg

SEQ ID NO: 58285 - DNA, 218 bp, Glycine max
gatcgatgccaatggagtctaactcggcatccgctctttacttccttttaagcctatcgtgcatcactttgcttctttctgcgttacgtgctcaagctcaatctcatgctccagctcccactttcaagtactgtgaaaagaatgcagactatgctgtgaacgtgagtggagtggaaatattgcttgacctcgtggagagaggagtgccattcaacttt

SEQ ID NO: 58286 - DNA, 374 bp, Glycine max
atccatcttgctggattctccacccattatgcaagataaaaactaaaatgggtaattataaagttctaatttttttttttccaatcttaccccagacaaaagttctatcgtcaatagtgcacaacctctttttttgtctgccggtgacatattatattgctctaggccggtccactaaccgtgccattcgtgtgccaaaatatatataaaacatttttctatgtctttgattatcgctagaaaaatattcttaatgagtaaatacgaatcaaaaggctttttgttggacttgacaacaggacagatccagtggacaactttccttagcactcattttctccttttgccttaaaaatccattctttggggtccct

SEQ ID NO: 58287 - DNA, 330 bp, Glycine max
ggcacaagtgagtttgttgatcgagataactagaaacagtgtgatgaaaatgaaggtccttgttttcttcgttgctacaattttggtagcatggcaatgctatgcgtacgatatgttccctctccgaatgaacactggctatggtgcccgtactccggaggtgaaatgcgcaagttggaggcttgctgtggaagcacacaacatctttggctttgagaccattcctgaagagtgcgttgaagcaacaaaggaatacatccatgggcgaacaatatagatcagactccaaaacagttaaccaacaagccttactttatgccagagacctcg

SEQ ID NO: 58288 - DNA, 364 bp, Glycine max
ggcacaagtgagtttgttgatcgagataactagaaacagtgtgatgaaaatgaaggtccttgttttcttcgttgctacaattttggtagcatggcaatgccatgcgtacgatatgttccctctccgaatgaacactggctatggtgcccgtactccggaggtgaaatgcgcaagttggaggcttgctgtggaagcacacaacatctttggctttgagaccattcctgaagagtgcgttgaagcaacaaaggaatacatccatggcgaacaatatagatcagactccaaaacagttaaccaacaagcttacttttatgccagagacctcgaagtccaccccaaggacacatttgtgttcagtata

SEQ ID NO: 58289 - DNA, 314 bp, Glycine max
ggcacaagtgagtttgttgattgagaaaactagaaacagttttatgaaaatgaaagtccttgttttcttcgttgccacaattttggtagcatggcaatgccatgcgtacgatatgttccctccccgaatgaacactggctatggtgcccgtactccggaaggtaaattcccaagttggacgcttgctgtggaagcacacaacatccttggctttgagaccattcctgaagagtgcgttgaagcaacacaggaatacatccatggcgaacaatatagatcagactccacaacagttaaccaacaagcttactttt

SEQ ID NO: 58290 - DNA, 233 bp, Glycine max
ggcacaagtgagtttgttgatcgagataactagaaacagtgtgatgaaaatgaaggtccttgttttcttcgttgctacaattttggtagcatggcaatgccatgcgtacgatacgttccctctccgaatgaacactggctatggtgcccgtactccggaggtgaaacgcgcaagttggaggcttgctctggaagcacagaacatctttggccttgagcacattcctgaacagt

SEQ ID NO: 58291 - DNA, 87 bp, Glycine max
ggggaggaagaataattgtgaggcgagggtaaggtcgcgttgtgtttcatccagctcttccacatgtcctcttccttctcggtcccg

SEQ ID NO: 58292 - DNA, 375 bp, Glycine max
ggatttcaaaatcacaaggataacctttcattgtcgcacctcatcgcaacctgagcacatctcacatcatcccaacctgatcacatctcacatcatcgtcacacattgttgtagcctaagcattgtctcaaatcgccgcaatgagaacaatgcgcatcgccctcattgcaacctgagctttgcttcaccgaatttggagttgcttcacttttcagttcaaacatctgataaatactctttaaccccaatcttcaacaatccagtcttcacaaatcttctcaggttactctaacctctagtttgtaaaacctttcaactattccatggtcgtgatttgtgcccctttgaattggaaccttggattgtaaaacccta

SEQ ID NO: 58293 - DNA, 224 bp, Glycine max
  unsure (1)..(224): unsure at all n locations
gacactaaacaagttaaaagaagagcatcactgaactaacanagcaaccctatgtcgaaggtggtttgtgtcaccggagccagcggcgccatcggatcatgggtggtcctactcctcctccagcgtggttacaccgtccatgccaccgtccaagatatcaaggatgaaaatgagacgaaacatttggaggaaatggaaggagcaaagagtcatctccatttttt

SEQ ID NO: 58294 - DNA, 88 bp, Glycine max
ggtgcacaagtgagtttgttgatccagataactagaatcagtgtgatgaaaatgaacgtccttggcttcctcgttgctacaattttgg

SEQ ID NO: 58295 - DNA, 107 bp, Glycine max
ggaggttcagggaattgttcaaaccggtgttctagtttatcgttgtgtgttgttgtaattcgttgttctccttttgtgggtctatggttgggtttgatttttttctc

SEQ ID NO: 58296 - DNA, 107 bp, Glycine max
ggaaatcaaatcaggagcgggggaaaaagaaaagagagagaagtagggttcgaaaatggcagcagaatcatcagagggcgaatataaaactcaagttaagccgaggg

SEQ ID NO: 58297 - DNA, 286 bp, Glycine max
ggcacaagtgagtttgttgatcgagataactagaaacagtgtgatgaaaatgaaggtccttgttttcttcgttgctacaattttggtagcatggcaatgccatgcgtacgatatgttccctctccgaatgaacactggctatggtgcccgtactccggaggtgaaatgcgcaagttggaggcttgctgtggaagcacacaacatctttggctttgagaccattcctgaaaactgcgttgaagcaacagaggaatacatccatggcgaacaatatagatcagactcc

SEQ ID NO: 58298 - DNA, 291 bp, Glycine max
gtgatacgacaagagaacggaggggagcttagtttgaacatatatcatcacttacaatcaggggtttgtggaacacatcgaatgcagtgtcttgccgcgttcaaagttttggtgatgaccaggataatctggacttccaaggtgatgccacgtcgtcggtccacgggcataaaaatcacaatgttagatggtgtaggaaaagcactgggtggcactgtggggacagtgttatactcctctccagtgcaactttgggaaggctctacagtggtcacaggctttgaaacctac

SEQ ID NO: 58299 - DNA, 199 bp, Glycine max
ggagtagcgatggagaagatgatcggttagctacagtcaattgtccttcccttcgtttccattattctgatgcttccgcgagtttagagggcaagactcttctccgtgcgcgacgtgtactgcgccatcttcggtcaacgggcataatgcccccatttttggacggtgcatccacttccgatgcgagtcactgtggggg

SEQ ID NO: 58300 - DNA, 171 bp, Glycine max
tggcttagattctactaattccaaaacttcatattctgcaacatggtcgagtctgttttcttcagtccaatgactctaggtaaatagattctgaatctgtacgatatgatgactctccgattgaacactgtgataaagtatccatcctccggtagttagctgcacctgttg

SEQ ID NO: 58301 - DNA, 117 bp, Glycine max
gacgagaaaggtttggaaattattctccaactacccgttttagagatagcaggagtctcctccatggctcgctcgtcgagatccttgcctgctatcgccgttatactttgcccatca

SEQ ID NO: 58302 - DNA, 314 bp, Glycine max
ggcacaagtgagtttgttgatcgagataactagaaacagtgtgatgaaaatgaaggtccttgttttcttcgttgctacaattttggtagcatggcaatgccatgcgtacgatatgttccctctccgaatgaacactggctatggtgcccgtactccggaggtgaaatgcgcaagttggaggcctgctgtggaagcacacaacatctttggctttgagaccattcctgaagagtgcgttgaagcaacaaacgaatacatccatggcgaacaatatagatcatactccacaacagttaaccaacaagcttactttt

SEQ ID NO: 58303 - DNA, 134 bp, Glycine max
gagagtggtggactgtgcaaaatagcgtcgtggtcgtgatttttttcatactaagtgcatcttgaacccagtgacgtcccccatccatgggttgtacgcaccgacgcggtaatggttcatccgcttctgcttcg

SEQ ID NO: 58304 - DNA, 287 bp, Glycine max
ggcacaagtgagtttgttgatcgagataactagaaacagtgtgatgaaaatgaaggtccttgttttcttcgttgctacaattttggtagcatggcaatgccatgcgtacgatatgttccctctccgaatgaacactggctatggtgcccgtactccggaggtgaaatgcgcaagttggaggcttgctgtggaagcacacaacatctttggctttgagaccatccctgacgagtgcgttgaagcaacacaggactacatccatggcgcaaactacagatcagacccca

SEQ ID NO: 58305 - DNA, 177 bp, Glycine max
cacgcgtcagacgggtgccaaaagaacaacaaaagggggaacaattgatttggttgatcaaaataacaagaacaattttaagaaaattgaaggcccttgtttcctccgttccccaagttttggcaccacggaattccattccttcgaactgttccctctcctaatggacccttgctc

SEQ ID NO: 58306 - DNA, 215 bp, Glycine max
gagagatcatgcctcatcgtgatgagcaaatcacccaacatgcacaaccgtctgtagacggaatcatcacattggaggaatgtcttgctgaggcgcattatgatgcgctacattggatccccgcaccaattcaacgttcgttacagtatccgttctcccgagttcatttgccgcaacttggtggcttgctgtgctctcacacatcatctttggct

SEQ ID NO: 58307 - DNA, 147 bp, Glycine max
atgggctttttctttgagcttaatttaatgttgcgaatctttgttttgggtcatcatttgttggttgtagatcagcgaggtgtggagtgtggtatttttcatagattaattggggatattgtatggcattgcttgtgctggtgttgt

SEQ ID NO: 58308 - DNA, 148 bp, Glycine max
tggggcacaactgagtttcatgttccacatggttatgttcagtgtgctgaacatggttgtccttgttttcctcgttgcgaccagtttggtcgcatggtagctgccattcgtattgtcttttgcctctccgaatcgacactggctacgg

SEQ ID NO: 58309 - DNA, 85 bp, Glycine max
aggggcacaagttagtttgttgattcaaaatactagaaacattttaataaaattaaaggtcttgttttcctccttgccaaaaatt

SEQ ID NO: 58310 - DNA, 193 bp, Glycine max
agataaaaatagagaaacaaagggtccagaaatttgtgtgttaatccatcaaccaatatatagtgcgatcaacatggctgtccttattttagtcgttgcaatcatttctgaaacaggttaatgccaaacgttactataagttccctcaccgaatgaataccggatatggtgctcgtactccggtggtgaaatt

SEQ ID NO: 58311 - DNA, 352 bp, Glycine max
gatgcacaagtttgttgagatagctagaagcaataagatgaaaatgaaagtgcttgttttgtttgttgctacagttttggtagcatatgaatgccatggctcagactaccagaagttccctctccaaatgaaaactgggtttggtgggcaatacagcaatgaggtggcatgtgccagttggaggcttggcgtggaagcaaacaacgtagtcaagtggcaaactgttcctgcagcttgcggagagtacatagctgactacgttctaggagaccaatatagattagattccaaaacagttaaaccaacaagcttagttctatgctaaatccctcaaactcgccaacaaagatgt

SEQ ID NO: 58312 - DNA, 190 bp, Glycine max
gacacttcataatcctctagtaacccttcttttctctctctctctctcgtgttctgagctgctagaaccactggagaggaattgaagtcatgcgtctttcaccatgtttgcaatgcttgttggactgctctctcacagccttgtctttcgtgtcacaggcattactgttcccgattttatcacctgcctc

SEQ ID NO: 58313 - DNA, 276 bp, Glycine max
ggcacaagtgagtttgttgatcgagataactagaaacagtgtgatgaaaatgaaggtccttgttttcttcgttgctacaattttggtagcatggcaatgccatgcgtgcgatatgttccctctccgaatgaacactggctatggtgcccgtactccggaggtgaaatgcgcaagttggaggcctgctgtggaagcacagaggatctttggccttgagaccactcctgaatagtgccttgacgcacccggggaccacctccatgggcgaatcatctc

SEQ ID NO: 58314 - DNA, 77 bp, Glycine max
gatagcgatacatatagtggtttcagtgactgatcagtgttcacttgatctcatcgtccttgttatcatcattgcca

SEQ ID NO: 58315 - DNA, 130 bp, Glycine max
cgggatagcaaaatcgtttctccaatttaatcaccattgtagaacccaattcgcttcgtcgttttcgattaagacagcaatggcacgtaccaagcaaaccgctcgcaagtccaccggatgaaacgccccg

SEQ ID NO: 58316 - DNA, 128 bp, Glycine max
aagggggcccaattaattttgttaatcaagataactagaaacattttgatgaaaataaaggtccttgttttcttcgttgcaaaaattttggtaccatggcaatgccatgcgtacaaaatgttccctcc

SEQ ID NO: 58317 - DNA, 75 bp, Glycine max
aagactaagaagaccattaaggaggtatctcatgagtggtcattggtgaacaagcataagcctagttggatgagg

SEQ ID NO: 58318 - DNA, 169 bp, Glycine max
gatcaataatctattttatactatacctacattttgataattttctttgtagttgatagccatggctacccgtggaaagcttgaggttgacattgatcgcaagtcccgcgcatatagctgctggcaaatgcttctgaattctaccgagctatgtcctcacggcttcgct

SEQ ID NO: 58319 - DNA, 111 bp, Glycine max
gtgtgcagtaacatttccatttcatttggagagacagagtagtgagtagtgagagggccaatctatgcatcctccagatcgttacgagcgtttcgtcgtccctgaccgccc

SEQ ID NO: 58320 - DNA, 341 bp, Glycine max
ggagtttgttgatcgagataactagaaacagtgtgatgaaaatgaaggtccttgttttcttcgttgctacaattttggtagcatggcaatgccatgcgtacgatatgttccctctccgaatgaacactggctatggtgcccgtactccggaggtgaaatgcgcaagttggaggcttgctgtggaagcacacaacatctttggctttgagaccattcctgaagagtgcgttgaagcaacaaaggaatacatccatggcgaacaatatagatcagactccaaaacagttaaccaacaagcttacttttatgccagagacctccaaattcatcccaatgacaca

SEQ ID NO: 58321 - DNA, 380 bp, Glycine max
  unsure (1)..(380): unsure at all n locations
ggcacaagtgagtttgttgatcgagataactagaaacagtgtgatgaaaatgaaggtccttgttttcttcgttgctacaattttggtagcatggcaatgccatgcgtacgatatgttccctctccgaatgaacactggctatggtgcccgtactccggaggtgaaatgcgcaagttggaggcttgctgtggaagcacacaacatctttggctttgagaccattcctgaagagtgcgttgaagcaacaaaggaatacatccatggcgaacaatatagatcagactccaaaacagttaaccaacaagcttacttttatgccagagacctcgaagtccatcncaaggacacatttgtgttcagtatagatggcaccgtactct

SEQ ID NO: 58322 - DNA, 208 bp, Glycine max
gggcacaagtttgttgagatagctagaagcaataagatgaaaatgaaagtgcttgttttgtttgttgctacagttttggtagcatatgaatgccatgggtccaaactacaaaaatttccctcctccaaatgaaaactgggtttggtgggcaatacaacaattaagggtgaatttgccatttggaggcttggcgtggaagcaaacaacg

SEQ ID NO: 58323 - DNA, 380 bp, Glycine max
  unsure (1)..(380): unsure at all n locations
ggcacaagtgagtttgttgatcgagataactagaaacagtgtgatgaaaatgaaggtccttgttttcttcgttgctacaattttggtagcatggcaatgccatgcgtacgatatgttccctctccgaatgaacactggctatggtgcccgtactccggaggtgaaatgcgcaagttggaggcttgctgtggaagcacacaacatctttggctttgagaccattccagaagagtgcgttgaagcaacaaaggaatacatccatggcgaacaatatagatcagactccaaaacagttaaccaacaagcttacttttatgccagagacctcgaagtccatcncaaggacacatttgtgttcagtatagatggcaccgtactct

SEQ ID NO: 58324 - DNA, 380 bp, Glycine max
ggcacttcaattgcaatcaaattagttcattctctttgcgcagttccctacctctcctttcaagatgcagatcttcgtcaagaccctcaccggaaagaccatcacccttgaggtggaaagctctgacaccatcgacaacgtcaaggccaagatccaggacaaggaaggaattcccccggatcagcaacgtctcatcttcgccggaaagcagctcgaggacggccgtaccctcgccgactacaacatccagaaggagtcaacccttcaccttgtccttcgtctccgtggtggcatgcagatcttcgtcaagactctcactggcaaaaccattaacctagaggtcgaaaactctgacaccattgacaacgtcaaggccaaga

SEQ ID NO: 58325 - DNA, 297 bp, Glycine max
gtgcacaagtgagtttgttgatcgagataactagaaacagtgtgatgaaaatgaaggtccttgttttcttcgttgctacaattttggtagcatggcaatgccatgcgtacgatatgttccctctccgaatgaacactggctatggtgcccgtactccggaggtgaaatgcgcaagttggaggcttgctgtggaagcacacaacatctttggcctttgagaccattccctgaagagtgcgttgaagcaacaaaagaatacatccatggcgaacaatatagattagactccaaaacagt

SEQ ID NO: 58326 - DNA, 356 bp, Glycine max
ggcacaagtgagtttgttgatcgagataactagaaacagtgtgatgaaaatgaaggtccttgttttcttcgttgctacagattttggtagcatggcgatgccatgcgtacgatatgttccctcccccaatgaacactggctatggtgcccgtactccggacgtgaaatgcgcaagttggaggcttgctgtggaagcacacaacatctttggctttgagaccattcctgacgagtgcgttgatgcagcaaacgaatacatccatggcgaacggtatagatcagactccatgacagttaaccaacggacttacttttatgccatagacctcgaatgtcatcccaaggacacatttgtg

SEQ ID NO: 58327 - DNA, 192 bp, Glycine max
gacaagtttgttgagatagctagaagcaataagatgaaaatgaaagtgcttgttttgtttgttgctacagttttggtagcatatgaatgccatggctcagacaacaaaaatttccctctccaaatgaaaactgggtttggtgggcaatacagcattgaggtggcatttgcaatttgaaggcttgccttgaaa

SEQ ID NO: 58328 - DNA, 367 bp, Glycine max
  unsure (1)..(367): unsure at all n locations
ggcacaagtgagtttgttgatcgagataactagaaacagtgtgatgaaaatgaaggtccttgttttcttcgttgctacaattttggtagcatggcaatgccatgcgtacgatatgttccctctccgaatgaacactggctatggtgcccgtactccggaggtgaaatgcgcaagttggaggcttgctgtggaagcacacaacatctttggctttgagaccattcctgaagagtgcgttgaagcaacaaaggaatacatccatggcgaacaatatagatcagactccaaaacagttaaccaacaagcttacttttatgccagagacctcgaagtcnatcncaaggacacatttgtgttcagtatagat

SEQ ID NO: 58329 - DNA, 377 bp, Glycine max
ggcacaagtgagtttgttgatcgagataactagaaacagtgtgatgaaaatgaatgtccttgttttcttcgttgctacaattttggtagcatggcaatgccatgcgtacgatatgttccctctccgaatgaacactggctatggtgcccatactccggaggtgaaatgcgcaagttggaggcttgctgtggaagcacacaacatctttggctttgagaccattcctgaagagtgcgttgaagcaacaaaggaatacatccatggcgaacaatatagatcagactccagaacagttaaccaacaagcttacttttatgccagagacctcgaagtccatccaaagacacatttgtgttcagtatagatggcaccgtact

SEQ ID NO: 58330 - DNA, 376 bp, Glycine max
ggcacaagtgagtttgttgatcgagataactagaaacagtgtgatgaaaatgaaggtccttgttttcttcgttgctacaattttggtagcatggcaatgccatgcgtacgatatgttccctctccgaatgaacactggctatggtgcccgtactccggaggtgaaatgcgcaagttggaggcttgctgtggaagcacacaacatctttggctttgagaccattcctgaagagtgcgttgaagcaacaaaggaatacatccatggcgaacaatatagatcagactccaaaacagttaaccaacaagcttacttttatgccagagacctcgaagtccatcccaaggacacatttgtgttcagtatagatggcaccgta

SEQ ID NO: 58331 - DNA, 386 bp, Glycine max
ggcacaagtttgttgagatagctagaagcaataagatgaaaatgaaagtgcttgttttgtttgttgctacagttttggtagcatatgaatgccatggctcagactaccagaagttccctctccaaatgaaaactgggtttggtgggcaatacagcaatgaggtggcatgtgccagttggaggcttggcgtggaagcaaacaacgtagtcaagtggcaaactgttcctgcagcttgcggagagtacatagctgactacgttctaggagaccaatatagatcagattccaaaacagttaaccaacaagcttatttctatgctaaatccctcaaactcaccaacaaagatgtctttgtcctggacgttgacgacactactctctctaat

SEQ ID NO: 58332 - DNA, 380 bp, Glycine max
  unsure (1)..(380): unsure at all n locations
ggcacaagtgagtttgttgatcgagataactagaaacagtgtgatgaaaatgaaggtccttgttttcttcgttgctacaattttggtagcatggcaatgccatgcgtacgatatgttccctctccgaatgaacactggctatggtgcccgtactccggaggtgaaatgcgcaagttggaggcttgctgtggaagcacacaacatctttggctttgagaccattcctgaagagtgcgttgaagcaacaaaggaatacatccatggcgaacaatatagatcagactccaaaacagttaaccaacaagcttacttttatgccagagacctcgaagttcatcncaaggacacatttgtgttcagtatagatggcaccgtactct

SEQ ID NO: 58333 - DNA, 441 bp, Glycine max
ccacgcgtaagacacgcgtccgcacaagactacaaagggggcgagaagaacacacattgggagttagatagagagaatgcgagatgtggccggaacatcctcgtccctgactaaggggggccgcacctttccgagattctttacaggagaaaggcatctttacacacatgagcccctcaactccgtttctgcgtaattgacgcctcatcacacccggtaatgtcgttaattcggccgtatcaacggccggtctttcgttctcaccaactctcgagctgttaggcccttctggtcatcataacattttcttggagattgggacgtaatccccatgaggttaaacctttcgccagaagattctcgcaactgaaaatatcctctttgcttcccctgagtacaattactctgtcccaagtcctttaaagaatgcacttgactggg

SEQ ID NO: 58334 - DNA, 288 bp, Glycine max
ggttctagtgtgtgattgtttgttgttgtaactcgttcttcttcttttgttgttctgtgtttgtgtttgttttttctctcacctgaaaatgtcttgctgcggtggtaactgtggttgcggaagctcctgcaagtgcggcaacggctgcggaggctgcaagatgtacccagacttgagctacactgagtcaaccaccaccgagaccttggtcatgggagtggcacctgttaaggctcaatttgagggtgctgaaatgggtgtgcccgctgagaacgatggctgcaaatg

SEQ ID NO: 58335 - DNA, 377 bp, Glycine max
gaaggtgcaagagtttgttgtgagctataagctagtttatcgtgaggagaatatgaagttgtttgttttctttgttgctgcagtagttttggtagcatggccatgccatggcgcaggctaccaaaggttccctctccgaatgaaaactggctatggtgagcgttcttcggaggtaaaatgcgcaagttttaggcttgctgtggaagcacacaacatccgagcctttaaaaccattcctgaagagtgcgttgaaccaacaaaggactacattaatggcgaacaatttagatcagactctaaaacagttaaccaacaagctttcttttatgctagtgaacgcgaagtccatcacaacgacatatttatattcggcatag

SEQ ID NO: 58336 - DNA, 382 bp, Glycine max
gaaggtgcaagagtttgttgtgagctataagctagtttatcgtgaggagaatatgaagttgtttgttttctttgttgctgcagtagttttggtagcatggccatgccatggcgcaggctaccaaaggttccctctccgaatgaaaactggctatggtgagcgttcttcggaggtaaaatgcgcaagttttaggcttgctgtggaagcacacaacatccgagcctttaaaaccattcctgaagagtgcgttgaaccaacaaaggactacattaatggcgaacaatttagatcagactctaaaacagttaaccaacaagctttcttttatgctagtgaacgccaagtccatcacaacgacatatttatattcggcatagataac

SEQ ID NO: 58337 - DNA, 350 bp, Glycine max
ggcacaagtgagtttgttgatcgagataactagaaacagtgtgatgaagatgaaggtccttgttttcttcgttgctacaattttggtagcatggcaatgccatgcgtacgatatgttccctctccgaatgaacactggctatggtgcccgtactccggaggtgaaatgcgcaagttggaggcttgctgtggaagcacacaacatctttggctttgagaccattcctgaagagtgcgttgaagcaacaaaggaatacatccatggcgaacattatagatcagactccaaaacagttaaccaacaagcttacttttatgccagaaacctcgaattcaatcccaaggacacat

SEQ ID NO: 58338 - DNA, 294 bp, Glycine max
ctcccctgtcaacaggatattttgcttgcttggtttaatcgtttcttgaattctggtgaagattgcccaaatattcaaagagggtttgaagtttggtggagaagggctttctggaagaggaatggagagcaagaacggacaagacaatttcgaattgcaactacatcagttgagaacccttgaggatagattgttccactgtggaggaattggcagcaaattactgggtatgccaccttttaaccttatatcatgatcatttctatttgattcctctacgattatcagtactga

SEQ ID NO: 58339 - DNA, 281 bp, Glycine max
gaacacattccagaatacagtcagatacattgtagtatcacttttgtctcagaatttgttcttttgagttatggcaagcgtaaaggttgcatgtgtggttttgatgtacatggctgtgaagagtgcattaatgatggtgcaagccgtgtcatgcaatgatgtttctgtgaacgtagcaccgtgcgtatcttagctgagtcagggtggagatgttagagaatcctgcagtagcagattgaaggacattctgggttctgccaacaacacctttgatagataac

SEQ ID NO: 58340 - DNA, 375 bp, Glycine max
  unsure (1)..(375): unsure at all n locations
gagtgcacaagtgagtttgttgatcgagataactagaaacagtgtgatgaaaatgaaggtccttgttttcttcgttgctacaattttggtagcatggcaatgccatgcgtacgatatgttccctctccgaatgaacactggctatggtgcccgtactccggaggtgaaatgcgcaagttggaggcttgctgtggaagcacacaacatctttggctttgagaccattcctgaagagtgcgttgaagcaacaaaggaatacatccatggcgaacaatatagatcagactccaaaacagttaaccaacaagcttacttttatgccagagacctcgaagtcaatcccaatgacacatttgtgttcagtatanatggcac

SEQ ID NO: 58341 - DNA, 379 bp, Glycine max
gaagtgcaagagtttgttgtgagctataagctagtttatcgtgaggagaatatgaagttgtttgttttctttgttgctgcagtagttttggtagcatggccatgccatggcgcaggctaccaaaggttccctctccgaatgaaaactagctatggtgagcgttcttcggaggtaaaatgcgcaagttttaggcttgctgtggaagcacacaacatccgagcctttaaaaccattcctgaagagtgcgttgaaccaacaaaggactacattaatggcgaacaatttagatcagactctaaaacagttaaccaacaagctttcttttatgctagtgaacgcgaagtccatcacaacgacatatttatattcggcatagata

SEQ ID NO: 58342 - DNA, 367 bp, Glycine max
ggcacaagtgagtttgttgatcgagataactagaaacagtgtgatgaaaatgaaggtccttgttttcttcgttgctacaattttggtagcatggcaatgccatgcgtacgatatgttccctctccgaatgaacactggctatggtgcccgtactccggaggtgaaatgcgcaagttggaggcttgctgtggaagcacacaacatctttggctttgagaccattcctgaagagtgcgttgaagcaacaaaggaatacatccatggcgaacaatatagatcagactccaaaacagttaaccaacaagcttacttttatgccagagacctcgaagtccatcccaaagacacatttgtgttcagtatagat

SEQ ID NO: 58343 - DNA, 382 bp, Glycine max
ggcacaagtgagtttgttgatcgagataactagaaacagtgtgatgaaaatgaaggtccttgttttcttcgttgctacaattttggtagcatggcaatgccatgcgtacgatatgttccctctccgaatgaacactggctatggtgcccgtactccggaggtgaaatgcgcaagttggaggcttgctgtggaagcacacaacatctttggctttgagaccattcctgaagagtgcgttgaagcaacaaaggaatacatccatggcgaacaatatagatcagactccaaaacagttaaccaacaagcttacttttatgccagagacctcgaagttccatcccaaggacacatttgtgttcagtatagatggcaccgtactctc

SEQ ID NO: 58344 - DNA, 357 bp, Glycine max
  unsure (1)..(357): unsure at all n locations
gataacacaaggcagaaagcaagctcatcctagagttttaaaaatggcagcagcctcctccatggctctctcttccccatccttggctggcaaggccgtgaagctgggcccatcagcccccgaagtcgggagggtcagcatgaggaagaccgtcaccaagcaggcctcctccggaagcccatggtacggcccagaccgcgtcaagtacttgggcccattctctggcgagcccccgtcctacctcactggcgagttcccaggtgactacggctgggacactgctgggctttcggccgacccaganaccttcgccagaaaccgtgagctcgaagtgattcactccangtgggccatgct

SEQ ID NO: 58345 - DNA, 367 bp, Glycine max
gcacaagtttgttgagatagctagaagcaataagatgaaaatgaaagtgcttgttttgtttgttgctacagttttggtagcatatgaatgccatggctcagactaccagaagttccctctccaaatgaaaactgggtttggtgggcaatacagcaatgaggtggcatgtgccagttggaggcttggcgtggaagcaaacaacgtagtcaagtggcaaactgttcctgcagcttgcggagagtacatagctgactacgttctaagagaccaatatagatcagattccaaaacggttaaccaacaagcttaattccaatgcaaatccctcaaactcaacaacaaagatgtctttgtcttggacgttgac

SEQ ID NO: 58346 - DNA, 269 bp, Glycine max
gacccacacgtcagtagggtggcaaaaaaacaacggagggggcacaagtgagtctctagctcgagaatcaataatgtagtctacccaacgcttatgtcgttcgttcctgcatctctgtgatgtcatgactctcacagctcacgttggacaatctgtccgcacgcatcgggaagctcagtttagcgggtggtacatcctagatggggccagcaacttgcggaggtttcggtggtgacatgggactataggcggataggaaactcattctg

SEQ ID NO: 58347 - DNA, 380 bp, Glycine max
ggcacaagtgagtttgttgatcgagataactagaaacagtgtgatgaaaatgaaggtccttgttttcttcgttgctacaattttggtagcatggcaatgccatgcgtacgatatgttccctctccgaatgaacactggctatggtgcccgtactccggaggtgaaatgcgcaagttggaggcttgctgtggaagcacacaacatctttggctttgagaccattcctgaagagtgcgttgaagcaacaaaggaatacatccatggcgaacaatatagatcagactccaaaacagttaaccaacaagcttacttttatgccagagacctcgaagtccatccccaaggacacatttgtgttcagtatagatggcaccgtactc

SEQ ID NO: 58348 - DNA, 368 bp, Glycine max
ggcacaagtgagtttgttgatcgagataactagaaacagtgtgatgaaaatgaaggtccttgttttcttcgttgctacaattttggtagcatggcaatgccatgcgtacgatatgttccctctccgaatgaacactggctatggtgcccgtactccggaggtgaaatgcgcaagttggaggcttgctgtggaagcacacaacatctttggctttgagaccattcctgaagagtgcgttgaagcaacaaaggaatacatccatggcgaacaatatagatcagactccaaaacagttaaccaacaagcttacttttatgccagagaactcgaagtccatcccaaggacacatttgtgttcagtatagatg

SEQ ID NO: 58349 - DNA, 268 bp, Glycine max
ggcacaagtttgttgagatagctagaagcaataagatgaaaatgaaagtgcttgttttgtttgttgctacagttttggtagcatatgaatgccatggctcagactaccagaagttccctctccaaatgaaaactgggtttggtgggcaatacagcaatgaggtggcatgtgccagttggaggcttggcgtggaagcaaacaacgtagtcaagtggcaaactgttcctgcggcttgcggagagtacatagctgactacgtcctaggaga

SEQ ID NO: 58350 - DNA, 359 bp, Glycine max
ggcaagagtttgttgtgagctataagctagtttatcgtgaggagaatatgaagttgtttgttttctttgttgctgcagtagttttggtagcatggccatgccatggcgcaggctaccaaaggttccctctccgaatgaaaactggctatggtgagcgttcttcggaggtaaaatgcgcaagttttaggcttgctgtggaagcacacaacatccgagcctttaaaaccattcctgaagagtgcgttgaaccaacaaaggactacattaatggcgaacaatttagatcagactctaaaacagttaaccaacaagctttcttttatgctagtgaacgcgaagtccatcacaacgacatattt

SEQ ID NO: 58351 - DNA, 375 bp, Glycine max
ggcacaagtgagtttgttgatcgagataactagaaacagtgtgatgaaaatgaaggtccttgttttcttcgttgctacaattttggtagcatggcaatgccatgcgtacgatatgttccctctccgaatgaacactggctatggtgcccgtactccggaggtgaaatgcgcaagttggaggcttgctgtggaagcacacaacatctttggctttgagaccattcctgaagagtgcgttgaagcaacaaaggaatacatccatggcgaacaatatagatcagactccaaaacagttaaccaacaagcttacttttatgccagagacctcgaagtccacccaaagacacatttgtgttcagtatagatggcaccgta

SEQ ID NO: 58352 - DNA, 382 bp, Glycine max
  unsure (1)..(382): unsure at all n locations
ggcacaagtgagtttgttgatcgagataactagaaacagtgtgatgaaaatgaaggtccttgttttcttcgttgctacaattttggtagcatggcaatgccatgcgtacgatatgttccctctccgaatgaacactggctatggtgcccgtactccggaggtgaaatgcgcaagttggaggcttgctgtggaagcacacaacatctttggctttgagaccattcctgaagagtgcgttgaagcaacaaaggaatacatccatggcgaacaatatagatcagactccaaaacagtcaaccaacaagcttacttttatgccagagacctcgaagtcaatcncaaggacacatttgtgttcagtatagatggcaccgtactctct

SEQ ID NO: 58353 - DNA, 232 bp, Glycine max
ggcacaagtgagtttgttgatcgagataactagaaacagtgtgatgaaaatgaaggtccttgttttcttcgttgctacaattttggtagcatggcaatgccatgcgtacgatatgttccctctccgaatgaacactggctatggtgcccgtactccggaggtgaaatgcgcaagttggaggcttgctgtggaagcacacaacatctttggctttgagaccattcctgaaaag

SEQ ID NO: 58354 - DNA, 367 bp, Glycine max
  unsure (1)..(367): unsure at all n locations
ggcacaagtgagtttgttgatcgagataactagaaacagtgtgatgaaaatgaaggtccttgttttcttcgttgctacaattttggtagcatggcaatgccatgcgtacgatatgttccctctccgaatgaacactggctatggtgcccgtactccggaggtgaaatgcgcaagttggaggcttgctgtggaagcacacaacatctttggctttgagaccattcctgaagagtgcgttgaagcaacaaaggaatacatccatggcgaacaatatagatcagactccaaaacagttaaccaacaagcttacttttatgccagagacctcgaagtccatcncaaggacacatttgtgttcagtatagat

SEQ ID NO: 58355 - DNA, 382 bp, Glycine max
ggcacaagtgagtttgttgatcgagataactagaaacagtgtgatgaaaatgaaggtccttgttttcttcgttgctacaattttggtagcatggcaatgccatgcgtacgatatgttccctctccgaatgaacactggctatggtgcccgtactccggaggtgaaatgcgcaagttggaggcttgctgtggaagcacacaacatctttggctttgagaccattcctgaagagtgcgttgaagcaacaaaggaatacatccatggcgaacaatatagatcagactccaaaacagttaaccaacaagcttacttttatgccagagacctcgaagtcaatcccaaggacacatttgtgttcagtatagatggcaccgtactctct

SEQ ID NO: 58356 - DNA, 380 bp, Glycine max
gaaggtgcaagagtttgttgtgagctataagctagtttatcgtgaggagaatatgaagttgtttgttttctttgttgctgcagtagttttggtagcatggccatgccatggcgcaggctaccaaaggttccctctccgaatgaaaactggctatggtgagcgttcttcggaggtaaaatgcgcaagttttaggcttgctgtggaagcacacaacatccgagcctttaaaaccattcctgaagagtgcgttgaaccaacaaaggactacattaatggcgaacaatttagatcagactctaaaacagttaaccaacaagctttcttttatgctagtgaacgcgaagtccatcacaacgacatatttatattcggcatagata

SEQ ID NO: 58357 - DNA, 339 bp, Glycine max
gaaccctaacactgcgaatcgaggaaaacacccttcggtggaatcatcactgcgtcttcttcaaccaaccaccgcgaccagagctcttctccgccgcgtccggagctcttctccaccacgttcaagttgtttaaggataatgggtcggaaagctggtacgctttttatcaaccccaagagattcggtaatcttcaaaaaccttgcatgaaggaaatggcattgtttctcagttgtatggctgcaaaccatagtgacaccgaagcctgtgctcgtcggaaggaactattgaatgtctgtattgatgctcagagtaaaaagaacaggaagtcctgggggag

SEQ ID NO: 58358 - DNA, 378 bp, Glycine max
gaaggtgcaagagtttgttgtgagctataagctagtttatcgtgaggagaatatgaagttgtttgttttctttgttgctgcagtagttttggtagcatggccatgccatggcgcaggctaccaaaggttccctctccgaatgaaaactggctatggtgagcgttcttcggaggtaaaatgcgcaagttttaggcttgctgtggaagcacacaacatccgagcctttaaaaccattcctgaagagtgcgttgaaccaacaaaggactacattaatggcgaacaatttagatcagactctaaaacagttaaccaacaagctttcttttatgctagtgaacgcgaagtcatcacaacgacatatttatattcggcatagat

SEQ ID NO: 58359 - DNA, 293 bp, Glycine max
ggcacaagtgagtttgttgatcgagataactagaaacagtgtgatgaaaatgaaggtccttgttttcttcgttgctacaattttggtagcatggcaatgccatgcgtacgatatgttccctctccgaatgaacactggctatggtgcccgtactccggaggtgaaatgcgcaagttggaggcttgctgtggaagcacacaacatctttggctttgagaccattcctgaagagtgcgttgaagcaacaaaggaatacatccatggcgaacaatatagatcagactccaaaacag

SEQ ID NO: 58360 - DNA, 355 bp, Glycine max
ggcacaagtgagtttgttgatcgagataactagaaacagtgtgatgaaaatgaaggtccttgttttcttcgttgctacaattttggtagcatggcaatgccatgcgtacgatatgttccctctccgaatgaacactggctatggtgcccgtactccggaggtgaaatgcgcaagttggaggcttgctgtggaagcacacaacatctttggctttgagaccattcctgaagagtgcgttgaagcaacaaaggaatacatccatggcgaacaatatagatcagactccaaaacagttaaccaacaagcttacttttatgccagagacctcgaagtccatcccaaggacacatttgtg

SEQ ID NO: 58361 - DNA, 155 bp, Glycine max
tgtctgccgcttagcaacattttcggcatcgaagcaatgccacgcgtacgagctgttcgttctccgaatgtgcactgactagatgtgcccgtacaccagttgtgcaatgtgcaagttgaatgcttgctgtcgtatcacagaacatctttggcttt

SEQ ID NO: 58362 - DNA, 310 bp, Glycine max
ctggtcacctgatttacaagcttggaggcattgacaagcgtgttattgagaggtttgagaaggaagctgctgagatgaacaagaggtctttcaagtatgcctgggtgctggacaaacttaaggctgagcgtgaaagaggaatcaccattgatattgctttgtggaagtttgaaacaacaaagcattattgcacagttattgatgcgcctggacatagggatttcattaagaatatgattactgggacatcccaagctgactgtgctgttcttatcattgattcgaccactggtggttttgaagctggtat

SEQ ID NO: 58363 - DNA, 180 bp, Glycine max
ggcacaagtgagtttgttgctcgagataactagtcacagtgtgatgacaatgaaggtccttgttttcttcgatgctacaattttggtagcactgcaatgccatgcgtaccatatgttcccctctccgaagaagcccggactatggtgcccgtactccggaggtgaaatgcgcaagttgaa

SEQ ID NO: 58364 - DNA, 275 bp, Glycine max
gaaggtgcaagactttgttgtgagctataagctagtttatcgtgaggagaatatgaagttgtttgttttctttgttgctgcagtagttttggtagcatggccatgccatggcgcaggctatcaaaggttccctctccgaatgaaaactggctatggtgagcgttcttcggaggtaaaatgcgcaagttttaggcttgctgtggaagcacacaacatccgagcctttaaaaccattcctgaagagtgcgttgcaccaataaaggactacattaatg

SEQ ID NO: 58365 - DNA, 354 bp, Glycine max
ggagtttgttgtgagctataagctagtttatcgtgaggagaatatgaagttgtttgttttctttgttgctgcagtagttttggtagcatggccatgccatggcgcaggctaccaaaggttccctctccgaatgaaaactggctatggtgagcgttcttcggaggtaaaatgcgcaagttttaggcttgctgtggaagcacacaacatccgagcctttaaaaccattcctgaagagtgcgttgaaccaacaaaggactacattaatggcgaacaatttagatcagactctaaaacagttaaccaacaagctttcttttatgctagtgaacgcgaagtccatcacaacgacatatt

SEQ ID NO: 58366 - DNA, 287 bp, Glycine max
ggcacaagtttgttgagatagctagaagcaataagatgaaaatgaaagtgcttgttttgtttgttgctacagttttggtagcatatgaatgccatggctcagactaccagaagttccctctccaaatgaaaactgggtttggtgggcaatacagcaatgaggtggcatgtgccagttggaggcttggcgtggaagcacacaacgtagtcaagtggcaaactgttcctgcagcttgcggagagtacatagctgactacgttctacgagaccaatatacatcagattcc

SEQ ID NO: 58367 - DNA, 308 bp, Glycine max
gggacaagttaatttggttgttcaaaatacttagaaccattgtaatgaaaatgaaggtccttgtttccttcgttgcaacaattttggtaccatgcattgcaatgcgtacgatatgttccctctcgaatgaacactggctatggtgcccgtactccggaggtgaaatgcgcaagttggaggcttgctgtggaagcacacaacatctttggctttgagaccattcctgaagagtgcgttgaagcaacaaaggaatacatccatggcgaacaatatagatcagactccaaaacagttaaccaacaagctta

SEQ ID NO: 58368 - DNA, 352 bp, Glycine max
ggtgcacaagtgagtttgttgatcgagataactagaaacagtgtgatgaaaatgaaggtccttgttttcttcgttgctacaattttggtagcatggcaatgccatgcgtacgatatgttccctctccgaatgaacactggctatggtgcccgtactccggaggtgaaatgcgcaagttggaggcttgctgtggaagcacacaacatctttggctttgagaccattcctgaagagtgcgttgaagcaacaaaggaatacatccatggcgaacaatatagatcagactccaaaacagttaaccaacaagcttacttttatgccagagacctcgaagtccatcccagggacacat

SEQ ID NO: 58369 - DNA, 339 bp, Glycine max
gagatttggctgactatgtagtaattgaaatttactgaacatgtacacaaatcttgctcaggacttcacagtgtactttaacttggaagaatgcatctcatacttatgcgaatatattacagccaatggtccctttgatggcttccttggcttctcacagggtgcaactctttcagcacttttgataggttaccaggcacagggaaagttactaaaggagcatccaccaataaaatttctcatatcaatatcaggatgcaaattcagaaatcccagcatatgcgatgttgcctacaaagacaccatcaaagctaaatctgttcatttcattggggaaaa

SEQ ID NO: 58370 - DNA, 333 bp, Glycine max
ggcacaattgattttgttgatcgagataactagaaacagtgtgatgaaaatgaaggtccttgttttcttcgttgctacaattttggtagcatggcaatgccatgcgtacgatatgttccctctccgaatgaacactggctatggtgcccgtactccggaggtgaaatgcgcaagttggaggcttgctgtggaagcacacaacatctttggctttgagaccattcctgaagagtgcgttgaagcaacaaaggaatacatccatggcgaacaatatagatcagactccaaaacagttaaccaacaagcttacttttatgccagagacctcgaagt

SEQ ID NO: 58371 - DNA, 353 bp, Glycine max
gctcaaaacttcaacaaagaatatctcacgatgcaggtgatgtgatcaaccacgaataccaacttctttaactgttttcgcaaaaatgttctcaaagctacactcacaacactcagaacagcctcaaccttttcaattctctcgggaatgtcaatcctctacagaggatgatatcgcaagcacttgtggtctcaatttgatcaccgcccataaatctggtttgagcggtgatcaacataatgagaccacaagtgaaataatgcagcgccctagaggacgcccatccggttccaaaaacatgcccaagccgcctctcataataacgtgcgagcccgagcacgtcatgagcccgt

SEQ ID NO: 58372 - DNA, 301 bp, Glycine max
gaaggtgcaagagtttgttgtgagctataagctagtttatcgtgaggagaatatgaagttgtttgttttctttgttgctgcagtagttttggtagcatggccatgccatggcgcaggctaccaaaggttccctctccgaatgaaaactggctatggtgagcgttcttcggaggtaaaatgcgcaagttttaggcttgctgtggaagcacacaacatccgagcctttaaaaccattcctgaagagtgcgttgaaccaacaaaggactacattaatggcgaacaatttatatcagactctaaa

SEQ ID NO: 58373 - DNA, 187 bp, Glycine max
gatagaggtcgcttgtatcgacttgttctgtcttgaaaatccattttgcgtcatgtcattcctcagatttgtttcgcctccggagagagcttgttgggtctgctgcgacttcatgttcatcagggtgtcctccttggcagcacgggtgtggtcagcggtgtcgcatacggtggtaggcgcatgggca

SEQ ID NO: 58374 - DNA, 351 bp, Glycine max
ggcacaagtgagtttgttgatcgagataactagaaacagtgtgatgaaaatgaaggtccttgttttcttcgttgctacaattttggtagcatggcaatgccatgcgtacgatatgttccctctccgaatgaacactggctatggtgcccgtactccggaggtgaaatgcgcaagttggaggcttgctgtggaagcacacaacatctttggctttgagaccattcctgaagagtgcgttgaagcaacaaaggaatacatccatggcgaacaatatagatcagactccaaaacagttaaccaacaagcttacttttatgccagagacctcgaagtccatcccaaggacacatt

SEQ ID NO: 58375 - DNA, 270 bp, Glycine max
ggcagaagtgagtttgttgatcgagataactagaaatagtgtgatgaaaatgaaggtccttgttttcttcgttgctacaattttggtagcatggcaatgccatgcgtacgatatgttccctctccgaatgaatactggctatggtgcccgtactccggaggtgaaatgcgcaccgttggaagcatgctgtggaagcacaaaatatcctttggctttgagaccattcctgacgaatgcgttgaagcagcaaaggaatacatccatggcgaa

SEQ ID NO: 58376 - DNA, 200 bp, Glycine max
ggatgaggtgtgaacaggtaagcgatctctttcgtcggttatctgtaaaggacccttctaagcttcaagtctgcctttaggtaagctcaatgtctaaggttggttgcgcaaagcagaacagaatacaacacaagtacagttacacacaccactttccttagttagcgcattgctttgcgatggccagaatggcactggca

SEQ ID NO: 58377 - DNA, 321 bp, Glycine max
ggcacaagtgagtttgttgatcgagataactagaaacagtgtgatgaaaatgaaggtccttgttttcttcgttgctacaattttggtagcatggcaatgccatgcgtacgatatgttccctctccgaatgaacactggctatggtgcccgtactccggaggtgaaatgcgcaagttggaggcttgctgtggaagcacacaacatctttggctttgagaccattcctgaagagtgcgttgaagcaacaaaggaatacatccatggcgaacaatatagatcagactccaaaacagttaaccaacaagcttacttttatgccag

SEQ ID NO: 58378 - DNA, 374 bp, Glycine max
cattcccgggccgacacacgcgtcaggcgaaacagagagtgatttcagtgagtgatcggtgttcacttgatctcatcataatcgtcagcgtcaattgaagaagatgccgatcagaaacatcgccgtcggaaggcctgaagaggcgactcaccccgacacgttgaaggcggctttggctgagttcatctcaaccttcatcttcgtgttcgccggctcaggctccggcatcgcctacaacaagctcaccgacaacggcgctgccacccctgccggcctcatctccgcctccatcgcccatgcattcgccctcttcgtcgccgtctccgtcggcgccaacatctccggcggccacgtcaaccccgccgtcaccttcg

SEQ ID NO: 58379 - DNA, 325 bp, Glycine max
  unsure (1)..(325): unsure at all n locations
gaaggtgcaagagtttgttgtgagctataagctagtttatcgtgaggagaatatgaagttgtttgttttctttgttgctgcagtagttttggtagcatggccatgccatggcgcaggctaccaaaggttccctctccgaatgaaaactggctatggtgagcgttcttcggaggtaaaatgcgcaagttttaggcttgcagtggaagcacagaacatccgagcctttaaaaccattcctgaagagtgcgttgaagcaacaaaggactacattaatggcgaacaatttagattagactctaaaacagtttaacaacangctttcttt

SEQ ID NO: 58380 - DNA, 317 bp, Glycine max
gggacaagtgagtttgttgatcgagataactagatacagtgtgatgaaaatgaaggtccttggtttcctcggtgctagaattttggtagcatggcaatgccatgcgtacgatatgttccctctccgaatgaacactggctatggtgcccgtactccggaggtgaactgcgcaagttggcggcttgctgtggcagcacataacatctttggctttgagaccattcctgaagagtgcgttgaagcaacataggaatacatccatggagattaatatagatcagactccatcacagttaaccaacatgcttacttttatg

SEQ ID NO: 58381 - DNA, 343 bp, Glycine max
ggcacaagtgagtttgttgatcgagataactagaaacagtgtgatgaaaatgaaggtccttgttttcttcgttgctacaattttggtagcatggcaatgccatgcgtacgatatgttccctctccgaatgaacactggctatggtgcccgtactccggaggtgaaatgcgcaagttggaggcttgctgtggaagcacacaacatctttggctttgagaccattcctgaagagtgcgttgaagcaacaaaggaatacatccatggcgaacaatatagatcagactccaaaacagttaaccaacaagcttacttttatgccagagacctccaagtccatcccaaa

SEQ ID NO: 58382 - DNA, 392 bp, Glycine max
gacaagtgagtttgttgatcgagataactagaaacagtgtgatgaaaatgaaggtccttgttttcttcgttgctacaattttggtagcatggcaatgccatgcgtacgatatgttccctctccgaatgaacactggctatggtgcccgtactccggaggtgaaatgcgcaagttggaggcttgctgtggaagcacacaacatctttggctttgagaccattcctgaagagtgcgttgaagcaacaaaggaatacatccatggcgaacaatatagatcagactccaaaacagttaaccaacaagcttacttttatgccagagacctcgaagtcgatcccaaggacacatttgtgttcagtatagatggcaccgtactctctaatattccatac

SEQ ID NO: 58383 - DNA, 55 bp, Glycine max
aaaaaaaccaccaaaggggaaacaaaacctagggtcctaatttccaaccaaacgg

SEQ ID NO: 58384 - DNA, 343 bp, Glycine max
tgacaaaagaacaacaaaaggggaaaaagtaactgtgctaatcgaaacatctgcacatagtgtgctgaaaatgcatgtccctgcattcatcggcgctgtcaatatgggaaccaggcgatttcaaacatatgacagtttggctcccagaatcaatatgggctaagatgaccttaaacccgatgtcataaacgaaactttcatgcctactgattaatcacatacatctttggctattacagtattcacgaacactgcattcatcacaatgtcgaagtaaacgatgacaaaacacttctattagatgacaaagcagtcaatgaatatgcatacatttacgccaaag

SEQ ID NO: 58385 - DNA, 394 bp, Glycine max
ggcacaagtgattttgttgatcgagataactagaaacagtgtgatgaaaatgaaggtccttgttttcttcgttgctacaattttggtagcatggcaatgccatgcgtacgatatgttccctctccgaatgaacactggctatggtgcccgtactccggaggtgaaatgcgcaagttggaggcttgctgtggaagcacacaacatctttggctttgagaccattcctgaagagtgcgttgaagcaacaaaggaatacatccatggcgaacaatatagatcagactccaaaacagttaaccaacaagcttacttttatgccagagaactcgaagtcaatcccaaggacacaattgtgttcagtatagatgggcacgtactctctaatattccatac

SEQ ID NO: 58386 - DNA, 380 bp, Glycine max
gaagacaacagaaggggaaggtgcaaaagtttgttgtgagctataagctagtttatcgtgaggagaatatgaagttgtttgttttctttgttgctgcattatttttggtagcatggccatgccatggcgcaagctatcaaaggttccctctccgaatgaaaactggctatggtgagcgttcttcggaggtaaaatgcgcaagttttaggcttgctgtggaagcacacaacatccgagcctttaaaaccattcctgaagagtgcgttgaaccaacaaaggactacattaatggcgaacaatttagattagactctaaaacagttaaccaacaagctttcctttatgctagtgaacgcgaagttcatcacaacgacatattt

SEQ ID NO: 58387 - DNA, 352 bp, Glycine max
ggcacaattgatttggttgatcgaaataactaaaaccagtgtgatgaaaatgaaggtccttgtttccttcgttgcaacaattttggtaccatggcaatgccatgcgtacaatatgttccctctccgaatgaacactggcaatggtgcccgtactccggaggtgaaatgcgcaatttggaggcttgctgtggaagcacacaacatctttggctttgaaaccattcctaaaaattgcgttgaagcaccaaaggaatacatccatggcaaacaatatagatcagactccaaaccagttaaccaacaagcttacttttatgccagagacttcaaattccatcccaagggacacatt

SEQ ID NO: 58388 - DNA, 330 bp, Glycine max
ggcacaagtgagtttgttgatcgagataactagaaacagtgtgatgaaaatgaaggtccttgttttcttcgttgctacaattttggtagcatggcaatgccatgcgtacgatatgttccctctccgaatgaacactggctatggtgcccgtactccggaggtgaaatgcgcaagttggaggcttgctgtggaagcacacaacatctttggctttgagaccattcctgaagagtgcgttgaagcaacaaaggaatacatccatggcgaacaatatagatcagactccaaaacagttaaccaacaagcttacttttatgccagagacctcga

SEQ ID NO: 58389 - DNA, 410 bp, Glycine max
gaaggtgcaagagtttgttgtgagctataagctagtttatcgtgaggagaatatgaagttgtttgttttctttgttgctgcagtagttttggtagcatggccatgccatggcgcaggctaccaaaggttccctctccgaatgaaaactggctatggtgagcgttcttcggaggtaaaatgcgcaagttttaggcttgctgtggaagcacacaacatccgagcctttaaaaccattcctgaagagtgcgttgaaccaacaaaggactacattaatggcgaacaatttagatcagactctaaaacagttaaccaacaagctttcttttatgctagtgaacgcgaagtccatcacaacgacatatttatattcggcatagataacaccgtactctctaatatcccatactatg

SEQ ID NO: 58390 - DNA, 407 bp, Glycine max
ggcacaagtgagtttgttgatcgagataactagaaacagtgtgatgaaaatgaaggtccttgttttcttcgttgctacaattttggtagcatggcaatgccatgcgtacgatatgttccctctccgaatgaacactggctatggtgcccgtactccggaggtgaaatgcgcaagttggaggcttgctgtggaagcacacaacatctttggctttgagaccattcctgaagagtgcgttgaagcaacaaaggaatacatccatggcgaacaatatagatcagactccaaaacagtttaccaacaagcttacttttatgccagagacctccaagtccatcccaaggacacatttgtgttcagtatagatggcaccgtactctctaatattccatactacaaaaaacatg

SEQ ID NO: 58391 - DNA, 405 bp, Glycine max
ggcacaagtgagtttgttgatcgagataactagaaacagtgtgatgaaaatgaaggtccttgttttcttcgttgctacaattttggtagcatggcaatgccatgcgtacgatatgttccctctccgaatgaacactggctatggtgcccgtactccggaggtgaaatgcgcaagttggaggcttgctgtggaagcacacaacatctttggctttgagaccattcctgaagagtgcgttgaagcaacaaaggaatacatccatggcgaacaatatagatcagactccaaaacagttaaccaacaagcttacttttatgccagagacctcgaagtcaatcccaaggacacatttgtgttcagtatagatggcaccgtactctctaatattccatactacaaaaaaca

SEQ ID NO: 58392 - DNA, 407 bp, Glycine max
ggcacaagtgagtttgttgatcgagataactagaaacagtgtgatgaaaatgaaggtccttgttttcttcgttgctacaattttggtagcatggcaatgccatgcgtacgatatgttccctctccgaatgaacactggctatggtgcccgtactccggaggtgaaatgcgcaagttggaggcttgctgtggaagcacacaacatctttggctttgagaccattcctgaagagtgcgttgaagcaacaaaggaatacatccatggcgaacaatatagatcagactccaaaacagttaaccaacaagcttacttttatgccagagacctcgaagtccatcccaaggacacatttgtgttcagtttagatgggaccgtactccctaatattccatactacagaaacatgg

SEQ ID NO: 58393 - DNA, 379 bp, Glycine max
gtctcaccacttcaaaacactcataacacaaagcacaaagcaaagctcatccttgagttaaaaaatggcagcagcttcttccatggctctctcatccccatccttggctggcaaggccgtgaagctgggcccatcagccccagaagtgggaagggtgagcatgaggaagaccgtcaccaagcaggtctcctcaggaagcccatggtacggcccagaccgagtcaagtacttgggcccattctctggcgagcccccgtcctacctaaccggtgagttcccaagcgactacggctgggacactgctgggctttccgcagacccaagaacctttcgcaaggaaccgtgaactcgaagtgatccactccaggtgggccatgct

SEQ ID NO: 58394 - DNA, 407 bp, Glycine max
gaaggtgcaagagtttgttgtgagctataagctagtttatcgtgaggagaatatgaagttgtttgttttctttgttgctgcagtagttttggtagcatggccatgccatggcgcaggctaccaaaggttccctctccgaatgaaaactggctatggtgagcgttcttcggaggtaaaatgcgcaagttttaggcttgctgtggaagcacacaacatccgagcctttaaaaccattcctgaagagtgcgttgaaccaacaaaggactacattaatggcgaacaatttagatcagactctaaaacagttaaccaacaagctttcttttatgctagtgaacgcgaagtccatcacaacgacataattaatattcggcatagataacacggtaccctctaatatcccatac

SEQ ID NO: 58395 - DNA, 262 bp, Glycine max
gggaaaagttcttcattaagacgatggcttgctatttgcactgatgatttaattgggaatgggaagtaccaaacaacttctaatcttctgcgcaagtatcttggagattttctaattgcttcatatttaaatgttgttgaagagtctggttatgatgagagacatgcaaaggaaattgagagagctgttcttttgcaaactcttgattgtttctggagagatcatcttgtaaacatgaataggctcagctctgcggtgaaca

SEQ ID NO: 58396 - DNA, 175 bp, Glycine max
gtggggtgcggtgggtttgttgctctcttttcctggcttccctgtctctgtcgttccggcctttgttttcgtctttccggtgcgttttcggtggcctcggctctctctttcttctggctctcgtgtctctcgcttccggctgtgtcttcttcgcgtttcctttcggtgtccggtg

SEQ ID NO: 58397 - DNA, 411 bp, Glycine max
gaaggtgcaagagtttgttgtgagctataagctagtttatcgtgaggagaatatgaagttgtttgttttctttgttgctgcagtagttttggtagcatggccatgccatggcgcaggctaccaaaggttccctctccgaatgaaaactggctatggtgagcgttcttcggaggtaaaatgcgcaagttttaggcttgctgtggaagcacacaacatccgagcctttaaaaccattcctgaagagtgcgttgaaccaacaaaggactacattaatggcgaacaatttagatcagactctaaaacagttaaccaacaagctttcttttatgctagtgaacgcgaagtccatcacaacgacatatttataatcggcatagataacaccgtactctctaatatcccatactatga

SEQ ID NO: 58398 - DNA, 397 bp, Glycine max
ggtgcacaagtgagtttgttgatcgagataactagaaacagtgtgatgaaaatgaaggtccttgttttcttcgttgctacaattttggtagcatggcaatgccatgcgtacgatatgttccctctccgaatgaacactggctatggtgcccgtactccggaggtgaaatgcgcaagttggaggcttgctgtggaagcacacaacatctttggctttgagaccattcctgaagagtgcgttgaagcaacaaaggaatacatccatggcgaacaatatagattagactccaaaacggttaaccaacaagcttacttttatgccagagacctcgaagtccatcccaaggacacatttgtgttcagtatagatggcaccgtactctctaatatccatacta

SEQ ID NO: 58399 - DNA, 398 bp, Glycine max
ggcacaagtgagtttgttgatcgagataactagaaacagtgtgatgaaaatgaaggtccttgttttcttcgttgctacaattttggtagcatggcaatgccatgcgtacgatatgttccctctccgaatgaacactggctatggtgcccgtactccggaggtgaaatgcgcaagttggaggcttgctgtggaagcacacaacatctttggctttgagaccattcctgaagagtgcgttgaagcaacaaaggaatacatccatggcgaacaatatagatcagactccaaaacagttaaccaacaagcttacttttatgccagagacctcgaagtccatccccaaggacacatttgtggtcagtatagatggcaccgtactctctaatattccatactac

SEQ ID NO: 58400 - DNA, 394 bp, Glycine max
aattcccgggtcgacacacgcgtcagggctgcacgacagaagggtggatgtagcattgatcaaggtgaaccacataattttgtgtgttctttctctcctttcttctctttcaattctgctacaattttgtgtgtatgacatttatggtctattgcattttctgctactttcttgtttgttcttcatcacttccataacacttataatgtgtgcatgtgacagaagaatttccacttggccgacccttggcttgcggcaacatgaaacaacaaaaatgtaacttgagttacatttcatgggaccatagctgaatcaccccctggaaatagactcctttaaccattcagctaaatgaaaatgaaaaccactgctcaaggtacagtcacaccaatca

SEQ ID NO: 58401 - DNA, 409 bp, Glycine max
ggtgcacaagtgagtttgttgatcgagataactagaaacagtgtgatgaaaatgaaggtccttgttttcttcgttgctacaattttggtagcatggcaatgccatgcgtacgatatgttccctctccgaatgaacactggctatggtgcccgtactccggaggtgaaatgcgcaagttggaggcttgctgtggaagcacacaacatctttggctttgagaccattcctgaagagtgcgttgaagcaacaaaggaatacatccatggcgaacaatatagatcagactccaaaacagttaaccaacaagcttacttttatgccagagacctcgaagtccatcccaaggacacatttgtgttaattataaatggcaccgtactctctaatattccatactacaaaaaacatg

SEQ ID NO: 58402 - DNA, 406 bp, Glycine max
ggcacaagtgagtttgttgatcgagataactagaaacagtgtgatgaaaatgaaggtccttgttttcttcgttgctacaattttggtagcatggcaatgccatgcgtacgatatgttccctctccaaatgaacactggctatggtgcccgtactccggaggtgaaatgcgcaagttggaggcttgctgtggaagcacacaacatctttggctttgagaccattcctgaagagtgcgttgaagcaacaaaggaatacatccatggcgaacaatatagatcagactccaaaacagttaaccaacaagcttacttttatgccagagacctcgaagtccatcccaaggacacatttgtgttcagtatagatggcaccgtactctctaatattccatactacaaaaaacat

SEQ ID NO: 58403 - DNA, 408 bp, Glycine max
ggcacaagtgagtttgttgatcgagataactagaaacagtgtgatgaaaatgaaggtccttgttttcttcgttgctacaattttggtagcatggcaatgccatgcgtacgatatgttccctctccgaatgaacactggctatggtgcccgtactccggaggtgaaatgcgcaagttggaggcttgctgtggaagcacacaacatctttggctttgagaccattcctgaagagtgcgttgaagcaacaaaggaatacatccatggcgaacaatatagatcagactccaaaacagttaaccaacaagcttacttttatgccagagacctcgaagtcaatcccaaggacacatttggtgtcagtaatagatggcaccgtactctctaatattccatactacaaaaaacatg

SEQ ID NO: 58404 - DNA, 333 bp, Glycine max
acaaaggggaaaacaacaacaaaacaaacccaataaaaagggttcctttggaaccttcctaatggtgcctcctggaacccctaacctcaagcctcaaaggcctgccaattaataaaaaccaatttaaaaaccaacaattttcaaacctccaatgttcaagccaacaatgttcaaaccaacggtttaaaaaccaaaaccaacggtttaaaaaccgaaaccaacggtttaaaaaccaacatattagaagccaacattcaagaaaccaacttaaggaaagtatcctccaattgaagacaacaaccaagcctaaagccagccatgaagtccaataac

SEQ ID NO: 58405 - DNA, 363 bp, Glycine max
ggcacaagtgagtttgttgatcgagataactagaaacagtgtgatgaaaatgaaggtccttgttttcttcgttgctacaattttggtagcatggcaatgccatgcgtacgatatgttccctctccgaatgaacactggctatggtgcccgtactccggaggtgaaatgcgcaagttggaggcttgctgtggaagcacacaacatctttggctttgagaccattcctgaagagtgcgttgaagcaacaaaggaatacatccatggcgaacaatatagatcagactccaaaacagttaaccaacaagcttacttttatgccagagacctcgaagtccatcccaaagacacatttttgttcaattt

SEQ ID NO: 58406 - DNA, 412 bp, Glycine max
gcacaagtgagtttgttgatcgagataactagaaacagtgtgatgaaaatgaaggtccttgttttcttcgttgctacaattttggtagcatggcaatgccatgcgtacgatatgttccctctccgaatgaacactggctatggtgcccgtactccggaggtgaaatgcgcaagttggaggcttgctgtggaagcacacaacatctttggctttgagaccattcctgaagagtgcgttgaagcaacaaaggaatacatccatggcgaacaatatagatcagactccaaaacagttaaccaacaagcttacttttatgccagagaactcgaagtccatcccaaggacacatttgtgttcagtatagatggcaccgtactctctaatatttcatactacaaaaaaacatggatat

SEQ ID NO: 58407 - DNA, 393 bp, Glycine max
gggcacaagtttgttgagatagctagaagcaataagatgaaaatgaaagtgcttgttttgtttgttgctacagttttggtagcatatgaatgccatggctcagactaccagaagttccctctccaaatgaaaactgggtttggtgggcaatacagcaatgaggtggcatgtgccagttggaggcttggcgtggaagcaaacaacgtagtcaagtggcaaactgttcctgcagcttgcggagagtacatagctgactacgttctaggagaccaatatagatcagattccaaaacagttaaccaacaagcttatttctatgctaaatccctcaaactcaccaacaaagatgtccttggccttggactttgacgacactactctctctaatctcca

SEQ ID NO: 58408 - DNA, 398 bp, Glycine max
  unsure (1)..(398): unsure at all n locations
gacaagtgagtttgttgatcgagataactagaaacagtgtgatgaaaatgaaggtccttgttttcttcgttgctacaattttggtagcatggcaatgccatgcgtacgatatgttccctctccgaatgaacactggctatggtgcccgtactccggaggtgaaatgcgcaagttggaggcttgctgtggaagcacacaacatctttggctttgagaccattcctgaagagtgcgttgaagcaacaaaggaatacatccatggcgaacaatatagatcagactccaaaacagttaaccaacaagcttacttttatgccagagacctcgaagtcaatcncaatgacacatttgtgttcagtataaatggcaccgtactctctaatattccatactacaaa

SEQ ID NO: 58409 - DNA, 301 bp, Glycine max
tggcactcaccacacaatctcaaccggtaccgttaccataaaagcaaaccctttagtgatcttccacatcttcaccataaccaactggcttcacaaacccaaatcttaagcgatccaccaccacgacaataatggctcaaggcttcaaatgttcaatgttttcaccacatgttccccatttaatgactcatcaccaatgtcattgtaacagattttcataaagcgttaagcaattgagcactccaagatgcagtacctttcaaacattgtcggaaagatgtccattgtcgcaattgccatc

SEQ ID NO: 58410 - DNA, 413 bp, Glycine max
ggcacaagtgagtttgttgatcgagataactagaaacagtgtgatgaaaatgaaggtccttgttttcttcgttgctacaattttggtagcatggcaatgccatgcgtacgatatgttccctctccgaatgaacactggctatggtgcccgtactccggaggtgaaatgcgcaagttggaggcttgctgtggaagcacacaacatctttggctttgagaccattcctgaagagtgcgttgaagcaacaaaggaatacatccatggcgaacaatatagatcagactccaaaacagttaaccaacaagcttacttttatgccagagacctcgaagtccatcccaaggacacatttggtgttcagtatagatggcaccgtactctctaatattccatactacaaaaaacatggatat

SEQ ID NO: 58411 - DNA, 409 bp, Glycine max
ggcacaagtgagtttgttgatcgagataactagaaacagtgtgatgaaaatgaaggtccttgttttcttcgttgctacaattttggtagcatggcaatgccatgcgtacgatatgttccctctccgaatgaacactggctatggtgcccgtactccggaggtgaaatgcgcaagttggaggcttgctgtggaagcacacaacatctttggctttgagaccattcctgaagagtgcgttgaagcaacaaaggaatacatccatggcgaacaatatagatcagactccaaaacagttaaccaacaagcttacttttatgccagagacctcgaagtccatcccaaagacacaattgtggtcagttatagatggcaccgtactctctaatattccatactacaaaaaacatgg

SEQ ID NO: 58412 - DNA, 341 bp, Glycine max
aagaggttattctatcatttctatgcaaggatttctgagttctcaatcaaaaaagccaataaactgcgcacaatcctgctaatttttgcaatgtgtgggggcaacagtagtttgtcctccactcctctttctgagtgctgtggtccacttgtctatatattgagacatgcttctctatgctccctacgacttattacagcaataaatttatttgtctggtggaactcgtgttgttcaaaacatgcaaattagatatggatctttctgattagtattcttagtattgattaaaacattaaaaaatgaaaatatttatggagaataacataaaaaaaacatta

SEQ ID NO: 58413 - DNA, 61 bp, Glycine max
ttccgctcccagaatacgacctaatggggagaccagtcttccgtcccgttgtcttgcctct

SEQ ID NO: 58414 - DNA, 401 bp, Glycine max
  unsure (1)..(401): unsure at all n locations
ggcacaagtgagtttgttgatcgagataactagaaacagtgtgatgaaaatgaaggtccttgttttcttcgttgctacaattttggtagcatggcaatgccatgcgtacgatatgttccctctccgaatgaacactggctatggtgcccgtactccggaggtgaaatgcgcaagttggaggcttgctgtggaagcacacaacatctttggctttgagaccattcctgaagagtgcgttgaagcaacaaagggatacatccatggcgaacaatatagatcagactccaaaacagttaaccaacaagcttacttttatgccagagacctcgaagtccatcccaaggacacatttgtgttcagtaaaanatgcgaccgtactctctaatattccatactacaaa

SEQ ID NO: 58415 - DNA, 321 bp, Glycine max
accggtaacgcattcccgtctcgacacacgcgtcagtcgggtggcaaaaaaacaccagaggggattcattcaccagttatcaaaggtcgcatatgcacgtggagacgtatctctaagtcgcattcggaccacgtcttcaaatacgcaccatcaactaatacacagtggtgttcacggccatgagcatgggcatcgcaatggtccttggcgttttggcggaattaaccgttctaggttcaaggattggaattttggatttgccacttaattgtccagggggcattcaaccggtggggcattctttgggttccccgaaggcaa

SEQ ID NO: 58416 - DNA, 392 bp, Glycine max
catgtaggattcactcacgttggggaggttatgattttgagaggcaagtgaccagcgtcgcagtcattaggaccaagtcgaacattgtggtattcgtgtggggagtgctcgctagagattcagattctgcctgtttgagaaaattgtctaatttatttagtataaattcaaattgtcttgttcgaaacaacgtatgtctttgaaggtgttcactgctctttcgaatatatccaatatttaatactgagaagcatgttctccatgcatgtttctactttctagtgagccttttagatatcaaatatcgttaattgttgattttattagattactataattagacaaatatcggtgcactcactccaaaaattttttgccctcaatacatattt

SEQ ID NO: 58417 - DNA, 405 bp, Glycine max
  unsure (1)..(405): unsure at all n locations
gaaggtgcaagagtttgttgtgagctataagctagtttatcgtgaggagaatatgaagttgtttgttttctttgttgctgcagtagttttggtagcatggccatgccatggcgcaggctaccaaaggttccctctccgaatgaaaactggctatggtgagcgttcttcggaggtaaaatgcgcaagttttaggcttgctgtggaagcacacaacatccgagcctttaaaaccattcctgaagagtgcgttgaaccaacaaaggactacattaatggcgaacaatttagatcagactctaaaacagttaaccaacaagctttcctttatgctagtgaacgcgaagtccatcacancgacatatttatattcggcatagataacaccgtactctctaatatcccata

SEQ ID NO: 58418 - DNA, 403 bp, Glycine max
  unsure (1)..(403): unsure at all n locations
ggcacaagtgagtttgttgatcgagataactagaaacagtgtgatgaaaatgaaggtccttgttttcttcgttgctacaattttggtagcatggcaatgccatgcgtacgatatgttccctctccgaatgaacactggctatggtgcccgtactccggaggtgaaatgcgcaagttggaggcttgctgtggaagcacacaacatctttggctttgagaccattcctgaagagtgcgttgaagcaacaaaggaatacatccatggcgaacaatatagatcagactccanaacagttaaccaacaagcttacttttatgccagagacctcgaagtccatcccaaggacacatttgtgttcagttaaaaatgggaccgtactctctaatattccatactacaaaaa

SEQ ID NO: 58419 - DNA, 340 bp, Glycine max
ggcacaagtgagtttgttgatcgagataactagaaacagtgtgatgaaaatgaaggtccttgttttcttcgttgctacaattttggtagcatggcaatgccatgcgtacgatatgttccctctccgaatgaacactggctatggtgcccgtactccggaggtgaaatgcgcaagttggaggcttgctgtggaagcacacaacatctttggctttgagaccattcctgaagagtgcgttgaagcaacaaaggaatacatccatggcgaacaatatagatcagactccaaaacagttaaccaacaagcttacttttatgccagagacctcgaagtccatccc

SEQ ID NO: 58420 - DNA, 406 bp, Glycine max
ggcacaagtttgttgagatagctagaagcaataagatgaaaatgaaagtgcttgttttgtttgttgctacagttttggtagcatatgaatgccatggctcagactaccaggagttccctctccaaatgaaaactgggtttggtgggcaatacagcaatgaggtggcatgtgccagttggaggcttggcgtggaagcaaacagcgtagtcaagtggcaaactgttcctgcagcttgcggagagtacatagctgactacgttctaggagaccaatatagatcagattccaaaacagttaaccaacaagcttatttctatgctaaatccctcaaacccaccaacaaagatgtccttgtcctggacgttgacgacactactctctctaatctccagtattttgctaacca

SEQ ID NO: 58421 - DNA, 348 bp, Glycine max
ggcacaagtgagtttgttgatcgagataactagaaacagtgtgatgaaaatgaaggtccttgttttcttcgttgctacaattttggtagcatggcaatgccatgcgtacgatatgttccctctccgaatgaacactggctatggtgcccgtactccggaggtgaaatgcgcaagttggaggcttgctgtggaagcacacaacatctttggctttgaggccattcctgaagagtgcgttgaagcaacaaaggaatacatccatggcgaacaatatagatcagactccaaaacagttaaccaacaagcttacttttatgccagagacctcgaagtccatcccaaagggac

SEQ ID NO: 58422 - DNA, 344 bp, Glycine max
ggcacaagtttgttgagatagctagaagcaataagatgaaaatgaaagtgcttgttttgtttgttgctacagttttggtagcatatgaatgccatggctcagactaccagaagttccctctccaaatgaaaactgggtttggtgggcaatacagcaatgaggtggcatgtgccagttggaggcttggcgtggaagcaaacaacgtagtcaagtggcaaactgttcctgcagcttgcggagagtacatagctgactacgttctaggagaccaatatagatcagattccaaaacagttaaccaacaagcttatttctatgctaaatccctcaaactcaccaacaaa

SEQ ID NO: 58423 - DNA, 407 bp, Glycine max
gaaggtgcaagagtttgttgtgagctataagctagtttatcgtgaggagaatatgaagttgtttgttttctttgttgctgcagtagttttggtagcatggccatgccatggcgcaggctaccaaaggttccctctccgaatgaaaactggctatggtgagcgttcttcggaggtaaaatgcgcaagttttaggcttgctgtggaagcacacaacatccgagcctttaaaaccattcctgaagagtgcgttgaaccaacaaaggactacattaatggcgaacaatttagatcagactctaaaacagttaaccaacaagctttcttttatgctaatgaacgcgaagttcaatcaaaacgacatatttatattcggcatagataacaccgtactctccaatatcgcatac

SEQ ID NO: 58424 - DNA, 396 bp, Glycine max
ggcacaagtgagtttgttgatcgagataactagaaacagtgtgatgaaaatgaaggtccttgttttcttcgttgctacaattttggtagcatggcaatgccatgcgtacgatatgttccctctccgaatgaacactggctatggtgcccgtactccggaggtgaaatgcgcaagttggaggcttgctgtggaagcacacaacatctttggctttgagaccattcctgaagagtgcgttgaagcaacaaaggaatacatccatggcgaacaatatagattagactccaaaacagttaaccaacaagcttacttttatgccagaagactcgaagtccatcccaaggacacatttgtgttcaatatagatggaacgtaccctctaatattccatactac

SEQ ID NO: 58425 - DNA, 60 bp, Glycine max
gacacttcaagatcctctagaaacacttcttttctctctctctctctcggattctgagct

SEQ ID NO: 58426 - DNA, 359 bp, Glycine max
actattatgtgtcccttgcaccatcagcttctctctttggttcccctctcatcgcgtcataagcacctcaattctcactattctttacaaatttgaggttcaaacgctacgactagggtgcatcccgtgggttcctaaatattttttttcgattggggtgcagggagcaaataagggggtgtagtaagtaaaatccattagtgatgatgtatataaaaaccaaaaaaaatattacatgtactaaaagcaaaaaaaaagtttaggtagtaatttgaaatgtttaaaccatttttttatatctctaacacttttactattattttctctatttcctctttatcttaggataaattaccaca

SEQ ID NO: 58427 - DNA, 163 bp, Glycine max
tggggcgcaccttagtctgtcgatctcgctccttgggtccagtctcatcgctctcctaggcacctcagttctcagtgttccttactgatttgtggttcaaacgctaggactagggtgcatcccgtctgttcctaaatagtttttttcgactggggtgcaccga

SEQ ID NO: 58428 - DNA, 296 bp, Glycine max
agtgaggatacgacagaacggggtgttgagcagggacaaagatgtctggtatgggagatcggtacatgggcatcgcacattacacggtgatgattcgattgttggttaaacatagataatcggaacgtcgcagaatccaagtcctcaggatgaaatcgagctccgtcaacggctaaccaggtctgctccacttcagttcgatcacttcagagattcatgagactgcctttaagaatgaaagtgtgggtttggtcaccagagagcagtatgtagatacgagggttaacattcacatc

SEQ ID NO: 58429 - DNA, 382 bp, Glycine max
ggaagagtgaagagaatggctcccaagggtttaacctttctggctgtgttaatatgcgtttcagcactgtcactgagtccttctgttgcgggggaagggcaaaataatggccttgttatgaacttctacaaggaatcatgccctcaggctgaagacatcatcacagaacaagtcaagcttctctacaagcgccacaagaacactgctttctcctggctcaggaacatcttccatgactgtgctgttcagagttgtgatgcttcactgttgctggactccacaagaaggagcttgtctgagaaggaaacagatagaagctttgggttgaaaaatttcaaggtaaattgagaccatcaaagaagctttggaaagagaatgccct

SEQ ID NO: 58430 - DNA, 382 bp, Glycine max
ggcacaagtttgttgagatagctagaagcaataagatgaaaatgaaagtgcttgttttgtttgttgctacagttttggtagcatatgaatgccatggctcagactaccagaagttccctctccaaatgaaaactgggtttggtgggcaatacagcaatgaggtggcatgtgccagttggaggcttggcgtggaagcatacaacgtagtcaagtggcaaactgttcctgcagcttgcggagagtacatagctgactacgttctaagagaccaatatagatcagattccaaaacagttaaccaacaagcttatttctatgctaaatccctcaaactcaccaacaaagatgtccttgtcttggacgttgacgacactactctctc

SEQ ID NO: 58431 - DNA, 297 bp, Glycine max
gcacaaatgactttggtggttcaagatatctagaaacattgtgatgaaaatgaaggtccttgttttcttcgttgctacaattttggtaccatggcaatgccgtgcgtacgatatgttccctctccgaatgaacactgggtatggtgcccgtactccggaggtgaaatgcgcaagttggaggcttgctgtggaagcacacaacatctttggctttgagaccattcctgaaaagtgcgttgatgcaacacaggaatacatccatggcgatcaatatagatcagactctataacagttaa

SEQ ID NO: 58432 - DNA, 391 bp, Glycine max
  unsure (1)..(391): unsure at all n locations
gaaggtgcaagagtttgttgtgagctataagctagtttatcgtgaggagaatatgaagttgtttgttttctttgttgctgcattagttttggtaacatggccatgccatggcgcaggctaccaaaggttccctctccgaatgaaaactggctatggtgagcgttcttcggaggtaaaatgcgcaagttttangcttgctgtggaagcacacaacatccgagcctttaaaaccattcctgaagagtgcgttgaaccaacacatgactacattaatggctaacactttagatcagactctaaaacagttaaccaacaagctttcttttatgccaatgaaccccaaggttcaacacacctacatatttatattcggcatagataacaccgtact

SEQ ID NO: 58433 - DNA, 387 bp, Glycine max
ggcacaagtgagtttgttgatcgagataactagaaacagtgtgatgaaaatgaaagtccatgttttcttcgttgctacaattttggtagcatggtaatgccatgcgtacgatatgttccctctccgaatgaacactggctatggtgcccgtactccggatgtgaaatgcgcaagttggaggcttgctgtggaagcacacaacatctttggctttgagaccattcctgaagagtgcgttgaagcaacaaaggaatacatccatggcgaacaatatagatcatactccaaaacagttaaccaacaagcttacttttatgccaaagaactccaatttcaatcccaaggaaacatttgtgttcagtatagatggcaccgtactctctaata

SEQ ID NO: 58434 - DNA, 302 bp, Glycine max
ggtgctcaatcaactatctattataagcatcttgtcctcctcatagtcttcttcttcatcatgttcgtgttctatctgtagcgagcatcacagattcgagatgcagctgcatggttgggtatgtgtgtgcttccggacatgggtgtggacattcgtgcagcagtgtgccctttgtgcgtgaaaggtcacgtctaatgtgacccttgcagtgcatggttatgatacatcagcaagctcctatattgccggtgctgtgactatgttgcaaggcaagatgagggttagcacagatgttgtgtaca

SEQ ID NO: 58435 - DNA, 338 bp, Glycine max
ggcacaagtttgttgagatagctagaagcaataagatgaaaatgaaagtgcttgttttgtttgttgctacagttttggtagcatatgaatgccatggctcagactaccagaagttccctctccaaatgaaaactgggtttggtgggcaatacagcaatgaggtggcatgtgccagttggaggcttggcgtggaagcaaacaacgtagtcaagtggcaaactgttcctgcagcttgcggagagtacatagctgactacgttctaggagaccaatatagatcagattccaaaacagttaaccaacaagcttatttctatgctaaatccctcaaactcacc

SEQ ID NO: 58436 - DNA, 388 bp, Glycine max
ggcacaagtgagtttgttgatcgagataactagaaacagtgtgatgaaaatgaaggtccttgttttcttcgttgctacaattttggtagcatggcaatgccatgcgtacgatatgttccctctccgaatgaacactggctatggtgcccgtactccggaggtgaaatgcgcaagttggaggcttgctgtggaagcacacaacatctttggctttgagaccattcctgaagagtgcgttgaagcaacaaacgaatacatccatggcgaacaatatagatcagactccaaaacagttaaccaacaagcttacttttatgccagagacctccaagttcatccaaaggacaaatttgggtccagtatagatggcaccgtactctctaatatt

SEQ ID NO: 58437 - DNA, 308 bp, Glycine max
ggtgcacaagtgagtttgttgatcgagataactagaaacagtgtgatgaaaatgaaggtccttgttttcttcgttgctacaattttggtagcatggcaatgccatgcgtacgatatgttccctctccgaatgaacactggctatggtgcccgtactccggaggtgaaatgcgcaagttggaggcttgctgtggaagcacacaacatctttggctttgagaccattcctgaagagtgcgttgaagcaacataggaatacatccatggcgaacaatatagatcagactccaaaacagttaaccaacaagc

SEQ ID NO: 58438 - DNA, 391 bp, Glycine max
ggcacaagtgagtttgttgatcgagataactagaaacagtgtgatgaaaatgaaggtccttgttttcttcgttgctacaattttggtagcatggcaatgccatgcgtacgatatgttccctctccgaatgaacactggctatggtgcccgtactccggaggtgaaatgcgcaagttggaggcttgctgtggaagcacacaacatctttggctttgagaccattcctgaagagtgcgttgaagcaacaaaggaatacatccatggcgaacaatatagatcagactccaaaacagttaaccaacaagcttacttttatgccagagacctcgaagtccatcccaagggacacaatttggggtcattataaatggcaccgtactctctaatattc

SEQ ID NO: 58439 - DNA, 358 bp, Glycine max
ggcacaagtgagtttgttgatcgagataactagaaacagtgtgatgaaaatgaaggtccttgttttcttcgttgctacaattttggtagcatggcaatgccatgcgtacgatatgttccctctccgaatgaacactggctatggtgcccgtactccggaggtgaaatgcgcaagttggaagcttgctgtggaagcacacaacatctttggctttgagaccattcctgaagagtgcgttgaagcaacaaaggaatacatccatggcgaacaatatagatcagactccaaaacagttaaccaacaagcttacttttatgccagagacctcgaagtccatcccaacgacacatttgtgttc

SEQ ID NO: 58440 - DNA, 392 bp, Glycine max
gcacaagtgagtttgttgatcgagataactagaaacagtgtgatgaaaatgaaggtccttgttttcttcgttgctagaattttggtagcatggcaatgccatgcgtacgatatgttccctctccgaatgaacactggctatggtgcccgtactccggaggtgaaatgcgcaagttggaggcttgctgtggaagcacacaacatctttggctttgagaccattcctgaagagtgcgttgaagcaacaaaggaatacatccatggcgaacaatatagatcagactccaaaacagttaaccaacaagcttacttttatgccagagacctcgaagtccatcccaagggacaacatttgtggtcagtatagatggcaccgtactctctaatattcca

SEQ ID NO: 58441 - DNA, 327 bp, Glycine max
ggcacaagtgagtttgttgatcgagataactagaaacagtgtgatgaaaatgaaggtccttgttttcttcgttgctacaattttggtagcatggcaatgccatgcgtacgatatgttccctctccgaatgaacactggctatggtgcccgtactccggaggtgaaatgcgcaagttggaggcttgctgtggaagcacacaacatctttggctttgagaccattcctgaagagtgcgttgaagcaacaaaggaatacatccatggcgaacaatatagatcagactccaaaacagttaaccaacaagcttacttttatgccagagacct

SEQ ID NO: 58442 - DNA, 390 bp, Glycine max
  unsure (1)..(390): unsure at all n locations
ctatccaaattcattggcgtgtggccattttcaaattgaatggagttatggaattggggttgagattcgattagacagacacaccatggacccagagtcaccatatgctaggggtatgtacaaaatcttgtccaaattaaattctctcaaaaagattgaaaaaggtgctaggggtgtcattgactctagacaaagtacatttttggaaggaagatatttattacaagtgcacttgtggctaataagggggtgaaggaggcaaaaaagaaagaagaaaaaatgcctcatttttaaagttataaaaagacatgactcaatgagttggaagtttcttctatatatgctttanagactggaattttaagagaagtgaattgggtgttgtttggt

SEQ ID NO: 58443 - DNA, 397 bp, Glycine max
ggcacaagtgagtttgttgatcgagataactagaaacagtgtgatgaaaatgaaggtccttgttttcttcgttgctacaattttggtagcatggcaatgccatgcgtacgatatgttccctctccgaatgaacactggctatggtgcccgtactccggaggtgaaatgcgcaagttggaggcttgctgtggaagcacacaacatctttggctttgagaccattcctgaagagtgcgttgaagcaacaaaggaatacatccatggcgaacaatatagatcagactccaaaacagttaaccaacaagcttacttttatgccagagaactcgaagtcaatcccaaggacacatttgtgttcagtatagatgggcacgtactctctaatattccatactac

SEQ ID NO: 58444 - DNA, 329 bp, Glycine max
agtgcacaagtgagtttgttgatcgagataactagaaacagtgtgatgaaaatgaaggtccttgttttcttcgttgctacaattttggtagcatggcaatgccatgcgtacgatatgttccctctccgaatgaacactggctatggtgcccgtactccggaggtgaaatgcgcaagttggaggcttgctgtggaagcacacaacatctttggctttgagaccattcctgaagagtgcgttgaagcaacaaaggaatacatccatggcgaacaatatagatcagactccaaaacagttaaccaacaagcttacttttatgccagagacct

SEQ ID NO: 58445 - DNA, 272 bp, Glycine max
  unsure (1)..(272): unsure at all n locations
gacccccaaaccctgctgcatangaagaaaccctagcctctcaccctccctgcgacacgatgcagatcttcgtgaaaaccctaacgggtaagacgatcacccttgaggtggagtcttctgacaccatcgacaacgtgaaggccaagatccaggacaaggaaggcatccctccggaccagcagcgcctcatcttcgccggaaagcagctggaggacggccgcaccctcgccgactacaacatccagaaggagtccaccctccacctcgtcctc

SEQ ID NO: 58446 - DNA, 386 bp, Glycine max
ccggctcgacccacacgtcaggacgacagaagggggcacaagtttgttgagatagctagaagcaataagatgaaaatgaaagtgcttgttttgtttgttgctacagttttggtagcatatgaatgccatggctcagactaccagaagttccctctccaaatgaaaactgggtttggtgggcaatacagcaatgaggtggcatgtgccagttggaggcttggcgtggaagcaaacaacgtagtcaagtggcaaactgttcctgcagcttgcggagagtacatagctgactacgttctaggagaccaatatagatcagattccaaaacagttaaccaacaagcttatttctatgctaaatccctcaaactcaccaacaaagatgtcct

SEQ ID NO: 58447 - DNA, 377 bp, Glycine max
ggcacaagtgagtttgttgatcgagataactagaaacagtgtgatgaaaatgaaggtccttgttttcttcgttgctacaattttggtagcatggcaatgccatgcgtacgatatgttccctctccgaatgaacactggctatggtgcccgtactccggaggtgaaatgcgcaagttggaggcttgctgtggaagcacacaacatctttggctttgagaccattcctgaagagtgcgttgaagcaacaaaggaatacatccatggcgaacaatatagatcagactccaaaacagttaaccaacaagcttacttttatgccagaaaactcgaaattcaatcccaaggacacatttgtgttcagtatagatggcaccgta

SEQ ID NO: 58448 - DNA, 315 bp, Glycine max
gggtgaggagtcatgggctctagtccgtcaggatttaattagagagcttcaacagtggcaagataattatgcgaaactctttggtagcaatgaccgagtggctgaactgaggaaatctttgtatgttggcaagcaggcatctgtcgctagttggatgaccataccagatatgggctatgtaattgcctcaagatataacgtggtcctagtcactttatccttgcaggagtgcatgacctttttccctcttagaggacgaccaccactatctcagtcaagtcaccgtcttatttccattgggtttgtgcataaatg

SEQ ID NO: 58449 - DNA, 354 bp, Glycine max
  unsure (1)..(354): unsure at all n locations
ggcacaagtttgttgagatagctagaagcaataagatgaaaatgaaagtgcttgttttgtttgttgctacagttttggtagcatatgaatgccatggctcagactaccagaagttccctctccaaatgaaaactgggtttggtgggcaatacagcaatgaggtggcatgtgccagttggaggcttggcgtggaagcaaacaacgtagtcaagtggcaaactgttcctgcagcttgcggagagtacatagctgactacgttctangagaccaatatagatcagattccaaaacagttaaccaacaagcttatttctatgctaaatccctcaaactcaccaacaaagatgtctttg

SEQ ID NO: 58450 - DNA, 330 bp, Glycine max
ggcacaagtgagtttgttgatcgagataacaagaaacagtgtgatgaaaatgaaggtccttgttttcttcgttgctacaattttggtagcatggcaatgccatgcgtacgatatgttccctctccgaatgaacactggctatggtgcccgtactccggaggtgaaatgcgcaagttggaggcttgctgtggaagcacacaacatctttggctttgagaccattcctgaagagtgcgttgaagcaacaaaggaatacatccatggcgaacaatatagatcagactccaaaacagttaaccaacaagcttacttttatgccagagaactcga

SEQ ID NO: 58451 - DNA, 432 bp, Glycine max
gacccacacgtacgacggcgacagaaggggagaactgaaaatgttgatgatgaacacaatgcaatagctgtggtggagtctgagcgagggaggaatcattcaaggagacatgatgatccaagaggaagatcaaaatcgcaattgcatccacaacgagatatgagtaacattcaatgttattattgtggtgagaatgatcatgtgcaagtgaggtgtaaacaaatgaaggaggatttgaaaaaattaagagatatgaacaaagatgacgccaactcccaaactaatgtagtaaaaagtgtggaagatgaagatgatgtgtttttggcaacaaatgatggggttgctaaaacaaaatggatgatggattctgctgtctcaaagcacatttgcagagatcgagatatgtttgatactttgaaaatcgatggggaa

SEQ ID NO: 58452 - DNA, 386 bp, Glycine max
ggcacaagtgagtttgttgatcgagataactagaaacagtgtgatgaaaatgaaggtccttgttttcttcgttgctacaattttggtagcatggcaatgccatgcgtacgatatgttccctctccgaatgaacactggctatggtgcccgtacttcggaggtgaaatgcgcaagttggaggcttgctgtggaagcacacaacatctttggctttgagaccattcctgaagagtgcgttgaagcaacaaagggatacatccatggcgaacaatatagatcagactccaaaacagttaaccaacaagcttacttttatgccagagaactcgaagtccaacccaaggacacatttgtgtccagtatagatggcaccgtactctctaata

SEQ ID NO: 58453 - DNA, 326 bp, Glycine max
gaaagtgcacaagtgagtttgttgatcgagataactagaaacagtgtgatgaaaatgaaggtccttgttttcttcgttgctacaattttggtagcatggcaatgccatgcgtacgatatgttccctctccgaatgaacactggctatggtgcccgtactccggaggtgaaatgcgcaagttggaggcttgctgtggaagcacacaacatctttggctttgagaccattcctgaagagtgcgttgaagcaacaaaggaatacatccatggcgaacaatatagatcagactccaaaacagttaaccaacaagcttacttttatgccag

SEQ ID NO: 58454 - DNA, 305 bp, Glycine max
gaaggtgcaagagtttgttgtgagctataagctagtttatcgtgaggagaatatgaagttgtttgttttctttgttgctgcagtagttttggtagcatggccatgccatggcgcaggctaccaaaggttccctctccgaatgaaaactggctatggtgagcgttcttcggaggtaaaatgcgcaagttttaggcttgctgtggaagcacacaacatccgagcctttaaaaccattcctgaagagtgcgttgaaccaacaaaggactacattaatggcgaacaatttagatcagactctaaaacag

SEQ ID NO: 58455 - DNA, 346 bp, Glycine max
agaggctgcgacgatcgagatacggggaaatatcacattgacaaagaaccccattcttgtgggagatagatggcacgcttgtcactgctcattttcgcgttctgcgccgtcgccgtcgccgtcgccgtctcgggctcatcgttctaccatgccgcacgcaaccgtttgtcctctgacctggagtcacatgtgcaggatgtgctttgatcgagcgtccacgctccctctttcacgcgcgccgtgcgccgacacggcatccgctcctgtaccgtcaatcatgtccgctgcctcgtcccgatcatcgccgacattcatggccaccacttttgctccaactcgaggtcac

SEQ ID NO: 58456 - DNA, 384 bp, Glycine max
gaaggtgcaagagtttgttgtgagctataagctagtttatcgtgaggagaatatgaagttgtttgttttctttgttgctgcagtagttttggtagcatggccatgccatggcgcatgctaccaaaggttccctctccgaatgaaaactggctatggtgagcgttcttcggaggtaaaatgcgcaagttttaggcttgctgtggaagcacacaacatccgagcctttaagaccattcctgaagagtgcgttgaaccaacaaaggactacattaatggcgaacaatttagatcagactctaacacagttaaccaacaagctttcctttatgctagtgaacgcgaagtcgatcacaacgacatatttatattcggcatacgatacac

SEQ ID NO: 58457 - DNA, 359 bp, Glycine max
gatcccattcccagttttccttccctccacaatggcagagaaactacagtacccctgtctctcttccttgttaaccctcatcctctgcatctccgccacttccactaacccacacaagtcccaaacccaagcccttcacctccatagcctccctgacccattcacactctcatggcccgaatccgccaccgtagaacgcgacccggaacccaacacatctctctctcttcatcagataaacgcactcaccttcaacaaaaccgcttcccaactcatccacgttagactcgtacgcgatgccagcaaggtcaaaagtctcactcacttatccgcatccaaaatcaaaactcgaaccgcca

SEQ ID NO: 58458 - DNA, 381 bp, Glycine max
gaaggtgcaagagtttgttgtgagctataagctagtttatcgtgaggagaatatgaagttgtttgttttctttgttgctgcagtagttttggtagcatggccatgccatggcgcaggctaccaaaggttccctctccgaatgaaaactggctatggtgagcgttcttcggaggtaaaatgcgcaagttttaggcttgctgtggaagcacacaacatccgagcctttaaaaccattcctgaagagtgcgttgaaccaacaaaggactacattaatggcgaacaatttagatcagactctaaaacagttaaccaacaagctttcttttatgctagtgaacgcgaagtccatcacaacgacatatttatatcggcatagataac

SEQ ID NO: 58459 - DNA, 239 bp, Glycine max
acgcgtcagtacaaagaagacaacaaaaggggacaacccacctattgacaaccccccttaatccaatccatccccccaattcctccaacctaaattcccgaaaaatggcaaaggctccggaaaaaaaccctccggccaaaaaggccccggcggaaaaaaacccaaaggcggaaaaaaaggttccaaaggaaggaaccgccggaaaaaaaaaaaaaaaaaggtcaaaaaaaaccttgaaa

SEQ ID NO: 58460 - DNA, 392 bp, Glycine max
  unsure (1)..(392): unsure at all n locations
ggaaacagagagtgatttcagtgagtgatcggtgttcacttgatctcatcataatcgtcagcgtcaattgaagaagatgccgatcagaaacatcgccgtcggaaggcctgaagaggcgactcaccccgacacgttgaaggcggctttggctgagttcatctcaaccttcatcttcgtgttcgccggctcaggctccggcatcgcctacaacaagctcaccgacaacggcgctgccacccctgccggcctcatctccgcctccatcgcccatgcattcgccctcttcgtcgccgtctccgtcggcgccaacatctccggcggccacgtcaaccccggcgtcaccnttcggcgccttcgtcggcggcaacatcaccttcctccgcggcatcgtc

SEQ ID NO: 58461 - DNA, 278 bp, Glycine max
agaggttccagttgaggaagaaccatgaagccaccggttacctacggatttagattccgttgcgtttgtttgatcaatcattatggttcaaggtatccttaaaacccttcttgataatctaaggtaatgtgtttctggttattacaaaaattttataaggatccccaaaaatttcaacaattgatatcagagccaccattacagttagataattgatatttaaagttatttgattctaattacaccaaaatgccttgggtaaaataaacctttttttt

SEQ ID NO: 58462 - DNA, 361 bp, Glycine max
gaaggtgcaagagtttgttgtgagctataagctagtttatcgtgaggagaatatgaagttgtttgttttctttgttgctgcagtagttttggtagcatggccatgccatggcgcaggctaccaaaggttccctctccgaatgaaaactggctatggtgagcgttcttcggaggtaaaatgcgcaagttttaggcttgctgtggaagcacacaacatccgagcctttaaaaccattcctgaagagtgcgttgaaccaacaaaggactacattaatggcgaacaatttagatcagactctaaaacagttaaccaacaagctttcttttatgctagtgaacgcgaagtccatcacaacgacata

SEQ ID NO: 58463 - DNA, 321 bp, Glycine max
  unsure (1)..(321): unsure at all n locations
ggcacaagtgagtttgttgattcgagataactagaaacattgtgatgaaaatgaaggtccttgttttcttcgttgctacaattttggtagcatggcaatgccatgcgtacgatatgttccctctccgaatgaacactggctatggtgcccgtactccggaggtgaaatgcgcaagttggaggcttgctgtggaagcacacaacatctttggctttgagaccattcctgaagagtgcgttgaaacaacanaggaatacatccatggcgaacaatatagatcagactccanaacagttaaccaacaagcttacttttatgcca

SEQ ID NO: 58464 - DNA, 359 bp, Glycine max
ggcacaagtgagtttgttgatcgagataactagaaacagtgtgatgaaaatgaaggtccttgttttcttcgttgctacaattttggtagcatggcaatgccatgcgtacgatatgttccctctccgaatgaacactggctatggtgcccgtactccggaggtgaaatgcgcaagttggaggcttgctgtggaagcacacaacatctttggctttgagaccattcctgaagagtgcgttgaagcaacaaaggaatacatccatggcgaacaatatagatcagactccaaaacagttaaccaacaagcttacttttatgccagagacctcgaagtccatcccaaggacacatttgtgttca

SEQ ID NO: 58465 - DNA, 310 bp, Glycine max
  unsure (1)..(310): unsure at all n locations
gacttctcttcacacctttgttcactcttcttctcttgcggctagggttttaccgcagcttcttctaaatttaaggaaaatgggtaaggaaaaggttcacatcagtattgtggtcattggccatgtcgactctgggaaatccactaccactggtcacctgatttacaagcttggaggcattgacaagcgtgttattgagaggtttgagaaggaagctgctgagatgaacaagaggtctttcaagtatgcctgngtgctggacaaacttaaggctgatcgtgaaagaagaatcaccattgatattgctttg

SEQ ID NO: 58466 - DNA, 376 bp, Glycine max
ggcacaagtgagtttgttgatcgagataactagaaacagtgtgatgaaaatgaaggtccttgttttcttcgttgctacaattttggtagcatggcaatgccatgcgtacgatatgttccctctccgaatgaacactggctatggtgcccgtactccggaggtgaaatgcgcaagttggaggcttgctgtggaagcacacaacatctttggctttgagaccattcctgaagagtgcgttgaagcaacaaaggaatacatccatggcgaacaatatagatcagactccaaaacagttaaccaacaagcttacttttatgccagagacctcgaagtccatcccaaagacacatttgtgttcagtatagatggcaccgta

SEQ ID NO: 58467 - DNA, 381 bp, Glycine max
  unsure (1)..(381): unsure at all n locations
ggcaagagtttgttgtgagctataagctagtttatcgtgaggagaatatgaagttgtttgttttctttgttgctgcagtagttttggtagcatggccatgccatggcgcaggctaccaaaggttccctctccgaatgaaaactggctatggtgagcgttcttcggaggtaaaatgcgcaagttttatgcttgctgtggaagcacacaacatccgagcctttaaaaccattcctgaatagtgcgttgaaccaacaaaggactacattaatggcgaacattttagattagactctaaaacagttaaccaacaagctttcttttatgctagtgaacgcgaagtccatcacancgacatatttatattcggcatagataacaccg

SEQ ID NO: 58468 - DNA, 349 bp, Glycine max
ggcacaagtgagtttgttgatcgagataactagagacagtgtgatgaaaatgaaggtccttgttttcttcgttgctacaattttggtagcatggcaatgccatgcgtacgatatgttccctctccgaatgaacactggctatggtgcccgtactccggaggtgaaatgcgcaagttggaggcttgctgtggaagcacacaacatctttggctttgagaccattcctgaagagtgcctttaagcaacaaaggaatacatccatggcgaacaatatagatcagactccaaaacagttaaccaacaagcttacttttatgccagagacctcgaagtccatcccaaggacaca

SEQ ID NO: 58469 - DNA, 386 bp, Glycine max
gggcagcagaagaacaagtagttgagaactaagaaggagaagcaaatggcttcctcaatgatctcttccccagctgttaccactgtcaaccgtgccggtgccggcatggttgctccattcactggcctcaagtccatggctggcttccccaccaggaagaccaacaatgacattacctccattgctagcaacggtggaagagtgcaatgcatgcaggtgtggccaccagttggcaagaagaagtttgagactctttcctacctgccagaccttgatgatgcacaattggcaaaggaagtagaataccttcttaagaagggatggattccttgcttggaattccaagttggagcacggtttcgtgtaccgtgagcacaacaggtcac

SEQ ID NO: 58470 - DNA, 384 bp, Glycine max
ggcacaagtttgttgagatagctagaagcaataagatgaaaatgaaagtgcttgttttgtttgttgctacagttttggtagcatatgaatgccatggctcagactaccagaagttccctctccaaatgaaaactgggtttggtgggcaatacagcaatgaggtggcatgtgccagttggaggcttggcgtggaagcaaacaacgtagtcaagtggcaaactgttcctgcagcttgcggagagtacatagctgactacgttctaggagaccaatatagatcagattccaaaacagttaaccaacaagcttatttctatgctaaatccctcaaactcagcaacagagatgtctttgtcttggacgttgacgacactactctctcta

SEQ ID NO: 58471 - DNA, 340 bp, Glycine max
ggagctccgtacgtaaattctccaccaatcaaacctgagcagtgatgattgtcatactcgctcaaatctctatagagacactaccatactcaagaataaatatacaattagttaactcttctcatacttacagagtatgctagacgcaaacatgcttctccgttacctcttccttctggggctcttctcaaccatgacaacatcgtcaacttccgcgatgtacatgttcatcgttgccagttgctcccagaccaagttcaagcagagttccacctatgagaatacagtccactcgctcatcacctctctcgtcaagtccgatgccttcggcacataaaaa

SEQ ID NO: 58472 - DNA, 381 bp, Glycine max
ataatattattcaaaatttaaagggaaatatttatgtatgtataaataaatatatagttctcattactcttattagcacaacaatacatgttgaagccaaaagtgagaaaaaataatagtaactaataaggagtgcgtggaatgtgtgggagtaaattgttttgttagaggtttaagattttgacaaaagttatataagtaatattttaatatatcatttatctttcatattaattagattttcttttatttgtatttcttttttattttcttaaaacaaattgagatatatataaaatttcaataaacaataaacggaaaaaaatgcaaaaacaattttttgtgtgtctataatgaaaatatcaatgttagaacttaaga

SEQ ID NO: 58473 - DNA, 396 bp, Glycine max
ggcacaagtgagtttgttgatcgagataactagaaacagtgtgatgaaaatgaaggtccttgttttcttcgttgctacaattttggtagcatggcaatgccatgcgtacgatatgttccctctccgaatgaacactggctatggtgcccgtactccggaggtgaaatgcgcaagttggaggcttgctgtggaagcacacaacatctttggctttgagaccattcctgaagagtgcgttgaagcaacaaaggaatacatccatggcgaacaatatagatcagactccaaaacagttaaccaacaagcttacttttatgccagagacctcgaagtccatcccaaggacacatttgtgttcagtatagatggcaacgtactctctaatattccatacta

SEQ ID NO: 58474 - DNA, 341 bp, Glycine max
ggcacaagtgagtttgttgatcgagataactagaaacagtgtgatgaaaatgaaggtccttgttttcttcgttgctacaattttggtagcatggcaatgccatgcgtacgatatgttccctctccgaatgaacactggctatggtgcccgtactccggaggtgaaatgcgcaagttggaggcttgctgtggaagcacacaacatctttggctttgagaccattcctgaagagtgcgttgaagcaacaaaggaatacatccatggcgaacaatatagatcagactccaaaacagttaaccaacaagcttacttttatgccagagacctcgaagtccatccca

SEQ ID NO: 58475 - DNA, 359 bp, Glycine max
  unsure (1)..(359): unsure at all n locations
gggtgcaagagtttgttgtgagctataagctagtttatcgtgaggagaatatgaagttgtttgttttctttgttgctgcagtagttttggtagcatggccatgccatggcgcaggctaccaaaggttccctctccgaatgaaaactggctatggtgagcgttcttcggaggtaaaatgcgcaagttttaggcttgctgtggaagcacacaacatccgagcctttaaaaccattcctgaagagtgcgttgaaccaacanaggactacattaatggcgaacaatttagatcagactctaaaacagttaaccaacaagctttcttttatgctagtgaacgcgaagtccatcacaacgacata

SEQ ID NO: 58476 - DNA, 313 bp, Glycine max
ggggagcaagagtgaagagcgaagagaatggctcccaagggtttaatctttttggctgtgttatgcttctcagcactgtcactgagtcgttgtcttgcggaggataatggacttgttatgaacttctacaaggaatcatgccctcaggctgaagacatcatcaaagaacaagtcaagcttctctacaagcgccacaagaacactgctttctcctggctcagaaacatcttccatgactgtgctgttcagagttgtgatgcttcactgttgctggactccacaagaaggagcttgtctgagaaggaaacagata

SEQ ID NO: 58477 - DNA, 367 bp, Glycine max
ggcagttcaattccaatatattccattctctctgtgtatttccctacctctcccttcaagatgcagatcttcgtcaagaccctcaccggcaagaccatcacccttgaggtggaaagctctgacaccatcgacaacgtcaaggccaagatccaggacaaggaaggaatccccccggaccagcaacgtctcattttcgccggaaagcaacttgaggacggccgtacccttgctgactacaacattcagaaggagagtactcttcacctcgtcctccgtctccgtggtggcatgcagatcttcgttaagacactcaccggcaagaccataaccctagaggttgaaagctccgacaacatcgataacgtca

SEQ ID NO: 58478 - DNA, 388 bp, Glycine max
ggcacaagtgagtttgttgatcgagataactagaaacagtgtgatgaaaatgaaggtccttgttttcttcgttgctacaattttggtagcatggcaatgccatgcgtacgatatgttccctctccgaatgaacactggctatggtgcccgtactccggaggtgaaatgcgcaagttggaggcttgctgtggaagcacacaacatctttggctttgagaccattcctgaagagtgcgttgaagcaacaaaggaatacatccatggcgaacaatatagatcagactccaaaacagttaaccaacaagcttacttttatgccagagacctcgaagtccatcccaagggaaacatttgtgttcagtatagatggcaccgtactctctaatat

SEQ ID NO: 58479 - DNA, 383 bp, Glycine max
gaaggtgcaagagtttgttgtgagctataagctagtttatcgtgaggagaatatgaagttgtttgttttctttgttgctgcagtagttttggtagcatggccatgccatggcgcaggctaccaaaggttccctctccgaatgaaaactggctatggtgagcgtccttcggaggtaaaatgcgcaagttttaggcttgctgtggaagcacacaacatccgagcctttaaaaccattcctgaagagtgcgttgaaccaacaaaggactacattaatggcgaacaatttagattagactctaaaacagttaaccaacaagctttcttttatgctagtgaacgcgaagtccatcacaacgacatatttatattcggcatagataaca

SEQ ID NO: 58480 - DNA, 403 bp, Glycine max
ggagtttgttgatcgagataactagaaacagtgtgatgaaaatgaaggtccttgttttcttcgttgctacaattttggtagcatggcaatgccatgcgtacgatatgttccctctccgaatgaacactggctatggtgcccgtactccggaggtgaaatgcgcaagttggaggcttgctgtggaagcacacaacatctttggctttgagaccattcctgaagagtgcgttgaagcaacaaaggaatacatccatggcgaacaatatagatcagactccaaaacagttaaccaacaagcttacttttatgccagagacctcgaagtccatcccaaggacacatttgtgttcagtatagatggcaccgtactctctaatatttcatactacaaaaaacatggata

SEQ ID NO: 58481 - DNA, 388 bp, Glycine max
  unsure (1)..(388): unsure at all n locations
ggcagttcaattccaatatattccattctctctgtgtatttccctacctctcccttcaagatgcagatcttcgtcaagaccctcaccggcaagaccatcacccttgaggtggaaagctctgacaccatcgacaacgtcaaggccaagatccaggacaaggaaggaatccccccggaccagcaacgtctcattttcgccggaaagcaacttgaggacggccgtacccttgctgactacaacattcagaaggagagtactcttcacctcgtcctccgtctccgtggtggcatgcagatcttcgttaagacactcaccggcaagaccatanacctagaggttgaaagctccgacacaatcgataacgtcaaagccaagatccaggacaagg

SEQ ID NO: 58482 - DNA, 396 bp, Glycine max
  unsure (1)..(396): unsure at all n locations
ggcacaagtgagtttgttgatcgagataactagaaacagtgtgatgaaaatgaaggtccttgttttcttcgttgctacaattttggtagcatggcaatgccatgcgtacgatatgttccctctccgaatgaacactggctatggtgcccgtactccggaggtgaaatgcgcaagttggaggcttgctgtggaagcacacaacatctttggctttgagaccattcctgaagagtgcgttgaagcaacaaaggaatacatccatgacgaacaatatagatcagactccanaacagttaaccaacaagcttacttttatgccagagacctcgaagtcaatcncaaggacacatttgtgttcagtatagatggcaacgtactctctaataatcatactac

SEQ ID NO: 58483 - DNA, 396 bp, Glycine max
  unsure (1)..(396): unsure at all n locations
gcacaagtttgttgagatagctagaagcaataagatgaaaatgaaagtgcttgttttgtttgttgctacagttttggtagcatatgaatgccatggctcagactaccagaagttccctctccaaatgaaaactgggtttggtgggcaatacagcaatgaggtggcatgtgccagttggaggcttggcgtggaagcaaacaacgtagtcaagtggcaaactgttcctgcagcttgcggagagtacatagctgactacgttctaggagaccaatatagatcagattccaaaacagttaaccaacaagcttatttctatgctaaatccctcaaactctacaacanagatgtctttgtcctggacgttgacgacactactctctctaatctccagtattt

SEQ ID NO: 58484 - DNA, 387 bp, Glycine max
gaaggtgcaagagtttgttgtgagctataagctagtttatcgtgaggagaatatgaagttgtttgttttctttgttgctgcagtagttttggtagcatggccatgccatggcgcaggctaccaaaggttccctctccgaatgaaaactggctatggtgagcgttcttcggaggtaaaatgcgcaagttttaggcttgctgtggaagcacacaacatccgagcctttaaaaccattcctgaagagtgcgttgaaccaacaaaggactacattaatggcgaacaatttagatcagactctaaaacagttaaccaacaagctttcttttatgctagtgaacgcgaagtccatcacaccgacatatttatattcggcatagataacaccgt

SEQ ID NO: 58485 - DNA, 395 bp, Glycine max
ggcacaagtgagtttgttgatcgagataactagaaacagtgtgatgaaaatgaaggtccttgttttcttcgttgctacaattttggtagcatggcaatgccatgcgtacgatatgttccctctccgaatgaacactggctatggtgcccgtactccggaggtgaaatgcgcaagttggaggcttgctgtggaagcacacaacatctttggctttgagaccattcctgaagagtgcgttgaagcaacaaaggaatacatccatggcgaacaatatagatcagactccaaaacagttaaccaacaagcttacttttatgccagagacctcgaagtccatcccaaagacacatttgggttcagtataaatggcaccgtactctctaatattccatact

SEQ ID NO: 58486 - DNA, 322 bp, Glycine max
  unsure (1)..(322): unsure at all n locations
ggcacaagtgagtttgttgatcgagataactagaaacagtgtgatgaaaatgaaggtccttgttttcttcgttgctacaattttggtagcatggcaatgccatgcgtacgatatgttccctctccgaatgaacactggctatggtgcccgtactccggaggtgaaatgcgcaagttggaggcttgctgtggaagcacacaacatctttggctttgagaccattcctgaagagtgcgttgaagcaacaaaggaatacatccatggcgaacaatatagatcagactccaatacagttanacaacaagcttacttttatggcaga

SEQ ID NO: 58487 - DNA, 394 bp, Glycine max
ggcacaagtgagtttgttgatcgagataactagaaacagtgtgatgaaaacgaaggtccttgttttcttcgttgctacaattttggtagcatggcaatgccatgcgtacgatatgttccctctccgaatgaacactggctatggtgcccgtactccggaggtgaaatgcgcaagttggaggcttgctgtggaagcacacaacatctttggctttgagaccattcctgaagagtgcgttgaagcaacaaaggaatacatccatggcgaacaatatagatcagactccaaaacagttaaccaacaagcttacttttatgccagagacctcgaagtccatcccaaggacacatttgtgttcagtatagattgcaccgtactctccaatattccatac

SEQ ID NO: 58488 - DNA, 394 bp, Glycine max
gaaggtgcaagagtttgttgtgagctataagctagtttatcgtgaggagaatatgaagttgtttgttttctttgttgctgcagtagttttggtagcatggccatgccatggcgcaggctaccaaaggttccctctccgaatgaaaactggctatggtgagcgttcttcggaggtaaaatgcgcaagttttaggcttgctgtggaagcacacaacatccgagcctttaaaaccattcctgaagagtgcgttgaaccaacaaaggactacattaatggcgaacaatttagatcagactctaaaacagttaaccaacaagctttcttttatgctagtgaacgcgaagtccatcacaacgacatatttatattcggcatagataacaccgtactctct

SEQ ID NO: 58489 - DNA, 376 bp, Glycine max
  unsure (1)..(376): unsure at all n locations
agcacaagagttacattatctataaatgtgagaagtaatcaaaataatatctttacaaaaaaaaggcaactttccaaggaacaagagaagcatttttgaaggcctccacaacaacagtccagtcactttcaaaccaaaatttactccaatttctatccacaacaaccaaggaagacacccttatggtctctaaagatagcaccactgccggaatgatccggggagccccttgaggatccatccgttttgcattttatggtatggcaagccggatgggaccaaatcacgcanacaaattgcaaagccttcgactattttgtactacttgttgtatgtcaaaaaaaaaatccatcacaacaaaaaaaagcggccgctc

SEQ ID NO: 58490 - DNA, 398 bp, Glycine max
  unsure (1)..(398): unsure at all n locations
gaaagtgcaagagtttgttgtgagctataagctagtttatcgtgaggagaatatgaagttgtttggtttctttggtgctgcaataattttggtaacatggccatgccatggcgcaagctaccaaaggttccctctccgaatgaaaactggctatggtgagcgttcttcggagggaaaatgcgcaagttttaagcttgctgtggaagcacacaacatccgagcctttaaaaccattcctgaagagtgcgttgaaccaacanaggactacattaatggcgaacaatttagatcagactctaaaacagttaaccaacaagctttcttttatgctagtgaacgcgaagtccatcacaacgacatatttatattcggcatagataacaccgtactctctaata

SEQ ID NO: 58491 - DNA, 393 bp, Glycine max
  unsure (1)..(393): unsure at all n locations
gaacgtgcaagagtttgttgtgagctataagctagtttatcgtgaggagaatatgaagttgtttgttttctttgttgctgcagtagttttggtagcatggccatgccatggcgcatgctaccaaaggttccctctccgaatgaaaactggctatggtgagcgttcttcggaggtaaaatgcgcaagttttaggcttgctgtggaagcacacaacatccgagcctttaaaaccattcctgaagagtgcgttgaaccaacanaggactacattaatggcgaacaattagatcagactctaaaacagttaaccaacaagctttcttttatgctagtgaacgcgaagtccatcacaacgacatatttatattcggcatagataacaccgtactctct

SEQ ID NO: 58492 - DNA, 382 bp, Glycine max
gactttcttaatccttaaaccttaaatgttaaaacccattactagtatactgcagcaccgttcgttcattgaaaccacaaactccaaacagagatggctttgagacatcgccgccttacgaagcaactctccaagtttctaactcccgttctcaacgcaggtaactgctgtcagcaatctagcaaagctttaaacttagtggctttgtctataatgcatatgccttctgctcagagtccaattgctaattggactcaagtgagaggatttcgtgaatacaggatctcaacaaagtctgatgaattatgtgaacctgcaactgaaattgatcttttgtctttcattaaggcttcactggatgagtttgaaggcacccatcatt

SEQ ID NO: 58493 - DNA, 353 bp, Glycine max
ggtgcacaagtgagtttgttgatcgagataactagaaacagtgtgatgaaaatgaaggtccttgttttcttcgttgctacaattttggtagcatggcaatgccatgcgtacgatatgttccctctccgaatgaacactggctatggtgcccgtactccggaggtgaaatgcgcaagttggaggcttgctgtggaagcacacaacatctttggctttgagaccattcctgaagagtgcgttgaagcaacaaaggaatacatccatggcgaacaatatagattagactccaaaacagttaaccaacaagcttacttttatgccagagacctcgaagtccatcccaaagacacatt

SEQ ID NO: 58494 - DNA, 315 bp, Glycine max
accactcatacgtgcagatgagaagaggacaccacgtggcacaactttgctcacagagccatcagcatcacgatgtcgatgaaaatgccagcattgattgttgctacagttttggtatcatatgaaggtcaaggctcacactaacagtgattcacacgccatgtgtaaatcggcttcggcggccactacatcagtgatgtggcatgtgccagttgtcggcttcgcgtaggaacaatcagcgtaatctattggaacactgttcctgcagcttgctgatagtacatatctaactacgtccgagtataccaatataga

SEQ ID NO: 58495 - DNA, 358 bp, Glycine max
ggcacaagtgagtttgttgatcgagataactagaaacagtgtgatgaaaatgaaggtccttgttttcttcgttgctacaattttggtagcatggcaatgccatgcgtacgatatgttccctctccgaatgaacactggatatggtgcccgtactccggaggtgaaatgcgcaagttggaggcttgctgtggaagcacacaacatctttggctttgagaccattcctgaagagtgcgttgaagcaacaaaggaatacatccatggcgaacaatatatatcagactccaaaacagttaaccaacaagcttacttttatgccagagacctcgatgtccatcccaacgacacatttgtgttc

SEQ ID NO: 58496 - DNA, 357 bp, Glycine max
ggcacaagtgagtttgttgatcgagataactagaaacagtgtgatgaaaatgaacggccctgttttcttcgttgctacaattttggtagcatgggaatgccatgcgtacgatatgttccctctccgaatgaacactggctatggtgcccgtactccggaggtgaaatgcgcatgttggaggcttgctgtggaagcacacaacatctttggctttgagaccattcctgaagagtgcgttgaagcaacaaaggaatacatccatggcgaacaatatagatcagactcaaaacagttaaccaacaagcttacttttatgccagagacctcgaagttcatcccaaggacacatttgtgttc

SEQ ID NO: 58497 - DNA, 406 bp, Glycine max
aaaagggggacaagttagtttggtgattcagataactagaaacaatgtgatgaaaatgaaaggccttggtttcctcgttgctacaattttggtagcatggcaatgccatgcgtacgatatgttccctctccgaatgaacactggctatggtgcccgtactccggaagtgaaatgcgcaagttggaggcttgctgtggaagcacacaacatctttggctttgagaccattcctgaagagtgcgttgaagcaacaaaggaatacatccatggcgaacaatatagatcagactccaaaacagttaaccaacaagcttacttttatgccagagacctcgaagtccatcccagggacacatttgtgttcagtatagatggcacgtactctctaatattccatactacaaaa

SEQ ID NO: 58498 - DNA, 187 bp, Glycine max
accgctcctacaacagcagagaaaggggcacaaatgggattgatacttgaaataagtaggaaccgcgtttggaaatccaatgtccttggattcatcactcccacagattccatcgcatgacactaccatgactacaagtgcctcctcactcggaatgtatccatccgatggcgtatctactccggaa

SEQ ID NO: 58499 - DNA, 386 bp, Glycine max
gaaggtgcaagagtttgttgtgagctataagctagtttatcgtgaggagaatatgaagttgtttgttttctttgttgctgcagtagttttggtagcatggccatgccatggcgcaggctaccaaaggttccctctccgaatgaaaactggctatggtgagcgttcttcggaggtaaaatgcgcaagttttaggcttgctgtggaagcacacaacatccgagcctttaaaaccattcctgaagagtgcgttgaaccaacaaaggactacattaatggcgaacaatttagatcagactctaaaacagttaaccaacaagctttctttttatgctagtgaacgcgaagtccatcacaacgacatatttatattcggcatagataacacc

SEQ ID NO: 58500 - DNA, 403 bp, Glycine max
aggggcaaaagtgagtttggtgatcgagataactagaaacagtgtgattaaaatgaaagtccttgttttcttcgttgctacaattttggtagcatggcaatgccatgcgtacgatatgttccctctccgaatgaacactggctatggtgcccgtactccggaggtgaaatgcgcaagttggaggcttgctgtggaagcacacaacatctttggctttgagaacattcctgaagagtgcgttgaagcaacaaaggaatacatccatggcgaacaatatagatcagactccaaaacagttaaccaacaagcttacttttatgccagagacctcgaagtcaatcccaaggacacatttgtgttcagtatagatggcaccgtactctctaatattccatactacaaa

SEQ ID NO: 58501 - DNA, 358 bp, Glycine max
tggggcacaagtgagtttgttgatcgagataactagaaacagtgtgatgaaaatgaaggtccttgttttcttcgttgctacaattttggtagcatggcaatgccatgcgtacgatatgttccctctccgaatgaacactggctatggtgcccgtactccggaggtgaaatgcgcaagttggaggcttgctgtggaagcacacaacatctttggctttgagaacattcctgaaaagtgcgttgaaacaacaaaggaatacatccatggcgaacaatatagatcagactcaaaaaaatttaacaaacaggcttacttttatgccagagaactcaaagtcaatcccaaggacacatttgtg

SEQ ID NO: 58502 - DNA, 398 bp, Glycine max
gacaagtgagtttgttgatcgagataactagaaacagtgtgatgaaaatgaaggtccttgttttcttcgttgctacaattttggtagcatggcaatgccatgcgtacgatatgttccctctccgaatgaacactggctatggtgcccgtactccggaggtgaaatgcgcaagttggaggcttgctgtggaagcacacaacatctttggctttgagaccattcctgaagagtgcgttgaagcaacaaaggaatacatccatggggaacactatagatcatactccacaacagttaacaacaagcttacttttatgccagagacctcgaagtctatcccaaagacacatttgtgttcagtatatatggcaccgtactctctaacattccatactacaaaa

SEQ ID NO: 58503 - DNA, 262 bp, Glycine max
ggcacaagtttgttgagatagctagaagcaataagatgaaaatgaaagtgcttgttttgtttgttgctacagttttggtagcatatgaatgccatggctcacactaccagaagttccctctccaaatgaaaactgggtttggtgggcaatacagcaatgaggtggcatgtgccagttggaggcttggcgtggaagcaaacaacgtagtcaagtggcaaactgttcctgcaccttgcggagagtacataactgactacgttct

SEQ ID NO: 58504 - DNA, 391 bp, Glycine max
ggaacctttgcattctattcattcaagattcagcaagtgcgttttggaagcagagaccgaaatacttcgagatggcccgtacaaagcaaactgctcgtaagtcaactggaggaaaagctcccaggaagcagcttgcaaccaaggctgcacgtaagtctgcaccaacaactggtggtgtgaagaagcctcatcgttatcgccctggaactgttgctcttcgtgagattaggaaattacagaagagcactgagctcctaatcaggaagcttccttttcagatgttgggtcctgaaattgcccaggatttcaagactgatctgcgtttccagagccatgctgtgcttgcattgcaagaggctgctgaggcataccttgttgggctctttgaaga

SEQ ID NO: 58505 - DNA, 384 bp, Glycine max
  unsure (1)..(384): unsure at all n locations
ggcacaagtgagtttgttgatcgagataactagaaacagtgtgatgaaaatgaaggtccttgttttcttcgttgctacaattttggtagcatggcaatgccatgcgtacgatatgttccctctccgaatgaacactggctatggtgcccgtactccggaggtgaaatgcgcaagttggaggcttgctgtggaagcacacaacatctttggctttgagaccattcctgaagagtgcgttgaagcaacanaggaatacatccatggcgaacaatatagatcagactccaaaacagttaaccaacaagcttactttttatgcagagacctcgaagtccatcccaaggacacatttgtgttcagtatagatggcaccgtactctctaa

SEQ ID NO: 58506 - DNA, 189 bp, Glycine max
ggcgcacccagagaggaagcttagagagagagagagagagagagagagagaggagagagtattggcgcttcatcaagatgggtatttctagggattccatgcacaagaggcgtgccactggtggcaagaaaaaggcttggagaaagaagagaaagtatgagcttgggcgtcaagcagcaaacaccaagt

SEQ ID NO: 58507 - DNA, 317 bp, Glycine max
ggcacaagtgagtttgttgatcgagataactagaaacagtgtgatgaaaatgaaggtccttgttttcttcgttgctacaattttggtagcatggcaatgccatgcgtacgatatgttccctctccgaatgaacactggctatggtgcccgtactccggaggtgaaatgcgcaagttggaggcttgctgtggaagcacacaacatctttggctttgagaccattcctgaagagtgcgttgaagcaacaaaggaatacatccatggggaacaatatagatcagactccaaaacagttaaccaacaagcttacttttatg

SEQ ID NO: 58508 - DNA, 358 bp, Glycine max
ggcacaagtgagtttgttgatcgagataactagaaacagtgtgatgaaaatgaaggtccttgttttcttcgttgctacaattttggtagcatggcaatgccatgcgtacgatatgttccctctccgaatgaacactggctatggtgcccgtactccggaggtgaaatgcgcaagttggaagcttgctgtggaagcacacaacatctttggctttgagaccattcctgaaaagtgcgttgaagcaacaaaggaatacatccatggcgaacaatatagattagactccaaaacagtttaccaacaagcttacttttatgccagagacctcgaaatccatcccaaagacacatttgtgttc

SEQ ID NO: 58509 - DNA, 393 bp, Glycine max
ggcacaagcgagtttgttgatcgagataactagaaacagtgtgatgaaaatgaaggtccttgttttcttcgttgctacaattttggtagcatggcaatgccatgcgtacgatatgttccctctccgaatgaacactggctatggtgcccgtactccggaggtgaaatgcgcaagttggaggcttgctgtggaagcacacaacatctttggctttgagaccattcctgaagagtgcgttgaagcaacaaaggaatacatccatggcgaacaatatagatcagactccaaaacagttaaccaacaagcttacttttatgccagagacctcgaagtccatcccaaggacacatttgtgttcagtatagatggcaccgtactctctaatattccata

SEQ ID NO: 58510 - DNA, 168 bp, Glycine max
ggcacaagtgagtttgttgatcgagataactagaaacagtgtgatgaaaatgaaggtccttgttttcttcgttgctacaattttggtagcatggcaatgccatgcgtacgatatgttccctctccgaatgaacactggctatggtgcccgtactccggaggtgaaatg

SEQ ID NO: 58511 - DNA, 400 bp, Glycine max
ggcacaagtgagtttgttgatcgagataactagaaacagtgtgatgaaaatgaaggtccttgttttcttcgttgctacaattttggtagcatggcaatgccatgcgtacgatatgttccctctccgaatgaacactggctatggtgcccgtactccggatgtgaaatgcgcaagttggaggcttgctgtggaagcacacaacatctttggctttgagaccattcctgaagagtgcgttgaagcaacacaggaatacatccatggcgaacaatatagatcagactccaaaatagttaaccaacaagcttacttttatgccagagacctcgaaatccatcccaaggacacatttgtgttcagtatagatggcaccgtactctctaatatttcatactacaaa

SEQ ID NO: 58512 - DNA, 230 bp, Glycine max
  unsure (1)..(230): unsure at all n locations
gcctcaacanaaaacagcacaacgaaccactctgaagccgctcacgttatccacaacactctcaaccctccttaaaccctaaccaatccaaccatggcttcttcttccaccttcactgcaatgtccgcctgcaagctctcctcctccgccgccatctcctccttcncctcncgccgccgctccaacgccgtcgttctgtcgaggcgcagccgcgccgccagggtctccgc

SEQ ID NO: 58513 - DNA, 398 bp, Glycine max
ggcacaagtgagtttgttgatcgagataactagaaacagtgtgatgaaaatgaaggtccttgttttcttcgttgctacaattttggtagcatggcaatgccatgcgtacgatatgttccctctccgaatgaacactggctatggtgcccgtactccggaggtgaaatgcgcaagttggaggcttgctgtggaagcacacaacatctttggctttgagaccattcctgaagagtgcgttgaagcaacaaaggaatacatccatggcgaacaatatagatcagactccaaaacagttaaccaacaagcttacttttatgccagagacctcgaagtccatcccaaagacacatttgtgttcagtatagatggcaccgtactctctaatattccatactaca

SEQ ID NO: 58514 - DNA, 397 bp, Glycine max
gaaggtgcaagagtttgttgtgagctataagctagtttatcgtgaggagaatatgaagttgtttgttttctttgttgctgcagtaattttggtagcatggccatgccatggcgcaggctaccaaaggttccctctccgaatgaaaactggctatggtgagcgttcttcggaggtaaaatgcgcaagttttaagcttgctgtggaagcacacaacatccgagcctttaaaaccattcctgaagagtgcgttgaaccaacaaaggactacattaatggcgaacaatttagatcagactctaaaacagttaaccaacaagctttcttttatgctagtgaacgcgaagtccatcacaacgacatatttatattcggcatagataacaccgtactctctaat

SEQ ID NO: 58515 - DNA, 368 bp, Glycine max
gaaggtgcaagagtttgttgtgagctataagctagtttatcgtgaggagaatatgaagttgtttgttttctttgttgctgcagtagttttggtagcatggccatgccatggcgcaggctaccaaaggttccctctccgaatgaaaactggctatggtgagcgttcttcggaggtaaaatgcgcaagttttaggcttgctgtggaagcacacaacatccgagcctttaaaaccattcctgaagagtgcgttgaaccaacaaaggactacattaatggcgaacaatttagatcagactctaaaacagttaaccaacaagctttcttttatgctagtgaacgcgaagtccatcacaacgacatatttatat

SEQ ID NO: 58516 - DNA, 298 bp, Glycine max
agggggaaaaattgagttttgttgattcgagataactagacacagtgtgatgaaaaatgaaagtccttgttttcttcgttgctacaattttggtagcatggcaatgccatgcgtacgatatgttccctctccgaatgaacactggctatggtgcccgtactccggaagtgaaatgcccaagttggaagcttgctgtgggagcacacaacatccttggctttgagaccattcctgaagagtgcgttgaagcaacaaaggaatacatccatggcgaacaatatagattagactccaaaac

SEQ ID NO: 58517 - DNA, 74 bp, Glycine max
cggggcacaagaaagtttgtttttggaaatatcgataattagacttattggaatgatggtccttgatctcgtat

SEQ ID NO: 58518 - DNA, 403 bp, Glycine max
ggatgcaactgtggagaaggaagctgcgaggaatggggggttatagaacttcaaggagtggtggagccacagcctggattccacgattccctccaaaatcttcacatcggcactttgtgtcgtccttcttctcaggcgctgcgtcattatagagtattccacaatcgcaatttaaaacatttctctacttttagggttctgctaactagagtattttacaagaatattattggaagtctacaccttcactgttggataccatgaactgacggggtcaaaggttcccttaaagaagccaatggtggtgctcaagaaagtaaagcatcctgatggagaaagtggttgtaaggtggagctgcaagttgttggagtcattagacataagattctgttcaagaacaga

SEQ ID NO: 58519 - DNA, 400 bp, Glycine max
  unsure (1)..(400): unsure at all n locations
ggcacaagtgagtttgttgatcgagataactagaaacagtgtgatgaaaatgaaggtccttgttttcttcgttgctacaattttggtagcatggcaatgccatgcgtacgatatgttccctctccgaatgaacactggctatggtgcccgtactccggaggtgaaatgcgcaagttggaggcttgctgtggaagcacacaacatctttggctttgagaccattcctgaagagtgcgttgaagcaacaaaggaatacatccatggcgaacaatatagatcagactccaaaacagttaaccaacaagcttacttttatgccagagacctcgaagtccatcncaaggacacatttgtgttcagtatagatggcaccgtactctctaatattccatactacaaa

SEQ ID NO: 58520 - DNA, 363 bp, Glycine max
  unsure (1)..(363): unsure at all n locations
gaaggtgcaagagtttgttgtgagctataagctagtttatcgtgaggagaatatgaagttgtttgttttctttgttgctgcagtagttttggtagcatggccatgccatggcgcaggctaccaaaggttccctctccgaatgaaaactggctatggtgagcgttcttcggaggtaaaatgcgcaagttttaagcttgctgtggaagcacacaacatccgagcctttaaaaccattcctgaagagtgcgttgaaccaacanaggactacattaatggcgaacaatttagatcagactctaaaacagttaaccaacaagctttcttttatgctagtgaacgcgaagtccatcacaacgacatatt

SEQ ID NO: 58521 - DNA, 290 bp, Glycine max
ggcacaagtgagtttgttgatcgagataactagaaacagtgtgatgaaaatgaaggtccttgttttcttcgttgctacaattttggtagcatggcaatgccatgcgtacgatatgttccctctccgaatgaacactgggtatggtgcccgtactccggaggtgaaatgcgcaagttggaggcttgctgtggaagcacacaacatctttggctttgagaccattcctgaagagtgcgttgaagcaacagaggaatagatccatggcgaacaatatggatcagactccaaaa

SEQ ID NO: 58522 - DNA, 288 bp, Glycine max
ggcacaagtgagtttgttgatcgagataactagaaacagtgtgatgaaaatgaaggtccttgttttcttcgttgctacaattttggtagcatggcaatgccatgcgtacgatatgttccctctccgaatgaacactgagctatggtggcccgctactcggcgaggtgaaatgcggaagttggaggcttgctgtggaagcacacaacatctttgactttgagaccagtcctgaagagtgcgttggagcagcaagcgaatacatccatggcgaacaatggagatcagact

SEQ ID NO: 58523 - DNA, 300 bp, Glycine max
ggcacaagtttgttgagatagctagaagcaataagatgaaaatgaaagtgcttgttttgtttgttgctacagttttggtagcatatgaatgccatggctcagactaccacaagttccctctccaaatgaaaactgggtttggtgggcaatacagcaatgaggtggcatgtgccagttggaggcttggcgtggaagcaaacaacgtagtcaagtggcaaactgttcctgcagcttgcggagagtacatagctgactacgtgctaggagaccaatatagatcagattccaacgcagttaacc

SEQ ID NO: 58524 - DNA, 297 bp, Glycine max
gaaggtgcaagagtttgttgtgagctataagctagtttatcgtgaggagaatatgaagttgtttgttttctttgttgctgcagtagttttggtagcatgggcatgccatggcgcaggctaccaaaggttccctctccgaatgaaaactggctatggtgagcgttcttccgaggtaaaatgcgcaagttttaggcttgctgtggaagcacacaacatccgagcctttaaaaccatttcctaaaaatccgttgaaccaacaaaggactacattagatggggaacaatttagatcagact

SEQ ID NO: 58525 - DNA, 267 bp, Glycine max
gacacttcaaaatcctctggtaacccttattttatctattctctctcgttcttttgtgttctaagcagctagaatcaatggagaggaaaagaagccatgcctctttcaccatgtttgcaatgcttgttggagtgatctctcagagccttgtcattcctgtagtatccagcactgttgaagatcagaagaactactagaccccagattcacatgctggaagtcccccctcaagctcacacagtagtactcctccatgctcatggccat

SEQ ID NO: 58526 - DNA, 297 bp, Glycine max
ggcacaagtttgttgagatagctagaagcaataagatgaaaatgaaagtgcttgttttgtttgttgctacagttttggtagcatatgaatgccatggctcagactaccagaagttccctctccaaatgaaaactgggtttggtgggcaatacagcaatgaggtggcatgtgccagttggaggcttggcgtggaagcaaacaacgtaatcaagtggcaaactgttcctgcagcttgcggagagtacatagctgactacgttctaggagaccaatagagatcagattccaaaacagtta

SEQ ID NO: 58527 - DNA, 305 bp, Glycine max
gaaggtgcaagagtttgttgtgagctataagctagtttatcgtgaggagaatatgaagttgtttgttttctttgttgctgcagtagttttggtagcatggccatgccatggcgcaggctaccaaaggttccctctccgaatgaaaactggctatggtgagcgttcttcggaggtaaaatgcgcaagttttaggcttgctgtggaagcacacaacatccgagcctttaaaaccattcctgaagagtgcgttgaaccaacaaaggactacattaatggcgaacaatttagattagactctagaacag

SEQ ID NO: 58528 - DNA, 270 bp, Glycine max
aggggcacagttgagtttgttgatgtatacaactagaaagagtatggtgaagatgaaggtccttggtttcttctctgctacaattttggtagcatggcaatgccatgcgtacaatgtgttcggtctccgaatgaacactggctatggtgcccgtactccggaggtgatatgcgcaagttggaggcttgctgtggaagcacactacatctttggcattgaaaccattcctgaagagtgcgttgagacgacatgggattacatccataggga

SEQ ID NO: 58529 - DNA, 381 bp, Glycine max
ggcacaagtgagtttgttgatcgagataactagaaacagtgtgatgaaaatgaaggtccttgttttcttcgttgctacaattttggtagcatggcaatgccatgcgtacgatatgttccctctccgaatgaacactggctatggtgcccgtactccggaggtgaaatgcgcaagttggaggcttgctgtggaagcacacaacatctttggctttgagaccattcctgaagagtgcgttgaagcaacaaaggaatacatccatggcgaacaatatagatcagactccaaaacagttaaccaacaagcttacttttatgccagagacctcgaagtccatcccaaggacacatttgtgttcagtatagatggcaccgtactctc

SEQ ID NO: 58530 - DNA, 189 bp, Glycine max
cggggagttgaattgaaacttttggagagagaaaagaagagcaaaaacaacacatcaatctgcattttggcattgggctcttcgtgttgagtttgtttggtccaatccaacgcttggtttggctgtgtgtgtgtgtttgtgttgggaacaataagaatagcagtgggaatcaatcagcgaccccatgag

SEQ ID NO: 58531 - DNA, 121 bp, Glycine max
aacataaaaaattccgtggccgttttggttaagaaggaagacggaaaaaaaaaattagaagggaaccaaaataaaaatcaaccccgttttttgataattttaagggccaagaattgaacat

SEQ ID NO: 58532 - DNA, 289 bp, Glycine max
  unsure (1)..(289): unsure at all n locations
ggttgtcaacattgaccaagtaagcaggtgaggtcaggtgangcgagggaaccattcaactggcaactgctcccggtcccttcaacctcaagccaccacagcaaaaaggttccctaaatcaaatcataacaactttgtgtgctttctttccgcactgaacagtgaaaatcacgcaaacaacattaaaccctctttcatgctggcctcagactccggctctgtgctccgacccaaaccccccgtacccactcttgacccgacccgttcactgctccgccctttctgcttc

SEQ ID NO: 58533 - DNA, 286 bp, Glycine max
ggcacaagtgagtttgttgatcgagataactagaaacagtgtgatgaaaatgaaggtccttgttttcttcgttgctgcaattttggtagcatggcaatgccatgcgtacgatatgttccctctccgaatgaacactggctatggtgcccgtactccggaggtgaaatgcgcaagttggaggcttgctgtgggagcacacaacatctttggctttgagaccattcctgaagagtgcgtgtaagcaacaaaggaatacatccatggcgaacaggatagatcagactcc

SEQ ID NO: 58534 - DNA, 373 bp, Glycine max
gattgtagaactgaacaagggtttctctttctctttctctgtctgcttcttcactttctctcgtttcaatcgaaaaaaatcatgggcagaaaattcttcgtcggtggcaactggaaatgcaatgggaccactgaggaggtgaagaagattgttactactttaaatgaagctaaagtccctggagaagatgttgtagaagttgttgtgagccctccttttgtgttccttccttttgtaaaaagtttgccgcgccctgatttccatgtctcggcccaaaattgttgggttcgcaaaggtggtgcttatactggagaggttagtgctgaaatgcttgttaatttgggaattccttgggttattattggtcactctg

SEQ ID NO: 58535 - DNA, 135 bp, Glycine max
gactcagggacaatatctcgaacgagttaattaactaggaagcctaagctactagtagcgctttccttcctgcctctctttgctttcctgggtcattcagaatatgttgaacaagttgtggacataagtgggaaa

SEQ ID NO: 58536 - DNA, 123 bp, Glycine max
  unsure (1)..(123): unsure at all n locations
gaagggaagcaaggacgatgagtatagtatgagtaatcagattcagagtgtatagtgattctgattctttcattttccatagattagcaggcaatcgagcaagggagggaganagaganagag

SEQ ID NO: 58537 - DNA, 374 bp, Glycine max
ggcacaagtgagtttgttgatcgagataactagaaacagtgtgatgaaaatgaaggtccttgttttcttcgttgctacaattttggtagcatggcaatgccatgcgtacgatatgttccctctccgaatgaacactggctatggtgcccgtactccggaggtgaaatgcgcaagttggaggcttgctgtggaagcacacaacatctttggctttgagaccattcctgaagagtgcgttgaagcaacacaggaatacatccatggcgaacaatatagatcagactccaaaacagttaaccaacaagcttacttttatggcagagacctcgaagtccatcccaaggacacatttgtgttcagtatagatggcaccg

SEQ ID NO: 58538 - DNA, 315 bp, Glycine max
ggcacaagtgagtttgttgatcgacataactagaaacagtgtgatgaaaatgaaggtccttgttttcttcgttgctacaattttggtagcatggcaatgccatgcgtacgatatgttccctctccgaatgaacactggctatggtgcccgtactccggaggtgaaatgcgcaagttcgaggcttgctgtggaagcacacaacatctttggctttgagaccattccttaagagtgcgttgaagcaacaaaggaatacatccatggcgaacaatatagatcagactccaaaacagttaaccaacaagcgtactttta

SEQ ID NO: 58539 - DNA, 212 bp, Glycine max
gacaagtgagtttgctgatcgatataactagaaacagtgtgatgaagatgaaagtccttgttttcttcgttgctacaattttggtaacatggcaatgccatgcgtaggatatgttccctctccgagtgaacactggctatggtgcccgtactgcggaagttaaatgcgcaagttggacgcttgctgtggaagcacacaatatctttggcttt

SEQ ID NO: 58540 - DNA, 395 bp, Glycine max
agaaaggggcacaagtttgttgagatagctagaagcaataagatgaaaatgaaagtgcttgttttgtttgttgctacagttttggtagcatatgaatgccatggctcagactaccagaagttccctctccaaatgaaaactgggtttggtgggcaatacagcaatgaggtggcatgtgccagttggaggcttggcgtggaagcaaacaacgtagtcaagtggcaaactgttcctgcagcttgcggagagtacatagctgactacgttctaggagaccaatatagatcagattccaaaacagttaaccaacaagcttatttctatgctaaatccctcaaactcaccaacaaagatgtctttgtcttggacgttgacgacactactctctctaatct

SEQ ID NO: 58541 - DNA, 117 bp, Glycine max
caatggggaattggcacaccacacacacagtgctgtcctgtaattcccaaaataaataacgaacaagaacccgaatttccaatgcaaatgtgttagtaaggactgtacggcagattg

SEQ ID NO: 58542 - DNA, 342 bp, Glycine max
ggcacaagtgagtttgttggttcaaattactagaaacaatgttatgaaaatgaagggccttggtttcctcgttgctacaattttggtagcatggcaatgccatgcgtacgatatgtttcctctccgaatgaacactggctatggtgcccgtactccggaggtgaaatgcgcaaattggaggcttgctgtggaagcacacaacatctttggctttgagaccattcctgaaaaatgcgttgaagcaacaaaggaatacatccatggcgaacaatatagattagactccaaaaacagttaaccaacaagcttacttttatgccagagacctcgaagtccatccca

SEQ ID NO: 58543 - DNA, 378 bp, Glycine max
ggcacaagtgagtttgttgatcgagataactagaaacagtgtgatgaaaatgaaggtccttgttttcttcgttgctacaattttggtagcatggcaatgccatgcgtacgatatgttccctctccgaatgaacactggctatggtgcccatactccggaggtgaaatgcgcaagttggaggcttgctgtggaagcacacaacatctttggctttgagaacattcctgaagagtgcgttgaagcaacaaaggaatacatccatggcgaacaatatagatcagactccaaaacagttaaccaacaagcttacttttatgccagagacctcgaagtccatcccaaggacacatttgtgttcagtatagatggcaccgtact

SEQ ID NO: 58544 - DNA, 364 bp, Glycine max
ggcacaagtgagtttgttgatcgagataactagaaacagtgtgatgaaaacgaaggtccttgttttcttcgttgctacaattttggtagcatggcaatgccatgcgtacgatatgttccctctccgaatgaacactggctatggtgcccgtactccggaggtgaaatgcgcaagttggaggcttgctgtggaagcacacaacatctttggctttgagaccattcctgaagagtgcgttgaagcaacaaaggaatacatccatggcgaacaatatatattagactccaaaacagttaaccaacaagcttacttttatgccagagacctcgaagtccatcccaaggacacatttgtgttcagtata

SEQ ID NO: 58545 - DNA, 226 bp, Glycine max
gactcaagcactagatctctatcgagtaaattaactaggaggcctaacctatgagtatccctttccttcctgcctctctttgctttcctggctcattcagaatatgttgagcaggttgtagacataactggcagacccattttcccaggtggcacagtgtacagtatgcgagcaacttcgggcgctgccggtggtggattgaaactaggccggtgaggagactcag

SEQ ID NO: 58546 - DNA, 310 bp, Glycine max
ggcacaagtgagtttgttgatcgagataactagaaacagtgtgatgaaaatgaaggtccttgttttcttcgttgctacaattttggtagcatggcaatgccatgcgtacgatatgttccctctccgaatgaacactggctatggtgcccgtactccggaggtgaaatgcgcaagttggaggcttgctgtggaagcacacaacatctttggctttgagaccattcctgaagagtgcgttgaagcaacaaaggaatacatccatggcgaacaatatagatcagactccaaaacagttaaccaacaagcttac

SEQ ID NO: 58547 - DNA, 352 bp, Glycine max
ggcacaagtgagtttgttgatcgagataactagaaacagtgtgatgaaaatgaaggtccttgttttcttcgttgctacaattttggtagcatggcaatgccatgcgtacgatatgttccctctccgaatgaacactggctatggtgcccgtactccggaggtgaaatgcgcaagttggaggcttgctgtggaagcacacaacatctttggctttgagaccattcctgaagagtgcgttgaagcaacaaaggaatacatccatggcgaacaatatagatcagactccaaaacagttaaccaacaagcttacttttatgccagacacctcgaagtccatcccaaggacacattt

SEQ ID NO: 58548 - DNA, 360 bp, Glycine max
ggcacaagtgagtttgttgatcgagataactagaaacagtgtgatgaaaatgaaggtccttgttttcttcgttgctacaattttggtagcatggcaatgccatgcgtacgatatgttccctctccgaatgaacactggctatggtgcccgtactccggaggtgaaatgcgcaagttggaggcttgctgtggaagcacacaacatctttggctttgagtccattcctgaagagtgcgttgaagcaacaaaggaatacatccatggcgaacaatatagatcagactccaaaacagttaaccaacaagcttacttttatgccagagacctcgaagtccatcccaaggacacatttgtgttcag

SEQ ID NO: 58549 - DNA, 202 bp, Glycine max
ggaacttcgcacgttcagtgtcagacatgcctagctctgtcgtgccgtcgttgacgagggcgtttcgggtgcgaagccctgacctccgctcgctctttcggtctcgcgctcttgtccatcgcttccgccaatgtcttcgtcgaggagcgtttcgatgacgggtgggaagatcgaggggttaagtcagattgggaaagggatg

SEQ ID NO: 58550 - DNA, 339 bp, Glycine max
gaaggtgcaagagtttgttgtgagctataagctagtttatcgtgaggagaatatgaagttgtttgttttctttgttgctgcagtagttttggtagcatggccatgccatggcgcaggctaccaaaggttccctctccgaatgaaaactggctatggtgagcgttcttcggaggtaaaatgcgcaagttttaggcttgctgtggaagcacacaacatccgagcctttaaaaccattcctgaagagtgcgttgaaccaacaaaggactacattaatggcgaacaatttagatcagactctaaaacagttaaccaacaagctttcttttatgctagtgaacg

SEQ ID NO: 58551 - DNA, 330 bp, Glycine max
gacaaaacaagtgtttcgaatagattatcctaagtctttgggaatagtgctgcaatggcttcaggtcaggaggaggtgaaccttttgggagctactggaagcccatttgtgtgcagggttcatattgccctcaagttgaagggagttcaatacaaatatgtcgaagaaaatttgaggaacaagagtgaactgcttctcaaatccaacccagttcacaagaaggttccagtgtttattcacaatgagaagcccatagcagagtctcttgtgattgttgaatacattgatgagacatggaagaacaaccccatcttgccttctgatccttac

SEQ ID NO: 58552 - DNA, 123 bp, Glycine max
gaacatttgtctcccaaccttcaatttcaatcaacgggtaaacccttttccatttgagcatcatcatgtccaccgcagcgcaacccaaggccaagaaaacggggtcttccaaaaaaaccctct

SEQ ID NO: 58553 - DNA, 378 bp, Glycine max
ggcacaagtgagtttgttgatcgagataactagaaacagtgtgatgaaaatgaaggtccttgttttcttcgttgctacaattttggtagcatggcaatgccatgcgtacgatatgttccctctccgaatgaacactggctatggtgcccgtactccggaggtgaaatgcgcaagttggaggcttgctgtggaagcacacaacatctttggctttgagaccattcctgaagagtgcgttgaagcaacaaaggaatacatccatggcgaacaatatagatcagactccaaaacagttaaccaacaagcttacttttatgccagagacctcgaagtccatcccaaggacacatttgtgttcagtatagatggcaccgtact

SEQ ID NO: 58554 - DNA, 375 bp, Glycine max
gaaggtgcaagagtttgttgtgagctataagctagtttatcgtgaggagaatatgaagttgtttgttttctttgttgctgcagtagttttggtagcatggccatgccatggcgcaggctaccaaaggttccctctccgaatgaaaactggctatggtgagcgttcttcggaggtaaaatgcgcaagttttaggcttgctgtggaagcacacaacatccgagcctttaaaaccattcctgaagagtgcgttgaaccaacaaaggactacatttatggcgaacaatttagatcagactctaaaacagttaaccaacaagctttcttttatgctagtgaacgcgaagtccatcacaacgacatatttatattcggcat

SEQ ID NO: 58555 - DNA, 306 bp, Glycine max
ggcacaagtgagtttgttgatcgagataactagaaacagtgtgatgaaaatgaaggtccttgttttcttcgttgctacaattttggtagcatggcaatgccatgcgtacgatatgttccctctccgaatgaacactggctatggtgcccgtactccggaggtgaaatgcgcaagttggacgcttgctgtggaagcacacaacatctttggctttgagaccattcctgaagagtgcgttgaagcaacaaaggaatacatccatggcgaacaatatagattagactccaaaacagtttaccaacaagc

SEQ ID NO: 58556 - DNA, 299 bp, Glycine max
gaaggtgcaagagtttgttgtgagctataagctagtttatcgtgaggagaatatgaagttgtttgttttctttgttgctgcaatagttttggtagcatggccatgccatggcgcaggctaccaaaagttccctctccgaatgaaaactgggtatggtgagcgttcttcggaggtaaaatgcccaagttttaagcttgctgtggaagcacacaacatccgagcctttaaaaccattcctgaagaatgcgttgaaccaagaaaggactacattaatggggaacaatttagattagactcta

SEQ ID NO: 58557 - DNA, 378 bp, Glycine max
ggcacaagtttgttgagatagctagaagcaataagatgaaaatgaaagtgcttgttttgtttgttgctacagttttggtagcatatgaatgccatggctcagactaccagaagttccctctccaaatgaaaactgggtttggtgggcaatacagcaatgaggtggcatgtgccagttggaggcttggcgtggaagcaaacaacgtagtcaagtggcaaactgttcctgcagcttgcggagagtacatagctgactacgttctaggagaccaatatagatcagattccaaaacagttaaccaacaagcttatttctatgctaaatccctcaaactcaccaacaaagatgtctttgtcttggacgttgacgacactactc

SEQ ID NO: 58558 - DNA, 211 bp, Glycine max
  unsure (1)..(211): unsure at all n locations
tattgtaggaagaataaaaagagatacatggatttaaagaccctataaacaactatttatggttatataatccgaataacagaaaaatggataattgccaaaatacctgagngaacttgcaaatttcacggatgaggatgatgaggaagcctttttatcacgccttttttgaagagcaaagattcagggtttggaggtaccattttaatgg

SEQ ID NO: 58559 - DNA, 275 bp, Glycine max
gaaggtgcaagagtttgttgtgagctataagctagtttatcgtgaggagaatatgaagttgtttgttttctttgttgctgcagtagttttggtagcatggccatgccatggcgcaggctaccaaaggttccctctccgaatgaaaactggctatggtgagcgttcttcggaggtaaaatgtgcaagttttaggcttgctgtggaagcagacaacatccgagcctttaaaaccattcctgaagagtgcgttgaaccaacaggggactacattaatg

SEQ ID NO: 58560 - DNA, 314 bp, Glycine max
ggcacaagtgagtttgttgatcgagataactagaaacagtgtgatgaaaatgaaggtccttgttttcttcgttgctacaattttggtagcatggcaatgccatgcgtacgatatgttccctctccgaatgaacactggctatggtgcccgtactccggaggtgaaatgcgcaagttggaggcttgctgtggaagcacacaacatctttggctttgagaccattcctgaagagtgcgttgaagcaacaaaggaatacatccatggcgaacaatagagatcagactccaaaacagttaagcaacaagcttactttt

SEQ ID NO: 58561 - DNA, 333 bp, Glycine max
gagtgcacaagtgcagtttgttgatcgagataactagaaacagtgtgatgaaaatgaaggtccttgttttcttcgttgctacaattttggtagcatggcaatgccatgcgtacgatatgttccctctccgaatgaacactggctatggtgcccgtactccggacgtgaaatgcgcaagttggaggcttgctgtggaagcacacaacatctttggctttgagagcattcctgaagagtgcgttgaagcaacaaaggaatacatccatggcgaacaatatagatcagactccaaaacagttaaccagcaagcttacctttatgccagagacctcg

SEQ ID NO: 58562 - DNA, 359 bp, Glycine max
  unsure (1)..(359): unsure at all n locations
ggcacaagtgagtttgttgatcgagataactagaaacagtgtgatgaaaatgaaggtccttgttttcttcgttgctacaattttggtagcatggcaatgccatgcgtacgatatgttccctctccgaatgaacactggctatggtgcccgtactccggaggtgaaatgcgcaagttggaggcttgctgtggaagcacacaacatctttggctttgagaccattcctgaagagtgcgttgaagcaacaaaggaatacatccatggcgaacaatatagatcagactccaaaacagttaaccaacaagcttacttttatgccagagacctcgaagtccatcncaaggacacatttgtgttca

SEQ ID NO: 58563 - DNA, 380 bp, Glycine max
ggcacaagtgagtttgttgatcgagataactagaaacagtgtgatgaaaatgaaggtccttgttttcttcgttgctacaattttggtagcatggcaatgccatgcgtacgatatgttccctctccgaatgaacactggctatggtgcccgtactccggaggtgaaatgcgcaagttggaggcttgctgtggaagcacacaacatctttggctttgagaccattcctgaagagtgcgttgaagcaacaaaggaatacatccatggcgaacaatatagatcagactccaaaacagttaaccaacaagcttacttttatgccagagacctcgaagtccatcccaaggacacatttgtgttcagtatagatggcaccgtactct

SEQ ID NO: 58564 - DNA, 353 bp, Glycine max
gacaagtgagtttgttgatcgagataactagaaacagtgtgatgaaaatgaaggtccttgttttcttcgttgctacaattttggtagcatggcaatgcaatgcgtacgaaatgttccctctccgaatgaacactggctatggtgcccgtactccggaggtgaaatgcgcaagttggaggcttgctgtggaagcacacaacatctttggctttgagaccattcctgaaaattgcgttgaagcaccaaaggattacatccatggcgaccaatatagtatagactccaaaaaagttaaccaacaagcttacttttatgccagagacctcgaattccatcacagggacacatttgtg

SEQ ID NO: 58565 - DNA, 262 bp, Glycine max
ggcacaattgattttgttgatcaaaatacctagaaccattgtgatgaaaatgaaggcccttgtttccttcgttgcaacaattttggtagcatggaaatgccatgcgtacaaaaggttccctctccgaatgaacactggcaatggtgcccgtaccccggaggtgaaatgcccaatttggaggcttgctgtggaagcaaacaaaatctttggctttgaaaccattcctgaaaattgctttgaaccaacaaaggaatacatccat

SEQ ID NO: 58566 - DNA, 405 bp, Glycine max
ggcacaagtgagtttgttgatcgagataactagaaacagtgtgatgaaaatgaaggtccttgttttcttcgttgctacaattttggtagcatggcaatgccatgcgtacgatatgttccctctccgaatgaacactggctatggtgcccgtactccggaggtgaaatgcgcaagttggaggcttgctgtggaagcacacaacatctttggctttgagaccattcctgaagagtgcgttggagcaacaaaggaatacatccatggcgaacaatatagatcagactccaaaacagttaaccaacaagcttacttttatgccagagacctcgaagtccatcccaaggacacatttgtgttcagtatagatggcaccgtactctctaatattccatactacaaaaaaca

SEQ ID NO: 58567 - DNA, 395 bp, Glycine max
ggcacaagtgagtttgttgatcgagataactagaaacagtgtgatgaaaatgaaggtccttgttttcttcgttgctacaattttggtagcatggcaatgccatgcgtacgatatgttccctctccgaatgaacactggctatggtgcccgtactccggaggtgaaatgcgcaagttggaggcttgctgtggaagcacacaacatctttggctttgagaccattcctgaagagtgcgttgaagcaacaaaggaatacatccatggcgaacaatatagatcagactccaaaacagttaaccaacaagcttacttttatgccagagacctcgaagtccatcccaaggacacatttgtgttcagtatagatggcaccgtactctctaatattccatact

SEQ ID NO: 58568 - DNA, 355 bp, Glycine max
ggcgaaacagagagtgatttcagtgagtgatcggtgttcacttgatctcatcataatcgtcagcgtcaattgaagaagatgccgatcagaaacatcgccgtcggaaggcctgaagaggcgactcaccccgacacgttgaaggcggctttggctgagttcatctcaaccttcatcttcgtgttcgccggctcaggctccggcatcgcctacaacaagctcaccgacaacggcgctgccacccctgccggcctcatctccgcctccatcgcccatgcattcgccctcttcgtcgccgtctccgtcggcgccaacatctccggcggccacgtcaaccccgccgtcaccttcggcgcct

SEQ ID NO: 58569 - DNA, 369 bp, Glycine max
gaaagtgcacaagtgagtttgttgatcgagataactagaaacagtgtgatgaaaatgaaggtccttgttttcttcgttgctacaattttggtagcatggcaatgccatgcgtacgatatgttccctctccgaatgaacactggctatggtgcccgtactccggaggtgaaatgcgcaagttggaggcttgctgtggaagcacacaacatctttggctttgagaccattcctgaagagtgcgttgaagcaacaaaggaatacatccatggcgaacaatatagatcagactccaaaacagttaaccaacaagcttacttttatgccagagacctcgaagtccatcccaaggacacatttgtgttcagtata

SEQ ID NO: 58570 - DNA, 381 bp, Glycine max
gaaggtgcaagagtttgttgtgagctataagctagtttatcgtgaggagaatatgaagttgtttgttttctttgttgctgcagtagttttggtagcatggccatgccatggcgcaggctaccaaaggttccctctccgaatgaaaactggctatggtgagcgttcttcggaggtaaaatgcgcaagttttaggcttgctgtggaagcacacaacatccgagcctttaaaaccattcctgaagagtgcgttgaaccaacaaaggactacattaatggcgaacaatttagatcagactctaaaacagttaaccaacaagctttcttttatgctagtgaacgcgaagtacatcacaacgacatatttatattcggcatagataa

SEQ ID NO: 58571 - DNA, 398 bp, Glycine max
gaaggtgcaagagtttgttgtgagctataagctagtttatcgtgaggagaatatgaagttgtttgttttctttgttgctgcagtagtcttggtagcatggccatgccatggcgcaggctaccaaaggttccctctccgaatgaaaactggctatggtgagcgttcttcggaggtaaaatgcgcaagttttaggcttgctgtggaagcacacaacatccgagcctttaaaaccattcctgaagagtgcgttgaaccaacaaaggactacattaatggcgaacaatttagattagactctaaaacagttaaccaacaagctttcttttatgctagtgaacgcgaagtccatcacaacgacatatttatattcggcatagataacaccgtactctctaata

SEQ ID NO: 58572 - DNA, 402 bp, Glycine max
ggcacaagtgagtttgttgatcgagataactagaaacagtgtgatgaaaatgaaggtccttgttttcttcgttgctacaattttggtagcatggcaatgccatgcgtacgatatgttccctctccgaatgaacactggctatggtgcccgtactccggaggtgaaatgcgcaagttggaggcttgctgtggaagcacacaacatctttggctttgagaccattcctgaagagtgcgttgaagcaacaaaggaatacatccatggcgaacaatatagatcagactccaaaacagttaaccaacaagcttacttttatgccagagacctcgaagtccatcccaaggacacatttgtgttcagtatagatggcaccgtactctctaatattccatactacaaaaa

SEQ ID NO: 58573 - DNA, 328 bp, Glycine max
ggcacaagtgagtttgttgatcgagataactagaaacagtgtgatgaaaatgaaggtccttgttttcttcgttgctacaattttggtagcatggcaatgccatgcgtacgatatgttccctctccgaatgaacactggctatggtgcccgtactccggaggtgaaatgcgcaagttggaagcttgctgtggaagcacacaacatctttggctttgagaccattcctgaagagtgcgttgaagcaacaaaggaatacatccatggcgaacaatatagatcagactccaaaacagttaaccaacaagcttacttttatgccagagacctc

SEQ ID NO: 58574 - DNA, 334 bp, Glycine max
tgatcttcaacgacacagagggaggaacatttgcatacatctgacttacgattcaggaactgcgtattggtgacatgtagggatggacatcgcaatagaccgtacaaatgattcaggtcgtctatcatgtgggtgaacttgatcgaaccatcaacttttacacaaagtggtaaggaattctgcattatgagcggtgagagttcacaaacgacatatatagcaacgcttaactgtggctctgccctagattaatcccatttagttgtagacttaacatataattatggagctacctctcaagacgttggctattgctattgcccattagctcatg

SEQ ID NO: 58575 - DNA, 382 bp, Glycine max
  unsure (1)..(382): unsure at all n locations
ggcacaagtttgttgagatagctagaagcaataagatgaaaatgaaagtgcttgttttgtttgttgctacagttttggtagcatatgaatgccatggctcagactaccagaagttccctctccaaatgaaaactgggtttggtgggcaatacagcaatgaggtggcatgtgccagttggaggcttggcgtggaagcaaacaagtagtcaagtggcaaactgttcctgcagcttgcggagagtacatagctgactacgttctangagaccaatatagatcagattccaaaacagttaaccaacaagcttatttctatgctaaatccctcaaactcaccaacaaagatgtctttgtcttggacgttgacgacactactctctct

SEQ ID NO: 58576 - DNA, 361 bp, Glycine max
gaaggtgcaagagtttgttgtgagctataagctagtttatcgtgaggagaatatgaagttgtttgttttctttgttgctgcagtagttttggtagcatggccatgccatggcgcaggctaccaaaggttccctctccgaatgaaagctggctatggtgagcgttcttcggaggtaaaatgcgcaagttttaggcttgctgtggaagcacacaacatccgagcctttaaaaccattcctgaagagtgcgttgaaccaacaaaggactacattaatggcgaacaatttagattagactctaaaacagttaaccaacaagctttcttttatgctagtgaacgcgaagtccatcacaacgacata

SEQ ID NO: 58577 - DNA, 394 bp, Glycine max
ggcacaagtgagtttgttgatcgagataactagaaacagtgtgatgaaaatgaaggtccttgttttcttcgttgctacaattttggtagcatggcaatgccatgcgtacgatatgttccctctccgaatgaacactggctatggtgcccgtactccggaggtgaaatgcgcaagttggaggcttgctgtggaagcacacaacatctttggctttgagaccattcctgaagagtgcgttgaagcaacaaaggaatacatccatggcgaacaatatagatcagactccaaaacagttaaccaacaagcttacttttatgccagagacctcgaagtccatcccaaggacacatttgtgttcagtatagatggcaccgtactctctaatattccatac

SEQ ID NO: 58578 - DNA, 409 bp, Glycine max
gggaaaagtgaatttgttgattgaaataactaaaaacaattttattaaaattaaaggccttggtttcctccgtggcaaaaattttggaccaatgaatgcatgcgtacgatatgttccctctccgaatgaacactggctatggtgcccgtactccggaggtgaaatgcgcaagttggaggcttgctgtggaagcacacaacatctttggctttgagaccattcctgaagagtgcgttgaagcaacaaaggaatacatccatggcgaacaatatagatcagactccaaaacagttaaccaacaagcttacttttatgccagagacctcgaagtcaatcccaaggacacatttgtgttcagtatagatggcaccgtactctctaatattccatactacaaaaaacatggata

SEQ ID NO: 58579 - DNA, 412 bp, Glycine max
ggcacaagtttgttgagatagctagaagcaataagatgaaaatgaaagtgcttgttttgtttgttgctacagttttggtagcatatgaatgccatggctcagactaccagaagttccctctccaaatgaaaactgggtttggtgggcaatacagcaatgaggtggcatgtgccagttggaggcttggcgtggaagcaaacaacgtagtcaagtggcaaactgttcctgcagcttgcggagagtacatagctgactacgttctaggagaccaatatagatcagattccaaaacagttaaccaacaagcttaattccatgctaaatccctcaaactcaccaacaaagatgtctttgtcttggacgttgacgacactactctctctaatctcaagtattttgctaaccatggatt

SEQ ID NO: 58580 - DNA, 367 bp, Glycine max
gaaggtgcaagagtttgttgtgagctataagctagtttatcgtgaggagaatatgaagttgtttgttttctttgttgctgcagtagttttggtagcatggccatgccatggcgcaggctaccaaaggttccctctccgaatgaaaactggctatggtgagcgttcttcggaggtaaaatgcgcaagttttaggcttgctgtggaagcacacaacatccgagcctttaaaaccattcctgaagagtgcgttgaaccaacaaaggactacattaatggcgaacaatttagatcagactctaaaacagttaaccaacaagctttcttttatgctagtgaacgcgaagtccatcacaacgacatatttata

SEQ ID NO: 58581 - DNA, 408 bp, Glycine max
ggggtgcacaagtgagtttgttgatcgagataactagaaacagtgtgatgaaaatgaaggtccttgttttcttcgttgctacaattttggtagcatggcaatgccatgcgtacgatatgttccctctccgaatgaacactggctatggtgcccgtactccggaggtgaaatgcgcaagttggaggcttgctgtggaagcacacaacatctttggctttgagaacattcctgaagagtgcgttgaagcaacaaaggaatacatccatggcgaacaatatagattagactccaaaacagttaaccaacaagcttacttttatgccagagacctcgaagtccatcccaaggacacatttgtgttcagtatagatggcaccgtactctctaatattccatactaccaaaaac

SEQ ID NO: 58582 - DNA, 355 bp, Glycine max
atttgttttgtttttctttgttgctgcagtagttttggtagcatggccatgccatggcgcatgctaccaaaggttccctctccgaatgaaaactggctatggtgagcgttcttcggaggtaaaatgcgcaagttttaggcttgctgtggaagcacacaacatccgagcctttaaaaccattcctgaagagtgcgttgaaccaacaaaggactacattaatggcgaacatttagattagactctaaaacagtttaacaacaagctttcttttatgctagtgaacgcgaagtcaatcacaacgacatatttatattcggcatagataacaccgtactctctaatattccatactatg

SEQ ID NO: 58583 - DNA, 397 bp, Glycine max
ggcacaagtgagtttgttgatcgagataactagaaacagtgtgatgaaaatgaaggtccttgttttcttcgttgctacaattttggtagcatggcaatgccatgcgtacgatatgttccctctccgaatgaacactggctatggtgcccgtactccggaggtgaaatgcgcaagttggaggcttgctgtggaagcacacaacatctttggctttgagaccattcctgaagagtgcgttgaagcaacaaaggaatacatccatggcgaacaatatagattagactccaaaacagttaaccaacaagcttacttttatgccagagacctcgaagtccatcccaaggacacatttgtgttcagtatagatggcaccgtactctctaatattccatactac

SEQ ID NO: 58584 - DNA, 402 bp, Glycine max
gagcgaaatcgatataatgggagaacactctgacataatactcctatctcctccattctatcagatgctcaagacagacacttttgaatgttctctgttctcttacatgtcgacgaatagttaccacacatttcatcacttcagggccgattatctcagtactctactctaaagtcactatcacattgttagtgttgataggatgatgccacagcgtgtactgatcataattactgaggctgtgtttctatcaccagctgtaacgtatattaagccacatcttggaaattctgtggatgtcatcgaacgcacaaaactcatcaattgctagtgaaaatgttagagatataggacatctccactcagagacgtgaactatgatacactaagctctactagctg

SEQ ID NO: 58585 - DNA, 358 bp, Glycine max
ggcacaagtgagtttgttgatcgagataactagaaacagtgtgatgaaaatgaaggtccttgttttcttcgttgctacaattttggtagcatggcaatgccatgcgtacgatatgttccctctccgaatgaacactggctatggtgcccgtactccggaggtgaaatgcgcaagttggaggcttgctgtggaagcacacaacatctttggctttgagaccattcctgaagagtgcgttgaagcaacaaaggaatacatccatggcgaacaatatagattagactccaaaacagttaaccaacaagcttacttttatgccagagacctcgaagtccatcccaaggacacatttgtgttc

SEQ ID NO: 58586 - DNA, 161 bp, Glycine max
aggcgtcaggatgccagaagggggcagaagtgatttcatagtactagcattcaatctcaactgtcactcatctcacggtacttgaattctaactcgcgacactgttggcctcacggaaccgtcatgcatggaagaaagtccatcaccgaatctaaaatagc

SEQ ID NO: 58587 - DNA, 408 bp, Glycine max
aggggcaaaagtgagtttgttgatcgagataactagaaacagtgtgatgaaaatgaaggtccttgttttcttcgttgctacaattttggtagcatggcaatgccatgcgtacgatatgttccctctccgaatgaacactggctatggtgcccgtactccggaggtgaaatgcgcaagttggaggcttgctgtggaagcacacaacatctttggctttgagaccattcctgaagagtgcgttgaagcaacaaaggaatacatccatggcgaacaatatagattagactccaaaacagttaaccaacaagcttacttttatgccagagacctcgaagtccatcccaaggacacatttgtgttcagtatagatggcaccgtactctctaatattccatactacaaaaaaca

SEQ ID NO: 58588 - DNA, 164 bp, Glycine max
gagtcaagtacttgggcccattctctggcgagcccccgtcctacctaaccggtgagttcccaggcgactacggctgggacactgctgggctttccgcagacccagaaaccttcgccaagaaccgtgaactcgaagtgattcactccaggtgggccatgctcgga

SEQ ID NO: 58589 - DNA, 320 bp, Glycine max
gacagttgcagcctgagcttgagcaaaacgaccttgaccatctatagctgtcggtgtcagtaagaagatttcgattgcaaagggaggtggcggtagcaaagcgttagtggccaatcccttcgtcactcattaatgctctcatttcaacgctgattccctccttcatctaccgtgtttcgacagcgccgcttcctttcgtaacaaagactgataatagcatcaggccgattcactcatccagttcatgaagactcattggatgctcgtcactgggatgcagagaactcctactgcatcattcggatgcaaacatcggattt

SEQ ID NO: 58590 - DNA, 381 bp, Glycine max
  unsure (1)..(381): unsure at all n locations
ggcacaagtttgttgagatagctagaagcaataagatgaaaatgaaagtgcttgttttgtttgttgctacagttttggtagcatatgaatgccatggctcagactaccagaagttccctctccaaatgaaaactgggtttggtgggcaatacagcaatgaggtggcatgtgccagttggaggcttggcgtggaagcaaacaacgtagtcaagtggcaaactgttcctgcagcttgcggagagtacatagctgactacgttctangagaccaatatagatcagattccaaaacagttaaccaacaagcttatttctatgctaaatccctcaaactcaccaacaaagatgtctttgtcttggacgttgacgacactactctct

SEQ ID NO: 58591 - DNA, 401 bp, Glycine max
gatgcacaagtttgtttagaaaactagaagcaataagattaaaatgaaaatgcttgttttgtttgttgctacagttttggtagcatatgaatgccatggctcagactaccagaagttccctctccaaatgaaaactgggtttggtgggcaatacagcaatgaggtggcatgtgccagttggaggcttggcgtggaagcaaacaacgtagtcaagtggcaaactgttcctgcagctttcggagagtacatagctgactacgttctaggagaccaatatagatcagattccaaaacagttaaccaacaagcttatttctatgctaaatccctcaaactcaccaacaaagatgtctttgtcttggacgttgacgacactactctctctaatctccagtattttg

SEQ ID NO: 58592 - DNA, 397 bp, Glycine max
ggcacaagtgagtttgttgatcgagataactagaaacagtgtgatgaaaatgaaggtccttgttttcttcgttgctacaattttggtagcatggcaatgccatgcgtacgatatgttccctctccgaatgaacactggctacggtgcccgtactccggaggtgaaatgcgcaagttggaggcttgctgtggaagcacacaacatctttggctttgagaccattcctgaagagtgcgttgaagcaacaaaggaatacatccatggcgaacaatatagattagactccaaaacagttaaccaacaagcttacttttatgccagagacctcgaagtccatcccaaggacacatttgtgttcagtatagatggcaccgtactctctaatattccatactac

SEQ ID NO: 58593 - DNA, 367 bp, Glycine max
ggcacaagtgagtttgttgatcgagataactagaaacagtgtgatgaaaatgaaggtccttgttttcttcgttgctacaattttggtagcatggcaatgccatgcgtacgatatgttccctctccgaatgaacactggctatggtgcccgtactccggaggtgaaatgcgcaagttggaggcttgctgtggaagcacacaacatctttggctttgagaccattcctgaagagtgcgttgaagcaacaaaggaatacatccatggcgaacaatatagatcagactccaaaacagttaaccaacaagcttacttttatgccagagacctcgaagtccatcccaaggacacatttgtgttcagtatagat

SEQ ID NO: 58594 - DNA, 380 bp, Glycine max
ggcacaagtgagtttgttgatcgagataactagaaacagtgtgatgaagatgaaggtccttgttttcttcgttgctacaattttggtagcatggcaatgccatgcgtacgatatgttccctctccgaatgaacactggctatggtgcccgtactccggaggtgaaatgcgcaagttggaggcttgctgtggaagcacacaacatctttggctttgagaccattcctgaagagtgcgttgaagcaacaaaggaatacatccatggcgaacaatatagatcagactccaaaacagttaaccaacaagcttacttttatgccagagacctcgaagtccatcccaaggacacatttgtgttcagtatagatggcaccgtactct

SEQ ID NO: 58595 - DNA, 424 bp, Glycine max
agaagggggcacaagtttgttgagatagctagaagcaataagatgaaaatgaaagtgcttgttttgtttgttgctacagttttggtagcatatgaatgccatggctcagactaccagaagttccctctccaaatgaaaactgggtttggtgggcaatacagcaatgaggtggcatgtgccagttggaggcttggcgtggaagcaaacaacgtagtcaagtggcaaactgttcctgcagcttgcggagagtacatagctgactacgttctaggagaccaatatagatcagattccaaaacagttaaccaacaagcttatttctatgctaaatccctcaaactcaccaacaaagatgtctttgtcttggacgttgacgacactactctctctaatctccagtattttgctaaccatgggatttggt

SEQ ID NO: 58596 - DNA, 258 bp, Glycine max
gaccacattcggaaatacaaacacattacattgggcgtaccacttttgtctcggaatgtgctcatttgcattaggggaaacttaatgggtacaagtgtgggtttgatgtccctggatggtatgaattgaccaatgaaagggggaaccctttgattggagaatggtttcgttgaacctttaacgggtttaacctaaccggttcaagggtggaaattttccaaaatcttgttgtaacgggtttaggaaaattctgggttc

SEQ ID NO: 58597 - DNA, 411 bp, Glycine max
  unsure (1)..(411): unsure at all n locations
gacagaatcatcttctttttttcttcctatcctatctagtgaaaatgaattgaagggctaagggatgaaaggtttgatattgatggtctagctttagtagtgatctcttggaattgaaagtttagaaattagaaattaatagtgactattgatgatgggtaagaagaagccacaaaaaactaaggaactttccgtggcaatagctgaagcatcatcagcaattgatgagaaagagcaacaaattcaagttcaagttcaacctcaacctcaagctcctagaaagagaggtaaaactcgtaagaattgttttaaagagggaagaaaagtgaagaggaaaaaacacaactgatgatagggcaaagaggagcacaaggcacanagagttcaatggaaaaaggtacacacaacgag

SEQ ID NO: 58598 - DNA, 406 bp, Glycine max
  unsure (1)..(406): unsure at all n locations
ggcacaagtgagtttgttgatcgagataactagaaacagtgtgatgaaaatgaaggtccttgttttcttcgttgctacaattttggtagcatggcaatgccatgcgtacgatatgttccctctccgaatgaacactggctatggtgcccgtactccggaggtgaaatgcgcaagttggaggcttgctgtggaagcacacaacatctttggctttgagaccattcctgaagagtgcgttgaagcaacaaaggaatacatccatggcgaacaatatagatcagactccaaaacagttaaccaacaagcttacttttatgccagagacctcgaagtcaatcncaaggacacatttgtgttcagtatagatggcaccgtactctctaatattccatactacaaaaaacat

SEQ ID NO: 58599 - DNA, 385 bp, Glycine max
gaagagtttgttgtgagctataagctagtttatcgtgaggagaatatgaagttgtttgttttctttgttgctgcagtagttttggtagcatggccatgccatggcgcaggctaccaaaggttccctctccgaatgaaaactggctatggtgagcgttcttcggaggtaaaatgcgcaagttttaggcttgctgtggaagcacacaacatccgagcctttaaaaccattcctgaagagtgcgttgaaccaacaaaggactacattaatggcgaacaatttagatcagactctaaaacagttaaccaacaagctttcttttatgctagtgaacgcgaagtccatcacaacgacatatttatattcggcatagataacaccgtactct

SEQ ID NO: 58600 - DNA, 404 bp, Glycine max
ggaaaaattaatttggttgttcaaaatactaaaaaaattgtgatgaaaatgaaggtccttgttttcttcgttgctacaattttggtagcatggcaatgccatgcgtacgatatgttccctctccgaatgaacactggctatggtgcccgtactccggaggtgaaatgcgcaagttggaggcttgctgtggaagcacacaacatctttggctttgagaccattcctgaagagtgcgttgaagcaacaaaggaatacatccatggcgaacaatatagatcagactccaaaacagttaaccaacaagcttacttttatgccagagaactcgaagtccatcccaaggacacatttgtgttcagtatagatggcaccgtactctctaatattccatactacaaaaaaca

SEQ ID NO: 58601 - DNA, 368 bp, Glycine max
gaaggtgcaagagtttgttgtgagctataagctagtttatcgtgaggagaatatgaagttgtttgttttctttgttgctgcagtagttttggtagcatggccatgccatggcgcaggctaccaaaggttccctctccgaatgaaaactggctatggtgagcgttcttcggaggtaaaatgcgcaagttttaggcttgctgtggaagcacacaacatccgagcctttaaaaccattcctgaagagtgcgttgaaccaacaaaggactacattaatggcgaacaatttagattagactctaaaacagttaaccaacaagctttcttttatgctagtgaacgcgaagtccatcacaacgacatatttatat

SEQ ID NO: 58602 - DNA, 177 bp, Glycine max
gaactacatgagagtgcacttacgtagtgtgtgggagacaaagagagatggctaagtggtgcatgttggtgttggttcgtgctctagctctggctgtggccacgagttccatagatgcacccgatgatgttggtctcaaggactacgatgacattcatcagctatttctggagttgg

SEQ ID NO: 58603 - DNA, 386 bp, Glycine max
ggcacaagtgagtttgttgatcgagataactagaaacagtgtgatgaaaatgaaggtccttgttttcttcgttgctacaattttggtagcatggcaatgccatgcgtacgatatgttccctctccgaatgaacactggctatggtgcccgtactccggaggtgaaatgcgcaagttggaggcttgctgtggaagcacacaacatctttggctttgagaccattcctgaagagtgcgttgaagcaacaaaggaatacatccatggcgaacaatatagatcagactccaaaacagttaaccaacaagcttacttttatgccagagacctcgaagtccatcccaaggacacatttgtgttcagtatacatggcgccgtactctctaata

SEQ ID NO: 58604 - DNA, 162 bp, Glycine max
gaccgacacagacagtgacttcagtgagtgatcagtgttcacttgatcgcagcataatcgtcagcgtcacttgcgtaagatgcccataagcaacatcgccgtcggaaggcccgaagacgtgactcatgcctacaagttgaaagcggctttggctgaattcat

SEQ ID NO: 58605 - DNA, 366 bp, Glycine max
ggcacaagtgagtttgttgatcgagataactagaaacagtgtgatgaaaatgaaggtccttgttttcttcgttgctacaattttggtagcatggcaatgccatgcgtacgatatgttccctctccgaatgaacactggctatggtgcccgtactccggaggtgaaatgcgcaagttggaggcttgctgtggaagcacacaacatctttggctttgagaccattcctgaagagtgcgttgaagcaacaaaggaatacatccatggcgaacaatatagatcagactccaaaacagttaaccaacaagcttacttttatgccagagacctcgaagtccatcccaaagacacatttgtgttcagtataga

SEQ ID NO: 58606 - DNA, 267 bp, Glycine max
agaagggggcacaagtgagtttgttgatcgagataactagaaacagtgtgatgaaaatgaaggtccttgttttcttcgttgctacaattttggtagcatggcaatgccatgcgtacgatatgttccctctccgaatgaatactggctatggtgcccgtactccggaggtgaaatgcgcaagttggatgcttgctgtggaagcacataacatctttggctttgagaccattcctgaagagtgcgttgatgcaacaaatgaatacatcc

SEQ ID NO: 58607 - DNA, 390 bp, Glycine max
ggcacaagtgagtttgttgatcgagataactagaaacagtgtgatgaaaatgaaggtccttgttttcttcgttgctacaattttggtagcatggcaatgccatgcgtacgatatgtgccctctccgaatgaacactggctatggtgcccgtactccggaggtgaaatgcacacgttggacgcttgctgtggaagcacacaacatctttggctttgagaccattcctgaagaatgcgttgaatcaacataggaatacatccatggtgaacaatatagatcagactccaatacagttaaccaacaagcttacttttatgccacagacctcgaagtccatcccaaggacacatttgtgttcagtatacatggcaccgtactctctaatattcc

SEQ ID NO: 58608 - DNA, 242 bp, Glycine max
ggcacacgtgagtttgttgatcgtgataactacagacatcgtgaggagactggaagcagtgtgatgcaactgagcgtcagtgtttgctaggatggcacatgcatgcctatgatatgtgccggctccgatatgaagactggatatggtgcccgtactccagacgtgtcatgcacacgttgtacgcttgctgtgggcacagacagcatctttagctttgacacgcactccagaatagtgcgttg

SEQ ID NO: 58609 - DNA, 383 bp, Glycine max
  unsure (1)..(383): unsure at all n locations
ggcacaagtttgttgagatagctagaagcaataagatgaaaatgaaagtgcttgttttgtttgttgctacagttttggtagcatatgaatgccatggctcagactaccagaagttccctctccaaatgaaaactgggtttggtgggcaatacagcaatgaggtggcatgtgccagttggaggcttggcgtggaagcaaacaacgtagtcaagtggcaaactgttcctgcagcttgcggagagtacatagctgactacgttctaagagaccaatatagatcagattccanaacagttaaccaacaagcttatttctatgctaaatccctcaaactcaccaacaaagatgtctttgtcttggacgttgacgacactactctctct

SEQ ID NO: 58610 - DNA, 348 bp, Glycine max
  unsure (1)..(348): unsure at all n locations
ggcacaagtttgttgagatagctagaagcaataagatgaaaatgaaagtgcttgttttgtttgttgctacagttttggtagcatatgaatgccatggctcagactaccagaagttccctctccaaatgaaaactgggtttggtgggcaatacagcaatgacgtggcatgtgccagttggaggcttggcgtggaagcaaacaacgtagtcaagtggcaaactgttcctgcagcttgcggagagtacatagctgactacgttctangagaccaatatagatcagattccanaacagttaaccaacaagctttattctatgctaaatccctcaaactcaacaacanagatg

SEQ ID NO: 58611 - DNA, 388 bp, Glycine max
ggcacaagtgagtttgttgatcgagataactagaaacagtgtgatgaaaatgaaggtccttgttttcttcgttgctacaattttggtagcatggcaatgccatgcgtacgatatgttccctctccgaatgaacactggctatggtgcccgtactccggaggtgaaatgcgcaagttggaggcttgctgtggaagcacacaacatctttggctttgagaccattcctgaagagtgcgttgaagcaacaaaggaatacatccatggcgaacaatatagatcagactccaaaacagttaaccaacaagcttacttttatgccagagacctcgaagtccatcccaaggacacatttgtgttcagtatagatggcaccgtactctctaatatt

SEQ ID NO: 58612 - DNA, 382 bp, Glycine max
ggcacaagtgagtttgttgatcgagataactagaaacagtgtgatgaaaatgaaggtccttgttttcttcgttgctacaattttggtagcatggcaatgccgtgcgtacgatatgttccctctccgaatgaacactggctatggtgcccgtactccggaggtgaaatgcgcaagttggaggcttgctgtggaagcacacaacatccttggctttgagaacattcctgaagagttcgttgaagcaaccaaatgaatacatccatggcgaaccagtataaattagactccacatcagttacccaaccagcttacctctatgccagagacctcgaaatccatcccaaggacacatttgtgttcagtatagatggcaccgtactct

SEQ ID NO: 58613 - DNA, 386 bp, Glycine max
ggcacaagtttgttgagatagctagaagcaataagatgaaaatgaaagtgcttgttttgtttgttgctacagttttggtagcatatgaatgccatggctcagactaccagaagttccctctccaaatgaaaactgggtttggtgggcaatacagcaatgaggtggcatgtgccagttggaggcttggcgtggaagcaaacaacgtagtcaagtggcaaactgttcctgcagcttgcggagagtacatagctgactacgttctaggagaccaatatagatcagattccaaaacagttaaccaacaagcttatttctatgctaaatccctcaaactcaccaacaaagatgtctttgtcttggacgttgacgacactactctctctaat

SEQ ID NO: 58614 - DNA, 384 bp, Glycine max
ggcacaagtgagtttgttgatcgagataactagaaacagtgtgatgaaaatgaaggtccttgttttcttcgttgctacaattttggtagcatggcaatgccatgcgtacgatatgttccctctccgaatgaacactggctatggtgcccgtactccggaggtgaaatgcgcaagttggaggcttgctgtggaagcacacaacatctttggctttgagaccattcctgaagagtgcgttgaagcaacaaaggaatacatccatggcgaacaatatagatcagactccaaaacagttaaccaacaagcttacttttatgccagagacctcgaagtccatcccaaggacacatttgtgttcagtatagatggcaccgtactctctaa

SEQ ID NO: 58615 - DNA, 309 bp, Glycine max
gagagtcagaactcatcagagagagagagatcgatgacgagaattctggtgagacatggcagtctctacatgtcgcaaccttcttcatcactccgccctcgcacttgccgcttcatcgagtcgctcaattcatactcttttcctccaatgagatgtccctcaccggttccccatatccaggacgtgaatgacacacatctgaaggcgcagatcgagacctacttcaatggcgactagacggtgctctcgtcgatgatggaggcgattctgaggcggaacctgtcggggaatcactaggataccgactac

SEQ ID NO: 58616 - DNA, 392 bp, Glycine max
ggcacaagtttgttgagatagctagaagcaataagatgaaaatgaaagtgcttgttttgtttgttgctacagttttggtagcatatgaatgccatggctcagactaccagaagttccctctccaaatgaaaactgggtttggtgggcaatacagcaatgaggtggcatgtgccagttggaggcttggcgtggaagcaaacaacgtagtcaagtggcaaactgttcctgcagcttgcggagagtacatagctgactacgttctaggagaccaatatagatcagattccaaaacagttaaccaacaagcttatttctatgctaaatccctcaaactcaccaacaaagatgtctttgtcttggacgttgacgacactactctctctaatctccag

SEQ ID NO: 58617 - DNA, 373 bp, Glycine max
ggcacaagtgagtttgttgatcgagataactagaaacagtgtgatgaatatgaatgtccttgttttcttcgttgctacaattttggtagcatggcaatgccatgcgtacgatatgttccctctccgaatgaacactggctatggtgcccgtactccggaggtgaaatgcgcaagttggacgcttgctgtggaagcacacaatatctttggctttgagaccagtcctgaagagtgcgttgaagcaacaaatgaatacatccatggcgaacaatatatatcagactccaaaacagtttaccaataagcttacttttatgccagagaccccgaagtcatcccaaggacagatttgtgttcagtatatacggcaccg

SEQ ID NO: 58618 - DNA, 381 bp, Glycine max
  unsure (1)..(381): unsure at all n locations
ggcacaagtgagtttgttgatcgagatacctagacacagtgtggtaaatgtaagtgcctgtgttcttcgctgcgacaattttgggagcatggcaatgccatgcgtactataagttccccctccgcatgaacactggctatggtgcccgtactccggaggtgaaatgcgcaagttggaggcttgctgtggaagcacacaacatctttggctttgagaccattcctgaagagtgcgttgaagcaacaaaggaatacatccatggcgaacaatatagatcagactccaaaacagttaaccaacaagcttacttttatgccagagacctcgaagtccatcncaaggacacatttgtgttcagtatagatggcaccgtactctcta

SEQ ID NO: 58619 - DNA, 387 bp, Glycine max
ggcacaagtgagtttgttgatcgagataactagaaacagtgtgatgaaaatgaaggtccttgttttcttcgttgctacaattttggtagcatggcaatgccatgcgtacgatatgttccctctccgaatgaacactggctatggtgcccgtactccggaggtgaaatgcgcaagttggaggcttgctgtggaagcacacaacatctttggctttgagaccattcctgaagagtgcgttgaagcaacaaaggaatacatccatggcgaacaatatagatcagactccaaaacagttaaccaacaagcttacttttatgccagagacctcgaagtccatcccaaggacacatttgtgttcagtatagatggcaccgtactctctaatat

SEQ ID NO: 58620 - DNA, 374 bp, Glycine max
ggcacaagtgagtttgttgatcgagataactagaaacagtgtgatgaaaatgaaggtccttgttttcttcgttgctacaattttggtagcatggcaatgccatgcgtacgatatgttccctctccgaatgaacactggctatggtgcccgtactccggaggtgaaatgcgcaagttggaggcttgctgtggaagcacacaacatctttggctttgagaccattcctgaagagtgcgttgaagcaacaaaggaatacatccatggcgaacaatatagatcagactccaaaacagttaaccaacaagcttacttttatgccagagacctcgaagtccatcccaaggacacatttgtgttcagtatagatggcaccg

SEQ ID NO: 58621 - DNA, 375 bp, Glycine max
ggcacaagtgactttgttgatcgagataactataaacagtgtgatgaaaatgaaggtccttgttttcttcgttgctacaattttggtagcatgacaatgccatgcgtacgatatgtaccctcaccgaatgaacactggctatggtgcccgtactccggaggtgaaatgctcaagttggaagcttgctgtggaagcacacaacatctttggctttgagaccattcctgaagagtgcgttgaggcaacacaggaatacatccatggcgaacactatagatcagactccagaacagttaaccaacatgcttacttttatgccagagacctcgaggtccatcacaaggacacatttgtgtgcagtataaatggcaccgt

SEQ ID NO: 58622 - DNA, 388 bp, Glycine max
ggcacaagtgagtttgttgatcgagataactagaaacagtgtgatgaaaatgaaggtccttgttttcttcgttgctacaattttggtagcatggcaatgccatgcgtacgatatgttccctctccgaatgaacactggctatggtgcccgtactccggaggtgaaatgcgcaagttggaggcttgctgtggaagcacacaacatctttggctttgagaccattcctgaagagtgcgttgaagcaacagaggaatacatccatggccaacaatatagattagactccaaaacagttaagcaacaggcttacttttatgccagagacctcgaagtccatcccaaggacacatttgtgttcagtatagatggcaccgtactctctaatatt

SEQ ID NO: 58623 - DNA, 382 bp, Glycine max
ggcacaagtgagtttgttgatcgagataactagaaacagtgtgatgaaaatgaaggtccttgttttcttcgttgctacaattttggtagcatggcaatgccatgcgtacgatatgttccctctccgaatgaacactggctatggtgcccgtactccggaggtgaaatgcgcaagttggaggcttgctgtggaagcacacaacatctttggctttgagaccattcctgaagagtgcgttgaagcaacaaaggaatacatccatggcgaacaatatagatcagactccaaaacagttaaccaacaagcttacttttatgccagagacctcgaagtccatcccaaggacacatttgtgttcagtatagatggcaccgtactctct

SEQ ID NO: 58624 - DNA, 361 bp, Glycine max
  unsure (1)..(361): unsure at all n locations
ggcacaagtttgttgagatagctagaagcaataagatgaaaatgaaagtgcttgttttgtttgttgctacagttttggtagcatatgaatgccatggctcagactaccagaagttccctctccaaatgaaaactgggtttggtgggcaatacagcaatgaggtggcatgtgccagttggaggcttggcgtggaagcaaacaacgtagtcaagtggcaaactgttcctgcagcttgcggagagtacatagctgactacgttctaagagaccaatatagatcagattccaaaacagttaaccaacaagcttatttctatgctaaatcnctcaaactcaccaacaaagatgtctttgtcttgga

SEQ ID NO: 58625 - DNA, 239 bp, Glycine max
ttcacggctccatacaggctgtcagaagacgacaaaagaggcacaaggggatttgatgttatcaataatcaaattcagtgtaatgctacagtatgaccatgttctctgcagtgcaacaacattggtacccgtggaatgccagacgttgaaaatgatcccacgtccaatgaacactgtatatggtgacccttatcaagtcgtcagatgcacatcttagaggcttcccagtagagcacaca

SEQ ID NO: 58626 - DNA, 383 bp, Glycine max
ggcacaagtgagtttgttgatcgagataactagaaacagtgtgatgaaaatgaaggtccttgttttcttcgttgctacaattttggtagcatggcaatgccatgcgtacgatatgttccctctccgaatgaacactggctctggtgcccgtactccggaggtgaaatgcgcaagttggaggcttgctgtggaagcacacaacatctttggctttgagaccattcctgaagagtgcgttgaagcaacaaaggaatacatccatggcgaacaatatagatcagactccaaaacagttaaccaacaagcttacttttatgccagagacctcgaagtccatcccaaggacacatttgtgttcagtatagatggcaccgtactctcta

SEQ ID NO: 58627 - DNA, 372 bp, Glycine max
ggcacaagtgagtttgttgatcgagataactagaaacagtgtgatgaaaatgaaggtccttgttttcttcgttgctacaattttggtagcatggcaatgccatgcgtacgatatgttccctctccgaatgaacactggctatggtgcccgtactccggaggtgaaatgcgcaagttggaggcttgctgtggaagcacacaacatctttggctttgagaccattcctgaagagtgcgttgaagcaacaaaggaatacatccatggcgaacaatatagatcagactccaaaacagttaaccaacaagcttacttttatgccagagacctcgaagtccatcccaaggacacatttgtgttcagtatagatggcac

SEQ ID NO: 58628 - DNA, 392 bp, Glycine max
ggcacaagtgagtttgttgatcgagataactagaaacagtgtgatgaaaatgaaggtccttgttttcttcgttgctacaattttggtagcatggcaatgccatgcgtacgatatgttccctctccgaatgaacactggctatggtgcccgtactccggaggtgaaatgcgcaagttggaggcttgctgtggaagcacacaacatctttggctttgagaacattcctgaagagtgcgttgaagcaacaaaggaatacatccatggcgaacaatatagatcagactccaaaacaattaaccaacaagcttacttttatgccagagacctcgaagtccatcccaaggacacatttgtgttcagtatagatggcaccgtactctctaatattccat

SEQ ID NO: 58629 - DNA, 391 bp, Glycine max
gacttcaattgcaatcaaattagttcattctctttgcgcagttccctacctctcctttcaagatgcagatcttcgtcaagaccctcaccggaaagaccatcacccttgaggtggaaagctctgacaccatcgacaacgtcaaggccaagatccaggacaaggaaggaattcccccggatcagcaacgtctcatcttcgccggaaagcagctcgaggacggccgtaccctcgccgactacaacatccagaaggagtcaacccttcaccttgtccttcgtctccgtggtggcatgcagatcttcgtcaagactctcactggcaaaaccataaccctagaggtcgaaagctctgacaccattgacaacgtcaaggccaagatccaggacaagga

SEQ ID NO: 58630 - DNA, 380 bp, Glycine max
  unsure (1)..(380): unsure at all n locations
ggcacaagtgagtttgttgatcgagataactagaaacagtgtgatgaaaatgaaggtccttgttttcttcgttgctacaattttggtagcatggcaatgccatgcgtacgatatgttccctctccgaatgaacactggctatggtgcccgtactccggaggtgaaatgcgcaagttggatgcttgctgtggaagcacacaacatctttggctttgagaccattcctgaagagtgcgttganacaacaaaggaatacatccatggcgaacactatagatcagactccaaaacagttaaccaacaagcttacttttatgccagagacctcgaggtccatcgcaaggacacatttgtgttcagtatagatggcaccgtactct

SEQ ID NO: 58631 - DNA, 381 bp, Glycine max
gaaggtgcaagagtttgttgtgagctataagctagtttatcgtgaggagaatatgaagttgtttgttttctttgttgctgcagtagttttggtagcatggccatgccatggcgcaggctaccaaaggttccctctccgaatgaaaactggctatggtgagcgttcttcggaggtaaaatgcgcaagttttaggcttgctgtggaagcacacaacatccgagcctttaaaaccattcctgaagagtgcgttgaaccaacaaaggactacattaatggcgaacaatttagatcagactctaaaacagttaaccaacaagctttcttttatgctagtgaacgcgaagtccatcacaacgacatatttatattcggcatagataa

SEQ ID NO: 58632 - DNA, 376 bp, Glycine max
gaaggtgcaagagtttgttgtgagctataagctagtttatcgtgaggagaatatgaagttgtttgttttctttgttgctgcagtagttttggtagcatggccatgccatggcgcaggctaccaaaggttccctctccgaatgaaaactggctatggtgagcgttcttcggaggtaaaatgcgcaagttttaggcttgctgtggaagcacacaacatccgagcctttaaaaccattcctgaagagtgcgttgaaccaacaaaggactacattaatggcgaacaatttagatcagactctaaaacagttaaccaacaagctttcgtttatgctaatgaacgcgaagtccatcacaacgacatatttatattcggcata

SEQ ID NO: 58633 - DNA, 380 bp, Glycine max
ggcacaagtttgttgagatagctagaagcaataagatgaaaatgaaagtgcttgttttgtttgttgctacagttttggtagcatatgaatgccatggctcagactaccagaagttccctctccaaatgaaaactgggtttggtgggcaatacagcaatgaggtggcatgtgccagttggaggcttggcgtggaagcaaacaacgtagtcaagtggcaaactgttcctgcagcttgcggagagtacataactgactacgttctaggagaccaatatagattaaattccaaaacagttaaccaacaagcttatttctatgctaaatccctcaaactcaccaacaaagatgtctttgtcttggacgttgacgacactactctc

SEQ ID NO: 58634 - DNA, 375 bp, Glycine max
  unsure (1)..(375): unsure at all n locations
gatgcacaagtttgttgagatagctagaagcaataagatgaaaatgaaagtgcttgttttgtttgttgctacagttttggtagcatatgaatgccatggctcagactaccagaagttccctctccaaatgaaaactgggtttggtgggcaatacagcaatgaggtggcatgtgccagttggaggcttggcgtggaagcaaacaacgtagtcaagtggcaaactgttcctgcagcttgcggagagtacatagctgactacgttctangagaccaatatagatcagattccaaaacagttaaccaacaagcttatttctatgctaaatccctcaaactcaccaacaaagatgtctttgtcttggacgttgacgacac

SEQ ID NO: 58635 - DNA, 377 bp, Glycine max
ggtgagagagtgggcacgcacctgcacctgtcttcatcttccactttgtctttctctctctacccgtgaattttccaatctcagtctcacgttttctctttcactttcaataccgtttcgccaatgtcgcttctctgcttcccctcaatactatctattttctgtttcttcagtttcgtaaccgccgccaccgagttcgacttcggaacgttaactttgggaagcctcaagctcctcggcgacgcccacttaaacaacgccaccgtcagcctcacgcgcgacctcgccgttccaacctccagcgccggcagagccctttactcccgtcctgtcagattccgccaacccggaaaccgttttccggcgagcttcaccac

SEQ ID NO: 58636 - DNA, 366 bp, Glycine max
  unsure (1)..(366): unsure at all n locations
ggatgcacaagtttgttgagatagctagaagcaataagatgaaaatgaaagtgcttgttttgtttgttgctacagttttggtagcatatgaatgccatggctcagactaccagaagttccctctccaaatgaaaactgggtttggtgggcaatacagcaatgaggtggcatgtgccagttggaggcttggcgtggaagcaaacaacgtagtcaagtggcaaactgttcctgcagcttgcggagagtacatagctgactacgttctangagaccaatatagatcagattccaaaacagttaaccaacaagcttatttctatgctaaatccctcaaactcaacaacaaagatgtctttgtcttggacg

SEQ ID NO: 58637 - DNA, 393 bp, Glycine max
  unsure (1)..(393): unsure at all n locations
ggcacaagtgagtttgttgatcgagataactagaaacagtgtgatgaaaatgaaggtccttgttttcttcgttgctacaattttggtagcatggcaatgccatgcgtacgatatgttccctctccgaatgaacactggctatggtgcccgtactccggaggtgaaatgcgcaagttggaggcttgctgtggaagcacacaacatctttggctttgagaccattcctgaagagtgcgttgaagcaacaaacgaatacatccatggcgaacaatatagatcagactccanaacagttaaccaacaagcttacttttatgccagagaactcgaagtccatcccaaggacacatttgtgttcagtataaatggcaccgtactctctaatattccata

SEQ ID NO: 58638 - DNA, 343 bp, Glycine max
ggcagttgtattgttgaacaagggtttctctgtctgcttcttcactttctctcgtttcaatcgaaaccaaaacaaaaacatgggcagaaaattcttcgtcggtggcaactggaaatgcaatgggaccactgaggaggtaaagaagattgttactactttgaatgaggctaaagtccctggagaagatgtcgtagaagttgttgtgagccctccttttgtgttccttcctgttgtaaaaagtttgctgcgccctgatttccatgtttcggcacaaaactgttgggttcgcaaaggtggtgcttataccggtgaggttagtgctgaaatgcttgttaatttggga

SEQ ID NO: 58639 - DNA, 293 bp, Glycine max
ggcacaagtgagtttgttgatcgagataactagaaacagtgtgatgaaaatgaaggtccttgttttcttcgttgctacaattttggtagcatggcaatgccatgcgtacgatatgttccctctccgagtgaacactggctatggtgcccgtactccggatgtgaaatgcgcaagttggaggcttgctgtggaagcacacaacatctttggctttgagaccattcctgaagagttcgttgaagcaacaaaggaatacatccatggccaacaatatagattaaacgccaaaacag

SEQ ID NO: 58640 - DNA, 355 bp, Glycine max
ggcacaagtgagtttgttgatcgagataactagaaacagtgtgatgaaaatgaaggtccttgttttcttcgttgctacaattttggtagcatggcaatgccatgcgtacgatatgttccctctccgaatgaacactggctatggtgcccgtactccggaggtgaaatgcgcaagttggaggcttgctgtggaagcacacaacatctttggctttgagaccattcctgaagagtgcgttgaagcaacaaaggaatacatccatggcgaacaatatagatcagactccaaaacagttaaccaacaagcttacttttatgccagggacctcgaagtctatcccaaggacacatttgtg

SEQ ID NO: 58641 - DNA, 313 bp, Glycine max
  unsure (1)..(313): unsure at all n locations
ggcacaagtgagtttgttgatcgagataactagaaacagtgtgatgaaaatgaaggtccttgttttcttcgttgctacaattttggtagcatggcaatgccatgcgtacgatatgttccctctccgaatgaacactggctatggtgcccgtactccggaggtgaaatgcgcaagttggaagcttgctgtggaagcacacaacatctttggctttgagaccattcctgaagagtgcgttgaagcaacanatgaatacatccatggcgaacaatatagatcagactccaaaacagttaaccaagaagcttacttt

SEQ ID NO: 58642 - DNA, 287 bp, Glycine max
ggcacaagtgagtttgttgatcgagataactagaaacagtgtgatgaaaatgaaggtccttgttttcttcgttgctacaattttggtagcatggcaatgccatgcgtacgatatgttccctctccgaatgaacactggctatggtgcccgtactccggaggtgaaatgcgcaagttggaagcttgctgtggaagcacacaacatctttggctttgagaccattcctgaagagtgcgttgaagcaacaaaggaatacatccatggcgaacaatatagatcagactcca

SEQ ID NO: 58643 - DNA, 232 bp, Glycine max
  unsure (1)..(232): unsure at all n locations
ggtttcatttggttttcttccttctcacacttcccccaattcccaaaccaaactctgtcttttcttctctgtacggcactctctcttccggcgttctgggggtcgcatcgccggcgattccccactctgcttctctcttcacccttcaattcaatcctctcgtcttcgcttcactgagtcnctcttcgaaaatgcttcagatcgcntgctacggttttccttctctcaaatc

SEQ ID NO: 58644 - DNA, 375 bp, Glycine max
tccactccacccatttctctctctctcttctcttttcctcttcaacattcttctctctcacaaagcaacaacacaaacaccgagcgaggggaattcaactttcagcaatggcggtttcttcttctgcaacaaaatgggtcctcttcttgcttctggcgctgctcatccgagaagaagccatggccatggctactaccccacagatctctgacctcaggaatgttgaagttgaaagacacaggttgccgagcttgacgaactcgtcaatggtggagaggttagtgtccttttcccaacgttaaaaattcttatcctcttctttctcgaaactcgtgtaaatctggaccgtccgttccgaattctatctttaactct

SEQ ID NO: 58645 - DNA, 272 bp, Glycine max
ggcaagagtttgttgtgagctataagctagtttatcgtgaggagaatatgaagttgtttgttttctttgttgctgcagtagttttggtagcatggccatgccatggcgcaggctaccaaaggttccctctccgaatgaaaactggctatggtgagcgttcttcggaggtaaaatgcgcaagttttacgcttgctgtggaagcacacaacatccgagccttttaaaccattcctgaagagtgcgttgaaccaacaaaggactacattaatggc

SEQ ID NO: 58646 - DNA, 355 bp, Glycine max
ggcacaagtgagtttgttgatcgagataactagaaacagtgtgatgaaaatgaaggtccgtgttttcttcgttgctacaattttggtagcatggcaatgccatgcgtacgagatgttccctctccgaatgaacactggctatggtgcccgtactccggaggtgaaatgcgcaagttggaggcttgctgtggaagcacacaacatctttggctttgagaccattcctgaagagtgcgttgaagcaacaaaggaatacatccatggcgaacaatatagatcagactccaaaacagttaaccaacaagcttacttttatgccagagacctcgaagtccatcccaggacacatttgtgt

SEQ ID NO: 58647 - DNA, 163 bp, Glycine max
aattcccgggctcgacccacgacagtcagcccacgcgctcagtaacgatgacgagaagacaacagtaaggggcacaattgagtttgttgatcgaaatgtctagaaacagtgtgacgatgatgactgtccttgtattctttcgtgcaacaagtttggtcacatg

SEQ ID NO: 58648 - DNA, 378 bp, Glycine max
  unsure (1)..(378): unsure at all n locations
ggttctattgtttgattgtttgttgttgtaatccgttcttcttctttggtggttcggtgtttgtgttggttttttctctcacctgaaaaatgtcttgctgcggtggtaactgtggttgcggaagctcctgcaagtgcggcaacggctgcggaggctgcaagatgtacccagacttgagctacactgagtcaaccaccaccgagaccttggtcatgggagtggcacctgttaaggctcaatttgagggtgctgaaatgggtgtgcccgctgagaacgatggctgcaaatgtggaccaaactgctcctgcaacccctgcacttgcaagtgangtgttgggagagcaagcttcaagcagagatagcccttaattangaata

SEQ ID NO: 58649 - DNA, 291 bp, Glycine max
ggcacaagtgagtttgttgatcgagataactagaaacagtgtgatgaaaatgaaggtccttgttttcttcgttgctacaattttggtagcatggcaatgccatgcgtacgatatgttccctctccgaatgaacactggctatggtgcccgtactccggaggtgaaatgcgcaagttggaggcttgctgtggaagcacacaacatctttggctttgagaccattcctgaagagtgcgttgaagcaacaaaggaatacatccatggcgaacaatatagattagactccaaaac

SEQ ID NO: 58650 - DNA, 327 bp, Glycine max
gaaggtgcaagagtttgttgtgagctataagctagtttatcgtgaggagaatatgaagttgtttgttttctttgttgctgcagtagttttggtagcatggccatgccatggcgcaggctaccaaaggttccctctccgaatgaaaactggctatggtgagcgttcttcggaggtaaaatgcgcaagttttaggcttgctgtggaagcacacaacatccgagcctttaaaaccattcctgaagagtgcgttgaaccaacaaaggactacattaatggcgaacaatttagatcagactctaaaacagtttaacaacaagctttccttta

SEQ ID NO: 58651 - DNA, 193 bp, Glycine max
gacatttcacagtcaccaactaaccctccgtttatcccacccccaccctggttttaaccggcaacatccattggaaaggacacaacgccaggcgtctttcaggaggtttgcaatgcgtgttggattgctctctcagaaccgtgtcatacatgtaattgccacatcgctgcacatcagaagaatattagacccc

SEQ ID NO: 58652 - DNA, 366 bp, Glycine max
  unsure (1)..(366): unsure at all n locations
ggcacaagtgagtttgttgatcgagataactagaaacagtgtgatgaaaatgaaggtccttgttttcttcgttgctacaattttggtagcatggcaatgccatgcgtacgatatgttccctctccgaatgaacactggctatggtgcccgtactccggaggtgaaatgcgcaagttggaggcttgctgtggaagcacacaacatctttggctttgagaccattcctgaagagtgcgttgaagcaacaaaggaatacatccatggcgaacaatatagatcagactccaaaacagttaaccaacaagcttacttttatgccagagacctcgaagtcaatcncaaggacacatttgtgttcagtataga

SEQ ID NO: 58653 - DNA, 287 bp, Glycine max
gatggggttttactttccatggcgatggccaatgatggcctatgccttttggtctggaacttagtctgaacaatttcatttggtaactatatacaatgtttttattgctagctgttattggcttgttttcagtttgtggacaagttgcaatagtaatatatattacttgattttaggtttactatttcattgttctttgatcaactttaagttttaaccccttacaggtgtatttattattattattactacttacagtttatgttactgttgatttagtttttgac

SEQ ID NO: 58654 - DNA, 168 bp, Glycine max
ggcacaagtgagtttgttgatcgagataactagaaacagtgtgatgaaaatgaacgtccttgttttcttcgttgctacaattttggtagcatggcaatgccatgcgtacgatatgttccctctccgaatgaacactggctatggtgccggtactccggaggtgaaatg

SEQ ID NO: 58655 - DNA, 293 bp, Glycine max
ggcacaagtttgttgagatagctagaagcaataagatgaaaatgaaagtgcttgttttgtttgttgctacagttttggtagcatatgaatgccatggctcagactaccagaagttccctctccaaatgaaaactgggtttggtgggcaatacagcaatgaggtggcatgtgccagttggaggcttggcgtggaagcaaacaacgtagtcaagtggcaaactgttcctgcagcttgcggagagtacatagctgactacgttctaggagaccaatatagatcagattccaaaaca

SEQ ID NO: 58656 - DNA, 336 bp, Glycine max
  unsure (1)..(336): unsure at all n locations
gatcgaagcanaaaatgaaaacccaaagtgcttctctcctctgtctttttctctctcttgctatccttttggctagtggcactgctgcaagtgcaactccaagaagcgcagtgccaagccaccatgtttcaacattcaacagaagcctttttccttccacttttctctttggaattggttcttctgcttaccaggcagaaggagcagcaagtgtagatgggagaggaccaagcatatgggacacctacactagacagcatactgaaaagatttgggattatagcaccggtgacatgggagctgatttttatcatcgatacaagggtgacataaaaa

SEQ ID NO: 58657 - DNA, 379 bp, Glycine max
gacaagtgagtttgttgatcgagataactagaaacagtgtgatgaaaatgaaggtccttgttttcttcgttgctacaattttggtagcatggcaatgccatgcgtacgatatgttccctctccgaatgaacactggctatggtgcccgtactccggaggtgaaatgcgcaagttggaggcttgctgtggaagcacacaacatctttggctttgagaccattcctgaagagtgcgttgaagcaacaaaggaatacatccatggcgaacaatatagatcagactccaaaacagttaaccaacaagcttacttttatgccagagacctcgaagtccatcccaaggacacattgtgttcagtatagatggcaccgtactctct

SEQ ID NO: 58658 - DNA, 338 bp, Glycine max
gacaagtgagtttgttgatcgagataactagaaacagtgtgatgaaaatgaaggtccttgttttcttcgttgctacaattttggtagcatggcaatgccatgcgtacgatatgttccctctccgaatgaacactggctatggtgcccgtactccggaggtgaaatgcgcaagttggaggcttgctgtggaagcacacaacatctttggctttgagaccattcctgaagagtgcgttgaagcagcaaaggaatacatccatggcgaacaatatagatcagactccaaaacagttaaccaacaagcttacttttatgccagagacctcgaagtccatccc

SEQ ID NO: 58659 - DNA, 350 bp, Glycine max
ggcacaagtgagtttgttgatcgagataactagaaacagtgtgatgaaaatgaaggtccttgttttcttcgttgctacaattttggtagcatggcaatgccatgcgtacgatatgttccctctccgaatgaacactggctatggtgcccgtactccggaggtgaaatgcgcaagttggaggcttgctgtggaagcacacaacatctttggctttgagaccattcctgaagagtgcgttgaagcaacaaaggaatacatccatggcgaacaatatagatcagactccaaaacagttaaccaacaagcttacttttatgccagagacctcgaagtcaatcccaaagacacat

SEQ ID NO: 58660 - DNA, 355 bp, Glycine max
  unsure (1)..(355): unsure at all n locations
ggcacaagtgagtttgttgatcgagataactagaaacagtgtgatgaaaatgaaggtccttgttttcttcgttgctacaattttggtagcatggcaatgccatgcgtacgatatgttccctctccgaatgaacactggctatggtgcccgtactccggaggtgaaatgcgcaagttggaggcttgctgtggaagcacacaacatctttggctttgagaccattcctgaagagtgcgttgaagcaacaaaggaatacatccatggcgaacaatatagatcagactccaaaacagttaaccaacaagcttacttttatgccagagaactcgaagttcatcncaaggacacatttgtg

SEQ ID NO: 58661 - DNA, 313 bp, Glycine max
gcacaagtgagtttgttgatcgagataactagaaacagtgtgatgaaaatgaaggtccttgttttcttcgttgctacaattttggtagcatggcaatgccatgcgtacgatatgttccctctccgaatgaacactggctatggtgcccgtactccggaggtgaaatgcgcaagttggaggcttgctgtggaagcacacaacatctttggctttgagaccattcctgaagagtgcgttgaagcaacaaaggaatacatccatggcgaacaatatagatcagactccaaaacagttaaccaacaagcttactttt

SEQ ID NO: 58662 - DNA, 301 bp, Glycine max
gaggtgcaagagtttgttgtgagctataagctagtttatcgtgaggagaatatgaagttgtttgttttctttgttgctgcagtagttttggtagcatggccatgccatggcgcaggctaccaaaggttccctctccgaatgaaaactggctatggtgagcgttcttcggaagtaaaatgcgcaagttttaggcttgctgtggaagcacacaacatccgagcctttaaaaccattcctgaatagtgcgttgaaccaacaaaggactacattaatggcgaacaatttagatcagactctaaaa

SEQ ID NO: 58663 - DNA, 381 bp, Glycine max
  unsure (1)..(381): unsure at all n locations
ggttcaattgtgtgatggttggttgttgtaactcgttcttcttctttggtggttcggtgttggtgttggttttttctctcacctgaaaatgtcttgctgcggtggtaactgtggttgcggaagctcctgcaagtgcggcaacggctgcggaggctgcaagatgtacccagacttgagctacactgagtcaaccaccaccgagaccttggtcatgggagtggcacctgttaaggctcaatttgagggtgctgaaatgggtgtgcccgctgagaacgatggctgcaaatgtggaccaaactgctcctgcaacccctgcacttgcaagtgaggtgttgggaaggcaagcttcaagcagagatagccctttaatangaataatga

SEQ ID NO: 58664 - DNA, 363 bp, Glycine max
  unsure (1)..(363): unsure at all n locations
ggcacaagtttgttgagatagctagaagcaataagatgaaaatgaaagtgcttgttttgtttgttgctacagttttggtagcatatgaatgccatggctcagactaccagaagttccctctccaaatgaaaactgggtttggtgggcaatacagcaatgaggtggcatgtgccagttggaggcttggcgtggaagcaaacaacgtagtcaagtggcaaactgttcctgcagcttgcggagagtacatagctgactacgttctangagaccaatatagatcagattccaaaacagttaaccaacaagcttatttctatgctaaatcgctcanactcaacaacaaagatgtctttgtcttggacg

SEQ ID NO: 58665 - DNA, 385 bp, Glycine max
  unsure (1)..(385): unsure at all n locations
atcctgtcatcctgtgccaatttttccggcaaatccgcaagaataaattggaacctaaggtaattataacatgaaattacaaaattattaaataaaaggttatcattattaagtataaactactcagtcatctttaacaatctgtactagtaagaagttaaaacagatgaagcaaatatcncatgggtggtgcatacgtctagccttaccacatttatacatatccttatacttggttcaacaaatcaggggaagaaatgcatagtgatgattggatttccttctaaatactcatttgccggtactatttgttgcacattccttttatgcaaagctcaaggggaaacagcataaacaaccattccaaatgatgaaactcattcca

SEQ ID NO: 58666 - DNA, 303 bp, Glycine max
ggcacaagtgagtttgttgatcgagataactagaaacagtgtgatgaaaatgaaggtccttgttttcttcgttgctacaattttggtagcatggcaatgccatgcgtacgatatgttccctctccgaatgaacactggctatggtgcccgtactccggaggtgaaatgcgcaagttggaggcttgctgtggaagcacacaacatctttggctttgagaccattcctgaagagtgcgttgaagcaacaaaggaatacatccatggcgaacaatatagatcagactccaaaacagttaaacaaca

SEQ ID NO: 58667 - DNA, 55 bp, Glycine max
ggcacaagtgagtttgttgatcgagataactagaaacagtgtgatgaaaatgaag

SEQ ID NO: 58668 - DNA, 363 bp, Glycine max
  unsure (1)..(363): unsure at all n locations
gaaggtgcaagagtttgttgtgagctataagctagtttatcgtgaggagaatatgaagttgtttgttttctttgttgctgcagtagttttggtagcatggccatgccatggcgcaggctaccaaaggttccctctccgaatgaaaactggctatggtgagcgttcttcggaggtaaaatgcgcaagttttaggcttgctgtggaagcacacaacatccgagcctttaaaaccattcctgaagagtgcgttgaaccaacaaaggactacattaatggcgaacaatttagatcagactctaaaacagttaaccaacaagctttcttttatgctagtgaacgcgaagtccatcacancgacatatt

SEQ ID NO: 58669 - DNA, 314 bp, Glycine max
ggcacaagtgagtttgttgatcgagataactagagacagtgtgatgaaaatgaaggtccttgttttcttcgttgctacaattttggtagcatggcaatgccatgcgtacgatatgttccctctccgaatgaacactggctatggtgcccgtaatccggaggtgaaatgcgcaagttggaggcctgctgtggaagcacacaacatctttggctttgagaccactcctgaagagtgcgttgaagcaacaaaggaatacatccatggcgaacaatatagatgagactccagaacagttaaccaagaagcttactttt

SEQ ID NO: 58670 - DNA, 158 bp, Glycine max
gacagcgaaacagagagtgatttcagtgagtgatcggtgttcacttgatctcatcataatcgtcagcgtcaattgaagaagatgccgatcagaaacatcgccgtcggaaggcctgaagaggcgactcaccccgacacgttgaaggcggctttggctga

SEQ ID NO: 58671 - DNA, 225 bp, Glycine max
gaggtgcaagagtttgttgtgagctataagctagtttatcgtgaggagaatatgaagttgtttgttttctttgttgctgcagtagttttggtagcatggccatgccatggcgcaggctaccaaaggttccctctccgaatgaaaactggctatggtgagcgttcttcggaggtaaaatgcgcaagttttaggcttgctgtggaagcacacaacatccgagccttt

SEQ ID NO: 58672 - DNA, 302 bp, Glycine max
ggcacaagtgagtttgttgatcgagataactagaaacagtgtgatgaaaatgaatgtccttgttttcttcgttgctacaattttggtagcatggcaatgccatgcgtacgagatgttccctctccgaatgaacactggctatggtgcccgtactccggacgtgaaatgcgcaagttggaggcttgctgtggaagcacacaacatctttggctttgagaccattcctgaagagtgcgttgaagcaacaaaggaatacatccatggcgaacaatataaatcagactccaaaacagttaaccaac

SEQ ID NO: 58673 - DNA, 293 bp, Glycine max
ggaaatcgagaagaagaagaagaagaagatggagaagtatcagatctggagcaggagaatagcgttggcagcgtttgcgtttgctctgctgttccaatcggcctcagcagacgacgtcgttgtgctctctgaagataacttcgagaaggaagttggtcaggacagaggagctctcgttgagttctatgctccttggtgtggacactgcaaaaagcttgctccagaatatgaaaagcttggtagcagcttcaagaaagccaaatctgttttaattggcaaggttgactgtgatg

SEQ ID NO: 58674 - DNA, 325 bp, Glycine max
gaaggtgcaagagtttgttgtgagctataagctagtttatcgtgaggagaatatgaagttgtttgttttctttgttgctgcagtagttttggtagcatggccatgccatggcgcatgctaccaaaggttccctctccgaatgaaaactggctatggtgagcgttcttcggaggtaaaatgcgcaagttttatgcttgctgtggaagcacacaacatccgagcctttaaaaccattcctgaagagtgcgttgaaccaacatacgactacattaatggcgatcaatttagatcagactctaaaacagttatacaacaagctttcttt

SEQ ID NO: 58675 - DNA, 356 bp, Glycine max
  unsure (1)..(356): unsure at all n locations
ggcacaagtgagtttgttgatcgagataactagaaacagtgtgatgaaaatgaaggtccttgttttcttcgttgctacaattttggtagcatggcaatgccatgcgtacgatatgttccctctccgaatgaacactggctatggtgcccgtactccggaggtgaaatgcgcaagttggaggcttgctgtggaagcacacaacatctttggctttgagaccattcctgaagagtgcgttgaagcaacaaaggaatacatccatggcgaacaatatagatcagactccanaacagttaaccaacaagcttacttttatgccagagacctcgaagtcaatccaaggacacatttgtgtt

SEQ ID NO: 58676 - DNA, 311 bp, Glycine max
ggtaccttcaaattcacatttactccttattctggttcgaggcacgagctacggtgtatttatggtctcctttctcactgcaacatcgatcgcgaaatgcaggctatgtcatcgttcacaggccggaacgatttccggctccacttcgcgttcttcgtcggtctacaatccactcttccaagtctcactcgtgacacatttcacgttttcgctctgagacgcgttccacatactgatctcactcatcatcagcacactaccgaggttctcacaatgaatcatctgtctcagaaattcgtcaaggtcctgac

SEQ ID NO: 58677 - DNA, 265 bp, Glycine max
ggagctgacaccgagaagaagaagatggagatgtatcagatctggaacaggagaatagcgttgggagcgttcgcgtttgttctgcttttcctatcggcctcagcagacgacgtcgttgtgctctctgaagataacttcgagaaggaagttggtcaggacagaggagctctcgttgagttctatgctccttggtgtggacactgcaaaaagcttgctccagaatatgaaaagcttggtagcagcttcaagaaagccaaatctgttt

SEQ ID NO: 58678 - DNA, 293 bp, Glycine max
gagtgcacaagtgagtttgttgatcgagataactagaaacagtgtgatgaaaatgaaggtccttgttttcttcgttgctacaattttggtagcatggcaatgccatgcgtacgatatgttccctctccgaatgaacactggctatggtgcccgtactccggaggtgaaatgcgcaagttggaggcttgctgtggaagcacacaacatctttggctttgagaccattcctgaagagtgcgttgaagcaacaaaagaatacatccatggcgaacaatatagattagactccaaaa

SEQ ID NO: 58679 - DNA, 307 bp, Glycine max
ggcacaagtgagtttgttgatcgagataactagaaacagtgtgatgaaaatgaaggtccttgttttcttcgttgctacaattttggtagcatggcaatgccatgcgtacgatatgttccctctccgaatgaacactggctatggtgcccgtactccggaggtgaaatgcgcaagttggaagcttgctgtggaagcacacaacatctttggctttgagaccattcctgaagagtgcgttgaagcaacaaaggaatacatccatggcgaacaatatagattaaactccaaaacagtttatcaacaagct

SEQ ID NO: 58680 - DNA, 330 bp, Glycine max
ggaacctttgcattctattcattcaagattcagcaagtgcgttttggaagcagagaccgaaatacttcgagttttctgaagttgttgttggttgttgattaagatggcccgtacaaagcaaactgctcgtaagtcaactggaggaaaagctcccaggaagcagcttgcaaccaaggctgcacgtaagtctgcaccaacaactggtggtgtgaagaagcctcatcgttatcgccctggaactgttgctcttcgtgagattaggaaataccagaagagcactgagctcctaatcaggaagcttcctttccagaggttggttcgtgaaattgc

SEQ ID NO: 58681 - DNA, 254 bp, Glycine max
cagaaacatcgccgtcggaaggcctgaagaggcgactcaccccgacacgttgaaggcggctttggctgagttcatctcaaccttcatcttcgtgttcgccggctcaggctccggcatcgcctacaacaagctcaccgacaacggcgctgccacccctgccggcctcatctccgcctccatcgcccatgcattcgccctcttcgtcgccgtctccgtcggcgccaacatctccggcggccacgtcaaccccgccg

SEQ ID NO: 58682 - DNA, 325 bp, Glycine max
gaaggtgcaagagtttgttgtgagctataagctagtttatcgtgaggagaatatgaagttgtttgttttctttgttgctgcagtagttttggtagcatggccatgccatggcgcaggctaccaaaggttccctctccgaatgaaaactggctatggtgagcgttcttcggaggtaaaatgcgcaagttttaggcttgctgtggaagcacacaacatccgagcctttaaaaccattcctgaagagtgcgttgaaccaacaaaggactacatttatggggaacaatttaaattagactctaaaacagtttaacaacaagctttcctt

SEQ ID NO: 58683 - DNA, 302 bp, Glycine max
ggcacaagtgagtttgttgatcgagataactagaaacagtgtgatgaaaatgaaagtccttgttttcttcgttgctacaattttggtagcatggcaatgccatgcgtacgatatgttccctctccgaatgaacactggctatggtgcccgtactccggaggtgaaatgcgcaagttggaagcttgctgtggaagcacacaacatctttggctttgagaccattcctgaagagtgcgttgaagcaacataggaatacatccatggcgaacaatatacatcagactccaaaacagttaaccaac

SEQ ID NO: 58684 - DNA, 359 bp, Glycine max
gaaggtgcaagagtttgttgtgagctataagctagtttatcgtgaggagaatatgaagttgtttgttttctttgttgctgcagtagttttggtagcatggccatgccatggcgcaggctaccaaaggttccctctccgaatgaaaactggctatggtgagcgttcttcggaggtaaaatgcgcaagttttaggcttgctgtggaagcacacaacatccgagcctttaaaaccattcctgaagagtgcgttgaaccaacaaaggactacattaatggcgaacaatttagatcagactctaaaacagttaaccaacaagctttcttttatgctagtgaacgccaagttcatcaaaacgaca

SEQ ID NO: 58685 - DNA, 258 bp, Glycine max
ggcacaagtgagtttgttgatcgagataactagaaacagtgtgatgaaaatgaaggtccttgttttcttcgttgctacaattttggtagcatggcaatgccatgcgtacgatatgttccctctccgaatgaacactggctatggtgcccgtactccggaggtgaaatgcgcaagttggaggcttgctgtggaagcacacaacatctttggctttgagaccattcctgaagagtgcgttgaagcaacaaaggaatacat

SEQ ID NO: 58686 - DNA, 335 bp, Glycine max
gaccaatgtcgtatcttgactaccgaggatttgctagttgctaccttgagacgcaagcctctctatggttctctctataaatagtggatctctcttcatccccacattcacttttgatttgattcttttccccactttcagaacagcagcaacaaggtatagagagagagagagagagagagccaaaataaaaacaaactagtactcaacaaaaagagaaagagaaacctcttaaacacgcacccttaattcctacctcaaagaaagtactactcttcaaaaattttctattcactgaagaaggatctttgcacttgcacttgcagccatctatc

SEQ ID NO: 58687 - DNA, 178 bp, Glycine max
ggaaacagatagtgatttcagtgagtgatcggtgttcacttgatctcatcataatcgtcagcgtcaactgaagaagatgccgatcagaaacatcgccgtcggaaggcctgaagaggcgactcaccccgacacgttgaaggcggctttggctgagttcatctcaaccttcatcttcgtg

SEQ ID NO: 58688 - DNA, 394 bp, Glycine max
ggctcacgcgtcaggcaagaagacgacagaaggggaccgcaactgaaattagggttttttgcttccaaccctctgagtctgaactgaaattttttattttttccataatgtttgttctgaattaaaattatagcagaaacgccatagtgcgtgtttgcccatccttttttctcccgaaaaccctttttctctgttgatttggggggacacagtagcgactaaatctcttctgaaaatttgatcttgatttctgggtttgcgttgttatgctgattgatgaaatgggtgtgtgttatgtttaaccgtgatgagccctacagacctgtaatgattttgcggctatgatcgcaatcattaatgaacatctaagggactgagttatgtttgtatttgt

SEQ ID NO: 58689 - DNA, 305 bp, Glycine max
ggcagttcaattccaatatattccattctctctgtgtatttccctacctctcccttcaagatgcagatcttcgtcaagaccctcaccggcaagaccatcacccttgaggtggaaagctctgacaccatcgacaacgtcaaggccaagatccaggacaaggaaggaatccccccggaccagcaacgtctcattttcgccggaaagcaacttgaggacggccgtacccttgctgactacaacattcagaaggagagtactcttcacctcgtccttcgtctccgttgtggcatgcaaattttcgtcaa

SEQ ID NO: 58690 - DNA, 336 bp, Glycine max
acgcatcagtcagctggcagaaaacaaaagacagggggagggctttctaatcactcttactaattcacaactcaactctgtatgctcatcttctctctttcaaggtattatgattctaagatgtgaaacaccttccaatgtaactcagaatggttctacattggaattgatagtgcactctgagtccaaatcacgatcatggtcattgattctcgcgttaaatttcttcaagacaggatcgatgtttgtgacacatctgctactcttagcgtgtctgttatcgtcacacatatgactactaaggttattctcaactctgactgtatcttttctaaa

SEQ ID NO: 58691 - DNA, 352 bp, Glycine max
ggcacaagtgagtttgttgatcgagataactagaaacagtgtgatgaaaatgaaggtccttgttttcttcgttgctacaattttggtagcatggcaatgccatgcgtacgatatgttccctctccgaatgaacactggctatggtgcccgtactccggaggtgaaatgcgcaagttggaggcttgctgtggaagcacacaacatctttggctttgagaccattcctgaagagtgcgttgaagcaacaaaggaatacatccatggcgaacaatatagatcagactccaaaacagttaaccaacaagcttacttttatgccagagacctcgaagtccatcccaaaggacaacat

SEQ ID NO: 58692 - DNA, 382 bp, Glycine max
ggtgcaagagtttgttgtgagctataagctagtttatcgtgaggagaatatgaagttgtttgttttctttgttgctgcagtagttttggtagcatggccatgccatggcgcaggctaccaaaggttccctctccgaatgaaaactggctatggtgagcgttcttcggaggtaaaatgcgcaagttttaggcttgctgtggaagcacacaacatccgagcctttaaaaccattcctgaagagtgcgttgaaccaacaaaggactacattaatggcgaacaatttagatcagactctaaaacagttaaccaacaagctttcttttatgctagtggaacccaaagtcaatcacaacgacgtatttaaattcggcatagataacac

SEQ ID NO: 58693 - DNA, 332 bp, Glycine max
ggcacaagtgagtttgttgatcgagataactagaaacagtgtgatgaaaatgaaggtccttgttttcttcgttgctacaattttggtagcatggcaatgccatgcgtacgatatgttccctctccgaatgaacactggctatggtgcccgtactccggaggtgaaatgcgcaagttggaggcttgctgtggaagcacacaacatctttggctttgagaccattcctgaagagtgcgttgaagcaacaaaggaatacatccatggcgaacaatatagatcagactccaaaacagttaaccaacaagcttacttttatgccagagacctcgaag

SEQ ID NO: 58694 - DNA, 332 bp, Glycine max
ggcacaagtgactttgttgatcgagatacctagaaacagtgtgatgaacattaacgtccttgatttcctcgttgctacaattttggtagcatggcaatgccatgcgtacgatatgttcgctctccgaatgaacactggctatggtgcccgtactccggatgtgaaatgcgcaagttggaagcttgctgtggaagcacacaacatctttggctttgagaccattcctgaagagtgcgttgaagcaacaaaggaatacatccatggcgaacaatatagatcagactccaaaacagttaaccaacaagcttacttttatgccagagacctcgaag

SEQ ID NO: 58695 - DNA, 285 bp, Glycine max
gaggtgcaagagtttgttgtgagctataagctagtttatcgtgaggagaatatgaagttgtttgttttctttgttgctgcagtagttttggtagcatggccatgccatggcgcaggctaccaaaggttccctctccgaatgaaaactggctatggtgagcgttcttcggaggtaaaatgcgcaagttttaggcttgctgtggaagcacacaacatccgagcctttaaaaccattcctgaagagtgcgttgaaccaacaaaggactacattaatggcgaacaattt

SEQ ID NO: 58696 - DNA, 312 bp, Glycine max
ggcacaagtttgttgagatagctagaagcaataagatgaaaatgaaagtgcttgttttgtttgttgctacagttttggtagcatatgaatgccatggctcagactaccagaagttccctctccagatgaaaactgggtttggtgggcaatacagcaatgaggtggcatgtgccagttggaggcttggcgtggaagcaaacaacgtagtcaagtggcaaactgttcctgcagcttgcggagaatacatagctgactacgttctacgagaccaatatagattaaattccaaaacagtttaacaaaaagcctaat

SEQ ID NO: 58697 - DNA, 326 bp, Glycine max
aggggcaaaagttaatttgttgattgaaataactaaaaacaatgttatgaaaattaaaggccttggtttcctccgtgccaaaattttggtagcatggcaatgccatgcgtacgatatgttccctctccgaatgaacactggctatggtgcccgtactccggaggtgaaatgcgcaagttggaggcttgctgtggaagcacacaacatctttggctttgagaccattcctgaagagtgcgttgaagcaacaaaggaatacatccatggcgaacaatatagatcagactccaaaacagttaaccaacaagcttacttttatgccagag

SEQ ID NO: 58698 - DNA, 392 bp, Glycine max
ggcacaagtgagtttgttgatcgagataactagaaacagtgtgatgaaaatgaacgtccttgttttcttcgttgctacaattttggtagcatggcaatgccatgcgtacgatatgttccctctccgaatgaacactggctatggtgcccgtactccggaggtgaaatgcgcaagttggaggcttgctgtggaagcacacatcatctttggctttgagaccattcctgaagagtgcgttgaagcaccacaggaatatatccatggcgaataatatagatcagactccaaaacagttaaccaccaagcttacttttatgccagagaactcgaagttcatcgcaaagacacatttgtgttcactatagatggcaccgtactctctaatattccat

SEQ ID NO: 58699 - DNA, 308 bp, Glycine max
gattgtagaactgaacaagggtttctctttctctttctctgtctgcttcttcactttctctcgtttcaatcgaaaaaaatcatgggcagaaaattcttcgtcggtggcaactggaaatgcaatgggaccactgaggaggtgaagaagattgttactactttaaatgaagctaaagtccctggagaagatgttgtagaagttgttgtgagccctccttttgtgttccttccttttgtaaaaagtttgctgcgccctgatttccatgtctcggcccaaaattgttgggttcgcaaaggtggtgcttatac

SEQ ID NO: 58700 - DNA, 383 bp, Glycine max
ggcacaagtgagtttgttgatcgagataactagaaacagtgtgatgaaaatgaaggtccttgttttcttcgttgctacaattttggtagcatggcaatgccatgcgtacgatatgttccctctccgaatgaacactggctatggtgcccgtactccggaggtgaaatgcgcaagttggaggcttgctgtggaagcacacaacatctttggctttgagaccattcctgaagagtgcgttgaagcaacaaaggaatacatccatggcgaacaatatagatcagactccaaaacagttaaccaacaagcttacttttatgccagagaactcgaggttcatcccaaggacacatttgtgttcagtatagatggcaccgtactctcta

SEQ ID NO: 58701 - DNA, 307 bp, Glycine max
ggcacaagtgagtttgttgatcgagataactagaaacagtgcgatgaaaatgaaggtccttgttttcttcgatgctacaattttggtagcatggcaatgccatgcgtacgatatgttccctctccgaatgaacactggctatggtgcccgtactccggaggtgaaatgcgcaagttggaggcttgctgtggaagcacacaacatctttggctttgagaccattcctgaagagtgcgttgaagcaacaaaggaatacatccatggcgaacaatatagattaaactccaaaacagttaaccaacaagct

SEQ ID NO: 58702 - DNA, 390 bp, Glycine max
ttcattcaaacacatactcaaagttacttcaactcaaaattatttttgaatctataatcaattctaaatttttctctaacataaaaccaaacatatattaattgtgaattcagaatcaatttttcaacggaaaaccaaatacgaacttaagatcttcaactctgtactaatttgaggaatcccataacttacccaatttttttatttacaaaaaagatgataaaatatggtccatcacatattgagctcttggaaagtattctcagaagtcttgatgggccatatttgggccaagcccatgcaataatgcccaaagccagaacccagaatcatacgtccaaacatgtctggacaactttaaagagattaatggtcctccctttccttttt

SEQ ID NO: 58703 - DNA, 266 bp, Glycine max
ggcaagagtttgttgtgagctataagctagtttatcgtgaggagaatatgaagttgtttgttttctttgctgctgcagtagttttggtagcatggccatgccatggcgcaggctaccaaaggttccctctccgaatgaaaactggctatggtgagcgttcttcggaggtaaaatgcgcaagttttaggcttgctgtggaagcacacaacatccgagcctttaaaaccattcctgaagagtgcgttgaaccaacaaaggactacatt

SEQ ID NO: 58704 - DNA, 381 bp, Glycine max
ggcacaagtttgttgagatagctagaagcaataagatgaaaatgaaagtgcttgttttgtttgttgctacagttttggtagcatatgaatgccatggctcagactaccagaagttccctctccaaatgaaaactgggtttggtgggcaatacagcaatgaggtggcatgtgccagttggaggcttggcgtggaagcaaacaacgtagtcaagtggcaaactgttcctgcagcttgcggagagtacatagctgactacgttctaggagaccaatatacgtcagattccaaaacagttaaccaacaagcttaattctatgctaaatccctcaaactcaccaacaaagatgtctttgtcttggacgttgacgacactactctct

SEQ ID NO: 58705 - DNA, 289 bp, Glycine max
ggcacaagtgagtttgttgatcgagataactagaaacagtgtgatgaatatgaaggtccttggtttcttcgttgctagaattttggtagcatggcaatgccatgcgtacgatatgttccctctccgaatgaacactggctatggtgcccgtaatccggaggttaaatgctcaagtttgaggcttgctgtggaagcacacaacagctttggctttgagaccagtcctgaagagtgcgttgaagcaacaaacgaatacatttatagcgaacaatatagatcagacttcaaa

SEQ ID NO: 58706 - DNA, 384 bp, Glycine max
gatgcacaagtttgttgagatagctagaagcaataagatgaaaatgaaagtgcttgttttgtttgttgctacagttttggtagcatatgaatgccatggctcagactaccagaagttccctctccaaatgaaaactgggtttggtgggcaatacagcaatgaggtggcatgtgccagttggaggcttggcgtggaagcaaacaacgtagtcaagtggcaaactgttcctgcagcttgcggagagtacatagctgactacgttctaggagaccaatatagatcagattccaaaacagttaaccaacaagcttaattccatggctaaaatccctcaaactcaccaacaaagatgtctttgtcttggacgttgacgacactactctc

SEQ ID NO: 58707 - DNA, 317 bp, Glycine max
ggcacaagtgagtttgttgatcgagataactagaaacagtgtgatgaaaatgaaggtccttgttttcttcgttgctacaattttggtagcatggcaatgccatgcgtacgatatgttccctctccgaatgaacactggctatggtgcccgtactccggaggtgaaatgcgcaagttggaggcttgctgtggaagcacacaacatctttggctttgagaccattcctgaagagtgcgttgaagcaacaaaggaatacatccatggcgaacaatatagatcagactccaaaacagttaaccaacaagcttacttttatg

SEQ ID NO: 58708 - DNA, 294 bp, Glycine max
ggcacaagtgagtttgttgatcgagataactagaaacagtgtgatgaaaatgaaggtccttgttttcttcgttgctacaattttggtagcatggcaatgccatgcgtacgatatgttccctctccgaatgaacactggctatggtgcccgtactccggaggtgaaatgcgcaagttggaggcttgctgtggaagcacacaacatctttggctttgagaccattcctgaagagtgcgttgaagcaacaaaggaatacatccatggcgaacaatatagattaaactccaaaacaat

SEQ ID NO: 58709 - DNA, 349 bp, Glycine max
ggcacaagtgagtttgttgatcgagataactagaaacagtgtgatgaaaatgaacgtccttgttttcttcgttgctacaattttggtagcatggcaatgccatgcgtacgatatgttccctctccgaatgaacactggctatggtgcccgtactccggaggtgaaatgcgcaagttggaggcttgctgtggaagcacacaacatctttggctttgagaccattcctgaagagtgcgttgaagcaacaaaggaatacatccatggcgaacaatatagatcagactccaaaacagttaaccaacaagcttacttttatgccagagacctcgaagttcatcccaaggacaca

SEQ ID NO: 58710 - DNA, 351 bp, Glycine max
ggcacaagtgagtttgttgatccaaataactagaaacaatgtgatgaaaatgaagggccttggtttcctcgttgccaaaattttggtagcatggcaatgccatgcgtacgaaatgttccctccccgaatgaacactggctatggtgcccgtactccggaggtgaaatgcccaagttggaggcttgctgtggaagcacacaacatctttggctttgagaccattcctgaagagtgcgttgaagcaacaaaggaatacatccatggcgaacaatatagatcagactccaaaacagttaaccaacaagcttacttttatgccaaagacctccaagttccacccaagggacacat

SEQ ID NO: 58711 - DNA, 378 bp, Glycine max
ggtgcaagagtttgttgtgagctataagctagtttatcgtgaggagaatatgaagttgtttgttttctttgttgctgcagtagttttggtagcatggccatgccatggcgcaggctaccaaaggttccctctccgaatgaaaactggctatggtgagcgttcttcggaggtaaaatgcgcaagttttaggcttgctgtggaagcacacaacatccgagcctttaaaaccattcctgaagagtgcgttgaaccaacaaaggactacattaatggcgaacaatttagatcagactctaaaacagttaaccaacaagctttcttttatgctagtgaacgcgaagtccatcacaacgacatatttatattcggcatagataa

SEQ ID NO: 58712 - DNA, 318 bp, Glycine max
ggcacaagtgagtttgttgatcgagataactagaaacagtgtgatgaaaatgaaggtccttgttttcttcgttgctacaattttggtagcatggcaatgccatgcgtacgatatgttccctctccgaatgaacactggctatggtgcccgtactccggaggtgaaatgcgcaagttggaggcttgctgtggaagcacacaacatctttggctttgagaccattcctgaagagtgcgttgaagcaacaaaggaatacatccatggcgaacaatatagattagactccaaaacagttaaccaacaagcttacttttaagc

SEQ ID NO: 58713 - DNA, 334 bp, Glycine max
gaagagtttgttgtgagctataagctagtttatcgtgaggagaatatgaagttgtttgttttctttgttgctgcagtagttttggtagcatggccatgccatggcgcaggctaccaaaggttccctctccgaatgaaaactggctatggtgagcgttcttcggaggtaaaatgcgcaagttttaggcttgctgtggaagcacacaacatccgagcctttaaaaccattcctgaagagtgcgttgaaccaacaaaggactacattaatggcgaacaatttacatcagactctaaaacagttaaccaacaagctttcttttatgctagtgaacgcg

SEQ ID NO: 58714 - DNA, 294 bp, Glycine max
accaacaaaggactacattaatggcgaacaatttagatcagactctaaaacagttaaccaacaagctttcttttatgctagtgaacgcgaagcccatcacaacgacatatttatattcggcatagataacaccgtactctctaatatcccatactatgaaaaacatggatatggggtggaggaatttaatgaaaccttatatgatgaatgggttaacaagggcgacgcaccggcattgccagagactcttaaaaattacaacaagctgttgtctcttggcttcaagattgtaat

SEQ ID NO: 58715 - DNA, 357 bp, Glycine max
ggcacaagtttgttgagatagctagaagcaataagatgaaaatgaaagtgcttgttttgtttgttgctacagttttggtagcatatgaatgccatggctcagactaccagaagttccctctccaaatgaaaactgggtttggtgggcaatacagcaatgaggtggcatgtgccagttggaggcttggcgtggaagcaaacaacgtagtcaagtggcaaactgttcctgcagcttgcggagagtacatagctgactacgttctaggagaccaatatagatcagattccaaaacagttaaccaacaagcttaattctatgctaaatccctcaaactcaccaacaaagatgtccttggcc

SEQ ID NO: 58716 - DNA, 363 bp, Glycine max
gaaggtgcaagagtttgttgtgagctataagctagtttatcgtgaggagaatatgaagttgtttgttttctttgttgctgcagtagttttggtagcatggccatgccatggcgcaggctaccaaaggttccctctccgaatgaaaactggctatggtgagcgttcttcggaggtaaaatgcgcaagttttaggcttgctgtggaagcacacaacatccgagcctttaaaaccattcctgaagagtgcgttgaaccaacaaaggactacattaatggcgaacaatttagatcagactctaaaacagttaaccaacaagctttcttttatgctagtgaacgcgaagtccatcacaacgacatatt

SEQ ID NO: 58717 - DNA, 356 bp, Glycine max
ggcacaagtgagtttgttgatcgagataactagaaacagtgtgatgaaaatgaaggtccttgttttcttcgttgctacaattttggtagcatggcaatgccatgcgtacgatatgttccctctccgaatgaacactggctatggtgcccgtactccggaggtgaaatgcgcaagttggaggcttgctgtggaagcacacaacatctttggctttgagaccattcctgaagagtgcgttgaagcaacaaaggaatacatccatggcgaacaatatagatcagactccaaaacagttaaccaacaagcttacttttatgccagagacctcgaagtccatcccaaggacacatttgtgt

SEQ ID NO: 58718 - DNA, 389 bp, Glycine max
ggcacaagtgagtttgttgatcgagataactagaaacagtgtgatgaaaatgaaggtccttgttttcttcgttgctacaattttggtagcatggcaatgccatgcgtacgatatgttccctctccgaatgaacactggctatggtgcccgtactccggaggtgaaatgcgcaagttggaggcttgctgtggaagcacacaacatctttggctttgagaccattcctgaagagtgcgttgaagcaacaaaggaatacatccatggcgaacaatatagatcagactccaaaacagttaaccaacaagcttacttttatgccagaaacctcaaagtccaccccaaggacacatttgtgttcagtatagatggcaccgtactctctaatattc

SEQ ID NO: 58719 - DNA, 358 bp, Glycine max
ggcacaagtgagtttgttgatcgagataactagaaacagtgtgatgaaaatgaaggtccttgttttcttcgttgctacaattttggtagcatggcaatgccatgcgtacgatatgttccctctccgaatgaacactggctatggtgcccgtactccggaggtgaaatgcgcaagttggaggcttgctgtggaagcacacaacatctttggctttgagaccattcctgaagagtgcgttgaagcaacaaaggaatacatccatggcgaacaatatagatcagactccaaaacagttaaccaacaagcttacttttatgccagagacctcgaagtccatcccaaggacacatttgtgttc

SEQ ID NO: 58720 - DNA, 406 bp, Glycine max
ggttaccaaaactttaattaactggttgtgagtcttgtcttgtgactgactgctatatcttggcccaactcaattccaccaaatctccagctctcaacttcattttcatataatatttattagaatgaaatcatctaacaaatttttatctttgttatgcttaggtccacccttatgttgcaacagggaataagaactccaaaatttggcataagaaatgagaagctgcaatggtttctagatgctgtgaaggagcatcctaatgagttaaagcttgtaggggcccactgccatcttgggtcaacaattaccaaggttgacatttttaagggaatccgccaattattatggtcaactacatcgaccaaatccaagctcagggttttcaagttgattgcttaaatat

SEQ ID NO: 58721 - DNA, 306 bp, Glycine max
ggcacaagtgagtttggtgatcgagataactagaaacagtgtgatgaaaatgaaggtccttggtttcctcgttgctacaattttggtagcatggcaatgccatgcgtacgatatgttccctctccgaatgaacactggctatggtgcccgtactccggaggtgaaatgcgcaagttggaagcttgctgtggaagcacacaacatccttggctttgagaccaatcctgaagaatgcgttgaagcaacaaagggatacatccatggcgaacaatatagattagactccaaaacagttaaccaacaagc

SEQ ID NO: 58722 - DNA, 316 bp, Glycine max
gaaggtgcaagagtttgttgtgagctataagctagtttatcgtgaggagaatatgaagttgtttgttttctttgttgctgcagtagttttggtagcatggccatgccatggcgcaggctaccaaaggttccctctccgaatgaaaactggctatggtgagcgttcttcggaggtaaaatgcgcaagttttaggcttgctgtggaagcacacaacatccgagcctttaaaaccattcctgaagagtgcgttgaaccaacaaaggactacattaatggcgaacaatttagatcagactctaaaacagttaaccaacaa

SEQ ID NO: 58723 - DNA, 398 bp, Glycine max
  unsure (1)..(398): unsure at all n locations
ggcacaagtgagtttgttgatcgagataactagaaacagcgtgatgaaaatgaaggtccttgttttcttcgttgctacaattttggtagcatggcaatgccatgcgtacgatatgttccctctccgaatgaacactggctatggtgcccgtactccggaggtgaaatgcgcaagttggaggcttgctgtggaagcacacaacatctttggctttgagaccattcctgaagagtgcgttgaagcaacaaaggaatacatccatggcgaacaatatagatcagactccaaaacagttaaccaacaagcttacctttaatccaangaaacttcgaattcaatcccaaggacacatttgtgctcagtatagatggcaccgtactctctaatattccatacta

SEQ ID NO: 58724 - DNA, 405 bp, Glycine max
gaaggtgcaagagtttgttgtgagctataagctagtttatcgtgaggagaatatgaagttgtttgttttctttgttgctgcagtagttttggtagcatggccatgccatggcgcaggctaccaaaggttccctctccgaatgaaaactggctatggtgagcgttcttcggaggtaaaatgcgcaagttttaggcttgctgtggaagcacacaacatccgagcctttaaaaccattcctgaagagtgcgttgaaccaacaaaggactacattaatggcgaacaatttagatcagactctaaaacagttaaccaacaagctttcctttaagccaattgaacgcaaattccatcacaacgacatatttatattcggcatagataacaccgtactctctaatatcccaa

SEQ ID NO: 58725 - DNA, 379 bp, Glycine max
ggcacaagtgagtttgttgatcgagataactagaaacagtgtgatgaaaatgaaggtccttgttttcttcgttgctacaattttggtagcatggcaatgccatgcgtacgacatgttccctctccgaatgaacactggctatggtgcccgtactccggaggtgaaatgcgcaagttggaggcttgctgtggaagcacacaacatctttggctttgagaccattcctgaagagtgcgttgaagcaacaaaggaatacatccatggcgaacaatatagatcagactccaaaacagttaaccaacaagcttacttttatgccagagacctcgaagtctatcccaaggacacatttgtgttcagtatagatggcaccgtactc

SEQ ID NO: 58726 - DNA, 190 bp, Glycine max
ggcatcaattcaaaatatatcatcaattataagcatgggtttgtggaacacgatgaatgcagtgtcctgccgctttcacaagcttggtgattaacagaagtatctggccttccagtgtgattgcacgtcatcgtccatgggcactgagctcacaaagttagacggtggtggaaaaccagtgggtggcact

SEQ ID NO: 58727 - DNA, 384 bp, Glycine max
ggcacaagtgagtttgttgatcgagataactagaaacagtgtgatgaaaatgaaggtccttgttttcttcgttgctacaattttggtagcatggcaatgccatgcgtacgatatgttccctctccgaatgaacactggctatggtgcccgtactccggaggtgaaatgcgcaagttggaggcttgctgtggaagcacacaacatctttggctttgagaccattcctgaagagtgcgttgaagcaacaaaggaatacatccatggcgaacaatatagatcagactccaaaacagttaaccaacaagcttacttttatgccagagacctcgaaatccatcccaaggacacatttgtgttcagtatagatggcaccgtactctctaa

SEQ ID NO: 58728 - DNA, 330 bp, Glycine max
caaaaagacaacagaaggggacaattgattttgttgttcaaaataactagaaccattgtgatgaaaatgaaggtccttgttttcttcgttgctacaattttggtaccatggaaatgcaatgcttacaatatgttccctctccgaatgaaaactggctatggtgcccgtactccggaggtgaaatgcgcaagttggaggcttgctgtggaagcacacaacatctttggctttgagaccattcctgaagagtgcgttgaagcaacaaaggaatacatccatggcgaacaatatagatcagactccaaaacagtttaacaacaggcttacttt

SEQ ID NO: 58729 - DNA, 401 bp, Glycine max
ggcacaagtgagtttgttgatcgagataactagaaacagtgtgatgaaaatgaaggtccttgttttcttcgttgctacaattttggtagcatggcaatgccatgcgtacgatatgttccctctccgaatgaacactggctatggtgcccgtactccggaggtgaaatgcgcaagttggaggcttgctgtggaagcacacaacatctttggctttgagaccattcctgaagagtgcgttgaagcaacaaaggaatacatccatggcgaacaatatagatcagactccaaaacagttaaccaacaagcttacttttaggccaaaggaccccgaattccatcccaaggacacatttgtgttcagtatagatggcaccgtactctctaatattccatactacaaa

SEQ ID NO: 58730 - DNA, 317 bp, Glycine max
ggcacaagtgagtttgttgatcgagataactagaaacagtgtgatgaaaatgaaggtccttgttttcttcgttgctacaattttggtagcatggcaatgccatgcgtacgatatgttccctctccgaatgaacactggctatggtgcccgtaccccggaggtgaaatgcacaagttggacgcttgctgtggaagcacacaacatctttggctttgagaccattcctgaagagtgcgttgaagcaacaaaggaatacatccatggcgaacaatatagatcagactccaaaacagttaaccaacaagcttacttttatg

SEQ ID NO: 58731 - DNA, 380 bp, Glycine max
tggggcacaagtgagtttgttgatcgagataactagaaacagtgtgatgaaaatgaaggtccttgttttcttcgttgctacaattttggtagcatggcaatgccatgcgtacgatatgttccctctccgaatgaacactggctatggtgcccgtactccggaggtgaaatgcgcaagttggaggcttgctgtggaagcacacaacatctttggctttgagaccattcctgaagagtgcgttgaagcaacaaaagaatacatccatggcgaacaatatagatcagactccaaaacagttaaccaacaagcttacctttaagccaaaaaacctccaggtccatcccagggacacatttgtgttcagtacagatggcaccgta

SEQ ID NO: 58732 - DNA, 183 bp, Glycine max
ggcacaagtgtgtctatagatctatagtccctcagattatcttgacattgcctgtttcgtttgttgctacacttctgctatcttgatactgctattgctcaaagtcaccgaacttccctctctcactgagtccagcgtgtcgtgagccatctcgtccttagggcacaggtcttattgggaggc

SEQ ID NO: 58733 - DNA, 322 bp, Glycine max
ggcacaagtgagtttgttgatcgagataactagaaacagtgtgatgaaaatgaaggtccttgttttcttcgttgctacaattttggtagcatggcaatgccatgcgtacgatatgttctctctccgaatgaacactggctatggtgcccgtactccggaggtgaaatgcgcaagttggaggcttgctgtggaagcacacaacatctttggctttgagaccattcctgaagagtgcgttgaagcaacaaaggaatacatccatggcgaacaatatagatcagactccaaaacagttaaccaacaagcttacttttatgccaga

SEQ ID NO: 58734 - DNA, 399 bp, Glycine max
ggcacaagtgagtttgttgatcgagataactagaaacagtgtgatgaaaatgaaggtccttgttttcttcgttgctacaattttggtagcatggcaatgccatgcgtacgatatgttccctctccgaatgaacactggctatggtgcccgtactccggaggtgaaatgcgcaagttggaggcttgctgtggaagcacacaacatctttggctttgagaccattcctgaagagtgcgttgaagcaacaaaggaatacatccatggcgaacaatatagatcagactccaaaacagttaaccaacaagcttacctttaagccaaagaacctccaattccatcccaaggacacatttgtgttcagtatagatggcaccgtactctctaatattccatactaca

SEQ ID NO: 58735 - DNA, 381 bp, Glycine max
ggcacaagtttgttgagatagctagaagcaataagatgaaaatgaaagtgcttgttttgtttgttgctacagttttggtagcatatgaatgccatggctcagactaccagaagttccctctccaaatgaaaactgggtttggtgggcaatacagcaatgaggtggcatgtgccagttggaggcttggcgtggaagcaaacaacgtagtcaagtggcaaactgttcctgcagcttgcggagagtacatagctgactacgttctaggagaccaatatagatcagattccaaaacagttaaccaacaagcttatttctatgctaaatccctcagactcaccaacaaagatgtctttgtcttggacgttgacgacactactctct

SEQ ID NO: 58736 - DNA, 353 bp, Glycine max
gcacgcgtcagtacgatggcaaaaaaacgacaaaagggggcacaattaattttgttgttcaagataactaaaaacattgtgatgaaattgaaggtccttgttttctccgttgctacaattttggtagcatggaaatgcaatgcgtacgatatgttctctctccgaatgaacactggctatggtgcccgtactccggacgtgaaatgcgcaagttggatgcttgctgtggaagcacacaacatctttggctttgagaccattcctgaagagtgcgttgaagcaacaaaggaatacatccatggcgaacaatatagatcagactccaaaacagttaaccaacaagcttactttta

SEQ ID NO: 58737 - DNA, 308 bp, Glycine max
  unsure (1)..(308): unsure at all n locations
gcaaaattaatttggttgttcaaaattacaaaaaacattttaataaaattaaaggcccttgtttcctccgttcaaaaattttggaacaatggaaatgcaaggccttcgataggttccccccccaaatgaacactggctatggtgcccgtactccggaggtgaaatgcgcaagttggaggcttgctgtggaagcacacaacatctttggctttgagaacattcctgaagagtgcgttgaagcaacaaaggaatacatccatggcgaacaatatagatcagactccanaacagttaaccaacaagcttac

SEQ ID NO: 58738 - DNA, 321 bp, Glycine max
gaaggtgcaagagtttgttgtgagctataagctagtttatcgtgaggagaatatgaagttgtttgttttctttgttgctgcagtacttctggtaccatggccatgccatggcgcacgctaccaaaggttccctctccgaatgaaaactggctatggtgagcgttcttcggaggtaaaatgcgcaagttttaagcttgctgtggaagcacacaacatccgagcctttaaaaccattcctgaagagtgcgttgaaccaacaaaggactacattaatggcgaccaatttagatcagactctgaaacagttaaccaacaagcttt

SEQ ID NO: 58739 - DNA, 378 bp, Glycine max
gcacaagtgagtttgttgatcgagataactagaaacagtgtgatgaaaatgaaggtccttgttttcttcgttgctacaattttggtagcatggcaatgccatgcgtacgatatgttccctctccgaatgaacactggctatggtgcccgtactccggaggtgaaatgcgcaagttggaggcttgctgtggaagcacacaacatctttggctttgagaccattcctgaagagtgcgttgaagcaacaaaggaatacatccatggcgaacaatatagatcagactccaaaacagttaaccaacaagcttacttttatgccagagacctcgaattccatcccaaggacacatttgtgttcagtatagatggcaccgtactc

SEQ ID NO: 58740 - DNA, 383 bp, Glycine max
gagtgcacaagtgagtttgttgatcgagataactagaaacagtgtgatgaaaatgaaggtccttgttttcttcgttgctacaattttggtagcatggcaatgccatgcgtacgatatgttccctctccgaatgaacactggctatggtgcccgtactccggaggtgaaatgcgcaagttggaggcttgctgtggaagcacacaacatctttggctttgagaccattcctgaagagtgcattgaagcaacaaaggaatacatccatggcgaacaatatagatcagactccaaaacagttaaccaacaagcttacttttaagccagagacctccaaatttcaatcccagggacacatttgggttcagtatatatggcaccgtact

SEQ ID NO: 58741 - DNA, 375 bp, Glycine max
ggcacaagtgagtttgttgatcgagataactagaaacagtgtgatgaaaatgaaggtccttgttttcttcgttgctacaattttggtagcatggcaatgccatgcgtacgatatgttccctctccgaatgaacactggctatggtgcccgtactccggaggtgaaatgcgcaagttggaggcttgctgtggaagcacacaacatctttggctttgagaccattcctgaagagtgcgttgaagcaacaaaggaatacatccatggcgaacaatatagatcagactccaaaacagttaaccaacaagcttacttttatgccagagacctcgaagtcaattccaagacacatttgtgttcagtatagatggcaccgta

SEQ ID NO: 58742 - DNA, 401 bp, Glycine max
  unsure (1)..(401): unsure at all n locations
ggcacaagtgagtttgttgatcgagataactagaaacagtgtgatgaaaatgaaggtccttgttttcttcgttgctacaattttggtagcatggcaatgccatgcgtacgatatgttccctctccgaatgaacactggctatggtgcccgtactccggaggtgaaatgcgcaagttggaggcttgctgtggaagcacacaacatctttggctttgagaccattcctgaagagtgcgttgaagcaacaaaggaatacatccatggcgaacaatatagatcagactccaaaacagttaaccaacaagcttacttttatgccagagaccttcaagtccaatcccagggacaaatttgtgttcagtatanatggcaccgtactctctaatattccatactacaaa

SEQ ID NO: 58743 - DNA, 402 bp, Glycine max
ggcacaagtgagtttgttgatcgagataactagaaacagtgtgatgaaaatgaaggtccttgttttcttcgttgctacaattttggtagcatggcaatgccatgcgtacgatatgttccctctccgaatgaacactggctatggtgcccgtactccggaggtgaaatgcgcaagttggaggcttgctgtggaagcacacaacatctttggctttgagaccattcctgaagagtgcgttgaagcaacaaaggaatacatccatggcgaacaatatagatcagactccaaaacagttaaccaacaagcttacttttatgccaaaaacctccaaattcaatcccagggacacatttgtgttcagtatagatggcaccgtactctctaatattccatactacaaaa

SEQ ID NO: 58744 - DNA, 436 bp, Glycine max
cgcgtcaatacaactgcgagaaagacaaaaaaagggggcacaattaattttgttgttcacaataacaagaaacagtgtgatgaaaatgaacgtccttgttttcttcgttgctacaattttggtagcatggcaatgccatgcgtacgatatgttccctctccgaatgaacactggctatggtgcccgtactccggaggtgaaatgcgcaagttggaagcttgctgtggaagcacacaacatctttggctttgagaccattcctgaagagtgcgttgaagcaacaaaggaatacatccatggcgaacaatatagatcagactccaaaacagttaaccaacaagcttacttttatgccagagacctcgaaattcaatcacagggacaaatttgtgttcagtatagatggcaccgtactctctaatattccatactacaa

SEQ ID NO: 58745 - DNA, 222 bp, Glycine max
ggaactagtgagatttcagctcattcttccttgtaacagtgtacttaatatgatcgtccttgatttcttcgatgctattcttcaggtagcatagcatttaccatgcgtagtatatgtgctcccaccaaatgtggagtggttatggtacccgaccgccgaccgcgatacacgcaaataggtcgcctgctgtctttaccaacatcatcttttgcaatgccacca

SEQ ID NO: 58746 - DNA, 396 bp, Glycine max
ggcacaagtgactttgttgatcgagataactacaaacagtgtgatgaaaatgaaggtccttgttttcttcgctgcaacaagtttggtagcatggcaatgccatgcgtacgatatgttccctctccgaatgaacactggctatggtgcccgtactccggaggtgaaatgcgcaagttggaggcttgctgtggaagcacacaacatctttggctttgagaccattcctgaagagtgcgttgaagcaacaaaggaatacatccatggcgaacaatatagatcagactccaaaacagttaaccaacaagcttacttttatgccaaagacctcgaagtccaacccaatggaccaatttgtgtccagtatacatggcaccgtactctctaatattccatact

SEQ ID NO: 58747 - DNA, 353 bp, Glycine max
gaaggtgcaagagtttgttgtgagctataagctagtttatcgtgaggagaatatgaagttgtttgttttctttgttgctgcagtagttttggtagcatggccatgccatggcgcaggctaccaaaggttccctctccgaatgaaaactggctatggtgagcgttcttcggaggtaaaatgcgcaagttttaggcttgctgtggaagcacacaacatccgagcctttaaaaccattcctgaagagtgcgttgaaccaacaaaggactacattaatggcgaacaatttagatcagactctaaaaaagttaaacaacaagctttcttttatgctactgaacgcgaagtccatcaca

SEQ ID NO: 58748 - DNA, 401 bp, Glycine max
ggcacaagtgagtttgttgatcgagataactagaaacagtgtgatgaaaatgaaggtccttgttttcttcgttgctacaattttggtagcatggcaatgccatgcgtacgatatgttccctctccgaatgaacactggctatggtgcccgtactccggaggtgaaatgcgcaagttggaggcttgctgtggaagcacacaacatctttggctttgagaccattcctgaagagtgcgttgaagcaacaaaggaatacatccatggcgaacaatatagatcagactccaaaacagttaaccaacaagcttacttttatgccagagaactccaaattccatcccagggacacatttgtgttcagtatagatggcaccgtactctctaatattccatactacaaa

SEQ ID NO: 58749 - DNA, 421 bp, Glycine max
cgacacacgcgtcagaaaaataagacagaaaggggcacaagtgagtttgttgatcgagataactagaaacagtgtgatgaaaatgaaggtccttgttttcttcgttgctacaattttggtagcatggcaatgccatgcgtacgatatgttccctctccgaatgaacactggctatggtgcccgtactccggaggtgaaatgcgcaagttggaggcttgctgtggaagcacacaacatctttggctttgagaccattcctgaagagtgcgttgaagcaacaaaggaatacatccatggcgaacaatatagatcagactccaaaacagttaaccaacaagcttacttttatgccagagacctccaaggtccatcccaaggacacatttgtgttcagtatagatggcaccgtactctctaatat

SEQ ID NO: 58750 - DNA, 402 bp, Glycine max
ggcacaagtgagtttgttgatcgagataactagaaacagtgtgatgaaaatgaaggtccttgttttcttcgttgctacaattttggtagcatggcaatgccatgcgtacgatatgttccctctccgaatgaacactggctatggtgcccgtactccggaggtgaaatgcgcaagttggaggcttgctgtggaagcacacaacatctttggctttgagaccattcctgaagagtgcgttgaagcaacaaaggaatacatccatggcgaacaatatagatcagactccaaaacagttaaccaacaagcttacttttatgccagagacctcgaaatccatcccaaagacacatttgtgttcagtatagatggcaccgtactctctaatattccatactacaaaaa

SEQ ID NO: 58751 - DNA, 422 bp, Glycine max
agggttctagtgtgtgattgtttgttgttgtaactcgttcttcttcttttgttgttctgtgtttgtgtttgttttttctctcacctgaaaatgtcttgctgcggtggtaactgtggttgcggaagctcctgcaagtgcggcaacggctgcggaggctgcaagatgtacccagacttgagctacactgagtcaaccaccaccgagaccttggtcatgggagtggcacctgttaaggctcaatttgagggtgctgaaatgggtgtgcccgctgagaacgatggctgcaaatgtggaccaaactgctcctgcaacccctgcacttgcaagtgaggtgttgggagagcaagcttttagcacagatatagcccttaattaggaataatgataaactattaatgtgtagctaaaaacttatgtattat

SEQ ID NO: 58752 - DNA, 299 bp, Glycine max
ggtcgtcaaatgcgcagtgatgcacacttaaaattttccttggcaacttcaaagtacatcaacattgtctcctacgcctactgttctcttctctgtcacatcaggtatatattatccagtcgtcacatggataccaggtacatgcgactcttttctcatcgaaagcactaacacgattcctttctgatcactggacgagatcacagctctcaacagctttcacgcaatcatcaatgacatccatgcatacttatccagcaaattcatagcatgacagctgataactgccccaacggcat

SEQ ID NO: 58753 - DNA, 406 bp, Glycine max
  unsure (1)..(406): unsure at all n locations
ggcacaagtgagtttgttgatcgagataactagaaacagtgtgatgaaaatgaaggtccttgttttcttcgttgctacaattttggtagcatggcaatgccatgcgtacgatatgttccctctccgaatgaacactggctatggtgcccgtactccggaggtgaaatgcgcaagttggaggcttgctgtggaagcacacaacatctttggctttgagaccattcctgaagagtgcgttgaagcaacaaaggaatacatccatggcgaacaatatagatcagactccaaaacagttaaccaacaagcttacttttatgccagagacctcgaagtccatcccaaggacacatttgtgttcagtatagatggcaccgtactctctaatattccatactacanaaaacat

SEQ ID NO: 58754 - DNA, 325 bp, Glycine max
ggcacaagtgagtttgttgatcgagataactagaaacagtgtgatgaaaatgaaggtccttgttttcttcgttgctacaattttggtagcatggcaatgccatgcgtacgatatgttccctctccgaatgaacactggctatggtgcccgtactccggaagtgaaatgcgcaagttggaggcttgctgtggaagcacacaacatctttggctttgaaaacattcctgaagagtgcgttgaagcaacaaaggaatacatccatggcgaacaatatagatcagactccaaaacatttaaacaacaagcttacttttatgccagagac

SEQ ID NO: 58755 - DNA, 329 bp, Glycine max
  unsure (1)..(329): unsure at all n locations
ggcacaagtttgttgagatagctagaagcaataagatgaaaatgaaagtgcttgttttgtttgttgctacagttttggtagcatatgaatgccatggctcagactaccagaagttccctctccaaatgaaaactgggtttggtgggcaatacagcaatgaagtggcatgtgccagttggaggcttggcgtggaagcaaacaacgtagtcaagtggcaaactgttcctgcagcttgcggagagtacatagctgactacgttctangagaccantatagatcagatttcanaacagttaaacaacaagcttatttctatgctaaatccctc

SEQ ID NO: 58756 - DNA, 359 bp, Glycine max
gagtgcacaagtgagtttgttgatcgagataactagaaacagtgtgatgaaaatgaaggtccttgttttcttcgttgctacaattttggtagcatggcaatgccatgcgtacgatatgttccctctccgaatgaacactggctatggtgcccgtactccggaggtgaaatgcgcaagttggacgcttgctgtggaagcacacaacatcttttggctttgagaccattcctgaagagtgcgtttaaacaacaaaggaatacatccatggcgaacaatatagatcagactcgaaaacagttaaccaacaagcttacttttatgccagagacctcgaagtccatcccaaggacacatttgtg

SEQ ID NO: 58757 - DNA, 380 bp, Glycine max
cgaatgaacactggctatggtgcccgtactccggaggtgaaatgcgcaagttggaggcttgctgtggaagcacacaacatctttggctttgagaccattcctgaagagtgcgttgaagcaacaaaggaatacatccatggcgaacaatatagatcagactccaaaacagttaaccaacaagcttacttttatgccagagacctcgaagtccatcccaaggacacatttgtgttcagtatagatggcaccgtactctctaatattccatactacaaaaaacatggatatggggtggagaaatttaactcgaccttgtatgatgaatgggttaacaagggcaatgcaccggcactgcccgagactcttaagaattacaacaa

SEQ ID NO: 58758 - DNA, 389 bp, Glycine max
gggcacaagtttgttgagatagctagaagcaataagatgaaaatgaaagtgcttgttttgtttgtcgctacagttttggtagcatatgaatgccatggctcagactaccagaagttccctctccaaatgaaaactgggtttggtgggcaatacagcaatgaggtggcatgtgccagttggaggcttggcgtggaagcaaacaacgtagtcaagtggcaaactgttcctgcagcttgcggagagtacatagctgactacgttctaggagaccaatatagatcagattccaaaacagttaaccaacaagcttatttctatgctaaatccctcaaactcaccaacaaagatgtctttgtcttggacgttgacgacactactctctctaatct

SEQ ID NO: 58759 - DNA, 283 bp, Glycine max
ggagcgaagaagatattagggtttttgagtgcggtgcggcgatcctagcactctcttctgcagctttcgccgacagcttcattcaccatggctgagcaaaccgagaaggcttttttgaaacaaccaaaagtgtttctcagctcgaagaaaactgggaagggaaagagacccggaaagggtgggaaccgcttttggaaatccattgggcttggatttaagactcccaaggaagccatcgaaggaacctacattgacaagaagtgccccttcactggcaatgttt

SEQ ID NO: 58760 - DNA, 378 bp, Glycine max
  unsure (1)..(378): unsure at all n locations
ggcacaagtgagtttgttgatcgagataactagaaacagtgtgatgaaaatgaaggtccttgttttcttcgttgctacaattttggtagcatggcaatgccatgcgtacgatatgttccctctccgaatgaacactggctatggtgcccgtactccggaggtgaaatgcgcaagttggaggcttgctgtggaagcacacaacatctttggctttgagaccattcctgaagagtgcgttgaagcaacaaaggaatacatccatggcgaacaatatagatcagactccanaacagttaaacaacaagctttactttatgccagagacctcgaagtccaatcccaagacacatttgtgttcagtatagatggcaccgtact

SEQ ID NO: 58761 - DNA, 375 bp, Glycine max
  unsure (1)..(375): unsure at all n locations
ggcacaagtttgttgagatagctagaagcaataagatgaaaatgaaagtgcttgttttgtttgttgctacagttttggtagcatatgaatgccatggctcagactaccagaagttccctctccaaatgaaaactgggtttggtgggcaatacagcaatgaggtggcatgtgccagttggaggcttggcgtggaagcaaacaacgtagtcaagtggcaaactgttcctgcagcttgcggagagtacatagctgactacgttctangagaccaatatagatcagattccaaaacagtttaacaacaagcttatttctatgctaaatccctcaaactcaccaacanagatgtctttgtcttggacgttgacgacacta

SEQ ID NO: 58762 - DNA, 360 bp, Glycine max
ggtgcacaagtgagtttgttgatcgagataactagaaacagtgtgatgaaaatgaaggtccttgttttcttcgttgctacaattttggtagcatggcaatgccatgcgtacgatatgttccctctccgaatgaacactggctatggtgcccgtactccggaggtgaaatgcgcaagttggaggcttgctgtggaagcacacaacatctttggctttgagaccattcctgaagagtgcgttgaagcaacaaaggaatacatccatggcgaacaatatagatcagactccaaaacagttaaccaacaagcttacttttatgccagagacctcgaagttcatcccaaagacacaattgtgttc

SEQ ID NO: 58763 - DNA, 363 bp, Glycine max
ggcacaagtgagtttgttgatcgagataactagaaacagtgtgatgaaaatgaaggtccttgttttcttcgttgctacaattttggtagcatggcaatgccatgcgtacgatatgttccctctccgaatgaacactggctatggtgcccgtactccggaggtgaaatgcgcaagttggaggcttgctgtggaagcacacaacatctttggctttgagaccattcctgaagagtgcgttgaagcaacaaaggaatacatccatggcgaacaatatagatcagactccaaaacagttaaccaacaagcttacttttatgccagagacctcgaagtccatcccaaggacacatttgtgttcagtat

SEQ ID NO: 58764 - DNA, 367 bp, Glycine max
  unsure (1)..(367): unsure at all n locations
gaaggtgcaagagtttgttgtgagctataagctagtttatcgtgaggagaatatgaagttgtttgttttctttgttgctgcagtagttttggtagcatggccatgccatggcgcaggctaccaaaggttccctctccgaatgaaaactggctatggtgagcgttcttcggaggtaaaatgcgcaagttttaggcttgctgtggaagcacacaacatccgagcctttaaaaccattcctgaagagtgcgttgaaccaacaaaggactacattaatggcgaacaatttagatcagactctaaaacagttaaccaacaagctttcttttatgctagtgaacgcgaagtccatcacancgacatatttata

SEQ ID NO: 58765 - DNA, 399 bp, Glycine max
ggtgcacaagtgagtttgttgatcgagataactagaaacagtgtgatgaaaatgaaggtccttgttttcttcgttgctacaattttggtagcatggcaatgccatgcgtacgatatgttccctctccgaatgaacactggctatggtgcccgtactccggaggtgaaatgcgcaagttggaggcttgctgtggaagcacacaacatctttggctttgagaccattcctgaagagtgcgttgaagcaacaaaggagtacatccatggcgaacaatatagatcagactccaaaacagttaaccaacaagcttacttttatgccagagacctcgaagtccatcccaaggacacatttgtgttcagtatagatggcaccgtactctctaatattccatactac

SEQ ID NO: 58766 - DNA, 373 bp, Glycine max
gggtgcaagagtttgttgtgagctataagctagtttatcgtgaggagaatatgaagttgtttgttttctttgttgctgcagtagttttggtagcatggccatgccatggcgcaggctaccaaaggttccctctccgaatgaaaactggctatggtgagcgttcttcggaggtaaaatgcgcaagttttaggcttgctgtggaagcacacaacatccgagcctttaaaaccattcctgaagagtgcgttgaaccaacaaaggactacattaatggcgaacaatttagatcagactctaaaacagttaaccaacaagctttcttttatgctagtgaacgcgaagtccatcacaacgacatatttatattcggcat

SEQ ID NO: 58767 - DNA, 345 bp, Glycine max
gaccttttaggggtgcagagaagagaatcaatctcaaggaattactcaacttaatttttctctcacaaataccgatttctattatttccaactcaaaatttctccattctttttgtttcggtagctcgcgacatcagatcaacatcgacagcctctcgcgattggttcgatattccattccctctttctattatctacgcaaaggtaattttattagtctattcacgatttgcggcatctgattttgtaattttcacaacaatcgtgtgcacgactgattaattgattttgccagtagtaactagcaattcatcttaaccatattttctcggttcccaatttttc

SEQ ID NO: 58768 - DNA, 341 bp, Glycine max
ggttctagtgtgtgattgtttgttgttgtaactcgttcttcttcttttgttgttctgtgtttgtgtttgttttttctctcacctgaaaatgtcttgctgcggtggtaactgtggttgcggaagctcctgcaagtgcggcaacggctgcggaggctgcaagatgtacccagacttgagctacactgagtcaaccaccaccgagaccttggtcatgggagtggcacctgttaaggctcaatttgagggtgctgaaatgggtgtgcccgctgagaacgatggctgcaaatgtggaccaaactgctcctgcaacccctgcacttgcaagtgaagtgttgggagag

SEQ ID NO: 58769 - DNA, 397 bp, Glycine max
ggcacaagtgagtttgttgatcgagataactagaaacagtgtgatgaaaatgaaggtccttgttttcttcgttgctacaattttggtagcatggcaatgccatgcgtacgatatgttccctctccgaatgaacactggctatggtgcccgtactccggaggtgaaatgcgcaagttggaggcttgctgtggaagcacacaacatctttggctttgagaccattcctgaagagtgcgttgaagcaacaaaggaatacatccatggcgaacaatatagatcagactccaaaacagttaaccaacaagcttacttttatgccagagacctcgaagtccatcccaaggacacatttgtgttcagtatagatggcaccgtactctctaatattccatactac

SEQ ID NO: 58770 - DNA, 406 bp, Glycine max
  unsure (1)..(406): unsure at all n locations
ggcacaagtgagtttgttgatcgagataactagaaacagtgtgatgaaaatgaaggtccttgttttcttcgttgctacaattttggtagcatggcaatgccatgcgtacgatatgttccctctccgaatgaacactggctatggtgcccgtactccggaggtgaaatgcgcaagttggaggcttgctgtggaagcacacaacatctttggctttgagaccattcctgaagagtgcgttgaagcaacaaaggaatacatccatggcgaacaatatagatcagactccaaaacagttaaccaacaagcttacttttatgccagagacctcgaagtccatcccaaggacacnattgtgttcagtatagatggcaccgtactctctaatattccatactacaaaaaacat

SEQ ID NO: 58771 - DNA, 403 bp, Glycine max
ggtgcaagagtttgttgtgagctataagctagtttatcgtgaggagaatatgaagttgtttgttttctttgttgctgcagtagttttggtagcatggccatgccatggcgcaggctaccaaaggttccctctccgaatgaaaactggctatggtgagcgttcttcggaggtaaaatgcgcaagttttaggcttgctgtggaagcacacaacatccgagcctttaaaaccattcctgaagagtgcgttgaaccaacaaaggactacattaatggcgaacaatttaaatcagactctaaaacagttaaccaacaagctttcttttatgctagtgaacgcgaagtccatcacaacgacatatttatattcggcatagataacaccgtactctctaatatccatact

SEQ ID NO: 58772 - DNA, 276 bp, Glycine max
ggtgcacaagtgagtttgttgatcgagataactagaaacagtgtgatgaaaatgaaggtccttgttttcttcgttgctacaattttggtagcatggcaatgccatgcgtacgatatgttccctctccgaatgaacactggctatggtgcccgtactccggaggtgaaatgcgcaaattggaggcttgctgtggaagcacacaacatctttggctttgagaccaatcctgaaaagtgcgttgaaacaacaaaggaatacatccatggcgaacaatat

SEQ ID NO: 58773 - DNA, 277 bp, Glycine max
gtccaaacggcgacaaaacgacaacggaaggggaatactgcacgatagattttttctaactagtccagtcaccctaccaacctacgatcgacaatttcaggagtcacaatttcctcaaatgctcaccccatcgctgtaacccacatccgccatagccctcccacaacttgttcaacaggcagtcaacctacaagcaactcagaaggagtgccaattcccgacactcacaccatgaacaagggtatctccgaacttgttgtctgggccggcgataaag

SEQ ID NO: 58774 - DNA, 172 bp, Glycine max
ggcacaagtgagtttgttgatcgagataactagaaacagtgtgatgaaaatgaacgtccttgttttcttcgctgctacaattttggtagcatggcaatgccatgcgtacgatatgttccctctccgaatgaacactggctatggtgcccgtactccggaagtgaaatgcgca

SEQ ID NO: 58775 - DNA, 356 bp, Glycine max
gaagtgagtttgttgatcgagataactagaaacagtgtgatgaaaatgaaggtccttgttttcttcgttgctacaattttggtagcatggcaatgccatgcgtacgatatgttccctctccgaatgaacactggctatggtgcccgtactccggaggtgaaatgcgcaagttggaggcttgctgtggaagcacacaacatctttggctttgagaccattcctgaagagtgcgttgaagcaacaaaggaatacatccatggcgaacaatatagatcagactccaaaacagttaaccaacaagcttacttttatgccagagacctcgaagtccatcccaaggacacatttgtgttcag

SEQ ID NO: 58776 - DNA, 380 bp, Glycine max
ggcacaagtgagtttgttgatcgagataactagaaacagtgtgatgaaaatgaaggtccttgttttcttcgttgctacaattttggtagcatggcagtgccatgcgtacgatatgttccctctccgaatgaacactggctatggtgcccgtactccggaggtgaaatgcgcaagttggaggcttgctgtggaagcacacaacatctttggctttgagaccattcctgaagagtgcgttgaagcaacaaaggaatacatccatggcgaacaatatagatcagactccagaacagttaaccaacaagcttacttttatgccagagacctcgaagtccatcccaaggacacatttgtgttcagtatagatggcaccgtactct

SEQ ID NO: 58777 - DNA, 405 bp, Glycine max
gaaggtgcaagagtttgttgtgagctataagctagtttatcgtgaggagaatatgaagttgtttgttttctttgttgctgcagtagttttggtagcatggccatgccatggcgcaggctaccaaaggttccctctccgaatgaaaactggctatggtgagcgttcttcggaggtaaaatgcgcaagttttaggcttgctgtggaagcacacaacatccgagcctttaaaaccattcctgaagagtgcgttgaaccaacacaggactacattaatggcgaacaatttagatcagactctaaaacagttaaccaacaagctttcttttatgctagtgaacgcgaagtccatcacaacgacatatttatattcggcatagataacaccgtactctctaatatcccata

SEQ ID NO: 58778 - DNA, 383 bp, Glycine max
ggcacaagtgagtttgttgatcgagataactagaaacagtgtgatgaaaatgaaggtccttgttttcttcgctgctacaattttggtagcatggcaatgccatgcgtacgatatgttccctctccgaatgaacactggctatggtgcccgtactccggaggtgaaatgcgcaagttggaggcttgctgtggaagcacacaacatctttggctttgagaccattcctgaagagtgcgttgaagcaacaaaaggatacatccatggcgaacactatagatcagactccaaaacaatttaacaacaaaccttactttttaggccagagacctcgaaagtccaattcgaagggacacatttgtgttcagtataaatggcaccgtact

SEQ ID NO: 58779 - DNA, 405 bp, Glycine max
ggcacaagtgagtttgttgatcgggataactagaaacagtgtgatgaaaatgaaggtccttgttttcttcgttgctacaattttggtagcatggcaatgccatgcgtacgatatgttccctctccgaatgaacactggctatggtgcccgtactccggaggtgaaatgcgcaagttggaggcttgctgtggaagcacacaacatctttggctttgagaccattcctgaagagtgcgttgaagcaacaaaggaatacatccatggcgaacaatatagatcagactccaaaacagttaaccaacaagcttacttttatgccagagacctcgaagtccatcccaaagacacatttgtgttcagtatagattggaccgtactctctaatattccatactagcaaaaaca

SEQ ID NO: 58780 - DNA, 379 bp, Glycine max
gactcaccacttcaaaacactcataacacaaagcacaaagcaaagctcatccttgagttaaaaaatggcagcagcttcttccatggctctctcatccccatccttggctggcaaggccgtgaagctgggcccatcagccccagaagtgggaagggtgagcatgaggaagaccgtcaccaagcaggtctcctcaggaagcccatggtacggcccagaccgagtcaagtacttgggcccattctctggcgagcccccgtcctacctaaccggtgagttcccaggcgactacggctgggacactgctgggctttccgcagacccagaaaccttcgccaagaaccgtgaactcgaagtgatccactccaggtgggccatgctc

SEQ ID NO: 58781 - DNA, 188 bp, Glycine max
gagggcgatgaagctacatatagacacaatacagagtgagttgttgctccttcgcgacaactctctgccaacatgggtatctccagagactccatccacaatatgcctgccactggtggcaataataatgcctggtggaaaaagataaagtatcaccttggtcgccatgctgctaacaccaagctgtc

SEQ ID NO: 58782 - DNA, 316 bp, Glycine max
agtcacatgggcatcatcaacatttcgtcgtttcgctgctcattgccttcgctgacacagatggtgcgttgtgaaacgtgttttgggatgaaagtggtatgacgaacggcgtatacgtcgccgaccgtggcaccgtctctgggactgacgtccagtatgctccaacaggagcactcattgacacttatcaccgcaaaaactggtccttttacacggctcacattgcagaattaactgccacattcatcatcgtaaatattaatgtgctcacaatcctatggtacatgcaccacagtgtgctcatagaaaacttcaa

SEQ ID NO: 58783 - DNA, 374 bp, Glycine max
ggcacaagtgagtttgttgatcgagataactagaaacagtgtgatgaaaatgaaggtccttgttttcttcgttgctacaattttggtagcatggcaatgccatgcgtacgatatgttccctctccgaatgaacactggctatggtgcccgtactccggaggtgaaatgcgcaagttggaggcttgctgtggaagcacacaacatctttggctttgagaccattcctgaagagtgcgttgaagcaacaaaggaatacatccatggcgaacaatatagatcagactccagaacagttaaccaacaagcttacttttatgccagagacctcgaagttgatcccaaggacacatttgtgttcagtatagatggcaccg

SEQ ID NO: 58784 - DNA, 378 bp, Glycine max
ggcacaagtgagtttgttgatcgagataactagaaacagtgtgatgaaaatgaaggtccttgttttcttcgttgctacaattttggtagcatggcaatgccatgcgtacgatatgttccctctccgaatgaacactggctatggtgcccgtactccggaggtgaaatgcgcaagttggaggcttgctgtggaagcacacaacatctttggctttgagaccattcctgaagagtgcgttgaagcaacaaaggaatacatccatggcgaacaatatagatcagactccaaaacagttaaccaacaagcttacttttatgccagagacctcgaagtccatcgcaaggacacatttgtgttcagtatagatgggaccgtact

SEQ ID NO: 58785 - DNA, 397 bp, Glycine max
ggcacaagtgagtttgttgatcgagataactagaaacagtgtgatgagaatgaaggtccttgttttcttcgttgctacaattttggtagcatggcaatgccatgcgtacgatatgttccctctccgaatgaacactggctatggtgcccgtactccggaggtgaaatgcgcaagttggaggcttgctgcggaagcacacaacatctttggctttgagaccattcctgaagagtgcgttgaagcaacaaaggaatacatccatggcgaacaatatagatcagactccaaaacagttaaccaacaagcttacttttatgccagagacctcgaagtccatcccaaggacacatttgtgttcagtatagatggcaccgtactctctaatattccatactac

SEQ ID NO: 58786 - DNA, 366 bp, Glycine max
ggcacaagtgagtttgttgatcgagataactagaaacagtgtgatgaaaatgaaggtccttgttttcttcgttgctacaattttggtagcatggcaatgccatgcgtacgatatgttccctctccgaatgaacactggctatggtgcccgtactccggaggtgaaatgcgcaagttggaggcttgctgtggaagcacacaacatctttggctttgagaccattcctgaagagtgcgttgaagcaacaaaggaatacatccatggcgaacaatatagatcagactccataacagttaaacaccaagcatacttttaagccatataacgcgaatttacgcgaagtccatcacatcgacatatttatat

SEQ ID NO: 58787 - DNA, 380 bp, Glycine max
ggcaagagtttgttgtgagctataagctagtttatcgtgaggagaatatgaagttgtttgttttctttgttgctgcagtagttttggtagcatggccatgccatggcgcaggctaccaaaggttccctctccgaatgaaaactggctatggtgagcgttcttcggaggtaaaatgcgcaagttttaggcttgctgtggaagcacacaacatccgagcctttaaaaccattcctgaagagtgcgttgaaccaacaaaggactacattaatggcgaacaatttagatcagactctaaaacagttaaccaacaagctttcttttatgctagtgaacgcgaagtccatcacaacgacatatttatattcggcatagataacacc

SEQ ID NO: 58788 - DNA, 379 bp, Glycine max
ggcacaagtttgttgagatagctagaagcaataagatgaaaatgaaagtgcttgttttgtttgttgctacagttttggtagcatatgaatgccatggctcagactaccagaagttccctctccaaatgaaaactgggtttggtgggcaatacagcaatgaggtggcatgtgccagttggaggcttggcgtggaagcaaacaacgtagtcaagtggcaaactgttcctgcagcttgcggagagtacatagctgactacgttctaggagaccaatatagatcagattccaaaacagttaaccaacaagcttatttctatgctaaatccctcaaactcaccaacaaagatgtctttgtcttggacgttgacgacactactct

SEQ ID NO: 58789 - DNA, 397 bp, Glycine max
gaagtttgttgagatagctagaagcaataagatgaaaatgaaagtgcttgttttgtttgttgctacagttttggtagcatatgaatgccatggctcagactaccagaagttccctctccaaatgaaaactgggtttggtgggcaatacagcaatgaggtggcatgtgccagttggaggcttggcgtggaagcaaacaacgtagtcaagtggcaaactgttcctgcagcttgcggagagtacatagctgactacgttctaggagaccaatatagatcagattccaaaacagttaaccaacaagcttatttctatgctaaatccctcaaactcaccaacaaagatgtctttgtcttggacgttgacgacactactctctctaatctccagtattttgct

SEQ ID NO: 58790 - DNA, 320 bp, Glycine max
  unsure (1)..(320): unsure at all n locations
gcacaagtgagtttgttgatcgagataactagaaacagtgtgatgaaaatgaaggtccttgttttcttcgttgctacaattttggtagcatggcaatgccatgcgtacgatatgttccctctccgaatgaacactggctatggtgcccgtactccggaagtgaaatgctcaaattggcagcttgctgtggcagcacacaacatctttggctttgagaccattcctgaagagtgcgttgaagcatcaaaggaatacatccatggcgaacaatatagatcagactccanaacagtttaacaacaagcttacttttatgccag

SEQ ID NO: 58791 - DNA, 358 bp, Glycine max
ggcacaagtgagtttgttgatcgagataactagaaacagtgtgatgaaaatgaaggtccttgttttcttcgttgctacaattttggtagcatggcaatgccatgcgtacgatatgttccctctccgaatgaacactggctatggtgcccgtactccggaggtgaaatgcgcaagttggaggcttgctgtggaagcacacaacatctttggctttgagaccattcctgaagagtgcgttgaagcaacaaaggaatacatccatggcgaacaatatagatcagactccaaaacagttaaccaacaagcttacttttatgccagagacctcgaggtccatccaaagacacatttgtgttca

SEQ ID NO: 58792 - DNA, 348 bp, Glycine max
ggcacaagtttgttgagatagctagaagcaataagatgaaaatgaaagtgcttgttgtgtttgttgctacagttttggtagcatatgaatgccatggctcagactaccagaagttccctctccaaatgaaaactgggtttggtgggcaatacagcaatgaggtggcatgtgccagttggaggcttggcgtggaagcaaacaacgtagtcaagtggcaaactgttcctgcagcttgcggagagtacatagctgactacgttctaggagaccaatatagatcagattccaaaacagttaaccaacaagcttatttctatgctaaatccctcaaacttcacaacaaagatg

SEQ ID NO: 58793 - DNA, 403 bp, Glycine max
ggcaagagtttgttgtgagctataagctagtttatcgtgaggagaatatgaagttgtttgttttctttgttgctgcagtagttttggtagcatggccatgccatggcgcaggctaccaaaggttccctctccgaatgaaaactggctatggtgagcgttcttcggaggtaaaatgcgcaagttttaggcttgctgtggaagcacacaacatccgagcctttaaaaccattcctgaagagtgcgttgaaccaacaaaggactacattaatggcgaacaatttagatcagactctaaaacagttaaccaacaagcttttcttttatgctagtgaacgcgaagtccatcacaacgacatatttatattcggcatagataacaccgtactccctaatatcccatact

SEQ ID NO: 58794 - DNA, 178 bp, Glycine max
aaggcatagccataaattctttgaataagaaaatggtatattatattatgatatatattggcttagctataatcactagaattattatatactaagtataaatatatagaaattccagtgattatagactatctttatataatagtataaataaattaaattcactgaccgtcaaaaa

SEQ ID NO: 58795 - DNA, 348 bp, Glycine max
gaatctcccgtttctgactccctggaactggttgttggatccccgtggaagcatcataaggatgaagagcgtttcaagtcaaagcactgcaacatagtgagatctgactcataatttggcgacactctatgaaattatgaggttacctggattttgtgaggttgtcatggtattggagtcatggcgggtgaggttgtgggatttcaaaaggatcaaggcacacttgacaatggttctgacgtatgaacacctgtattgaatgacaacgataatggcaagctgcaatgttatgtgggatccgctgcggatgccatcagatttgggacacatggagaggaatctgcaaaa

SEQ ID NO: 58796 - DNA, 103 bp, Glycine max
aacgggatcaaggtttggctcccagcatacaaattcacggaacaggatctgtgcttaacgacattcgaatccacatgtccaccgcatcgcagcccaaggccac

SEQ ID NO: 58797 - DNA, 130 bp, Glycine max
aaaaccttaggtcaggcggggtaacttccgtatttaaatcatggcaccaactgagatcggaaatgtcaatccaaacggcattttggccgacatgcgctaagatatcactcccatacactctcaattcaca

SEQ ID NO: 58798 - DNA, 131 bp, Glycine max
aaatgatcttggcagcagagctctcagtacagctatcaagacgacgattaatgatgacacattcgtcgatggatgctccactaagagcatacgagcaatataaaagcggccgctcgacacgatacaggctt

SEQ ID NO: 58799 - DNA, 269 bp, Glycine max
ttcatcagcgagacgcagcgaaacgggaatgccacgatcagacgcgaggtacatcctcaacagtagggtccgatgcgctgccatcgctattctcacatatttcaatcgctacatgtcgtaactctcataatcatttcaattggcatgaccaaacaatgctatatcaccaatatcactggaaacaggcagggaagaagaatcagccatatgacttcatgtggaacaggacctgggacaacaaccaacgggaacattactactagaactgg

SEQ ID NO: 58800 - DNA, 276 bp, Glycine max
gactctcgctcaaagcataatacagtgagtttgatcttggttgggacgctcgacataatgtcgtcgacaatgcagaatcgtcattcatcctttacttcctctacagcgtcatctctgtgaacagcgacatgacttctatcttcggtgtcgttgtggtcgtcttcaggtacatgctaaagggttactactcagaacgtggttgtgaagatagcgctcctcgtcatcctcatgaatcggaggtacacgtcatcgtcttccacatcctctttggtgcaa

SEQ ID NO: 58801 - DNA, 101 bp, Glycine max
tttcaaacgtactaaggtcaaacatttacattggtaaattaaccttgctgctctcacggattcaagttcacatatacgtacatggaacgtaaaagtccttc

SEQ ID NO: 58802 - DNA, 75 bp, Glycine max
tgggacatctaaggtcacgcagcgctatcctctgagtttatgccttcctgtatgggagcgcgcgacccctcgtgg

SEQ ID NO: 58803 - DNA, 90 bp, Glycine max
gctctcaattcctcacattaatgtgtgtctgtcacgagaaccataatgctgacacattacagtaactctctttcccgacctgaataagaa

SEQ ID NO: 58804 - DNA, 155 bp, Glycine max
gtccggcaagccatagagacacgcctcagtgcggttgtcagaagagcagatattggtagacctaagcatacagtggttacaatgcgtcataagtgatcacttaatccttcaggaatcgtcatcataagcatcatcatcatcgttcattgacaaac

SEQ ID NO: 58805 - DNA, 411 bp, Glycine max
gagcgaaacagagagtgatttcagtgagtgatcggtgttcacttgatctcatcataatcgtcagcgtcaattgaagaagatgccgatcagaaacatcgccgtcggaaggcctgaagaggcgactcaccccgacacgttgaaggcggctttggctgagttcatctcaaccttcatcttcgtgttcgccggctcaggctccggcatcgcctacaacaagctcaccgacaacggcgctgccacccctgccggcctcatctccgcctccatcgcccatgcattcgccctcttcgtcgccgtctccgtcggcgccaacatctccggcggccacgtcaaccccgccgtcaccttcggcgccttcgtcggcggcaacatcaccttcctccgcggcatcgtctacgtcatcgcccagct

SEQ ID NO: 58806 - DNA, 212 bp, Glycine max
ggctgccgcctcttcttcgagttgtacactctctcttcaaccctactttaaggtttatctcctaaaacccttttcatgttgattggatgacatcaacctgctcgtgttgtctgaaactcctgcggattttaccatgattcacatgctggatcaaggtctgccatctcaacttcaggatttctccagtacttcatgtactacatagtgcgttt

SEQ ID NO: 58807 - DNA, 403 bp, Glycine max
ggtgctccacctttatcttgctgagactctgatcagttagagttgcattcatcaatgactatcacttatttacctccggagctgcatgaaatcatgcaccgaatccgactcggattccgactgggacgattcggaagaagatcccgatttccacttgctcgtagaaactcatatcaagttctcaaagctctcacttaagcacaaggctaacgccggtgggacggttagagaacttgatagtggatgattgcaagttgtatccgacgaacattggtctgaggctaactggtacacaagatccacctatcccaagcatgcataagcatttagagtacttaatagttttgccatagcaaattgtacgatttctctgattcaccttgggattcacgattttagctgg

SEQ ID NO: 58808 - DNA, 200 bp, Glycine max
aaaaggggacaatggggtgtcgctgcaggttggtttgagtgcgtagagcatacgtcattgcgctcacgatcttttgtgcgaacaggaccgtttggacgtcctttcaggcatcggtgagttcgtgctcgagagcgtctgtagcattctgtgagctggtgagatctacgagctcttgtcagagatgtgatcacttggtggag

SEQ ID NO: 58809 - DNA, 91 bp, Glycine max
aagacgggtgggttaagcaacagacaaaaggaacacaagaagaaaatgcccttggctgcaaagagagataaggtatcaagaactcggatag

SEQ ID NO: 58810 - DNA, 427 bp, Glycine max
ggcagcagaagaacaagtagttgagaactaagaaggagaagcaaatggcttcctcaatgatctcttccccagctgttaccactgtcaaccgtgccggtgccggcatggttgctccattcactggcctcaagtccatggctggcttccccaccagaaagaccaacaatgacattacctccattgctagcaacggtggaagagtgcaatgcatgcaggtgtggccaccagttggcaagaagaagtttgagactctttcctacctgccagaccttgatgatgcacaattggcaaaggaagtagaataccttcttaagaagggatggattccttgcttggaaatcgagttggagcacggtttcgtgtaccgtgagcacaacaggtcaccaggatactacgatggacgctactggaccatgtggaagctgcc

SEQ ID NO: 58811 - DNA, 385 bp, Glycine max
ggaaactcaactttcaatattgcaacgctttaccgcattcatataaattacacaattgatcgaggtgctctgaaagtgagcatagacatttcagaggcatagtatcgctaatcaaactcactagctcaccacatttgagagaatactcaataccatgtgtcgagcacataataggaatgtacggcactaatattccatccactgtgacgggtaaagaaccatatatacagagaagatgatggtggctgcatgagtgcgagtgagggagtatgcggtgagggatctcttacactggtcgtttcactatattagtacacggtcagattacctatgtgatcactatcttacgtacttttgcaatttgatcccttaacttttgaaaaat

SEQ ID NO: 58812 - DNA, 62 bp, Glycine max
cgggatgctttcttgagtggtcgttctgcagctatttgcttgatggctgctctctccctttg

SEQ ID NO: 58813 - DNA, 416 bp, Glycine max
atatcaataagcggaggtgatcaccatttatatagtctgtattctccttgcctgttggacatgtttagattcttttgtagaagtttatgtgagaaagaaattcgaacagaaattgcgtatcaagactttattacagattactctttatgcaaaaaaaaaaaaaaaaaaaaaaaaaaaaaaaaaaaaaaaaaaaaaaaaaaaaaaaaaaaaaaaaaaaaaaaaaaaaaaaaaaaaaaaaaaaaaaaaaaaaaaaaaaaaaaaaaaaaaaaaaaaaaaaaaaaaaaaatttaaaaaaaaaaataaaaaaaaaaaaaaaagggggcgccccaaaaagtttacagttttttttacggggtgtgagggtttaaaactcctttaaggggggcccaaattttatatagggggcgggtttttta

SEQ ID NO: 58814 - DNA, 165 bp, Glycine max
atactactcaggagaaactacatattctcaacccatcattttccagaaaactcaaatcatcttccttaccaaatgcctcctaagtatttacgtaactggttgttgagtccattaattttgtctgcaccttggactggaacgatacttcctccccccttacatttt

SEQ ID NO: 58815 - DNA, 177 bp, Glycine max
tcagatgatgttgatcacgtttagtgcactcctcaggcttcactttgcattgtgcacagacatcaagcttctgatgacacacactcttcttcatattcttcttcatcatcgtgtgcttgttcggattgtgactaacatcatcgtgtacgcgagcattgctattgtcggcaatgtgtg

SEQ ID NO: 58816 - DNA, 66 bp, Glycine max
ctatttgaatttaaagacatgatcttttacttcattcttcaatgaagatatcttgagatttttcac

SEQ ID NO: 58817 - DNA, 183 bp, Glycine max
agcgtgaacttcgacctgaaaagacggatttgagcagaccatgtccgaatctgctgacccacatccacgtttgtacttcgtacaccagatcgtggatcactcactcactgatgtacaactttccgaactctttgccgactatggtacaactgactcgtgcaatgtcatgcgacgaccgactgg

SEQ ID NO: 58818 - DNA, 98 bp, Glycine max
ccaacaaaaaatgggcctttgaaactaaagaaaaacaaactaagattggcccaaactgaagaaatacaaaaaaatggcttgagatcaagcctaaccac

SEQ ID NO: 58819 - DNA, 178 bp, Glycine max
gtaaatgaaaattaactcggtattttatcaatctattttctactctctttttagaatttgtaaagtagaaaaatgggaatttaaaaatattagaaaaaaagaaaaaaaaattgaaaaaaattataaaattataatagatatatataatgaaatgattacattaaaacaatttttatac

SEQ ID NO: 58820 - DNA, 155 bp, Glycine max
gaaactgcggagtcacatggagagttcgatcctggctcaagaataacggctgcgtcgacaaggattacaagctgaccatacgcgatgcatagctacgtgcatcgagctttcgatacgggtcacctaaatcctattcaccggccgtcggatgggaa

SEQ ID NO: 58821 - DNA, 437 bp, Glycine max
cagtaagagcatccgaaagggattacccaatcaggagacacagtatatgagttgtgtaagctatatgatctttcagcccttcggaatctcaccacgaactattactcatatgcaatcatcacgtcatccgctatgaatatcacactgaccattgcggatggcaatgctctctccctcaacaacctcatattttgtcattctaagacgacttacacctgcatagccatctacagtcccctgattgtcatcactgaacaaagcctacccaacaccattgattatacagttatctatgttgacaaatctggcatcaaggtttctccctggcatgatattcccttgcagttaagtgatgatatctttaacttcattgtctagattcctacagaatccagtgcaaagatggaagttgccactgatgagtctttcactcccat

SEQ ID NO: 58822 - DNA, 424 bp, Glycine max
  unsure (1)..(424): unsure at all n locations
ggcacttcaattgcaatcaaattagttcattctctttgcgcagttccctacctctcctttcaagatgcagatcttcgtcaagaccctcaccggaaagaccatcacccttgaggtggaaagctctgacaccatcgacaacgtcaaggccaagatccaggacaaggaaggaattcccccggatcagcaacgtctcatcttcgccggaaagcagctcgaggacggccgtaccctcgccgactacaacatccagaaggagtcaacccttcaccttgtccttcgtctccgtggtggcatgcagatcttcgtcaagactctcactggcaaaaccataaccctagaggtcgaaagctctgacaccattgacaacgtcaaggccaagattcaggacaagganggaatccccccagaccagcaacgtctcatc

SEQ ID NO: 58823 - DNA, 61 bp, Glycine max
agaaggggattgcgattcacagaaaacaccaccaactcaacacagtcatcatcgtcactac

SEQ ID NO: 58824 - DNA, 294 bp, Glycine max
aggggcagttcaagtgcaatcaaattagttcattcactttgcgcagttccctacctctcctttcaagatgcagatcttcgtcaagaccctcaccggaaagaccatcacccttgaggtggaaagctctgacaccatcgagaacgtcaaggccaagatccaggacaaggaaggaattcccccggatcagcaacgtctcatcttcgccggaaagcagctcgaggacggccgtaccctcggccgactacaacatccagaaggagtcaacccttcagcttgtccttcgtctccgtggtg

SEQ ID NO: 58825 - DNA, 152 bp, Glycine max
gcatccctacatgggcgtgacgcagcaggatcagacgcttaggacccgaaactgcgaagtttcccgtaaatctggagagacacgagaagtgactcgacgagaagtacctagctggcagtggacagcgaatgaagcatctttctcgtgcgcct

SEQ ID NO: 58826 - DNA, 165 bp, Glycine max
acgaaagggaataccaataagttatcctccaatagttttccaggtacctcacggtttcaacctcaggagtttggaatccaggcaacgtcccttatgggaaccaccagttctggcactcctaaagcaactcccttcctaagccaatgcaacggtgccaatgccaat

SEQ ID NO: 58827 - DNA, 250 bp, Glycine max
acacgaactaatgtatgccaatggttatatcgctgtaagtgaaacacccattagtcaatggttgctactacaactttagaatgatgagtgaggtactagtgtaacatcgtcgccatgatctactccaacattattgtcaaatcaacatcaacaggaaagacagtcaaaatgagatttcttcatgactaaaaagatgttcggtactcaaacagttgtattggatcattgtcaaagcgcaaaatattttcca

SEQ ID NO: 58828 - DNA, 183 bp, Glycine max
tagtaataattctaacaccgatgtcgtatgatatatgatgaacaaataattatatttgataaatatgtgattagaagtttaattcttaaatttggatgtataacgaaacatttattaagggagatagctagactctttaaataaattttcttaattcaataaattagtctttaacccataacc

SEQ ID NO: 58829 - DNA, 79 bp, Glycine max
gattgacctttggtcatcacaagcgaaaacccacttctggatcttctggtatggttcccctgttgcaaaaaaaaaaaca

SEQ ID NO: 58830 - DNA, 292 bp, Glycine max
gacaccacctggttccgggtcacactacgtgcgcaggatcaagagccttctcatgcatcagccgattcaagtgtcttccgcctttcgcatgcagcagctgtagggaactcccatcgactctttggcgagataatcacaccaacagcaaaatgctcgttttttgctttgtgggtattgttcttgatcatttgagttgggaccatcgaccatggtgggtagattttcgagattctctgtcggaagaaatgtccacctgacagcgctaagtgccctgcatgacacggaagtgatg

SEQ ID NO: 58831 - DNA, 147 bp, Glycine max
tgcgaaaacacgacaggggggaatacagaacatcgttgagatctagaagatctacatcatcagggtcttgaagcagctgcacgccgacatcgtgatctccagcgcggcggtgaggatcatgagacattttcatagacggcatcgtcg

SEQ ID NO: 58832 - DNA, 128 bp, Glycine max
cttccaacagctgcaaaaaaaccacaaaagggtacggctgcaaaaaaaccaaaaaaggggaatttaaaaattggaactttaaccaaaaaaaaaaaaaaaaaaaaaaaaaaaaaaccggccccccaaaa

SEQ ID NO: 58833 - DNA, 420 bp, Glycine max
tattaagctgtaattaactgagattaaccacaacaaagttgattgagtgacaaaaaaaaaaaaaaaaaaaaaaaaaaaaaaaaaaaaaaaaaaaaaaaaaaaaaaaaaaaaaaaaaaaaaaaaaaaaaaaaaaaaaaaaaaaataaaaaaaaaaaaaaaaaaaaaaaaaaaaaaggggccgcccaaaaggatcaaacctaactaacccttgaaggcaacttaaaacccctccaaaagggccaccaaaatcaaatcaaggggccgccgtttaaaaactccgaaacgggaaaaacccgggcttaaccaaattaaacccccttgaaaaaaaccccccttccccaagcgggctaaaaaccaaaaaggccccaaccaatccccttcccaaaaatttgccaacccaaaaggccaaagggaaccccc

SEQ ID NO: 58834 - DNA, 271 bp, Glycine max
ctcctccccttccgcgaagggtttaacccaacctcctccaaaattaaaggataaaggttaagagaaagggtacacacctatagtggggatagtccaaatttacactgggaaatctccaatcacagggcacaccatatataaacttttaggcgcttacaaacgtgttatagtgagatatttgaaagaaactgctcagataaaaactacgtctctcaaatatacccttgtgcgttaaaaaccttaagcgcaacctgtaataagaaacacaaat

SEQ ID NO: 58835 - DNA, 258 bp, Glycine max
tatgtacagtattcgtaggcagatagtatagtacagcatgcacactcttgtggtagggtatgcgcattgtgcactcttctgtattcttacacttggatggatgattcttcccctaagttctagtgtttgtttattttttgtacaaataaaaaggaactaaaagagtgtagtgtggtgggtggtatctggcatggttgacggtgcaattatcattttgtttcggtcagaccaaatagaaaataaagagtacaatacagc

SEQ ID NO: 58836 - DNA, 170 bp, Glycine max
gaagggataggaaaaaggaaaatgggaaaattattccggaaaccctaaccttggcaacccggaattgcccaatccgaacccggttgcctcctccacaaaagggtccgattcgccgccctcgccggtcccaaaaaattcaatccccaaaagttgcaactccccaatccatt

SEQ ID NO: 58837 - DNA, 382 bp, Glycine max
ggttctagtgtgtgattgtttgttgttgtaactcgttcttcttcttttgttgttctgtgtttgtgtttgttttttctctcacctgaaaatgtcttgctgcggtggtaactgtggttgcggaagctcctgcaagtgcggcaacggctgcggaggctgcaagatgtacccagacttgagctatactgagtcaaccaccaccgagaccttggtcatgggagtggcacctgttaaggctcaatttgagggtgctgaaatgggtgtgcccgctgagaacgatggctgcaaatgtggaccaaactgctcctgcaacccctgcacttgtaagttaggtgttgggagaacaagcttcaagcagagattacccttaattaggaataatgat

SEQ ID NO: 58838 - DNA, 78 bp, Glycine max
  unsure (1)..(78): unsure at all n locations
ccctcttctaattcntctctcaaaaggactgaacgaaaaaaccttaaggttcctctgttcctcttcgccccccaaaaa

SEQ ID NO: 58839 - DNA, 161 bp, Glycine max
gaacctttttccccttcctttcacctcctcagcattcgtcagaaaaaccccataacccaaaaatgcctttcaaaaggtactttaaaattggaagggttgcccagtataccaagggcaaaaattacggccgcgccttaataattgtcaagttcattgaccaa

SEQ ID NO: 58840 - DNA, 111 bp, Glycine max
gaatctttgttctcttcctttcagctcctcagcagtcatcagatatacgccactctccatgattgtctttcaagaggtaggtttagcttgggatggttgctcaaatgagct

SEQ ID NO: 58841 - DNA, 143 bp, Glycine max
ggaaagtgaaaagtgtatttatttatttttatttttatttttaaagaaaaaaaaacaataaaaagaggagagtttgttgctgtgctgggttgtatgagcggttcaacaggaaaatctcgcgggccaaaaaagatgtgtaattg

SEQ ID NO: 58842 - DNA, 124 bp, Glycine max
gattcacacaactaactaagaaagtctttcatagccccccaaaaatgaagagcaccatcttctttgctctctttctcttttgtgccttcaccagctcatacctaccttcagccatccccgattt

SEQ ID NO: 58843 - DNA, 55 bp, Glycine max
tggatttagttggaggggttcatagatttagggaatcgattactatactagtaat

SEQ ID NO: 58844 - DNA, 273 bp, Glycine max
cccacgcgtccgcccacgcgtccggaaccacttggagtaacataactcctaacactggaaactttgctgtttctgaatcttcaattcacttttcagtcagtaccatgtctcctttgcaattaagagataccaagacaaatgattctgtatctgatgatgcttttccaaactgtattgggaatgatatagctagttcaggatcagcatcatctgataattataagatgaattcttccaaggggaagaatttcgcgttcaacaagagcagtgttt

SEQ ID NO: 58845 - DNA, 353 bp, Glycine max
gagggacatggtggttctggtggagagatttacttgccaaaagcttacgttagaaccatgaggaccacttcttggatcagctcagttagtagaacctgtatctagcttcccaacgggcttatctgagtgtgtagaaacactcacgtgccccaggagtcggagaacgagtattgtatgtgatcaatgtctatggtttacgatctctgtccttagtcacttgtgtgttttgttactcagttctcaggactttactgctcaggctctcaagtttcagatacatgctgccaaaaagccttactctgtgtccattgtttgtgcgatctttggaagtaatccagaactggagagctgag

SEQ ID NO: 58846 - DNA, 65 bp, Glycine max
gtacgggctgcgaaaagaagacgaaacagaaggggtacgggctgccgaaagaagacgaaacagaa

SEQ ID NO: 58847 - DNA, 51 bp, Glycine max
taatgggaacttcgtccctccctttgtcattcactctctgagtgacatcgg

SEQ ID NO: 58848 - DNA, 63 bp, Glycine max
gccggtttcccgaacgatttgatggtttggaatgcatttcccaagcaacgagtcttcggttcg

SEQ ID NO: 58849 - DNA, 236 bp, Glycine max
gaccgaaagcgaaatcggaagcgtgatcgttcgtttaaacgtacgttgacactgatggagagactaacttctaggacatcttctcgcaaatccgcgccacgcgcagcgacatgcacatcgacgtcaacgcaatcgccatcacctgccccaacacatacgacgagagctaagcagatagctccgcaactggagcctgaggacgagggagaggctcaagggcggaataagtcgggaac

SEQ ID NO: 58850 - DNA, 354 bp, Glycine max
ggaagagtgaagagaatggctcccaagggtttaacctttctggctgtgttaatatgcgtttcagcactgtcactgagtccttctgttgcgggggaagggcaaaataatggccttgttatgaacttctacaaggaatcatgccctcaggctgaagacatcatcacagaacaagtcaagcttctctacaagcgccacaagaacactgctttctcctggctcaggaacatcttccatgactgtgctgttcagagttgtgatgcttcactgttgctggactccacaagaaggagcttgtctgagaaggaaacagatagaggctttgggttgagaaatttcaagtacattgagacaatc

SEQ ID NO: 58851 - DNA, 342 bp, Glycine max
ataatatcacaagagcatgtaaggtgatctctatcagaaaatgatttagcaataaaaaaatatcacatgggccaatgggacagcaggtatatcttacagcataattctaacttgtaggacaatgagttacactttcaacatttcatctaacacttatgtgttcaggtggatggcataagggtcaagagatggcaatgttggtggctggctgtagtttggtccatttggcagatgcaaaacagagttatcttctccaatgcacttttcaatggcaacaagttgctcgaggatgctatagtcttaatgtggacttggctaagaaacatggagaaagattttaca

SEQ ID NO: 58852 - DNA, 319 bp, Glycine max
ttccgggtgcgccccacgcgtccgggcagccataagacgagagacggggacttcctcgattgaagtcttcctcaaaaccatctttcgtgatctccaccctctctctaattttcacacgcagcggcttcatcgtccgttttcatgactcggtgtgcatactggcgacgtctgctgtgatggaccccaccttgccagggttggaggagtcccaggaattgattgatcagatggagatcatcctgtcctcgagacaggtctgttagctcgagactgtttgtgcggacatggttcgtggtgcaaacgacatgcgcctcacggt

SEQ ID NO: 58853 - DNA, 295 bp, Glycine max
ggagttgaaggggttagggtttaggaagggatggaagcggcagtggtggacgtcggctctaagctcctcaaagcgggctttgcaattcctgaccagactcctgccatggcccgcacttggagaggttttatctccttcaatgcataattctaagtttctaacccacttagctattctcaaataattcccactcagatgaagcaattactcgatgatggatccgtcgcagataattcactggctgacaatgtcaccgttgattccgttgtgcgaggatttattagagattgggatg

SEQ ID NO: 58854 - DNA, 280 bp, Glycine max
tgacagtagagtaccctgacattctagctcgatatgtccaacaccatcctgtctgacgatgagtagcatttcgattcgattgccagaatccggcgcctcgaattgttatgctcatctagcctgtatgagtcgctagaacggttacatcggcatggaaggacgctcatgctttgttgttgtacatctctactttttaatctggaattcacggtcacgcctttgtgccattttgttggtctctcgaaaccttcactttttcagaatgcgtatgtatttagtg

SEQ ID NO: 58855 - DNA, 358 bp, Glycine max
gagcgaaacagagagtgatttcagtgagtgatcggtgttcacttgatctcatcataatcgtcagcgtcaattgaagaagatgccgatcagaaacatcgccgtcggaaggcctgaagaggcgactcaccccgacacgttgaaggcggctttggctgagttcatctcaaccttcatcttcgtgttcgccggctcaggctccggcatcgcctacaacaagctcaccgacaacggcgctgccacccctgccggcctcatctccgcctccatcgcccatgcattcgccctcttcgtcgccgtctccgtcggcgccaacatctccggcggccacgtcaaccccgccgtcaccttcggcgccttc

SEQ ID NO: 58856 - DNA, 64 bp, Glycine max
cactctaggtgcaaaaaaagggctcttaataattattcaaatgggtgttccttaatcatccaca

SEQ ID NO: 58857 - DNA, 159 bp, Glycine max
ggatgcgtctacactaactaaagccgagcagcgagagagagaaatcctagcaaaaatgccggccggccagggttcgagatcgcgcaccaaagattccctctctcgtcgcttcaggaagaatggtaccgaacgcctcatcacaggactcagaagctacca

SEQ ID NO: 58858 - DNA, 176 bp, Glycine max
ggcacttcaattgcaatcaaattagttcattcgctttgcgcagttccctacctctcctttcaagatgcagatcttcgtcaagaccctcaccggaaagaccatcacccttgaggtggaaagctctgacaccatcgacaacgtcaaggccgagatccatgacaatgaaggaagtcccc

SEQ ID NO: 58859 - DNA, 151 bp, Glycine max
caaaaggttcaagcctaagttagccttgaagggaacttcaaacccctccaaaatggccaccaaaatccaatcaatgggcgtccgtttaaaaactcctgaactggaaaaacctggcgttaaccaacttaaacccccttcagcaaatccccct

SEQ ID NO: 58860 - DNA, 126 bp, Glycine max
tatttacatgataatgtcaccatatacacaaatggttttgtaactgatactaagaggaaaagtaaaaaacaaaaagtctggacattataattaaacaccttttttcacaaagttcttttttaactg

SEQ ID NO: 58861 - DNA, 222 bp, Glycine max
ggtagcaagtaagtctaaacacgaagctcgcaaattccctcaacactggagtcgctggaatattcattctgggactcatcttaactgactcagcatgattcaaaatggttgcattgtatcccaaaggtgtgcccctctgaattctaagttacacaatcatggcatagctaatacctttgcctttcgttgcccctcacaaatgcctctcaaagtttccctctc

SEQ ID NO: 58862 - DNA, 228 bp, Glycine max
ctagggtgcagcttcgagaacacgacatctggggactcatctcttacacctattctctcttcatcctgttctatctgtgacgagcatcatggcctcaagagcagtgttactgttggccaagtgtatgcatcctgacatgggtgtggacattccctcatcactcatcccttttttccttaaaggtcttgtacagggtgacgcttgacatgctcgtttttggaactcacc

SEQ ID NO: 58863 - DNA, 152 bp, Glycine max
acgcgtcagaacacgactcaacggtaacgtcgctacagcagcaaaaaaagggaattctggtaaggctgctatacaatcaccgtcgggatactgatgaggttattaacacagcgtaatttttctttacagtacatcgctaatgacatagttat

SEQ ID NO: 58864 - DNA, 110 bp, Glycine max
aggtgagctgaaagtgttactgaattttctagacatctggaaaaagttagaaaaaaagaaacaagtgatttggataagagtaaaacataagaaaaatcacacaagttgac

SEQ ID NO: 58865 - DNA, 166 bp, Glycine max
cgctcttaacgtgagatcgtgtgaagtttaagctaccttaagcaaaaggagaaagacacaccgaaacttagaactctctcttgaatacacccaaagcctgatataccaaactcttgtaatgtaactcttccttactatttatttaatgcaatttcagttctaaaaa

SEQ ID NO: 58866 - DNA, 317 bp, Glycine max
tctcattgtattgattgatatgcaaaagattcaaatcttacattaagcttaagggttgtttgggtaagcttcattagaagtatttctaattgatagagcctattctagagccgatacgtaattaacaactagcaagcattcctaatgagcatactaaccgactaatacaaccatcataactagtcgtatcgatcactatttattgttaaaattaacacacttatcggatgagaatgtacaactatttagaataatttatttagaacaggtcgataagcacagaatgtatcctctatctggtggcagacattaccata

SEQ ID NO: 58867 - DNA, 215 bp, Glycine max
ggtgctctgctcgtgcctctagggttatcatttctccatttccattttctctctcacttttcaagaatcgtaagctatgggaaagtcttacccaactgtgagtgctgattacaagaaggccgttgaaaaggcgaagaagaacctcaaaggcttcatcgctgaaaaaaaatgcgctcctcaaaggctccgtttggaatggaattcggctggaacct

SEQ ID NO: 58868 - DNA, 351 bp, Glycine max
tatgtgatgatgttttgtaaaaaaaaaaaaaaacaaaaaaatcaaaaaaaaaaacagaaataaaaaaaaaaaaaaaacaaaaaaaaaaaaaaaaaaaaaaaaaaacaaaaaaaaaaaaactttaaaaaaaaaaaaaaaaaaaaaaaaaaaaaagggggccccccaaggggtccaacctttctttcccggggatgcgacttcaaaacccctccaaaggggcccccaatttcaattcccggggcgtccttttaaaacctcttgacggggaaaacccgggggtttccccatttaaccccctttgaaaaaaacccccttttcccaagggggggttatacccaaggggcccccccc

SEQ ID NO: 58869 - DNA, 391 bp, Glycine max
gatacacaacacacatacaattactattaaactctctataatatttgctgaatccggtataattttctaataatggcgacagacgttcagcacgtcatagtttacagttaacattccacgaacgacaattataaccctccgctggcaccgttgatggagccatatgatctcagtaagtggtccatgtacagaaccgccatatctcactttatagcattactcccttctctttatatcaccgatgttgaccattagtggggataagagacattatgacactaaggtcttgtgtaatacagaatatgacggcgttggaatttagtgcatcatcttggaccttcagtcatatgatcgtcatccttgtttactggactgcctgaatcacgggatg

SEQ ID NO: 58870 - DNA, 294 bp, Glycine max
gggggttgggacacgagagagagtgggagtcacagagcaaagtaaagcagccgattggactttgagtccgtttgttccttggttttgttatcttcagatatctttcattctttcgtattatctgtcgtttcaccccacacagatatgttggcatccatttagacctcatcactacattatctctatagcatcagaacataggacacaccttcgtttcgtttcgttcccacggccgtctccatgtccgcctcctccgcgattgcttctttcaactcctaactctccacgtgcttg

SEQ ID NO: 58871 - DNA, 100 bp, Glycine max
gactgatacaggaacagctagcagagaaacaaagttacaagtaaagtaaattaagaagatcattaatggcttcccttgcaaccttagctgctgttcaacc

SEQ ID NO: 58872 - DNA, 165 bp, Glycine max
aagctattttgaagcatggctgagactttttattttaaaaactttaaaagttaaaattttgaaattataaaatataaaaaagtaaaaaaaaaatgggtcaaacagattacttttatgtagccgtgttagtcattcagagtcgtataccttatcaaaatcgtgtcg

SEQ ID NO: 58873 - DNA, 303 bp, Glycine max
gggtcacacgcagttgtattgtagaactgaacaagggtttctctttctctttctctgtctgcttcttcactttctctcgtttcaatcgaaaaaaatcatgggcagaaaattcttcgtcggtggcaactggaaatgcaatgggaccactgaggaggtgaagaagattgttactactttaaatgaagctaaagtccctggagaagatgttgtagaagttgttgtgagccctccttttgtgttccttccttttgtaaaaagtttgctgcgccctgatttccatgtctccggccaaaattgttgggt

SEQ ID NO: 58874 - DNA, 143 bp, Glycine max
ggttttaaagggaacatcattccaactttttcaagaaacgattgcgatgtacagtgttgcatgatctgtgcctgagttcctggtgaatcatatgaatcgtacatacgtatgtttgtgtacttttttctttttgtcagagaaga

SEQ ID NO: 58875 - DNA, 238 bp, Glycine max
aacagaacagaaaggggtagtccgtacgtctacgcactaacctcgcacattccctcagtactggcatcgctggaaaattcaatctgggactcaactgaactgatcactcatgattcaccatggatgcattggatctcaacggtgtgccactctgaattctaagtcacgcaactatggcatacctaaatactctgcctttcgttgcgcctcgctaatgactcccaaggttgccgtcact

SEQ ID NO: 58876 - DNA, 421 bp, Glycine max
ggacttcaattgcaatcagattagttcattctctttgcgcagttccctacctctcctttcaagatgcagatcttcgtcaagaccctcaccggaaagaccatcacccttgaggtggaaagctctgacaccatcgacaacgtcaaggccaagatccaggacaaggaacgaattctcccggatcagcaacgtctcatcttcgccggaaagcagctcgaggacggccgtaccctcgccgactacaacatccagaaggagtcaacccttcaccttgtccttcgtctccgtggtggcatgcagatcttcgtcaagactctcactggcaaaaccataaccctagaggtcgaaagctctgacaccattgacaacgtcaaggccaagatccaggacaaggagggaatccccccagaccagcaacgtctca

SEQ ID NO: 58877 - DNA, 200 bp, Glycine max
cagaatataggccctttccttcatacatccttccctttcacacagtacgcacaacttatctcaactatccgtagctcacatgccacttaatcacaacctcaactcgtaaagtttctcactttcatttctcgcacttcaccgtcgtcccccaccttacactgctcttgatgtcttggttatagctcatgatactacacagt

SEQ ID NO: 58878 - DNA, 394 bp, Glycine max
acgcgtccgacaactgatagatacagatgcaaggggcatacacaaggggttattccacttgttgcattgtacttaggcaagagtattaggcaacggagtcttctctaacatcaacgacacttgctcatttgctaaccaacaatttgcgtttctttgtcatcgcaaatggctgctagacatgtacacaccataagccaaaccgtatccgattcccttacgctgagcttagtcgtgccgcgaagaactaccccagggaaccacataatcctcgagtgtgcgcaaacttgcatactggaccaagtggtgctacagtggggtcaccacgcgatcacccatgttgctcagtgccagaatggtatcctgatcttgaagttaccattagcctcagcactgt

SEQ ID NO: 58879 - DNA, 187 bp, Glycine max
gatcatcactaggtgtttacatttgggattacctctcgtcatggtgggacaccctcataacttgcatcatccatcttgcgtcaatctgtgctttcctagtcttttctaatccagtgctgtgtactgataatgaggacagtcttttccatggaatcaacatctacacgcaaacacagagcccggtaac

SEQ ID NO: 58880 - DNA, 395 bp, Glycine max
gatcccgataacaccatcatcactttcagtcactgtcgcttccataccatgtcatggtactgttgtacatcaacgatagaatggtaacactgatcaaacacaccacactgtctcccactcccattgtgtacacctcactcaatctcgatgatcatggcatcatccatttcaagcacttgtgacaaacctcaattccctcaccctctctcctcctctttctcttcatctgcatcattaataagagatctgggcttccacataatgtttcagcagaagcccattagaaatgtagttgattggtgctcaaattcccacctagtgattcatttcccacaacagtcctacaacaaaactgaaattaacaaaaaaaccaataacttcaacggcggaaaggc

SEQ ID NO: 58881 - DNA, 173 bp, Glycine max
taccgctcccataagacgacagatgggggcatccagtttatccacgaactcactgtgacagccacttgtgccaaacctcaagtccctcacactcggctgctctacaggctccacgcctacatcagcgtgcatgcaacttcatatctcttctatgttgccacctaaattcaatt

SEQ ID NO: 58882 - DNA, 144 bp, Glycine max
ggaagtcgccgtttgttttcttttcgttcgcatcatctctctctctctcagaaagatgaaagtggtcgccgcgtaattgctcgccgtcctcggtggcaacaacatcccctccgccgatgtcctcaatgaaatccttggctccgt

SEQ ID NO: 58883 - DNA, 215 bp, Glycine max
gacactactaacatttctctcaaatctgtggtgctgcatttcaattgcctccgcttccacctcgcaaccatcagcagctctagaggatacacgcttagatatccgtgcatgccacgtcatagatcgactatgctgccccataaatgccattcactgggcgtcgcattaagacatcgagatggcgaatcagctggtgttacccctgatacacactt

SEQ ID NO: 58884 - DNA, 275 bp, Glycine max
ggatgataacaaaaacatcgacgacgagatcgaagagatcgagcttgagataaagcgccttaccacgcgcctcgacgcgctccgtctcgagaaggcgaagcgggggaagcgcgtggtgatgggcagagtcgtccccgcgaagttcatggagccgcgcccaagcgccgtcgtttcaagaaaacccgaagaaacgccgaagacaaaagttagggttagtagtagtagtaacaatgataataatgcgtggccgcgacggatgagtcttggaccgaatg

SEQ ID NO: 58885 - DNA, 160 bp, Glycine max
aaaaaacaacgaagggggaaatccaaatttgcgtccttccttggcatctgtgatctcttctcctcacactgagcagattaaggcaaccaccggacttgaacaagtacatggagacaaagctccagatcaagctgaatgcaaatcgcatggttgttggtac

SEQ ID NO: 58886 - DNA, 180 bp, Glycine max
tacggctgcaggtcacgacagaatggtaccgctgctaaaacacgacagtaaggggttcatgttttatgctgtggaaaaaatgaatacgttccttgctggggggttttggtagttttacaactttggacgcctttttacaactgttgggtttgatgttgttttaactcaaccttttttgtt

SEQ ID NO: 58887 - DNA, 319 bp, Glycine max
gataacacagactcacacaaagagttacaagagaaatcatcatgggatcatcaccaactatgtatgcgtagttacctattgttgcaacttccaacatctactcaagggtggtcatgtttaacatcaataacaatacttctaggtttgttgtacaggcatcagattagcctgcagcagctgcatccgcctgcgccacatccccatttgaagctgaagcttaatcacaaccacgacctattggcatcaccataggtgctaatgtgaagattcatatgaaagaatcatactggtacaaacgcaccggttcagtggttgctgt

SEQ ID NO: 58888 - DNA, 92 bp, Glycine max
agatatgatcgctcaagagttctccttagtaatgataatgttttttgtgttctctaaagctctcccttcgattgttttattaagattgttgc

SEQ ID NO: 58889 - DNA, 309 bp, Glycine max
acgcgtcaatccggacgtccgccgacgcctcaggggaatcctccgtgccgctccgagacacccacagattgtgcgcttatgcagtgaagaagcttggtcatcttaaggatattgtttcagcaggctgtctactctgctcaggcttccttgactgtgcttttcaattgcttgctcttctatggtgtgaccgggcccgttttactggccgtcgtttttgatcttcgtgtactgtgaaatcctgccgttgagcaccatattcaccgttctgtagatctcccttccagtttctggagtcagttccaataggcc

SEQ ID NO: 58890 - DNA, 103 bp, Glycine max
tgagtgcagctgagaattcatcactaatgcggagggtgattcccagtgattcagaagcttagtctgaggacgacgagaacgatatggaagatgaagaggattg

SEQ ID NO: 58891 - DNA, 88 bp, Glycine max
ggagagaagctggtgactgactttccaaatcactcctggtgaagaacactcagagtgcggtcgctctagaggatccaatcgtacctac

SEQ ID NO: 58892 - DNA, 73 bp, Glycine max
acgcgaccgacggctgctacaaaaggagagaaggggactgcacgggatagcaattcgttcgacttctctcgac

SEQ ID NO: 58893 - DNA, 300 bp, Glycine max
gactcaccacttcaaaacactcataacacaaagcacaaagcaaagctcatccttgagttaaaaaatggcagcagcttcttccatggctctctcatccccatccttggctggcaaggccgtgaagctgggcccatcagccccagaagtgggaagggtgagcatgaggaagaccgtcaccaagcaagtctcctcaggaagcccatggtacggcccagagcgaatcaagtacttgggcccattctctggcgagccaccgtcgtacctaaccggtgagttcccaggcgactacggctgggacac

SEQ ID NO: 58894 - DNA, 240 bp, Glycine max
acccacgcgtcagtccagatgacgacagaaggggtctcgatcatttcagaattgtgcaattatggtctctaaatcttttttattggcacatttactcgccatatttttacaatctagcgggtttgatctattgtttgccgattgtcaagtttttagaaacaattattgatatgacatcgtcgtactgtcttcatcggaggatgttaacatgacacgtagatcatcagtctgttttgagcc

SEQ ID NO: 58895 - DNA, 71 bp, Glycine max
tagaggattcaagcttacgttcgcgttcaatccaagtcataactcctccaaaatgtcacccaaattcaatt

SEQ ID NO: 58896 - DNA, 203 bp, Glycine max
ggcgaaacagagagtgatttcagtgagtgatcggtgttcacttgatctcatcataatcgtcagcgtcaattgaagaagatgccgatcagaaacatcgccgtcggaaggcctgaagaggcgactcaccccgacacgttgaaggcggctttggctgagttcatctcaaccttcatcttcgtgttcgccggctcaggctccggcat

SEQ ID NO: 58897 - DNA, 151 bp, Glycine max
tggttgttccatatgcctatcacacagtccactcacactctttgtgaaaaacgggagtttcttactctttctgataccttccacttatccgtgatttctacgtcatggctcatcatcactatcaccaggatttaattggtgagtccttgtt

SEQ ID NO: 58898 - DNA, 120 bp, Glycine max
cggggttttctcgtcagaagcctaggtagcctctttctgtcgccactgcaatcaacggcacggcccacagtaatgacaggagagagactgaatctcaacgcttaccctttggccgattcg

SEQ ID NO: 58899 - DNA, 165 bp, Glycine max
  unsure (1)..(165): unsure at all n locations
gcttctgaatcgtcttttacttctcagcagcttcggctagggttcaganacgaaaaaaggttccggttttccgttcccgattaaaacccaattggaaaaaaaaccttttaaggaggttaaaaaggaacccccaaagaataaaacagaaatccaattattccttta

SEQ ID NO: 58900 - DNA, 102 bp, Glycine max
ggagcatgttccctacacggattcatacactcccagaaaacatttttcattcgatttctcagcaccagtcagcaacaacaacagccctttccattccacaag

SEQ ID NO: 58901 - DNA, 129 bp, Glycine max
ggcggcactcgttttcgttctcatgctggtttatacatctttgctaacgaggtttacagcgctcaacctacgatgcagaacgacgacggacggatcacatgatctttacattcctatgaagtgctccgc

SEQ ID NO: 58902 - DNA, 157 bp, Glycine max
gcgtcaatcgggaggccgaaagccggcaaaagggtgagaggtgctcctagatgatcatccaggatactgtgatccattcaacagcaagcatagactcacgggaaggactatagttacatgcagctctatgagtgctgagggaacgtcaaagttgtcc

SEQ ID NO: 58903 - DNA, 214 bp, Glycine max
acgcgaccgtgcagctgcaggagaacacataggggaaactcacaactcagcatgactgctcacctggctcgattgctgttcgtgtttgcaccgcgaacgtggtttatgatatgcgctttgttgatcacgctttaagatgtagcgattacggcgaagattactatactgtggaagttgaagttgagttcatttaataggagtccatctgaggatt

SEQ ID NO: 58904 - DNA, 123 bp, Glycine max
cacgcaaccgtgatgccgcgacgccaccggatggggagactcgcgagtcagcaacactgcgcgctggcctctaattctgacgtgcttgtgcgcctctcacgccattttttatacactctttgt

SEQ ID NO: 58905 - DNA, 189 bp, Glycine max
gggaatctgaagaagatcacgtccgaggtcgatgaggtatcccggtctaatgggcgccgcgtagtgaaggataagctgtcccgttgcaccgaagacggataactttccgtcagcacagacgctcttctcgcattctccgaaagcggtatgatcttcatgcacgacgttttagcagctgctaacggggaa

SEQ ID NO: 58906 - DNA, 264 bp, Glycine max
gatctttcatctgtgacatacaacaggtacagagttttctgatgctatgcctctatctctccactactcttacgctaaatagactcaacattacctccattctctcaaaagcaaactcaattctctccagcaacatcagcatactctcagtccatgtgatgaccggactgtaccgatcagtacctaaatctcatagctggagtgagcagggaatcccttatggtgaattggtgtccattagtacttctaaccctgacgtcacac

SEQ ID NO: 58907 - DNA, 346 bp, Glycine max
cacgcaaccgtacagcagcgaaagggacactgaaggggaccttactagctattagctcaagatagaaatacttctaataccccgttgtcctagcgcttcactagtgtcatccaaaatagcatcaaaagtaccgacaatcagttacaaggaaagtcaagactctacagtgacattcgaatccttaaagtcaaagttgccgacgttcaggtcccgatcgctacattaggctgaagtcccaaatacgctgcaataccactacgttgacaagtcctcaaccattacacactgatcagcaccatggtcataatcaaaagacttccgatccctatgattatcatgatcatgt

SEQ ID NO: 58908 - DNA, 70 bp, Glycine max
attgatgtagtcactacaacatgttagtatttatctattaggtttctagttgacagcgttgatattaggg

SEQ ID NO: 58909 - DNA, 271 bp, Glycine max
attcacgggctgacgcacgcgtcaatacggatgcaaaaaaacaacaaaaggggagtctcatatctgactcacatcgtcatccattttgctcctttcaatcaataccaacaccttctttgctctcatgctcatctataccttcaacgtttcatgtctaactttaaccttcactgatttcgtgctccattctgtatgtaaccctcatgacaatggtcgtatacattagaacatgtctgacataaaaccatttattgtaaaaccgaacatccct

SEQ ID NO: 58910 - DNA, 247 bp, Glycine max
tcactatcttgattcttttgaatcatgtaaaaaaaaaaaaaaaaaaaaaaaaaaaaaaaaaaaaaaaaaaaaaaaaaaaaaaaaaaaaaaaaaaaaaaaaaaaaaaaaaaaaaaaaaaaaaaaaaaaaaaaaaaaaaaaaaaaaaaaaaaaaaaaaaaaaaaaaaaaaaaaaaaaaaaaaaaaaaaaaaaaaagaggggcaaaaaaaaaaaaaaaagttaaatacgaggtaaagaaaattaaaaact

SEQ ID NO: 58911 - DNA, 303 bp, Glycine max
cacgcgtccgcccacgcgtccgacagcagcgaaaggtccagatgcgggggaactaccacatgctaccgtcgatcaacaataatattttgcgacaaatcaggtgacgccgagtcaactcacgcattcatgcatcgattcaggcgttttgagctcatagaacagccacctttcttccactcctgccactctgatccttccttcgttctccatgactcaatctctctcgacctcgacctcttgccacttctcaaccacttcgacgctttctcaaatctgttgcacgcgccatcattctcttatcag

SEQ ID NO: 58912 - DNA, 120 bp, Glycine max
tacagttgcgagaaaacgaccgaatatggccgcagatcagcatcaccactttgggctgcaccacatgatgcagatttaagtcaccctgccagcaacctcttcacgcgtctagagcgtata

SEQ ID NO: 58913 - DNA, 111 bp, Glycine max
attcacgggccgaggcacgcgtccatacggacgtcagaagaggagagaggggggcatcgccggggagccaggccaatagtggcttcaatgcgtgcttcgtggtcacctcat

SEQ ID NO: 58914 - DNA, 72 bp, Glycine max
actcaatagtgagtcgtatgatctgtacggtggaatcttacgtacgcatggttgcgacgtcaaaactcttcc

SEQ ID NO: 58915 - DNA, 96 bp, Glycine max
gggaagcggctgctggtgaggataccttctgtggttcacgcacctctgccgtcttggctcttcaggggtgtctgcccgtgcctgtttggtgggcgt

SEQ ID NO: 58916 - DNA, 188 bp, Glycine max
acgcaaccgccaacgcgtccgtacagccgtcagcacacgactcagcgggtgcttcaagaccattgactgggggagtttgtcgtgtggtgttccagtgtcaatactggccgctctatacgatccttgcctacgtgcccttgcatgctccgttctctctcttctatagtctcagctaatttcaattcatt

SEQ ID NO: 58917 - DNA, 122 bp, Glycine max
ggaaagaaaaagcaagccaacgtctctcatgcaattatggaggactttgagagaggaccaaggtaccacgcatacgctgcgttgagggaaacaaagcttcgcatgaggcaaaaaaataaaaa

SEQ ID NO: 58918 - DNA, 394 bp, Glycine max
ggcagttcaattccaatatattccattctctctgtgtatttccctacctctcccttcaagatgcagatcttcgtcaagaccctcaccggcaagaccatcacccttgaggtggaaagctctgacaccatcgacaacgtcaaggccaagatccaggacaaggaaggaatccccccggaccagcaacgtctcattttcgccggaaagcaacttgaggacggccgtacccttgctgactacaacattcagaaggagagtactcttcacctcgtcctccgtctccgtggtggcatgcagatcttcgttaagacactcaccggcaagaccataaccctagaggttgaaagctccgacaccatcgattacgtcaaggccaagatcaagacaaggagggtat

SEQ ID NO: 58919 - DNA, 152 bp, Glycine max
gaattggggaaatgccacatcaaacgatctaaagacagaccattattcacatctcatcgggttcactggagtcatgcatcatcactgatctgtaagaaccatacaattcacactcacttcgtcacctcaaatcaactaagaacatatcccca

SEQ ID NO: 58920 - DNA, 348 bp, Glycine max
aacggttccgcttccaaaagaacacctaacggttccgctgccaaaagaccaccaaaagggtttcacgtcaaaatgataactgtccggtccttttaataatggaaatttacattatcacatccaatgatacatgtcgcaattaagattcacaaacggctgctctacaggatccaagcttacctgcccctccatacgatctcagctcacttccacattctcaccacatctcagctcatcgaccgtctcatcacaatttcattccctggacatccttttactacctcatcataggcaccatcctgcacattcccaattcactcgccgtcctactaatcaccatttccccac

SEQ ID NO: 58921 - DNA, 259 bp, Glycine max
aaaatacggttctggctccaaaacaccacctcacggttccggtcccaacagaccacagtaagggttccacctctaaataatcacagtccggtcgttttaaaacaggaaatttagtttgtcatttctacatgatcgatctcgcaattaagattgacaaactcccctctacatgatccaaccaaagctgcccctctatatgatcttctctcacttccatcattcttgcctactttttactatacatagtctcccctcaact

SEQ ID NO: 58922 - DNA, 91 bp, Glycine max
gtttactgtttttcatgtgcatctatttaattgacttgtaaggtgagggttgccccccacttatatgtgcacttatgcagtgatcttgcat

SEQ ID NO: 58923 - DNA, 320 bp, Glycine max
tcaggctgctacaacataactgaagggataccattcttggaaatttaatggccatttgagaaagacggggattcgtgaagataccagctttcattatcatgcattgcgacttaatgattgacgtacatgtcccacaagattcatctaacagacctgttctaaacacttcgtggctttcaagtccctagcgttctttatcatcattgtgctttgcaatatcgcctcatcacctgatagaggcctcttttagaggactggatcaatttcatgtcctcatagttgcacatccccaatggctcagcgtacacaccctatttcat

SEQ ID NO: 58924 - DNA, 114 bp, Glycine max
ccagaatttcaccagcccaaaaaaaacaaaaaaagaggcagcaccagacgatccaaacgatccaaatccacctacgcgtgcacgcgacctcaaaacgcttccacaacgacacca

SEQ ID NO: 58925 - DNA, 370 bp, Glycine max
gactcaccacttcaaaacactcataacacagagcacaaagcaaagctcatccttgagttaaaaaatggcagcagcttcttccatggctctctcatccccatccttggctggcaaggccgtgaagctgggcccatcagccccagaagtgggaagggtgagcatgaggaagaccgtcaccaagcaggtctcctcaggaagcccatggtacggcccagaccgagtcaagtacttgggcccattctctggcgagcccccgtcctacctaaccggtgagttcccaggcgactacggctgggacactgctgggctttccgcagacccagaaaccttcgccaagaaccgtgaactcgaagtgatccactccaggtgg

SEQ ID NO: 58926 - DNA, 370 bp, Glycine max
tgcattttgtggttccgacaccacagcaacagagctatctgtaatcgagagtgttttcaagctgagagaagcgcagcctagcgcaattgtggacgatgagatgaagaaaaccattgcaaaagcatggactgatgctagaactgggaaaactgctgaccctttaagtagctaccgttgagcgaccaaaagaggttcagatgcttagttcctgtttctagagaatgatttgctctatttaattacattatcttgttttaaagtgaatgtttggcctgtgttcatggtacttgtagaagattagatgtgcagttattgttaccaaagttatactttgatataatgatgcgattttcgtctgtggttgctcaaa

SEQ ID NO: 58927 - DNA, 327 bp, Glycine max
ggtgattgtttgttgttgtaactcgttcttcttcttttgttgttctgtgtttgtgtttgttttttctctcacctgaaaatgtcttgctgcggtggtaactgtggttgcggaagctcctgcaagtgcggcaacggctgcggaggctgcaagatgtacccagacttgagctacactgagtcaaccagcaccgagaccttggtcatgggagtggcacctgttaaggctcaatttgagggtgctgaaatgggtgtgcccgctgagaacgatggctgcaaatgtggaccaaactgctcctgcaacccctgcacttgcaagtgaggtgttggg

SEQ ID NO: 58928 - DNA, 401 bp, Glycine max
  unsure (1)..(401): unsure at all n locations
gcgtcagcccacacgtccgacaggctgcgaagaggacgacnagacgagggtattcatatcatgtccattgtcattctataacataataacaacaaacaaaacaccattcaaacaataagaacttggaccgtcgtggataacatcggagcttcacaagcattgacggatcgaatgaaggtgtcccagtcgcaacatgcattgaggtcactgcagcagcatgccaggcgcactataagatccaaccctcaggacacgtgcatgccatctgctacctctgctacagtctcacctacagtcaataagaggaccgtggagtacaacatgatgatcgggaaaatcctctgtttacgtaacataatctcacttgcatcacagtgccctttcgccaacttgcgtacaac

SEQ ID NO: 58929 - DNA, 197 bp, Glycine max
tacagtgacacaatccgtgagtttccgtaacattttgaaagctaaaaaaggagtaattacataagatgtatggttccgtaaccttacatgcgacgtcataactcttcaaaaataacacggacgctcaatacgatggaagcctacgtacacctgcatgccaggtcaaaactcttcgatactgtcacctaaactcaatt

SEQ ID NO: 58930 - DNA, 113 bp, Glycine max
tggggaaaatgtactactaccgtggcataaacaaaatgaaaatgtaggtgctgaaatgtttcttatcttggttacaataaagtgattttgctgattccaaaaaaaataaaaat

SEQ ID NO: 58931 - DNA, 255 bp, Glycine max
gacacaactaactaagaaagtcttccatagccccccaaaaatgaagagcaccatcttctttgctctctttctcttttgtgccttcaccacctcatacctaccttcagccatcgctgatttcgtgctcgataatgaaggtaaccctcttgaaaatggtggcacatattatatcttgtcagacataacagcatttggtggaataagagcagccccaaccggaaatgaaagactccctctcactgtggtgcaatctcg

SEQ ID NO: 58932 - DNA, 194 bp, Glycine max
  unsure (1)..(194): unsure at all n locations
gacctcaaaaaacaaaaatcaataccttagagaaaacaaaagcacagaatcgaaagaagagttcttttttgagagagattgggatggcttcgacgaagaagatcacactgaagagttcggacggcgaggccttcgaggtggaggaagcngtggcggtggagtcccagacgatcaagcacatgatcgaggacaac

SEQ ID NO: 58933 - DNA, 361 bp, Glycine max
gaagacagctgggagggaagaatagaatgggatctggaagtggaagacacactggatagttcctcacgtgaacggatgcatgaaggaagcatccgacgctcatgactcagctccgccactccatgcctgtccttggcaacgctctcgtcggcgtcagtatcgacctcttccgccaacaactctatactacgcactatgctttcgatactcagtcgatttctcacgtggcagccggggatcaccactaaacgtttggacggacgcactccagtccatcatcacctcctagtcttgctaccatattctcgcaggctttaatgtttacacttcacatcatgttcacatctttggcactcactat

SEQ ID NO: 58934 - DNA, 114 bp, Glycine max
gggtcgatcaatcggcgcgccagagtcaacaaaaggggatctccatctcagggtcgtatcatccacatttcatcaccagttcatacaccctgcatcgcgtgtacaaacacgtgg

SEQ ID NO: 58935 - DNA, 324 bp, Glycine max
ggttctagtgtatgtgattgttgtgactcgttcttcttcgtcgttatcttcttcttttgttgtttgtgtgtttgttttttctctcacctgaaaatgtcttgctgcggtggtaactgtggttgcggaagcgcctgcaagtgcggcaacggctgcggaggctgcaagatgtacccagacttgagctacaccgagtcaaccaccaccgagaccttggtcatgggagtggcaccagttaaggctcaattcgagagtgctgaaatgggtgttcccgctgagaacgatggctgcaaaatgtggagctaactgcacctgcaaaccccgcac

SEQ ID NO: 58936 - DNA, 338 bp, Glycine max
cgggtggcaaaagaacaacgaaggggaatgtctgagagtcgggtctatacgtgtcgggctgtgcggatcttcacttacactctccaaatcacacaccaaaccacgcagcgagagaaacctaaatgccgttctaagtgacactcaaatcgatcgactatggatgcggtgtattacgtgaatatattgggcatcggctctgtcgactgccttcaaattgtcttccctccgtcgatagtcactcgctcttgcaaagcacacgaagcactttggctgtggagactaaatcgctggcaaacttactcagattgggaacagattcaggggagatgaccagcctg

SEQ ID NO: 58937 - DNA, 279 bp, Glycine max
gacacaccgtttgttccactctcaactcaacttctgctacccagtctcttcttgcatgtcagatcactgttctctctatactcatgggcatggtcaacatctgaatcatgggatttgctagagttcacgctttggttgccatactcactctggcatatagacgatgtgtggctcgttaccggcatgttctcaacttttgcactctgaggattctcacgtgatccaggtgcacctgtcatcaccatgtcccgcgtgtccacgatgtcgcttttagcgatt

SEQ ID NO: 58938 - DNA, 321 bp, Glycine max
  unsure (1)..(321): unsure at all n locations
gactcaccacttcaaaacactcataacacaaagcacaaagcaaagctcatccttgagttaaaaaatggcagcagcttcttccatggctctctcatccccatccttggctggcaaggccgtgaagctgggcccatcagccccagaagtgggaagggtgagcatgaggaagaccgtcaccaagcaggtctcctcaggaagcccatggtacggcccagaccgagtcaagtacttgggcccattctctggcgagcccccgtcctacctaaccggtgagttcncaggcgactacggctgggacactgctgggctttccgcagaccc

SEQ ID NO: 58939 - DNA, 257 bp, Glycine max
agggatcaacatttgtctcacatctttcactttcagtcaacggttaatcccttttcaaaatttagcatcaacatttccaccgcaacgtaccccaaggtcaatataacggagtcttcaaataaccacctctcacatcctaccttccccttaatgaaatcggatcgcgatacctattctcaaggataaaaccggttctagccattacaccataactacaattcatcgaaaggacgcacatggacttgcttccaacctac

SEQ ID NO: 58940 - DNA, 196 bp, Glycine max
ggctgggtgtttgttttgttccttccaattgtcagatctgaatcaccggactcactcttcacactcactcacactgaatggcttccgaacgcgaccatcaccaacaccaccatcaccatcaagatcacgatcatcatcatcatgatcatgatcaccatcatcatcacgatggagacggagagacccactcacgggt

SEQ ID NO: 58941 - DNA, 84 bp, Glycine max
cccactcctccataacgatgcgatgggacgacaggaggtgacactcaacaggtaaaaggttggtacataacggcagccaaaaac

SEQ ID NO: 58942 - DNA, 361 bp, Glycine max
ggttctagtgtgtgattgtttgttgttgtaactcgttcttcttcttttgttgttctgtgtttgtgtttgttttttctctcacctgaaaatgtcttgctgcggtggtaactgtggttgcggaagctcctgcaagtgcggcaacggctgcggaggctgcaagatgtacccagacttgagctacactgagtcaaccaccaccgagaccttggtcatgggagtggcacctgttaaggctcaatttgagggtgctgaaatgggtgtgcccgctgagaacgatggctgcaaatgtggaccaaactgctcctgcaacccctgcacttgcaagtgaggtgttgggagagcaagcttcaagcagagatag

SEQ ID NO: 58943 - DNA, 54 bp, Glycine max
gagacctcaggtcaggcggggctacccgctgagtttaagcatatcaataagcgg

SEQ ID NO: 58944 - DNA, 384 bp, Glycine max
  unsure (1)..(384): unsure at all n locations
ggttctagtgtgtgattgtttgttgttgtaactcgttcttcttcttttgttgttctgtgtttgtgtttgttttttctctcacctgaaaatgtcttgctgcggtggtaactgtggttgcggaagctcctgcaagtgcggcaacggctgcggaggctgcaagatgtacccagacttgagctacactgagtcaaccaccaccgagaccttggtcatgggagtggcacctgttaaggctcaatttgagggtgctgaaatgggtgtgcccgctgagaacgatggctgcaaatgtggaccaaactgctcctgcaacccctgcacttgcaagtgangtgttgggagagcaagcttcaagcagagatagcccttagttangaataatgataa

SEQ ID NO: 58945 - DNA, 54 bp, Glycine max
agagtaagagaatttctatactccctttgttccagattgtatgacattttagag

SEQ ID NO: 58946 - DNA, 401 bp, Glycine max
agaagggcacaaaaacaagatttgtaacataaactgtcctttttattatgcttttacccccaaacaaaaaacacaaaatcacccttaaaaaaaaaaaaacaaaaaaaaaaaaaaaaaaaaaaaaaaaaaaaaaaaaaaaaaaaaaaaaaaaaaaaaaaaaaaaaaaaaaaaaaaaaaaaaaaaacaaaaaaaaaaaaaaaaaaaaaaaaaaaaaaaaaaaaaaaaaaaaaaaaaaaaaaaacggccccacaaaaaaataaccaaacttcaacaacatccctagaacgacaaaacccctcttagggacccaccaaataaacatccgcgggccctttttaaaaaacacccgtcaggaaaaaccccatgaacccccacacataacccccttacaaaaagccccc

SEQ ID NO: 58947 - DNA, 106 bp, Glycine max
attactattactgatcaatcaaaatatctatcaaaagtaaaaagcgaagagaagggaaaaactttaatttttttatggtaaaaaattcaattatacctgttatttc

SEQ ID NO: 58948 - DNA, 393 bp, Glycine max
ggacgttatatctgccagttgcctagatgacactctcacgtctcatctgcggcgctctactgtctatgatttccgtccactaatggtagtatagacctctacttctcgacagtatattcataatgactcagcaatctttctcattgtctctgttcatctaccttcagaatccttgtcaagttcgtctcattctgtctaaactcccatatattgtccctatcttgtcttcaaaagtgcagctgagctgcattggatatcgtgttcgcataaaaagttgtagtcataattgaacaattagacccggtatagaatagatcaagagcacaaaatctcgtgtcaatgatactgtgtttcatgccaacttcaagtgtcttgctgatcaaataaacctga

SEQ ID NO: 58949 - DNA, 298 bp, Glycine max
ggttctagtgtgtgattgtttgttgttgtaactcgttcttcttcttttgttgttctgtgtttgtgtttgttttttctctcacctgaaaatgtcttgctgcggtggtaactgtggttgcggaagctcctgcaagtgcggcaacggctgcggaggctgcaagatgtacccagacttgagctacactgagtcaaccaccgccgagaccttggtcatgggagtggcacctgttaaggctcaatttgagggtgctgaaatgggtgtgcccgctgagaacgatggctgcaaatgtggaccaaac

SEQ ID NO: 58950 - DNA, 99 bp, Glycine max
gatatatattggcttagctataatcactagaattattatatactaagtataaatatatagaaattctagtgattatagactatctttatataataatat

SEQ ID NO: 58951 - DNA, 81 bp, Glycine max
gccggtttcccgaacgatttgatggtttggaatgcatttcccaagcaacgagtcttcggttcgaaaccagcagagagagac

SEQ ID NO: 58952 - DNA, 104 bp, Glycine max
tgcccagtgatggaaaaataaacctattgaacggctacatgattatgttcgtaactggatctgcaccattctcattctctctctctctctctctctctcccccc

SEQ ID NO: 58953 - DNA, 338 bp, Glycine max
atacaacggtacagctggggggggaccactgtttgggatcgtgcgcaacttgtgaatattctgatctctccatgagatagctcgactcggaggtagttttctgtgattgctgaatttagttaaggatgttgaatctgagattcttgtgctacaagatgctcgtagatcaacgacgatgttaagcacgtaagcattgttgggacattgaggttctcacaggcaagtcatcagagactgtcatctgatgggtaagtgcagcataggttttgagacttacccatggttgtgacaatttgcgtggtcgatgcaattacatattgtcgcatcatgatcttgtt

SEQ ID NO: 58954 - DNA, 108 bp, Glycine max
gagggttacacgccgtcgtcactgtttttgtgtgtcgcttcttcgtatgtgcagctgcaatggtgaagggacgccaatgagaacgtgtcagactctacctgaggggta

SEQ ID NO: 58955 - DNA, 336 bp, Glycine max
agaaggggagcgaaacagagagtgatttcagtgagtgatcggtgttcacttgatctcatcataatcgtcagcgtcaattgaagaagatgccgatcagaaacatcgccgtcggaaggcctgaagaggcgactcaccccgacacgttgaaggcggctttggctgagttcatctcaaccttcatcttcgtgttcgccggctcaggctccggcatcgcctacaacaagctcaccgacaacggcgctgccacccctgccggcctcatctccgcctccatcgcccatgcattcgccctcttcgtcgccgtctccgtcggcgccaacatctccggcggccacg

SEQ ID NO: 58956 - DNA, 275 bp, Glycine max
gagggatcgcatttgtaatcacaataacagattttcaaactcatcaagcttcaaagcgaatcttattgagaaaatgtctggtcctggtaaaggtggcgacggtttaggaaatggaggtgtcaataagcataagaaggttcttcctgacattcatctagtgcatcacaaaacctgtcattcgtaggttagcgacaagatgttgcatgaaaaagatcagtggtttggtctacgaagcaaccagcagaattctgaccatactcctggggaacgtgaat

SEQ ID NO: 58957 - DNA, 193 bp, Glycine max
tgtagttcagcgtcatcctttcattagcataccattatatcagattccaaagttcattatccgcatgaatgacactaagaggatttctgtcattattggagaagggtggggctcttacgtacaatcattaccaactcattccgagtggcttccaagttgcgtatcttagaacataatcaaatggcgtgcgctc

SEQ ID NO: 58958 - DNA, 113 bp, Glycine max
aaaaggccaacggaaggtacggtagcggcaagaccattatacggactcacgaaatatataacgcgaagaaagcagaaaaaatcggcggctctagaggattcaagcgttcgctc

SEQ ID NO: 58959 - DNA, 301 bp, Glycine max
atctgctctatagcactcaaccacacgatctccttcccaatggtcaacattgcgcgatctaaatcagcgctaggtgcagtcgtcgtcataaatagccaagttcaagctaacgtaagctcctctttgtgcaagctctgtatgatccatttctggatccacgtgactctgacgtcacaacgctaccatgacacgctctcatgtcctcttcaatgtccgtcgatttcaattccacgaacctcgcatcaagtctagtgacacagtctaaccgtcgctcaaccaatccaccttgcgtcacaacaaa

SEQ ID NO: 58960 - DNA, 113 bp, Glycine max
gcacctaaggggagacatcttcggatttcagcatttctactctccaaacattcgaattcgcattctcatcactctttcgccattccatggcttcgggatataacacatcggcg

SEQ ID NO: 58961 - DNA, 286 bp, Glycine max
tacaacagcagagaaagggaaagttaatgggagcctctcatcttctgtcgaccagcttttgcttcgttgtgaacatggacatgaggacaacaggttgcatcctcatctagccctgcatccgagttcatgcgtcttagatggtgtcacaaactgcaggacaagtgtgttagtcattacagcgtcgggttcgaggaggatgtttaagagacacaacatctgcgccttggactgcaggaacgattggtgctctggtgtcatgtccaaaaggttcggacggatcggcctt

SEQ ID NO: 58962 - DNA, 55 bp, Glycine max
gaggtaccgctaccatgatacgatacaagggtacggccgaaaagaccacatacgg

SEQ ID NO: 58963 - DNA, 302 bp, Glycine max
  unsure (1)..(302): unsure at all n locations
gacggataactattcggtggcacaggcggtgatcactccatgggctcacctcgctttgactgagacacgacattcggtggtcatcgtaatggacacactggaggtcgacgcggacctgtcagtgattacggtgactcagttggcgctcctgctgattacacgacttcatttgggggttgtcctgnccgactgccttgattgagttctggatcatgtggatatcgcgcaccgactaattgatacattcggtcgtacatattggatatcagtgctctagtgggtgctgttggggcagtcatagg

SEQ ID NO: 58964 - DNA, 188 bp, Glycine max
ttggagaataaaaaaaaaaaaaaaaaaaaaaaaaaaaaaaaaaaaaaaaaaaaaaaaaaaaaatatttaaaaaaaccaaaaaaaaaaaaaaaataataaataaaaaagcggccgccctaaaggttccaaccttacttacccttgaatgcaacttcaaaccccttcaaaagtgtcacctaatttcaatt

SEQ ID NO: 58965 - DNA, 296 bp, Glycine max
tggatctcgcgggtcgacacaagactctatacagactcgtattaagcagagaaagggctacattttgggaggttttcgtatagagaattgttatcatttgctccgagtacataactaattacatccttcatagtcatgaatctgtgatggttttccaaaatcgccggttctgttacaattgggggaatcggtaacatgacaagaaagaataaggctgtccacagcagacgcaccaacaggttacaagctgcttcaaaccagcctggcaagtctaagggcgactgccatctcagcta

SEQ ID NO: 58966 - DNA, 203 bp, Glycine max
gccactacaaaaagacaacagaggggtacggctgcaaacaaaacgacaaaaagggagggtttttatcatcactacaaaaagttgctgcatcatcatacactcgacacctcacagccgctgtacactcggcccccctagaggttcaaccctactttcgttctgcatcccacccaagtccccttcaaactcttcacgcaatttaa

SEQ ID NO: 58967 - DNA, 93 bp, Glycine max
agtcgcaacttttcaacttctatctctttctcccttactatttcatgttctgcggcgcaaatccgatttatgatcactcatgttttttctcta

SEQ ID NO: 58968 - DNA, 154 bp, Glycine max
gaataaagaagaaaacaaaaaaaaggtaaagatgaaaagaaaaaaaaaaaagggaaagagataataaaaagcgggcgctccaaaggattcaagcttaagtacgcctgcatgcgaagtcaaagctcctccaaaagggcacccaaattcaattcaa

SEQ ID NO: 58969 - DNA, 256 bp, Glycine max
ggtttctgttccttcgtctgcaaccctagctttcagctgtttgcagtcaatgggtggtgaatctgatgtaccggaaaacaccctctcttgtgctaattgtggcaaacctgcgaagctgcagtactttcgctttatctgtgtctgtgtgtgtgttctagagcgtgcgcagaagtaacaggagctgtgcccccactttgtctttttttatgatgtaggttgttgtggagtgtgggatgctatttttgcatttgatatg

SEQ ID NO: 58970 - DNA, 60 bp, Glycine max
aacgagacctcaggtcaggcggggctacccgctgagtttaagcatatcaataagcggagg

SEQ ID NO: 58971 - DNA, 159 bp, Glycine max
gacatctttcactcgttctcagatatttcaagtcaattttctcccctcataaagctcacccatcactggctctcgttcaggcacacatcaatcccgcggctatcaatcccgtagaaaaggtcccatcggacactcaacctcttgcagacaaaaagctat

SEQ ID NO: 58972 - DNA, 53 bp, Glycine max
gacagctcttggctttagcaaattccaattcgcagatctcacttagacaccct

SEQ ID NO: 58973 - DNA, 130 bp, Glycine max
gggagttacacattattctctctctcactcacacacactcagagtgcaagctagagagagagagatggacgatctcgaggatgaagagaacggagccgaggaggtgttggggtcaagcttgaccatggag

SEQ ID NO: 58974 - DNA, 313 bp, Glycine max
gttcgcggctctcttcaaatacgcgacacccgaactcgctgactgaaacgcgcacgcataagggttttgccatgatggcactgtccaaactcgtccgatcggcaatctctctcatctccagatccacgttcctcacctccgagcgatccagtctctaccgattcttcattgaccattccatctccgtcgcctccagaaattacaccaacatgacggggcacaatgacttcacggttaaggtcgcactggctttgtttggacgttcaggatactatgcctgtgcattgtacaatgcatctgctatagctaatgc

SEQ ID NO: 58975 - DNA, 155 bp, Glycine max
caggtaaccactgatttacgtaggtcatttatcaaccccccccccaaaagggacgctcaagaggatccaagcttacggacgctcgaaaggatcgacgcttacctacgcgtgcatgagacatcataactccactagactgtcacctaaattcactt

SEQ ID NO: 58976 - DNA, 398 bp, Glycine max
gacaccccatctatacacgactcattctcactacacacgctcaacacattacttcctctttcgtgccctcaaattgagatggcctgtagggtcgatgaaaggatctcactgcgcaaccaacatcacattgtccgactacgtacctgctcaagctcatcctgcagtgtctctcttgacataagtagcgtatcacgcctacacattcacttcctcgcaatgggcattgacagtatacattactggcagctctttgctaccatatcacagttcatctagcctaaccaaccatgtcttgatacaacatggatgttccaaatggcacggtttgtgcatgaacgtttaaggcgagggtcacatgcaagaagagaggtgccactctcgtgtctagtttagacgtc

SEQ ID NO: 58977 - DNA, 102 bp, Glycine max
gagacacgccactcaattatttctgtccatttcttcttcccatattgttctcgtgtgttgtgtgtgtcagtgttttggggtgtgtgtgtgagtgagtgagat

SEQ ID NO: 58978 - DNA, 264 bp, Glycine max
gattctatatttcacgttttcacactcttatacatcattctcaacacattcacaacacaatcattattgccattctatctggtcgtggaaagggtggaaagggtttgcggacgcgcaagtaggatccaagcatacgtacgctcttatgcaacgtatcaacggctaccatagtgtcagctaatctcaagtcactgaccgtcggtttagtgcatcggatcagtgaattgcttgacgatgcccaccttagacttcttgcaatatacc

SEQ ID NO: 58979 - DNA, 67 bp, Glycine max
acgagctaagacgacagaaggggagacctcaggtcaggcggggctacccgctgagtttaagcatatc

SEQ ID NO: 58980 - DNA, 240 bp, Glycine max
cccacgcgtacgaccgctgctacgaagacacatcaggggacatctcagttcagatgtcacacaaccagagacagagtattcatacatattagcagtctcgtactctcgcatggagatttcggcgtctcaaattgtctctgtgtagctagctaggatttcgatgatattcagtttgttgagcgaacgagtttggatggggatcataatatgcagttcatggtgtacaccatttcgggtcct

SEQ ID NO: 58981 - DNA, 117 bp, Glycine max
ctctgaggatgatgagaaaatataactttcattcttccgagtttcccatgaggaaagtacatggagacctcaggtcaggcggggctacccgctgagtttaagcatatcaataagcgg

SEQ ID NO: 58982 - DNA, 62 bp, Glycine max
caaaaaaccacaaaaagggaagaaaaattccaaaaaaaggctccaaaatttggcaagttaac

SEQ ID NO: 58983 - DNA, 84 bp, Glycine max
ggattgattccctcattcttcatccatagacatggccaccgtcacttctgcagccgttgctattccctcattcactggcctcaa

SEQ ID NO: 58984 - DNA, 138 bp, Glycine max
  unsure (1)..(138): unsure at all n locations
aaacctaaccggnaggagtatgcaagatcttaaaaatcacaaaccggcagtcctaaaggttcaaacctaacttatccttgaatgcaagttcaaaccccttcaatatggtcaccaaatttcatttcattggccttcgtt

SEQ ID NO: 58985 - DNA, 58 bp, Glycine max
ataagctgtaagaagaggagagaaaggtaaatagatagtaaggaacattaactcataa

SEQ ID NO: 58986 - DNA, 372 bp, Glycine max
gactcaccacttcaaaacactcataacacaaagcacaaagcaaagctcatccttgagttaaaaaatggcagcagcttcttccatggctctctcatccccatccttggctggcaaggccgtgaagctgggcccatcagccccagaagtgggaagggtgagcatgaggaagaccgtcaccaagcaggtctcctcaggaagcccatggtacggcccagaccgagtcaagtacttgggcccattctctggcgagcccccgtcctacctaaccggtgagttcccaggcgactacggctgggacactgctgggctttccgcagacccagaaaccttcgccaagaaccgtgaactcgaagtgatccactccaggtgggc

SEQ ID NO: 58987 - DNA, 166 bp, Glycine max
gggagggcgtgggcgagggaatcaagcagagcttgtactactatttatcttcatcctcatttttgtcgtcgtcgttcttcctttttccgttgttcatctggttcgtctcgcagggggagggcgggagtcgatcttgcgcgcttcgaggcttttcgaattgcgttca

SEQ ID NO: 58988 - DNA, 326 bp, Glycine max
taatacaacattttaacatgtgttggagttcagctccaaaactgatacacatttgtggatccatgatcgatctctcaaagcattgttgtccaaaaaagagagaaatgttttgaatgaagtgttattttcagccctgaggagggtttagaaactgaggcagctttttcagacacagcaaaaacaaaattgtaacagagggctttggcatttaattttgtggcagagtgtggcacacgagagggcatggcatcttcatatatcaaattacttttggagacagtgaaactaccataatgcaaaagccaaaagcagacaatttttttttc

SEQ ID NO: 58989 - DNA, 177 bp, Glycine max
tgccaaaaaaccaccaaaaggggaagctacgttcagcatccccataattgagaaagatgagcatgaagaaaacagtcaccaaacgaagtcccctcaagacacactatgatctgacaaaaccgatctccagtacttgcagccaagtctctgacgacccttttgtcctactctaatgcg

SEQ ID NO: 58990 - DNA, 251 bp, Glycine max
ggttcaaattcgaatcaagcgcttcgcctatgcttttgcctactgttcacactgtcactaccactgttcaagttctaactaaacacttcggcgcagtctgtggttctgcacatgatgtccctggcagtgatgggtccgaacgatgtcctgatgaccaaatccggtgcaattcgcatcatcatcatgctcgctagtggtccccgtgatatcatccttaccaaactcggtcacactcgcatgatcgagatgca

SEQ ID NO: 58991 - DNA, 386 bp, Glycine max
gagcgaaacagagagtgatttcagtgagtgatcggtgttcacttgatctcatcataatcgtcagcgtcaattgaagaagatgccgatcagaaacatcgccgtcggaaggcctgaagaggcgactcaccccgacacgttgaaggcggctttggctgagttcatctcaaccttcatcttcgtgttcgccggctcaggctccggcatcgcctacaacaagctcaccgacaacggcgctgccacccctgccggcctcatctccgcctccatcgcccatgcattcgccctcttcgtcgccgtctccgtcggcgccaacatccccggcggccacgtcaaccccgccgtcaccttcggcgccttcgtcggcggcaacatcaccttcctccgcg

SEQ ID NO: 58992 - DNA, 383 bp, Glycine max
cttcccaggcctacgaacgcgtccgacaggaggacagaaggggatggctgctaccatcatcacatgcaagctctcactgcttttaagccttctctcagtttcactattgctgggtgtgagttcatcagatacccttcagaatgtaggggcaattcccccaacatgcaagcgcatagagtgtcccagctatgatgtcattcactttggcaacggctacgaaatccgtcgctataattcacccgtttggatttcgaacagccccattctagacatttctctggttgaagccacaagaaccggcttcaggaggctatttgattatattcaaggtaagaataactacaagcagaaaattgagatgacagcgcctgtgatcagtgaag

SEQ ID NO: 58993 - DNA, 369 bp, Glycine max
ggttctagtgtgtgattgtttgttgttgtaactcgttcttcttcttttgttgttctgtggttgtgtttgttttttctctcacctgaaaatgtcttgctgcggtggtaactgtggttgcggaagctcctgcaagtgcggcaacggctgcggaggctgcaagatgtacccagacttgagctacactgagtcaaccaccaccgagaccttggtcatgggagtggcacctgttaaggctcaatttgagggtgctgaaatgggtgtgcccgctgagaacgatggctgcaaatgtggaccaaactgctcctgcaacccctgcacttgcaagtgaggtgttgggagagcatgcttcaagcagagatagcccttaat

SEQ ID NO: 58994 - DNA, 53 bp, Glycine max
gagacctcaggtcaagcggggctacccgctgagtttaagcatatcaataagcg

SEQ ID NO: 58995 - DNA, 225 bp, Glycine max
gcgcgctagaattccttataaataacagggttatatgcttatgcgttggggaaacatgacaatgagtgttcttggggatagtaaaaatgtaaaatgggttgggccaatccaatcactcaatttaatccaccatttgttcggtgtgtgcctaaagaagtcaactattttatctgtattatctgcattatccattttaactttattatcaattgaggtcttttttac

SEQ ID NO: 58996 - DNA, 387 bp, Glycine max
gtccttctccttcctcctcgtcttctctcttctccttcctctcaagtattgcaacctaaaagaatcactttctttaccacagcctttttcacacccatgacatttcctctttgccaccgcattcccttccccaaccttgcctgggtttgtatcccagacggaagttctgaaccaaatgcggtttcttggtcttttttgccatctggttatgggaaaaatgggtttgtggaggaggtatttttggtgtttaatgtgatttgcttgttgtgttgttaagtgcaatgagtttacctcccccaatacgcttacgacatgttcaatgaagaagggggatttgaacttacgatggctgtggttagaaggttcgagtatggagaatttgttgtg

SEQ ID NO: 58997 - DNA, 330 bp, Glycine max
actaataaccaaagtgaagctaatgctaaaattaactcacaaatcaagctttgtcattaaaaaatcacctaaaaaccattttaaggtccaacgccttgaatgatcctctttgcttttatttggttaaacgtggacttttgaaagcctatagccaacgcataactttgtcactactttcaagaaaccaagatatcattaatggtccaatgccttaatgttttctcttctttcaaaaagaatcaaaagatcatttaaatggtccaaagccttaaaacgaccttttttggtcataacatatcttgcaaaaaagataaaaacacttaacaaacg

SEQ ID NO: 58998 - DNA, 53 bp, Glycine max
gagacctcatgtcaggcggggctacccgctgagtttaagcatatcaataagcg

SEQ ID NO: 58999 - DNA, 243 bp, Glycine max
aatcatgtgcactcaattaggctctctcgcgctggaacgtcgaccattcatgaaggcacaaggctcttttccgatctgcgcagcaaggcctccccttggaaaatcaccacgcggttcaatcgactatcgagcaccgcccaaacaccttagtatgaacgttttcatctaaactcacagtggctctcaattcctggttgtgctgaatccgtcggaaactccttctgcatcgacaataccaacata

SEQ ID NO: 59000 - DNA, 318 bp, Glycine max
gagcgaaacagagagtgatttcagtgagtgatcggtgttcacttgatctcatcataatcgtcagcgtcaattgaagaagatgccgatcagaaacatcgccgtcggaaggcctgaagaggcgactcaccccgacacgttgaaggcggctttggctgagttcatctcaaccttcatcttcgtgttcgccggctcaggctccggcatcgcctacaacaagctcaccgacaacggcgctgccacccctgccggcctcatctccgcctccatcgcccatgcattcgccctcttcgtcgccgtctccgtcggcgccaacatctc

SEQ ID NO: 59001 - DNA, 333 bp, Glycine max
  unsure (1)..(333): unsure at all n locations
atcatcgccagtgacaaaattgcatgcagaaggtataggaacagtttgcagcaggttatacattggaacagccaagaacataccaccatcagagcttattgatacaactggtgctggagatgcatttattggagccgttctctatgctatctgtgccaacttcgagccagagaaaatgctgtgctttgctgctactgtggcagcttccaagtgcagagctcttggagcaagaagtggtctcccttaccgcatagattcatgcttggcatccttcatgcagtagcaatccttactancactgaagtgaaccaaatgggttagaataaatttttt

SEQ ID NO: 59002 - DNA, 301 bp, Glycine max
gagcgaaacagagagtgatttcagtgagtgatcggtgttcacttgatctcatcataatcgtcagcgtcaattgaagaagatgccgatcagaaacatcgccgtcggaaggcctgaagaggcgactcaccccgacacgttgaaggcggctttggctgagttcatctcaaccttcatcttcgtgttcgccggctcaggctccggcatcgcctacaacaagctcaccgacaacggcgctgccacccctgccggcctcatctccgcctccatcgcccatgcattcgccctcttcgtcgccgtctcc

SEQ ID NO: 59003 - DNA, 304 bp, Glycine max
gagcgaaacagagagtgatttcagtgagtgatcggtgttcacttgatctcatcataatcgtcagcgtcaattgaagaagatgccgatcagaaacatcgccgtcggaaggcctgaagaggcgactcaccccgacacgttgaaggcggctttggctgagttcatctcaaccttcatcttcgtgttcgccggctcaggctccggcatcgcctacaacaagctcaccgacaacggcgctgccacccctgccggcctcatctccgcctccatcgcccatgcattcgccctcttcgtcgccgtctccgtc

SEQ ID NO: 59004 - DNA, 304 bp, Glycine max
agcgaaacagagagtgatttcagtgagtgatcggtgttcacttgatctcatcataatcgtcagcgtcaattgaagaagatgccgatcagaaacatcgccgtcggaaggcctgaagaggcgactcaccccgacacgttgaaggcggctttggctgagttcatctcaaccttcatcttcgtgttcgccggctcaggctccggcatcgcctacaacaagctcaccgacaacggcgctgccacccctgccggcctcatctccgcctccatcgcccatgcattcgccctcttcgtcgccgtctccgtcg

SEQ ID NO: 59005 - DNA, 262 bp, Glycine max
ggatgaccctcaaccaccctaagggaccttcttccaaattcccaatttcatctgccgttcgatttcagactcttcattcgggatttggcacaacgagatcatggctcgcattcagtcgatgcgtgctcgttcggctgttctcgtgcgtccagtgatcagttccgtgtcagtcgatttaagcttgcatgacaggtgaaggcccggatcttgcagagctctcagccatgggtcaagacatacttaccacagcaagtggaagatg

SEQ ID NO: 59006 - DNA, 142 bp, Glycine max
ggctgtgagtgagacaccgatagatagatagcgcggcataacctaaacctatctttcttctctccctgtgtgtgcgcgtcaacggcaaacagaaggcaccatggtcactgccaggactgtgaaggatgtttcacctcatgag

SEQ ID NO: 59007 - DNA, 293 bp, Glycine max
gacaactgagaaaggcaagaagcagccgtgtgggtcacctcattggactgacttcaccgcagaaatgggacggaactgcacatccgcaattcactctctcccgataacgccacagcacagtttctttgtaattcacagtacaatcaaatcgcttgtccatctaaacatgggagaatatgcttcgagaaccaatcttagctactgtccagattatcgcattgacgaggactccatagatgacatgcctttaacaagtgaccccgaatgctatgacgatgatcgccatcttaaac

SEQ ID NO: 59008 - DNA, 152 bp, Glycine max
  unsure (1)..(152): unsure at all n locations
gattgttgttgctattatcatccgcagctgcttttattcgcaccgcaaacagtgggccatggccgtcggaaagaacaagcgcatctccaaggggaanaagggtggcaagaagaaggcagctgatccctttgccaagaaggattgggatgaca

SEQ ID NO: 59009 - DNA, 71 bp, Glycine max
gactctttatttctcgttttctctctctacactcctttcagcacagcacaacacaacacaaaaccctttcc

SEQ ID NO: 59010 - DNA, 260 bp, Glycine max
ttccgggcctacacacgcgtcaaaccggtcgacagaaagggacttacgggtaaatgtttccgtcactcttcgtctcttaccgactactgtacacgctctccctatacgatacaatactacatacgtgtacagtctacgttatcatcactcaagtgggtctcgttgcgtcttctcctggctctccgttctctattgtcttcccagttttattcacttgctcgccatttccaacgctcgccagttgcacatctctcattgaa

SEQ ID NO: 59011 - DNA, 146 bp, Glycine max
gacgtgaagttgaatccttgctgatgcccatcatgggaactacttttcctcctcactctcgctcgggaagcgtcaacatcaaatcttcagccgcaagaattctcttgggtccctcgccgcaaaccaggtcaggttctctcttttgg

SEQ ID NO: 59012 - DNA, 210 bp, Glycine max
ttgagattccaatacactcacattagggataacgatagcatcatcttactaatctatttctctcactctaatccactttcaactcgctcttgtctttcttatggccactctaaatgctccaaacttatatttccatacctatctgatcaattatcgtctatagtgttagttacgatcgactaattgactgtctttgtacaaggtttgatc

SEQ ID NO: 59013 - DNA, 121 bp, Glycine max
attactattactgatcaatcaaaatatctatcaaaagtaaaaagcgaagagaagggaaaaactttaatttttttatggtaaaaaattcaattatacctgttatttcacaaaaaaaaagaaa

SEQ ID NO: 59014 - DNA, 238 bp, Glycine max
gatttcacggtctcattactcatccctgtaattcaaggttggaaatccagacatcaaactgacattaggatggcctcagtacacacctattggaccattgcctccgtacatcacctccgtgcctctgctctcgttcatctcgccatgtcttagtcacaccccgaagatgcaatgtatgattcagacaccgcaaatgtaatcgacgctgctgatgaatcagttgataacttcagtgatg

SEQ ID NO: 59015 - DNA, 123 bp, Glycine max
tacctattttttatgctctagtttctaacttaaatttaaaagtaactttttaagtaaaaaataagttgggtcaaacatacccttaaagcaagcacctggccatattaaattagactgtattag

SEQ ID NO: 59016 - DNA, 95 bp, Glycine max
caaaaaaaaaaaaaaaaaaaaaaaaaaaaaaacgggcgccccaaaagattcaaacctaagtaaccctgcaagcgaagtcaaaacccctccaaaag

SEQ ID NO: 59017 - DNA, 369 bp, Glycine max
  unsure (1)..(369): unsure at all n locations
ggttctagtgtgtgattgtttgttgttgtaactcgttcttcttcttttgttgttctgtgtttgtgtttgttttttctctcacctgaaaatgtcttgctgcggtggtaactgtggttgcggaagctcctgcaagtgcggcaacggctgcggaggctgcaagatgtacccagacttgagctacactgagtcaaccaccaccgagaccttggtcatgggagtggcacctgttaaggctcaatttgagggtgctgaaatgggtgtgcccgctgagaacgatggctgcaaatgtggaccanactgctcctgcaacccctgcacttgcaagtgangtgttgggagagcaagcttcaagcagagatagcccttaat

SEQ ID NO: 59018 - DNA, 405 bp, Glycine max
gacttctcttcacacctttgttcactcttcttctcttgcggctagggttttagcgcagcttcttctagatttaaggaagatgggtaaggaaaaggttcacatcagtattgtggtcattggccatgtcgactctgggaaatcgactaccactggtcacctgatttacaagcttggaggcattgacaagcgtgttattgagaggtttgagaaggaagctgctgagatgaacaagaggtctttcaagtatgcctgggtgctggacaaacttaaggctgagcgtgaaagaggaatcaccattgatattgctttgtggaagtttgaaacaacaaagtagtagtgcacagttattgatgcgcctggacatagggatttcagtaagaatatgattactgggacatcgcaagc

SEQ ID NO: 59019 - DNA, 99 bp, Glycine max
gaaggacacaaaaaccagaacgtagagtcacaccaccacagcagagcacagcaaccctcaaatccctttcctttttcccccctgatttaacagaagaaa

SEQ ID NO: 59020 - DNA, 62 bp, Glycine max
atgtgaaaaaacttttttgttagtaatcatgcttcttcaacaatgtctccaatttgtttctc

SEQ ID NO: 59021 - DNA, 345 bp, Glycine max
gattcacacaactaactaagaaagtcttccatagccccccaaaaatgaagagcaccatcttctttgctctctttctcttttgtgccttcaccacctcatacctaccttcagccatcgctgatttcgtgctcgataatgaaggtaaccctcttgaaaatggtggcacatattatatcttgtcagacataacagcatttggtggaataagagcagccccaacgggaaatgaaagatgccctctcactgtggtgcaatctcgcaatgagctcgacaaagggattggaacaatcatctcgtccccatatcgaatccgttttatcgccgaaggccatcctttgagcctta

SEQ ID NO: 59022 - DNA, 317 bp, Glycine max
aagcacaaatcataaaatagtagcatagaattgaaaagggaaaaattacttcaaaaccccatcttgaattcaacaattgtaaaactaaatgacaaacataaatttcaaattacaagttttgactctcagatttcatttcccctaataagtccaatgtacattcccattcaaacaactaaaacggcagaaatgactctggtctaaggtttaccaaatcttactagacattgaaagcctaatcaacagccacaattactccgaacctactttattctaaagtaaaatgtacacttgaaaccaaaattgtagtcattccc

SEQ ID NO: 59023 - DNA, 355 bp, Glycine max
ggcgaaacagagagtgatttcagtgagtgatcggtgttcacttgatctcatcataatcgtcagcgtcaattgaagaagatgccgatcagaaacatcgccgtcggaaggcctgaagaggcgactcaccccgacacgttgaaggcggctttggctgagttcatctcaaccttcatcttcgtgttcgccggctcaggctccggcatcgcctacaacaagctcaccgacaacggcgctgccacccctgccggcctcatctccgcctccatcgcccatgcattcgccctcttcgtcgccgtctccgtcggcgccaacatctccggcggccacgtcaaccccgccgtcaacttcggcgcct

SEQ ID NO: 59024 - DNA, 353 bp, Glycine max
ggttctagtgtatgtgattgttgtgactcgttcttcttcgtcgttatcttcttcttttgttgtttgtgtgtttgttttttctctcacctgaaaatgtcttgctgcggtggtaactgtggttgcggaagcgcctgcaagtgcggcaacggctgcggaggctgcaagatgtacccagacttgagctacaccgagtcaaccaccaccgagaccttggtcatgggagtggcaccagttaaggctcaattcgagagtgctgaaatgggtgttcccgctgagaacgatggctgcaaatgtggagctaactgcacctgcaacccctgcacttgcaagtgaggtgttggagagctaaagct

SEQ ID NO: 59025 - DNA, 63 bp, Glycine max
ggggccttcactctgaaccaaataccatagtcttctctttgtccgtgacaaaacagttcccac

SEQ ID NO: 59026 - DNA, 359 bp, Glycine max
ggttctagtgtgtgattgtttgttgttgtaactcgttcttcttcttttgttgttctgtgtttgtgtttgttttttctctcacctgaaaatgtcttgctgcggtggtaactgtggttgcggaagctcctgcaagtgcggcaacggctgcggaggctgcaagatgtacccagacttgagctacactgagtcaaccaccaccgagaccttggtcatgggagtggcacctgttaaggctcaatttgagggtgctgaaatgggtgtgcccgctgagaacgatggctgcaaatgtggaccaaactgctcctgcaacccctgcacttgcaagtgaggtgttgggagagcaagcttcaagcagagat

SEQ ID NO: 59027 - DNA, 55 bp, Glycine max
gttccggttgccaaaaaacaacaaaagggtacggctgcaaaaaaacgacataatg

SEQ ID NO: 59028 - DNA, 337 bp, Glycine max
ggattcgtaaagattttttttttcttttactcacagtcatcccgcaatccccaaatcgcccctcctctcgtcgaaacccgaccccatctccaaattcggctccggcatcgtaccatttctctcactacttcggggattcgctccttcttccgtccatggctctcccagacactctcactagcactcccaccagttctatggatgaaagggaatccttgaagaatgacactccaatttgcagcaatgcttgtaaggatgtgacaaaggagaaaaccttctatcttcaaccagtgtcacctttttcttctggtgtaggtttgccatatggcactgaagg

SEQ ID NO: 59029 - DNA, 345 bp, Glycine max
acgggtgagacaggagcaaaaaaagggatccacgtgcgtttagattacggttcgacactaaactgtcactggttatactgcctccacttcactgcctttctaaacttttttttcgaacccaattagggatactgtctgaatggctcctgccccatcaacactgtcggccatagtggggattttctcaacacagactgatggtgatgcgcagacttactgaacatgctccattgctctcaacattacggtagactgacctgtcattagggatcataaggtttgtgactcatgcagtgcatctcacaggggtgagtttcaaagccttccaagatgtgtagaatggtt

SEQ ID NO: 59030 - DNA, 111 bp, Glycine max
  unsure (1)..(111): unsure at all n locations
cagaanagaagcaaaaaaaacaaaaaaaaagcgggcgccccagaaggttcaagcctaagttacccttcaagccaagttcaaactcttccaaaagggcacctaaattcaatt

SEQ ID NO: 59031 - DNA, 282 bp, Glycine max
gagtaacgtttgtctcaataaaccccagtgtaggccgcctggatctattgcctaccatcaacatgtggcgcctagcgagcaagtcagcacttaaccgagtctgatcgaattgacatcggcttagcgcaaccatggacatgatgtctgtctatatctgactgtcagtcaatggttcaacaataaacgtttcagactccccgcttatcccattactaattgtgcgcttaccgctatgcctgagcttacctaagtcacagtttttcatcatggttttctgatttg

SEQ ID NO: 59032 - DNA, 248 bp, Glycine max
ggaagacgaagattgcattaatacaggctacgtgacatgtaggccatgcaggatgtcaccatttctataccacccgtgatggtcgccacttaacacttctgacatggtccgacgtgatataattttgccagccatgtttcctgttattcccgtcaccatgtgcccgaaatagcatcgttatgaaatggtcgttcgacactcattcacttttgatcccaccccctggatctgatgttcgaatccggaat

SEQ ID NO: 59033 - DNA, 309 bp, Glycine max
gtcaagtcataagtgtgtgtataatataactgataactggtgctgtgtgaatgacatatttcaatgttgaacaattccttcttgagttcttctgaaaaaaaaaaaaaaaaaaaaaaaaaaaaaaataaaaaaaaaaaaaaaaataaaaaaaaaaagcataaaaattcaatagaaaaaaacataagcacaataaaaaaaaaaggggggcgcccaaaagtttaaaatttaaattgggtgagaaggaaatttaaaaccttttaaaaggggccacaaaattcaaataaaggggacttcttaaaaaacctttta

SEQ ID NO: 59034 - DNA, 121 bp, Glycine max
agatgttgggaaaaaaaaaaaaaaaaaaaaaaaaaaaaaagcggccccacaagatgatccaagcttacgtcctcgtgcatacgacatcacacctcttcaatattgtcacctatcttcacat

SEQ ID NO: 59035 - DNA, 164 bp, Glycine max
ggaaacaagctgctgaagatatgcgcagaatatgataacatgtcaccaataatagatttgaatatctgtaatctgacaaatttccctaaatactatgaatcaatttctctgaggttgtgtccgcggattttatgtcaatggttgctgatctatatttgtgtggc

SEQ ID NO: 59036 - DNA, 371 bp, Glycine max
gacttctcttcacacctttgttcactcttcttctcttgcggctagggttttagcgcagcttcttctagatttaaggaagatgggtaaggaaaaggttcacatcagtattgtggtcattggccatgtcgactctgggaaatccactaccactggtcacctgatttacaagcttggaggcattgacaagcgtgttattgagacgtttgagaaggaagctgctgagatgaacaagaggtctttcaagtatgcctgggtgctggacaaacttaaggctgagcgtgaaagaggaatcaccattgatattgctttgtggaagtttgaaacaacaaagtattattgcacagttattgatgcgcctggacatagggatt

SEQ ID NO: 59037 - DNA, 79 bp, Glycine max
gccggtttcccgaacgatttgatggtttggaatgcatttcccaagcaacgagtcttcggttcgaaaccagcagagagtg

SEQ ID NO: 59038 - DNA, 349 bp, Glycine max
gattgtagaactgaacaagggtttctctttctctttctctgtctgcttcttcactttctctcgtttcaatcgaaaaaaatcatgggcagaaaattcttcgtcggtggcaactggaaatgcaatgggaccactgaggaggtgaagaagattgttactactttaaatgaagctaaagtccctggagaagatgttgtagaagttgttgtgagccctccttttgtgttccttccttttgtaaaaagtttgctgcgccctgatttccatgtctcggcccaaaattgttgggttcgcaaaggtggtgcttatactggagaggttagtgctgaaatgcttgttaatttgggaattc

SEQ ID NO: 59039 - DNA, 396 bp, Glycine max
gggttctagtgtgtgattgtttgttgttgtaactcgttcttcttcttttgttgttctgtgtttgtgtttgttttttctctcacctgaaaatgtcttgctgcggtggtaactgtggttgcggaagctcctgcaagtgcggcaacggctgcggaggctgcaagatgtacccagacttgagctacactgagtcaaccaccaccgagaccttggtcatgggagtggcacctgttaaggctcaatttgagggtgctgaaatgggtgtgcccgctgagaacgatggctgcaaatgtggaccaaactgctcctgcaacccctgcacttgcaagtgaggtgttgggagagcaagcttcaagcagagatagcccttaattaagaataatgataaactattaatgt

SEQ ID NO: 59040 - DNA, 249 bp, Glycine max
cccaggcgtcagcacacacgtcagcgcagacatcagtacgggtgcaaaatgacaacaaaaagggacttcataactcacactgcttcattgcatatctgcaaatactgtcacccctgctacctacaaattcgccgaaatatggaatcacttcatgcaaatgtaacatcacttgtatacagcagtggcaatcgtgtatctcactcgacatttgcatgctcttccttcgtgtcagcgttcgatgttgtctgg

SEQ ID NO: 59041 - DNA, 94 bp, Glycine max
gggggcaaatgcaaatcaaattaaacaagaggaaacagcagttgaagaggagaaaagcaaacaaagcaaagcaaaaaccctggcttcagttcag

SEQ ID NO: 59042 - DNA, 54 bp, Glycine max
tacataccatctgaataaaggaaaatcatgaacaggacaagagaacgaaggtac

SEQ ID NO: 59043 - DNA, 368 bp, Glycine max
ggttctagtgtgtgattgtttgttgttgtaactcgttcttcttcttttgttgttctgtgtttgtgtttgttttttctctcacctgaaaatgtcttgctgcggtggtaactgtggttgcggaagctcctgcaagtgcggcaacggctgcggaggctgcaagatgtacccagacttgagctacactgagtcaaccaccaccgagaccttggtcatgggagtggcacctgttaaggctcaatttgagggtgctgaaatgggttgtccccgctgagaacgatggctgcaaatgtggaccaaactgctcctgcaacccctgcacttgcaagtgaggtgttgggagagcaagcttcaagcagagatagccctta

SEQ ID NO: 59044 - DNA, 148 bp, Glycine max
actaatgaaattataaattatccataaattggatagaaagatctttcatccttcattcgccatttttttttatataaatttcttgtcgaaggcttttgaaggatagtgataaaatgaagatggttcaggcaaaaggctcacgatttgg

SEQ ID NO: 59045 - DNA, 321 bp, Glycine max
tcataaaaaaaacaaaaaaaaaaaaaacaaaaaaaaaaaaaaaaaaaaaaaaaaaaaaaaaaaaaaaactgataaacaaaaagatataaggcttccctaaaggtatatacaattgttttaactcttctaaaatgtcacaaaatcttcaattcggtgcccgtcttttaacaccgtggtcatcgttttaaacctggggtcctccaaaataccttcccttttaccacttttacctttttgcagcaggtcctcttattggcgagccccctttttttcgcccgggcctgcatttttaccccttcattgggaaaacccccccttttt

SEQ ID NO: 59046 - DNA, 370 bp, Glycine max
ggcacttcaattgcaatcaaattagttcattctctttgcgcagttccctacctctcctttcaagatgcagatcttcgtcaagaccctcaccggaaagaccatcacccttgaggtggaaagctctgacaccatcgacaacgtcaaggccaagatccaggacaaggaaggaattcccccggatcagcaacgtctcatcttcgccggaaagcagctcgaggacggccgtaccctcgccgactacaacatccagaaggagtcaacccttcaccttgtccttcgtctccgtggtgacatgcagatcttcgtcaagactctcactggcaaaaccataaccctagaggtcgaaagctctgacaccattgacaacgtc

SEQ ID NO: 59047 - DNA, 63 bp, Glycine max
gagttctagtctaaggttacgccgtcgtcgctgtttgtgtgtgtatcaggtgcagctaccaac

SEQ ID NO: 59048 - DNA, 63 bp, Glycine max
gaccgtcctcctctttctctccgtgtggccgttcagtgacaccgagtgtaaagaagaggagag

SEQ ID NO: 59049 - DNA, 345 bp, Glycine max
cgggactcaccacttcaaaacactcataacacaaagcacaaagcaaagctcatccttgagttaaaaaatggcagcagcttcttccatggctctctcatccccatccttggctggcaaagccgtgaagctgggcccatcagccccagaagtgggaagggtgagcatgaggaagaccgtcaccaagcaggtctcctcaggaagcccatggtacggcccagaccgagtcaagtacttgggcccattctctggcgagcccccgtcctacctaaccggtgagttcccaggcgactacggctgggacactgctgggctttccgcagacccagaaaccttcgccaagaaccg

SEQ ID NO: 59050 - DNA, 123 bp, Glycine max
cgtagtaagcgacgaaatgcttcggggagttgaaaataagcgtagatccggggattcccgatataggtcaacctttcgaactgctgctgaatccacgggcaggcaagagaaaaaaagataaag

SEQ ID NO: 59051 - DNA, 376 bp, Glycine max
atcaaaatatctttgaataaaataatcaaaaaaatcaattagacgtttttctttggaagtttccttggatcaattgacttataaccaaagtgaaactaaggctaaaatcaactcacaaatcaagctttgtccgcaaaaaatcactaaaaaccattttaaggtccaacgccttaaacgatcctctttgcttttatcggttaacatggaccgttcaaaagcataaaatcaacatgtaactttaacgcttttgcgagaactacgtaggtctgatttcctcttcgatggaggatacgtaagagcaaaagccccacttttgtcgacctcgtgagatggttagaggtccaacgccttagcttttctcaccaagtaaaatgga

SEQ ID NO: 59052 - DNA, 367 bp, Glycine max
ggtggcacgtgccacgtacacgtgaaaaagaccctgggcctttcggccctccccaatccttcccggcaacggcggaaacttttcctaatcagtcccacagtgaagttgatcggagcccacatacattcaggcacggacccaacggtttgaacagaaataagaataatatgtgttggttgactttgaggggatccagtggatacagatttcaaaacaattgaggcaagcataatgttcaggcttggacaactccaatctgagggtggcatcctacaaagaatggtatacaagaattaagaacagcaccgacgcggttcctatttccagcgtcttttgaaggtaaggagggatttaaggctgctgcaat

SEQ ID NO: 59053 - DNA, 386 bp, Glycine max
gacagctgactcaaaaatgagaatcttgagttacctttacattcttctcctttttcatcaacaccaccaccattattcaagcgagcttaaatagggaaagaggagcaagaccttttcagtacctctaaatccagtttttgcaattccatttgtgagttattggaatttggaagtagctagggagtgtctcaaattaatggcatccatgtctcttattcttctttggttcctaatgtttgctggcgaaatgatgtcaatgggaaatagtttacacaaggggcacatgataatggaagaggaggaatgttgggattgtttgaagtgatgggtgctcttctggaagacccttacagggcccaaacacatccacagccatgtactgatac

SEQ ID NO: 59054 - DNA, 370 bp, Glycine max
gattgtagaactgaacaagggtttctctttctctttctctgtctgcttcttcactttctctcgtttcaatcgaaaaaaatcatgggcagaaaattcttcgtcggtggcaactggaaatgcaatgggaccactgaggaggtgaagaagattgttactactttaaatgaagctaaagtccctggagaagatgttgtagaagttgttgtgagccctccttttgtgttccttccttttgtaaaaagtttgctgcgccctgattttcatgtctcggcccaaaattgttgggttcgcaaaggtggtgcttatactggagaagttagtgctgaaatgcttgttaatttgggaattccttgggttattattggtcact

SEQ ID NO: 59055 - DNA, 137 bp, Glycine max
  unsure (1)..(137): unsure at all n locations
atgagcattgttgagattgatacaacnnacaaaaaaaaaaaaaaaaaaaaaaaaccggccccccaaaagattcaaacctaacttagcctgcaagccaagtcaaaactcctccaaaatggccaccaaaatcaattcaa

SEQ ID NO: 59056 - DNA, 87 bp, Glycine max
gatcaaattaatttttgatatctttcaaggctttgccttgatttgagtggttgtgtgttatggattttaatatagattatggttctg

SEQ ID NO: 59057 - DNA, 394 bp, Glycine max
ggaagagtgaagagaatggctcccaagggtttaacctttctggctgtgttaatatgcgtttcagcactgtcactgagtccttctgttgcgggggaagggcaaaataatggccttgttatgaacttctacaaggaatcatgccctcaggctgaagacatcatcacagaacaagtcaagcttctctacaagcgccacaagaacactgctttctcctggctcaggaacatcttccatgactgtgctgttcagagttgtggtgcttcactgttgctggactccacaagaaggagcttgtctgagaaggaaacagatagaagctttgggttgagaaatttcaggtacattgagaccatcaaagaagctttggaaagagaatgccctggagttgtttcaa

SEQ ID NO: 59058 - DNA, 353 bp, Glycine max
ggaattctctcgagtcgaggttgcgtttggactttggagaagaagaaaatggcggagtcgaattacgagtacccaaggctacggcggccggaaatagtcacaatcctagcgcagttgcagatcgcgaacgtgaccgagcaggacttcaccaaccctaaccctgatttcatctccgatctctacactcgcgtcctcattcatctcgacattctcctcgaggaagacaacgagcaactcgagttccacgccctagagcatcttgaaaaccctgatttccacctggattccgttcgcgccgtgaaactctacaaccagatcaacgaggttctcacgacactcgagtgtccgcgcaa

SEQ ID NO: 59059 - DNA, 141 bp, Glycine max
tcatgcatgctccaatgcttttcattttctctctctctttttcactcttcttctagcttcttgtttcatgcaagttatatgcaactggttctgttatatgcatactatctatatcccagctgcactttattttatattttc

SEQ ID NO: 59060 - DNA, 143 bp, Glycine max
gacatacagtcgcagcacaagtcacagaggttgtcggcggcgtgagaaagttggacatcaacctattcacagatgagaagggccacatacctgaactcttaagcgattctcaatgccgtcgtttcgccagcgtctaaatcctc

SEQ ID NO: 59061 - DNA, 384 bp, Glycine max
gtgtgaaaaaaaaaaaaaaaaaaaaaaaaaaaaaaaaaaaaaaaaaaaaaaaaaaaaaaaaaaaaaaaaaaaaaaaaaaaaaaaaaaaaaaaaaaaaaaaaaaaacaaaaaaaaaaaaaaaaaaaaaaaaaaaaaaaccccccccccaaaaggtccaaacctaaatacccccgaaaagcaaaccaaaacccccccaaaaggccccccaaaaccaaatccaaggcccccccttaaaaaaccccctaacggaaaaacccccggcgtaacccaactaaacccccttaaaaaaaaccccccttccccaaaggggggaaaacccaaaaagccccccaccaatcccccccccaaaaaatgccccacccaaaatggcaaaaggaacccccc

SEQ ID NO: 59062 - DNA, 256 bp, Glycine max
actggtaccctgctcgtacggcccagaattcccgagtcgacgcatgcatccgcgcatgcgtccggtaggctgcgaacaagacgacggtacgggatacatccttttatccccgggtctagctccaaaaacatcatctcgtggtcaagattcgaaagctcactagagagtactgaagtgaaacaacgactgaaggctatggtttcgagcttgatacattcgacgccttccatttccaggctcaatgccacggtagtgt

SEQ ID NO: 59063 - DNA, 116 bp, Glycine max
gttgtggccaagaattaggtgcctcgagttaggaggacgatagtctaagcatcttttctcacagggatttttgagtcagtttctgtttatatttattatatgcataattggtttct

SEQ ID NO: 59064 - DNA, 53 bp, Glycine max
gagacctcaggtcaggcggggctacccgctgagtttaagcatatcaataagcc

SEQ ID NO: 59065 - DNA, 69 bp, Glycine max
aaaaggtaaggcctccaaaaaaacacaaaaagggggttttggctccaactccgccaaattctcaatccc

SEQ ID NO: 59066 - DNA, 141 bp, Glycine max
gaagaaagctgctagcacagggaagttctacacttttttgtttggattgatcgagtgtactttttcttttcgagattggcttggtgtgcagtggaaagagggtggaaaagagtggtaagggggagggcggcgccccttgtc

SEQ ID NO: 59067 - DNA, 76 bp, Glycine max
agggaaagatcccaaggagtcggtccgaacgaagattccaccccttccttgacgaacacacagacgtgtgttttgg

SEQ ID NO: 59068 - DNA, 278 bp, Glycine max
gatccttcgtccagctagcaccacattcacctgaggcttccaaagcaatggcttcccttgcagcatccactgctgctgcttcccttggcatgtcagaaatgcttggaaaccccaacaacttcagtggtggcacaagggcagctccaactgcttccaatcctggctccttcaagactgtggctcctttctccaaaaagaaggctacaccaacacctccaaaaaaagctgctgctgctgctcctgccaatgatgagcttgccaagtggtatggtcctgac

SEQ ID NO: 59069 - DNA, 137 bp, Glycine max
gacacttactagtagtaagcatggagtcctcaaagatctatgcttacctcttcctctgcatgatctttctctcttccgccactcccattctcggttgtggctactgtggcaaaccccccaaaaagcacaagcctggt

SEQ ID NO: 59070 - DNA, 51 bp, Glycine max
gcgtaatgaacttgattatttccctaaaatgaagatgttatctttgctcgt

SEQ ID NO: 59071 - DNA, 107 bp, Glycine max
gacacaccgtttgttctattcttaactcaacttctgctacccactctcttcttccaagtccaaccacgcttttctctacagtcatgggcaaggtcaagatcggaatc

SEQ ID NO: 59072 - DNA, 434 bp, Glycine max
gcttgtgcgcttagcgcacttatggaccgcttagcacacgttagtgatttttggcttagcgcgcctttctcacttagcggatgaactgaagcggtgcacttagtgagatgaagcggtgcgcttagcgaacctgtacagctcatcttcttccagagtcttcctcgcgcttagcccaggagtgttacgcttagtggacgctcgctaagccagcagattggcttagcgagaaggtgaaaaacaacactttccaaagcttgcctaattaacctgaagttgagagaaaatgattattaaacacacaaaatgaaaatactaagtatttattacctatacttaacagaaaatacttataacactacaaaataaccataaattgggagagtttgatacaatttatacaagttttatacacaaaagttagtcgttttcatcga

SEQ ID NO: 59073 - DNA, 265 bp, Glycine max
cccacgcgtccgaagggcggcaaaagaacaacgaaagggaaaatctgatgctactcaatgatatctgaatctccgtccgaatgcacctgtgacaaactttcagttccacgtcgctgaaacaacatcatcaagactacggtaaagaagtacattcagcctcttcatttttcgaagcgttgctttcgaagcacttcgcgaaatgtccacggttgagatcctcgtgatatgcaatgctcgaacgcatacaatgttccaccaaagactc

SEQ ID NO: 59074 - DNA, 278 bp, Glycine max
gacaactaagagagaatcgtcctgctcacatcaacacaatgcatctctgcgcaaccatgttgatcagaaacaacattactctgcacgacaagatcaggcacaccatcaagctttcaaaggacaggatgcagaagacagagcgaatacctcctgaccaggacacattgatttttaccagaaagcagatggcagatggtcttactcgtgcagtttacaacatgctctcagcatcaacacttcatctgatcttgctgctaacgttaagaaacatgagtaac

SEQ ID NO: 59075 - DNA, 223 bp, Glycine max
taatattgtaatttagcaaatatcttttgagattctcataaagactgatcatatatggtcttcttacatatattgccctacctattaattagttttcatcacttaaattcatcaaaaacccagtgcttctgagttgtgatcttccatggggtcagccccatgcaaattcagcgggtatgtgctgggtggtcacactacattgttatctgaccttttgtccttt

SEQ ID NO: 59076 - DNA, 79 bp, Glycine max
gccggtttcccgaacgatttgatggtttggaatgcatttcccaagcaacgagtcttcggttcgaaaccagcagagagag

SEQ ID NO: 59077 - DNA, 164 bp, Glycine max
aatcttgattgtgttgagcatcttcttgatcaaatcttgaagatacagcaaaaggaaagaggaggggaaaaaaaggggcgctccagagggattaagcttaagtaagccttgaagggaagttaaaactcctccaaaagggccactaaaatcaaattaagtggcgt

SEQ ID NO: 59078 - DNA, 258 bp, Glycine max
atttggggttgtccgctgtgcactgctctttggatttgccgcctagaattaatttacatatcttgaaactatttcctaacataaaatattcaagtttctatttttacttttattgggtatgttttgctaggtctattggagatgagagcctttgcaaggaagtatttgaggagtacattgcacagctaaaagaagaggcaaaagagaatgagcggaaacgaaaagaggaaagggcaaagaaggaaaaagacagggagg

SEQ ID NO: 59079 - DNA, 59 bp, Glycine max
atggatattgcgtaatcaattgacgttgatattcaataacaaagagtaaatcctctaac

SEQ ID NO: 59080 - DNA, 92 bp, Glycine max
gctttagtataagatcatatgaagttatgggaagaaacatatggttgtgtaagctgtagttgtcacttatttaatgatatgagcaatttggg

SEQ ID NO: 59081 - DNA, 124 bp, Glycine max
gaaattgtgttggagcaaaataccatcatgaagctaagaagcattctccttattgtgtgggctttgtttgctctcttgagccacgcttatggggaaatccgtttttgccaaaaaaaaataaaag

SEQ ID NO: 59082 - DNA, 422 bp, Glycine max
gagtgtatgtgattgttgtgactcgttcttcttcgtcgttatcttcttcttttgttgtttgtgtgtttgttttttctctcacctgaaaatgtcttgctgcggtggtaactgtggttgcggaagcgcctgcaagtgcggcaacggctgcggaggctgcaagatgtacccagacttgagctacaccgagtcaaccaccaccgagaccttggtcatgggagtggcaccagttaaggctcaattcgagagtgctgaaatgggtgttcccgctgagaacgatggctgcaaatgtggagctaactgcacctgcaacccctgcacttgcaagtgaggtgttggggagctaaagcttcaagcagaaatggcccttagaaataatgataaaaactatatgtagtttcaaaacttcaaaattatgtagtaag

SEQ ID NO: 59083 - DNA, 102 bp, Glycine max
tcttgaataacacaattaaagagagcttaagacttattttgattcacaaatccaaccacaactcagcaccacaactcaacttcatcataggcatcatgtagg

SEQ ID NO: 59084 - DNA, 107 bp, Glycine max
gccacaacacagaacaaaaacaatgaaaaagaaaaacccttagccaacacaaccatcatgggcacctctgctattcagcagtcagcattcactgggcaaactgctct

SEQ ID NO: 59085 - DNA, 139 bp, Glycine max
aggggcccaggctgattacatcactgtgcctgttgagggtccatacaagcctgctcactacatgtactaagtaactgagattatcaacggaaagtgagggaaagacataatcggttttatgaatcaggttgattgatta

SEQ ID NO: 59086 - DNA, 280 bp, Glycine max
gaaagtgctatgagtcagctcggcgaactatgtgaccatgttcacattcatgcacagaaaacccttccttccagttccagcagctcggacgatctatgtgctgcaagcggatcaatgcggtgtgtcgagcacgtagatcgtcaaacacgtgcccttccaccaagtcactggcgttcactgcacaagggagctggtgctaacgacatgtggtaaccaaactgaatacctgtgcaacatatcggccgtgaaccagccgttctacctccgaagacggtcggac

SEQ ID NO: 59087 - DNA, 57 bp, Glycine max
ggtttgagtagtattattgtgagatcattgtttctagtacataattgatttctttat

SEQ ID NO: 59088 - DNA, 114 bp, Glycine max
ttttgcttcattgtgaacatggaggttcaggaaatcatgtggcatcatcgtcctgctcatcctccttgtctttgccttccaagtggtagtgcataatgcgggaaaagtgtgtga

SEQ ID NO: 59089 - DNA, 152 bp, Glycine max
agggaattaaattccaaattgaattgttaccaggaggggcaacggtaatgccttgccaaaatgatcattaaattcatgaccccccttatggcaaaggaacccaacttaaaaacttccttaagcaaccaaaaaccggtttcggccctggtccg

SEQ ID NO: 59090 - DNA, 173 bp, Glycine max
gcgtcacttttcacatctgctgttcctgcgcgtggacactcctcaggtatgccgagaccatagttacacataagagcgttagtcccgccggggacttccgtttgcactggtacatgtacgtgcagacctgtgtcactgatccaggactggctgcatcaacatggttgcatcgt

SEQ ID NO: 59091 - DNA, 407 bp, Glycine max
gacttctcttcacacctttgttcactcttcttctcttgcggctagggttttagcgcagcttcttctagatttaaggaagatgggtaaggaaaaggttcacatcagtattgtggtcattggccatgtcgactctgggaaatccactaccactggtcacctgatttacaagcttggaggcattgacaagcgtgttattgagaggtttgagaaggaagctgctgagatgaacaagaggtctttcaagtatgcctgggtgctggacaaacttaaggctgagcgtgaaagaggaatcaccattgatattgctttgtggaagtttgaaacaacaaagtattattgcacagttattgatgcgcctggacatatggatttcattaagaatatgattactgggacatcccaaactg

SEQ ID NO: 59092 - DNA, 335 bp, Glycine max
ggcacaagtttgttgagatagctagaagcaataagatgaaaatgaaagtgcttgttttgtttgttgctacagttttggtagcatatgaatgccatggctcagactaccagaagttccctctccaaatgaaaactgggtttggtgggcaatacagcaatgaggtggcatgtgccagttggaggcttggcgtggaagcaaacaacgtagtcaagtggcaaactgttcctgcagcttgcggagagtacatagctgactacgttctaggagaccaatatagatcagattccaaaacagttaagcaacaagcttatttctatgctaaatccctcaaactc

SEQ ID NO: 59093 - DNA, 195 bp, Glycine max
catattccatgattgtgtcatgcatctcttcatggcatcgtgatgggcatatcattcctgcatttatcatattcatggattgcattttgcatgagtaattgcattatcatgcatcttcattcaacatgctttttgttctacaaactgcataccttttcatgttcactcatgcatagtccttgcattttcctctac

SEQ ID NO: 59094 - DNA, 185 bp, Glycine max
tctatactgagactggtatcaccattaaagacaagttaagcatgtgtagcatcctcatggaccacttctgtaaccatggccatgatatcatctatagtacccgttatatcattatcaccagtatgacgtcaaaggaaattcagaccgcggtcaagcttgtaccggccgctcaattggatacacac

SEQ ID NO: 59095 - DNA, 144 bp, Glycine max
gttcctgagtatcgatatggcatcttaattctaccacattctaccttggtggtttgttgaacttggactatgatggttgatttagcttgacccgtgcacttactaatataatcactgttagtaggtgacggcgatttttgtttg

SEQ ID NO: 59096 - DNA, 387 bp, Glycine max
gatgtacagaaaggaggatgagacgacgtatgaggataagaaaaactagacaagcttatggtaaaaatgaagacaacgaggactggatcagtgagagagaagttgatggtgaaactgaggacgatggggacatgatcagtgagaggaaaagaaacattagagaagttgatgctgatgttcaagatagggtcataaaatatgctctgttgcacaatgtccagaagttgaaaatgaatataaattcaacaacctatagacccaattttaagtccctccctttaatctttcgcagtcagtctttgacatctcttgagctttccaataagttgagcccttctaggttaaaacttccaaaatctctatgcttgcctgcattgaaaagcttgc

SEQ ID NO: 59097 - DNA, 65 bp, Glycine max
ggttctcgagtgtttgaaccccccttccttttctgctttgaattaaagattcgtgttttatatgt

SEQ ID NO: 59098 - DNA, 158 bp, Glycine max
acctccgatctaattacgttataagaaataagttctagtgtaaaattcactacatcatgtttcttatatattgaacgatatatagtattttaaaatgttaatgacaatttacatactttctaaaataatcccttaccttagcaagtaatcaatgtgtg

SEQ ID NO: 59099 - DNA, 67 bp, Glycine max
gggttgcaccgccgaccgaccctgatcttctgtgaagggttcgagtgagagcatacctgtcgggacc

SEQ ID NO: 59100 - DNA, 325 bp, Glycine max
ggttctagtgtgtgattgtttgttgttgtaactcgttcttcttcttttgttgttctgtgtttgtgtttgttttttctctcacctgaaaatgtcttgctgcggtggtaactgtggttgcggaagctcctgcaagtgcggcaacggctgcggaggctgcaagatgtacccagacttgagctacactgagtcaaccaccaccgagaccttggtcatgggagtggcacctgttaaggctcaatttgagggtgctgaaatgggtgtgcccgctgagaacgatggctgcaaatgtggaccaaactgctcctgcaacccctgcacttgcaag

SEQ ID NO: 59101 - DNA, 59 bp, Glycine max
ggagagagagagagaaatggagaagacaggagtgttatcggcgaaggagggagggagag

SEQ ID NO: 59102 - DNA, 278 bp, Glycine max
ggctctgtggctctctacatgtcagcaatcagcgcgaaacaggctctcgaagttgccgttaacgctgctgtttgtggatcaaaaggtcacagatattgtccagtttcccaaagggtcctcctaagattaaacgacaataaaatcgcttacacactccacctcaacgattgcagtagtatacccgtaaggtttttgggtgtgaatcccaaagggaacgttccactggttccttttgatggcaaatgggtggctgactctgatgtgattgtggggatact

SEQ ID NO: 59103 - DNA, 358 bp, Glycine max
gacacctttgttcactcttcttctcttgcggctagggttttagcgcagcttcttctagatttaaggaagatgggtaaggaaaaggttcacatcagtattgtggtcattggccatgtcgactctgggaaatccactaccactggtcacctgatttacaagcttggaggcattgacaagcgtgttattgagaggtttgagaaggaagctgctgagatgaacaagaggtctttcaagtatgcctgggtgctggacaaacttaaggctgagcgtgaaagaagaatcaccattgatattgctttgtggaagtttgaaacaacaaagtattattgcacagttattgatgcgcctggacataagg

SEQ ID NO: 59104 - DNA, 242 bp, Glycine max
ggggggtcagagtgagaaagagaaagagagaattcgtaaaccctaatttcggaaagatcggcgatgactgcctccaaggatcgcgagaacttcgtctacatcgccaaactcgccgagcaggccgagcgttacgaagagatggtggaatcaatgaagaacgttgcgaatctcgacgttgaactgacggtggaggagcggaatttgctttctgttgggtacaagaatgtgattggtgctcgcag

SEQ ID NO: 59105 - DNA, 85 bp, Glycine max
gttccaaaagaactacgtaggtctgattttctcatcccaaattgaggaatacgtaggagcaaagggaaacacccttgtcgaccat

SEQ ID NO: 59106 - DNA, 62 bp, Glycine max
gacagcatttttgaagtagtttgtgtaaacttaaagaagagttaacgaaaaaaaaaagaaag

SEQ ID NO: 59107 - DNA, 78 bp, Glycine max
ggggatcatatgtgtttgacactttttgtgacaaacattatctggcaccgcttaaatgatcatttgttttgatgatgt

SEQ ID NO: 59108 - DNA, 73 bp, Glycine max
gtatggcgcaacccaattcttgtactatacttggcaagttctactctcctatcccttttattaatttcggaat

SEQ ID NO: 59109 - DNA, 196 bp, Glycine max
gacccccaaactctgcatcggaagaaaccctagccactctcccggcgtcacgatgcagatcttcgtgaaaagcctaacgggtaaaacgatcacgttggaggtggagtcttcggacaccatcgacaacgtgaaggccaagatccaggacaaggaaggcatccctccggagcaccagcgcctcatcttcgccgggaag

SEQ ID NO: 59110 - DNA, 91 bp, Glycine max
  unsure (1)..(91): unsure at all n locations
ggtagttagttagtagtgaaaaaatgaaaatggaacaagacgtttcagtttcacactcaacacannacccaaagccctaaaggaaagacga

SEQ ID NO: 59111 - DNA, 154 bp, Glycine max
gacccacgcatccatcaggtggcaaaaagacaacgaacggggtcatgcgttagtactgaagaactgaacatggatcacgaggtttcagtttcagactcactacatcacctacccccttatcgggcgggcgccctccctcggcggtcaggtcggc

SEQ ID NO: 59112 - DNA, 62 bp, Glycine max
gtgctttgttgtggttgttaaggtttgattcgacaggtttagacgatcttacagcgacgcac

SEQ ID NO: 59113 - DNA, 168 bp, Glycine max
gacaccatcgactactcttcttagttccagcacaataagctcttcatttctcccagactttcttttccttcaccagcaatgtcagcaggagttcacacttttgttcttcccggacctcatgcagtcccctatgatcactttccatgccaccttctgggtccgtctctt

SEQ ID NO: 59114 - DNA, 125 bp, Glycine max
ggatatcagaagcgcagacctacgatttcggccgtttgctccccagggaaagaagcagggtgtttcttttgaaatcggctacaatagatgtcaggtgaagacgtagctgttgcagttgatgcacc

SEQ ID NO: 59115 - DNA, 175 bp, Glycine max
gatcccataaaaaacacaagcaaaaaaaaaaaaaaaaaaaaaacaaaaaaagcggccgcccaaagaagaagccggtttcaaggtccgtcaaagccggtctccaattccccgtcggaagacatggccgttatttgaacaacggaaggtacgctcagcgtgtccgtaccggtgctcc

SEQ ID NO: 59116 - DNA, 317 bp, Glycine max
gagcgaaacagagagtgatttcagtgagtgatcggtgttcacttgatctcatcataatcgtcagcgtcaattgaagaagatgccgatcagaaacatcgccgtcggaaggcctgaagaggcgactcaccccgacacgttgaaggcggctttggctgagttcatctcaaccttcatcttcgtgttcgccggctcaggctccggcatcgcctacaacaagctcaccgacaacggcgctgccacccctgccggcctcatctccgcctccatcgcccatgcattcgccctcttcgtcgccgtctccgtcggcgccaacatct

SEQ ID NO: 59117 - DNA, 72 bp, Glycine max
ccaacgcgtccgcccacgcgtccgcccacgcgtccgcccacgcgtccgcccacgcgtccgcccacgcgtccg

SEQ ID NO: 59118 - DNA, 157 bp, Glycine max
gttgggaacttaagatattcttgctgcataatacatgacatcattgattatgcataacatacagttcttgtatttctgtcccctatactgtaaatctgtaatctagatatgattttcattcaatttgaagaatttgaagttgttaagttgggatttc

SEQ ID NO: 59119 - DNA, 168 bp, Glycine max
gatagtcaattcattttcttcttctgcttcaccttctcttctcttctctcagagggttagggtttttttctcttcattgctctctctgtcgttttatttccatggctcagcaagatgctcagaatggtgggtcggagaatggcgctgctgcggtgtcgtttgtcgctt

SEQ ID NO: 59120 - DNA, 218 bp, Glycine max
atacaggcgtcagacagactacaaaaagaggaggaaagggggagcgaaagaggggttttggaacctgcagcattcggtgctccaatctcagctatccgtgaaggctccatcaccgatcgacaatcctgtcaccgattcgtggtacacccaccgtcccgtcttcacgctcgcaatcggacacgtcttaagtgcctcattcttcacttattacgcaacat

SEQ ID NO: 59121 - DNA, 52 bp, Glycine max
aaaaactttaatttttttatggtaaaaaattcaattatacctgttatttcac

SEQ ID NO: 59122 - DNA, 326 bp, Glycine max
gtacgcgcgagaagacacagaagggagggagattagcattagccaatcaaaacacagactgggcacatggcatccacaatggaaagtgaaatcactaacacatgtgcgtgtgctcaatcacaagtgaagttgaactgcagtgaatttcagacaaattttgttgagaacccatcaattttgaacatttctggcaatgtgtgtcgtctaaaaaacggtcttcccattggtatacgtgaaactgtagagtttttgtatgcatggcttcctaagtttccagttcaacccatttcttcgagaggagattgcaactaattgatcttaagtag

SEQ ID NO: 59123 - DNA, 150 bp, Glycine max
tctcggggggttctcctaccgattcttcagccggggcgattttggatccgaacctcttctgcggcgtcgctctgggacactccatcgttcggcattcgcaccctctcgtctacggtcctggttctcgcatttgccgagtgtgtgggattc

SEQ ID NO: 59124 - DNA, 107 bp, Glycine max
  unsure (1)..(107): unsure at all n locations
aggggcgattcaatcttaaaaaaaaagccgtagtttaattggaaaaggtcntttttccttcctacttggaaagtttcttcttcgtatttctcgtaaaactctcaacc

SEQ ID NO: 59125 - DNA, 51 bp, Glycine max
gggtttctgtttaggtttatgtgtgttgttgggttgaggtggtttggtttg

SEQ ID NO: 59126 - DNA, 174 bp, Glycine max
atcatttatcatactcacgcattgcatttgcctaagtcatcgcattatcatacatcttcatctaacatgtttttgttttgccaattgcatacattctattttcatcgttcatatgtgatgttcactaatgcttgatcctgacacatagttgctcatgccttgcattttcctcac

SEQ ID NO: 59127 - DNA, 224 bp, Glycine max
  unsure (1)..(224): unsure at all n locations
agggcagaacacttgggtggataagaaacttanatttgcattgcatgtgaaacatgtggcatgcgttgtgactacttttgaggtttactacgcagaatactgctgggttggttttaaggtggcatgagctgagttggaatgctttgggtatggaaagattttggcacacctcatgcctaaaatactttttgtggttcttgtaatacgttttatggttcatctgt

SEQ ID NO: 59128 - DNA, 543 bp, Glycine max
gaagtaattacatctcaatttttgtttcgaagaaacacaaagataagcaaaagtgggagcgaagaatggagaaccccagcagtagtgaaaggagcagagcaggaatcgaagataacatgctggccatgtttgatgcctccgaaaccaaagatgctcaccaagatgccctagatgaccggattgcttttattgatgctgttcgtgcttcttgtgaacatggaaaaccgcccacttcaaaaatttttggggcggtttttcacatgctgaggacagggaagtctctagagttgattgtgggaagttataagcttctggttgatttagacaagcacttccctcgcgtggtatttagctggcacggatgattcccgatcatcagcgaactctccatcaaaattggttgtggttaaagaggcatggtctcccagtatcgattttgtggataaggccacggctgttagtgaagctgggtagaaacagtcgggtggatgggcgggaccctctagctttcaagtcgtgattaaagggctggctgaagtttta

SEQ ID NO: 59129 - DNA, 76 bp, Glycine max
aagagttctttgttatacttatgtttcaaaaaaaaccaaaaaataaagcggccgttctagaggatccaagcttacg

SEQ ID NO: 59130 - DNA, 56 bp, Glycine max
gagacctcaggtcaggcggggctacccgctgagtttaagcatatcaataagcggag

SEQ ID NO: 59131 - DNA, 178 bp, Glycine max
gatgtcatagtattatcattcattctcatctttctctcttctctctccacccaaaccctaacttccgaccctgttcccctctcgtagccgtcatgaaaggaggaaagtccaagaccgaatctaagagagccgatcccaaagttgctgtgaataagaaaggagccgccaccaaggctag

SEQ ID NO: 59132 - DNA, 320 bp, Glycine max
gacttctcttcacacctttgttcactcttcttctcttgcggctagggttttagcgcagcttcttctagatttaaggaagatgggtaaggaaaaggttcacatcagtattgtggtcattggccatgtcgactctgggaaatccactaccactggtcacctgatttacaagcttggaggcattgacaagcgtgttattgagaggtttgagaaggaagctgctgagatgaacaagaggtctttcaagtatgcctgggtgctggacaaacttaaggctgagcgtgaaagaggaatcaccattgatattgctttgtggaagtttg

SEQ ID NO: 59133 - DNA, 341 bp, Glycine max
ggttctagtgtgtgattgtttgtttttgtaactcgttcttcttcttttgttgttctgtgtttgtgtttgttttttctctcacctgaaaatgtcttgctgcggtggtaactgtggttgcggaagctcctgcaagtgcggcaacggctgcggaggctgcaagatgtacccagacttgagctacactgagtcaaccaccaccgagaccttggtcatgggagtggcacctgttaaggctcaatttgagggtgctgaaatgggtgtgcccgctgagaacgatggctgcaaatgtggaccacactgctcctgcaacccctgcacttgcaagtgaggtgttgggagag

SEQ ID NO: 59134 - DNA, 81 bp, Glycine max
tgcgaaaagaagaaagaaagggtttattctaaaatttaaaccaaaaaaaaaaaaaaaaaaaaaaaaaaaaaaacgggcggt

SEQ ID NO: 59135 - DNA, 111 bp, Glycine max
ggatcactcagtaaatgtattttgtaccaaccggtcgctcgataggatcaaagcttacgtacccgtgcatgcaacgtccaatctccactatcgtgtcacctaaatacaatt

SEQ ID NO: 59136 - DNA, 180 bp, Glycine max
ggtctcgtggaagtttaagcaagcagaattctaccggcgcctgctttctttgttcgtgttatgcatcatgatggagtcttaggtgaagcacgcacttgttgtcatagttatgggtcgtactggatccagaggacctgtgacccaggttagagtgaagttattggatgattatgaacgtca

SEQ ID NO: 59137 - DNA, 123 bp, Glycine max
aatgaataatacaagaaaaaaaaaaaaaaaaaaaaaaaaaaaacgggcgctccaaaagattcaagcttaagtaagcgtgcaatggaagtcatagctcctcgataatgtcacccaaattcaatt

SEQ ID NO: 59138 - DNA, 54 bp, Glycine max
gagggaaagaagttggtctctgctactaaggaaggcctgaaacttgacgagagc

SEQ ID NO: 59139 - DNA, 215 bp, Glycine max
gaggttaaggttgccgtgctggtggtcgagtacagatggcgggtagggtttcgacgtgctatcatccggctgttcgctcggattcacgctcatctatgcctgcatgcgacgtcatgactcttcggggatgtcattcatattcaaatcagttgacgccattttacaccatcctgactgggaacaccatttcatcacccacgatttctaccctccat

SEQ ID NO: 59140 - DNA, 390 bp, Glycine max
ggtgcaaaactgaattataaacttgaaatacatcaaagcagttttgttcctctcttcgtcttcatatacgtttatgttttatgatttatacttcactacttttatgcttccacttagtttgattgcatagtctgatcagatctttgctcagtttgatagctatttctgctttagtctggtagtgtcatagtctgatagcatcagtttgaaagttgttttcttcagtctgatatatcatgtgttctgtttttacaacatagcttgttacccttttatgcttcagtctttttccctctgccatattcaaacagtctcaatatatggagtgacaaatggttcccaaactctcttgataatgttattcactgggattagaatccagatattgat

SEQ ID NO: 59141 - DNA, 118 bp, Glycine max
ggagacaatggttcaccgacttggttcccttcagtgcggccgctctacaggatcaatacttacgtaagcgtgcgcgtgacttcatagctcttccatctcgtcacgtggcttcaagggc

SEQ ID NO: 59142 - DNA, 207 bp, Glycine max
  unsure (1)..(207): unsure at all n locations
cccacgcntcccatacagtcgtcaatacagtaccgacaggagtacagaacggaaatatacccttgaagggtatcaacccctttttgtaccccacttcgcctgcatttacgtctccgttggaagacatctactgaacctcctttaaccatactgggccttcacgtggcattgtttcaatacatggctgtaccttggctgaaacatgtc

SEQ ID NO: 59143 - DNA, 337 bp, Glycine max
gatgactgaactttgaagtataccgattctgggagacatcagaggaagcaatcatgagttccaaaggcaaagtgatgagagtgagagaagtggctgggtgaaagtcaaggagctcagatagatcacagcaagattaatgatagtggagtgagtaaggtttttggccaattagtgaacaacacaatgtgttccttttttgcaggcattttggttacagatacaatacaagaactgttcttagttacctcatagttcctacagatacacacacaacctgggttaagagagagagacattgagaggaagcatagcatggtactcttgaataaatggggcc

SEQ ID NO: 59144 - DNA, 60 bp, Glycine max
gtgttgatgcccagccatgaatatttgatgttagaatattgaaatattgcaattttattt

SEQ ID NO: 59145 - DNA, 165 bp, Glycine max
ttcttttgttccccctcccgcctcgtcgtttctccgcctgtcttgcccttctcgtcttcctttcgtctctgtcgtcttcggtctccctggctttgtgtggcgtggttctgggcgccttgggctctcgcttgttctgccttttgtttgttgcttcgtttccctctc

SEQ ID NO: 59146 - DNA, 232 bp, Glycine max
ggttctagtgtgtgattgtttgttgttgtaactcgttcttcttcttttgttgttctgtgtttgtgtttgttttttctctcacctgaaaatgtcttgctgcggtggtaactgtggttgcggaagctcctgcaagtgcggcaacggctgcggaggctgcaagatgtacccagacttgagctacactgagtcaaccaccagcgagaccttggtcatgggagtggcacctgttaag

SEQ ID NO: 59147 - DNA, 194 bp, Glycine max
ggcatcacacacagacaaacactcccattttctctctttctctttctctccgacctagcgagaccgagcgatccgatcctaatcccgcgatgctccgccgcgcaaccacctccctcatctccggcgcctcccgccgctgcctctccaccgacgtgccggcgacgccggcggcggattccgtcttcgcggacgcg

SEQ ID NO: 59148 - DNA, 65 bp, Glycine max
aacccacgggaggaaaacgggttcagtcgtattgttcaggcgatggtgatttgtctcggggacaa

SEQ ID NO: 59149 - DNA, 76 bp, Glycine max
ggggaaggggtcagatttatcttgacgggagcaagagtaataataatgtgtataatgctacatcagcgggtatggt

SEQ ID NO: 59150 - DNA, 388 bp, Glycine max
gacttcaattgcaatcaaattagttcattctctttgcgcagttccctacctctcctttcaagatgcagatcttcgtcaagaccctcaccggaaagaccatcacccttgaggtggaaagctctgacaccatcgacaacgtcaaggccaagatccaggacaaggaaggaattcccccggatcagcaacgtctcatcttcgccggaaagcagctcgaggacggccgtaccctcgccgactacaacatccagaaggagtcaacccttcaccttgtccttcgtctccgtggtggcatgcagatcttcgtcaagactctcactgggaaaaccataaccctagaagtcgaaagctctgaaaccattgacaacttcaaggccaagatccaggacaa

SEQ ID NO: 59151 - DNA, 392 bp, Glycine max
ggttggacgcatggaagcaaagcaaaggctgataatggcggcaacccataactcaatcataaatccccacatcaaccccaccctttctccattacaacacctggcactagagggataccatcttttattattatctatcttcactattactgttagatggatagacattgccataaacagcactttcctccccttacctgaaaagtttggtttctgattcttttttccatttcagcaaagtgggtgtggtttaatttaatttacttttagtatgagttatgggtgaattatttggcgttggaaaaagaaggaacatcagcagcagcaacaacaacaacaacagttctagtactagcgttcttgggttggatgtgaaggtgcaacagagccct

SEQ ID NO: 59152 - DNA, 398 bp, Glycine max
tattcacacaactaactaagaaagtcttccatagccccccaaaaatgaagagcaccatcttctttgctctctttctcttttgtgccttcaccacctcatacctaccttcagccatcgctgatttcgtgctcgataatgaaggtaaccctcttgaaaatggtggcacatattatatcttgtcagacataacagcatttggtggaataagagcagccccaacgggaaatgaaagatgccctctcactgtggtgcaatctcgcaatgagctcgacaaagggattggaacaatcatctcgtccccatatcgaatccgttttatcgccgaaggccatcctttgagccttaagttcgattcatttgcagttataatgctgtgtgttggaattcctaccgagtgg

SEQ ID NO: 59153 - DNA, 165 bp, Glycine max
ggaggccatagtaaccattagttatactggtcttcgcctatcattaatcatgacgcaccaatctttctattcctcacagtcgcatatcacacgtttatccatgcccaccttccagactatgatggtcactctcacgatcgtccagatggaatgacatcatttcac

SEQ ID NO: 59154 - DNA, 284 bp, Glycine max
cgcgtccatacaggcgtcagaacacgagtcagtggcgctgctataacacgacagaaagggattccaagtttcagtgcaaaaaaaaaaaaaagaaaaaaaaaagcggcagctgctagacgatcaagatttaagtatacgtacatgtgaattcaaagttctaccacagtgtcaccgaaatccaattcaatggcagtcgtcttagaacgtcatgatcgggaaagacaaaacgttacccataattaaactcattgcaccatgaaccacatttcgccattcggagtaat

SEQ ID NO: 59155 - DNA, 304 bp, Glycine max
gaatgaaactagattccatgttccaaccacagtgctacgaaagtgcgtgcgagaaagagatcacatcacacatgggctattacccacagtttcctgcacgatcatgctcatgccacacctgccagattgccatgcccacacatcataggaagtcccaatcctaaccagcttgcttccgtggcacataagcatgatgatagttacgtcagccgaagctctcgccggtcagctcgcagagtgcgcataggtgcagccgccgttggctctcaggtccaccctgatgaagcaacatatcgggacactg

SEQ ID NO: 59156 - DNA, 60 bp, Glycine max
gacatgttctgataccgaccatggcgcacgagtaagaaagatagaatctcggtactttcc

SEQ ID NO: 59157 - DNA, 254 bp, Glycine max
aggcgtcagacggctacaagaagagaactgataggtgttgctgcggtattattacagaaggggacaccatccagtactcttcttttcagcagatcctcatgatctctgctaagctttcttttctttgaagtcatacgtcttcaatgtcatcacatttcacacttctgtggtcgtcggatttcatgctgtctgctgtcgacacttctcgagtctacgttctgtgtccttctcttcaccctcatgttttacgcctt

SEQ ID NO: 59158 - DNA, 303 bp, Glycine max
attcccgggactgacccacgcgtccgcccacgcgtcagtacaggcgtcagagggctacgaaaagacaaggtctgggagacggtcagttctattcgggagatcccgatgttctccggtccagtgccatggcttggggtcctggtcgctactctgagatccgcatgagggctacggatgggctgttcacggactaccacagtgacgacgaggttcatcatcaccagctactcacctactggagtggctattacagcagtcaggaaccacgagaagtgacctgtgtctggctgatgtcggcaccca

SEQ ID NO: 59159 - DNA, 388 bp, Glycine max
acacttcaaaatcctctggtaacccttattttatctattctctctctttcttttgtgttctaagcagctagaagcaatggagaggaaaagatgccatgcctctttcaccatgtttgcaatgcttgttggagtgatctctcagagccttgtcattcctgtagtagtccaagtactccatcaacaccctcaggtggaaactgtggatcatcacctccacaacatcatgattcaacaacaccctcaactccatcaacaccaacaaaccctccctcaggtgatactatggaggtacccctcaacacctgtcactgtgagcccagcaactactccagttgaccctggaacccctagtattccctcatcatcacccattccttcaccatctccc

SEQ ID NO: 59160 - DNA, 221 bp, Glycine max
cggggttggtccctacattgccttctttgcttttctcgggctagcagtcgacgacgccgttttgacccggcgaccggcaaatggtggagccggtggagcttcgctgcgacgaccagctctcgcatctgtcagattcaagcaatggtgatccgtcgtggcggttgaacttccacgggtttcagccatcctccaaacaagcggaaaagcagttgaacccccct

SEQ ID NO: 59161 - DNA, 176 bp, Glycine max
gactcaccacttcaaaacactcataacacaaagcacaaagcaaagctcatccttgagttaaaaaatggcagcagcttcttccatggctctctcatccccatccttggctggcaaggccgtgaagctgggcccatcagccccagaagtgggaagggtgagcatgaggaagaccgtca

SEQ ID NO: 59162 - DNA, 91 bp, Glycine max
cttgaacatacgaacttgtataaattactgggaattggtaactacgttttttgagctgaaacttttactgaattttctagacatctggacc

SEQ ID NO: 59163 - DNA, 217 bp, Glycine max
gctcttaaagaatctcagtgctgaagagaaactcataagcatggcggtttgctagtcagtgcttgacttccttgcttctggttgtagtgttcaacgtggctcaatggcagcctctggtccctgccctgttcatatttggggactctgtggttgatctgcgaaatgattcccacctatacaccgttgttgtcgcacacttcccacattttggacgaga

SEQ ID NO: 59164 - DNA, 73 bp, Glycine max
aggggtgcttcgtctcagatcattctgcgcaagtgggacagagagaccgaagtgacctcagcggcgggtgcgg

SEQ ID NO: 59165 - DNA, 108 bp, Glycine max
acccacgcatccaaccgctcgtaagtaacgatgcaaggggactacacacgggggctagagaagtgatgagggtctttgagtgccgcagtggacgccctcgacgatgca

SEQ ID NO: 59166 - DNA, 135 bp, Glycine max
ggcagttcaattctaatctattcgattctctctgtgtatttccctatctctcccttcaagatgcatatcttcgtcaagaccggggcggcgataccatcatccttgaggtgggagggtctgacaccatcgacaacg

SEQ ID NO: 59167 - DNA, 195 bp, Glycine max
tgggagggttagattcgttgatgttgttctaaaacgtcgacacattctccgtcgccacaacagcaatggctccgaacaaaggtgtgaaacgttcggttgacagcacacaataagaacgttcacgaaaacgtgacgaatcctttgttcgagaagcgtccgaagcaattcgggatcggaggcgcactgccgtcgaat

SEQ ID NO: 59168 - DNA, 150 bp, Glycine max
gcttcttcagccatttagctccatagctgcagcattagggtttttcatctgcttcaatggggaagggaacagggagttttggtaagagaaggaacaagactcacactctctgtgtgaggtgtggccgccggagcttccatcgccagaaga

SEQ ID NO: 59169 - DNA, 126 bp, Glycine max
ggctttcttctccaccatcatcgtgatcatgtcacatcacaaccaatccaccgactaggcttatttggtccaagacatcgctcatatcctgcatgctaccaacacacacagataatgccttccaca

SEQ ID NO: 59170 - DNA, 74 bp, Glycine max
aaggtgaaaatcagcgacgcaagtcttcatttgctctcttctcttcttcgtcatgttcatatcttatgagctgg

SEQ ID NO: 59171 - DNA, 180 bp, Glycine max
ggtcacattctacaagaacgaagtactactacaagggaagaaaaacttagctactacggacggatcagagagagtggctcaagcaatggcatcgaattctggcttgcgtggttcctctcaggatgtgttggaaggtagccctcatgtgagtggctccacacgcctgaatgtggggagtgg

SEQ ID NO: 59172 - DNA, 143 bp, Glycine max
gctggcgggctccctcacgttcttctgagtaaaaaaagaggaagaggaaagagttggagcaaaagtagaagaggaaaaaacaagaaggggaacaaaaaaaaaaaagcggccgccctagaggatccaagcgtacgtacgcgtgc

SEQ ID NO: 59173 - DNA, 59 bp, Glycine max
tggggaggtaagaagttgtgctttggcatcaccgtggcttcgggacgagaatctcaatg

SEQ ID NO: 59174 - DNA, 141 bp, Glycine max
gacctaaaaattgtaccgatatggcttcacttgtgtgtctccttttggccttgcatttcatgggtatcatgtcaggtgcgttaggagcaaatactgaagtgtttacaaaagagtctcggacgtctctatcgaggagaaccg

SEQ ID NO: 59175 - DNA, 336 bp, Glycine max
gattgagtacaacttcacattttagaagaataccccctcttttgctgcatcagaggagttgtaaattaagagcatggctgcacaagctcttgtatcatcatcttctcttaccttctcagcggaggctgcaagacaaagtcttggaccaagatcactccaatctccatttggcttctccagaaaagcctcctttcttgttaaggcagctgctaccccccctgtcaagcaaggatcagacagacctttgtggtttgcatcaaagcaaagtctttcttacttggatggcagccttccgggtgactatggatttgaccctctgggactttcagaccctga

SEQ ID NO: 59176 - DNA, 200 bp, Glycine max
gattgagtccaacttcacattttagttgagtacgtcatcttttgcggcatcagaggagttgtcacttaacagcattgctgcaatagctcttactctcatcatcttctcttactttctcatcagaggctgcatgtcaaagtcttggacgcacatcattcacgtccagatttggtttctccagatatgcatcctctcttgtt

SEQ ID NO: 59177 - DNA, 119 bp, Glycine max
gagggtgtttgtcgtcgctactaagagttgctgcttcttcagccactccgcaactcgcagcctctgtgccctcaacaaccatggctgaaatcgaaactaccgttccagatcccacccaa

SEQ ID NO: 59178 - DNA, 144 bp, Glycine max
gattgaagtggcaacatgtattgattatacacgaacgcagtattgtttactattaaaaaaaaaaaacccaagacaaccaacagatacaatcacatccgcacaccaaatcaaataaaaacaaaccaaaacaagaaaaaccggccg

SEQ ID NO: 59179 - DNA, 130 bp, Glycine max
gggcttttcccattcgctcacgtgagtgttttgtttgcactctcctctccccttagcagtaccacaggattcagacaggattagatctagaggagaagttttaactgtccaacagcatcaccgcgactac

SEQ ID NO: 59180 - DNA, 171 bp, Glycine max
  unsure (1)..(171): unsure at all n locations
gggatggacaacgttgtgganggaggttgaaaaggtaaaaaaggaatggaataaaccatccaaaaaaccccacgaccacattaaggcaaccccaaactacggcaaatcaccaaaaccaaaagaggaaaataattcccttgccaaatgagggggaagcccccaggatggctt

SEQ ID NO: 59181 - DNA, 292 bp, Glycine max
ggtgtgagtgcgagagacacgaagacaggtccttggatagtaatacgtggattacgttttcagtcgccaaaatttggtttacaaaagccattcgccagaacaaccacaaaaggaaacaacgaacactggttttgaatccgttagcggcggcgttagctgatttagcttacgaacacacacctctagctctgtgttgatcgtttgcaggtcacagtgaccaggaggagaggggtttcgaaggtcctgtgatagcgtggaatgtaaaatcactctggcaatgggactgggaaca

SEQ ID NO: 59182 - DNA, 317 bp, Glycine max
ggagagagagtagtacatcggaagactcagtgagtttactgtttctctgactttgatgcatgcaggttgaagagtggaagacggtgaaaactaagaataatagaattaaataaaattcagagtaaatgaaaaaaagaaggaggtggagagagtgatgtagtgagtagtgagtgtagacaaggtttggtctttggggcggatgtggagcagtgcagggttgccgcaggggggtttctctccgagtgggagggggggagatgatgatttcagccttttaagaggaatgtgacactaggataatgctgaagaatggaaaa

SEQ ID NO: 59183 - DNA, 187 bp, Glycine max
tacggctgccaaaaaacaacaaaaggttacgcttccaaaaaaccaccaaaaggtaccgcttccaaaagaccacaacacggtaccgcttccaaaaaaccaccaaatggtaccgcttccaaaacaccacccaaaggtaccgctgccaaaagaccacactaaggtacagctgccaaaagaccacacaatg

SEQ ID NO: 59184 - DNA, 245 bp, Glycine max
  unsure (1)..(245): unsure at all n locations
gggtcttggcctgtatttgtatcatgaggatcaaatgtctaatttttaagcttctaaatttttgttttggttggatgtgatattgtattgtttcttctcgttgatgtgaatagaagtagacaataggtggctgttaggtacgtgggggagggcactgtcaagtatggtggaaaacttgaagccatagcgttggtgggaggantgggggatgcgtaggtgtagggagggggttttattgctcaggt

SEQ ID NO: 59185 - DNA, 310 bp, Glycine max
ggcgataaacacgtactagtacagagcatacctcaccaaaacccagcgtttcacattatcttcgtttttatttctccaatgggacaagcagcgtccacgccggtttcttcgacggacctgagtcaccgggatattttcagaggggggggggccatcggccgcgactacaccgccggcatccccgaggagtgccgggcgggagggggcgagtttctaagcgcggggggggcggaaaacctgctccgtggcgggggggcggtggctgcgcgtggacggcgagaaccgccagcgcctctccctggacgcgaag

SEQ ID NO: 59186 - DNA, 351 bp, Glycine max
ggaaacagagagtgatttcagtgagtgatcggtgttcacttgatctcatcataatcgtcagcgtcaattgaagaagatgccgatcagaaacatcgccgtcggaaggcctgaagaggcgactcaccccgacacgttgaaggcggctctggctgagttcatctcaaccttcatcttcgtgttcgccggctcaggctccggcatcgcctacaacaagctcaccgacaacggcgctgccacccctgccggcctcatctccgcccccatcgcccatgcattcgccctcttcgtcgccgtctccgtcggcgccaacatctccggcggccacgtcaaccccgccgtcaccttcggcgc

SEQ ID NO: 59187 - DNA, 267 bp, Glycine max
ggtgtcgacgtgtattcagcacacagcatagctcctctctcccccatggtttggaatcgaatgccgtagagtacatgaggggggcgctttcttgtagcatttctaagctatcacagctccagctcctggttgcagtttcgcgcgtcacaaagtgaaccgggtgggggataacaccgtttcaaggatgggtgctctcaacgttccatgaaaatctttttgtagtactgagggtgtgaagattgctggttgccctagtccagaggtttc

SEQ ID NO: 59188 - DNA, 306 bp, Glycine max
gagtatcacaacttggtttacaccaataattggaagacaaatgttatattcactctattttttttttaagtacacttccattttattttaatttaaattttttactaccattaatatttcgaaaagtaatttttaagatggggggtgagtttattcaagttcaaaaagtaattttcggaatgcgaatatggagggagattgggggggagagagcaggagcggggaggggttgagcgtttgagatgtagggggggtccgaatgttagacagagaggccaatcagacaagaaagacgggaacaagata

SEQ ID NO: 59189 - DNA, 298 bp, Glycine max
gatagctcacacactaaggatttgatttctcacatcccacacttcagcgtcaagctctgctttcataatctcacttcttcagctcaagatgctgaagtcctcaatcacgctttcagatgatgaggagctgatcactatggtcggagttcatcactgtgtcacagttgtgttcatcagacgtaggtaagcattgatcttagtgggagatttaacaggtggagtgggagcatatcccttgagtccgatgtcgcaggggacgttgggatagccattcacccgtgtctgttgctgcctgtgg

SEQ ID NO: 59190 - DNA, 323 bp, Glycine max
  unsure (1)..(323): unsure at all n locations
ggttctagtgtatgtgattgttgtgactcgttcttcttcgtcgttatcttcttcttttgttgtttgtgtgtttgttttttctctcacctgaaaatgtcttgctgcggtggtaactgtggttgcggaagcgcctgcaagtgggggaagggctgcggaggctgcaagatgtagccagacttgagctacaccgagtcagccagcagggagaccttggtcatgggagtggggccanttaangctcaagtcgagagtgctgaaatgggtgttcccgctgagaacgatggctgcaaatgtggagctaactgcacctgcaacccctggac

SEQ ID NO: 59191 - DNA, 338 bp, Glycine max
gactcaccacttcaaaacactcataacacaaagcacaaagcaaagctcatccttgagttaaaaaatggcagcagcttcttccatggctctctcatccccatccttggctggcaaggccgtgaagctgggcccatcagcgcgagaggtgggaagggtgagcatgaggaagaccgtcaccaagcaggtctcctcaggaagccgatggtacggcccagaccgagtcaggtggttgggcccattctctggctgaggcgccgtcctacctaaccggtgagttcccaggcgactacggctgggacactgctgggctttccgcagacccagaaagcttcgccaag

SEQ ID NO: 59192 - DNA, 302 bp, Glycine max
ggaccccattaagaaccacttcctatacattggatgcaaccaaacaacagtattgattaggatttcagaaattttgacaaaaaatcaaaataaaataaaatgtgtaaatccatgggacgttttggaacaactagagcatggagaaccatggtttatttttggaataggaagggcatatcaaaatttagttacttgagagggggacagaacactcataggcagggtggcagtaatttagttttgatgcattttccatgtatagatttttacactgtctgacaattagaaatcactctatacat

SEQ ID NO: 59193 - DNA, 57 bp, Glycine max
gagacctcaggtcaagcggggctacccgctgagtttaagcatatcaataagcggagg

SEQ ID NO: 59194 - DNA, 62 bp, Glycine max
gttcaagattttgccttgtttaaataatgaataccatgtcttcttttgagttccatgtttac

SEQ ID NO: 59195 - DNA, 241 bp, Glycine max
gacagcactgcactcttcgcaagagaacagaaaaagacaacacagagagaagcgtcttaataaacgctcttctctgaaaaacctgatttcttctcttcttctcttctctttcgtttcgatcttcgatctctgaaaatgagagggggcgggtcaatccacatcggtcaggccggtagtcaggtcggaaacgcctgcggggaagggggggggctcgaagacgggaggggggctgatgggcaga

SEQ ID NO: 59196 - DNA, 119 bp, Glycine max
gacaacaaaatttgccacatgccaattcacgcctcaatttctttcctcaacgtttccatcacacatagatcccaatcctctcccatgccctatgttcccctcacttccatgggcacaca

SEQ ID NO: 59197 - DNA, 199 bp, Glycine max
ggatagctgagagagaaaggaaaggttaactaagaagcaatacttcaatggccacccttgttgttcataaccaaggttcttctgctcaagatgctgaggctctcgaacaggctttcaaaggatggggggctgatgacaatgccattatagcaatactgagtcacagaaatgttcatcagaggcaagaaatcagaaaagc

SEQ ID NO: 59198 - DNA, 316 bp, Glycine max
tggaagctacagcactgagcgtgaaagagcccaactggattgcaactggttggaacgttggatgtcatcacaatcacccaacttaagaccacgtgagaccctttataggacgcgtgccaatgctacttccaccactgattacatgtctgaagaaaagacacttgagagggacatgggtgcaactctggacgcgggggcatgctaatatgggcttcaggaatggagaatcttttgacacaagcccaatttctaataggtaccatcagcgccaccacagtgctggtgtctctagctacatggccccaaaccagtctgc

SEQ ID NO: 59199 - DNA, 90 bp, Glycine max
gaggacctctatgctgcgtgtttcctttggattatgctattacctcacctggtttgcttttaatgaaaggttgataacaaatttatatag

SEQ ID NO: 59200 - DNA, 412 bp, Glycine max
ggttctagtgtgtgattgtttgttgttgtaactcgttcttcttcttttgttgttctgtgtttgtgtttgttttttctctcacctgaaaatgtcttgctgcggtggtaactgtggttgcggaagctcctgcaagtgcggcaacggctgcggaggctgcaagatgtacccagacttgagctacactgagtcaaccaccaccgagaccttggtcatgggagtggcacctgttaaggctcaatttgagggtgctgaaatgggtgtgcccgctgagaacgatggctgcaaatgtggaccaaactgctcctgcaacccctgcacttgcaagtgaggtgttgggagagcaagcttcaagcagagatagcccttaattaggaataatgataaactattaatgtgtagctaaaaacttatg

SEQ ID NO: 59201 - DNA, 317 bp, Glycine max
taacttatagcctagatgaacttaacaattatgattgcctagatgttgtgaaaatacgacatgacacacactacgagggtcagtttaaggaaattgtgagtgagattgtgaagaacaaacacaaatttcaacaatcatgggtgatacacatcatgaggaaagcacataagttggcttactcttttgttaaagcgggactatctttatcatcttatttatgtctgtatgactaagtaacttttaatcgttgtctggggtttctttgtccaagtaatggagcttgccggcaacgctacaagcggccgctctagaggatc

SEQ ID NO: 59202 - DNA, 130 bp, Glycine max
tacctctttccaacaatgatgcacttgctgaacttagaagcgctcagatatgggtccactctcccattgagatttgtgaatttgacacaacattgacatgttaagaaataatgaatattattaattactt

SEQ ID NO: 59203 - DNA, 76 bp, Glycine max
acaagatgatcccagcttacgtccgcctgcatacgacgtcacacctctacaatagcgccacctaaaatcaaatcag

SEQ ID NO: 59204 - DNA, 348 bp, Glycine max
gactcaccacttcaaaacactcataacataaagcacaaagcaaagctcatccttgagttaaaaaatggcagcagcttcttccatggctctctcatccccatccttggctggcaaggccgtgaagctgggcccatcagccccagaagtgggaagggtgagcatgaggaagaccgtcaccaagcaggtctcctcagggagcccatggtacggcccagaccgagtcaagtacttgggcccattctctggcgagcccccgtcctacctaaccggtgagttcccaggcgactacggctgggacactgctgggctttccgcagacccacaaaccttccccaagaaccgtgaact

SEQ ID NO: 59205 - DNA, 260 bp, Glycine max
acgcgtccaaccgaggccaaaagacaaccgaagggggccattattgctgtcaacatccgcagctgctgttattcgcagcgcaaacaaccagtgagccatgggcgtccgaaagaacaagcgcagctccaaagggaaaaagggtggccagaagaaggcagctgatcgctttgccaagaaggattggtatgacactaaggccccctccctctttcaagtgaacgatgtgcgcagaacccgcgtcgctcgtacgcacggtagca

SEQ ID NO: 59206 - DNA, 64 bp, Glycine max
gagttgtgaactggccattcaggactctgtagtgaggattttccttctaaacctagttatggtg

SEQ ID NO: 59207 - DNA, 54 bp, Glycine max
acgcgtccggagtaaatagcaccaataccaagtctcgcgttaagcacgggagac

SEQ ID NO: 59208 - DNA, 92 bp, Glycine max
gccggtttcccgaacgatttgatggtttggaatgcatttcccaagcaacgagtcttcggttcgaaaccagcagagagggaaaaaaaaagagc

SEQ ID NO: 59209 - DNA, 232 bp, Glycine max
tgacgtagcaacaacacaaccttctggttctgtcggcattaaattatctcacggtaacgctactacaataccacaaagggattcagttccgatgacaattccgaacttgttaggttcacaacaaagtatcgtttggtacagtcgttagtgacgaaaaaattctgcctctgcaccaacaggtaatagtgactattttcaactgaaggttccagtatccatttggactaaaatc

SEQ ID NO: 59210 - DNA, 51 bp, Glycine max
cctttgatcccttttttcttcttctaaaaaccttcaaaaaacagcacggtg

SEQ ID NO: 59211 - DNA, 383 bp, Glycine max
catgagagtgagaataaatcggggtcttctttgtcctcgtgtgaaaaaaaaaaaaaaaaaaaaaaaaaaaaaaaaaaaaaaaaaaaaaaaaacaaaaaaaaaaaaaaaaaaaaaaaaaaaaaaaaaaaaaaaaaaaaaaaaaaaaaaaaaaaaaaaacccaaaaaaaaaaaaaaaaaaaaaaaaaaaaaaggggccccccaaaaggttccaagtttatttccccggaaaaggaaccccaaagcccctcaaagagggcccccaaattaaattccggggccctttttttaaaaaactgcacggggaaaaaccctgggtttaccccaataaaaccccttgaaaaaaaacccccttttccaaaggggtataataccaaaaagccccc

SEQ ID NO: 59212 - DNA, 361 bp, Glycine max
gtctgcatattcctttttaaagagagaattaaaatttgttaggggaaatttttaaacttaattcaccccccccccccctcttaagttattgaggccacttgtttaacaatccacgtgaggagcatcctcagcaacaacagcgacttcccgttgcctacgtgcggatgttgtgggcctttgccgctgaggagcatcatctgaatcacgattatcttctctctctctagggctcttcctataactctacctaaggtacgacctaaacctctaattctaaccataatctgcaaatttgcacatacataaaaatttatgtcaaaattcaaaacaatacttaaatcaattacaataatatcattcc

SEQ ID NO: 59213 - DNA, 406 bp, Glycine max
gagatcccaaaggtactcttatagtacttcttctctttctctcactgtttttgttgcttattctgccttatcctgtctccctctcttcactacccttttttttttttcactttccttcttatcatctttttttcttttttggtttatattttgggggggtatttttcttttcatttgtacttttttatttattgatcttgggttttggtttattttattgtgtgtggaatacaagtggtgaagttagaaattttgttgtttcccatctgcatgtggagtttgaggtcagctttgtgtttgttaaggttacatgaagccatttctctttttaaatcttcccaacaccgagttcaattcttcacaagttgattgtcaccactcaatggctcattcttcttatccctag

SEQ ID NO: 59214 - DNA, 79 bp, Glycine max
cgggactcaccacttcagaacactcactacacacagcacaaagcaaagctcatccttgagttaaaaacatggcagcagc

SEQ ID NO: 59215 - DNA, 141 bp, Glycine max
gaatgcgcaatccaagcctaagctccgtatacaataacatgggacaacaccacacgatcccgatactatcgcgttcgtcttcgggatcggagtcatcatcaaaagggacagtccgggggagtcgtaattcatagtcagaag

SEQ ID NO: 59216 - DNA, 153 bp, Glycine max
gaatcgcatgggcaaaccaaattcggcgctttcaacacggacactcttcacgatccacgcttaagtcctcatccatacgacatcatagcacgtctataatggcccatacattcagattcacagggcttacgtgtttgaatcatcgtgaccagt

SEQ ID NO: 59217 - DNA, 311 bp, Glycine max
aaggtatgtagaagatattttccagatcgtcaatttactttcgttttttaaaaaaattttggttggggttgctcataaatgtatgatatggtttgtaatttgaatagtcactgtcgttatttctgcaagcgtacttttaatgtatcaaaagttttcctttctagcatctatgccatcagttgtggctgggctttgtatatcctaggcaagtttgcatttgtgttttggacaaaatcaattgatacgtttaagtgtgtataaattataatacatgtcatacaaaataaatgacatcagcgagaaggaaaaag

SEQ ID NO: 59218 - DNA, 297 bp, Glycine max
aaatggagtctcactgtcatacaatgttggacggaaatttgaatttctattcaaatttcaccgtcactctgaaggttacattctaaagtcaactttagagccacgatttcactcattaagattatcaaatttcagcaattcgttcagcccacgaattccaacatcaagttcaggaatcaccatgaagtgtaccttggtgtcaccatgcatgtaaaccatgaatggtatacacacagtgtgactataagatgtggacatgtaatgtatcacacaaatgctcagctcggacttacgttg

SEQ ID NO: 59219 - DNA, 356 bp, Glycine max
ggttctagtgtgtgattgtttgttgttgtaactcgttcttcttcttttgttgttctgtgtttgtgtttgttttttctctcacctgaaaatgtcttgctgcggtggtaactgtggttgcggaagctcctgcaagtgcggcaacggctgcggaggctgcaagatgtacccagacttgagctacactgagtcaaccaccaccgagaccttggtcatgggagtggcacctgttaaggctcaatttgaaggtgctgaaatgggtgtgcccgctgagaacgatggctgcaaatgtggaccaaactgctcctgcaacccctgcacttgcaagtgaggtgttgggagagcaagcttcaagcaga

SEQ ID NO: 59220 - DNA, 266 bp, Glycine max
taggtgtgcaatttgtccatgtcaggggtcaatcgtaggttccatctgccatacctacccatgcactataccaaaccttaccaatccatttctaaatctcctccttttttcccccgggaggcttatccaatcaatcggtccattttccttattagctttcatcaatcaccggcttcatcttaaaggccaaccgttacctccccactctaaacctctcaacactttcccataaacaaccccatgattcctttccacaattctcccta

SEQ ID NO: 59221 - DNA, 127 bp, Glycine max
gatactgaatatttcgactatcacacaaggagtttccaccgtatatccggctgcgctcgacgttctaagcttacgttcgcgtgcctgcgacttcatacctcttccatcgtttcacctactctcaatt

SEQ ID NO: 59222 - DNA, 59 bp, Glycine max
gattcacatacttactactgtcagtggcagagagagagaaagatgaaaacaacaaaaac

SEQ ID NO: 59223 - DNA, 137 bp, Glycine max
taccggtcaggaattcccgggccgacccacgcgtcagcccacgcgtccgaattggagcgacagcactacaggatggacgctaaagtgcgcgtcaatgcgacgtcatcactcatccataatgtcaccaagattcaatt

SEQ ID NO: 59224 - DNA, 206 bp, Glycine max
tccacctaataacagcttatggtggatacctcagcacccagagacgacgaaaggcctactatgcgacaaaatgcctctgggacttgtacctattcgtagatctagggaatcccgattctacgtcaacccttcgtcactgctgctaagtccactcgccacgcaagatacaacctggtgaactgatacatcttatctagccacaggaa

SEQ ID NO: 59225 - DNA, 127 bp, Glycine max
agggtggatgtcaatgcgcgaaaaaaaaggagaaacaaaaaataaaacgggcgcgctacaagatgcgatcttacgttagcgtgcatgcgaagtcataacacttctacaatgtcaccgaaattcaatt

SEQ ID NO: 59226 - DNA, 355 bp, Glycine max
gtccaggaacatttctgttacaagaagtggcgaaaagtgcacataattgttgaatgcattcttaattgtactttcttcatttaggtattgttgtatactatgtttagtttataaaaaaaaaaaaaaaaaaaaaaaaaaaaaaaaaaaaaaaaaaaaaaaaaaaaaaaaaaaaaacaaaaaaaaaaaaaaaaaaaagtaaaaaaaaaaaaaaaaagaaaaaaaaaaaaggggcggctcaaaaggttcaatgctaaattcccgttgaagggaacgtaaaaacttttcaaacagtcaactaaaattcatttcaagggcgttcttttaaaaaattgtaaacgggaaaaccctggggttt

SEQ ID NO: 59227 - DNA, 286 bp, Glycine max
gacagtttccccatagaatttctcgtctgcaacgcactacccagacaccgcgtctccggttcgaaaccagcatagggaagataacgttgtgctgcgccgccacactgggaccttgcttaaggttgcaggcgtacattcacctacatcagaatatgtaactcgtcttaagtgtcaccactctattggtctatggcagtcacatcatacattcttgactggcaaaacttggtggtaagcctgcatagacggcatgctgcacaactctctttgacaagctagggtaata

SEQ ID NO: 59228 - DNA, 262 bp, Glycine max
gatccccagtcacatacaaaagttagggttcataactttcccattccctctcgcatgccaatctcaatacaataatcaagtctttcgtacatttttcatcaatctcgtctagatcacaacatcacgctgaccacttctgttagcaaggccttcaatgtcacagaagtcctcgcactagcatctcataccatgtctgacatgatcgcagtgcagcgcaccaatggcgcgatcccggtcccgaacatcactagcagcatgatgg

SEQ ID NO: 59229 - DNA, 378 bp, Glycine max
gattcacacaactaactaagaaagtcttccatagccccccaaaaatgaagagcaccatcttctttgctctctttctcttttgtgccttcaccacctcatacctaccttcagccatcgctgatttcgtgctcgataatgaaggtaaccctcttgaaaatggtggcacatattatatcttgtcagacataacagcatttggtggaataagagcagccccaacgggaaatgaaagatgccctctcactgtggtgcaatctcgcaatgagctcgacaaagggattggaacaatcatctcgtccccatatcgaatccgttttatcgccgaaggccatcctttgagccttaagttcgattcatttgcagttataatgctgtgtg

SEQ ID NO: 59230 - DNA, 381 bp, Glycine max
ggttctagtgtgtgattgtttgttgttgtaactcgttcttcttcttttgttgttctgtgtttgtgtttgttttttctctcacctgaaaatgtcttgctgcggtggtaactgtggttgcggaagctcctgcaagtgcggcaacggctgcggaggctgcaagatgtacccagacttgagctacactgagtcaaccaccaccgagaccttggtcatgggagtggcacctgttaaggctcaatttgagggtgctgaaatgggtgtgcccgctgagaacgatggctgcaaatgtggaccaaactgctcctgcaacccctgcacttgcaagtgaggtgttgggagagcaagcttcaagcagagataacccttaattaagaataatga

SEQ ID NO: 59231 - DNA, 348 bp, Glycine max
gactcaccacttcaaaacactcataacacaaagcacaaagcaaagctcatccttgagttaaaaaatggcagcagcttcttccatggctctctcatccccatccttggctggcaaggccgtgaagctgggcccatcagccccagaagtgggaagggtgagcatgaggaagaccgtcaccaagcaggtctcctcaggaagcccatggtacggcccagaccgagtcaagtacttgggcccattctctggcgagcccccgtcctacctaaccggtgagttcccaggcgactacggctgggacactgctgggctttccgcagacccagaaaccttcgccaagaaccgtgaact

SEQ ID NO: 59232 - DNA, 271 bp, Glycine max
gttcgctacggagtaaatacacaaatggaaggtaagaaagaatcgtcttttaacttcgtcctttgtctcgtgtttatcggtactatattggacagcatgcattctgacaatattggcagcaacatttatggatagatggtaaactatcaccatagccatagatatgacagtctacgaaacgtacaaaggcgccactcgataggatccagtgcttacgtaagcgtgcatgctacgtgataatgacttctaaagtgtgacgatctcatcaatt

SEQ ID NO: 59233 - DNA, 346 bp, Glycine max
gagtccactcgattttagaatttgacgtgtctggtgccttgacctgtactgcattgtgccccttcgctgacattgcagatatgtttttagtgctgacgcatcgtggtggggagatattcactacccttgaggggtgttctgctactgttcggtctggtttcatcatgaaaggcagaatatgtgaagtgtcgcgaccgtaacgcgtcactgaatgtctaatgcagtgacgtgttgaagctaatgtcactcaaagataagataggccagatgacacagattgaatggagtgtcgccacacctgatgtgatgatcatgtacttcaattggactgtgctcagtaggggat

SEQ ID NO: 59234 - DNA, 128 bp, Glycine max
aacaacgacgttaagagcaaacaacggtacggctgttaaatacaacagcgggcgttctacaggatccatgcctacgtacccgtgcatgcgacctcgtaactcttcgacaatgtcacctagattcaatt

SEQ ID NO: 59235 - DNA, 185 bp, Glycine max
aaagagacccggaaaaggtgggaaccgcttttggaaatccattgggcttggatttaagactcccacggaagccatcgaaggaacctacattgacaagaagtgccccttcactggcaatgtttccatccgtggccgtatcttggctggaacatgtcacagtgctaagatgaacaagactattattg

SEQ ID NO: 59236 - DNA, 185 bp, Glycine max
  unsure (1)..(185): unsure at all n locations
ggaaggatagtgattttagagtagaaaaagcanaaaaaaaaaaaaaaaaaaaaaaaaaaaaccggccgcccaaaaggatcaaacctaacttacccttgaatgcaacttcaaactcctccaagagtgccaccaaaatacaatacagggcccctctttaaacaatctcgacacggaaaaaacccggg

SEQ ID NO: 59237 - DNA, 359 bp, Glycine max
gagcgaaacagagagtgatttcagtgagtgatcggtgttcacttgatctcatcataatcgtcagcgtcaattgaagaagatgccgatcagaaacatcgccgtcggaaggcctgaagaggcgactcaccccgacacgttgaaggcggctttggctgagttcatctcaaccttcatcttcgtgttcgccggctcaggctccggcatcgcctacaacaagctcaccgacaacggcgctgccacccctgccggcctcatctccgcctccatcgcccatgcattcgccctcttcgtcgccgtctccgtcggagccaacatctccggcggccacgtcaaccccgccgtcaccttcggcgccttcg

SEQ ID NO: 59238 - DNA, 331 bp, Glycine max
gatttcttcttaacatagtatatttataataaatcagttacagaaacatagtttatgatgtactatatttcacattttaattaatatttcgactacacgcctaaacagcactactagtagacggtgttagatctagtgtgtacagacaatcaaacaaacctttcgtcgaacaccttctctgcatcgagcgcgccttttacgttgaactcgggagtggagggagcagagaacaccatcaccatgtttggctccgctcaaccttcttcttcacccttcggcaccccttcttctacccctgcttttggcaccccttcttcgatccctgcttttg

SEQ ID NO: 59239 - DNA, 115 bp, Glycine max
ggattacgtcgcctcatgcgcaaagcatggcaacccaggtcagggacaacggcaccgccatcgtgcaggaacctgccacgtgtgcaaggcaccttttacacgaaccataggacaa

SEQ ID NO: 59240 - DNA, 51 bp, Glycine max
aaacaatatttaagtggtcatcttataaaattttttaatgtcaatgaatcc

SEQ ID NO: 59241 - DNA, 314 bp, Glycine max
ggaaacagagagtgatttcagtgagtgatcggtgttcacttgatctcatcataatcgtcagcgtcaattgaagaagatgccgatcagaaacatcgccgtcggaaggcctgaagaggcgactcaccccgacacgttgaaagcggctttggctgagttcatctcaaccttcatcttcgtgttcgccggctcaggctccggcatcgcctacaacaagctcaccgacaacggcgctgccacccctgccggcctcatctccgcctccatcgcgcatgcattcgccctcttcgtcgccgtctccgtcggcgccaacatct

SEQ ID NO: 59242 - DNA, 83 bp, Glycine max
gatgatccttcaggcagttaatgggatatgaggagtggcaaaagctcgcaccaaatatgcgagaggggtgtccaccctagcct

SEQ ID NO: 59243 - DNA, 228 bp, Glycine max
ccacaagtccgcccacacatcagtgcagctgcgacaagaccacacatggggactttcgaaacttccgtgccccccagtttccgggtcaaccgagaagttactaaatgaaaacgtgaaccgaaacgaaaacgaacggcggatatcagttgttccatcgaggctcaccgcggcaggctcccccgaatccctgttcacaccttctgcatcgctggaacctcgtcggcatac

SEQ ID NO: 59244 - DNA, 367 bp, Glycine max
ggttctagtgtgtgattgtttgttgttgtaactcgttcttcgtcctttgttgttctgtgtttgtgtttgttttttctctcacctgaaaatgtcttgctgcggtggtaactgtggttgcggaagctcctgcaagtgcggcaacggctgcggaggctgcaagatgtacccagacttgagctacactgagtcaaccaccaccgagaccttggtcatgggagtggcacctgttaaggctcaatttgagggtgctgaaatgggtgtgcccactgagaacgatggctgcaaatgtggaccaaactgctcctgcaacccctgcacttgcaagtgaggtgttgggaaagcaagcttcaagcaaagataaccctta

SEQ ID NO: 59245 - DNA, 328 bp, Glycine max
gactacctcaacaacaatactacagcagcatacgtcgtcgtcgtcgtcgatgacctctcctccgccgcatcatcatgccttcggtgtccctcatgataatggtggtcgccgcttcttagctgctcgtcgtcggcggtagcaacaacacctccaccaatgataacatcgaagacatccacggctttgttataatagcagaagatgatcataggaatgaatccttgttgtctgatattgatggtgatgttattgatgagcttactgccggtagtgaagaacagctggccgcggcgtcttctggtggtagtggggccgttgtcgttgccgc

SEQ ID NO: 59246 - DNA, 228 bp, Glycine max
gcccgccgatatgtctattcatagccttgctggaaagccacatttcactacatgtcgaattccacaacaagtcaataccggtggcccctcctgacagttgcgcagccgggatgcccaaggggacgcgctctgtaattgcgcattaagagatgcgggtgtagtcgctacggggcaggatgaacgctacacttaccaattgcctatcgcatggctcggatcacattcttc

SEQ ID NO: 59247 - DNA, 375 bp, Glycine max
tcagcgggatcatcccgacattcagttcataatttctgcggacttcatatatatttcgtacataaagcatggcacgttaggtgtgaaagaatgaagagtcactgcagctgaaagtcgcagggacgactcatgttcattcataagagaatattggaagacaggatgtacaagtggtcatcatatgatctctctacttggcctctgactacaagcagtagctcttgatttacatgggtaaagatttcgagggcatggtccatcaactcacagttggacttgcactggtgctgaaggagttccaccaacttgcaggcacgttatggatatatgaaaagtgggtgttcagactcaagtatgatgatcacatgcatggtg

SEQ ID NO: 59248 - DNA, 304 bp, Glycine max
gaataatagtcccttttctgaaattctcctaactctctctctctctcaacaatggctcctacttttgttcctaagttggtttctgctgcagcattgttgtttaactccacgatggctcaatctccaacttcctcccccgccttaacacccaccaacacgccggttggcactccacctaagagggcgttgtccccgttccctgttcctgctgccgttccaaccgtcgtcctctccctccggggtccacctaccttcttctccttcggaacccccaatttgcagctgctactcccaaacatccctc

SEQ ID NO: 59249 - DNA, 179 bp, Glycine max
caacggggaggtctcgtcacaactttattcaatcatgcttctcctgcgacaagggtattaacggatcctcctccaaaaatacgagaaaatgggtaaagaaaacgcttatctcaatatcgccgacatctctcactctcacaactgggaaatccacttctcttcgtaccttatttacaacc

SEQ ID NO: 59250 - DNA, 359 bp, Glycine max
  unsure (1)..(359): unsure at all n locations
ggtctagaattaccgggccgacccacgcgtccaanaggatacaagggccctgtgatgggggatgcttgacgccatgcgtgatacgggccgtgctgcttttagaccaatagtggataagattcaggattctgaatgttcgcagtgcttgcattatacaatatgattgcgtgaatttcatttgcctcccatatgtattaattggttgtgactcaagtattgacatctgcatttgcgtcagcatctcctgtgatcttatacattggaatcacagatcatacgcgtatttcaaattctggggtttcttccacactacacatgatctaaagcgtcagttcatcggggtacttaaaacgagcatc

SEQ ID NO: 59251 - DNA, 242 bp, Glycine max
aaggatcacttaaggggtatactacttgactgaatattgaacacgattttgtacaattaatcataatttaaaaaggattcaataaacatttggaaatgatttatacctctaagattgttaacatcttaacgaggatagtgttgatcatcaaaagccctcatctggacaaaaaaaaatgcggctattcaagatgattcattactcatttagtcatgcaagctaattcatcctccaacatgtca

SEQ ID NO: 59252 - DNA, 174 bp, Glycine max
agggatagcaaaatcgtatcgccagtttaatcaccagtgttcaacccaattcccttcctcgttttccattaagagatcaatggcacgtttcaagcaaaacgctcccaagtccaaccgaagaaatggtcccaagaaacaattggtaaccaaagccgctcgcaagtcaacccccgg

SEQ ID NO: 59253 - DNA, 343 bp, Glycine max
gcacttgcaatcccttttaacatttagggcaaggttcattttcgcaccaggccccagttccagcggttttcctcttaaccaaccacaggcattccaagtagattacggattgcctccacagtgccaaaaggtcgaactcatggtcgtgcagaatcattaggatcacaaatttggaaacttccacggcaacaagctcgacttcccactacacacgttatatgtgtgccacctagaaagcggataatttgaccgtctctctcctcacatatgagtgttcaggacatcttaaggtaaatggcgagagaccccaaagattccaattcctgacacctctgaactacgt

SEQ ID NO: 59254 - DNA, 279 bp, Glycine max
tgccgttgcgataccactaaacaacggtaccgctgctaaataccacagaaagggtccgccaatttccgtagctactgttcttgcgcgttcacaggcgcaaagtgatccaaaaacataaggtaaccattaccttgtcaaccaaggatgactcttccgtaagcgctcctacaactatgtaaatacatagtttagtcaaacaccacggctcacatagacacgattggcacatcacatcaaagcgatgcacatatacactatatcaactcctcgacctctcat

SEQ ID NO: 59255 - DNA, 61 bp, Glycine max
ggtccaggattcccgggtccaaccaagcgtccgaacggtggcaaaaaaacacaaaaagggg

SEQ ID NO: 59256 - DNA, 276 bp, Glycine max
ggttctagtgtgtgattgtttgttgatgtaactcgttcttcttcttttgatgttctgtgtttgtgtatgttttttctctcacctgaagatgtcttgctgcagtggtaactgtggttgcggcagctcctgcaagtgtagcaacggctgcaggagctgcaagatgttcccagacttgaactatcatgaggtcaaccatcgacgagaacttggtcatgggagtggcacgtgttaaggctcaattttagggtgcttaaatgggtgtgcccgctgagaacg

SEQ ID NO: 59257 - DNA, 107 bp, Glycine max
aggctttgttcacaaaagaactacgtaggtctgattttctcatcacaattgaggaatacgtaggagcaaagggaaacgcccttgtcgaccgaaaaaaaaaaaataac

SEQ ID NO: 59258 - DNA, 387 bp, Glycine max
  unsure (1)..(387): unsure at all n locations
naggggccaagattctcttaaccaaagcaatcttcagttttttttttttctctctcactcccttctctcctccttataaaccaatcaaccttagcctcagccacatccaaaattcagagtgtggttgtaaagttgcaatggaagtgttgagagttcaggtttttgttgtgtccattgtggctcttgctttggcttatgtggcaccttccatcaatgctcaggtccttcctcctgcccctgcccctgcacccacaagtgatgggatatcagttgaccaaggaattgcctatgtgctaatgctgctggctctggtccttacttacatcattcactaacctctctatcaccccattcatctattcactatgtttttcttcaactctattc

SEQ ID NO: 59259 - DNA, 312 bp, Glycine max
gactcaccacttcaaaacactcataacacaaagcacaaagcaaagctcattcttgagttaaaaaatggcagcagcttcttccatggctctctcatccccatccttggctggcaaggccgtgaagctgggcccatcagccccagaagtgggaagggtgagcatgaggaagaccgtcaccaagcaggtctcctcaggaagcccatggtacggcccagaccgagtcaagtacttgggcccattctctggcgagcccccgtcctacctaaacggtgagtttccaggcgactacggctgggacactgctgggctttc

SEQ ID NO: 59260 - DNA, 356 bp, Glycine max
ggagaataaggatcaagcggcagacgtggcttcaaattggggaatccgtctattcggcaacatagtcgacacacggagcattcggtctgttcatcaccgtcaccgttgcgcgcaccctctgttctaacgactcctaaatagcttgagactttgcttccacttcatctttcccagatcgttgcaccctttgcttccatatgcacacgtctgcgccgttcactgtctgcatggaataagcatcaattcacctgtttgatttaccacatcacatggtatcacatgcaacagattgatgtctcaacaagcatgcctacttcacacatgatgaggactgttctcaacgttgtcgatatctc

SEQ ID NO: 59261 - DNA, 282 bp, Glycine max
gagagttctcattctctctctctctctcaataatttctctctctctacagttttctctatactccaactgtggtatttctgtcactgctaagatccccacctaatcgcctcgtctcaggctcatcagtcttttcccttctcttccaagctcataaactcacacacccacgtgcttcattttccccgtcggtctgggaggttttgttagtattagatgggtgtttctggcagggtcgcattcagagttatcgagcgtcagaggtggggggggggggggggggg

SEQ ID NO: 59262 - DNA, 370 bp, Glycine max
gaattgactgtgggaacatgcgaattgcgagcctgatacgagagcttcagattccagtttgttcctcagaccctccatcatgtgtcataggcttcaaattagtggtaacatcatcttaggggagagatttgactgatcgcaccttccagatatgcaatgactcttatgagagcacagaagatctttggagcatgcggagacgttgccattacagaaacatgattcccgtattgtggtagtggcagcagtgtgtgcgctggggatattagatgtggatctgaacgacgaatacgccttggatctgggccaaaattgaccatctgtggaagagatttgggacaacgtgaggaaatgtggattcgagcctctc

SEQ ID NO: 59263 - DNA, 73 bp, Glycine max
gggaaatgaaaataaaaaaaaaaaaattgtgtattattgaatttctctggaatcttcttctgtgtatgggggg

SEQ ID NO: 59264 - DNA, 339 bp, Glycine max
gcttggtgttgattcttgacgatgtccgccgccaggtgtttgctgcgctccgccgtctcccgagctgccggtgcggcaaatctggctgccggagctagaacgaagcctgcacgatctccgtttcggctcccaaagcaaacctcagtctccaatcgcgttttcaggttaccggtggaagcgagcttctgcgtggaatcgatgcttccttatcacagtgctactgcgtctgcattgctgaattcgatgctctctgtgtctcgccactcctacggttggacccctgaagggtgatgctgaatgccacaatttctggtctgtaagctcgtgatttggaattta

SEQ ID NO: 59265 - DNA, 248 bp, Glycine max
ggtaccggtcaggaattcccgggccgacccacgcgtcagaccgctggtacgacacacacatcagggaaatacgtccatctgatgggatcttagaagcgtgtgcacgatttgagcacacaactggcatttgacgtcctcatcgtcgttttcgattaagagagcaatgacacggacgatccaaagggttcacacttacatcggaggaaaggtccgtcgaagcacttggcaacgatagccgctcgcaagtc

SEQ ID NO: 59266 - DNA, 216 bp, Glycine max
gagctttcaattggctcaggtgaggtagtgatctgcgaccgtggggtctcagcaatagctgcatagtcgtatgtttcagatgtatgtcacaagcatcactctgaggtcgtgcgcttcttgcagtcagtgaggtgcttggagtgtaggtttgaatgttttaatgttcagcttgcaactgtctattcgcccggacagggtccgtctcctgggacttca

SEQ ID NO: 59267 - DNA, 60 bp, Glycine max
ggttggtagaaaaaattgggcttgtgggacttgtttaatcgggaatcacaactcgtgaca

SEQ ID NO: 59268 - DNA, 177 bp, Glycine max
ggaccatggagggttttgcctgcagctaaaatcgaaagcaggacgccgcagtgtcatatagtaggtcaagcgatcacaatgcgaaggtcaccaattcatttcattatacctcacacgtctagcctcacttcaaaatcatctcgcaagcttcatgtcacctctgatcgatgacatact

SEQ ID NO: 59269 - DNA, 351 bp, Glycine max
gactcaccacttcaaaacactcataacacaaagcacaaagcaaagctcatccttgagttaaaaaatggcagcagcttcttccatggctctctcatccccatccttggctggcaaggccgtgaagctgggcccatcagccccagaagtgggaagggtgagcatgaggaagaccgtcaccaagcaggtctcctcaggaagcccatggtacggcccagaccgagtcaagtacttgggcccattctctggcgagcccccgtcctacctaaccggtgagttcccaggcgactacggctgggacactgctgggcttttcgcagagccagaaaaccttcgccaagaaccgtgaactcg

SEQ ID NO: 59270 - DNA, 112 bp, Glycine max
gttttgaggatgttatgtttgaagaaacttgagactttcttttttcagcgaattaattatcagacgtaaattgtggtactaagaatacgtttacataaattgttttgaacca

SEQ ID NO: 59271 - DNA, 178 bp, Glycine max
ggtcaggaattcccgggccgacccacgcgtcagcggatgcgacagtacggctgagagggaactcaaaactgagacagctttaatgcgttctcggagatttgatctgaccttccacccttcaattcgcgggacgatggcaggatctcacgctggcgtgacagaagttctcgacgacggt

SEQ ID NO: 59272 - DNA, 170 bp, Glycine max
gagtgagaacaatactgttccaaaacttaatttgaggtagggcctaccctaaaatgccataacatggacctatcagtagcatttacaatagaatctattaaaaaatttttgtccaaaaaaaaaaaaggaataaaaaaaaaaaaacgggccgcccaaaaggttccaagctt

SEQ ID NO: 59273 - DNA, 229 bp, Glycine max
ttggcgtgtaaatattttttattataaaataacaatgatgatggtgatttggtgtatatattaattaatattataaaataacaattaatcttattctttaatagatatcatttatttttgtgtggcacacaggacaaaaagtattttttttttcgaaaagaagcactagttaggcacagttcccaggaataaagtatagccggtccagtgcgtcctgatacttcgagga

SEQ ID NO: 59274 - DNA, 68 bp, Glycine max
attatccaacttgctacaatgaacatagcaaatcaaacaaaaaaaaaaaggcggcccctcaagatgat

SEQ ID NO: 59275 - DNA, 385 bp, Glycine max
ggttctagtgtgtgattgtttgttgttgtaactcgttcttcttcttttgttgttctgtgtttgtgtttgttttttctctcacctgaaaatgtcttgctgcggtggtaactgtggttgcggaagctcctgcaagtgcggcaacggctgcggaggctgcaagatgtacccagacttgagctacactgagtcaaccaccaccgagaccttggtcatgggaatggcacctgttaaggctcaatttgagggtgctgaaatgggtgtgcccgctgagaacgatggctgcaaatgtggaccaaactgctcctgcaacccctgcacttgcaagtgaagtgttgggagagcaagcttcaagcagagatagcccttaattaggaataatgataaa

SEQ ID NO: 59276 - DNA, 293 bp, Glycine max
gactcgcagttgtattgttgaacaagggtttctctgtctgcttcttcactttctctcgtttcaatcgaaaccaaaacaaaaacatgggcagaaaattcttcgtcggtggcaactggaaatgcaatgggaccactgaggaggtaaagaagattgttactactttgaatgaggctaaagtccctggagaagatgtcgtagaagttgttgtgagccctccttttgtgttccttcctgttgtaaaaagtttggctgcgccctgatttccatggttcggcacaaaactgttgggttcg

SEQ ID NO: 59277 - DNA, 94 bp, Glycine max
caaagtctccagtgctgccacatgaactgttacagcataggttgcttcctggtagagatatggtgaagtttaagcttcagggtattttttggga

SEQ ID NO: 59278 - DNA, 111 bp, Glycine max
aaggttccgctgccaaaaaaccacaaaaaggtaccgcttccaaaaaaccacaaaaaggtaccgcttccaaaaaacgacaaaagggtaccgcttccaaaaaacgacagaaag

SEQ ID NO: 59279 - DNA, 57 bp, Glycine max
gagacctcaggtcaggcggggctacccgctgagtttaagcatatcaataagcggagc

SEQ ID NO: 59280 - DNA, 89 bp, Glycine max
aagcttatggaacatgtcagtgtgatgtctgtctgctataccatgagctttagtaatctcactcactggattgataggttttgtcgaaa

SEQ ID NO: 59281 - DNA, 126 bp, Glycine max
gtctgcctatttttacatctaggatttacatatacaacatatatcactgtcaagattaagagtgaatttttggattatttagattagatatttcgattccaaaattaaaaaaagggataggagatt

SEQ ID NO: 59282 - DNA, 193 bp, Glycine max
gaacacactcatattgtatacctcacaacttccatgtcactgcccgtgtgtcgccgctatggccagtgtcatcaaccaagcctccgtcgcaattttccgggcatgtaccgctaaatcgaggctgctgagcggcacttccggtcaacttaaaccggaagtaaccttgctgccaatgaggtgccctccttcagcc

SEQ ID NO: 59283 - DNA, 258 bp, Glycine max
gctgctttttctttctcatattttccttcattcccagtttccacacctttcccacaattcactatttctctcgccatgccatctcgacaactgcccacgtctgcaccacctcccaaccaccgcgtctcaacccctctcttcgctttcaccgcctccgtctgctctttattctttctagccctcctctgcctccggaagcgtcaaccgaacaactccatcctcgaacccccctcaaccgttcccctaccccgtcctccg

SEQ ID NO: 59284 - DNA, 383 bp, Glycine max
tattaaaaattatttatatttttattaaggtttaattacttatttagtttctatagtttttaaacttatttattttagtctctatcgttaataagttgattttttagtttctaaaatctacattttaattcccaaacaatttcaactgttaaaattatttaactaatgaagttaaaaaaattttaataacattgatattttaggaattaaaatgtaaattgcaggaattaaaaaatatacttattaaatttcaaaaattaaaaaattcacttattaaatataagaattaaaaggaataagtttaaaaactataaaaactaaatggataattaaatcttaattaaataactttttgaatcaacattttcattaaataatagaca

SEQ ID NO: 59285 - DNA, 417 bp, Glycine max
ctgggatgccaaatttctcagacatcaaggccaaccttttgccagtcaaattattaaatcacttgttcacatagatcagctgatgccatcatcttagtatggattcacaacagctcttcagtttcggtggtgttactagtgcaggattaccttacatgtcttcttttcccactgttccatcgctacccaacagtctacttagatccttgaaatatgacacaggaaactcacctaattcacccttttccacttattttgattctgatactctttcagcattgagtgacggccaggagcaatacagcccaggagaaatcctctctggtgtcagctcttcactggaaaccaaccattatatgtataatagatcaatctccactttggacagtttcccattatattctgatcggaactctc

SEQ ID NO: 59286 - DNA, 377 bp, Glycine max
gacttcaattgcaatcaaattagttcattctccttgcgcagttccctacctctcctttcacgatgcagatcttcgtcaagaccctcaccggaaagaccatcacccttgaggtggaaagctctgacaccatcgacaacgtcaaggccaagatccaggacaaggaaggaattcccccggatcagcaacgtctcatcttcgccggaaagcagctcgaggacggccgtaccctcgccgactacaacatccagaaggagtcaatccttcaacttgtccttcgtctccgtggtggcatgcagatcttcgtcaagactcccactggcaataacataaccctagaggtcgaaagctctgacaccattgacaacgtccaggccaag

SEQ ID NO: 59287 - DNA, 177 bp, Glycine max
gggtcgagtcacgcgtcgagtcacgcgtcgcatcggtgcaagaatacgagcagcgggggggaaagggtcagatttatcctgacaggagcaagagttatagcacagtgtagtttgcttcagcagcaggtatgggcatgttgcagagaaaggagagggtccaatgcggtcgttcctcaa

SEQ ID NO: 59288 - DNA, 123 bp, Glycine max
ggaggctactgtaatcactactcatactagtcttcgactctcattcatcattacgcacctatatcaccaatccacacagtcccatgtttcacgtttaaccattcccaccttacattccattcc

SEQ ID NO: 59289 - DNA, 158 bp, Glycine max
gatggctctgaatagaagacaatagggtaggccgttgagatggtgtcgtgtgggctaatgctcagaactgcagttctaaagtcttctgacaatattcttactagtactaaatcatttcgtattatgtgagtagtgcttggcctcttaaacgtgtgtcg

SEQ ID NO: 59290 - DNA, 113 bp, Glycine max
agtgcggtctagaattaccgggtcgacgcacgcgtccacccacacgtccgacgacagaaggggaaacaaacaaagaactcactcaaactcaacatagagagagagagagagag

SEQ ID NO: 59291 - DNA, 395 bp, Glycine max
agaaacagctggggaaagcgagggcaagttgggaatagacccacccaaaatcgcatccgaaattcctaacagaagagaaaaggaaggcatagattcacatttcacacacacacacatacgactctctctctctctctctctctgatggattcgagggagtaaaagcaagaaagcaagcatttggatttggattgagatccgcaatggcaccgaacaacaccagaaccatgggatcccatttccctcttctcgctttcctctttctctgcctcctcgcgccccttctcttcttcttcttcgcatcgccccttcacggtctcattctctcattctcaactctcacttgttttcaattattagttttgtttctagtgttggcacatccacgtagagtg

SEQ ID NO: 59292 - DNA, 67 bp, Glycine max
ggtccaaaatcctcactccagccacaacccttcatgtggaccatgggctcaatgggtgggttacaaa

SEQ ID NO: 59293 - DNA, 386 bp, Glycine max
  unsure (1)..(386): unsure at all n locations
ggttctagtgtgtgattgtttgttgttgtaactcgttcttcttcttttgttgttctgtgtttgtgtttgttttttctctcacctgaaaatgtcttgctgcggtggtaactgtggttgcggaagctcctgcaagtgcggcaacggctgcggaggctgcaagatgtacccagacttgagctacactgagtcaaccaccaccgagaccttggtcatgggagtggcacctgttaaggctcaatttgagggtgctgaaatgggtgtgcccgctgagaacgatggctgcaaatgtggaccaaactgctcctgcaacccctgcacttgcaagtgaggtgttgggagagcaagcttcaagcagagatagcccttaattangaataatgataaac

SEQ ID NO: 59294 - DNA, 261 bp, Glycine max
ggcagaatctggggttgctcctgctttggccagggctctcagctctgaaagattggtaccgattccggatgtgagccaaaacagctttcatttgaatcccctgtttttcctttcgggaaagttaacaatatgtgggagtttctgctgtgaattgaattcgagtcgtagcttctggattcggtgcttgctgctttggtggcataagttattggactaagtgagatgatacgatttgagtgcaaaggagacttacactgtgtg

SEQ ID NO: 59295 - DNA, 379 bp, Glycine max
gacagcgaaacagagagtgatttcagtgagtgatcggtgttcacttgatctcatcataatcgtcagcgtcaattgaagaagatgccgatcagaaacatcgccgtcggaaggcctgaagaggcgactcaccccgacacgttgaaggcggctttggctgagttcatctcaaccttcatcttcgtgttcgccggctcaggctccggcatcgcctacaacaagctcaccgacaacggcgctgccacccctgccggcctcatctccgcctccatcgcccatgcattcgccctcttcgtcgccgtctccgtcggcgccaacatctccggcggccacgtcaaccccgccgtcaccttcggcgccttcgtcggcggcaacatcacct

SEQ ID NO: 59296 - DNA, 371 bp, Glycine max
ggttctaatgtgtgattgtttgttgttgtaactcgttcttcgtcatttgttgttctgtgtttgtgtatgttttttctctcacctgaaaatgtcttgctgcggtggtaactgtggttgcggaagctcctgcaagtgcggcaacggctgcagaggctgcaaaaatgtacccaagacttgagctacactgagtcaactaccaccgagaccttggtcatgggagtggcacctgttaaggctcaatttgagggtgctgaaatgggtgtgcccgctgagaacgatggctgcaaatgtggaccaaactgctcctgcaacccctgcacttgcaagcgacgtgttgggagagcaagcttcaagcagagatagcccttaat

SEQ ID NO: 59297 - DNA, 253 bp, Glycine max
gtgacattttagattccaatgcacataaaatttatgtatataaagatggacactgaaatcaaatcaggcatttcatttagtcctttgtactgtatactagtagtatgttgctggccatcatttgttgaaaacttaaaatgttagaaatagtacaagggtgacaaattgtaataatgtatttatcagaagagacgaagagaaagagggtgacaaggagaagagcactaggagagaagaaaatggaggggaggat

SEQ ID NO: 59298 - DNA, 53 bp, Glycine max
  unsure (1)..(53): unsure at all n locations
gagacctcaggtcaggcggggctacccgctgagtttaaacanangatanaaaa

SEQ ID NO: 59299 - DNA, 139 bp, Glycine max
gcactgcgttatagcaggaccaacttcatgaccacactgctcgctattgctgttcgctcttgctgctcgtgggacttcggtaaccttgacaatgtccagttcggtatccgtaccttggccatttggtcagtctcatgat

SEQ ID NO: 59300 - DNA, 152 bp, Glycine max
taaatactaaattaggtttttcaaaaggagaaaagaggaaaagagcaggggagaaagagaggaagggggaaaaaaagcgggcgctctagaggatcaaagcttaagtaggcgggcatgcgaggtcatagcgcttcgagagggtcaccggaaag

SEQ ID NO: 59301 - DNA, 111 bp, Glycine max
gaccattttggagggagagaaaaaaaagggggggaaatttcaatggcgtcaagggtttctctgaaggcaaggggtaagatttcaagggtatcaagcgccgcgaaatatcta

SEQ ID NO: 59302 - DNA, 230 bp, Glycine max
gacaaaagtagcaaagcaattcactcagcctcttcaccacctctttaagctcaggctatctaagaaatgttagtacttctttcctggcaggtttaaatccgtttgtggtgtgagaaaaaaggggatggatttggcaagagcaagggtcttcttcatggggttcgttgtggggggtctatttgctgcaagggtgagtgctcagaccagtgagttccctcaagcggcaggac

SEQ ID NO: 59303 - DNA, 366 bp, Glycine max
gacttctcttcacacctttgttcactcttcttctcttgcggctagggttttagcgcagcttcttctagatttaaggaagatgggtaaggaaaaggttcacatcagtattgtggtcattggccatgtcgactctgggaaatccactaccactggtcacctgatttacaagcttggaggcattgacaagcgtgttattgagaggtttgagaaggaagctgctgagatgaacaagaggtctttcaagtatgcctgggtgctggacaaacttaaggctgagcctgaaagaagaatcaccattgatattgcttttgtggagtttgaaacaacaaagtaatagtgcacagttattgatgcgcctggacatag

SEQ ID NO: 59304 - DNA, 379 bp, Glycine max
actcaccacttcaaaacactcataacacaaagcacaaagcaaagctcatccttgagttaaaaaatggcagcagcttcttccatggctctctcatccccatccttggctggcaaggccgtgaagctgggcccatcagccccagaagtgggaagggtgagcatgaggaagaccgtcaccaagcaggtctcctcaggaagcccatggtacggcccagaccgagtcaagtacttgggcccattctctggcgagcccccgtcctacctaaccggtgagttcccaggcgactacgggtgggacactgctgggctttccgcagacccagaaaccttcgccaagaaccgtgaactccaagtgatccactccaggtgggccatgctcg

SEQ ID NO: 59305 - DNA, 344 bp, Glycine max
gagcgaaacagagagtgatttcagtgagtgatcggtgttcacttgatctcatcataatcgtcagcgtcaattgaagaagatgccgatcaggaacatcgccgtcggaaggcctgaagaggcgactcaccccgacacgttgaaggcggctttggctgagttcatctcaaccttcatcttcgtgttcgccggctcaagctccggcatcgcctacaacaagctcaccgacaacggcgctgccacccctgccggcctcatctccgcctccatcgcccatgcattcgccctcttcgtcgccgtctccgtcggcgccaacatctccggcgggcacgtcaaccccgccgtca

SEQ ID NO: 59306 - DNA, 75 bp, Glycine max
agacgacagagaggggttgacaaacgaaaaatgtcggccgcccgcaaggttccaagcttacttaggcttgcaggc

SEQ ID NO: 59307 - DNA, 296 bp, Glycine max
ggttctagtgtgtgattgtttgttgttgtaactcgttcttcgtcttttgttgttctgtgtttgtgtttgttttttctctcacctgaaaatgtcttgctgcggtggtaactgtggttgcggaagctcctgcaagtgcggcaacggctgcagaggctgcaagatgtacccagacttgagctacactgagtcaaccaccaccgagaccttggtcatgggagtggcacctgttaaggctcaatttgaaggttcttaaattggttttcccgcttaaaaccaatggtggcaattttgaacaa

SEQ ID NO: 59308 - DNA, 273 bp, Glycine max
acgcgtccaacggctgaacacagaatggtacagctgccacaagaccacatacgggtacagctgccaaaagaccacaaaacggtactgctgctaaaatacgacatccaggagaagaatacagagttgggtttcccactaacgacatatgctatcaatgtgtaactttacatcaatcttatcggttaactggacatttacctcctttatactcgataagttttgctataactcgttttgtagtttcatgtttactgcttaatatctgtgtttaac

SEQ ID NO: 59309 - DNA, 261 bp, Glycine max
gataacgggacaataaaacacacatactcttttctgtttttatactaatctcatgtaggtgtgacagacaatgtcattcttggcttatatgagggtatcaataatgctcttctgaatcgaggctcttcacgcttccctcatgtggtttcccctcaaataattgtttcccaccaaaaaaagctcccatctcttacagcatcaacatccacacccacgcgcgtcccatattcccctccaccttcctccatctgcttcccctcc

SEQ ID NO: 59310 - DNA, 384 bp, Glycine max
cctacttgcagcaaatattctcaatatgatgtaaaagtcaagactatgcagaaaatgaatacatgtcctcacgacacagaagcacaaaaaggattgtatggtttctatcaggcatttacaagttcaatgatgtatccttatttatactacttgcagtatttatcatcaagcatgactcttacactaaattagatagatggaatagtcttatcatacttgaaatatataatatctttagtaaattcggtatctactaactatatgaatcaaaattatgcagattatcttaattcacggttcaatggcatccaactagtcagaaattgattccatagttttctagtagctactcatgaatccagtgatacaatcctaatatgcctt

SEQ ID NO: 59311 - DNA, 232 bp, Glycine max
ccagacggctacagaagggtaacgctgagagcatacgacagtgtgggctacttgcagcacatattctcaatatgatgtgcaagtcaagactatgcacgcactgcataggggtcctcatcacacagacatacacatgagattgtatggtttccaacatgcagttacaagttcactgatgtcaccttacttacactacgtgcactatttatcatcaaccatgactcttacacca

SEQ ID NO: 59312 - DNA, 193 bp, Glycine max
aaaaaaaaaaacggccgctctaaaggatacaggccgatctacacgatccagccacatctaagctcgcctacgacgtcacctatcttcaattcagtggccgacattcatattcactggccatcggtaaaaacgtcgtgtaagggaaaaaactgccgtgaaccaaattaatcttctctgcagcagagctcctttc

SEQ ID NO: 59313 - DNA, 297 bp, Glycine max
gcactgcgttatcgcacgaccagcttcatgaccaactgctcgcgcatcctattcactcttgcagctgttaacattccgtaaccttgaaatttccagatcgagaaccgtatctaggcgatttggtcagtcgcatgattcgaaaattatctttgaccgacaagttccacttctgttaccttgtcacggcctgaacagattggattctcgatatcacattgtaaccccatccatctggattaagactccgctgaccatcaatgatgtcgtcataggcttcaggtaaattatctcatgtat

SEQ ID NO: 59314 - DNA, 297 bp, Glycine max
gattacattatcaaacaacccattccaattctcgtgaactccattccattgcttctcttcttcacaaattccattcctagagagagagagaagcaacaacatcataatcggaatttgattgaattcgatttgggtgatgagcgcgtgaaaaaagaagaagaggaagaagatggcagggaagaaaggggtggcggcagaagacgcaataagggccattgggttaaggttacaatctcacaaacgatctcaagctcaaattctgcaagaaccactccagattgatcgctatcgacgatg

SEQ ID NO: 59315 - DNA, 352 bp, Glycine max
ggccaaaccaactccccaaaggggaccttagagagcaatcttctaccttctctctcctctctctctctctctctcttttgcttttattattctctttcaatggcttcatcctcttccagaacaaattcaattgaccgtgtctaactctctctcacactccaccagattctgctcatacaccacttccaaaactcctttctcttctccttcatcggccttcccttcctccacaagctctggcttttcgtcctcatccttcttcaaccagccacgttagcatcacgctcacaggcatcaccgtgccggatcgcccacccgtgtcaatctatgcagccccgcccctctctcctct

SEQ ID NO: 59316 - DNA, 63 bp, Glycine max
gaataatatattttacgatagttcttgatcagatattcatgtccgtgatagctctttttgccc

SEQ ID NO: 59317 - DNA, 407 bp, Glycine max
gaatcaaaaccctccaaggtttgatctcaaaataaacaatggaaaactcttcaccccttcctctttctaaacacaacagagatctccttttatctgctttataactcccatctggtcatccttcgcaaaaagaatttcagaatgagaatgtgtcaccactcttttgccttcaccatctcaatgtccttttctaattatctttatcttgctccttagaagaagaacctcacactacagagctcaagcaccccacccccaagtggtcaaaatgtcaactatgccaatgtatcaacagcaacaagaacaacctcctccgatgagtgtgacacaacattcaccacatgagtccattggtcccgtgattggggttctggtcgtggttattgtgttaggcgtaattgctgtta

SEQ ID NO: 59318 - DNA, 151 bp, Glycine max
atagtgcactacctctatactcacgtgtgagattgcaggccgttcagttgcaccaatgtctcaaccacatgcagcaaagcttaaatagggaaacccaagaccaccaagtccgtatcccgttccaccagcacctgacttcaattacacatct

SEQ ID NO: 59319 - DNA, 283 bp, Glycine max
aaatgaggccgttatcatcgtcatcatacacgtagtcatggcccatcagaatcacgccacatctggccatgtgttcgcccactcaagcggctgggggggcacacaacccaggtcatcagcagttcgatcaacagtcaggtcgcaggccaccatagtatcgaccgtgtccgctgcgaacacctcttcaacatgcggcacacaaccccgacgcctgcatgcgtggccgatgtgaaccttgaacttctcccgctcgtgcaaggccacgaatgtccagtcggcggta

SEQ ID NO: 59320 - DNA, 272 bp, Glycine max
ccttgggtaactcaccccgatacagacaactacctccacacccgtagtaactgtggtctgatactgacctcccgcgcgtcaacttaacttggtgaagtcacgggggcctattggtcgccgtatgcgttcagggaagcgttccatcgaaccgaaccgtacttacacgcgtatcttgccggggcccatgatcgtcctcgctgaggacgtccgaaatgcacacgactacggcgacaacggtgaccaccccaaatatgtcccttgagatatcatca

SEQ ID NO: 59321 - DNA, 282 bp, Glycine max
aaaataacaaggtatgggaaacagcctattattcatacctttctctcgcgctcatacattgaaattgtaacagtcaagggtgtatccaacagaccttagcctgtgggtcaaagcattggaggattggatgcattgcacgatgaatcggtggtattcaggtggaaacatgcattgatgtcactgtaggagcatgccaagagcaatattagatcctacactcatgccaaaaccttgtcttctgctacgtctgctgctgtctccaattaaccctttaagccaccc

SEQ ID NO: 59322 - DNA, 230 bp, Glycine max
catgtctaacattcacaatcttctccttcccaagaatgctggtggatcatccaatgctgctgctgcaaacgatgactcttaaataagggttttttttccgtgaaaagttatccaatttattctctttggattctcactgtctttgtagtttttcagtttttgataattgcgttctgtacatgtaattacgttttcaatcactgatgtgaatatagaacactcattttctc

SEQ ID NO: 59323 - DNA, 378 bp, Glycine max
agaagggcagaaaaacaagatttgtaacacaaactgtcctttttattaggcttttacccccaaaaaaaaaaaaaaaaaaaaaaaaaaaaaaaaaaaaaacaaaaaaaaaaaaaaaaaaaaaaaaaaaaaaaaaaaaaaagaaaaaaaaaaaaaaaaaaaaaaaaaaaaaaaaaaagaaaaaaaaaaaatagaggaaaataaaaaacatgatgaaaaaagatgacaaaaaaaaaaaaaaaaaagggggagccaaagggggtaaaactaatagaggggggggaagggaataaaaaccccctaaaaagggcacccaaaaaaaaattcgggggggggtttttaaaaaaacgggggggggaaaaaccgtgggtttccaaaata

SEQ ID NO: 59324 - DNA, 356 bp, Glycine max
ggttctagtgtgtgattgtttgttgttgtaacccgttcttcttcttttgttgttctgtgtttgtgtttgttttttctctcacctgaaaatgtcttgctgcggtggtaactgtggttgcggaagctcctgcaagtgcggcaacggctgcggaggctgcaagatgtacccagacttgagctacactgagtcaacaccaccgagaccttggtcatgggagtggcacctgttaaagctcaatttgagggtgctgaaatgggtgtgcccgctgagaacgatggctgcaaatgtggaccaaactgctcctgcaacccctgcacttgcaagtgaggtgttgggagagcaagcttcaagcagag

SEQ ID NO: 59325 - DNA, 147 bp, Glycine max
gtatgtcgtgctgctgttctagatccttatgtgactcatttatttagacgatagtgatacaatctgcctctcaaaatgatcccatcatatatacgcgtgcagttacattcacacttcttcaaggttgtccccttttatccattcaga

SEQ ID NO: 59326 - DNA, 163 bp, Glycine max
cttatcaaaaaaaaactcacacaaaaatacaaatgaacaaacaatttcaaaaaaaatatttaatccatcattgaaatcaatcggctgctccaaaggatccaagcttactctatcccatgaatgctatctcaaaactcttcaagactgtcacctgatttcaatt

SEQ ID NO: 59327 - DNA, 59 bp, Glycine max
ggtagttccaccgagtagcaacaatgtcgaagcgaagtcgcggaggatctgcgggaaac

SEQ ID NO: 59328 - DNA, 83 bp, Glycine max
gagacaagggtggcatcgcggtatacgcgatagacaccgattttggactatatgggaatgccgactttgtttcatcgcgttcg

SEQ ID NO: 59329 - DNA, 95 bp, Glycine max
agtaccatgacgacgtgaccgtaattgtaatcatgcttgggatgaatcagcgtacttcaaaggcatcaacttgcatttaagacttgccacttcag

SEQ ID NO: 59330 - DNA, 385 bp, Glycine max
gggtggcaaaagaacaacgaaggggggacgaagttaatggtaccagagtagagtacagccgtagaatggaaaaacgaactccctcgcgttgagaaatgggtgtagtactcttccggtgggttctgccactgactctgttgctcacttgcgcgttacgtttccagtctgacgatcgtctcctctactaccaagagttcggcatcgagggaggactagcctccttcgattcagattcggacccatctcgcacctccaacatggggaaggacttttctgactcgtccaccgactctatttatctacttccctctcgaagacgctttcggcgacgccgaattctccgaacgcttgcaacttctccgcgcgccttaacacgtggagccac

SEQ ID NO: 59331 - DNA, 115 bp, Glycine max
gggtgaaccaatcgtatgttattggtacatccacaaaggtggatatctctgatgtcaatgttgataaatttgatgacaagtactttgccaaggaagctaagaaaaagaaaacaaa

SEQ ID NO: 59332 - DNA, 55 bp, Glycine max
aatggaaataaacaaaaagactgcaaaagcacaagctactagaatcattcaatcc

SEQ ID NO: 59333 - DNA, 342 bp, Glycine max
ggcagttcaattccaatatattccattctctctgtgtatttccctacctctcccttcaagatgcagatcttcgtcaagaccctcaccggcaagaccatcacccttgaggtggaaagctctgacaccatcgacaacgtcaaggccaagatccaggacaaggaaggaatccccccggaccagcaacgtctcattttcgccggaaagcaacttgaggacggccgtacccttgctgactacaacattcagaaggagagtactcttcacctcgtcctccgtctccgtggtggcatgcagatcttcgttaagacactcaccggcaagaccataaccctagaggttgaa

SEQ ID NO: 59334 - DNA, 66 bp, Glycine max
cacatagacccatgaatccatacatctcgatcgaaaaagaatcgaaattgatgaatatatctctcg

SEQ ID NO: 59335 - DNA, 336 bp, Glycine max
ggatagcagctactcggtccatatggaagctcagaaatgatgtgatctttcataatcagcctttccacatttctaagttggtggataacactaacttcctcacttggtcctggttgaggggatgggaaaaggacttcaatgccccttttcaccaatggtctacagccatgcctatggcctttacttagctagtggtctgttgggttaaggattttgggggcttcttgtagggcatttgtgttatgtatttttggactcatgatcctggagatgttatctccttcttctcttgtagtacctctggtactattatttggttaatatatatattagatc

SEQ ID NO: 59336 - DNA, 361 bp, Glycine max
atgcgtgaattgcttacaacatgctagaatagggttttcaagtttaggctaagagtagggtttccttaggcttatattcacagagggtcctagtgttggatgccttagtctctttttccgggtgggaattgtagaatgcttgtgattgcttgtaaggattcttaatgcatagtgaaaatctaattcaggttgtggactagacaattggagtagcttttctagaaatagagagtgaaccagtataaaagattatatctttgtctcttggttcatatctttcactcattgaagttttattcaatgtttgaaaagattcaagttttatgattttgaaagaaaggaagttaatgaaggatgatgt

SEQ ID NO: 59337 - DNA, 171 bp, Glycine max
ggggcagagcaaacttgctcctcggtctttatcaccaatgtgtaagataggtcccatcagctcatcactataaaatagaataggtgagtcgaaatcactaagcacaccggtctaactactgaacggctccacagaagcaattggcatagaaatgtcctctcacatcaacat

SEQ ID NO: 59338 - DNA, 62 bp, Glycine max
aacaaatttaacctttacaaaatcttgaaatagtttgtaaagacttaaagaagagttaaggc

SEQ ID NO: 59339 - DNA, 78 bp, Glycine max
aacaacaaaagaaagaagaaaagaagaagggaaaaagcggccgactctaaaggatccaagcttccgtcgccctacagg

SEQ ID NO: 59340 - DNA, 195 bp, Glycine max
ggagtcttttaacgcatgtttctagacacatacgtcattgggacaagatctcacatcgttcaagcttctcctacttctgccctacaatactctcgaatcttctcttgtgtgttgtacccgcatcgtgaccatcagtgacagtgactgctgtcgacatctcccaatctcacgctgagtgacatattatgtgaatga

SEQ ID NO: 59341 - DNA, 350 bp, Glycine max
gactcaccacttcaaaacactcataacacaaagcacaaagcaaagctcatccttgagttaaaaaatggcagcagcttcttccatggctctctcatccccatccttggctggcaaggccgtgaagctgggcccatcagccccagaagtgggaagggtgagcatgaggaagaccgtcaccaagcaggtctcctcaggaagcccatggtacggcccagaccgagtcaagtacttgggcccattctctggcgagcccccgtcctacctaaccggtgagttcccaggcgactacggctgggacactgctgggctttccgcagacccagaaaccttcgccaagaaccgtgaactcg

SEQ ID NO: 59342 - DNA, 379 bp, Glycine max
  unsure (1)..(379): unsure at all n locations
gggttctagtgtgtgattgtttgttgttgtaactcgttcttcttcttttgttgttctgtgtttgtgtttgttttttctctcacctgaaaatgtcttgctgcggtggtaactgtggttgcggaagctcctgcaagtgcggcaacggctgcggaggctgcaagatgtacccagacttgagctacactgagtcaaccaccaccgagaccttggtcatgggagtggcacctgttaaggctcaatttgagggtgctgaaatgggtgtgcccgctgagaacgatggctgcaaatgtggaccaaactgctcctgcaacccctgcacttgcaagtgaggtgttgggagagcaagcttcaagcagagatagcccttaattangaataa

SEQ ID NO: 59343 - DNA, 361 bp, Glycine max
gggtttctagtgtgtgattgtttgttgttgttactcgttcctcctcctttggtggcctggggttggggttggtttttcccccaactgaaaatgtcctgctgccgtggtaactgtggttgcggaagctcctgcaagtgcggcaacggctgccgaggctgcaagatgtacccagacttgagctacactgagtcaaccaccaacgagaccttggtcatgggagtggcacctgttaaggcgcaatttgagggtgctgaaatgggtgtgcccgctgagaacgatggctgcaaatgtggaccaaactgctcctgggaaacctgtacattcaaatgaggtgtttggagagcaaacttttagcacagat

SEQ ID NO: 59344 - DNA, 137 bp, Glycine max
tcccggcacgaattcccggctcgaccacgcgtcagttgcgatgcgacaacacaacggaacgggtacaaccaagatatcacacggtacaggtgctagaaaactacaacagggtacagtttccaaaagacgacagaaag

SEQ ID NO: 59345 - DNA, 300 bp, Glycine max
tatgcttagaatctggggcaattaaggatgtagctgcatgttcttttatttttgtgtgttcttcttggtttcccccaaggattcctgtctgctgtaattttcccgtcacggtcttctataaagaagagaacataagtttgaggcttcagtcctcactttgtgctttaaaccatgtgcagtctatgatagcctgagccctttcgctcagtccacgggatgccccaaagcgcttaattaaaactgaacctaactggctcgttgcatttgaaaacattcatacatacacatacgcatgcaggt

SEQ ID NO: 59346 - DNA, 54 bp, Glycine max
gagacctcaggtcaagcggggctacccgctgagtttaagcatatcaataagcgc

SEQ ID NO: 59347 - DNA, 314 bp, Glycine max
atgtataagaatttctaagattccgctcgcacttttataatgccaacaattatattgaattgatactggtatttaatatttacttatacttaataattgaataaaatgtcaaactcactacaatcaattactcgcgagtttcgtccatcgcagatatgaagtgtatatagtatgtataaaaaagaaatattaagattgtaaaatcattcgcacatgccttgtctcgaatgttccagtttgatactatttagaagattcagactaaaaataatgtttaagtttttacaagatcgaggtcatattaatttgtgaaa

SEQ ID NO: 59348 - DNA, 293 bp, Glycine max
gacgtctctcagcacagagcgcggcatgctcacccgagaccggtaccagcaatcgggatccatcccattgtcggacgtacatccacacataccaaaacaacagcacccatatccagagaaatctatcctacgcccttggaccaactttatcacttccgtcatcggcgaactggcaacatcttcaatgccgttctacgcaagagattgtccatgaccagggctcacaagccttcattgtccttgtcaacggtgcgtaaatctaccacagggaaagaacatatcagtgctctcat

SEQ ID NO: 59349 - DNA, 112 bp, Glycine max
gtgaagtttcattgtgattctttgttgagtcaccatccttcattttcgtgctttgtggccaaattctttttgcatgtcttggatgaatagaacttttactaggttaagtggc

SEQ ID NO: 59350 - DNA, 303 bp, Glycine max
gtgttctgctacatttgaggagtttctttctgttctgatttttatgtatgatgtctaaatcaacattttgttgtggagcaaaacactttaacttttttttttaaaacttacaatgaatgttattttctgcaacaactgggaagaaaaaaaaaaaaaaagacaaataaaaaaaaaaaaaaaaaacaaaaaaaaaaaaaaaaaaaagagaaaaaagacaaaaaaaagaaaaaagaaaccaccaaataaaaaatataaacgaaaaaaaggcgccgcttaagaagttaccagctagaggcgcctcaa

SEQ ID NO: 59351 - DNA, 258 bp, Glycine max
ggagagagaaggggatattcactccacatcgtgtgctcactctctcttctcctaggtgtcgctctcaacgatagaaactaaggtacacatgcacactaattcaaagctctacaactatgtcaccaaatttaaattcacatgggcttctttttaccccttcttgaaagttagaagtctagagtatcacaactagatcaccttgcactacatgccccgttcgtgagatgacgttctaacgaatacgacacttacgatctg

SEQ ID NO: 59352 - DNA, 375 bp, Glycine max
gacagcgaaacagagagtgatttcagtgagtgatcggtgttcacttgatctcatcataatcgtcagcgtcaattgaagaagatgccgatcagaaacatcgccgtcggaaggcctgaagaggcgactcaccccgacacgttgaaggcggctttggctgagttcatctcaaccttcatcttcgtgttcgccggctcaggctccggcatcgcctacaacaagctcaccgacaacggcgctgccacccctgccggcctcatctccgcctccatcgcccatgcattcgccctcttcgtcgccgtctccgtcggcgccaacatctccggcggccacgtcaaccccgccgtcaccttcggcgccttcgtcggcgggaacatc

SEQ ID NO: 59353 - DNA, 322 bp, Glycine max
gattcacaacttcaatccctcttttgctttaccaaattccattttccaattcaaaaccctaactccgttcgaagcaccaaatcgtgatggcaccaaaggcagagaagaagccagcagagaagaagcctgtggaggagaagaaatcgacggtgggagacaaggctccggcggagaagaagccaaaggccggaaagaagcttccgaaggagggaggcgccggcggagaaggtaagaagaagaagagaaacaagaagagcgtggagacatacaagatctacatcttcaaggttctgaagcaggttcaccctgacattggtatctc

SEQ ID NO: 59354 - DNA, 205 bp, Glycine max
ggtggccgctgtgattcccatgaggtcctccccatgccgcatctcccaccctcaatgtcgcccgatcatattgttgtcgtcgatgctcacccaagctctttgtgtggtcaaagttatgatctactcacaatgggtgctagtgagtcatggtggatgatagagatgacaatggatgctggtgatttcttggttcattgttcatgga

SEQ ID NO: 59355 - DNA, 79 bp, Glycine max
gaccatcatgctcatagggaacaagtgtgatctgtctcatcgacgggcagtgagcaaagaggagggagagcaatttgtg

SEQ ID NO: 59356 - DNA, 301 bp, Glycine max
gtcagtaggagatgcaaggagaaaacataacccaatatcaaatataattgggataagaagatacataataataaatcagcttcagccatttcagtacatgatgaaaaggaatcattgtacttacggcccagtaatgacgatttgcaatgtcccaaccaccttgataacgtcgaaatccgtgtagaatgtcaggcctattggtcctgtttgctgctagcacaagagtacccttagttctaggacgtgctgcttgagctacttgtgtgacgccattcttccatggacccaaattctgaccccc

SEQ ID NO: 59357 - DNA, 248 bp, Glycine max
tgggagccctcgtcagcacgttgtgcatgcccagtttgggagttccgacgctcttagcaaccagtcaagacccggtgcctctaggctcatgttcccattcaacttgggttttcgaagcccagtcatgcatcacaatgcgaacggagtaataccatcgtgcccattattgttatgtatgtcgacggtccccaatcaaacatgccggtaggaagttgggtgcaggcctcgctcaacggcaagcttggtgc

SEQ ID NO: 59358 - DNA, 241 bp, Glycine max
ggctattccgcaccttctctgctaccaatggaattcaacccgatcccaatcggttcgtgctcgaacaaacaccagatgatctatacagagtagttcaattccactgaatcagatcacgataggcacattacggggactgatcccaacacgtttttcgccatgtcgaatttgtcccgcgaagatcctaagcaagtgtactctagtgcacattcacagcgacgacgatatctcagattcactg

SEQ ID NO: 59359 - DNA, 75 bp, Glycine max
ggtggtagtaatcacagaacttagcgtcacaggttccattgcctccgcttccatctcgcatgcatggatgactct

SEQ ID NO: 59360 - DNA, 246 bp, Glycine max
gtaccgggcacgaattcacgggtcaatacaggcgtcagtaaggctagcaaaaggggacatgccggtgttgcaactaatacttcatgtatatgcatcgtcaggcccttactagatgccaatggtcatgatctaattttaagtgattcttctgatgaccagattgacagttagatgaagccaattcacgttttaaatcgtcccaataccgagttcaattcgtcacaagttgaatgttatcactcaatg

SEQ ID NO: 59361 - DNA, 368 bp, Glycine max
ggcacttcaattgcaatcaaattagttcattctctttgcgcagttccctacctctcctttcaagatgcagatcttcgtcaagaccctcaccggaaagaccatcacccttgaggtggaaagctctgacaccatcgacaacgtcaaggccaagatccaggacaaggaaggaattcccccggatcagcaacgtctcatcttcgccggaaagcagctcgaggacggccgtaccctcgccgactacaacatccagaaggagtcaaaccttcaccttgtccttcgtctccgtggtggcatgcagatcttcgtcaagactctcactggcaaaaccataaccccaaagggtcaaagctctgacaccatttacaacg

SEQ ID NO: 59362 - DNA, 81 bp, Glycine max
gtggtagggctgcaaaaagacgacgcaatggtgtctgatgtaaactataatgacttcagcatagatcatccgaatcttcag

SEQ ID NO: 59363 - DNA, 362 bp, Glycine max
gactcagccagggcagaaaattcagaagctctccctcttcctcacgttgcattttccttctcctccattctccattgagacgccatcacagctccaacctttggtgctcatttctgctccaaatctcgaaacaagggcattttcggggtcgtgaagtgcgtggctacgactgggacttcgaaatttcagatcgtgatggcggcgcagctaatccgtgatcgagtagagatggagtgcctagagggagcttgggataccctcgaaggcaacacaaggtgccgatttcggggcaccattcgattcacggctacttctttggtgcatccagatgaacctgcaccgacgcttcagcgaactgtgga

SEQ ID NO: 59364 - DNA, 86 bp, Glycine max
gtcagtggaagccggcatgtccacatgcgcatttggaaatgtatacattgagcactactcctccaaatgcccaagttagaagagac

SEQ ID NO: 59365 - DNA, 219 bp, Glycine max
gtcagcggagacgttcgactttccttcagagcgctgctctaatgctacagcttgggctcttatactctaaatggtggataatcgcttccgatactctctctgtaccctcattatcccttcatgtctcagcgaaacgattcaccgaattcacaggtctctgcagatcaacatgcttccctcacttatctagataatcctcagaagatttccagtctgtca

SEQ ID NO: 59366 - DNA, 255 bp, Glycine max
gaggaaaagcgcgacgcagactgtgtgaagtagatgtgtgcggaaaatccacgaatcattcttagggtttcaacataggatccaaaaaaggacaaggctccaacaacttcctgcaagcccacaagatctggccgtggctagcactacaaacaacaatctgtagcactggaaaacagtcagctaaagtgaacacaatggcgctcttttttcaaggcacctattgcaaaatcccttctgaaactccccaatacaagc

SEQ ID NO: 59367 - DNA, 276 bp, Glycine max
cgggggcacccccattggcgtctcagaaggagaatttggttttgaatcaagagtctagacctgcatttgctgcagaaactcctaagaagttgaaccgagaaatcgcggttgatgctagcctttcaaattggctgggttcatcagaaactacacctgttaccaaaggtttgtacgtgggtaccctggagaggagcagctcacaaagctcaaattcagtggttagccattaaaataggcctattttaggtgcattgacagttgaagagctcaaacatt

SEQ ID NO: 59368 - DNA, 341 bp, Glycine max
ggtctcgcaacttcatgcttagaaccctagcaacactgtgacccactctactctcgtgtgatggttcagagtgtgttttcacactctcatgcagcggttcacgctctcactctctctcacggtggttcacactcgcattgtggttcagagtgtgttctcattctctctcacacggtggttcacgctctcactctcacggaggtgctctatcaaggtcgagtttacttctcactttagtcgaaagaaggactcttttgtatccagcagtgtctcgagcctacccaaacgttaataggtagtattaacttcaatggagccatccaaaggaaacatcaagggga

SEQ ID NO: 59369 - DNA, 331 bp, Glycine max
ggttctagtgtgtgattgtttgttgttgtaactcgttcttcttcttttgttgttctgtgtttgtgtttgttttttctctcacctgaaaatgtcttgctgcggtggtaactgtggttgcggaagctcctgcaagtgcggcaacggctgcggaggctgcaagatgtacccagacttgagctacactgagtcaaccaccaccgagaccttggtcatgggagtggcacctgttaaggctcaatttgagggtgctgaaatgggtgtgcccgctgagaacgatggctgcaaatgtggaccaaactgctcctgcaacccctgcacttgcaagtgaagt

SEQ ID NO: 59370 - DNA, 63 bp, Glycine max
gtctttaattcttcgtcaaaaacaaaacaaaaaaaaaagcaacaacaaacgaacacaacaaaa

SEQ ID NO: 59371 - DNA, 218 bp, Glycine max
ggttcaacttccacttgaacttgccgcttcttcaagtcgaagacaacaaacacacaacagagactgaaacgacagcattttttgatctattatggtgaaggggttgcacgggcagaacctccccgcccacgtggcacagctggttgatcagctggagcgccactgcttcgctcccgatggatctcccatctccaagccctcgcttcaacgatctccaa

SEQ ID NO: 59372 - DNA, 205 bp, Glycine max
gattgtagaactgaacaagggtttctctttctctttctctgtctgcttcttcactttctctcgtttcaatcgaaaaaaatcatgggcagaaaattcttcgtcggtggcaactggaaatgcaatgggaccactgaggaggtgaagaagattgttactactttaaatgaagctaaagtccctggagaagatgttgtacaagttgttg

SEQ ID NO: 59373 - DNA, 164 bp, Glycine max
gtgaccaactgtgacatcaatatggatcatctttcaaatatcattatactcgaatgctcaattcctatgacacctcatgatcgcggcagcacggctacgatccaggttgagctagacgggattgctacatcagcgctcttctgtacaggcacctagattcaagt

SEQ ID NO: 59374 - DNA, 139 bp, Glycine max
gacacgcagttgtattgtagaactgaacaagggtttctctttctctttctctgtctgcgtcttcactttctctcgtttcagtcgaaaaagatcatgggcagaaaattcctcgtcggtggcaactggaagatgcaatggg

SEQ ID NO: 59375 - DNA, 53 bp, Glycine max
gttaaaaataatgtaccaaattttacgtaccagcttcgccagtacctgcgaag

SEQ ID NO: 59376 - DNA, 179 bp, Glycine max
ggaagaagagagtgatgatgatatgggattcggcttgtttgattagggacattctcaatgatttggttaaattttgtggttctttaccttttaaggttactctggatattgtaggttttatttttgtgctggttatttatatctgtatacgacttgattttgttatgttatatgaactt

SEQ ID NO: 59377 - DNA, 172 bp, Glycine max
gaaagcactgcactcctcgcaacacaacaaaagaagacaacccagagagcgcgtcttaataaacgctcttctctgaaaacccccatttcctttcttctttcttcttctccttcgcctcttcgatcttcgatcttcctcgctgaaaatgagagaatgcatttcaatccacatc

SEQ ID NO: 59378 - DNA, 64 bp, Glycine max
gagcaacatggtgacgctggtggacagatttacttgccacaagcttacgttagaaccacgagga

SEQ ID NO: 59379 - DNA, 283 bp, Glycine max
ccaacccttaagccaagccttcgtaacggtgccaaaaaaacaacagaagggaaataaccccaaaggccaaagaaaaaaaacaaaaaaccaaaaaaaaaccggccgccctaaaggatcaaacctaagttacccttcaagccaagtcaaaaaccctccaaagtggtcacctaattcaattccacgggccgtcttttacaacgtccttaacgggaaaaacctggcggtaacccaactaaacccccttcaacaaatccccccttccccaactggcgttataaccaaa

SEQ ID NO: 59380 - DNA, 103 bp, Glycine max
agttttatacacaaaagttagtcgttttcactgactaacagtcgacttacagggttgaatgccagttacagtgcaaaacagatgatcatttagtgttttgatc

SEQ ID NO: 59381 - DNA, 53 bp, Glycine max
tacagctgcgataatacaattgaaggggtggatgtggacacgatcattaaatc

SEQ ID NO: 59382 - DNA, 118 bp, Glycine max
actaatctacaaattacaggcatccctaccaagcaccttttggccaccccacatgagagagcacgcggatttatcgacttacctttcaccaccactgccatacgtacacggcccccac

SEQ ID NO: 59383 - DNA, 165 bp, Glycine max
caagaaagggaagtgtgcacctaaaaaaggaagcaggctttattgtataaaatgcttgcagggtcacttcaattatagcaacaatgaagattcatgttcgatcatgaaaaaaaaagaatgacgaaagtctacagcggcctctctagaggatgcaagcttaagtat

SEQ ID NO: 59384 - DNA, 375 bp, Glycine max
gactcaccacttcaaaacactcataacacacagcacaaagcaaagctcatccttgagttaaaaaatggcagcagcttcttccatggctctctcatccccatccttggctggcaaggccgtgaagctgggcccatcagccccagaagtgggaagggtgagcatgaggaagaccgtcaccaagcaggtctcctcaggaagcccatggtacggcccagaccgagtcaagtacttgggcccattctctggagagcccccgtcctacctaaccggtgagttcccaggcgactatcgctgggacactgctgggctttccgcagacccagaaaccttcgccaagaaccgtgaactcgaagtgatccactccaggtgggccat

SEQ ID NO: 59385 - DNA, 150 bp, Glycine max
ggatgttaggttgtatcgtatcatcattcattcatccatccagctgtctactgtgtgccatttccattgccaccaccgatgactctctcacccatcaactgagtccactaacttcatcaccttcgctgccttcttcaaatttcattaatc

SEQ ID NO: 59386 - DNA, 188 bp, Glycine max
ggataaaaaaaaaaaagaaaaaaaaaagattgttgaaaacggcatagtattgtatggcttgcttgggctaaaattagaaccctaagcccctcagcgagacagccgccgccgccttcttcaataaccgtcgcaatcctctttcggcaaaaaaagaaaacccttcttctcactcatattcttacgcacac

SEQ ID NO: 59387 - DNA, 282 bp, Glycine max
gactcaccacttcaaaacactcataacacaaagcacaaagcaaagctcatccttgagttaaaaaatggcagcagcttcttccatggctctctcatccccatccttggctggcaaggccgtgaagctgggcccatcagccccagaagtgggaagggtgagcatgaggaagaccgtcaccaagcaggtctcctcaggaagcccatggtacggcccagaccgagtcaagtacttgggcccattctctggcgagcccccgtcctacctaaccggtgagttcccagg

SEQ ID NO: 59388 - DNA, 302 bp, Glycine max
gacacatccagtcatgacggggtagtcgctgtaattccgcatagcactctttatctctttctccgccgcaaactagtcgttctacaggatcgccactgtagtacccttgaattaaacatcagagcacttcaatgatgtgcttggatgccaattgacggcacctcaagcaacaacgacgtcactgccaacgccgaggggtccgtgatgagcctcatcatgaagcacatccgcgttgtccgaactaggctgatacgcatccacgccatggcagatagcgtttcccagggcttgcctctgatcaa

SEQ ID NO: 59389 - DNA, 402 bp, Glycine max
cccgctcctacaacagcaccgaaagggctacacaacggtaccgctgccatactactacagaagggtacggccgcgaggatacaacctaacgttaccgttgctacaacatcacagctcggtatggctgccatataactacatatcggtaccgctgctataagacgatcgaatggtacagctgccatgaacattacataactgttatcgctgcgaaactactcacacttgcgactccagacctcccacctaaccacgctttccccgcatcgcccttcctgcctcttgagcggcttgatgcttatatgccatgccacctgtatcagaacatctaccttctgtcacctaatctctattcactggctgtcgtttaacattgccatcactgtaacaaccgtgcctttc

SEQ ID NO: 59390 - DNA, 134 bp, Glycine max
gattgtgatgtgagagacccatgccattataatcagcaacaacgtttctgataatctgatctatggttttagtaatttatgtcatttttgtcttcgtattgcaacttgcaagttagtttaacttaattttgagg

SEQ ID NO: 59391 - DNA, 290 bp, Glycine max
ggcagttcaattccaatatattccattctctctgtgtatttccctacctctcccttcaagatgcagatcttcgtcaagaccctcaccggcaagaccatcacccttgaggtggaaagctctgacaccatcgacaacgtcaaggccaagatccaggacaaggaaggaatccccccggaccagcaacgtctcattttcgcccggaaagcaacttgaggacggccgtacccttgctgactacaacattcagaaggagagtactcttcacctcgtcctccgtctccgtggtggcc

SEQ ID NO: 59392 - DNA, 90 bp, Glycine max
gccattagataaaattcctcaatatgaaagagacattctaacgactattaaaccagaattactacaatcactaaaaggtggactaactag

SEQ ID NO: 59393 - DNA, 81 bp, Glycine max
gccggtttcccgaacgatttgatggtttggaatgcatttcccaagcaacgagtcttcggttcgaaaccagcagagagagag

SEQ ID NO: 59394 - DNA, 360 bp, Glycine max
ggcagttcaattccaatatattccattctctctgtgtatttccctacctctcccttcaagatgcagatcttcgtcaagaccctcaccggcaagaccatcacccttgaggtggaaagctctgacaccatcgacaacgtcaaggccaagatccaggacaaggaaggaatccccccggaccagcaacgtctcattttcgccggaaagcaacttgaggacggccgtacccttgctgactacaacattcagaaggagagtactcttcacctcgtcctccgtctccgtggtggcatgcagatcttcgttaagacactcaccggcaagaacataaccctagaggttgaaagctcccgacacatcgat

SEQ ID NO: 59395 - DNA, 356 bp, Glycine max
ggcacttcaattgcaatcaaattagttcattctctttgcgcagttccctacctctcctttcaagatgcagatcttcgtcaagaccctcaccggaaagaccatcacccttgaggtggaaagctctgacaccatcgacaacgtcaaggccaagatccaggacaaggaaggaattcccccggatcagcaacgtctcatcttcgccggaaagcagctcgaggacggccgtaccctcgccgactacaacatccagaaggagtcaacccttcaccttgtccttcgtctccgtggtggcatgcagatcttcgtcaagactctcactggcaaaaccataaccctagaggtcgaaagctctgaca

SEQ ID NO: 59396 - DNA, 130 bp, Glycine max
ggcgaaacagagagtgatttcagtgagtgatcggtgttcacctgatttcaacacaaacctcaacgtccaatgtagaaaatgcccattaaaaacaacccccctcggaaggcttaaaaagggaatcaacccc

SEQ ID NO: 59397 - DNA, 168 bp, Glycine max
ggaacgattcgacctaccaatacatacagtttcatacttcacacaatcgagaccatgataaatttccaaacttcatccatcaacaatgcggccgctctagatgatacaagcttaagtactcttgcatacaacatcctagctcttccacagtgtcacctaaatccagtt

SEQ ID NO: 59398 - DNA, 379 bp, Glycine max
cgggtgccaaaaaacgcacaaagggagagctgagacaagacgacaaaaaggtacagttttcagaacaccaaagcacgcgatctctatcccacgaaaattctcagtttgcagagaaaatctgaggcatctctagacgatcgtatctcaactatgagtgtctgtgacatcataactcgtcacacctcacatcatacattcaattaactggcagtactgtaacatttgcgcgcatggtaaagacttgccttaattcaaatctgacgacatgcatgacatcatcattgacctaactgaccctgtatcaattacgccaactgcaatgtatctccgtagcacttgctcaaccgtcatcgagagtgaaacccgtcctgtcactcca

SEQ ID NO: 59399 - DNA, 149 bp, Glycine max
gattgctggctggtaaagaatctctaaactgatttccgcacttagtcacttgctttcttcacaattcactccagatttttattttcgtgttgatcttcttgttactctgatgttccataaagataaactcaagtttctttgatgatgat

SEQ ID NO: 59400 - DNA, 88 bp, Glycine max
ggctacgctttcttttccttcagggttaagccgtgagatttgccaatctgagaaatggccgattcttctcgggaggagaacgtttaca

SEQ ID NO: 59401 - DNA, 385 bp, Glycine max
gactcaccacttcaaaacactcataacacaaagcacaaagcaaagctcatccttgagttaaaaaatggcagcagcttcttccatggctctctcatccccatccttggctggcaaggccgtgaagctgggcccatcagccccagaagtgggaagggtgagcatgaggaagaccgtcaccaagcaggtctcctcaggaagcccatggtacggcccagaccgagtcaagtacttgggcccattctctggcgagcccccgtcctacctaaccggtgagttcccaggcgactacggctgggacactgctgggctttccgcagacccagaaaccttcgccaagaaccgtgaactcgaagtgattcactccaggtgggccatgctcggagcc

SEQ ID NO: 59402 - DNA, 154 bp, Glycine max
gacgcatccttctttctctctctctcctcctcgatcccaattccactagggattcaattccgatgcgattccgagcttgttagatccacgacaacgtttcgtttcccagattcttttgtaaaaaaaaataatcttcctttgcccaacaggtaag

SEQ ID NO: 59403 - DNA, 100 bp, Glycine max
  unsure (1)..(100): unsure at all n locations
gacgttcacattcaggaatcgttttcttcagaaaatttgccatcgttganggaagcgcgagagccttcgttgttcaagatgagagctaagtggaagaaga

SEQ ID NO: 59404 - DNA, 306 bp, Glycine max
atggcaaggtcatgagcttactaggccatgagtctcgctaatggaaatctcttttgacaaaaaaaaaaaaaaaaaaaaaaaaaaaaaaaaaaaaaaaaaaaaaaaaagtaaaaaaaaaaaaaaaaaaaaaaaaaaaaaaaacggccgctcaaaaagattcaaacttaaataagcctgaaaggaaagttaaaacccctcaaaaatgttaactaaattcaattcaatggccgttcttttaaaaagtccttaatgggaaaaacctggcgttaaccaaattaaaccccttgtaagaaaatccccttttcc

SEQ ID NO: 59405 - DNA, 109 bp, Glycine max
taggctattatgatacagtaacttgtgtacaacatatacataaagtcaaaagagtaaaagcaaatggattttacaccatactataattattttatatatccctcgttgc

SEQ ID NO: 59406 - DNA, 145 bp, Glycine max
gtctttaattcttcgtcaaaaaaaaaaaaaaaaaaaaaaaaaaaaaaaaaaaaaaaaaaaaaaaaaaaaaaaaaaaaaaaaaaaaaaaaataaaaaaaaaaaaaaaaaaaaaaaaaaaaaaaaaaaaaaaaaaaggcaactaaaa

SEQ ID NO: 59407 - DNA, 353 bp, Glycine max
gaagagaaaaatgagtataattcaatacaacgcatcatgttaagagtgaaggtactgaccgagcgaaagcatatataatacatactgagtgcttacagttgctgcgtcgcaaggtatcggcagcaacagataactatcatcacaattttcgatcactgcattggttcagtggacaagggatttgaactacctgacttgcatacgtgatagcttcaaagttgcagaagttgcacgctagagcatctcaagcgtcacaatttgcacccacacgtggaactaacgactactggcaattgctggaacataatatgccatacattcaggagcctcctacagtagagaaatgcaccctg

SEQ ID NO: 59408 - DNA, 58 bp, Glycine max
gaccagtccccgtttgttccgctgcaaaacaaaaacaccgcgtcttccccgtgcggcg

SEQ ID NO: 59409 - DNA, 125 bp, Glycine max
aaggtgtatcattgacaaaaaatagcttaaaagtaaccccataacgttttcgacgtatcattgacaaaatttcattgaaagcccagaggggcaaaaagactgcatgcatgaaggtgtgctttctc

SEQ ID NO: 59410 - DNA, 298 bp, Glycine max
ggggctatggagcactatacttggtttcggctttccctattattataggtatttcagttgttctgattttgttttacaattccctccagtaggaaattgcattccactcaaattcagtgtataatgttacactatattgaaatgagttagtatatcgcaatgttcacctaacatcaaaaaaaaaaaaaaaaaaaaaaaaaaaaaaaaaaaaaaaaaaaaaaaaaaaaaaaaaaaaaaaaaaaaaaaaaaaaaaaaaaaaacctaataacctttcaaaacaattcaacacccctcaatg

SEQ ID NO: 59411 - DNA, 120 bp, Glycine max
  unsure (1)..(120): unsure at all n locations
taacgatacggctgctataaaccacaccatgggtgtattacacatgctcaatgtttatgttgctttcagtcagtttagatgatactgccacatcnttgaatcaacctttgagagtccaaa

SEQ ID NO: 59412 - DNA, 109 bp, Glycine max
attactattactgatcaatcaaaatatctatcaaaagtaaaaagcgaagagaagggaaaaactttaatttttttatggtaaaaaattcaattatacctgttatttcact

SEQ ID NO: 59413 - DNA, 192 bp, Glycine max
aggttacggcttccagaaaaacaacaaaaggaaggaaaatgggtgttttgatttgtaaaatttccggaattttataatggggttttaaattagttggcctaaaaaggaatcctccttgaaggccgttttacccacccttttttaaggtaaattaaaaaaattaaattagggaaatttggccaaattcaaccc

SEQ ID NO: 59414 - DNA, 85 bp, Glycine max
gaataatcacataacatgaagagaaagataagaagaaagaggaacatataaagaaatagatagatgtcgtatagtgatctgatgg

SEQ ID NO: 59415 - DNA, 87 bp, Glycine max
gtgtaaatggtcattctattggcttttaacttgcctgttgtgatactcctggaattgtaacgctgttggattttaagagttctttgc

SEQ ID NO: 59416 - DNA, 260 bp, Glycine max
ttatatagttaagccctcttttatgcgtcaaaaaaaaattacaaagaaattactgaagactagcctttagcaagagagtcttgggtgcacgagaggggttattttaaccttttaaaattcataaaagttcaaaagaataatttacaaaaattagtatgtaaaataaatttacctaaaaatatattccagataaagaaggaatattataatagatattttttataaaaaaaaaaaaacaaaaaaaaaaaaaaaagcgggcg

SEQ ID NO: 59417 - DNA, 343 bp, Glycine max
gacagcgaaacagagagtgatttcagtgagtgatcggtgttcacttgatctcatcataatcgtcagcgtcaattgaagaagatgccgatcagaaacatcgccgtcggaaggcctgaagaggcgactcaccccgacacgttgaaggcggctttggctgagttcatctcaaccttcatcttcgtgttcgccggctcaggctccggcatcgcctacaacaagctcaccgacaacggcgctgccacccctgccggcctcatctccgcctccatcgcccatgcattcgccctcttcgtcgccgtctccgtcggcgccaacatctccggcggccacgtcaaccccgccg

SEQ ID NO: 59418 - DNA, 103 bp, Glycine max
ggcggaattcagatctagcgtttgcactttgcacaatgcgagttctataggatcgtttggttataccgattagtgttactaaaacaacgtttttgtgatatcg

SEQ ID NO: 59419 - DNA, 152 bp, Glycine max
actaatgaaattataaattatccataaattggatagaaagatctttcaacccttaattgccatttttttttaagaaaaattttcttgtccaaaggccttttaagggatagtgataaaatgaaaatggttcaggcaaaaggcccacaatttgg

SEQ ID NO: 59420 - DNA, 305 bp, Glycine max
gaacagcgaaacagagagtgatttcagtgagtgatcggtgttcacttgatctcatcataatcgtcagcgtcaattgaagaagatgccgatcagaaacatcgccgtcggaaggcctgaagaggcgactcaccccgacacgttgaaggcggctttggctgagttcatctcaaccttcatcttcgtgttcgccggctcaggctccggcatcgcctacaacaagctcaccgacaacggcgctgccacccctgccggcctcatctccgcccccatcgcccatgcattcgccctcttcgtcgccgtctccg

SEQ ID NO: 59421 - DNA, 284 bp, Glycine max
agggacgaggaattgagttgatatcgaaagggaaacggtggtttaagtgacgatttgctgaataagtggagatggcaaacttcaatgtcatgcataaacaaacgatagctctcatagcagccaagatcagagatcctcactgagacgctttaatcggctttctcaatatcaatgaccaatccctttccctaaccggaaaacacagagctgccccttcattacatggctccgggacctttaggactccttacaggatgccatggtcaccatagaagatgttcaca

SEQ ID NO: 59422 - DNA, 357 bp, Glycine max
tggttatcatctgcccaatttatatatacagttaaatttgtataaaaataactttttgaaaatattttttttctgtattaacttctatactagtttataaaattagtacttttaataaattaataaggtaatttttttaagggttaaatgttttttctccctaataatttttaaaatttagttttaatctctatgaattttttaactttttagtccctaataaatttatgtttgattaacacacttaatttatttttggtccctaataacattttgaaaaataaaatataataaagtgatttagatagtactatagagaccaagaataaaagaataaacattattagagaccaattt

SEQ ID NO: 59423 - DNA, 97 bp, Glycine max
  unsure (1)..(97): unsure at all n locations
aggaaaatcaagagagagaaganaacacccacaattcgagtattaagaggaattaaatgagccgttaaatcctccaatcaggaaggggacgcgtggc

SEQ ID NO: 59424 - DNA, 335 bp, Glycine max
ggcacttcaattgcaatcaaattagttcattctctttgcgcagttccctacctctcctttcaagatgcagatcttcgtcaagaccctcaccggaaagaccatcacccttgaggtggaaagctctgacaccatcgacaacgtcaaggccaagatccaggacaaggaaggaattcccccggatcagcaacgtctcatcttcgccggaaagcagctcgaggacggccgtaccctcgccgactacaacatccagaaggagtcaacccttcaccttgtccttcgtctccgtggtggcatgcagatcttcgtcaagactctcactgggcaaaacataaccc

SEQ ID NO: 59425 - DNA, 405 bp, Glycine max
taccggtaacgaattcccggctcaacccacgcgtcagaccgctgctacataacgacacaaggggacatcaacttgagacaaacacttaaatacctatcatgggaagaaataaactacagaataagaagtggcttcaatctccgaaatctccatgtacacgtgagcaacttatgctaaccagattacggtgctgtctaactcggattcattcctcaagctactgacactacagtcttccaccgtagtgacaccatcacactcaatgtaatgtttcaactaagagcctccataatggagaaagtatgtcacggagtgcaccgcaacttcattgatagcttcaatgatgctaccggatgttgatgacgctgccattaaagcttctcacaacaacttcgtgctcatgat

SEQ ID NO: 59426 - DNA, 222 bp, Glycine max
gacagcgaaacaaagagtgatttcagtgagtgatcggtgttcacttgatctcatcataatcgtcagcgtcaattgaagaagatgccgatcagaaacatcgccgtcggaaggcctgaagaggcgactcaccccgacacgttgaaggcggctttggctgagttcatctcaaccttcatcttcgtgttcgccggctcaagctccggcatcgcctacaacaagctc

SEQ ID NO: 59427 - DNA, 375 bp, Glycine max
ggctagaacgttgaactgcaccttctcactggagctggcattaccttcttcagttctcctcaaatttgatgtattttctatctacaacttcagtgtttattctgtctcactctcaaaacctgtgtgttctggcggtgattgctgaagaccccaatgctttgttgatccatctcagcgtcttaacgtttactaaattctgctttgaaaatgagagttgagaaaggagcaaaaaatgaaggtggatatgttggtggtttcttccacttgtttgactggacctcaaaatctcgtaagaaattatttgcagccaagtcagatttgccagagtcctcaaaacagagaagaaaggttgatggcaacatggcaatggtgctg

SEQ ID NO: 59428 - DNA, 361 bp, Glycine max
gagcgaaacagagagtgatttcagtgagtgatcggtgttcacttgatctcatcataatcgtcagcgtcaattgaagaagatgccgatcagaaacatcgccgtcggaaggcctgaagaggcgactcaccccgacacgttgaaggcggctttggctgagttcatctcaaccttcatcttcgtgttcgccggctcaggctccggcatcgcctacaacaagctcaccgacaacggcgctgccacccctgccggcctcatctccgcctccattcgccatgcattcgccctcttcgtcgccgtctccgtcggcgccaacatctccggcggccacgtcaaccccgccgtcaccttcggcgccttcgtc

SEQ ID NO: 59429 - DNA, 324 bp, Glycine max
tacggtttcgataatacggttttcggtgaacagtgcgcaatctatccactataccacaattgattatcctgtcacacattacactcagtgccataaataagttcgcgcataaaagttagctgaataggtctaatcacgattatatccgcttgacgatgcataacaacatcaggtagccatcaaatccccttcactgacgtcgcacctagcatagtttctaacgtatatgctctacctaggttcaccttatccacttaactactgttgtatcttcatgatgcatggctcttctgttgagttcgtagtcttttccacttgttccaa

SEQ ID NO: 59430 - DNA, 298 bp, Glycine max
aattcccgagtcgacccacgcctcagataggctgaaaaaaaacaacagaaggggacgccgatcagtagtacaaccatagcctcaattgtatatcgcctcattggcttcgatcccaatggtgacatgtaacatttctcatacgcaacaaggtcaaatgtttgatgcacagtatccagctaaagaagccactagaacaacagatcaggcaacgccacttcgattatcaaacaaacacttcagtggaacacccagatgcaactaaaactgtattgccaccaactgggtccactcattgttt

SEQ ID NO: 59431 - DNA, 383 bp, Glycine max
gatagtctcacatgctacatttcacagatatcaatctcgcatagcagtcaacacaggtcaccacacgactttcctccaaacctttcctgagaaacctgtcagtgaaacccttaattgtggaacgcaattcaggaacgagactcgaatggctagctccttaccgtagcttccaacatgaccttacagctgactaacactgaggactacattcagggacactttaatagatttttgccagatatttcaatgatctctaacatcgttcactaccttcggagaatgacgtcggatatgcagctcaagactatagcatgatactagatactgatggctactgcatatggctaagacatatttcgaacgcgaatgtaccaccgtatttg

SEQ ID NO: 59432 - DNA, 66 bp, Glycine max
gcttatgatgatcatataattatcttagcggatttcagtgagatttctatcaatgatctgattgcg

SEQ ID NO: 59433 - DNA, 319 bp, Glycine max
gagcgaaacagagagtgatttcagtgagtgatcggtgttcacttgatctcatcataatcgtcagcgtcaattgaagaagatgccgatcagaaacatcgccgtcggaaggcctgaagaggcgactcaccccgacacgttgaaggcggctttggctgagttcatctcaaccttcatcttcgtgttcgccggctcaggctccggcatcgcctacaacaagctcaccgacaacggcgctgccacccctgccggcctcatctccgcctccatcgcccatgcattcgccctcttcgtcgccgtctccgtcggggccaaacatctc

SEQ ID NO: 59434 - DNA, 315 bp, Glycine max
  unsure (1)..(315): unsure at all n locations
aattcncgtaccgacccacgcctcagcccacgcgtacgtacaggcgtcagtacagcagcgagaggcagacagaaaggaatattccctacaattaaaccggccgcacgatccaatccaagctcacatagggtcgcaggacacatcatgacgcttccaaattggcacctaatgtcagtacattcgccgatcttttacaacatcttaactgagaagtcccaggttttaccgaacttggacaccgtgcatcacatccgcctttcgcaatctggcgtcatagttaaaaggcccaccacgctttacctacctaacatttgc

SEQ ID NO: 59435 - DNA, 61 bp, Glycine max
gaaacaatgggcagtcaaacactccccgtgctggtcactgcactggcgaccgtattcatcc

SEQ ID NO: 59436 - DNA, 71 bp, Glycine max
taaaggatcaaagctaacttacccgtgaatgcaacgtcaaacccctccaaaagggtcaccaaaattcaatt

SEQ ID NO: 59437 - DNA, 229 bp, Glycine max
gaaaaaggcagaccatacttgttgcgagtaagatcatgaatacagtggaatttatggggctgtcgcagttactggtgctgctgatgggatgttgtgggtctgctactgctgctgatgacttgccaaccaaatgttctgcggtgattcactaatgtaagacagtgtccgaacttcgctacggagaatgaccaaatgcccttcaacgcaagttgcgacgccgccatcgcca

SEQ ID NO: 59438 - DNA, 103 bp, Glycine max
aggtaaagctgccacacgacaagatccaggcatagctgcgcgtgcatgagacatcggtactcttctaaaatgtcaacaaaatgcaactgacgggacatcatta

SEQ ID NO: 59439 - DNA, 161 bp, Glycine max
gaggtgaagactgaagaggtagctagtactgcacacgctgcgacgtcgcttcggagaaggattttgggcgccaaataaatcgtctcatcatagactccatagtctgaacgctaaacgaaaccaagccccaaatacaaataacgttggtgtcaggtgtcact

SEQ ID NO: 59440 - DNA, 348 bp, Glycine max
gcagagaaaggatatagtatgtgatctgcgaatctctctctgttatccggaatgtccctagtaaatttcatgattcaagattattgcatgcaaaccgattataggtatcctcagaaggctatgtttacgattcggttgccggtcggatatttaagtgtgacaaatacgttatgatatgatgtctgcacttagctagatgctgcagaatgaattgtatatgctgagatgggcgcgtctgaattggcttctaaggaagttggattttgtaatctgaagaacaatttaagggttttgaatgatagagttagttttgcgacgaataatatacggtgggagaaggctgggatt

SEQ ID NO: 59441 - DNA, 377 bp, Glycine max
ggtagcgctatctttctcagtgtaacgcctttagctagctcagatactcgagggtggtgattttcagtttcgtgttcgtttcttggtttttctgttcagtcatttgtttgtttgcaccgaaaacccatttcgaaactggtcttacttatttttttgctgatctggtcgaagaatacatagcgacacacacaaacaaaccatggctggtgccacgaattggcttacgttttcgttgactcacatggaaatgcagcagttcggtccatacgacaccaccactcactctcactgcttcaacgacagcaatttttatgggtggacgaattctaagagcgtcatggattcacagagtgagaccaacaactttgcggtgcaaa

SEQ ID NO: 59442 - DNA, 304 bp, Glycine max
gactcaccacttcaaaacactcataacacaaagcacaaagcaaagctcatccttgagttaaaaaatggcagcagcttcttccatggctctctcatccccatccttggctggcaaggccgtgaagctgggcccatcagccccagaagtgggaagggtgagcatgaggaagaccgtcaccaagcaggtctcctcaggaagcccatggtacggcccaggccgagtcaagtacttgggcccattctctggcgagcccccgtcctacctaaccggtgagttcccaggcgactacggctgggacactgct

SEQ ID NO: 59443 - DNA, 365 bp, Glycine max
gactcaccacttcaaaacactcataacacaaagcacaaagcaaagctcatccttgagttaaaaaatggcagcagcttcttccatggctctctcatccccatccttggctggcaaggccgtgaagctgggcccatcagccccagaagtgggaagggtgagcatgaggaagaccgtcaccaagcaggtctcctcaggaagcccatggtacggcccagaccgagtcaagtacttgggcccattctctggcgagcccccgtcctacctaaccggtgagttcccaggcgactacggctgggacactgctgggctttccgcagacccagaaaccttcgccaagaaccgtgaactcgaagtgatccactcca

SEQ ID NO: 59444 - DNA, 378 bp, Glycine max
tactcaccacttcaaaacactcataacacaaagcacaaagcaaagctcatccttgagttaaaaaatggcagcagcttcttccatggctctctcatccccatccttggctggcaaggccgtgaagctgggcccatcagccccagaagtgggaagggtgagcatgaggaagaccgtcaccaagcaggtctcctcaggaagcccatggtacggcccagaccgagtcaagtacttgggcccattctctggcgagcccccgtcctacctaaccggtgagttcccaggcgactacggctgggacactgctgggctttccgcagacccagaaaccttcgccaagaaccgtgaactcgaagtgatccactccaggtgggccatgct

SEQ ID NO: 59445 - DNA, 378 bp, Glycine max
gactcaccacttcaaaacactcataacacaaagcacaaagcaaagctcatccttgagttaaaaaatggcagcagcttcttccatggctctctcatccccatccttggctggcaaggccgtgaagctgggcccatcagccccagaagtgggaagggtgagcatgaggaagaccgtcaccaagcaggtctcctcaggaagcccatggtacggcccagaccgagtcaagtacttgggcccattctctggcgagcccccgtcctacctaaccggtgagttcccaggcgactacggctgggacactgctgggctttccgcaggcccagaaaccttcgccaagaaccgtgaactcgaagtgatccactccaggtgggccatgct

SEQ ID NO: 59446 - DNA, 345 bp, Glycine max
aggaggtgagaaaacaccacaaaggggattgcaaaaaaaaaaaaaaaaaaaaaaaaaaaagcggacgctctaaaggatccaagcttaagtaaaaccggcaggccaagaggatccacgcctacgtagtcatgcatgttaagttcaatggcctccatattgtcacctaaattcatgtcaaaggccttcggttaacaaagttaagcacggtaaaacacaggcgctttcaacatagtcgctttgaaccaaaacgccctttcggatcgtggttctaataagtagcacgaccgtaactgatcgcccttcacaagacttgtacaggctcaatggccaatggggatctccctg

SEQ ID NO: 59447 - DNA, 357 bp, Glycine max
ggaaacagagagtgatttcagtgagtgatcggtgttcacttgatctcatcataatcgtcagcgtcaattgaagaagatgccgatcagaaacatcgccgtcggaaggcctgaagaggcgactcaccccgacacgttgaaggcggctttggctgagttcatctcaaccttcatcttcgtgttcgccggctcaggctccggcatcgcctacaacaagctcaccgacaacggcgctgccacccctgccggcctcatctccgcctccatcgcccatgcattcgccctcttcgtcgccgtctccgtcggcgccaacatctccggcggccacgtcaaccccgccgtcaccttcggcgccttcgt

SEQ ID NO: 59448 - DNA, 340 bp, Glycine max
ggcccattgagcgatgttttaggtttgtgatgtgacatgaacaattctgaatggcacacaagatactcctttaagtttgcagctgccctgttctaaccccgggaatgatgaacatatcctagtcacaacattttccatagacagtcattttagctaactttggcatttacagcagcatttttgcttacctacacccttaattcatttctgaaactactgctgttttaccacctatattatattctgcagatgatttcttgactaccattgttaacatgcacgtaccggattcagtcatacttatggctaccattactcccgggacagtgttgattcttct

SEQ ID NO: 59449 - DNA, 388 bp, Glycine max
gactcaccacttcaaaacactcataacacaaagcacaaagcaaagctcatccttgagttaaaaaatggcagcagcttcttccatggctctctcatccccatccttggctggtaaggccgtgaagctgggcccatcagccccagaagtgggaagggtgagcatgaggaagaccgtcaccaagcatgtctcctcaggaagcccatggtacggcccagaccgagtcaagtacttgggcccattctctggcgagcccccgtcctacctaaccggtgagttcccaggcgactacggctgggacactgctgggctttccgcagacccagaaaccttcgccaagaaccgtgaactcgaagtgatccactccaggtgggccatgctcggagccttg

SEQ ID NO: 59450 - DNA, 51 bp, Glycine max
ggcatgttgttcatctcatttaggaggccaacaaaacgttggcacacccgg

SEQ ID NO: 59451 - DNA, 311 bp, Glycine max
  unsure (1)..(311): unsure at all n locations
gacttctcttcacacctttgttcactcttcttctcttgcggctagggttttagcgcagcttcttctagatttaaggaagatgggtaaggaaaaggttcacatcagtattgtggtcattggccatgtcgactctgggaaatccactaccactggtcacctgatttacaagcttggaggcattgacaagcgtgttattgagaggtttgagaaggaagctgctgagatgaacaagaggtctttcaagtatgcctgggtgctggacaaacttaaggctgagcgtgaaagaggaatcancattgatattgctttgt

SEQ ID NO: 59452 - DNA, 142 bp, Glycine max
ggttgttatgttatgctatgggattcgattactattgtgtgaaagttacccttctcttaagttatgttttcaacacttcatttggtttgatatttagatttttgtcttccgtccccattgataaccatgaaacccctaaact

SEQ ID NO: 59453 - DNA, 371 bp, Glycine max
attatggtgaatagccatgaatagtattcccttgttcctgcatgcaaattcatatgaattgaaatctattacaaattgagtagtggatcacaatcattgatgtacaaggcaggcctcaagtacgatccatccatgtattcaaaatttgtgagatttaaaaaataaaataaaatacaagtaggaaggctaagttaattgtgctagtctgggagcatcaaatcattgatatatcaacaaaatgaaaataaaataaaaacagtgtatacataacaaataaataagaatggtactttgttagaaaacaaaacaagtttaataatagctcacaaaccactatttttattacgtctcatcactggaaccaatagaga

SEQ ID NO: 59454 - DNA, 59 bp, Glycine max
agggtgtctaccattttttttatgtagctttcttacccaaactagaccaccattatcgc

SEQ ID NO: 59455 - DNA, 242 bp, Glycine max
cgctgaaggttcatggtagctgactcaatgtgaaatgaaacagaattttaaatggatatgaaatgggttccaacaggactcttcaaggtgttaatggatattaaatgagacttgatgttttcatatttatttttttaagattcctatggtggttcgaattgatcttttcattagaatttctattccagtttcgtttcaaaaaaaaaaaaaaaatcaaaaaaataagaaaaatatatcaacat

SEQ ID NO: 59456 - DNA, 109 bp, Glycine max
gtagcggacaaacaaagcaaagaattcgttatatagactggcctgcaatgttgaactatgcaattccttcatttcttttccctataaatagaggctttttgtgtcttat

SEQ ID NO: 59457 - DNA, 230 bp, Glycine max
tcacttaaatgatcgcatttggctagcatattaaccaacagattgccaagtggagtatatgcgcgcttagggtgcttgttccatgcgaaaacatgtgtcattcatgctgagatcgatcacttgaatttttggtctgactctacactgcgtaatcctcgcaggcgtcaaagagatttatctccacagcaggctccacatgatcgcaatgaagtacttgcgtttcctccgca

SEQ ID NO: 59458 - DNA, 92 bp, Glycine max
gccggtttcccgaacgatttgatggtttggaatgcatttcccaagcaacgagtcttcggttcgaaaccagcagagagagaaaaaaaaaaaga

SEQ ID NO: 59459 - DNA, 346 bp, Glycine max
tactgtcgcaaaaagatcacagtcagctacggttgcgagaatgactacacatgggtctaagtgttgacaaggtagaccttcatcggaccaatgccatcaaagccgtcgctaagaaaaagtcattgcaattgggcaactttgctagcacatgtgatcatcatcgtggttacacctttataataattttatccatgcagagtcctaagtgttctgtttaagttatatttataagtctctgccgacttcacgtacccgtaactttcaaaactatagttcttgatcagaggtggtcaattttcactgctgtcagtttttgatgagtactgttttttgttttgatggtaag

SEQ ID NO: 59460 - DNA, 81 bp, Glycine max
gggatagttgtagacatgtgacattggtttggttcatgttttggaccaaatatttttaacatgtctaagattgtctggtac

SEQ ID NO: 59461 - DNA, 208 bp, Glycine max
tgggaacatcgttttctcgtttgtgttttttccgttaaaatcataaatttctcacggaacaccagatccacgctcccgcttacaggccttccaccatctacagatccatgcttgacgagttcaccgacgacgtcatgttcctcgacaacgaccgcgatcactgtattgataccaccgaagctggcattgaaaccccgtcaatagggca

SEQ ID NO: 59462 - DNA, 354 bp, Glycine max
ggaacctttgcattctattcattcaagattcagcaagtgcgttttggaagcagagaccgaaatacttcgagatggcccgtacaaagcaaactgctcgtaagtcaactggaggaaaagctcccaggaagcagcttgcaaccaaggctgcacgtaagtctgcaccaacaactggtggtgtgaagaagcctcatcgttatcgccctggaactgttgctcttcgtgagattaggaaataccagaagagcactgagctcctaatcaggaagcttcctttccagaagttggttcgtgaaattgcccaggatttcaagactgatctgcgtttccagagccatgctgtgctcgcattgcaag

SEQ ID NO: 59463 - DNA, 222 bp, Glycine max
ctcggggacctgtgcaccgactcccctgacttacgctgctggaacccatcactggataacgttttcgctatacatattcctctgcttactctaacctgtcacaaacagacgctccacttcatcaatcattactacttcgcatacgtgccttaactttgctcatctctccaatgtcctccaccagtagcttcatcaacacagctttatcatgcaacccattcc

SEQ ID NO: 59464 - DNA, 100 bp, Glycine max
gaatgttaatgttcctcaagccatcgtaccgtgttgcctctcagacatctatccgtcatattgcctttcatcacgtacctttacatctggagggttgccc

SEQ ID NO: 59465 - DNA, 306 bp, Glycine max
gagacctcacgtcaagccgggctacccgctgagtttaaacatatcagtaacccgttgaacacaactctctgccaacatgggtaatctaccagacgctctatacgatccaagcttacctatgcttgcatgcaaaatgactgctcgtctaaaatgtcatctaaacttagttcactggctgtcatttttaaactttcagactggaaaacacttaggatgatccatcttaaacgtcttgctgtaaaatccccgttattcagattgcgtactagcaattacgcctgcagaaatcacactttcaatcacttg

SEQ ID NO: 59466 - DNA, 239 bp, Glycine max
ctttcggctcaaacatcactacaggtgggaaggggccgaaaatctgggaatcaaaaggttcttcaaaaggactgtaaatctttactcctaggatccaataacggctttttggttttaatcttcctaattacataaattactatcctactactgtagtgtctactgactgaatcgtgaattacattggatgggccaatggagaatcaaattacgagttgtgcaaacgacttaagatacta

SEQ ID NO: 59467 - DNA, 53 bp, Glycine max
tgtagcaactgttactagaatatgtatcccatcaagtgccccaatcgaattct

SEQ ID NO: 59468 - DNA, 184 bp, Glycine max
atgagtactgtattttgttttgatggtaaaagtctgagattttcaaattcacaagcaaccataaggttttagtccatttcctttgctgctgaagagggatgtcgtaaatttgcatttaatttacaaggaagttttgttaaaaaaagcatctcagaatcaaataaagaagatctccaattgaaaa

SEQ ID NO: 59469 - DNA, 316 bp, Glycine max
gaccaccatgcggtattttacatgttcacaacgttagcattaaaaccggtgtgatctggataagaccgccatcaatcagtcccaacgtttgccaacaccaccaacaggtcttcactccatgatccggtatggtgagattcattaagagtatagatgacgagatttagaccgtcacggatttttatgtcttttgcagacttcttggcataaattttggatggagtcagacgtgacacaatattaagggtgtctggttgacctgtttttttaattttaatttcaatagaaatacggcctcctgataagattgtgtttg

SEQ ID NO: 59470 - DNA, 132 bp, Glycine max
cggctcacatattatgggtggcaaaattaaattaaacaacaaactcaaaaagcggccgccctagaggatccaagcataattacacctgaatgcgacctcatagctcttcgaaacagtcacctaaattcaact

SEQ ID NO: 59471 - DNA, 370 bp, Glycine max
gatgtcatagtattatcattcattctcatctttctctcttctctctccacccaaaccctaactcccgaccctgttcccctctcgtatccgtcatgaaaggaggaaagtccaagaccgaatctaagagagccgatcccaaacttgctgtgaataagaagggagccgccaccaaggctaggaaacccgccggcaaggggaaggcagcgaaagaccctaacaagccaaagaggcctccaagtgctttcttcgttttcatggaggagttcaggaaggtattcaacaaagaacatcctgaaaacaaagcagtgtctgctgtgggcaaagctgctggagcaaaatggaagaccatgtctgatgctgaaaaagcacc

SEQ ID NO: 59472 - DNA, 374 bp, Glycine max
tgcggctcccatccccacgacttcacgagtactcgccgtcatacgactatccaaggggaatcattccaattaccatgccactttcaagagactgcgaaagactaaagggtatgttgagttccatgagtcgccgccggacaatttcgatcccggacagccgtataacgacccagtggctactcagcagattacggagcctatcgttctggacaagctaattcaaatcgagattgccaggatcattagggagaaactccaatagtgctaccgcatctatggcgtcacacacctccactaatgccgccatctcgtcaaccactatcacaagtccagcctcgtcatcagatgaggcaacgactgtcttcatccttctc

SEQ ID NO: 59473 - DNA, 71 bp, Glycine max
  unsure (1)..(71): unsure at all n locations
nggacgacacacatccccagaaattcatcatgagtcccctgtcttcgacgtatcaccaaagacctgatttc

SEQ ID NO: 59474 - DNA, 228 bp, Glycine max
  unsure (1)..(228): unsure at all n locations
ctaccaatggctcccgcaaaggcagagaagaagcccgcggagaagaagccggcagagaaggccccaggggagaagaagccgaaggcggagaagaagatatcgaaggaaggaggaagcgagggagggggggggagagcggggggagaagcggcggctctagacgatgcaggcttacgtaggcgtgcatgcnacgtcatagctcttcgatagtgtcacctaagttcaatt

SEQ ID NO: 59475 - DNA, 78 bp, Glycine max
tgaagactgtctctaacgaggaagcgtctgccatcaaatctgctgggaaagcgggggatcgaggtatggtgtcggatt

SEQ ID NO: 59476 - DNA, 373 bp, Glycine max
gcgctgtgagtgctgagaacgttacttcattcaaaagcagcaacagcaggttattctttgtttcttttcgttcttccacagccggtagattcggctttgtccatggccaccgaaccaaaagcagccactgaggaggtcaagattgatctcttcgaagacgatgacgaaattgtggagtttgtgatctccgacaagtgggatgacaaggaggaagggaaagaagtgactcaacagtgggaggatgattgggatgacgatgatgttattgatgatgtctcccctcagcagttaagggagtagttgagcagcaccaccaagaagtaatcacctgctagttattgttgcttgatatggcatgcgttattaattaggt

SEQ ID NO: 59477 - DNA, 306 bp, Glycine max
ggtgttggtggtatgcctattgggggaggtggacctggtgttggtgcccctggtggcggaagaggatatggtggtgggcctcgtgtttaagaactattttggaagacataaagtagagttattttggagtacataaagtacatgcttatttgaatacaaaatagtggaagagtgtgcaccttggattttacttaaataataatgattttttttaaaaaaagtattccagaaaaaattaagcaattgcacaaagagcataaacgatcaactctgacacaatgactgacaacaaaaaaaaaacgggcc

SEQ ID NO: 59478 - DNA, 239 bp, Glycine max
gatgatcacttattggatagttccttgttccactgaacactcaaccctcaagcagcaatcagggatttagtatttggagaaacaatgatcagtgatatggagattcctgttgcctttgcgcttgtccacaggaacgctcatcactcggcaattggctatcgtatcgcttagtatgaaacgcgctacaccctacatagtacgcattacgcatgccgtgggtcatgaatcctgctctcgtc

SEQ ID NO: 59479 - DNA, 100 bp, Glycine max
gatttcgcttcgtttcctaacctaaaccctactcattctccatacctcaacgagggaggttagggagacggcaacactttgctgtccgccttgaccgagc

SEQ ID NO: 59480 - DNA, 248 bp, Glycine max
gtgacatgtgggtgatatctacagtagttgaattttctaactgaaatactgtatgacattctgaatgatctcaagctctctagtattatattcaggtagcatttacattcttccatgcgtgggggtgaaagaagtggttcgaatggtcgtctcaagaggatgaaaacttacgtgggcgtgcatgcgatctcatatctcgtcgctagtgtcgagtaaatgcagttcacagggcgtcttatatcaagttc

SEQ ID NO: 59481 - DNA, 116 bp, Glycine max
gaaaatcatctcttcaatggcttccctcatgagcaccatcctcatgcaaaggtcttcgtctacttcacatgctgctggcatgtttttccctacatgagaagtcaccactattgaat

SEQ ID NO: 59482 - DNA, 112 bp, Glycine max
ttaccccaagcgtttaataatatggccgtgatctgtcattaggtgcgacgagcgccactgggaaagaaaaaaggaaaacgagggaaaaaaagcggccgctctagaggatcca

SEQ ID NO: 59483 - DNA, 122 bp, Glycine max
aggcgtcagacagctacgacaaggtgacgctacgagaaaaccagcttctgggactgcgcagggcttgggcagagtcgacaagtgccactttcctcaatggctcatcatggtgatctctgcaa

SEQ ID NO: 59484 - DNA, 137 bp, Glycine max
agacgtcagaacgaggagagaaaggacaaagataagataacagtaagagactcagagatgtctttgcaaagcggtcgatctagaggatttaagcttacgtactcatccatgagacgtcacaacgcttccatagtgtc

SEQ ID NO: 59485 - DNA, 130 bp, Glycine max
gaaacacaaacctcacaaaaaaaaaaaaaaaaaaaaaaaaaaaaaagcgggcgccccaaaaggttcaagcctaagtacgcctgcaagccaactcaaaactcctccaaaatgtcacccaaattcaattcaa

SEQ ID NO: 59486 - DNA, 113 bp, Glycine max
atgatgagttgacaagttcctttatttttaatgaatcaaagatatttttcaattcttaaatgaattttatttgtccccccaaaattttccattaaccatactagggaatccta

SEQ ID NO: 59487 - DNA, 153 bp, Glycine max
cgggtcgactcacgcgtcagcccgcgcctacaacaggagcgaaagagagactcaatggggcactcttcttcgtcacactaatcttcgaaactacacgacagcctatgtggtcgaaaatggcaaatgcccctcttcgcgtacggaaggttggag

SEQ ID NO: 59488 - DNA, 385 bp, Glycine max
gatgaacgataacactgaactagctctcacgtttgtgcttgcacttgcacctctccaacgataacaacgacgagcacaagatccagccgaacatttttgtctataattggtggagttgttgctggaattttggggttcacaagcttgaaaggatttgtattttacttccttctcatgatggttacttcacttgggcttgtagccaaagccagattttcaatccactcctactttgactcctcgaatcgagttctacttgatggcttcctaggtggtctaatgtcattcgtgctgttctggacatttgcattcgacattgtacatatattttgacggaggatcgtgcacaaaatgtctctaaagaaggcaattgttggcttctgac

SEQ ID NO: 59489 - DNA, 141 bp, Glycine max
gaggtttttagggtttacaccgagcagccacacctcccgcagcagccatggttctcaaaactgaactatgccgattcaatggtgccaagatctacccaggaaagggcatcagatttgttcggtggggggtctcaagttttc

SEQ ID NO: 59490 - DNA, 99 bp, Glycine max
gacataaagaggtacatgcattctaaagtgtgcacatcactgagagaggcaaacatgtggtcaagaggatcgaagtttaagtagccgtgtatgaaaagt

SEQ ID NO: 59491 - DNA, 260 bp, Glycine max
caccaaaggcagagaagaagccagcagagaagaagcctgtggaggagaagaaatcgacggtgggagacaaggctccggcggagaagaagccaaaggccggaaagaagcttccgaaggagggaggcgccggcggagaacgtaagaagaagaagagagagaggaagagcgtggagacatacaagatctacatcttcaaggttctgaagcaggttcaccctgacattggtatctcaagcaaggccatgggaatcatgaacagc

SEQ ID NO: 59492 - DNA, 301 bp, Glycine max
gattgcagtctcaaactgaaagtctcacaaattttgtagaaaactgtagttttatccccaggggcctcccccatctgaaagaaagagtatttgcctcgcatcatttttcttttcgttcgcgcgttctgtcgcgctctctgtcggtaggatgagagcaggacgagacccattaggtcttaggaatttgcccgatgagtactctaaggatggcagggaagtcctcgaagaccatacctcttcagccggttgcacggaaaaggaaagcggcggggaggagtggggaaggcgagtgtgggaaggt

SEQ ID NO: 59493 - DNA, 143 bp, Glycine max
ccgggccgactcaaacgtccatccaggcgtcagacagcggcaaaaagacaatagaatgggaaatttcaacgtttacttattttggtggaaagtatagctgtagcagcggacgctcaccctcactgttgttaagagtggatcac

SEQ ID NO: 59494 - DNA, 88 bp, Glycine max
aagagaaaaaaaaaaaaaaaaaaaaaaaaagcgggcgctctagaggatcgaggtgtacgtatacgtacatgtgaagtcatagctcttc

SEQ ID NO: 59495 - DNA, 54 bp, Glycine max
gaagtccgtcctttcttttgttaaacaggctggctgtgacttcggctcccttac

SEQ ID NO: 59496 - DNA, 392 bp, Glycine max
gactcaccacttcaaaacactcataacacaaagcacaaagcaaagctcatccttgagttaaaaaatggcagcagcttcttccatggctctctcatccccatccttggctggcaaggccgtgaagctgggcccatcagccccagaagtgggaagggtgagcatgaggaagaccgtcaccaagcaggtctcctcaggaagcccatggtacggcccagaccgagtcaagtacttgggcccattctctggcgagcccccgtcctacctaaccggtgagttcccaggcgactacggctgggacactgctgggctttccgcagacccagaaaccttcgccaagaaccgtgaactcgaagtgatccactccaggtgggccatgctcggagccttgggct

SEQ ID NO: 59497 - DNA, 265 bp, Glycine max
atcctttttggtaatttatttctatttaattattgattatattggataacttttcaatctaaaaaaaaaaaaaaaaaaaaaaaaaaaaaaaaaaaaaaaaaaagaacaaaaagaaaaaaaataaaaaaaaaaaaaaaaaaaaaataaaaaaactagcaaaaaaagcaaataaaagataaacacatggcacttcaaaaaaaacgtagaagaatgaaaaaataaatggtaatagacaactaagcctccatgaagaacatcgcgactg

SEQ ID NO: 59498 - DNA, 373 bp, Glycine max
ggttctagtgtatgtgattgttgtgactcgttcttcttcgtcattagcttcttcttatgttgtctgtgtgtctgttttttctctcatctgaaaatgtcttgctgcggtggtaactgtggttgcggaagcgcctgcaagtgcggcaacggctgccgaggctgcaagatgtacccatacttgagctacaccgagtcaacgatgacctagaccttggtcatgggagtggcatcagttaaggctcaattcgagagtgctgaaatgggtgttcccgctgagaacgatcgctgcaaatgtggagctaactgcacctgcaacccctgcacttgcaactgaggtgttggagagctaaagcttcaatcagaaatggccctta

SEQ ID NO: 59499 - DNA, 376 bp, Glycine max
gaccacttcaaaacactcataacacaaagcacaaagcaaagctcatccttgagttaaaaaatggcagcagcttcttccatggctctctcatccccatccttggctggcaaggccgtgaagctgggcccatcagccccagaagtgggaagggtgagcatgaggaagaccgtcaccaagcaggtctcctcaggaagcccatggtacggcccagaccgagtcaagtacttgggcccattctctggcgagcccccgtcctacctaaccggtgagttcccaggcgactacggctgggacactgctgggctttccgcagacccagaaaccttcgccaagaaccgtgaactcgaagtgatccactccaggtgggccatgctcg

SEQ ID NO: 59500 - DNA, 399 bp, Glycine max
ggttctagtgtgtgattgtttgttgttgtaactcgttcttcttcttttgttgttctgtgtttgtgtttgttttttctctcacctgaaaatgtcttgctgcggtggtaactgtggttgcggaagctcctgcaagtgcggcaacggctgcggaggctgcaagatgtacccagacttgagctacactgagtcaaccaccaccgagaccttggtcatgggagtggcacctgttaaggctcaatttgagggtgctgaaatgggtgtgcccgctgagaacgatggctgcaaatgtggaccaaactgctcctgcaacccctgcacttgcaagtgaggtgttgggagagcaagcttcaagcagagatagcccttaattaagaataatgataaactattaatgtgtag

SEQ ID NO: 59501 - DNA, 111 bp, Glycine max
gggacaaaaggattgatcgcgaaaaagatttcttgttcttattagaagatcgtgattggatccacatatgtttggtaaaaagaaagaaaaatattcttctttgagaataat

SEQ ID NO: 59502 - DNA, 166 bp, Glycine max
tcatgtcctaacttacgtgacgaaacttgagggacattattaaaactacaagagttgaatcttccatcaatgctctgacccctttccagatctcattcctctctcgtttcctcatgtgcaccatgtgcacactcataggcccactacaatgatagggctctccctc

SEQ ID NO: 59503 - DNA, 79 bp, Glycine max
gccggtttcccgaacgatttgatggtttggaatgcatttcccaagcaacgagtcctcggttcgaaaccagcagagagac

SEQ ID NO: 59504 - DNA, 182 bp, Glycine max
caaacgttggcaaaaggaaaaaggatggggggggtgaaactaaaagttgctgcttcttcagaaacgggggatctcaaggtttcaaccttacattaacttgaatgcaaatctaaactcctttacaagatcccccaaaattcaattaacggcccttcattttaaaaatcctgaacgggaaaaac

SEQ ID NO: 59505 - DNA, 100 bp, Glycine max
aacccaatgcccacaacacaaaatccaaactttatcccaaaaccaaacacattaagtcattcaacaccgaccacatcaatcaaccgtataatgttcactc

SEQ ID NO: 59506 - DNA, 67 bp, Glycine max
atacccgctctcttattgtagctagtagaccatcattccactcttccccgtctaaacatatctctac

SEQ ID NO: 59507 - DNA, 368 bp, Glycine max
  unsure (1)..(368): unsure at all n locations
ggcacttcaattgcaatcaaattagttcattctctttgcgcagttccctacctctcctttcaagatgcagatcttcgtcaagaccctcaccggaaagaccatcacccttgaggtggaaagctctgacaccatcgacaacgtcaaggccaagatccaggacaaggaaggaattcccccggatcagcaacgtctcatcttcgccggaaagcagctcgaggacggccgtaccctcgccgactacaacatccagaaggagtcaacccttcaccttgtccttcgtctccgtggtggcatgcagatcttcgtcaagactctcactggcaaaaccataaccctagaggtcgaaagctctgacnacattgacaacg

SEQ ID NO: 59508 - DNA, 53 bp, Glycine max
gagacctcaggtcaggcggggctacccgctgagtttaagcatatcaataagcg

SEQ ID NO: 59509 - DNA, 56 bp, Glycine max
aatcaatgactattcatgattccataattgaatcaattacatactggatccaagcg

SEQ ID NO: 59510 - DNA, 217 bp, Glycine max
cctgacaacattcacaaaactgaatccgccatagcagctgcaaagacttgataattaattgcaagtctgtctctatgctcaaaccagagttcccactatccatcaagctaggaacgcattggctatcactgcagcagatgataactaacttgtaatttaactaaggacaacaattcaattcttctagcaggtttttagggaaaggaaacttgttgtt

SEQ ID NO: 59511 - DNA, 394 bp, Glycine max
agacgggtgccaaaaaaagaaaaaaggggacatcagtcagtcattacgtattattcgtctacagtagtgtcaattacgcttctcctctctgtaacatgtacgaatacttataaggtcttcttagaaataaccttcagcgggtaatcagccagccgaatcattatagatccaggttcctacataactcaccacaccgtcaaaaatgtccacttgatttgcaggatctaaaaagtcgtagggcagataggcattttgatcaatacatgggctcggtcctcgatcacgtgatccagattttcatgtgtcacagtagcaacttcaccgtaggaaagatacctcgtagcgaatatatttaaggctccatgttcaccgacgagaacttcttaaaaatcca

SEQ ID NO: 59512 - DNA, 363 bp, Glycine max
gacaactccataacacaaggcagaaagcaagctcatcctagagttttaaaaatggcagcagcctcctccatggctctctcttccccatccttggctggcaaggccgtgaagctgggcccatcagcccccgaagtcgggagggtcagcatgaggaagaccgtcaccaagcaggcctcctccggaagcccatggtacggcccagaccgcgtcaagtacttgggcccattctctggcgagcccccgtcctacctcactggcgagttcccaggtgactacggctgggacactgctgggctttcggccgacccagaaaccttcgccagaaaccgtgagctcgaagtgattcactccaggtgggccatg

SEQ ID NO: 59513 - DNA, 238 bp, Glycine max
gacattcatattttcctttcgtttcctttcattttccctcactttctcgctccccaaacgcccctctctctcctccaatggccgaccagctcaccgacgaccagatcgccgagttcaaggaggccttcagcctcttcgacaaggacggcgatggttgcactactaccaaggaacttgggactgttatgaggtcacttggtcaaaacccaactgaggcagaactgcaggatatgataaa

SEQ ID NO: 59514 - DNA, 386 bp, Glycine max
agagacgacagaaggggaaaacagagagtgatttcagtgagtgatcggtgttcacttgatctcatcataatcgtcagcgtcaattgaagaagatgccgatcagaaacatcgccgtcggaaggcctgaagaggcgactcaccccgacacgttgaaggcggctttggctgagttcatctcaaccttcatcttcgtgttcgccggctcaggctccggcatcgcctacaacaagctcaccgacaacggcgctgccacccctgccggcctcatctccgcctccatcgcccatgcattcgccctcttcgtcgccgtctccgtcggcgccaacatctccggcggccacgtcaaccccgccgtcaccttcggcgccttcgtcggcggcaacatc

SEQ ID NO: 59515 - DNA, 359 bp, Glycine max
gacagactacagtaatattttatttgcactactactactactttatttaagcagaagcaggcgagtgaggaagagcgaagagtgaagagaatggctcccaagggtttaacctttctggctgtgttaatatgcgtttcagcactgtcactgagtccttctgttgcgggggaagggcaaaataatggccttgttatgaacttctacaaggaatcatgccctcaggctgaagacatcatcacagaacaagtcaagcttctctacaagcgccacaagaacactgctttctcctggctcaggaacatcttccatgactgtgctgttcagagttgtgatgcttcactgttgctggactccacaag

SEQ ID NO: 59516 - DNA, 105 bp, Glycine max
gaagaaagctgctagcagagggaagttctacacttttttgtttggattgatcgagtgtactttttcttttcgagattggcttggtgtgcagtggaaagagggtgc

SEQ ID NO: 59517 - DNA, 386 bp, Glycine max
  unsure (1)..(386): unsure at all n locations
gacttctcttcacacctttgttcactcttcttctcttgcggctagggttttagcgcagcttcttctagatttaaggaagatgggtaaggaaaaggttcacatcagtattgtggtcattggccatgtcgactctgggaaatccactaccactggtcacctgatttacaagcttggaggcattgacaagcgtgttattgagaggtttgagaaggaagctgctgagatgaacaagaggtctttcaagtatgcctgggtgctggacaaacttaaggctgagcgtgaaagaggaatcaccattgatattgctttgtggaagtttgaaacaacaaagtattattgcacagttattgatgcgcctggacatanggatttcattatagaatatg

SEQ ID NO: 59518 - DNA, 97 bp, Glycine max
gatgtttagttgaatcatttgcctaagctaattgaattattattatttttgttttctttgggattatgctatacaaattactgatctttgaatttag

SEQ ID NO: 59519 - DNA, 245 bp, Glycine max
ggaaagatttgatcagctggaaagcaaaagagaaaacagaaaaaaaaaaaaaaaaaaaaaaaaaaaaaaaaaagaagaacaaaaaagataaaaacaaaaaaacgaaaaaaaaaaaaaaacaaaacacaacaaaagcggccgcccaaaaggatccaaccttacgtccccttacaagcaacgtcaaagcccttcaaaaggggcaccaaaattcaatccacgggccgccgattaacaactccccaacg

SEQ ID NO: 59520 - DNA, 71 bp, Glycine max
ggagtttggcaactggaaaaaaacttctcaccttctttggtggttgataatgatatatatgttctttgaac

SEQ ID NO: 59521 - DNA, 337 bp, Glycine max
gactcaccacttcaaaacactcataacacaaagcacaaagcaaagctcatccttgagttaaaaaatggcagcagcttcttccatggctctctcatccccatccttggctggcaaggccgtgaagctgggcccatcagccccagaagtgggaagggtgagcatgaggaagaccgtcaccaagcaggtctcctcaggaagcccatggtacggcccagaccgagtcaagtacttgggcccattctctggcgagcccccgtcctacctaaccggtgagttcccaggcgactacggctgggacactgctgggctttccgcagacccagaaaccttcgccaag

SEQ ID NO: 59522 - DNA, 252 bp, Glycine max
ggtaacagcctccgcattccaaacaactccattgtccgtctcatgcactgcatacgtagcatctgcattggcattcccctctactgaatgaagttgtggatcttccaaagtccactaatctactgctcctcgtgcgttacattgcgtacctgctgcatggaaccaagtctgtaccttagattcggttgtggaagccattccacaaattgatgtgatactcggcgtcactcacacggcctaacaatctgactc

SEQ ID NO: 59523 - DNA, 396 bp, Glycine max
ggcagttcaattccaatatattccattctctctgtgtatttccctacctctcccttcaagatgcagatcttcgtcaagaccctcaccggcaagaccttcacccttgaggtggaaagctctgacaccatcgacaacgtcaaggccaagatccaggacaaggaaggaatccccccggaccagcaacgtctcattttcgccggaaagcaacttgaggacggccgtacccttgctgactacaacattcagaaggagagtactcttcacctcgtcctccgtctccgtggtggcatgcagatcttcgttaagacactcaccggcaagaccataaccctagaggttgaaagctccgacaccatcgataacgtcaaggccaagatccaggacaaggagggtatc

SEQ ID NO: 59524 - DNA, 59 bp, Glycine max
atagaactggccaggtaatgctgaaaatgaagagcagacatgttgcaggaaccattacc

SEQ ID NO: 59525 - DNA, 326 bp, Glycine max
cgggctcgtccgacagctgcgaaaggggtacagaaggggggtggagacaggggcaatgaatcatacccaaagtattcgggggcagcttcagattgcatccggattgtcgcctactcttattgttctcttcgcctcggatcagttctaggtcttctatctcagttcgacattgcagatgagcaaagatcttttctctgcgacatgcacatctctcttcagttctgagctctggactacatctctgatttaaatatcgttcatgcatacgtcctgcacacttacccgttccttcattgcggtgtcacaacgtgaatgttaatggctgc

SEQ ID NO: 59526 - DNA, 122 bp, Glycine max
agctagttacactctgtctgtttccattggcattgtagttgtacactctgcttggaaacttgggtgcatttcccagtaggaaattttatatttttccttccttgtgtaatttgtaatcgtag

SEQ ID NO: 59527 - DNA, 351 bp, Glycine max
cgagcaattttaaaaataagaaaataaaaaacacactaaaaaaattcatcaagaaaaaggatacaaaaaaagaaacataaaaaacacaacaaaaaaactaaaaaaaacaaaacctaaacataaaaaacgcggccgcccaaagggttccaacttaacttacccgtgaatgcaagttataaccccttcaaaagtgtccccaaatttcatttcacgggccttcttttaaaaacttcttaacgggaaaaccccggctttaacccatctaattccccttgcagaaaatccccttttcccaactgggtttattaccaaaaaggcccgcaccgttcgcctttccaaaaatttgcccac

SEQ ID NO: 59528 - DNA, 316 bp, Glycine max
gggggatgcaagcagagaatgctatgagtgattgatccgtattcaggtgatcccatgatatgcgtgaccatcgattaacaacgacgtggctcataaagatgtcagtcggcttgccaggataagcaagtcaaatcgatacgtggaatgtcgccttgactgaatgcatctcatcattcatctacaggttggtgggtgctagtgcatgcaatgactatctacggattactgagtctgtctctacccatcctgtgtgttttggtactcagttcacagcacatgaatgcgctggcaatctagctgcatctgcaagaacaaa

SEQ ID NO: 59529 - DNA, 182 bp, Glycine max
gatagtttcttcattttggttccgtccgttggtttgctcaatcaatcacttttcaatttcttcacgttcctaacacatagaatatctatcgtatgaaccaggactgtctgaagtacacacgcgataaggtcagtcattaccagcacggcagggacggcattcattatcacgcaaggaagact

SEQ ID NO: 59530 - DNA, 345 bp, Glycine max
aggggagtctgaggcgatcgtgaagaaatggagaaggcggtgagagcgtatgcggaggttctgagattggtgaggctcttaccaaaggacagcagggcttattatgccaagtacgcccgcgagaacttcgtcaattaccgtgatgtcgttgatccttctgatttcgatgacctctttcaacgcagctagactcattctctatgggtccgtcataagtattccattgataaatctgctgcggataagctcagagggatatgctgcacttgatgcaatttcaattgccacccaagtgtttgttcgtagttcgcactcattcacacccttccttgcatgcgtgagatg

SEQ ID NO: 59531 - DNA, 210 bp, Glycine max
ggcttcttcaaccttttaagggtaaaagttgagacgattcctatttcataacggaagaagatcttgccagtctcagaaacagaggcgagtgagggtatcagaattggagaagagaggggtagaagcaaaaattatataagcttttgtgctatcaaatagcaagaactagagcgcatagagggttttgcagttttgtgtcatgatgatgga

SEQ ID NO: 59532 - DNA, 54 bp, Glycine max
ggctgcgagcgaatccctctctctcgttctctttcgctctcatccagatcttgc

SEQ ID NO: 59533 - DNA, 314 bp, Glycine max
ggttctagtgtgtgattgtttgttgttgtaactcgttcttcttcttttgttgttctgtgtttgtgtttgttttttctctcacctgaaaatgtcttgctgcggtggtaactgtggttgcggaagctcctgcaagtgcggcaacggctgcggaggctgcaagatgtacccagacttgagctacactgagtcaaccaccaccgagaccttggtcatgggagtggcacctgttaaggctcaatttgagggtgctgaaatgggtgtgcccgctgagaacgatggctgcaaatgtggaccaaactgctcctgaaaccctg

SEQ ID NO: 59534 - DNA, 60 bp, Glycine max
ctttggaagggcacttcaacagagcacccttaaggcatggagtggaaaaaaagaaggagg

SEQ ID NO: 59535 - DNA, 279 bp, Glycine max
gaggccctacctttgtgtccgctactctctctaccccttccttttttctcacccttttgaaatttgagcagtagcactgttgcgacacaacaacatcatgaacatgaacatgaacatgaacatgaacactaagagcaggttgatcaccctttgggttgtgctctatttttggtccagcacagactcactagctgcttcaaagcagtgccatttccctggcagcttcaacgtgtggtgactccaattcagacactgggggtcgctctggtgcctttggac

SEQ ID NO: 59536 - DNA, 63 bp, Glycine max
aatgcttttttcctataaaaaaaaaagggaactactaaatgcacttcgattggatttttctac

SEQ ID NO: 59537 - DNA, 175 bp, Glycine max
gagacctcaggtcaggcggggctacccgctgagtttaagcatatcaataaacaaaaaagagaagaaaaaaaaaaagggccgctctagaagatgcaagctgatgtaagcttacatgcgaggtcatagcacttcgagagggtcacctaaagtcagggtgactggacgtcattttaca

SEQ ID NO: 59538 - DNA, 61 bp, Glycine max
gcaattaagatcgcagagagagatggggagtgacagcgaggcagagaaggagaagaagaag

SEQ ID NO: 59539 - DNA, 153 bp, Glycine max
gacagcactgcactcttcgcaacacaagagaggaagacaacccatagagcgcgtcttaataaacgcgcgtcgctgaaaacccgcatttcgtttcgtcgtgcgtcgtcgcgttcacatcttcgatggtcgatcgtcgtcgcggaaggggagaga

SEQ ID NO: 59540 - DNA, 305 bp, Glycine max
tgtaaaaaaaaaaaaaaaaaaaaaaaaaaaaaaaaaaaaaataaaaaaaaaaaaaaaaaaaaaaataataaaaaaaaaaaaaaattaaaaaaaaaaaaaaaaaaaaaaaaaaaaaaccggccgcccaaaaggttcaagccttacttacccttgcatgcaacttcaaaccccttcaaaattgtcaccaaatttaaattcacgggccttcttttaaaaacttcttgacgggaaaaaccctggctttaccaaattaaaccgctttgcacaaaatccccttttcccaaacgggcttaataccaaaaagg

SEQ ID NO: 59541 - DNA, 120 bp, Glycine max
cacaacctcctacaatgtatatatcatgccccacaccactcaaatggggtcatcaatcatgcactttcctccctaactttgcaggtacatgcagacaaactatggagtcttattcttaaa

SEQ ID NO: 59542 - DNA, 147 bp, Glycine max
gagttctactccatcgtcactccgtcttcgctgtttatgtgtatctcacgtgcatcgagcaaggacgtcaaagggacctcatcgagatctacttaaaggctacattccgtgtagacaccttgtctaaatccagtccatatccaaaca

SEQ ID NO: 59543 - DNA, 138 bp, Glycine max
ggtgtgtagtataggattctcttctttattccttttgtaatttcattcagtcttaatctttgtgaaaaataatgttcatcgagaattttaaggttgagtgtcctaatgtgaagtagaccgagactgagattcagtccg

SEQ ID NO: 59544 - DNA, 75 bp, Glycine max
gccggtttcccgaacgatttgatggtttggaatgcatttcccaagcaacgagtcttcggttcgaaaccagcagag

SEQ ID NO: 59545 - DNA, 324 bp, Glycine max
attgcatcaaatcctgtttttcatgaaaggacccagcacattgaagtggactgtcattttattatacagaaaatcgagtcaggtgacatcatcactagatttgttcattcatgtgatcatggcagatgtgtttaccaaatccttgaggggtccatgggttaactacatatgcattattgcattaggtacaaataaatagaggacataatgattcctctaaatcaaagatacagtttccatataacactatataaactggcatccgtgaagtctctagacccacagtgttgttctgcctttctctatgttatttgttgctctgtt

SEQ ID NO: 59546 - DNA, 126 bp, Glycine max
ggtgtgagttgagtctgtgatgataatgatgatgatgatgtgttccatgtggatgtgggttgtccttgtggccattgctggtgcccttttagtcctaagatgtatcctcaatctacgatagagctc

SEQ ID NO: 59547 - DNA, 77 bp, Glycine max
agacgacgacagcattgatattcaagttggtgatgttgatgatgcctctgaggctgattaggaggaagttggtaaaa

SEQ ID NO: 59548 - DNA, 146 bp, Glycine max
gggggcaccagctgtcgaatctgatgacctcactcctgaagtcgtatcttgcctcacaattccaaagttaaacacaagtctttcagcacaatcgcaaacatcagtatccacggcgacaattagttacgaagctgaagtacgcattt

SEQ ID NO: 59549 - DNA, 108 bp, Glycine max
ggtaagtttaggggttgttattccgtgtacggtttgtagtactcgtaaaagactagaagagaatgtaagaggtttgttttgtgttagttgttaattaagtgtatttgc

SEQ ID NO: 59550 - DNA, 88 bp, Glycine max
agggggttcccggagagatttgcaaaagataggataaggttgcatgaattatcacctttttcaaaagggcagtcaatctgtgttttcc

SEQ ID NO: 59551 - DNA, 89 bp, Glycine max
gaaaaaaagcctaagacaaagacagtgaaggaaacaacttatgagtgggaacttttaaatgatgtgaaagctatatggctgaggaatcc

SEQ ID NO: 59552 - DNA, 88 bp, Glycine max
gtacttcaacaaaatgattgtcatacacatgaccgatacaaattatacgatacaatgaagaatttgccagcggttgacttgtaagagg

SEQ ID NO: 59553 - DNA, 69 bp, Glycine max
  unsure (1)..(69): unsure at all n locations
ggtctgcagtgtgcacttctcttgcataggaagggaaagaccganaactagagaagaaggaaaaccttc

SEQ ID NO: 59554 - DNA, 351 bp, Glycine max
  unsure (1)..(351): unsure at all n locations
aagaaggaagctgaagtcatagaagagaagaaggaagtggaagtgacggaagagaagaaggaaattgaagtaacagaagagaagaaggaagctgaagtcatagaagagaagaaggaagtggaagtgacggaagagaagaaggaaattgaagtaacagaagagaagaaggaagcagaagtgaaagaagagaagaaggaaggggaagtgacggaagagaagaaggaagttgaagtgacggaagagaagaaggaagcggaagtgatagtagaagagaagaagggagttgaagtgacggaagagaagaaggaantggaagtgaccgaaagaaagaaagaagtggaagtgatcgaa

SEQ ID NO: 59555 - DNA, 283 bp, Glycine max
ggcacttcaattgcaatcaaattagttcattctctttgcgcagttccctacctctcctttcaagatgcagatcttcgtcaagaccctcaccggaaagaccatcacccttgaggtggaaagctctgacaccatcgacaacgtcaaggccaagatccaggacaaggaaggaattcccccggatcagcaacgtctcatcttcgccggaaagcatctcgaggacggccgttacctcgccgactacaacatccaagaaagagtcaacccttcaccttgtccttcgtct

SEQ ID NO: 59556 - DNA, 58 bp, Glycine max
cccacgagtcaaaccacgcgtccgccgacacgtcagacggctgcgataagagcaccga

SEQ ID NO: 59557 - DNA, 74 bp, Glycine max
gacctaagtaagttcaagttaggcaaaatgctaatccctgagaagggaggggacatggttaatgttcccctcac

SEQ ID NO: 59558 - DNA, 82 bp, Glycine max
gaagacgacagaaggcggagaaagaaaatactagtaatagtctaaatagtgttccctttttgtctcgagtaacgaagccagg

SEQ ID NO: 59559 - DNA, 130 bp, Glycine max
caataaaaattaaattaatagtacagatgttatcattaatttatattaataatatgattctttatatatattaagaaattttttggtttatatatagaaattgtttatattcttaatactaagaataccg

SEQ ID NO: 59560 - DNA, 328 bp, Glycine max
actcaccacttcaaaacactcataacacaaagcacaaagcaaagctcatccttgagttaaaaaatggcagcagcttcttccatggctctctcatccccatccttggctggcaaggccgtgaagctgggcccatcagccccagaagtgggaagggtgagcatgaggaagaccgtcaccaagcaggtctcctcaggaagcccatggtacggcccagaccgagtcaagtacttgggcccattctctggcgagcccccgtcctacctaaccggtgagttcccaggcgactacggctgggacactgctgggctttccgcagacccagaaacct

SEQ ID NO: 59561 - DNA, 271 bp, Glycine max
ggttctagtgtgtgattgtttgttgttgtaactcgttcttcttcttttgttgttctgtgtttgtgtttgttttttctctcacctgaaaatgtcttgctgcggtggtaactgtggttgcggaagctcctgcaagtgcggcaacggctgcggaggctgcaagatgtacccagacttgagctacactgagtcaaccaccaccgagaccttggtcatgggagtggcacctgttaaggctcaatttgagggtgctgaaatgggtgtgcccgctgag

SEQ ID NO: 59562 - DNA, 57 bp, Glycine max
gagacctcaggtcaggcggggctacccgctgagtttaagcatatcaataagcggaag

SEQ ID NO: 59563 - DNA, 115 bp, Glycine max
gaattagaaaactttcaaccgtattaaaagattacgaatccataatccataattagcaacaaatcaaaaccgtatccggaaacaagcaattcagcaaaatgcgcgcgcagctacc

SEQ ID NO: 59564 - DNA, 305 bp, Glycine max
gatttcttcttcttccacattctggtagttggtgtgctctttactctttatgtaatcaccgtctatgtgtctgtcatttccatgtgttacaactctgtgagatgcgatggatacataaacaggaagacgaacttcgctcacacttgctttcgatggtctgctcaatctgaacctaattgtgatgctagggtacattttccacaccatgaaatcggaaaagaaacccaaaaccgagcggccgctcgagatgatgcacgcttacctaagcatacgtgctacgtcatagcccatcggtcgtgtcagct

SEQ ID NO: 59565 - DNA, 184 bp, Glycine max
cgacggcagtgtttgtgttttgatttgaaaaaaaaaaaaaaaaaaaaaaaaaaaaaaacaaaaaaaaaaaaaaaaaaaaaaaaaaaaaaaaaaaaaaaaaaaaccggccgcccaaaaggatcaaacctaacttacccgtgaatgcaacgtcaaacccctccaaaagtgccaccaaaattcaatt

SEQ ID NO: 59566 - DNA, 74 bp, Glycine max
ggaagaagaacattaaattaaaccacagtgaagaagtaactaaaccaaactgcgaaacgctgaacatttgaagc

SEQ ID NO: 59567 - DNA, 61 bp, Glycine max
aagaaggaagctgaagtcatagaagagaagaaggaagtggaagtgacggaagagaagaagg

SEQ ID NO: 59568 - DNA, 57 bp, Glycine max
  unsure (1)..(57): unsure at all n locations
gagacctcaggtcangcggggctacccgctgagtttaagcatatcaataagcggagg

SEQ ID NO: 59569 - DNA, 57 bp, Glycine max
  unsure (1)..(57): unsure at all n locations
gagacctcaggtcangcggggctacccgctgagtttaagcatatcaataagcgaagc

SEQ ID NO: 59570 - DNA, 83 bp, Glycine max
gtcaggaattccgggctcgacccacgacttcagtagggctgcaaaagaacaacggagggggtaaccataatgctccataattt

SEQ ID NO: 59571 - DNA, 376 bp, Glycine max
ctatattactttaaaaatacagaacaaaatagtgttttgggtgactgcacctttatggttaaaaataagattaaaatatgtttttaatttttatggatataaataaattttatttcagtttttttaaaaaaaaaaaaaaaaaaaaaaaaaaaaaaaaaaaaaaaaaaaaaaaaaaaaaaaaaaaaaaaaaaaaaaaaaaaaaaaaaaaacaaaaaaaaaaaaaaaaaaaaaaaaaaaaaaaaagggcccccccaaagatttaaatttaaatttccgtttcagggaaattcaaaccctttcaaattggtccccaaaatcaaattaaagggcccgcgttttaaaattttcgcccgggaaaaaccagggcttttccaaa

SEQ ID NO: 59572 - DNA, 230 bp, Glycine max
ggttctagtgtgtgattgtttgttgttgtaactcgttcttcttcttttgttgttctgtgtttgtgtttgttttttctctcacctgaaaatgtcttgctgcggtggtaactgtggttgcggaagctcctgcaagtgcggcaacggctgcggaggctgcaagatgtacccagacttgagctacactgagtcaaccaccaccgagaccttggtcatgggagtggcacctgtta

SEQ ID NO: 59573 - DNA, 103 bp, Glycine max
gtgttcggattgcggcgacgtgagcggttcgctgcccgcgacgttgtgagaagtccactgaaccttatcatttagaagaagaaagaagaagcagcagcagcgg

SEQ ID NO: 59574 - DNA, 310 bp, Glycine max
ggaattaaactgcaaagtgaaatccccatgctacaaagcgttatactcatctttctagatacgttgttgactggaaagttccctctcagaaacagaagaccttgccttcgtcaccgtctctagaaacatgactaccacgaaaaccatcaccaccagcagcgatgtctttgacaaacggttcggggaaactgtctgcctgagaaaagtatgctcagaatcacgataacttcaccatgcgagatcatgtctcaactgccttgaagaaagaaggtttatcaccatcaactcttgtccctggcattgaattcac

SEQ ID NO: 59575 - DNA, 369 bp, Glycine max
tcatgccattttttttatcggcattgatatatgcaatgacattagacacgttaattataattataacttgtatgagattctttctttcttttttcgtcaaatattgagaggcttattcacgaagcttttatcggagcagacttgtattttaagggagaattatgacaacatagcaatcattgcagtacatggtagcaataatttatcataatgttcgcagtatttaaaataatcaagaccaccaattttagtataactttttttaatctttttattcaacaaaaaaatttcatcagttctgttgcaagtgctacttattagcatcattctatttttttttcctacatattcttttaacattccgatata

SEQ ID NO: 59576 - DNA, 204 bp, Glycine max
cacagaagggactcgcagattcaaacgtttccaggtgaggctgacgcatctctctctgcgttcatatgggagctgggcgtggagtcccagcgcacttgaggggtgagggacaaaaccttatgcagtcacaaagcctcaatcgcgcacttttccccgttcgttacaatgacacgttctatgtctatgcattcccttccgggtgaa

SEQ ID NO: 59577 - DNA, 414 bp, Glycine max
tgccaaaaaaacaacaaaagggaaaccacaaaatttatgtaactgatcaatctctttctctctctatctgtcgcttccatgcaatggcatatttgaagtcataaggttcaaaattggacaagttccgatctcacaatggggaaatcatcatcaaaatggatcatcaatgtactgtctgagataacgtcatccatatcaaatatttaaatacgcagaaagaatcatgttaatcatacaagaaagacttttaataacgtcaaaagtactataaaatggtttagccttaaaaccaaactcccatatcattgccacactttaggaagacctacagctggaaaatttagaagcagaaaaagtaatacttgagaatcaagaaatatacacaatgggatcaatttatgacaatgctgcact

SEQ ID NO: 59578 - DNA, 155 bp, Glycine max
ggatagcgaaacagagagtggtttcagtgagtgatcggtgttcacttgatccttcataagtcgtcatcatcatcatcatcatcaccgttgattgaagaagatgccgatcagaaacatcgccatcggaaggcctgaagaggctactcaccccgaca

SEQ ID NO: 59579 - DNA, 391 bp, Glycine max
ggttctagtgtgtgattgtttgttgttgtaactcgttcttcttcttttgttgttctgtgtttgtgtttgttttttctctcacctgaaaatgtcttgctgcggtggtaactgtggttgcggaagctcctgcaagtgcggcaacggctgcggaggctgcaagatgtacccagacttgagctacactgagtcaaccaccaccgagaccttggtcatgggagtggcacctgttaaggctcaatttgagggtgctgaaatgggtgtgcccgctgagaacgatggctgcaaatgtggaccaaactgctcctgcaacccctgcacttgcaagtgaggtgttgggagagcaagcttcaagcagagatagcccttaattaggaataatgataaactatta

SEQ ID NO: 59580 - DNA, 68 bp, Glycine max
aattcccgggccgacccacgcgtccaaccacgcgtccgagacgacagaaggggcatatcaataagcag

SEQ ID NO: 59581 - DNA, 291 bp, Glycine max
ggttctagtgtgtgattgtttgttgttgtaactcgttcttcttcttttgttgttctgtgtttgtgtttgttttttctctcacctgaaaatgtcttgctgcggtggtaactgtggttgcggaagctcctgcaagtgcggcaacggctgctgaggctgcaagatgtacccagacttgagctacactgagtcaaccaccaccgagaccttggtcatgggagtggcacctgttaaggctcaatttgacggtgctgaaataggtgtgcccgctgagaacgattgctgcaaatgtgg

SEQ ID NO: 59582 - DNA, 362 bp, Glycine max
attgattttctaattctccttattttcttgtatataatgattttgtatactcattttagtttcataatctacatgtattataatttttcattttcttatgatatcgataaaaaaaatgtaataaaaaaactcataatgaggacatagaaattatatttcaataaccaaaataatagcatatagttcaaagatttataatttaaatttctattgtaaatcaaagtatgacataaaatccataacaaagtaatattagtattgtactaaacttttaatttaaatccaaaatacattataagcaaactaagggttgctagcaccagaagatcctcttgcatccaaacgtgtattacgaacacttg

SEQ ID NO: 59583 - DNA, 393 bp, Glycine max
gactcaccacttcaaaacactcataacacaaagcacaaagcaaagctcatccttgagttaaaaaatggcagcagcttcttccatggctctctcatccccatccttggctggcaaggccgtgaagctgggcccatcagccccagaagtgggaagggtgagcatgaggaagaccgtcaccaagcaggtctcctcaggaagcccatggtacggcccagaccgagtcaagtacttgggcccattctctggcgagcccccgtcctacctaaccggtgagttcccaggcgactacggctgggacactgctgggctttccgcagacccagaaaccttcgccaagaaccgtgaactcgaagtgatccactccacgtggggcatgctcggagccttgggctg

SEQ ID NO: 59584 - DNA, 251 bp, Glycine max
ggaaccctagccatccattcatccacgagtcagtatttgcatcttggacccagatacctcgatattgcgcgttggcccctacctgctcgtctgtccgttggtcgactggctgacaagctcccacgtgccagcttggctgcacggctgtctgtacctctgcatgatggtctggtgatgtcacaacgccacagccctataactgtggcactgcgtcacatcatgagattccggaatagcactgaactcctgat

SEQ ID NO: 59585 - DNA, 368 bp, Glycine max
gacagcagcttccctcgcacccatgcccaatcacatcgacgagactcacgatttccttctcactgctatccagaaggacgcagagtccgttcacatcacgaggagcgagagatgtggtgacgttcaaggtcagatgcgcgaaatatctcgacacacttctgtgtctttgacccaaagaaagctgatacattgagtcagtctcatccaccaagtttcaatgttcaagacctgtcacggtacacggctatagatcaacaagaaccaattcagtgattcgtcagaacatcgtatcacagtagtcgatacttcatattcatttcagtttcctgtagttttaaatcaatactctgacaaggttcttttcatct

SEQ ID NO: 59586 - DNA, 326 bp, Glycine max
acgacagaacggtacagctgccagaaacgacagaacggtacggctgccagcaacacgacacaaaggtacagctgcgacaacacgacaacaaggtacggctgccacaacacgacaaaaaggtacggctgctactacgacgacaacaacgggatatttctaactctcaacacttccatatcttatcgtctcctcctccatcattgatgttctcacagaaacttctcaagattgctggcataccattctgaagcttcaatgactccttcaatttggcctccatcaacgcctacattgctgagttcatctcaacccttctccttgttttt

SEQ ID NO: 59587 - DNA, 299 bp, Glycine max
gaggcacacactgcgacaccacactccctgcgatcccgagatcacactctcttgcgcgagactctaactctcactatctcgctcgacactggttccgcttgtcggtcttgatctctgtggttcacaccaatgtctctcacacacatatgtggtcagtcattgtctagctgcactttaatttattaccagtggggcaattcatacactacccatgaatctcattttgagttgcttggtggaagctgatatttgagaaaacagtgaaattactgtcactattgcatctgtacatagaccac

SEQ ID NO: 59588 - DNA, 377 bp, Glycine max
gagttcaattccaatatattccattctctctgtgtatttccctacctctcccttcaagatgcagatcttcgtcaagaccctcaccggcaagaccatcacccttgaggtggaaagctctgacaccatcgacaacgtcaaggccaagatccaggacaaggaaggaatccccccggaccagcaacgtctcattttcgccggaaagcaacttgaggacggccgtacccttgctgactacaacattcagaaggagagtactcttcacctcgtcctccgtctccgtggtggcatgcagatcttcgttaagacactcaccggcaagaccataaccctagaggttgaaagctccgacaccatcgataacgtcaaggcaaagatcc

SEQ ID NO: 59589 - DNA, 66 bp, Glycine max
gagaacagtgggagctcgaggaagtacacttttcaggtgcagagtggggatgctgagaagaaggcg

SEQ ID NO: 59590 - DNA, 144 bp, Glycine max
gatcgcatttcatagcactcaccctcattaccaacacgaaagcatagccaaaaccttttttcgaagtctctgattttcctaatggctccggcaaaggcagagaagaagccggcggagaagaagccagcggccggagacagcacc

SEQ ID NO: 59591 - DNA, 97 bp, Glycine max
gccggtttcccgaacgatttgatggtttggaatgcatttcccaagcaacgagtcttcggttcgaaaccagcagagagagacaaaaaaaccaaaaacc

SEQ ID NO: 59592 - DNA, 60 bp, Glycine max
gatgagaactactttcaccaaaacacactctactctcgcaaaaaaaaaaaattgagtttc

SEQ ID NO: 59593 - DNA, 257 bp, Glycine max
agaattcacatagatacatacataacacaacgtatgctgcataacaacaatatacatacaaatgagcatgttgattatatagaacgtagaaggcaacactcatttttgtttaccatgggtaacgacaccatctctcatataagagcctatataacacatgctgacatgtatgataaacgaatggttcaaacaccatttactaacctaacagactacattcgtacaaagacctttacgccatggttttgttgaacacg

SEQ ID NO: 59594 - DNA, 83 bp, Glycine max
cacgcgtccgtccactcgtaaaagggcagccagagggcgaccctcgggtttcgctgccagtcgccttccccaggggacatgtc

SEQ ID NO: 59595 - DNA, 92 bp, Glycine max
gactcacaactccataacacaaggcagaaagcaagctcatcctagagttttaaaaatggcagcagcctcctccagggctctctcttccccat

SEQ ID NO: 59596 - DNA, 156 bp, Glycine max
gcagagaaagggacacaatcaggtaacgatgcaaggttttaacaaacggttatggcagctgcaagggttttcggagcgatagccgcgacagcgttcatggacccagggtcaaagagttcggccaatcaacaaacacgttccgtccggcggagccga

SEQ ID NO: 59597 - DNA, 325 bp, Glycine max
gactcaccacttcaaaacactcataacacaaagcacaaagcaaagctcatccttgagttaaaaaatggcagcagcttcttccatggctctctcatccccatccttggctggcaaggccgtgaagctgggcccatcagccccagaagtgggaagggtgagcatgaggaagaccgtcaccaagcaggtctcctcaggaagcccatggtacggcccagaccgagtcaagtacttgggcccattctctggcgagcccccgtcctacctaaccggtgagttcccaggcgactacggctgggacactgctgggctttccgcagacccaaga

SEQ ID NO: 59598 - DNA, 334 bp, Glycine max
gaaatttgtttgtggcactttttgtagtctaggcattgaattaaacaattggaattcaaagagatgtggttttattaaaaaaaaaaaaaaaaaaaacaaaaaaaaaaaaaaaaaaaaaaaaaaaaaaaaaaaaaaaaaaaaaaaaaaaaaaaaaaaaaaaacccaaaaaaaaaaaaaaaaaaaaaaaaaaaaaggggaaaaaaaaaattccccaagggggaaaaaacccccccccaactgtcccaaaccttaattccaaaaaaaaacacacatcccacaaaatcccccttttttccaaaacaaaccccaaacccccaaaacagttccccccccg

SEQ ID NO: 59599 - DNA, 57 bp, Glycine max
agggagacctcaggtcaggcggggctacccgctgagtttaagcatatcaataagcgg

SEQ ID NO: 59600 - DNA, 102 bp, Glycine max
agtccaggcgtcagtaaggaagcaaagggaacacacacagagacacctcaagacctgctgcgccactctctaagttgaaacatcgcacatcatctggaatca

SEQ ID NO: 59601 - DNA, 385 bp, Glycine max
gactcaccacttcaaaacactcataacacaaagcacaaagcaaagctcatccttgagttaaaaaatggcagcagcttcttccatggctctctcatccccatccttggctggcaaggccgtgaagctgggcccatcagccccagaagtgggaagggtgagcatgaggaagaccgtcaccaagcaggtctcctcaggaagcccatggtacggcccagaccgagtcaagtacttgggcccattctctggcgagcccccgtcctacctaaccggtgagttcccaggcgactacggctgggacactgctgggctttccgcagacccagaaaccttcgccaagaaccgtgaactcgaagtgatccactccaggtgggccatgctcggagcc

SEQ ID NO: 59602 - DNA, 106 bp, Glycine max
tggggcgcacccagagaggaagcttagagagagagagagagagagagagagagaggagagagtattggcgcttcatcaagatgggtatttctagggattccatgca

SEQ ID NO: 59603 - DNA, 157 bp, Glycine max
gggtcgaggcacgcgtccgcctcaacgtcagggctgcaaaaagacgacagaacgggacggtttggttaataaggtttacgctcaaacgtgtgcagtctcaccccccgacgcaagatcgatcataccgtcgcacaagacactcagtcacatcatgaaa

SEQ ID NO: 59604 - DNA, 124 bp, Glycine max
gaacgcagccaaagaaaagaaaatcctcaattttctgagcagccaaacactctctctctgtctctcgaaaattctcagtttgcagagaaaatctgaatcatgtcgtggcaagcgtatgtcgacg

SEQ ID NO: 59605 - DNA, 103 bp, Glycine max
gtgtgtaattttcaatatgatccaacggttacaaattccgtgatcatagttttaatgggacaggtttgggtgtacgcgagaaaaagagaaggttttgttagac

SEQ ID NO: 59606 - DNA, 201 bp, Glycine max
gaacgcagccaaagaaaagaaaatcctcaattttctgagcagccaaacactctctctctgtctctcgaaaattctcagtttgcagagaaaatctgaatcatgtcgtggcaagcgtatgtcgacgatcaccttcggtgtgacatcgaaggtaaccacctcactcacgctgctatcatcggccaagacggaagcgtttgggct

SEQ ID NO: 59607 - DNA, 134 bp, Glycine max
ggccgagaaaacgctaattcgcttgcagtcacagaagaggccaatcctattcatagctcgaggatggtgaagaagtgaaggtagttgttccagaatcagtgttgaataagcgcaagagggatgaggaatgggcg

SEQ ID NO: 59608 - DNA, 235 bp, Glycine max
gattcaccacggggctctcactatcttccattgccactcagttttgactctcattttattccctccatgtttcttcactttcttccagagacatgaccatgtcttcacacagtgttggcctcaaaattgcgtaatcatctgtaaggtgtgctggagcagtaaacagggtcatgggaaacatgtacagtgctaagtcagttgacatcgattcaaatgaactcaaggtgagtgtgat

SEQ ID NO: 59609 - DNA, 256 bp, Glycine max
  unsure (1)..(256): unsure at all n locations
gactcaccacttcaaaacactcataacacaaagcacaaagcaaagctcatccttgagttaaaaaatggcagcagcttcgtccatggctctctcatccccatccttggctggcaaggccgtgaagctgggcccatcagccccagaagtgggaagggtgagcatgaggaagaccgtcaccaagcanggtctcctcaggaagcccatgggacggcccagaccgagtcaagtaggtgggcccattctctggcgagccccc

SEQ ID NO: 59610 - DNA, 84 bp, Glycine max
gacagacacctcacttcacacaattgctctctaaaatgcgtgagctcatgtggttgacagaccattgccgcgagacagtttccg

SEQ ID NO: 59611 - DNA, 283 bp, Glycine max
ggaggacaccatggccaacaacaacgaagaggaagaggaagcagtggcgccaatggtgaagttgggttcgtacggtggtgaggttcggttggtggttggtggggaggaatccgctgcggaggagaccatgctgctttggggtattcagcaggccacactttccagacgcgaatgccttcggcgcgcaagctcccttgcaactctcccgcgacgcgtgtggccaggcgcgctcgaggcatcggtcgcggtccgcggggggaacgcctggagtaactggagcagt

SEQ ID NO: 59612 - DNA, 122 bp, Glycine max
gcgcacccagagaggaggcttagagagagagagagagagagagagagagatgagagagtgttggcgcttcatcaagatgggtatttctaggggttccatgcacaagaggcgtgccactggtg

SEQ ID NO: 59613 - DNA, 154 bp, Glycine max
ggagcaaaagcctaatccctatttttcttcctcagtagtgtcatttacgcttctcttctctgcagcagctatgcgtaaacctaaagtcttcttcgacatgaccatcagcagtcaatctgctggccgcatcgtgatggagctctacgccgacgtc

SEQ ID NO: 59614 - DNA, 92 bp, Glycine max
atagcttctattaaccctctagggcagccagtttatgtttgtctataatatacacagtttatcataagaagtattattcctgctatgtcaag

SEQ ID NO: 59615 - DNA, 104 bp, Glycine max
accacgcgtccgtccagacgtcagggtacaacacaacgaaaaaacgcaatgaggactctaggcgtatccaatttaggtatgagggcgagctcgacgattcagca

SEQ ID NO: 59616 - DNA, 55 bp, Glycine max
gaagccagagaaagagaaggaaccagcaacaaagagcagagagaaagagaggacc

SEQ ID NO: 59617 - DNA, 127 bp, Glycine max
gacagcactgcactcttcgcaacacagcacgaggggagaacccagagagcacgtcttaataaagactcttctcgtgaagagcccatttcttttcttcgttcttcgtcgcggtcgcgtcttcgatctt

SEQ ID NO: 59618 - DNA, 133 bp, Glycine max
ggtatccaatactcaccgtttctcagatgttttatttgcaacactgagagcacgagcagttgcgtagtgggttgttcgtcgccgctgcgacagagtgccctagcgacctctcgagcttgccacctacgcgact

SEQ ID NO: 59619 - DNA, 141 bp, Glycine max
gagtacagaataggcagttctcaccatttcccgctcgggaagttccaggtactacgaactttgccatggtttcgtcagcttactcttaatcctctttggtttactttaagtggtgtgtgtttgaacttacggtgcacattg

SEQ ID NO: 59620 - DNA, 129 bp, Glycine max
cgggaatcttggtgctgttgcagttcctagattccgagggagcgtgtaccgtgtaattcgcggagtttcattctgaacggagcacggaggatttcagcatcggagaccgaatcgttcgggtgaggggag

SEQ ID NO: 59621 - DNA, 122 bp, Glycine max
ggtgcataagaggaacaggaaacataggattggagggtcaccacgtttagcaacaagtaatcgctctcgactctttcgtcttcacttcacgagggttttagcttcttcctcttcacttcgtt

SEQ ID NO: 59622 - DNA, 129 bp, Glycine max
gctaggcagtcgtaacgtttgcttaagatgagaaagagcaccacttggtcagtctcttaaacgtccgaagagtgcggcgatcgagtccggtcctaggacgcgggagagggcttagcagcagggcgaaca

SEQ ID NO: 59623 - DNA, 138 bp, Glycine max
ctcctcttttttcgttcactttgaattagctaggttaatttttttaacgcaaatttggtcaaggttattgaaatttctgtgtacggtgcagtgctaaaagaagatggcagtagaagtattagttttaaaaaaattatt

SEQ ID NO: 59624 - DNA, 360 bp, Glycine max
gacccccaaaccctgctgcataggaagaaaccctagcctctcaccctccctgcgacacgatgcagatcttcgtgaaaaccctaacgggtaagacgatcacccttgaggtggagtcttctgacaccatcgacaacgtgaaggccaagatccaggacaaggaaggcatccctccggaccagcagcgcctcatcttcgccggaaagcagctggaggacggccgcaccctcgccgactacaacatccagaaggagtccaccctccacctcgtcctccgtctccgcggtggcgccaagaagcgcaagaagaagacctacaccaagcccaagaagatcaaacacaagcacaagaaggtcaagctcg

SEQ ID NO: 59625 - DNA, 138 bp, Glycine max
tgggaagactgtctctagcatcagaagatcatctatgagatatcagaaaactcactgcagatatacactcgagacttaactaagatgtagttgtgcagtatctttcgctctcacattaccaagtttaagctcgtaagc

SEQ ID NO: 59626 - DNA, 151 bp, Glycine max
ggggacgaggaagagagagagagatagattgttgtattttttggaaatgagagatagagagagagagagagagagagagaagacagtggtggcgaggcgacgcgagactcggaacgagtcattattcggtcgtggggttctggcggttttc

SEQ ID NO: 59627 - DNA, 280 bp, Glycine max
ttacagctgctagacgacgaaatatagctcacgataagaaatcgatgtcttactccattttacggacgctctaaaggatccaatcttactgtacacatggattagacatcatatctcttctatagtgacattgagatacagatcacgtgacgtcgcattacaccttcatgacaggcaaaatcctggtattaggaaacttaatcgactagcatcacatcccaccttcgcaagcttacgttatatcaaatatgacctcatagattacacttcacaataatta

SEQ ID NO: 59628 - DNA, 109 bp, Glycine max
atatttctgccatataatattttattgcatataatacgtagtgaacaaataaaaagagagggggttggggaatttgattaaacaaattgaatttcttcaattaacttgt

SEQ ID NO: 59629 - DNA, 115 bp, Glycine max
ggttctagtgtgtgattgtttgttgttgtaactcgttcttcttcttttgttgttctgtgtttgtgtttgttttttctctcaactgaaaatgtcttgctgcggtggtaactgtggt

SEQ ID NO: 59630 - DNA, 104 bp, Glycine max
ctcttgccgctaatacgaatcctgacaaagtcacaaatccgttgttcgaaaaacgtccgaagcaattccgaatcggaggagcgttgcctccgaagaaaaacctg

SEQ ID NO: 59631 - DNA, 231 bp, Glycine max
gatgtcatattacaagaccctcatcaccatgtacaaactctcacaagaatacaacactcaagatcagtgttaatataggtaatatctatagcacgtcgttaagatattggcacacatggatccagtgggccattttcacgttaatggtcccgtcaactgtgcactttgcctttccaggtatgagaagtttgctcttggatacactacagatgttgacattaagttgcactg

SEQ ID NO: 59632 - DNA, 318 bp, Glycine max
ggttctagtgtgtgattgtttgttgttgtaactcgttcttcttcttttgttgttctgtgtatgtgtctgttttttctctcaactgaaaatgtcttgctgcggtggtaactgtggttgcggaagctcctgcaagtgcggcaacggatgcggaggctgcgagatgtacccagacttgagctacactgagtcaaccaccaccgagaccttggtcatgggagtggcacctgttaaggctcaatttgagggtgctgaaatgggtgtgcccgctgagaacgatgactgcatatgtggaccaaactgctcctgcataccctgcac

SEQ ID NO: 59633 - DNA, 387 bp, Glycine max
aaggaagcagaagtgaaagaagagaagaaggaaggggaagtgacggaagagaagaaggaagttgaagtgacggaagagaagaaggaagcggaagtgatagtagaagagaagaaggaagttgaagtgacggaagagaagaaggaagtggaagtgaccgaaggaaagaaagaagtggaagtgatcgaagagaagaaggaaacagaagtgacagaagaaaagaaagaagtggaagtagaagtgagggaagagaagaaggaaagtgaagtgaaagaagaagagaaaggtcgggaagtgaccgaagagaagaacgaagttgaagtgacggaagagaagaacgaagcggaagtgatagtagacgacaagaaggaagttgaagtgaccggagag

SEQ ID NO: 59634 - DNA, 53 bp, Glycine max
gacgttcacattcacgatccgttttcttcagattatttgccaccgctgaggga

SEQ ID NO: 59635 - DNA, 364 bp, Glycine max
gacttctcttcacacctttgttcactcttcttctcttgcggctagggttttagcgcagcttcttctagatttaaggaagatgggtaaggaaaaggttcacatcagtattgtggtcattggccatgtcgactctgggaaatccactaccactggtcacctgatttacaagcttggaggcattgacaagcgtgttattgagaggtttgagaaggaagctgctgagatgaacaagaggtctttcaagtatgcctgggtgctggacaaacttaaggctgagcgtgaaagaggaatcaccattgatattgctttgtggaagtttgaaacaacaaagtattattgcacagttattgatgcgcctggacat

SEQ ID NO: 59636 - DNA, 61 bp, Glycine max
cactcttctatcatgttccccaaattcaactccctggccatcgttttataacctcgttact

SEQ ID NO: 59637 - DNA, 90 bp, Glycine max
gagcagatcacaaagatccaagcttacgtaacgcgtgcaagccagctgctcgataggctataagctcacgtacgcgtacatgacaggtca

SEQ ID NO: 59638 - DNA, 113 bp, Glycine max
gttataactttgacatcaatgtccatttggccaggcattagttcaataaatccatcttgcttatgtattctaacatttgttgtctttttttcagatttctttctattgaagtt

SEQ ID NO: 59639 - DNA, 303 bp, Glycine max
  unsure (1)..(303): unsure at all n locations
ggtgtccactacggtctttaagggggtacaggaagtanaaccctacatgtagactagaagattaggacaaaaaatattaaggaaaataatactaaaccgtagagaaaagggacacgtcctcgaaaaccacgtcacctggtagaatctgaaagtgtgaagagtgaagatggccgaagaaaaagaatcaacgtcaattcctcttagtcaaagggaaaatgcatctcgcgacgattccgaagacccagccaagtctccaccaagctcgcccaactcctccactcgcaaagcttgctgctttgttct

SEQ ID NO: 59640 - DNA, 268 bp, Glycine max
atattagcatgaactctaatatcatggttgtactctttgtaaccgttcaacttcacatttaagctagtaattggtgctttttctattgtacagtcgattagacatttctcatgaactcattacatgaagtttgatgtgagtttctggatgttgttatcacataatacgtcactgatgatgatattagcatctaaatccgtgattcaattgccatattgaatttcactgcagtatatgtatttgccgacccagatgaatagtgtcacta

SEQ ID NO: 59641 - DNA, 340 bp, Glycine max
cgagagacgacaaaagggggtgctttcttgaagcatttggaattctctcgattagctatgacgtaaaaagaacggtcaggagagatagagagggaacaagaatgagtgtatcagtgactgtgatgaccttcaatcaccatgatgaggagccgcaacacagtcacgattcgtgggagaagatataggatatgtgcaaaggcgtgtttagcagttactcaaccatcatcctcagtatccataatggagtgaatgcacaattggattttctctagcaaggtttgccagtttacaatcaaattgggatatcactggaagggccctacgacactactgaacagca

SEQ ID NO: 59642 - DNA, 259 bp, Glycine max
gggttgcctgatgaggttaaaaaaagataaagatacaaaaaaaaaaaaaaaaagataaagatacaaaaaaaaaacaaaaaagataaggataaaaaaaaacaaaaaaaaaaaaaaaacttagaagaaaaaaaaaaaaaaaaaaaaaaaagggggccccccaaaagtgttaagtctaatttacctttgattgcaatttcaaaccccttcaaaagggcccccaaatttcatttctggggcctccttttaaaaacttcttaac

SEQ ID NO: 59643 - DNA, 358 bp, Glycine max
gaatttaattagaatcgtttaatgtcaaaaaaaaaaaaaaaaaaaaaaaaaaaaaaaaaaaaaaaaaaaaaaaaaaaaaaaaaaaaaccaaaaaaaaacaaaaaaaaaaaaaaaaaaaaaaaaaaaaaccggccgcccaaaaggatcaaacctaacgtacccttccatgcaacttcaaaccccttcaaaagtgtcaccaaaatccaattcacgggccgtcctttaacaacctcctaacgggaaaaaccctgccgtaaccaaatttaaccaccttgaaaaaaacccccctttcccaaacacggcataaaaccaaaaaggccacaaccaatcccccttcccaaacaattcccaacccaaa

SEQ ID NO: 59644 - DNA, 176 bp, Glycine max
gacgtcacgatgtgcatgtcagagtgtgtattagagtacaagccgcatttgatcgcagtgtgttaggatgagtaacaccatcagggactctagctgaagtgggagacgtgattccagaccgcactgtcgccaacctggctcacgccaacagcacccaagtcgtcaccattcaggct

SEQ ID NO: 59645 - DNA, 285 bp, Glycine max
gacagctcttggctttagcaaattccaattcccaattcccaattcgaaacccttagtcctttcaaagaaccaaattgagtgatcgtgatggcaccaaaggcagagaagaagccagcggagaagaagcccgcggaggagaagaagtcgacggtgggagacaaggctccggcggagaagaagccaaaggccggaaagaagcttccgaaggagggaggcgccggcggagaagggaagaagaagaagagaaacaagaagagcgtggagacatacaagatctacatcttc

SEQ ID NO: 59646 - DNA, 322 bp, Glycine max
ggttctaaggggtgattgtttgttgttgtaactcgttcttcatcatttgttgttctgtgtttgtgtttgttttttctctcacctgaaaatgtcttgctgcggtggtaactgtggttgcggaagctcctgcaagtgcggcaactgctgccgaggctgcaagatgtacccaaacttgagctacactgagtcaaccaccaccgagaccttggtcatgggagtggcacctgttaaggctcaatttgagggtgctgaaatgggtgtgcccgctgagaacgatggctgcaaatgtggaccaaactgctcctgcaacccctgcacttgc

SEQ ID NO: 59647 - DNA, 305 bp, Glycine max
gaacagcgaaacagagagtgatttcagtgagtgatcggtgttcacttgatctcatcataatcgtcagcgtcaattgaagaagatgccgatcagaaacatcgccgtcggaaggcctgaagaggcgactcaccccgacacgttgaaggcggctttggctgagttcatctcaaccttcatcttcgtgttcgccggctcaggctccggcatcgcctacaacaagctcaccgacaacggcgctgccacccctgccggcctcatctccgcctccatcgcccatgcattcgccctcttcgtcgccgtctccg

SEQ ID NO: 59648 - DNA, 85 bp, Glycine max
gagaatagagttgttcccgttgactggctttttattgtgctgtttgctcatgaataaggaccatgttttagaaatcatatttgcc

SEQ ID NO: 59649 - DNA, 387 bp, Glycine max
  unsure (1)..(387): unsure at all n locations
ggttctagtgtgtgattgtttgttgttgtaactcgttcttcttcttttgttgttctgtgtttgtgtttgttttttctctcacctgaaaatgtcttgctgcggtggtaactgtggttgcggaagctcctgcaagtgcggcaacggctgcggaggctgcaagatgtacccagacttgagctacactgagtcaaccaccaccgagaccttggtcatgggagtggcacctgttaaggctcaatttgagggtgctgaaatgggtgtgcccgctgagaacgatggctgcaaatgtggaccaaactgctcctgcaacccctgcacttgcaagtgaagtgttgggagagcaagcttcaagcagagatagcccttaattangaataatgataaact

SEQ ID NO: 59650 - DNA, 95 bp, Glycine max
ggtaactaaggtgctcccaatactaatcaccatgagcaacgttcaagggctaacgaacaacagctgccataatattgctgactagcgcaatctca

SEQ ID NO: 59651 - DNA, 126 bp, Glycine max
ggttactaagggcgttacaatacacagccacataagacacttcaaacggccgttcgacacgatgcatccttacttacgcgtgcaagcgacgtctcagcacttctatattgtcacctaggttccatt

SEQ ID NO: 59652 - DNA, 117 bp, Glycine max
tggaacgtggaagtggaacccactttgatgtcacaaaacaaacaagtaccacatcagaaatccactcttataaaagaacaacctaacaacaaatctatcacaaatcgtcagtaatcc

SEQ ID NO: 59653 - DNA, 158 bp, Glycine max
cggcgaaattgccactgaggaagagtgaagtggcactttctaacggaaccattagggtttttttttaagctcggtttttttttgttttattttgtttttaatggttgactttgtttgaaatcaacgttcagtagtataattaaatttgttttcagagc

SEQ ID NO: 59654 - DNA, 318 bp, Glycine max
ggaacctgaaaatctagtttcttacaaggctctactctactgcttcaccttctgctctagaaaattcagtggtgatacatggcttcggctactctctctgtagccaaaccagcccttcaggcaaatgggaaaggcttctctgaattctctggcctccgcagctcatcaggcttccttcccttttctagaaaatcttcagaggatttccattctgtcattgccttccagacctatgcacttggaagcagtggaggatacaagaagggtgtgacataagcaaaactgaaggttgccataaacggatttggaacgattgga

SEQ ID NO: 59655 - DNA, 146 bp, Glycine max
  unsure (1)..(146): unsure at all n locations
gacctcaacacgtttattcgttacagaaattaagctcagtgtgtgtgagtgagagaaaaaaaanggagaaaaagggaaaaaaagggggcggtccaaaaggttcaaggctaagttagcgtggaagggaaggtaaaggtcctccaaag

SEQ ID NO: 59656 - DNA, 66 bp, Glycine max
gctcgccaccttttcttgttccattttgcttcaccgaattcaacccacttcggaggccaaattcaa

SEQ ID NO: 59657 - DNA, 105 bp, Glycine max
cgggaccacttcaaaacactcataacacaaagcacaaagcaaagctcatccttgagttaaaaaatggcagcagcttcttccaagggtctctcatccccaaccttg

SEQ ID NO: 59658 - DNA, 158 bp, Glycine max
gatcgctctcacacctgtgattattcctcttttaacaatccacacccagattcgaaggttccgaaatggacgctggcggaaagatcaagaagggcgccggacgtagaaagggcggcggcccagagaagaagccggtttcaaggtccgtcaaagccggt

SEQ ID NO: 59659 - DNA, 337 bp, Glycine max
gaaacagagagtgatttcagtgagtgatcggtgttcacttgatctcatcataatcgtcagcgtcaattgaagaagatgccgatcagaaacatcgccgtcggaaggcctgaagaggcgactcaccccgacacgttgaaggcggctttggctgagttcatctcaaccttcatcttcgtgttcgccggctcaggctccggcatcgcctacaacaagctcaccgacaacggcgctgccacccctgccggcctcatctccgcctccatcgcccatgcattcgccctcttcgtcgccgtctccgtcggcgccaacatctccggcggccacgtcaaccccgccg

SEQ ID NO: 59660 - DNA, 85 bp, Glycine max
aggagctttaacttgttcatacatgagatggctgcgataggaccacatgacgggatccatattcatggcgtcgaacgctgcttcc

SEQ ID NO: 59661 - DNA, 145 bp, Glycine max
ggatgaccggttaacaggaaaatctcgcgggccaaaagaaacgaaaaagcagaagaagaaaaaagcggccgctctaaacgatccaagcttacttacgcgtgcatgcaacgtcatagctcttccatagggtcaccgaaattcaatt

SEQ ID NO: 59662 - DNA, 97 bp, Glycine max
gcacgacagttggtggtagctgattgcatctgcatcggtttggtgttcagcagagcaggaaccgcaaacctttgtgtcgagaatcttagccatgggt

SEQ ID NO: 59663 - DNA, 259 bp, Glycine max
ggagctggtttttttgtcgcgtttgtttataacgttggtgttccttgactcgtgtactagtactagtactacccccaacacagcacgcagcagaccacgcgccgaggcgaagtccaggtccgggtcaaggcctacgacagcaatccagggagaccttcttcggctcaattctccgatcccatccgcaatggaagaaggcggattcctctctgccgctctccagcaagaaggagaacgtgactcccattacctctaaaat

SEQ ID NO: 59664 - DNA, 123 bp, Glycine max
cggggaaacacagagtgatttcactgagtgatcggtgttcacttgatcgcatgcagaagcgtcagcgtcaagtgaagaagatgccgatcagaaacatcgccgtcggaaggcctgaagaggcga

SEQ ID NO: 59665 - DNA, 72 bp, Glycine max
gaccaaacaataagcaagaatttccattgcatgcaaagcaaatacgcattatattactaattttaatttgtt

SEQ ID NO: 59666 - DNA, 74 bp, Glycine max
aaagctgccagagttcagaatcacagacgactaaatatccataccaaacggcaagtaacatcttcactgattgt

SEQ ID NO: 59667 - DNA, 80 bp, Glycine max
gccggtttcccgaacgatttgatggtttggaatgcatttcccaagcaacgagtcttcggttcgaaaccagcagagagagg

SEQ ID NO: 59668 - DNA, 69 bp, Glycine max
ggtgctcggtttttgatcgagtttttctccgtttagcgcagagcgaatttcgaaatcccgtggagaacg

SEQ ID NO: 59669 - DNA, 274 bp, Glycine max
tgggacgaacgagcaaaacgatgctctgggattccttcatttcccgtgtgattcaccaccgatctgatagtcgtagtgcgttgtgtgtttgggaagtgggatggagtgtgtgtgaagagtctcatgagattttcgtcagcgaggaacacgagcagcagaggtttctgtctcgtgagctcgcggatcgggagccacactgcgaactggatgcaagatacaggcaggagatctccgatcgagctgattaatgaagttcctccaattgacgttgaaa

SEQ ID NO: 59670 - DNA, 185 bp, Glycine max
atcatcaaatgcttttcaaaaaaaaaaaaaaaaaaaaaaaaaaaacagccgccccacaagatgatcccatcctaactcctccttgatacgacatcacacctctacaatatcgtcaactatcatctcatcagtggtcgtcttataacaacgtcattactaagaaaatcctgttattaaacataata

SEQ ID NO: 59671 - DNA, 282 bp, Glycine max
gactcttacaatcacagttgtcgagtcaccggatctgggttgcatagattcagagaaaattttccactttcaaatagcaagcaccgtcaatacccacgggttggatcggtgagactgttcattcaatcaaatctcatcagatttgggagatcatcaccaattctgttagccgatgcacaattgtaacatcatcactgcaaatacggaaggcattgatcatacgtatacggcactgaatctcccgtagtcgtcgttctttcaggaatcatgcaaccccgatta

SEQ ID NO: 59672 - DNA, 64 bp, Glycine max
taagagagaaggataaaaaatatagagagagagaaaaaaaaaggaaagatggtgcaggagagag

SEQ ID NO: 59673 - DNA, 118 bp, Glycine max
aaccaccagctgaacatgatttcaatctgagtaaatgtataccactaccctcaacttgtgtacagattctccccacgggatgaggaaaatcatgtaaattcaatatatttttttttcc

SEQ ID NO: 59674 - DNA, 253 bp, Glycine max
aggtgattttgagcattacatcttctaaatttgcattatattactctttttttattattattttagtggtttgtcttctgaacgggtagttctcagcctccttgcctgcttgaggcactttatagacttgtaaagaaaggtcaagttaatgaaacaagtttgcttaaaaaaagagaatcgaaaaaaaaaaaaaaaaaaaaaaaaaaaaaaaaaaaaaaaaaaaaaaaaaaaaaaaaaaaaaaaacacccaagg

SEQ ID NO: 59675 - DNA, 122 bp, Glycine max
gaagaagggttcgtagacagcccgaaagaaggtcctctcttcgtattctatagaaagacgaaatagcgtaagagaagaaagtagaaaggatttggattcgaggcttgctaggtgaagtcaac

SEQ ID NO: 59676 - DNA, 318 bp, Glycine max
ggttctagtgtgtgattgtttgttgttgtaactcgttcttcttcttttgttgttctgtgtttgtgtttgttttttctctcacctgaaaatgtcttgctgcggtggtaactgtggttgcggaagctcctgcaagtgcggcaacggctgcggaggctgcaagatgtacccagacttgagctacactgagtcaaccaccaccgagaccttggtcatgggagtggcacctgttaaggctcaatttgagggtgctgaaatgggtgtgcccgctgagaacgatggctgcaaatgtggaccaaactgctcctgcaacccctgcac

SEQ ID NO: 59677 - DNA, 296 bp, Glycine max
gtggaacacacctgacacctgatccgcgagcgagggtttgtgaagatgacgacgattcgcaggttttgctgcaacgatcttcttcgctttgccgccgtcaatctcgaccatctcaccgaaacagtaagcgtttttttgtcctttttccatttgatactgaatctgactgtgtattcgcttaattgcttcattggtttagttcaacatgtccttctacatgacctatcttgcaagatggcctgactatttccacgttgccgaaggccctggaaatcgaatcatgggttacagtgagt

SEQ ID NO: 59678 - DNA, 102 bp, Glycine max
gacgccgttagacgtaacggcgggaggtacggtggtggtgttgttgccttggttttgagtttggtttttgggttaccgttaatgctttgatgtgagttaatt

SEQ ID NO: 59679 - DNA, 249 bp, Glycine max
atcagattgaaggttttagtcctgagggccaaggtctgcaattttcccccttaatcagcaagcatgcaatgatgcattgtaaatgaaagtcaatcatctgaaagcttgagaaaaaattatttgattgagctaaccatgcacaattttcttttcaaagttcatgtttaataataaacttaggcattacattagctaaaacatttcaaagttcatttgggcattagatcaaacacataacttgcaactcat

SEQ ID NO: 59680 - DNA, 387 bp, Glycine max
cccgggctcaaccaagccttaataacggttgcaaaaagacaacagaaggggtctgttaacaggcttcgctatcatttttcggagcaatctgcttctgcatcaaggaaggacatcttgttcttcactatcaactagtatgttgtcaggtgaagatggtgtcactgcagttcaaccagctgctgctgctgctatcataccagacgaactagtggatatcatgactgtcttacatcttgtgatcagaacatcgctggattatggtgggttgtctcgtcgtcatcatggtggtgcaataattaatgagcatcatgctgcacaccgctgtcttcctgcagaatactgtgaccatgctgacgatgttcaactgaataacgccctttgtgcaca

SEQ ID NO: 59681 - DNA, 77 bp, Glycine max
gtcagcttttgcctttgatacagtgccactgcattattaaacatttgaacgaattggtagatcatctttagatcccc

SEQ ID NO: 59682 - DNA, 314 bp, Glycine max
gaattccaatatattccattctctctgtgtatttccctacctctcccttcaagatgcagatcttcgtcaagaccctcaccggcaagaccatcacccttgaggtggaaagctctgacaccatcgacaacgtcaaggccaagatccaggacaaggaaggaatccccccggaccagcaacgtctcattttcgccggaaagcaacttgaggacggccgtacccttgctgactacaacattcagaaggagagtactcttcacctcgtcctccgtctccgtggtggcatgcagatcttcgttaagacactcaccggcaag

SEQ ID NO: 59683 - DNA, 240 bp, Glycine max
gcacttcaattgcaatcaaattagttcattctctttgcgcagttccctacctctcctttcaagatgcagatcttcgtcaagaccctcaccggaaagaccatcacccttgaggtggaaagctctgacaccatcgacaacgtcaaggccaagatccaggacaaggaaggaattccccggattagcaacgtctcatcttcgccggaaagcagctcgaggacgggcggtacctcgccgactaca

SEQ ID NO: 59684 - DNA, 259 bp, Glycine max
  unsure (1)..(259): unsure at all n locations
gtctgatttccttatcgcaattaangaatacgtangagcaanggaaacaccctcgtcgaccgcaaaaaaaaaaaaaaaaaaaaaaaaaaaaaaaaaaaaaaaaaaaaaaaaaaaaaaaaaaaaaaaaaaaaaaaaaaaaaaaaaaaaagaaaaaaaaaaaaaaaaaaaaaaaaaaaaaagggccccccaaaaggatcaaacctaacttacccttgaatgcaacttaaaaccccttcaaaaatgtcaccaaaattaaatt

SEQ ID NO: 59685 - DNA, 298 bp, Glycine max
  unsure (1)..(298): unsure at all n locations
gctcttcacacctttgttcactcttcttctcttgcggctagggttttagcgcagcttcttctagatttaaggaagatgggtaaggaaaaggttcacatcagtattgtggtcattggccatgtcgactctgggaaatccactaccactggtcacctgatttacaagcttggaggcattgacaagcgtgttattgagaggtttgagaaggaagctgctgagatgaacaagaggtctttcaagtatgcctgngtgctggacaaacttaaggctgagcgttaaagaggaatcaccattgata

SEQ ID NO: 59686 - DNA, 314 bp, Glycine max
ggcgaaacagagagtgatttcagtgagtgatcggtgttcacttgatctcatcataatcgtcagcgtcaattgaagaagatgccgatcagaaacatcgccgtcggaaggcctgaagaggcgactcaccccgacacgttgaaggcggctttggctgagttcatctcaaccttcatcttcgtgttcgccggctcaggctccggcatcgcctacaacaagctcaccgacaacggcgctgccacccctgccggcctcatctccgcctccatcgcccatgcattcgccctcgtcgtcgccgtctccgtcggcgccaacat

SEQ ID NO: 59687 - DNA, 57 bp, Glycine max
catgtataattgagagaaggtgggaattttatattcttagttttatcctttttgaag

SEQ ID NO: 59688 - DNA, 68 bp, Glycine max
aaccaagccttcataacggctgcaaaaaaacaacaaaagggctaaatgaattattgtttttcattaac

SEQ ID NO: 59689 - DNA, 64 bp, Glycine max
gagaacaacataacataagaaaaacacacacacaaacaccctttgagttcattaacctcttcag

SEQ ID NO: 59690 - DNA, 69 bp, Glycine max
gaacagcgctcagatcagaatgagataaattatttgatgaagtgttttgctgaagaaaaggctgcttag

SEQ ID NO: 59691 - DNA, 380 bp, Glycine max
cgtaacgctttcgagacgtttccgtgagcaatttcatgaagattttccgtagttcttcgttcgttcttcgttcttcaaccggtaagttttcgaatccgtgactttcaattcatttcttgttttgtttgctttcatctttatttcgttcactttcggttttattttcttccttttttaacgagctttaactgatcgtttaagccgttatctcgcctaaagaatgataaaatgaattccaaccgatcatttgcgttgtaatctcgtttaatcactgttaaagcaaaatctaaccgatcgatcacattgtaaccacggttaaaccaaaaaaggcaaaataataataaaataatcaaaatatctttgaataaaataatcaaaaa

SEQ ID NO: 59692 - DNA, 151 bp, Glycine max
taccggtgccaaaagaccaccgaaaggtaccggttccagaagaccacagaaagataccggtgccaaaagaccacagaaaggtaccggtgccaaaagaccaccgaaagggtaacggttccggataccacccgaagggaattcttttcctccc

SEQ ID NO: 59693 - DNA, 324 bp, Glycine max
gattcacacaactaactaagaaagtcttccatagccccccaaaaatgaagagcaccatcttctttgctctctttctcttttgtgccttcaccacctcatacctaccttcagccatcgctgatttcgtgctcgataatgaaggtaaccctcttgaaaatggtggcacatattatatcttgtcagacataacagcatttggtggaataagagcagccccaacgggaaatgaaagatgccctctcactgtggtgcaatctcgcaatgagctcgacaaagggattggaacaatcatctcgttcccatatcgaatccgttttatcgccg

SEQ ID NO: 59694 - DNA, 361 bp, Glycine max
gagcgaaacagagagtgatttcagtgagtgatcggtgttcacttgatctcatcataatcgtcagcgtcaattgaagaagatgccgatcagaaacatcgccgtcggaaggcctgaagaggcgactcaccccgacacgttgaaggcggctttggctgagttcatctcaaccttcatcttcgtgttcgccggctcaggctccggcatcgcctacaacaagctcaccgacaacggcgctgccacccctgccggcctcatctccgcctccatcgcccatgcattcgccctcttcgtcgccgtctccgtcggcgccaacatctccggcggccacggtcaaccccgccgtcaccttcggcgccttcgt

SEQ ID NO: 59695 - DNA, 57 bp, Glycine max
gagacctcaggtcaggcggggctacccgctgagtttaagcatatcaataagcggagg

SEQ ID NO: 59696 - DNA, 340 bp, Glycine max
agcaacatggtgaagctggtggagagatttacttgccagaagcttacgttagaaccaagaggactacttaatggagcaaatcagttggaagaacttgtagctagcttcccaactggcttaactgagtgtggagaagcattatcaagccttaggagtaggagaacgagtactgtttgtgatgaatgtccatggtttaagaaatctgtccttagtcaacttgtgtgttttggtaatcaattctcaacaataaactgctctggcaatccagtttcatgttcaaaaaaggaaacttacaagatgggaaggccatcaacagaattgaccaactcgaacttcaaaa

SEQ ID NO: 59697 - DNA, 334 bp, Glycine max
gatctggcagcagaagaacaagtagttgagaactaagaaggagaagcaaatggcttcctcaatgatctcttccccagctgttaccactgtcaaccgtgccggtgccggcatggttgctccattcactggcctcaagtccatggctggcttccccaccagaaagaccaacaatgacattacctccattgctagcaacggtggaagagtgcaatgcatgcaggtgtggccaccagttggcaagaagaagtttgagactctttcctacctgccagaccttgatgatgcacaattggcaaaggaagtagaataccttcttacgaagggatggattcct

SEQ ID NO: 59698 - DNA, 388 bp, Glycine max
ggttctagtgtgtgattgtttgttgttgtaactcgttcttcttcttttgttgttctgtgtttgtgtttgttttttctctcacctgaaaatgtcttgctgcggtggtaactgtggttgcggaagcgcctgcaagtgcggcaacggctgcggaggctgcaagatgtacccagacttgagctacaccgagtcaaccaccaccgagaccttggtcatgggagtggcaccagttaaggctcaattcgagagtgctgaaatgggtgttcccgctgagaacgatggctgcaaatgtggagctaactgcacctgcaacccctgcacttgcaagtgaggtgttggagagctaaagcttcaagcagaaatggcccttagacataatgataaaaactat

SEQ ID NO: 59699 - DNA, 77 bp, Glycine max
gactcttctccacttctcaaactttgtaacttcaaaacatactcctctgttctctctgtttctcttcaatcttcctg

SEQ ID NO: 59700 - DNA, 383 bp, Glycine max
caacgggattttttttttacattcctacaaacgaaacttgattttgcgtaacacaaaacaaacaacaacaaaaacacaaaaaacacaccaacaccaaccaaaaaacacaacccaaaaaaaacacaaaacaacaccaacaaccaacacacaaacacacacaaccaccacaccacaatcgggcacaccacaaccacaccacacaccaacccacacaaaaacccgccccccccaaaagacccacccccaacccccacccccaaccaaaccccaacccccccccaaacccccccccaacacccaccccgggcccccccttaaacccaaccccacccgggaaacaccccggcccatccccaacaaaacccccctccacacaaaacccc

SEQ ID NO: 59701 - DNA, 379 bp, Glycine max
gactcaccacttcaaaacactcataacacaaagcacaaagcaaagctcatccttgagttaaaaaatggcagcagcttcttccatggctctctcatccccatccttggctggcaaggccgtgaagctgggcccatcagccccagaagtgggaagggtgagcatgaggaagaccgtcaccaagcaggtctcctcaggaagcccatggtacggcccagaccgagtcaagtacttgggcccattctctggcgagcccccgtcctacctaaccggtgagttcccaagcgactacggctgggacactgctgggctttccgcagaaccagaaacctttcccaaagaaccgtgaactcgaagtgattcactccaggtgggccatgct

SEQ ID NO: 59702 - DNA, 383 bp, Glycine max
gcggctcgaaccactcatcagaccactcgtcagcgcagccatccgtacagatgcggggaagacattgaggtcctggtgttaggaggtaacctacaggtactggtgctatagcagtacacacggtgatcggctcacttcctctgctttcatcatcatctgtctaagttggttacttgcgtcatcgcattcaggcatctctgtcacgatacatctccatcaatttgtgaatacctatactttagtgtcttcacacaccttattctcgtcaatcgattggttgctatctggatgttccgaaatcttctacagtgcatttgatgctgagttaacacaggttatccctgtgatcaagagatccattggtggcactcgtattggaggtc

SEQ ID NO: 59703 - DNA, 303 bp, Glycine max
gactcaccacttcaaaacactcataacacaaagcacaaagcaaagctcatccttgagttaaaaaatggcagcagcttcttccatggctctctcatccccatccttggctggcaaggccgttaagctgggcccatcaaccccagaagtgggaagggtgagcatgaggaagaccgtcaccaagcaggtctcctcaagaagcccatggtacggcccagaccgagtcaagtacttgggcccattctctggcgaacccccgtcctacctaaccggtgagttcccaagcgactacggctgggacactgc

SEQ ID NO: 59704 - DNA, 102 bp, Glycine max
cccgggcccaaccaagcgtcagaccaagcctccgcccaagcctccgtaacggtgccaaaaaaacacaaaaaggaaaaaaaggttgaataatggtgccaatgg

SEQ ID NO: 59705 - DNA, 302 bp, Glycine max
  unsure (1)..(302): unsure at all n locations
gatgtcatagtattatcattcattctcatctttctctcttctctctccacccaaaccctaactcccgaccctgttcccctctcgtatccgtcatgaaaggaggaaagtccaagaccgaatctaagagagccgatcccaaacttgctgtgaataagaagggagccgccaccaaggctaggaaacccgccggcaaggggaaggcagcgaaagaccctaacaagccaaagaggcctccaagtgctttcttcgttttcatggaggagttcaggaaggtattcaacanagaacatcctgaaaacaaa

SEQ ID NO: 59706 - DNA, 359 bp, Glycine max
agcgaaacagagagtgatttcagtgagtgatcggtgttcacttgatctcatcataatcgtcagcgtcaattgaagaagatgccgatcagaaacatcgccgtcggaaggcctgaagaggcgactcaccccgacacgttgaaggcggctttggctgagttcatctcaaccttcatcttcgtgttcgccggctcaggctccggcatcgcctacaacaagctcaccgacaacggcgctgccacccctgccggcctcatctccgcctccatcgcccatgcattcgccctcttcgtcgccgtctccgtcggcgccaacatctccggcggccacgtcaaccccgccgtcaccttcggcgccttcgt

SEQ ID NO: 59707 - DNA, 77 bp, Glycine max
cacgcgtcaataagactacaaaagggttcttaaaacagaaaaaccaaaaaacaataaaaggaggaagaatgagctgc

SEQ ID NO: 59708 - DNA, 63 bp, Glycine max
atatcaaccaaaaaataatctcaatcaacatggatcacaaaaaaaatttaatcgatatcaacc

SEQ ID NO: 59709 - DNA, 321 bp, Glycine max
ggcagttcaattccaatatattccattctctctgtgtatttccctacctctcccttcaagatgcagatcttcgtcaagaccctcaccggcaagaccatcacccttgaggtggaaagctctgacaccatcgacaacgtcaaggccaagatccaggacaaggaaggaatccccccggaccagcaacgtctcattttcgccggaaagcaacttgaggacggccgtacccttgctgactacaacattcagaaggagagtactcttcacctcgtcctccgtctccgtggtggcatgcagatcttcgttaagacactcaccggcaag

SEQ ID NO: 59710 - DNA, 339 bp, Glycine max
cacgcgtcaatccaggcgtcagaagatacataggggagaggagggggttagtgtggtagcttcactaagtcgaaaagtctctcgatagataaatggcatcaaatcgccggcttcatttgagaggtcaactttccgttcatgtctcgatctccgttgttcatccagtcacgggtgtcatctccacacaggctcggtcgccgttcagtgtcgctgccagtaaatctcgctcgcgaatccagactcaggtatccctttgaattgaccgtttgtgtgcaatccatgcaaccgtaccacaacgctcctgcttctgatgtgatgacttcgatgccaaccttctcg

SEQ ID NO: 59711 - DNA, 58 bp, Glycine max
ggagacctcaggtcaggcggggctacccgctgagtttaagcatatcaataagcggagc

SEQ ID NO: 59712 - DNA, 77 bp, Glycine max
gccggtttcccgaacgatttgatggtttggaatgcatttcccaagcaacgagtcttcggttcgaaaccagcagagag

SEQ ID NO: 59713 - DNA, 249 bp, Glycine max
attcccggatcgacccacgcgcccacccacgcgtcagggctgccaaaaaaacaacaaaagggaaccaaacttaatccccccttggttgcagcttcagcaccaccggaaagcaattcaatccgcaatgggaaccaatttgaaggcaggaggtaattccaaaagaaccaaccttaaagccccaaatccaatggtaattaactcaaactcctcctcaaaccgttacgttttcctggtccgaagactgggaat

SEQ ID NO: 59714 - DNA, 144 bp, Glycine max
aatgcatatcgaccaaaacaactacaacaaccaacaaggagtttagccaaaacaaaacgaagattaatgtgtgaagaaaaaaacaacgaacgaaagaaaaagtaaacatggataagattagaattttaataattatgttggatg

SEQ ID NO: 59715 - DNA, 363 bp, Glycine max
ggaagactatatcccccttcggtggaggctcaagccagacagcgtgcgatctctgcgacggacgcccaaaaggatttacgcatatctgaacgtacctgcgacgtcgacgcgcggcaaaaatgacagtcagattcacttcagcggccgtcgtgtcacaacgtcataaaggggatcatcctgatctttggcgccataaactccttgcaacgtatcgcacttgcgtgagcaggagttggaggaaagtggccagcatcaatgtgatttctcagcatatgcgtctcctgaagggctacatgggaggctcgctgtgtctgagcattgatcgctgacgttacgctgtgtactcggatcgtgaccgctttc

SEQ ID NO: 59716 - DNA, 348 bp, Glycine max
gacccaagcgtcagtaggtgcgagaaaacaacacaaagggagttctcttcacacctttgttcactcttcttctcttgcggctacggttttagcgcagcttcttctacatttaaggaagatgggtaacgaaaatgttcacatcagtattgtggtcattggccatgtcgactctgggaaatccactaccactggtcacctgatttacaagcttggaggcattgacaagcgtgttattgacaggtttgagaaggaagctgctgacatgaacaagaggtctttcaagtatgcctgggtgctggacaaacttaaggctgatcgtgaaagaggaatcaccattgagattgcttt

SEQ ID NO: 59717 - DNA, 283 bp, Glycine max
attccgaatcgacccacgcctccatccggtcgtaagagaacacctcagggggaatactgagtgacaacggtaagttaattcatcagtgaccacggtagcgtagctgatcgatctgcattagatctctccggtatctgaagcgacagacttcaatcggagatctgcatgcatggcccgagtcaccagattcccattctccaacacatccttcaggatccgttcggtctgaccattcgtctgatcggatcaggagtcgtcgatttcggcggtaggctaattttca

SEQ ID NO: 59718 - DNA, 278 bp, Glycine max
aattcccggatcgacccacgcctccatccggtcgtaagaacacgcgtcaggggtacaacagtatgacaacgggggattcactcatctctcactccctcagcatttctatctatctcatgtttcaactttcccaacgggcactcatttatctctttgagttacaatcacgcccgcaacaagtcgacagaatcgcaatccacagccacgacttcagcctccattacatcacaccactcgtatactcgcatcaccattgtgatatttgacgccaatgcgag

SEQ ID NO: 59719 - DNA, 96 bp, Glycine max
gaagggggcagaaaagtagtaccaagatggcttcagttgtgtatctcctccttggcttccatcacattggaatcacgtcacgttccctacgcgcaa

SEQ ID NO: 59720 - DNA, 63 bp, Glycine max
agtcaattcgaatgaaaagaaaaaggttaagcatcaacacacacaacaaataagttgtatgtt

SEQ ID NO: 59721 - DNA, 207 bp, Glycine max
gctgtgggaccacgttggggtcagttagatttcactccctcaattttcaacactgtcgcacagtgggaatcttcgtgtgcgcaatctgctgaagctttcaaatatactcccgcacgtttcggttcatatgtacgcgctgtttcctcaacagtgtgtgcctctatctcttctttgaaggaattcatctgtattatttgttaaatgatt

SEQ ID NO: 59722 - DNA, 233 bp, Glycine max
cacgttttgcgcacaatcctgcgtaaacgcagatggacccatgttacttcctcatgatttggcttcagatgcgtacaacatcaccatcacttgagactgctcaaaagaaagagttatctccagagcagagcgggctaatataccacccttcctgcaactgatcaaaatagcttgctaggagatttaataagaggatgctctaaaggatccaagcttacataatcctgcatgcc

SEQ ID NO: 59723 - DNA, 55 bp, Glycine max
gacaccgtcggcatcagttggaattttcgtggacgtagctgttaccgggttcact

SEQ ID NO: 59724 - DNA, 401 bp, Glycine max
  unsure (1)..(401): unsure at all n locations
ggttccagtgtgtgattggtttgatgtttgtaactccgttccttcatccttttgttgatcggtgtatgtgtgtgttttttctctcacctgaaaatgtcttgctgcggtggtaactgtggttgcggaagctcctgcaagtgcggcaacagctgcggaagctgcaagatgtacccagacttgagctacactgagtcaaccaccatcgagaccttggtcatgggagtggcacctgttaaggctcaatttgagggtgctgaaatgggtgtgcccgctgagaacgatggctgcaaatgtggaccaaactgctcctgcaacccctgcacttgcaagtgaggtgttgggagagcaagcttcaagcagagatagcccttaattangaataatgataaactattaatgtg

SEQ ID NO: 59725 - DNA, 369 bp, Glycine max
gatgtcaatcttcaattcaaatccctaatgtcaatcattctcacgaaccttcccaacgcgtcctcgtttcatccgaaacctaaacctaagccctctcatcatcacccacagatggctctcagtcagtctgcagtaattgtagcgcggacaatttgcttgaggaatctgttgcgaatggcagcgtcttctgaagagcgatccagtggaggaagtcaagttatcactgagaaaagcgatggtgtcagagtcctggagaatgtgaaagacgataataagaatgagttcgatgatacggtgattgaagacgcgtaagaagaagagttgtctgaagatggacagggtctgtcatatgatttgatggattagctc

SEQ ID NO: 59726 - DNA, 159 bp, Glycine max
gaatatcaatatacgaagaaaaaaaaaaaaaaaaaaaaaaaagaaaagaaaaaaaaaaaaaaaaaaaaaaaaagcggacgcgctacacgataggatctaaccttaccttccattgcatgtcatatcacatctcttctatcatgtaacttaaattcaatt

SEQ ID NO: 59727 - DNA, 369 bp, Glycine max
gagttacatcctatgttagtgttactcttccgtcaaacaccacataatcctttcctgcatttcacggtttttcttcaacactctcagtctcgttttcttcatctttttcttctttgttccactggaaaaagaagtaccttacttgtgaagtgggatttagagcttaatctgaagttgggttttgcttcccttgtccaaattccatggctttaatcttctttacttgttttcccttactcgatttcacatggcatttcaaccccgctctggagctgatagtgaagttgcaggaagctctatacaaaattcagagcattggtcagaggcttatacataccaccaaataattgaagaatgccggttatgaag

SEQ ID NO: 59728 - DNA, 337 bp, Glycine max
ccggtatcgctgctacactaccatataacggtacagctgccatacgacaatataagggttctgctgcaaaactccaactcacgggtacggctgcaatattcctccttatgggtctggctccgaaattaccacacttggttattgctgctataacacgacatctggttacggctgctacatcactactcaaggttacagctgctaaatcactcacatacgggtactgctgcaaacaatttgacatagggttacatgcgaactcaatggacgtattttacttacccagcttccacaactgcaaaatcaccacctttttcattctgaaaaaaatatcacc

SEQ ID NO: 59729 - DNA, 310 bp, Glycine max
gaattacaagcataagaaccatgtttttagtaatttataatttacaagtaacatatcggttgtctctctaaaaaaaaaaaaaaggaaaaaaaggaaaaaaaagaacaaaacaaaaaagaaaaaaagcagaccaaaagaaaagagaaaaaagagaaagaatgaaacttaacgaccagagcacaaaagcaaaaaaaaaaagggggggccccaaagggttaaaggctaagtcaccgtgccatggaaagtaaagcccctccaaaggggccccccaacgtacgtaacgggggcgcatttttaaaaaccgtggagg

SEQ ID NO: 59730 - DNA, 257 bp, Glycine max
taccgctgcaagaagactacataacgggacgggacattgtttttctgttccacttctaagatctctttcacgtcagtctcacacgtgaaacacatccttgttctgaaaatatatgctcgtcctagttccactgcgcatctggctcatgtttaacttgcatttttgaattatggccagttttaccccgcaatggtgtttctggcaaccttcaaaattagtttggtgcttcctcacaacatgggtttggtccttatgtg

SEQ ID NO: 59731 - DNA, 101 bp, Glycine max
atcatattctacgtagcatccatactgtatattaattatcttaaatttctttatatgcttcaagtgttagatgcaaacttaatgaatatgtttacgtgttt

SEQ ID NO: 59732 - DNA, 331 bp, Glycine max
agatgtcagtacagcagagaaaggtccagatgcgggaatagtagagacaggctgacattacgatacagctgccataatccgaaaaaaatgatacggctgtcaaaagggttcaaactgacattgctgtgcattcaacatcaaaaggtatcgatgatgtcaccctacttcaagttaatggcccttcgattataaattccggtactggaaaaaccatgcctttaccggctttatcgcccttacaacaaatccccgttccgcaaccaacattatgaccaaaaggtgcattccaaattcccttcccaaaatttgctcacccggatattgcaatggg

SEQ ID NO: 59733 - DNA, 355 bp, Glycine max
gatccgcatctctatgtttgggtgataggatacaacagcttcttcacctccgaagccgtatatcttagcttagcttagcaggggcaaagcaatggcttcgtcttccctcacttcagttcctctctcctcttcttccctcaatattccactttcttcctccaaaccttcctctagctttttatcttctccaattcccgcattctctcgcactcccaaaaccctgtttgccgaatcaaaatcccacttttacccaaagagaaacgataatgggttttccatcagagcccaaaccctagacttctcggattcattcttcgaaaggggtttccgctccgaagacgaaccctcttccccc

SEQ ID NO: 59734 - DNA, 54 bp, Glycine max
agcgaaaagacgacagaagggatccaatgattccaaaggtacaaactttatgcc

SEQ ID NO: 59735 - DNA, 203 bp, Glycine max
aggtacagctgcgaggagcacacagcagggattgtagcatgactagtaaatgtcaattttaaaacttagtttcaattctactccgcatcgccgattctcgccatgccgaaagccaagtgggcgctctaaaggatcgaaacttaggtacacgtgaatgcgacgtcataggtcttcgaaactgtcacctaaatctcacttcagat

SEQ ID NO: 59736 - DNA, 250 bp, Glycine max
cgggccaaaagtggctttgctaataccattgtggctatgagtggtatgatatcatacttgtttacaattaagttttgaatagtacaacccttcacatgattatcactgataactggccgtcaaacccaaacccaaagccatttccttgcaaaagcggccttccaataggatccatccttacgtacacatgcatgccacttcataggtcttctacattgtccaccaaattcagttcaccggacgtcgtttt

SEQ ID NO: 59737 - DNA, 387 bp, Glycine max
  unsure (1)..(387): unsure at all n locations
ggttctagtgtgtgattgtttgttgttgtaactcgttcttcttcttttgttgttctgtgtttgtgtttgttttttctctcacctgaaaatgtcttgctgcggtggtaactgtggttgcggaagctcctgcaagtgcggcaacggctgcggaggctgcaagatgtacccagacttgagctacactgagtcaaccaccaccgagaccttggtcatgggagtggcacctgttaaggctcaatttgagggtgctgaaatgggtgtgcccgctgagaacgatggctgcaaatgtggaccaaactgctcctgcaacccctgcacttgcaagtgangtgttgggagagcaagcttcaagcagagatagcccttaattangaataaatgataact

SEQ ID NO: 59738 - DNA, 134 bp, Glycine max
taacgggagcaccaaccataacgacttttcttggtcgctacttcgcatttccgttctttgcatttcacgggctacgaaaaacgacgtccttttcccaattttccccggcgaacgggaaatggtggaacccgtgg

SEQ ID NO: 59739 - DNA, 385 bp, Glycine max
actcacaactccataacacaaggcagaaagcaagctcatcctagagttttaaaaatggcagcagcctcctccatggctctctcttccccatccttggctggcaaggccgtgaagctgggcccatcagcccccgaagtcgggagggtcagcatgaggaagaccgtcaccaagcaggcctcctccggaagcccatggtacggcccagaccgcgtcaagtacttgggcccattctctggcgagcccccgtcctacctcactggcgagttcccaggtgactacggctgggacactgctgggctttcggccgacccagaaaccttcgccagaaaccgtgagctcgaagtgatccactccaggtgggccatgctcggggccttgggctgcg

SEQ ID NO: 59740 - DNA, 79 bp, Glycine max
aaaacacaaaggtacgctcaaaaacacagaggggaatagggctacataagaaacaaaagtggaaagtttttattgggtc

SEQ ID NO: 59741 - DNA, 174 bp, Glycine max
caaaagaccacagaagggggaatttaaaagattctgaaaaggggaattacccaaaatcccttaattgcaaaaatgaagaacaatccttccaaccagaacaagaacaacccggaccggcttaacaacaaaattcaagccaaaggcaaccaaatttaagggcccccccggaaaatt

SEQ ID NO: 59742 - DNA, 115 bp, Glycine max
agggacacatcaaaatccgccaatatacctgcttttctcactctcacgcactcgtgttcagatacgatacaaacccaggataggacaagaagccatgcttctttcaccatgtttg

SEQ ID NO: 59743 - DNA, 367 bp, Glycine max
ggtttgttgttgtaactcgttcttcttcttttgttgttctgtgtttgtgtttgttttttctctcacctgaaaatgtcttgctgcggtggtaactgtggttgcggaagctcctgcaagtgcggcaacggctgcggaggctgcaagatgtacccagacttgagctacactgagtcaaccaccaccgagaccttggtcatgggagtggcacctgttaaggctcaatttgagggtgctgaaatgggtgtgcccgctgagaacgatggctgcaaatgtggaccaaactgctcctgcaacccctgcacttgcaagtgaggtgttgggagagcaagcttcaagcagagatacccttaattaggaataatgataa

SEQ ID NO: 59744 - DNA, 216 bp, Glycine max
agacgacagaaagggagaacacttgcgcgctgcaggatccaagctcgcatcagtcatcgtgtgtcgaacatcaggcctctctgaagtgttaaaatgtcgccctgagaaaatgcgtgttcatatgcagctctcaaccttcatgaagatggtaacaatgttactgttgacgagaatcgcaccttggtgagaaatgcaaatgttcaagtcgatacctat

SEQ ID NO: 59745 - DNA, 348 bp, Glycine max
gaaactcgttctagtgtgtgattgtttgttgttgtaactcgttcttcttcttttgttgttctgtgtttgtgtatgttttttctctcacctgaaaatgtcttgctgcggtggtaactgtggttgcggaagctcctgcaagtgcagcaacggctgcggaggctgcaagatgtacccagacttgagttacactgagtcaaccaccaccgagaccttggtcatgggagtggcacctgttaaggctcaatttgagggtgctgaaatgggtgtgcccgctgagaacgatggctgcaaatgtggaccaaactgctcctgcaacccctgcacttgcaagtgaagtgttgggagagc

SEQ ID NO: 59746 - DNA, 319 bp, Glycine max
ggttctagtgtgtgattgtttgttgttgtaactcgttcttcttcttttgttgttctgtgtttgtgtttgtttttttctctcacctgaaaatgtcttgctgcggtggtaactgtggttgcggaagctcctgcaagtgcggcaacggctgcggaggctgcaagatgtacccagacttgagctacactgagtcaaccaccaccgagaccttggtcatgggagtggcacctgttaaggctcaatttgagggtgctgaaatgggtgtgcccgctgagaacgatggctgcaaatgtggaccaaactgctcctgcaacccctgcac

SEQ ID NO: 59747 - DNA, 75 bp, Glycine max
ctggaatctcttggttatgtgctcatgtacttcttaagaggaagtcttccctggcagggactgaaggctggcacc

SEQ ID NO: 59748 - DNA, 81 bp, Glycine max
ggatagttcctggatggaggcttggttggtttgttacaaatgatccatctggcacttttagaaatccaaaggtagatgagt

SEQ ID NO: 59749 - DNA, 345 bp, Glycine max
ggttctagtgtgtgattgtttgttgttgtaactcgttcttcttcttttgttgttctgtgtttgtgtatgttttttctctcacctgaaaatgtcttgctgcggtggtaactgtggttgcggaagctcctgcaagtgcggcaacggctgcggaggctgcaagatgtacccagacttgagctacactgagtcaaccaccaccgagaccttggtcatgggagtggcacctgttaaggctcaatttgagggtgctgaaatgggtgtgcccgctgagaacgatggctgcaaatgtggaccaaactgctcctgcaacccctgcacttgcaagtgaggtgttgggatagcaag

SEQ ID NO: 59750 - DNA, 302 bp, Glycine max
gaacccattcgcttacgaacaaccatactctctaaaaaattgatggtctcaccgacgagcgagtggcataatcgaaggccatgatcggcggtacaaacatgttcatcttcagatccatcctcgacacaccactcaagcaactcatcggtgatcacatttctgagctcactcgcgaatactgtctcagattcctcaagaaaccagggatgctcaggccatcctgcaagatatcgcatgtcatccaacatgtcatttcactgaaaacgctactgaggaacttctgataatgatactcctcttcc

SEQ ID NO: 59751 - DNA, 60 bp, Glycine max
atatgtgtatatctgtattatattcgttgttctggttgttgtttgtattttgttttgtac

SEQ ID NO: 59752 - DNA, 290 bp, Glycine max
gacttcacaacgcaaactgcgtcattgcatcattgcagatatcattaacccttctaccttcagattcgcgggaagatggcatcacctcacgctaatgtgacatcagttgtttagaacagtggtcaacgtgtttctcaatcgagatttgcatgctcttcattcttgtctgggttcgatgttgttggtcatgcatcaagtgcttggaagaaggaacttgtcacatcttcgatttccatggtgcctagagccacactaacatttgatcccccaactaccacttcagagcatac

SEQ ID NO: 59753 - DNA, 400 bp, Glycine max
  unsure (1)..(400): unsure at all n locations
gacttctcttcacacctttgttcactcttcttctcttgcggctagggttttagcgcagcttcttctagatttaaggaagatgggtaaggaaaaggttcacatcagtattgtggtcattggccatgtcgactctgggaaatccactaccactggtcacctgatttacaagcttggaggcattgacaagcgtgttattgagaggtttgagaaggaagctgctgagatgaacaagaggtctttcaagtatgcctgcgtgctggacaaacttaaggctgagcgtgaaagaggaatcaccattgatattgctttgtggaagtttgaaacaacaaagtattattgcacagttattgatgcgcctggacatanggatttcattaagaatatgattactgggacatcc

SEQ ID NO: 59754 - DNA, 52 bp, Glycine max
gaagtccgtcctttcttttgttaaacaggctggctgtgacttcggctcccac

SEQ ID NO: 59755 - DNA, 327 bp, Glycine max
taaagagaatgagacatacgggggtcctctgagcagtcacgtagggctcgcatttcgcgatcgccctatacggtcgctctttcctatccttgcatgcgatctaaaagatctaccattatgtaagtgcagttcaatacattgaccgtgcttttagaaactattaactgagaagcagttgcagggatttaacttacgctccttgcaggagacgtgtcttacgttaccctgctgcatatgtaacaagtcggacccaatgtatattcacaccagttgataaccccgaatggggattgaaaggcacctactttcgacaccttcatcacagcg

SEQ ID NO: 59756 - DNA, 322 bp, Glycine max
gacaacttcaatccctcttttgctttaccaaattccattttccaattcaaaaccctaactccgttcgaagcaccaaatcgtgatggcaccaaaggcagagaagaagccagcagagaagaagcctgtggaggagaagaaatcgacggtgggagacaaggctccggcggagaagaagccaaaggccggaaagaagcttccgaaggagggaggcgccggcggagaaggtaagaagaagaagagaaacaagaagagcgtggagacatacaagatctacatcttcaaggttctgaagcaggttcaccctgacattggtatctcaagc

SEQ ID NO: 59757 - DNA, 305 bp, Glycine max
  unsure (1)..(305): unsure at all n locations
gacttctcttcacacctttgttcactcttcttctcttgcggctagggttttagcgcagcttcttctagatttaaggaagatgggtaaggaaaaggttcacatcagtattgtggtcattggccatgtcgactctgggaaatccactaccactggtcacctgatttacaagcttggaggcattgacaagcgtgttattgagaggtttgagaaggaagctgctgagatgaacaagaggtctttcaagtatgcctgngtgctggacaaacttaaggctgagcctgaaagaggaatcaccattgatattg

SEQ ID NO: 59758 - DNA, 366 bp, Glycine max
gtcttagatttggcttgtgaacatggaatctttgtgaaacatgagggaagctactttattgaaggtaacagttttgatagtagagaagcagctgaactgtttttggctcaaaatcatgctgtttgtgacaaggtggttaaggatatgagaagactttatttttaaaatcaggtggaccttacatcttcctataaacttgctcagcatggtttcactaggccaaatctctttcaatggtatatatggcaaactttatgtaattgagcattgccaacattttttatcatcaaggcattaatattgtcttctatgggtaccaagtatcaaccattctttagatgagcttgtggcatttgaagttacaag

SEQ ID NO: 59759 - DNA, 300 bp, Glycine max
gattgtgcgacacgtttttacaagtgattggtatccatacacatcatcaccactacagattactccatatttccttccacaaccctgtaatcacctgcctcattgtcacaccaccacctacaagaagactgttggctcgtcaaaaaaacagtggtcacaatatgctccaaacctacatactgcgtgtcttaaactcattgtacatcgacaatcgttgctatattccattcacgtgacatctggtaagagattttcgactgagaaactcctggcatcacggaatctcaacaagcttgcacc

SEQ ID NO: 59760 - DNA, 262 bp, Glycine max
gacttctcttcacacctttgttcactcttcttctcttgcggctagggttttagcgcagcttcttctagatttaaggaagatgggtaaggaaaaggttcacatcagtattgtggtcattggccatgtcgactctgggaaatccactaccactggtcacctgatttacaagcttggaggcattgacaagcgtgttattgagaggtttgagaaggaagctgctgagatgaacaagaggtctttcaagtatgcctgggtgctggac

SEQ ID NO: 59761 - DNA, 273 bp, Glycine max
gacaccatccacgactcttctgagttccagcacagcaggctcttcatttctcggacactttcgtttcattcaccgttaatgtcaccagatttcacacattgggacttcccggaactcatacattccactaggatcactttccgagccattctccgcgtcatgctcatcatcctcatgttcaacctgctcttcactcatggcgggcttccatgggcctgggcacgggccatacacatcatacctggcccagtatctgaccagttccggatcatt

SEQ ID NO: 59762 - DNA, 297 bp, Glycine max
gaacagagcaggcgaagggccgaccctctactactactcacacggccttccttcgcgtatattcagactcaccagatcgtacacccgcagatgcacgacgcataagcgcacgcgactgcgacagatggagcgttgctaagaatgagatgaactatttacacaccatcatacacatgttgagaaagcttccgttcccgcgcagcggtcgctccaaaggatctcaccctaagtccgcgtgcatgctacgtcgcatcgctcctcgcgtgtgacatacactcaaggcaatggccgtcgttt

SEQ ID NO: 59763 - DNA, 358 bp, Glycine max
gacgacaatgacgaccaagaaaatgatgctcctgaccggggttaccaccaacaacaaccaaaattattaagaaaaaaggtatgttcaaccttgttgttagccttaccaattacataacgactcaaacgacgactcagacgacgacgaagatgaagacgacgaggacgaggaggagcaaggggaagaggaggatttgggaacagagtaccttatccgccctttagaaactgctgaggaggaggaagcatcaagtgattttgaaccagaggagaatggtgaggaggaggaagaagatgttgacgacgaggactgtgagaaggctgaggctccaccgaaaaggacagaggtcagataaaga

SEQ ID NO: 59764 - DNA, 173 bp, Glycine max
ttcccgcctcgacacacgcgtacgcccacgcgtccgccgactccaaacgaccgacagggagtgacatcagagaaagtgagaacagggtctaacaactggtgatgtcattgatggctacagaggacgatagtgcggtgaacgagcctttggatctcattacgctcagcctcgac

SEQ ID NO: 59765 - DNA, 359 bp, Glycine max
ggcaccgcttgagcagacttaacaacagcacaaagcgggttactgtctgttcaagctaccatctctctctctctttcttagtgcctccttgccagaagttaaaatggcccaagaaactttcctattcacatctgaatcagtgaacgaggggcaccctgacaagctctgtgaccagatctccgatgctgtgctcgatgcatgcttggagcaggaccctgacagcaaggttgcctgtgaaacctgcaccaagaccaacatggtgatggttttcggagagatcacaaccaaggccaacgtggactatgagaagattgtgcgtgacacatgcaagaacattggttttgtctctgatgatgttg

SEQ ID NO: 59766 - DNA, 322 bp, Glycine max
gattcttctcaaagtcatataaatagactcctttgtgacacattataaataatcctcaggtttccccacgtttcctctgtcacgaggaacagcgcagaacctaaccctcacgaaaacccctttcgattccgataactctcgttgtgccgaaaccctaaccttaaccgggttttctcgttggttgggattgaattggcatcggagggaggcgatcgattggaaaattggtagtagtagtttagcgttgaagaacgatgtctgctgctgtgtgcggaagcacgagatctttcttcgaagagcttcctccttctccgccactctc

SEQ ID NO: 59767 - DNA, 57 bp, Glycine max
gtggaagttgatgaagatacagctgaagacaaaaaggatgatcaagatgataagact

SEQ ID NO: 59768 - DNA, 54 bp, Glycine max
tacattctttccttgaaaaataaaataaaataaaatgaacttaatcattgttat

SEQ ID NO: 59769 - DNA, 334 bp, Glycine max
ggaaacagagagtgatttcagtgagtgatcggtgttcacttgatctcatcataatcgtcagcgtcaattgaagaagatgccgatcagaaacatcgccgtcggaaggcctgaagaggcgactcaccccgacacgttgaaggcggctttggctgagttcatctcaaccttcatcttcgtgttcgccggctcaggctccggcatcgcctacaacaagctcaccgacaacggcgctgccacccctgccggcctcatctccgcctccatcgcccatgcattcgccctcttcgtcgccgtctccgtcggcgccaacatctccggcggccacgtcaacccc

SEQ ID NO: 59770 - DNA, 128 bp, Glycine max
aaaaactgacggcaacatgatgtgatgtgaatgtgaatgtaatggcggccgcactagatgattcaggcttacgtccgcgtgtatgcgacgtaatacctcttctatgttgtcatctaaattcagttcag

SEQ ID NO: 59771 - DNA, 369 bp, Glycine max
ggggtacatacattttatggcttgaaaatatcattctccattccagtccactgcgagcaacactaccaaatcgccatggcaacactcacacagcgaacagtggcatcttccattttccattcccacacactcccacgcaaaccatgcttcttcctccgctttcgctttccctccactttctgcaacttcacattttccccttccaatttcgccgtgaaatcttcttcgcgcctcgccgtcatctccgcttcatcttcctccgagcaccaccacaactcctcctcatctccagacatcgccgtccttctcgaagtcgacggggttcttatggactcgcaccgcgtcggaaatcgcctcgccttcaataaa

SEQ ID NO: 59772 - DNA, 53 bp, Glycine max
gaaccaagtttgcttgcgtgtatattcattttagcatcaaggttgaatctcat

SEQ ID NO: 59773 - DNA, 342 bp, Glycine max
ggttctagtgtgtgattgtttgttgttgtaactcgttcttcttcttttgttgttctgtgtttgtgtttgttttttctctcacctgaaaatgtcttgctgcggtggtaactgtggttgcggaagctcctgcaagtgcggcaacggctgcggaggctgcaagatgtacccagacttgagctacactgagtcaaccaccaccgagaccttggtcatgggagtggcacctgttaaggctcaatttgagggtgctgaaatgggtgtgcccgctgagaacgatggctgcaaatgtggaccaaactgctcctgcaacccctgcacttgcaagtgaggtgttgggagagc

SEQ ID NO: 59774 - DNA, 218 bp, Glycine max
ggctactggatttcagcctcaaatattcttgatattcctcagtagaaaatcttggcttggtccctcatggacctagatagagggggtgtgttgaaggtcgcacatggcggagatataaggttgacttggtgctaaagagcgaagggagggagggataagtcttgggtttgaatcctcccactaacaaaaaccaacaaattaacaactaacatttgccg

SEQ ID NO: 59775 - DNA, 272 bp, Glycine max
ggtgctctgctcgtgcctctagggttatcatttctccatttccattttctctctcacttttcaagaatcgtaagctatgggaaagtcttacccaactgtgagtgctgattaccagaaggccgttgagaaggcgaagaagaagctcagaggcttcatcgctgagaagagatgcgctcctctaatgctccgtttggcatggcactctgctggaacctttgacaagggcacgaagaccggtggacccttcggaaccatcaagcaccctgccgaac

SEQ ID NO: 59776 - DNA, 257 bp, Glycine max
caagaccagaaggggaaggcaagggaaaggccccttgtggttcctcctggccttcgccggtcccccggttccccgttttggggtcaaaacggaacccaagtccggaatccaaacaattttaaccacccaaggtggaaagcctaaccctttgacaaaccccagttctgataacaaggattccaacaaaattgaggtggttacaatccagaatacaaaggacaaggaaaagggcctaaaggctttgaacgcaaaggcgc

SEQ ID NO: 59777 - DNA, 137 bp, Glycine max
agtttaagcatatcaataaagcggaggagacgctcaaaaggatcaaagcttaagtaagcggtcgatctaaaggaataaagcttccatacgcttgcatgcgatctcatcactcgtcgacattgtcacctatcttcact

SEQ ID NO: 59778 - DNA, 204 bp, Glycine max
gttttaccatgtgatttatcgtagaatctcagttgagcttactgatgaaatgcaaggtgtcccgcttcttgtagcattttggtattcatggtcatgttagcagaataggcataattcttgtaagcaattcagtcacatttggcattagcttttctttcttggatgttcttataagcatatctcatttaagcaagcattatgttt

SEQ ID NO: 59779 - DNA, 342 bp, Glycine max
aacttttagataagtgcttttatttaagttctccggtagctgggatgcataaattgagtttagcttacacaagaaattcatttcactttctattcttattttctactcttataagtacttacataaaagtttatcacgtcataacacatgaccaaactttacctctgttctgtttgtcaatagcatgaatgatgtcaaagtcaacgaaatcagagggcttgattggcctcgaaatagaagttatctgaatctcacgcctttttgaagctgccctcattcacgaatacgcttcatttcccttcgagaatcacacactcaacacctcccatgaatggtaaaaat

SEQ ID NO: 59780 - DNA, 200 bp, Glycine max
gactcactcatacaataaagaacaacttttggctccttggtgacaatggaaataaggaatccaggtggcttctcctcctggccctcctccctggccttggcttccaagttggtgttgcaaacggaggaaaaattttttaattcaaaaggcaacggttccaagggttggggtataaaaaacaacactggtccttgggccgg

SEQ ID NO: 59781 - DNA, 380 bp, Glycine max
tataacattaagttaaatatcaaatttgtttaattatcaaattttgtaaataaattaatgtataaaaaattctaaataaattataattaaaaaaattcaaaacatacggattgccaatctgtatgttttgaaaagaaaatacgcacatcttcttctccggtgatgaaaaactatcgaacttcatcttatatccgtaaacaacgcacatacaccactggcgataacatactcacaaaaggacgctagtgaaagcaagttacgattagggagtgcagttttacgaaaaaaaggtgctgcagaaattaaaaagctaatttgctatttataactgaaaataccgaacaggacattttcgatattttgaaaaattgttgggtgta

SEQ ID NO: 59782 - DNA, 286 bp, Glycine max
aaatcatttaaacacatgttgtttttgtatgcgcacttccaagtgcgcaagtcattgtacaagaacaacagtgcaatgtgtttgaccctatttaaacttcatggttgcgaattgaaggagatttgatttacgggaggagagctctctagggttgaggggaaggctatgaagctcttccccttgctctccatggcttccctaacatttctcatcaactctttcatctatttgcatattttcctcgtgtggttatgtaattggatttatccatttgggggttgatgta

SEQ ID NO: 59783 - DNA, 373 bp, Glycine max
  unsure (1)..(373): unsure at all n locations
tttattttgatttttcttagtttcactggcaattgacaccataccatanaactatactaccgtatggttgtttcaagtgacagtgaacttggattcttaagggttcggagcanattttattaatgaaaaaaaaatgtaattcanaagagagattttactataaataactaatttttttactgaaaataaattaaccacaaagttgttaaatacactagtatcattcataaaaaaaacaatttaccctaaagtaagatttgacttttttttagttaatattgtttggccctcctattgtttagagctttaattcctgatatggtatggaagcagacaatggtaaaagccctttcctttttgcaaccacttcatt

SEQ ID NO: 59784 - DNA, 52 bp, Glycine max
gaagtccgtcctttcttttgttaaacaggctggctgtgacttcggctccccc

SEQ ID NO: 59785 - DNA, 339 bp, Glycine max
gacagcgaaacagagagtgatttcagtgagtgatcggtgttcacttgatctcatcataatcgtcagcgtcaattgaagaagatgccgatcagaaacatcgccgtcggaaggcctgaagaggcgactcaccccgacacgttgaaggcggctttggctgagttcatctcaaccttcatcttcgtgttcgccggctcaggctccggcatcgcctacaacaagctcaccgacaacggcgctgccacccctgccggcctcatctccgcctccatcgcccatgcattcgccctcttcgtcgccgtctccgtcggcgccaacatctccggcggccacgtcaacccg

SEQ ID NO: 59786 - DNA, 79 bp, Glycine max
gccggtttcccgaacgatttgatggtttggaatgcatttcccaagcaacgagtcttcggttcgaaaccagcagagagac

SEQ ID NO: 59787 - DNA, 266 bp, Glycine max
  unsure (1)..(266): unsure at all n locations
cgtgacggcttcacgttgtcacagtcatcatctcttgcggctacggttttagcgcagcttcttctagatttaaggaagatgggtaaggaaaaggttcacatcagtattgtggtcattggccatgtcgactctgggaaatccactaccactggtcacctgatttacaagcttggaggcattgacaagcgtgttattgagaggtttgagaangaagctgctgagatgaacaagaggtctttcaagtatgcctgggtgctggacaaact

SEQ ID NO: 59788 - DNA, 361 bp, Glycine max
gaccctacgtacagatgactcatcattttcttctgggagcaactaaatggttctgacctgatggcaaatcagaacaaaacattagctctagcttcagtccaacaacataaacacattattcagactcttcactccatttttttttataaaagttggccaagaataatatgcatctcttgcttccttttcgcttttatactcactttttggtagttgagtcttcaagatgcattcttcctgagatattcagcttcgacatctcacgtatcactgtgattggttttgtctaatgtgattgctgctccaccagcagcttttctagacacagctaattcttgccagatgctaacgtcacagtata

SEQ ID NO: 59789 - DNA, 109 bp, Glycine max
gacgtagcgcattagcagcatctatactacatagcatgatcaaactgataaaaagcgctgtcgttgtgtcattcagtctgcgttggatgaacttcacaatcacatcatc

SEQ ID NO: 59790 - DNA, 318 bp, Glycine max
ggttctagtgtgtgattgtttgttgttgtaactcgttcttcttcttttgttgttctgtgtttgtgtttgttttttctctcacctgaaaatgtcttgctgcggtggtaactgtggttgcggaagctcctgcaagtgcggcaacggctgcggaggctgcaagatgtacccagacttgagctacactgagtcaaccaccaccgagaccttggtcatgggagtggcacctgttaaggctcaatttgagggtgctgaaatgggtgtgcccgctgagaacgatggctgcaaatgtggaccaaactgctccttgcaaccctgcac

SEQ ID NO: 59791 - DNA, 149 bp, Glycine max
tgggactgccgattcactacagctagagatggcccaagtgttcgtggttcatacacaagtctggaagtcagttgacagttgggtgatggctctcctctagcacctgtgatagcctatagtcgtgtatgcagtggtggatctgtggaccc

SEQ ID NO: 59792 - DNA, 363 bp, Glycine max
ggaacctttgcattctattcattcaagattcagcaagtgcgttttggaagcagagaccgaaatacttcgagatggcccgtacaaagcaaactgctcgtaagtcaactggaggaaaagctcccaggaagcagcttgcaaccaaggctgcacgtaagtctgcaccaacaactggtggtgtgaagaagcctcatcgttatcgccctggaactgttgctcttcgtgagattaggaaataccagaagagcactgagctcctaatcaggaagcttccttttcagaggttggttcgtgaaattgcccaggatttcaagactgatctgcgtttccagagccatgctgtgcttgcattgcaagaggctgctg

SEQ ID NO: 59793 - DNA, 382 bp, Glycine max
ggatgcacaagtttgttgagatagctagaagcaataagatgaaaatgaaagtgcttgttttgtttgttgctacagttttggtagcatatgaatgccatggctcagactaccagaagttccctctccaaatgaaaactgggtttggtgggcaatacagcaatgaggtggcatgtgccagttggaggcttggcgtggaagcaaacaacgtagtcaagtggcaaactgttcctgcagcttgcggagagtacatagctgactacgttctaggagaccaatatagatcagattccaaaacagttaaccaacaagcttatttctatgctaaatccctcaaactcaccaacaaagatgtctttgtcttggacgttgacgacactactct

SEQ ID NO: 59794 - DNA, 195 bp, Glycine max
gatgcatagcaattcccaattcctaattgtttaaacctaattctcatttcttcatcgttcgattcttctcctcctaaagatgcagatcttcgtgaaaactttgaccggtaagaccatcacccttgaggtggagtcctccgacaccatcgataacgtgaaagctaagattcacgacaaggaacggatcccacctga

SEQ ID NO: 59795 - DNA, 209 bp, Glycine max
gggtgtttgaatcatgaagctgttcaaaaaccagtccgacacggacgtaacgacatgcatcccggccgtcatgctgttccatgtgtagtaggataccaaggccgtgaagcatgccactggtggcataaggctcgcatgcagaaagaagatggtcttcgcacttgtccatcaggcaacctccaccctcttatcacgccacaagacgatca

SEQ ID NO: 59796 - DNA, 340 bp, Glycine max
  unsure (1)..(340): unsure at all n locations
gggggatccgtgtcncgaaaacgcaggtttaatgggcaactaaacagacaaacccttgatccttttttgcgactactccagtccggttctggtattctctcactcgcgatttcgtctattcttgtttggtgaaggggaagnactcgctcactttgatcttcaaagttcagaacgcgttttgaagctattgatanatgaagcaatattgtaaaattttgacattgtgtatgggcaataatgccttaagggtttggcttccaacaacttccaagaatccaagcaaccaaacctgggtggtacccataaaatttggtgtgtccttaagaagttaaggtccttt

SEQ ID NO: 59797 - DNA, 188 bp, Glycine max
atttcattagcactcgtctttggttctggtttataaatctcttcgaagttgctttataactctcattctaacatgtataactattaatgatagatcacctaccctcacatcctcacgaagtttactgctttcacacgtctgattattgctaatgaacacgtctccgttcaagtttccattttacatct

SEQ ID NO: 59798 - DNA, 328 bp, Glycine max
ggttctattgtatgtgattgttgtgactcgttcttcttcgtcgttatcttcttcttttgttgtttgtgtgtttgttttttctctcacctgaaaatgtcttgctgcggtggtaactgtggttgcggaagcgcctgcaagtgcggcaacggctgcggaggctgcaagatgtacccagacttgagctacaccgagtcaaccaccaccgagaccttggtcatgggagtggcaccagttaaggctcaattcgagagtgctgaaatgggtgttcctgctgagaacgatggctgcaaatgtggagctaactgcacctgcaacccctgcacttgca

SEQ ID NO: 59799 - DNA, 385 bp, Glycine max
tggggttctagtgtgtgattgtttgttgttgtaactcgttcttcttcttttgttgttctgtgtttgtgtttgttttttctctcacctgaaaatgtcttgctgcggtggtaactgtggttgcggaagctcctgcaagtgcggcaacggctgcggaggctgcaagatgtacccagacttgagctacactgagtcaaccatcaccgagaccttggtcatgggagtggcacctgttaaggctcaatttgagggtgctgaaatgggtgtgcccgctgagaacgatggctgcaaatgtggaccaaactgctcctgcaacccctgcacttgcaacttatgtgtttggagagcaagcttcaagcagagatagcccttaaataagaataatgat

SEQ ID NO: 59800 - DNA, 314 bp, Glycine max
  unsure (1)..(314): unsure at all n locations
tctgattatgcataataggagttgtgatggggatggtcaacttggctaatttggactcaattttccaagttttgacatgaggtctatagcagcttcaacaaagcttttcttgttccagtgtatcttgtggtttgtgacatataacccgtgtttgggtgtcatcttagccctattcctactagttaaatttgtaactgttcctttgtgtgatttggacgaaaattttggaatcaggtantgaagttaaaatgccaagttgccaatccgcaaaaaaaaaaaaaaaaaaaaacaaaaaaaagcgggcgctccaaaag

SEQ ID NO: 59801 - DNA, 295 bp, Glycine max
cagagaaagctcggaaatttgcctccgaaggcaccagctttcaagcccccacctttcacccctgatgcctctgatgatcaatccagggacaaaacatggattgattccaaaacctcggaggaactcgaagacctcgaagatgacctcgacgacgatcgcttcctccaagaatataggaagaagaggctggctgagatgcaagaggcagcaatagtattgacgtttgggtcaatgattctcatttcatgatctgactttgttcgggaagtgtcacaagctccatccgatgtttggg

SEQ ID NO: 59802 - DNA, 308 bp, Glycine max
ggttcaattgtgtcagtgaatgttgttgtaagtcgttcgtcgtcttttgttgttctgtgtctgtgtctggatcttcacggttctgaaattctcttgctgtagtggtcactgtggtctcgtaatcatctgtatattcggcaacggctgccgatgctgcagagatgtaccctcacattagcgatactgattcgactgccatcgagacagtggtcatactagtggcatgagttactgctcaatttgacggtgctgatatggatgtaccctcatagatctatgacttctatatggacgaaactgctcctgca

SEQ ID NO: 59803 - DNA, 347 bp, Glycine max
aggggagaagtggcggtgaagttgagactcagagcgcgcgatcgaaaactcgagaaatcgaaacactctatgatgatcatctcgtagtatatatatatacttccacagtcgagagaaagaaacagaagaagaagaagcagcaataagcactactcatatgtagtattagtcgtatcattgccgttttagtatcatgagcaacgaaaaggagaaaacatccttagcttctccttccggcgaactctgcaagggcttcaatggcctcgaaaaaggtctcctccgcgaatcgcctgggtcctccgccgaagtgtatccgtacggtggccacgttacttcttgggaaaacg

SEQ ID NO: 59804 - DNA, 358 bp, Glycine max
ggagcaagagtgaagagcgaagagaatggctcccaagggtttaatctttttggctgtgttatgcttctcagcactgtcactgagtcgttgtcttgcggaggataatggacttgttatgaacttctacaaggaatcatgccctcaggctgaagacatcatcaaagaacaagtcaagcttctctacaagcgccacaagaacactgctttctcctggctcagaaacatcttccatgactgtgctgttcagagttgtgatgcttcactgttgctggactccacaagaaggagcttgcctgagaaggaaacagatagaagctttgggttgagaaatttcaggtacattgagaacatcaaagaa

SEQ ID NO: 59805 - DNA, 397 bp, Glycine max
ggttctagtgtatgtgattgttgtgactcgttcttcttcgtcgttatcttcttcttttgttgtttgtgtgtttgttttttctctcacctgaaaatgtcttgctgcggtggtaactgtggttgcggaagcgcctgcaagtgcggcaacggctgcggaggctgcaagatgtacccagacttgagctacaccgagtcaaccaccaccgagaccttggtcatgggagtggcaccagttaaggctcaattcgagagtgctgaaatgggtgttcccgctgagaacgatggctgcaaatgtggagctaactgcacctgcaacccctgcacttgcaagtgaggtgttggagagctaaagcttcaagcagaaatggcccttagaaataatgataaaaactatatgt

SEQ ID NO: 59806 - DNA, 229 bp, Glycine max
cagggaacgtcctatcttcgtttggttggagataccatcaatgtgggaatcggagcaaggtccacaattctgctcagagaacctcgctgctcgtgacgtacatcagttatatcgggtgttggaattttcactaattctttcactacaatacacgcatctatgtcttgggtgttcatatgaatgctgactctcttcttcctgatttgggattacttcactcaatcctttc

SEQ ID NO: 59807 - DNA, 312 bp, Glycine max
ggatacactacagacaacaaggctaaattttattgttattgacatatatcgttttggatcatgactaagatttcttttacaacaattctcgctcttgcccttttcctcacacttatttcacagacgagtgaaacactgatagagaaccaatgttcgacagtgttggatccaaatgattgcaacctcagctggtgtcaatgcaattgtcgtcaacaatatcaacgatttggatcttgcgttgacgtaaatcttcacaaatgtgttcgcatctacgactgtacccccaaattgatctactgaatgttcctattt

SEQ ID NO: 59808 - DNA, 382 bp, Glycine max
ggttctagtgtgtgattgtttgttgttgtaactcgttcttcttcttttgttgttctgtgtttgtgtttgttttttctctcacctgaaaatgtcttgctgcggtggtaactgtggttgcggaagctcctgcaagtgcggcaacggctgcggaggctgcaagatgtacccagacttgagctacactgagtcaaccaccaccgagaccttggtcatgggagtggcacctgttaaggctcaatttgagggtgctgaaatgggtgtgcccgctgagaacgatggctgcaaatgtggaccaaactgctcctgcaacccctgcacttgcaagtgaggtgttgggagagcaagcttcaagcagagatagcccttaattaagaataatgat

SEQ ID NO: 59809 - DNA, 163 bp, Glycine max
tggtattgctgcgagtagatgactgatgggagaactcgttcttcttcttttgttgttctgtgtttgtgttggtcttttcgctcatctcttaatttcttgctgttctagttcctgtggctgctgtagctcctgctagtgcggctatccgttgctgttgttgcaa

SEQ ID NO: 59810 - DNA, 142 bp, Glycine max
gactcaagcgtaagtacaggcgtcagtatagcagcgaatgggtttgatcgaggtgtgatactttcattattatgagctgattttaattcgattttttgaccttgatgacgatggagggtcgggatcgatgccggtttgccta

SEQ ID NO: 59811 - DNA, 382 bp, Glycine max
ggcagttcaattccaatatattcgattctctctgtgtatttccctacctctcccttcaagatgcagatcttcgtcaagaccctcaccggcaagaccatcacccttgaggtggaaagctctgacaccatcgacaacgtcaaggccaagatccaggacaaggaaggaatccccccggaccagcaacgtctcattttcgccggaaagcaacttgaggacggccgtacccttgctgactacaacattcagaaggagagtactcttcacctcgtcctccgtctccgtggtggcatgcagatcttcgttaagacactcaccggcaagaccataaccctagacgttgaaagcttccgacacatcgataacgtcaatgccaagattcagg

SEQ ID NO: 59812 - DNA, 92 bp, Glycine max
gagagaatgagatagatatagagagaaaaagagagtgtgcttctctcgacacttggactacttacaggccacagccatgtgcaggtctggat

SEQ ID NO: 59813 - DNA, 245 bp, Glycine max
gcgtcagtccagacgtcagaagacgactgagcggacacctgtgtacaagccgtacgcgtagccgtctgttcagccgggagactccagttgaagtgagatacatgtcgctgactggtaagagtgtttgcattattgtgcgatgaattgatttacagttactgctgatcccagcccatttcatagagtcagctccagctccttgattatgcaggtataatcatagtcaggatcagtcatgtatgata

SEQ ID NO: 59814 - DNA, 271 bp, Glycine max
ggttctagtgtgtgattgtttgttgttgtaactcgttcttcttcttttgttgttctgtgtttgtgtttgttttttctctcacctgaaaatgtcttgctgcggtggtaactgtggttgcggaagctcctgcaagtgcggcaacggctgcggaggctgcaagatgtacccagacttgagctacactgagtcaaccaccaccgagaccttggtcatgggagtggcacctgttaaggctcaatttgagggtgctgaaatgggtgttgccgctgaa

SEQ ID NO: 59815 - DNA, 344 bp, Glycine max
gaaggaaggtgcgtataagcatagaaggaaagtaaactagggttttagcagtggtggaagggttgttgagaaggggttttagaagtccacatttttcagatttgattcgcgttcctcttctctcttctcatcatcaatggcgacccccattcctccccctcctgccgccgccgccgccgccgccgccgacaccaaggtcgattacttgaaccttccatgtccgattcccttcgaagagctccatcgcgaagctatgatgtctttgaagccagattcttttgaaggcaatcgttttgatttcaccaagatgctcaatcagaagttctccctcaatcacaaccttt

SEQ ID NO: 59816 - DNA, 252 bp, Glycine max
ggttctaatgtgagattgttcgctgctgtcactcgctcatcgtcatgggttgctctgtgcattgtgctcggtttttctctcacctgaaagtgtcttgctgcggtgataactgtggttgcggaaactcctgcaattgcggtaacgggtgctgtggctatatgatgtagccacacttcatctacactgactcaaccaacaacgacattctgttcatcagagttgcatctgttaatgctcaatttgacggtgctc

SEQ ID NO: 59817 - DNA, 371 bp, Glycine max
  unsure (1)..(371): unsure at all n locations
ggcagagagagacggtagcagataaacctaaagacgaacctcgcaaattccctcaacactggagtcactaagtgggactcggtggaaattcattctgggactcaggttagttttctcaatttaaaaaaacaactctcacaatgcgatccggatccttaaattgttgcttgctttgaacctaacgataagctgtgatgtgattatgatgttgtgtatttttttatttttaattatttagttatcatatgttttcgtcataattttcaactgttaatcgttaatttactgttatttactgtgctgttgaatcagctaagctgaccaaacatgattcanaatggttgcattgtatccaagggtgtgcccctctg

SEQ ID NO: 59818 - DNA, 401 bp, Glycine max
ggaagagtgaagagaatggctcccaagggtttaacctttctggctgtgttaatatgcgtttcagcactgtcactgagtccttctgttgcgggggaagggcaaaataatggccttgttatgaacttctacaaggagtcatgccctcaggctgaagacatcatcacagaacaagtcaagcttctctacaagcgccacaagaacactgctttctcctggctcaggaacatcttccatgactgtgctgttcagagttgtgatgcttcactgttgctggactccacaagaaggagcttgtctgagaaggaaacagatagaagctttgggttgagaaatttcaggtacattgagaccatcaaagaagctttggaaagagaatgccctggagttgtttcatgtgctga

SEQ ID NO: 59819 - DNA, 402 bp, Glycine max
  unsure (1)..(402): unsure at all n locations
ggcagttcaattccaatatattccattctctctgtgtatttccctacctctcccttcaagatgcagatcttcgtcaagaccctcaccggcaagaccatcacccttgaggtggaaagctctgacaccatcgacaacgtcaaggccaagatccaggacaaggaaggaatccccccggaccagcaacgtctcattttcgccggaaagcaacttgaggacggccgtacccttgctgactacaacattcagaaggagagtactcttcacctcgtcctccgtctccgtggtggcatgcagatcttcgttaagacactcaccggcaagaccataaccctagaggttganagctcccgacacatcgataacgtcaaggccaagatccaggacanagagggtatccccccg

SEQ ID NO: 59820 - DNA, 294 bp, Glycine max
tggggttccccaaccgagtaaaagaaaaagctgtgtccgttactcgggagttggaaaatggcaacggtcccggaaaacaaattgttgaaggccgaagaagaaccccgcaaccttccggtaaaaacaataaccgaatatgcttcccggattaactcctgctcaataacttccctccggatttcaacttgggcctccattacctcgcaatctcccctttctacaaatggacctgcaataactagcagctccgcatgcgctccgttcaacccctcgacatctctcaactctcgaaaa

SEQ ID NO: 59821 - DNA, 300 bp, Glycine max
ggttctagtgtatgtgattgttgtgactcgttcttcttcgtcgttatcttcttcttttgttgtttgtgtgtttgttttttctctcacctgaaaatgtcttgctgcggtggtaactgtggttgcggaagcgcctgcaagtgcggcaacggctgcggaggctgcaagatgtacccagacttgagttacaccgagtcaaccaccaccgagaccttggtcatgggagtggcaccagttaaggctcaattcgagagtgctgaaatgggtgttcccgctgagaacgatggctgcaaatgtggagct

SEQ ID NO: 59822 - DNA, 344 bp, Glycine max
gagttcaattccaatatattccattctctctgtgtatttccctacctctcccttcaagatgcagatcttcgtcaagcccctcaccggcaagaccatcacccttgaggtggaaagctctgacaccatcgacaacgtcaaggccaagatccaggacaaggaaggaatccccccggaccagcaacgtctcattttcgccggaaagcaacttgaggacggccgtacccttgctgactacaacattcagaaggagagtactcttcacctcgtcctccgtctccgtggtggcatgcagatcttcgttaagacactcaccggcaagaccataaccctagaggttgaaagct

SEQ ID NO: 59823 - DNA, 315 bp, Glycine max
gaccacttcacaacactcataacacaaagcacaaagcaaagctcatccttgagttaaaaaatggcagcagcttcttccatggctctctcatccccatccttggctggcaaggccgtgaagctgggcccatcagccccagaagtgggaagggtgagcatgaggaataccgtcaccaagcaggtctcctcaggaagcccatggtacggcccagaccgagtcaagtacttgggcccattctctggcgagcgcccgtcctacctaaccggtgagttcccaggctactactgctgggacactgctgggctttccgcagac

SEQ ID NO: 59824 - DNA, 289 bp, Glycine max
agacgtcagtagagctgcgaaagggggacacaaagggttcgatgcttgagatcacagcttcgtttcgatattcagtgtcgtcggtccggatgagtctcatgtcagctctgtggctcaggttaggctgaccgcggttattgcacacgtatccgtataggcatgtgacactgtggaaaggcctgcaaataaacctaacggcacttcgtactcatattccacgggttgccgtaccataattgatcccatttatgatcacgatcagtcagtagttccacgttgatagactgac

SEQ ID NO: 59825 - DNA, 347 bp, Glycine max
ggcacaagtttgttgagatagctagaagcaataagatgaaaatgaaagtgcttgttttgtttgttgctacagttttggtagcatatgaatgccatggctcagactaccagaagttccctctccaaatgaaaactgggtttggtgggcaatacagcaatgaggtggcatgtgccagttggaggcttggcgtggaagcaaacaacgtagtcaagtggcaaactgttcctgcagcttgcggagagtacatagctgactacgttctaggagaccaatatagatcagattccaaaacagttaaccaacaagcttatttctatgctaaatccctcaaactcaccaacaaagat

SEQ ID NO: 59826 - DNA, 345 bp, Glycine max
gacacaccctcaacttcttattcaatattccttcacactatcttcttctcttcatgagggtttagcaaagggttgctgacagagtttattggcattctgtccacctccacttcctactctctctctgagccacatgttcgtgaagttggaggtgggcatactgtcaactgagttctgttgtctgctctttgtaaagccttcatgatatttattcatctctcaacaattaaaaggagtggtataaggtgtaaacacgggatagcagggtgggtggccctccaaacttgcgctggagtgtactatgactatgcatctcacagctagctaacggcaaatgcattttga

SEQ ID NO: 59827 - DNA, 159 bp, Glycine max
ttacaactcccagtagtgagtcgtattaacgacagaagggggagtcagcaataacctcagtcacaaccgacggagtcatttattttacagcacaagtcattctgtcacagtgcggtgttgcacaggtggtcatcaggtgaaaggtactatttcgtgtgc

SEQ ID NO: 59828 - DNA, 315 bp, Glycine max
tacggctccggggcgacgacagaatgggacatcacaggacaaaaacattgtcccaaagctgcctttagacaacacacacatcatggcgagctctgctattcaacagtcaacattcactggtcaaactgctctgaagcaactcaatcagttcgtccgcatcaccggtagcaccggtaaacgtcgcactaacatgcaccacatcgtcatgattgctcctcagaacatttggcacctcaacatcacccttcctactcgactatatcaacatactagttactgcatttaatataacactcgcatgtcaacataagcctg

SEQ ID NO: 59829 - DNA, 288 bp, Glycine max
gggggcaaggaggatcagaggagttagcgtgatccattgttgttctctctctctctagagttcttatttcctctctctagaattttctatccgttcatccccctcacaaattatggtttttgcgaatcttttagtgtctgaaatctaatccaacgtttcatccatggtttccgattcaatggccgtcgtgtcgagtccctgggcggcagagatcaacggtccggggaacaggtcaaggaccagtaggtccgcgaaattgtagcagtataaaaacgatgcggctttgcg

SEQ ID NO: 59830 - DNA, 393 bp, Glycine max
gttctagaaggaacggggaggttttgcgctgcgtgatttcggttgttgtgagtcgctgtgcagggaaaagtggaaggtttttgaggttgttagcttcggtggtgaggtatgttactaaagttagggtttctccgaggaagctgtcggggttctgtatgtcggaggcgattcatggggcttttgcgtcgcaagggatgcagtttgtaaagggtcctacggttgttaacactggaatatgccagttctttggggtcacagggactgtgcccgcattttctgtggacttttctgctgtttctccttgttttgagtatctgcagtatgcgatgttcttaagatctatgtttaagtcattttttcttgtacataatccaataaatgtgcctagtgatg

SEQ ID NO: 59831 - DNA, 333 bp, Glycine max
gcagatcaagtggaagagtggctagtggtagagttgcattaaaaaatggatcccattaacaacggtggccgattccaaagccaatttaacatgggaataaggttaaacaacttccaggaaaacaatacgggaaaatggtccttccgccaacaatccctcaaccccgtaataacttgatgccggggatgaacttgcggtcaaaacttccttcaaatgaggtccctactattcacatctatgggggcaagagctgggacatggtgtattatggacaaagcaaacagaaggcttttggtgtcacaggctggaaaaaatttgttattgataattgtt

SEQ ID NO: 59832 - DNA, 349 bp, Glycine max
  unsure (1)..(349): unsure at all n locations
gaagcagaagcaggtgagtgagtgagtgagcaagagtgaagagcgaagagaatggctcccaagggtttaatctttttggctgtgttatgcttctcggcactgtcactgagtcgttgtcttgcggaggataatggacttgttatgaacttctacaaggaatcatgccctcaggctgaagacatcatcaaagaacaagtcaagcttctctacaagcgccacaagaacactgctttctcctggctcagaaacatcttccatgactgtgctgttcagagttgtgatgcttcactgttgctggactccacaagaatgagcttgtctgagaanggaacagatagaagctttgggt

SEQ ID NO: 59833 - DNA, 301 bp, Glycine max
ggttctagtgtatgtgattgttgtgactcgttcttcttcgtcgttatcttcttcttttgttgtttgtgtgtttgttttttctctcacctgaaaatgtcttgctgcggtggtaactgtggttgcggaagcgcctgcaagtgcggcaacggctgcggaggctgcaagatgtacccagacttgagctacaccgagtcaagcaccaccgagaccttggtcatgggagtggcaccagttaaggctcaattcgagagtgctgaaatgggtgttcccgctgagaacgatggctgcaaatgtggagcta

SEQ ID NO: 59834 - DNA, 290 bp, Glycine max
ccaagttgtaaatgggatctactttcgactcatcgtcgccgccggcgatgatcagtcctcctccaacaattaccaagccattgtctggaatttgccgtggacggaaaattacatgaaccttatttcctttatccctgttcatgatgcacctcctagttactattaataataatgtatgttcctgtcctatactatgtattaattagcaatttggacccaataaaagtttatgctaaggtacacaaaacaaaaacaaccaccataagaaaaaaagcggccgctctagagga

SEQ ID NO: 59835 - DNA, 200 bp, Glycine max
acaagacgacagaatggccaagttatctatgggatatacttcccacacattttcctctccggcgacgatcagtcctcctacatcagctgggaagtcattgcctggaatttgccgtgaccgggactttctatggctcttacatcctcaacccccgttcagtcaccaacgcccatgtccctaatcaccttgatgctattttc

SEQ ID NO: 59836 - DNA, 86 bp, Glycine max
ttcgggggaacagaaatgcactggcgtacctaccctgaggcttctcttctcttctcttctctgtggtgagtgaccatggtcagggt

SEQ ID NO: 59837 - DNA, 389 bp, Glycine max
ggttctagtgtgtgattgtttgttgttgtaactcgttcttcttcttttgttgttctgtgtttgtgtttgttttttctctcacctgaaaatgtcttgctgcggtggtaactgtggttgcggaagctcctgcaagtgcggcaacggctgcggaggctgcaagatgtacccagacttgagctacactgagtcaaccaccaccgagaccttggtcatgggagtggcacctgttaaggctcaatttgagggtgctgaaatgggtgtgcccgctgagaacgatggctgcaaatgttggacaaactgctcctgcaacccctgcacttgcaagtgaggtgttgggagagcaagctttaagcaaagaatagcccttaattaggaataatgataaacta

SEQ ID NO: 59838 - DNA, 347 bp, Glycine max
caccaaaagggaacagacaccacacacataataaccatcaaattcccgagcatacatgcagcatctgccagactctccaaaaatctcacgattgcacgttaagcactgtcatcaagcaatgtgaatactccgtcaacgattaccatcagtctcatctcgaacggttgtaccacacacatgcagccatcaactggtccttgtgcagagtctgcacacctaatttcaaagtcacacactttattctttacgacatcattttgatcattaatggctttaataaacctagttaaactgctctaaccggtttgaaccactgtgacagcattgacattttgagcaacgcttaa

SEQ ID NO: 59839 - DNA, 180 bp, Glycine max
aggcgtcagaacacgactcagtggggttgcaaaactgcgacaccatgcgaccggacacaattaaggttttccatatcacagcgtatcacaatgaaccaccactggtgcagcctcagtggcaatcgcatcagtctcaagggtcaacagttcatggagcatgtgcagtgcttcaggcacaat

SEQ ID NO: 59840 - DNA, 381 bp, Glycine max
ggcacaagtttgttgagatagctagaagcaataagatgaaaatgaaagtgcttgttttgtttgttgctacagttttggtagcatatgaatgccatggctcagactaccagaagttccctctccaaatgaaaactgggtttggtgggcaatacagcaatgaggtggcatgtgccagttggaggcttggcgtggaagcaaacaacgtagtcaagtggcaaactgttcctgcagcttgcggagagtacatagctgactacgttctacgagaccaatatagatcagattccaaaacagttaaccaacaagcttatttccatgccaaacccctcaaactcaccaacacagatgtctttgtcctggacgttgacgacactactctct

SEQ ID NO: 59841 - DNA, 318 bp, Glycine max
ggagcgaagaagatattaaggtttttgagtgcggtgcggcgatcctagcactctcttctgcagctttcgccgacagcttcattcaccatggctgagcaaaccgagaaggcttttttgaaacaaccaaaagtgtttctcagctcgaagaaaactgggaagggaaagagacccggaaagggtgggaaccgcttttggaaatccattgggcttggatttaagactcccagggaagccatcgaaggaacctacattgacaagaagtgccccttcactggcaatgtttccatccgtggccgtatcttggctggaacatgtcac

SEQ ID NO: 59842 - DNA, 308 bp, Glycine max
tgggatgtgattgttgtgacgcgtgcatcgtcgtcgttatcttcatcttttgttgtatgtgtgtaggttttttctcttaccagaatatgtcttgctgtggtggtaactgtggttgcggaagcgcccgtacgtgaggtagcggctgcggtggctggaacatatacccatgacgtgagctacacttagtcaaccagaatcgagaccttgatcatcgcagtggcatcagtttaggctcaattcgagtgtactgtactcggtgttttagctcagaacgatagatgcgcatgtggagctaactgtcagatgca

SEQ ID NO: 59843 - DNA, 176 bp, Glycine max
ggagtagaggaatggtgtagtagtcgatagaaatcgcgatctggactagggttaaactgaaagatcgagttcaaatgggtttccttggtaacactttggtgtgattgagatttggcgttgggatttcaattggtctcgtgatcaggtacattctcttcaactacttccatagcacc

SEQ ID NO: 59844 - DNA, 155 bp, Glycine max
gatagcaggctctgtcaacgaatggcgtgatcagtggaaaataggatcatagattttcacattacccttcaagctccaggattcatagtcctcgcagctgatgtatctaatcttgggatctatgtcttgactatgctgctaaccagtagacttct

SEQ ID NO: 59845 - DNA, 76 bp, Glycine max
tacagctgtcagacgacgagagaaagggcgacatgacacacgcttatctacgcgctcagtgcacgtcttatctgta

SEQ ID NO: 59846 - DNA, 294 bp, Glycine max
gaaaggcgattttcttaaaaccgtctttgagattagtatctttctagtcgaatgagccttatcgtctcgttgtcacactcagtcttcatgattcaaagactgttcgcattcactcttctccttccaccggactttcttcttcaccacctcactttctgtcttcctcctctaggttacactccatctgagcctcttcccaaaacaaccttgcgtttcacaccccctctactccaaaccctacccttgttcatcgccgccattgccttcttcttcattcgcttccaccacataacc

SEQ ID NO: 59847 - DNA, 378 bp, Glycine max
  unsure (1)..(378): unsure at all n locations
gatctctggtcgacgaaacagaatgagaaccaatacaaaagtggagatagctaacagtgacaagaactaaagcaaaaaatatgaatgagagacatttaaggtttcgatcatatctatgtagagaagacaaggcatattccacgagggaagaagacgaagaaacaaagctatataaagggctgcaagtgaacaaggctgcggggcacatgcagattgtgccgctgctatcatcggagaaaattcaacanaaaaaaaaaaaacttgatagttatgatgaaattgcaaccacaagccatgggtgctctccccaataataaattacggccttaattccccaaccggaattagtaggctcatcagcccattccaattctgtct

SEQ ID NO: 59848 - DNA, 383 bp, Glycine max
gactttcaaagttcttccttagcaacctcaatagggttccaccgttgaagtctcaatttgtgtttagggttcctcacatttgaagagttcacaccttattgtcgccattctcgcatctcaatattcattcaagtgttcacacaagagaaaccctacttcgctattcattctctccaatttcaattctcaatcgtgctcttcaccaactatgcattgatttgtctccctctttttctcttcagatgaacaaggaaatactaaaaagatccagcttacaaaaccaagtgtatttgcgatacctcatcgtgaatatatagtcataccatttgatagtcaactatgagcctatggagaagcagctacacttctttcatcagcttgtg

SEQ ID NO: 59849 - DNA, 295 bp, Glycine max
gaatctgtataatagaatttccaacagtatatcatccttgtgaaacctgtcacagatctaagaagaaaatcctgaccttcttctcacgtcaaaggctcatgacgatcatgggtttgtcatggactttggcattggcctggaaagtctgtgacccttggatcacatatctttggtctctaatcccaagcctccttttctctatttaagtatctctgatcaacctttttcgccattctgtgcttttacatatgatgaagatctgaggcaatacatgattccctcatcatgtaataca

SEQ ID NO: 59850 - DNA, 248 bp, Glycine max
ggaacgactactttggtgtggtgtcagtagatcaacattagattgcctgccgagctctttacggtgacagcacaagcacgtggcgcatacacgcacatatgcgatcaagctcaagctgataacgccgacgcccgactgtgaagactaagacccggtcctcaccttcatgttgctccttcttcctattcctcttcctcctagtggcgcacttcacatcgtcgctctccgagatgcggttctcctagata

SEQ ID NO: 59851 - DNA, 361 bp, Glycine max
gactgcactgaattggattgagtttgcagcaggagcacagaaagatatcagtgattcgatccttctcttgcagttccatcaactcccactttctcgcactcgtttcatctgacatccactgtcaagttccatacgatgcacattcactatatcttcctcatcaaagatattatactccacatgcatcacttagagtatcaatggcacacgacaatgagactcgtcacgtgcatatgcaaattgccatcactagggataacacttcggaagctctaccagtcacacttcaaggatttccttgtgagaatgctgatcatactgtcctagacagattatataatcctgcagcatcaacagtgaa

SEQ ID NO: 59852 - DNA, 396 bp, Glycine max
ggttctagtgtgtgattgtttgttgttgtaactcgttcttcttcttttgttgttctgtgtttgtgtttgttttttctctcacctgaaaatgtcttgctgcggtggtaactgtggttgcggaagctcctgcaagtgcggcaacggctgcggaggctgcaagatgtacccagacttgagctacactgagtcaaccaccaccgagaccttggtcatgggagtggcacctgttaaggctcaatttgagggtgctgaaatgggtgtgcccgctaagaacgatggctgcaaatgtggaccaaactgctcctgcaacccctgcacttgcaagtgaggtgttgggagagcaagcttcaagcagagatagcccttaattaggaataatgataaactattaatgtg

SEQ ID NO: 59853 - DNA, 399 bp, Glycine max
gagttcaattccaatatattccattctctctgtgtatttccctacctctcccttcaagatgcagatcttcgtcaagaccctcaccggcaagaccatcacccttgaggtggaaagctctgacaccatcgacaacgtcaaggccaagatccaggacaaggaaggaatccccccggaccagcaacgtctcattttcgccgggaagcaacttgaggacggccgtacccttgctgactacaacattcagaaggagagtactcttcacctcgtcctccgtctccgtggtggcatgcagatcttcgttaagacactcaccggcaagaacattaacctaaaaggttaaaagctccaacaccatcgataacgtcaaggccaacatccaggacaaggagggtatccccc

SEQ ID NO: 59854 - DNA, 394 bp, Glycine max
  unsure (1)..(394): unsure at all n locations
ggcacaagtttgttgagatagctagaagcaataagatgaaaatgaaagtgcttgttttgtttgttgctacagttttggtagcatatgaatgccatggctcagactaccagaagttccctctccaaatgaaaactgggtttggtgggcaatacagcaatgaggtggcatgtgccagttggaggcttggcgtggaagcaaacaacgtagtcaagtggcaaactgttcctgcagcttgcggagagtacatagctgactacgttctaggagaccaatatagatcagattccaaaacagttaaccaacaagcttatttctatgctaaatccctcaaactcaccaacanagatgtctttgtcttggacgttgacgacactactctctctaatctccagta

SEQ ID NO: 59855 - DNA, 309 bp, Glycine max
ggttctagtgtatgtgattgttgtgactcgttcttcttcgtcgttatcttcttcttttgttgtttgtgtgtttgttttttctctcacctgaaaatgtcttgctgcggtggtaactgtggttgcggaagcgcctgcaagtgcggcaacggctgcggaggctgcaagatgtacccagacttgagctacaccgagtcaaccaccaccgagaccttggtcatgggagtggcaccagttaaggctcaattcgagagtgctgaaatgggtgttcccgctgagaacgatggctgcaaatgtggatctaactgcacc

SEQ ID NO: 59856 - DNA, 272 bp, Glycine max
catacaggactagagaagggggagtaagtaaagttttctctattgtgcaggcttctagaattgaatcataaaggaatctgggataggaatttgaggaaacatagaactgattcaaaagcttagcagggtagcaatagattccaaaagacctcgactcaaccaaccaattttatggaaacccctacaaagccaactgagtcaatggcaatgcttgggtgtgacccaaaaccaacaaactaggtcaatgaaaatatttggcgtgacccttaccc

SEQ ID NO: 59857 - DNA, 232 bp, Glycine max
tgggatacaaactcacaccgctgtagtcaactttacccaatagtgtcgtcgcaggctgcgactacctccccgtcgtccacccagacgctgggcacgcacgatcccaataccgcgatcaccaggtctgcaatgcttgttggcgtgatctctcagagccttgtcatccctgacggagccatcactgttgaagatcagcagaactactacaccccagatgcctcatcctcaaata

SEQ ID NO: 59858 - DNA, 51 bp, Glycine max
agaaaacttatactccttctgatccaaaataatacagtaagtagttcttct

SEQ ID NO: 59859 - DNA, 159 bp, Glycine max
ggtgctaatcttaccttatccctctaatcagtctagctgttgcaaatttcaacaatttttcaatggcttccgcaaatgttgatttccttggctttgttggtgggcttccttgggccaccggaaacaatccccccaaaaaacccttttaaaccaagggga

SEQ ID NO: 59860 - DNA, 154 bp, Glycine max
ggacagtgtttaggatcacattattacatcctcgcacgcgttgtcgaatgatgattgccagtatatcctcctgcaattgcgcattggggtcaggtatcttcgactcagcgagcaaccgggatcgctccttgtatcctggtaattctccaacata

SEQ ID NO: 59861 - DNA, 307 bp, Glycine max
ggaagatattacggtttttgagtgcggtgcggcgatcctagcactctcttctgcagctttcgccgacagcttcattcaccatggctgagcaaaccgagaaggcttttttgaaacaaccaaaagtgtttctcagctcgaagaaaactgggaagggaaagagacccggaaagggtgggaaccgcttttggaaatccattgggcttggatttaagactcccagggaagccatcgaaggaacctacattgacaagaagtgccccttcactggcaatgtttccatccgtggccgtatcttggctggaacatg

SEQ ID NO: 59862 - DNA, 148 bp, Glycine max
gatcccataaaaaccacaagcaaaccctaaaaagtccactgagatatatagaactacctccaatttcacaaaatgaagaaggtgtttgtcgcatttgtacctctgccagtggtatttgtccgcacattgacaccttcaaattcaaacc

SEQ ID NO: 59863 - DNA, 407 bp, Glycine max
ggcacttcaattgcaatcaaattagttcattctctttgcgcagttccctacctctcctttcaagatgcagatcttcgtcaagaccctcaccggaaagaccatcacccttgaggtggaaagctctgacaccatcgacaacgtcaaggccaagatccaggacaaggaaggaattcccccggatcagcaacgtctcatcttcgccggaaagcagctcgaggacggccgtaccctcgccgactacaacatccagaaggagtcaacccttcaccttgtccttcgtctccgtggtggcatgcagatcttcgtcaagactctcactggcaaaaccataaccctagacgtcgacagctctgacaccattgacaacgtcaagggcaagattcaggacaacgagggaatccccccag

SEQ ID NO: 59864 - DNA, 183 bp, Glycine max
gctgagcaaaaccctaatccctatttttcttcctcagtagtgtcatttacgcttctcttctctgcagcaactatgcctaaccctaaggtcttcttcgacatgacgatcggcggtcaatctgctggccgcatcgtgatggaggctctacgccgacttcactccccgcaccgccgagaacttccg

SEQ ID NO: 59865 - DNA, 89 bp, Glycine max
  unsure (1)..(89): unsure at all n locations
ggcaactaagtagacgatagaatcagatcaggagagcatgcatatgaacatgatgatgaanaaggtgtgtgggtttgcaatagtgatgg

SEQ ID NO: 59866 - DNA, 156 bp, Glycine max
gaccactagtcatgcgggagagcggaagtagcagatgaatggcatggctgcgctccaggtctcgttgtgttttcgagagtctagatagatcggctcagggtgacgttgttgtgttaacaggttcccgtcgtttcgcaagtcgagggagaatggaag

SEQ ID NO: 59867 - DNA, 124 bp, Glycine max
cgggaaactagtgaattgttatggacactagtgtctcgccctctctcctagtttctctccgcgtctttggaagagtcttagggcttgcagtggcagtgcgtgtccgcatatgggcccttgcgtt

SEQ ID NO: 59868 - DNA, 78 bp, Glycine max
gaatctgcattttggcattgaggtcgtgtttagtttgtgccaatccaacgttggttgtgtgtatttgtgttgggagga

SEQ ID NO: 59869 - DNA, 92 bp, Glycine max
gacaccaaattttgcaacttggtttccaattgcgtgcacccatgtcctcttttcgctccttatcactctctgcgccctgcctccacgattcg

SEQ ID NO: 59870 - DNA, 55 bp, Glycine max
ggccgaggaaaaaaaaagagatagaagaggacgaaaaaaccacacgttcgaaaat

SEQ ID NO: 59871 - DNA, 95 bp, Glycine max
gaagatggcaacagaaagatccttcatttgttttgccatggaagcaagattcgcttccaatttttgcagaatctagccctttgtatcacacgcag

SEQ ID NO: 59872 - DNA, 89 bp, Glycine max
ggagtgtgggaggagagtcacaactaccagtccttgctgtgcatcgtgtgagtttgggagaggaatgaagctactcggaaagttattcc

SEQ ID NO: 59873 - DNA, 104 bp, Glycine max
  unsure (1)..(104): unsure at all n locations
aaggangagcttacaaaattgcgctttctaatccaaaccttagttctctcacagtcacaggtcataataatcacacaatctccgccgcatgcaatctttctttc

SEQ ID NO: 59874 - DNA, 164 bp, Glycine max
agtacggtcaggaattaccggctcgagcgacgcgtcagcccacgcgtccgacgacagaaggggggacaggtgtacaagcaaagtgtatgacatgtttcggcgttagaaggaacatgggagttcacttcagaagatgataatcaacaaggcagatgctgtagcca

SEQ ID NO: 59875 - DNA, 244 bp, Glycine max
ggttctactgtatatgattgttattactcgatcatcatcctcagtagcttcatcatctcctgctagcgagtatgtatattctctcagctcgaaaatttcgtacagtgtgctgtcactgtcgctgagacagagtcagcaagtgttgaacattttgccagcagcacatcagctaccaagatctgatctataccttttcaaacaccactgacaccatagtcatgtgagtggtactaatgaaggctca

SEQ ID NO: 59876 - DNA, 285 bp, Glycine max
  unsure (1)..(285): unsure at all n locations
ggcacaagtttgttgagatagctagaagcaataagatgaaaatgaaagtgcttgttttgtttgttgctacagttttggtagcatatgaatgccatggctcagactaccagaagttccctctccaaatgaaaactgggtttggtgggcaatacagcaatgacgtggcatgtgccagttggaggcttggcgtggaagcagacaacgtaatcaagtggcaaactgttcctgcagcttgcggagagtacatagctgactacgttctangagaacaatatagatcagatt

SEQ ID NO: 59877 - DNA, 81 bp, Glycine max
aggggtggaagttaaagaagaaaaggaaaagaagaacaaattagaagaagaaaaagggaaaaccccaaacaaaaaagaaga

SEQ ID NO: 59878 - DNA, 174 bp, Glycine max
gacaacacatagataagaagacagaaagatccaacactcaatcttccaacttccaatccctcgctttccgaacaaaatgtccattaacaacgaatccaagccgccaacggtgattgggaaaagccggccctacaacgtcgtcaagaatccgccgtccaaaagcaaagccgccga

SEQ ID NO: 59879 - DNA, 291 bp, Glycine max
  unsure (1)..(291): unsure at all n locations
ggagtgagcaagagtgaagagcgaagagaatggctcccaagggtttaatctttttggctgtgttatgcttctcagcactgtcactgagtcgttgtcttgcngaggataatggacttgttatgaacttctacaaggaatcatgccctcaggctgaagacatcatcaaagaacaagtcaagcttctctacaagcgccacaagaacactgcgttctcctggctcagaaacatcttccatgactggtgctgttcagagttgtgatgcttcactgttgctggactccacaagaagg

SEQ ID NO: 59880 - DNA, 272 bp, Glycine max
ggaagcgacagtccagatgtgtgtcgaagaaaatggtgtgactcacagaggggaactgctttggcacaaagcaggctcccaagccatgatagtgtagtctacaatttcgcagtaaccggaggttgtcacagcagagatgatcaatgttgtgggcttacaggacatggagacatacatgtcacaactggggtaaatggatatcgaagatcggatcttgtgctcttacctcactcgcagtcatagtatgcatttttgcatcctcagctgggtta

SEQ ID NO: 59881 - DNA, 395 bp, Glycine max
ggcacaagtttgttgagatagctagaagcaataagatgaaaatgaaagtgcttgttttgtttgttgctacagttttggtagcatatgaatgccatggctcagactaccagaagttccctctccaaatgaaaactgggtttggtgggcaatacagcaatgaggtggcatgtgccagttggaggcttggcgtggaagcaaacaacgtagtcaagtggcaaactgttcctgcagcttgcggagagtacatagctgactacgttctaggagaccaatatagatcagattccaaaacagttaaccaacaagcctaattccaagccaaattccctcaaactcaccaacaaagatgtctttgtcttggacgttgacgacactactctctctaatctccagta

SEQ ID NO: 59882 - DNA, 390 bp, Glycine max
  unsure (1)..(390): unsure at all n locations
ggtgtgattgtttgttgttgtaactcgttcttcttcttttgttgttctgtgtttgtgtttgttttttctctcacctgaaaatgtcttgctgcggtggtaactgtggttgcggaagctcctgcaagtgcggcaacggctgcggaggctgcaagatgtacccagacttgagctacactgagtcaaccaccaccgagaccttggtcatgggagtggcacctgttaaggctcaatttgagggtgctgaaatgggtgtgcccgctgagaacgatggctgcaaatgtggaccaaactgctcctgcaacccctgcacttgcaagttaagtgtttggaaaacaaagcttcagccagagatagcccttaattangaataatgataaactattaatgtgt

SEQ ID NO: 59883 - DNA, 346 bp, Glycine max
ggtgagagagcgagcgagcgagcagtttcaaagagaggatttgggattgggaaggcgagggattgcgctgcgtctcttcctcttctctttcgattcatccctcattcataatcttccaatccaacaacctcagcctcacactcacacatacacacatctgaacgcgtatcgtccctcccatggcttcaaagcgcatcctcaaggagctcaaggacttgcagaaagacccaccaacttcttgcagcgctggtccagtagctgaggacatgttccattggcaagcaacgattatgggtcctgctgatagtccttatgctggaggtgtattcctaatcactaatcaatt

SEQ ID NO: 59884 - DNA, 332 bp, Glycine max
ggcaagagtgaagagcgaagagaatggctcccaagggtttaatctctttggctgtgttatgcttctcagcactgtcactgagtcgttgtcttgcggaggataatggacttgttatgaacttctacaaggaaccatgccctcaggctgaagacatcatcaaagaacaagtcaagcttctctacaagcgccacaagaacactgctttctcctggctcagaaacatcttccatgactgtgctgttcagagttgtgatgcttcactgttgctggactccacaagaaggagcttgtctgagaaggaaacagatagaagctttgggttgagaaatttc

SEQ ID NO: 59885 - DNA, 260 bp, Glycine max
gaacgcaaagaattaaggttttccaattcacagatcaccacacgtattcaaggctggcacagcctcagccatagtcacagcggcgataccggctagcaccactggaacatgtccaatgcttcggtcgcaataagactgccttggccgtgactttacgtaagcacgagcacagtcatatcacgatcgactgctgctccagcgatctcgtggatcatgacatctacctcttcaacgccagcgattctttcctcctctcgggt

SEQ ID NO: 59886 - DNA, 359 bp, Glycine max
gaccctccattaatgtcccctcctcgattttccaaaccctctctctctctctctaccctaatctccttctcgcccaccctctatataatactccatacaacatagcataacattcgtatatacacacagtaccaaccactcttttttacttatggcatctttcatcttcacacctgtactctttcttcttatcatctccgccgtccttctcttcctccaccgccgatcccgctgccggcgcttccgcctaccgcctggtacactcgggctccccttcgtccgcgaaaccttacaagtcaataccagcttacaagagtgacaacccggaacccttcatgggacagcgcgtgaaacggtac

SEQ ID NO: 59887 - DNA, 318 bp, Glycine max
ggtagctacatactttgcgagtagctgttcttctgcgtctgttttacaagtgttcgagatccagcatctgtagcaacggcagcagagtcggacaccaagcatcacgagacgatggaaggaagttattcacaaacgatgcagattgatccgcatcgggctcgatttccatgcaccgttgtgtggtcaccacatcctgtgatcacgtggatcattccttgcatcggtcacattggcatcagcatacacgatggcgtgatactggcttttgcacggcctaattttgtgtgtgtggacaaatttgcatttggagctgccaac

SEQ ID NO: 59888 - DNA, 139 bp, Glycine max
gacaacagttccgaaggcccggttcatgtgttgcagtgacccacggggctcactgctgactgatcctgtggaatcaggggcagatgcaaatgccaatgcacatcagtcacagaaacatatactgcgcatatttggcggc

SEQ ID NO: 59889 - DNA, 72 bp, Glycine max
gattctgttgttatttatttgacttttacagtttactttagtcacattaatgtgtatgtttggttcagccgc

SEQ ID NO: 59890 - DNA, 392 bp, Glycine max
ggttctagtgtgtgattgtttgttgttgtaactcgttcttcttcttttgttgttctgtgtttgtgtttgttttttctctcacctgaaaatgtcttgctgcggtggtaactgtggttgcggaagctcctgcaagtgcggcaacggctgcggaggctgcaagatgtacccagacttgagctacactgagtcaaccaccaccgagaccttggtcatgggagtggcacctgttaaggctcaatttgagggtgctgaaatgggtgtgcccgctgagaacgatggctgcaaatgtggaccaaactgctcctgcaacccctgcactttcaaattaagttgttggaaaaccagccttcaggcagagatagcccttaaataggaataatgataaactatta

SEQ ID NO: 59891 - DNA, 195 bp, Glycine max
aactggggtaacacaatactatatcgctccatctcattctgcgctctattgagctagattgtacctatcaggctctctgttcttcttttgtatgctcgttcgggcttttgacatcctttcctccccatctaatctctcaggtcatcagtttcactcaatgcagtttactcattacgttgtgtgtagatattatcc

SEQ ID NO: 59892 - DNA, 250 bp, Glycine max
tgggatacacaattcactttcttcctctgcttcacattctcttctcttctctcatagggttagggtttttttctcttcagggctctctctgtccttttatttccatggttcagcaagatgctcacaatggtgggtcagagaatgccgctgctgctgtgtcgtttgtcgctttgaagccgcagctcctcatcgaactctcccaacacgaacgaccccgttctgttctacaaggccgcgtttgcctctgacg

SEQ ID NO: 59893 - DNA, 325 bp, Glycine max
  unsure (1)..(325): unsure at all n locations
ggttctagtgtgtgattgtttgttgttgtaactcgttcttcttcttttgttgttctgtgtttgtgtttgttttttctctcacctgaaaatgtcttgctgcggtggtaactgtggttgcggaagctcctgcaagtgcggcaacggctgcggaggctgcaagatgtacccagacttgagctacactgagtcaaccaccaccgagaccttggtcatgggagtggcacctgttaaggctcaatttgagggtgctgaaatgggtgtgcccgctgagaacgatggctgcaaatgtggaccaaactgctcctgcanaccctgcacttgcaag

SEQ ID NO: 59894 - DNA, 317 bp, Glycine max
  unsure (1)..(317): unsure at all n locations
ggttcaattttttgattgtttgttgttgtaactcgttcttcttcttttgttgttctgtgtttgtgtttgttttttctctcacctgaaaatgtcttgctgcggtggtaactgtggttgcggaagctcctgcaagtgcggcaacggctgcggaggctgcaagatgtacccagacttgagctacactgagtcaaccaccaccgagaccttggtcatgggagtggcacctgttaaggctcaatttgacggtgctgaaatgggtgtgcccgctgagaacgatggctgcaaatgtggaccanactgctcctgcaacccctgca

SEQ ID NO: 59895 - DNA, 300 bp, Glycine max
gacatgtggaacggatagactcacacaacggcgtgctccttatcacccaataattccactgttaccatgtctcctgcccactgaagtcgaagccctaatggcgtcacaggttcttcgacaccacgcactgtttgcgcccaagcaaagtctcccttcatcatcgcgtgacttcacgtcaatttcgacggttccctccgacctattgctattcgcgttgctctcctctcactgctaagcctagtttcgctgttagagctgactccaatgtcgaatgctctggttaagccaccgcagaagttc

SEQ ID NO: 59896 - DNA, 351 bp, Glycine max
gatccgaaatccaaataatgaatgatccggaaagaaaaccctagccccgaagtagcacgtgactgtgaaaataggagtagtagcgagcgccgcaaggcgaaatcacactatctctgctgaaacgcaaatgcttttacatcgaccgtccaatcaagtgccacgtcatcgatccgcgtgaaatcgattttgaacggccaggatcagcgctgcagaaaaactgggggaagcgaagggaagaggctggtaacttggctgttttctccattctcgcgtgctcggttttggatcgaatttttttttctccgtttgtttgcggaacaacgagtttcgaaatcccgtggagaacgtaac

SEQ ID NO: 59897 - DNA, 65 bp, Glycine max
cggcagagagcaacatactccaaatgtcccctgacaacatttccggtgattcacgacgtgcactg

SEQ ID NO: 59898 - DNA, 111 bp, Glycine max
acaaagaaaggggaaaaaaaattccttaagaaaaagaaaaagaaggtaaataaagaaaattaaaaaaaaaaaggggttttggtttttgtgtttgttgtttaaaccttaaaa

SEQ ID NO: 59899 - DNA, 383 bp, Glycine max
ggttctagtgtgtgattgtttgttgttgtaactcgttcttcatcttttgttgttctgtgtttgtgattgttttttctctcacctgaaaatgtcttgctgcggtggtaactgtggttgcggaagctcctgcaagtgcggaaacggctgcagaggctgcaagatgtatccagacttgagctacactgagtcaatcatcaccgagaccttggtcatgggagtggcacctgttaacgctcaatttgagggtgctgaaatgggtgtgcccgctgagaacgatggctgcaaatgtggaccaaactgctcctgcaacccctgcacttgcaagtgaagtgttgggagagcaatcttcaagcatagatagcccttaattaggaataatgata

SEQ ID NO: 59900 - DNA, 345 bp, Glycine max
gattgtagaactgaacaagggtttctctttctctttctctgtctgcttcttcactttctctcgtttcaatcgaaaaaaatcatgggcagaaaattcttcgtcggtggcaactggaaatgcaatgggaccactgaggaggtgaagaagattgttactactttaaatgaagctaaagtccctggagaagatgttgtagaagttgttgtgagccctccttttgtgttccttccttttgtaaaaagtttgctgcgccctgatttccatgtctcggcccaaaattgttgggttcgcaaaggtggtgcttatactggagaagttagtgctgaaatgcttgttaatttggga

SEQ ID NO: 59901 - DNA, 409 bp, Glycine max
acgcccacgcgtccggagcgaaacagagagtgatttcagtgagtgatcggtgttcacttgatctcatcataatcgtcagcgtcaattgaagaagatgccgatcagaaacatcgccgtcggaaggcctgaagaggcgactcaccccgacacgttgaaggcggctttggctgagttcatctcaaccttcatcttcgtgttcgccggctcaggctccggcatcgcctacaacaagctcaccgacaacggcgctgccacccctgccggcctcatctccgcctccatcgcccatgcattcgccctcttcgtcgccgtctccgtcggcgccaacatctccggcggccacgtcaaccccgccgtcaccttcggcgccttcgtcggcggcaacatcaccttcctccgcggcatcgtc

SEQ ID NO: 59902 - DNA, 379 bp, Glycine max
ggttctagtgtgtgattgtttgttgttgtaactcgttcttcttcttttgttgttctgtgtttgtgtttgttttttctctcacctgaaaatgtcttgctgcggtggtaactgtggttgcggaagctcctgcaagtgcggcaacggctgcggaggctgcaagatgtacccagacttgagctacactgagtcaaccaccaccgagaccttggtcatgggagtggcacctgctaaggctcaatttgagggtgctgaaatgggtgtgcccgctgagaacgatggctgcaaatgtggaccaaactgctcctgcaacccctgcacttgcaagtgaggtgttgggagagcaagcttcaagcagagataccccttaattaggaataat

SEQ ID NO: 59903 - DNA, 382 bp, Glycine max
gaaacaaaggcagagcagagttgttgcgattaagaagatgaagagagtggagtttatggggctggggctgttagtggtggtgatgatgggatgttgtgggtctgcgactgctgcggatgacttggcaaccaagtgttcggcggtgattcagaaggtaataccgtgtctgaacttcgcgacggggaaggaagaaatgcccaaaaaggaatgttgcgacgccgccacggccataaaggagagcaacccagagtgcttgtgctacatcattcaagagacccacaagggtagcccacaggtcaaaagcttgggcattcaagaggccaagctgcttcagctcgcttctgtttgcaacgtcaaaaacgccagcatcaccaactgtcct

SEQ ID NO: 59904 - DNA, 386 bp, Glycine max
ggttctagtgtgtgattgtttgttgttgtaactcgttcttcttcttttgttgttctgtgtttgtgtttgttttttctctcacctgaaaatgtcttgctgcggtggtaactgtggttgcggaagctcctgcaagtgcggcaacggctgcggaggctgcaagatgtacccagacttgagctacactgagtcaaccaccaccgagaccttggtcatgggagtggcacctgttaaggctcaatttgagggtgctgaaatgggtgtgcccgctgagaacgatggctgcaaatgtggaccacactgctcctgcaacccctgcacttgcaagtgacgtgttgggagagcaagcttcaagcagagatagcccttaattacgaataatgataaac

SEQ ID NO: 59905 - DNA, 353 bp, Glycine max
ggttctagtgtatgtgattgttgtgactcgttcttcttcgtcgttatcttcttcttttgttgtttgtgtgtttgttttttctctcacctgaaaatgtcttgctgcggtggtaactgtggttgcggaagcgcctgcaagtgcggcaacggctgcggaggctgcaagatgtacccagacttgagctacaccgagtcaaccaccaccgagaccttggtcatgggagtggcaccagttaaggctcaattcgagagtgctgaaatgggtgttcccgctgagaacgatggctgcaaatgtggagctaactgcacctgcaaaccctgcacttgcaagtgaggtgttggagagctaaaagc

SEQ ID NO: 59906 - DNA, 392 bp, Glycine max
gggcacaagtttgttgagatagctagaagcaataagatgaaaatgaaagtgcttgttttgtttgttgctacagttttggtagcatatgaatgccatggctcagactaccagaagttccctctccaaatgaaaactgggtttggtgggcaatacagcaatgaggtggcatgtgccagttggaggcttggcgtggaagcaaacaacgtagtcaagtggcaaactgttcctgcagcttgcggagagtacatagctgactacgttctaggagaccaatatagatcagattccaaaacagttaaccaacaagcttatttctatgctaaatccctcaaactcaccaacaaagatgtctttgtcttggacgttgacgacactactctctctaatctcca

SEQ ID NO: 59907 - DNA, 390 bp, Glycine max
ggttctagtgtatgtgattgttgtgactcgttcttcttcgtcgttatcttcttcttttgttgtttgtgtgtttgttttttctctcacctgaaaatgtcttgctgcggtggtaactgtggttgcggaagcgcctgcaagtgcggcaacggctgcggaggctgcaagatgtacccagacttgagctacaccgagtcaaccaccaccgagaccttggtcatgggagtggcaccagttaaggctcaattcgagagtgctgaaatgggtgttcccgctgagaacgatggctgcaaatgtggagctaactgcacctgcaacccctgcacttgcaagtgatgtgttggagagctaaagcttcaagcagaaatggcccttagaaataatgataaaaac

SEQ ID NO: 59908 - DNA, 201 bp, Glycine max
aagggtttggttgttaaggtattcgcccctcagagtgaagtcgatcgtcatgcacacttcacgagattccggtcgctcatgacagacaatctcaggaagaatttcgcgaagtcaatgatgcacaacatgtctaacccttacagtatttgcataggatgtaggtgatgatgatgcactgcccgacacgttgtcatcggcgtc

SEQ ID NO: 59909 - DNA, 227 bp, Glycine max
tcaaattctcgattggaattttatgaatctaggaacgaagggttacgattatggtaaggattgggaagccataagactaagagaacgagaggaagaacatgtcgattcaaaatgccagaagaggatttggtggacatcaaatttaggttgtatcatggttccgatatccgatccttcaggtattcctccgccgacaacggtcgatatgcctaatcaaaaggattgtc

SEQ ID NO: 59910 - DNA, 310 bp, Glycine max
ggtgtgtgggatgagaagatgatgatgaaacattgggagaataaattggctagagagagagagatagagggttgggttggttttcttcctcctcttcctaaatagactctaatctcaatcctcattacacacatatcgacagatttcttcaatcctctctcaatcttttctgttttcttttccactctttaatatcctcgttttcgccgattcaaaaacaactatgattttgtattttgttgtaattttcttcctagatgtatttgactcggttgtctgaatcaattgttgcagcatggtccggaaccac

SEQ ID NO: 59911 - DNA, 88 bp, Glycine max
gggaagcataacataacataacgaaaactaaatcccaaataacccaatgaatcatcatcctctgaattcaactcgctcgcacatggga

SEQ ID NO: 59912 - DNA, 129 bp, Glycine max
aagggggacaagtagaggacttcattctgtcacgagtacaagcatcttcacattgtcagaaaaaatgtgtcctcgcatgcattagatgaggaggggtctcaccttcgggctgctgagtctcctgatgca

SEQ ID NO: 59913 - DNA, 291 bp, Glycine max
gaaagaacgaacaagaaagggggggttcctaagtggtgttgatttgttttgtttgtttgtaactccttcttcttcttttgttgttctgtgtttgtgtttgttttttctctcacctgaaaatgtcttgctgccgtggtaactgtggtttcgggagctcctgcaagtgcggcaacggctgccgaggctgcaagatgtacccagacttgagctacactgagtcaaccaccaccgagaccttggtcatgggagtggcacctgttaaggctcaatttgagggtgctgaaatgggtg

SEQ ID NO: 59914 - DNA, 303 bp, Glycine max
gatacactgctacttccgtgacatcgctttgctaatcctctctctctctcagacgcatcaatttccaaccatgacggactacatgcaagaacaggatatggaaattgaagcattagaagctatacttatggatgagttcatagaaatacattctggtgaaagcggcctaagtacttccaatcgatgcttccaaatcaacgttgttgcgcaggatgacgatgcagatgggtcaataactaatccagctcaactggctttgatcttttcacacagagaaccatatcctgatgaagctccactttt

SEQ ID NO: 59915 - DNA, 364 bp, Glycine max
ggcatttcaattccaatatattcaattccccctgtgtatttcccaacctctcccttcaagatgcagatcttcgtcaagaccctcaccggcaagaccatcacccttgaggtggaaagctctgacaccatcgacaacgtcaaggccaagatccaggacaaggaaggaatccccccggaccagcaacgtctcattttcgccggaaagcaacttgaggacggccgtacccttgctgactacaacattcagaaggagagtactcttcacctcgtcctccgtctccgtggtggcatgcagatcttcgttaagacactcaccggcaagaccataaccctagaggttgaaagctcggacaccatcgataacg

SEQ ID NO: 59916 - DNA, 203 bp, Glycine max
gaagggcaaaataatggccttgttatgaacttctacaaggaatcatgccctcacgctgaagacatcatcacagaacaagtcaagcttctctacaagcgccacaagaacactgctttctcctggctcaggaacatcttccatgactgtgctgttcacagttgtgatgcttcactgttgccggactccacaagaaggagcttgtc

SEQ ID NO: 59917 - DNA, 242 bp, Glycine max
gacggtcaagtcaatttcttctcctctctctcactcgtacggttacggttttctcacttcatcactctctgtgtcgctccgtttcaatggctcaggatgacgctcaaacactgccggtcagataatgccgctgctgctgctatcgtgtcgtttgtctctttgaagccgcagctcctcgtccaatctcccaaagcctacgacaccattcggttcttcaaggctgcctttggctctgatgaagt

SEQ ID NO: 59918 - DNA, 255 bp, Glycine max
tggggggtgaacacgacggcttagagttagatagagtctcgcggagactcaaacccgcatctgtcattttcgagcttcatccatcaacagtgcgtccgcttatggtctgacctcgccacacgtttggatgacactaaacgactcctagctcatgctcatcataatcgtctattctccatacacccactcgccgccacttctaatctgggctccctgcacgttgctaagtttctcgtcagaacatcagtttacacc

SEQ ID NO: 59919 - DNA, 196 bp, Glycine max
gtaatacagggcttcatctcaccatatccattccccattagcgcagcacgcgagcctgtagcatggttctactcaaggcgtacagtttccagcaacctcagggagcccgggctctcctcgcgggacatcttcctcggtgtcccatcccactcgccgcatctccaatatccttcctctgattacctcgatttctcca

SEQ ID NO: 59920 - DNA, 284 bp, Glycine max
gattgtgattcatttgcacatttggaaagtgttgtttttctttttttcatttgcattgcaaagcaaaaaccttgcaaattgcaatggcttccaacaaggttattgccaccatcttggttctttctctccttgcctactcaacatcattcaccaatgcatgtggcacatgccacccaaaacctactccttctccccctcctccatcagggaagtgccccaaggacacattgaatctaggggtgtgtgctgatgttctacgacttgttaatgttgttgttggttcc

SEQ ID NO: 59921 - DNA, 394 bp, Glycine max
ggaattcattaatttcggtgtagtccaggttcatttcactcactctggttttcaatagtccaaagttgtcgacaaacgtaacacactacacacgtacgaagagttacaagcagaggtgacagatggctcttagtgaaggtgacaagcatctaaaatgagctcaataacttcaacttatcggtttcaacactcactttcgtctctttcattcacggaggattaattacatcatcactgtccccaacacacgaaatctctcacactatggctcttagcatcaagaacagtgaaattgaatttgttgatcatgaaggtggagaatcattagcacatgcagatctagtttcaccatggacaccacaccaatgcaggaccgtgcagatcaaaagggtat

SEQ ID NO: 59922 - DNA, 294 bp, Glycine max
  unsure (1)..(294): unsure at all n locations
gaaagcgagagaagccagcttggaatctatgtgacagacactgaacaacacgcacacaatgtcaaagcctctgttcaaaacctctccaaaactcctcgatcaagcaacatccacaacaacctctccacatttatctcctccgttagtctccgctctatcaggtcacatgatccacctcattgcgccttagtcagggatccaatggatcggaaacattctctctagatcggaagttcgagttcgggaatcgcatttggagcaccatgatncacgcacgatgttctcaaactgtat

SEQ ID NO: 59923 - DNA, 400 bp, Glycine max
ggcacaagtttgttgagatagctagaagcaataagatgaaaatgaaagtgcttgttttgtttgttgctacagttttggtagcatatgaatgccatggctcagactaccagaagttccctctccaaatgaaaactgggtttggtgggcaatacagcaatgaggtggcatgtgccacttggaggcttggcgtggaagcaaacaacgtagtcaagtggcaaactgttcctgcagcttgcggagagtacatagctgactacgttctatgagaccaatatagatcagattccaaaacagttaaccaacaagcttatttctatgctaaatccctcaaactcaccaacaaagatgtctttgtcttggacgttgacgacactactctctctaatctccagtattttgc

SEQ ID NO: 59924 - DNA, 395 bp, Glycine max
gggacaagtttgttgaaaaagccagaaagcattagatgaaaatgaaagtgcgtgttttgtttggttgctacagttttggtagcatatgaatgccatggctcagactaccagaagttccctctccaaatgaaaactgggtttggtgggcaatacagcaatgaggtggcatgtgccacttggaggcttggcgtggaagcaaacaacgtagtcaagtggcaaactgttcctgcagcttgcggagagtacatatctgactacgttctaggagaccaatatagatcagattccaaaacagttaaccaacaagcttatttctatgctaaatccctcagactcaccaacaaagatgtctttgtcatggacgttgacgacactactctctctaatctccagta

SEQ ID NO: 59925 - DNA, 323 bp, Glycine max
ggttctaatgtatgtgattgttgtgactcgttcttcttcgtcgttatcttcttctattgttgtttgtgtgtttgtttcttctctcacctgaaaatgtcttgctgcggtggtaactgtggttgcggaagcgcctgcaagtgcggcaacggctgcggaggctgcaagatgtacccagacttgagctacaccgagtcaaccaccaccgagaccttggtcatgggagtggcaccagttaaggctcaattcgagagtgctgaaatgggtgttcccgctgagaacgatggctgcaaatgtggagctaactgcacctgcaacccctgcac

SEQ ID NO: 59926 - DNA, 54 bp, Glycine max
tggggtatcattagggtttgtcattacgtcttcttcttttcacaatgacgcttc

SEQ ID NO: 59927 - DNA, 250 bp, Glycine max
cacactcagaggaactgacacacggcgtcgatgcattctgtggaagagcttgttgggttctctcagctttcacctttccaggctcggatgcaaagaaaaatcgcaatcattcctgaataaggcaccaccactatttctgggtattgggatgttgcagcaggaatggctcatcgttgtaacatccgattgttaggcaggagtgaagagaatgtatcagatacaggacatgcagactcaccacagagaggtc

SEQ ID NO: 59928 - DNA, 285 bp, Glycine max
gagtaacaagagacccagtctcgtttcgctctgtattgtttcactctgtaaaagactcattgcagcaagtgcgtcgtcgtggtgattgaggagcgctgagcgaaatgcggggtggtgtttccctgtggttggcgttagcctccgtagcagcggctgcaagagtgtcttgcggtggtttggcggggacatgactcgcactggaaatggggattacaatgaaccagccagtgaacttgtaggtactcagactctgggacagagtgctattgtgcacgttgatgctgc

SEQ ID NO: 59929 - DNA, 283 bp, Glycine max
aacagcaacgttgtagagggaaacctttgcgggaaaatcactgacagtaaaacgatctttccgccttccgtagcgccgccgttgaatacgaaagtgaacgcctccaccgggatcctggggctggaactgtgccgaacgccagggaagtgctgattgggctgtacagcaagacgctgaaagagatccacaacgttcccgaagatcaagggtaccgcaaggccgtcgagagcttcatcaagcacaggctcggcgtgtgccacgacgacgacgactgggagaacat

SEQ ID NO: 59930 - DNA, 381 bp, Glycine max
gactcacaactccataacacaaggcagaaagcaagctcatcctagagttttaaaaatggcagcagcctcctccatggctctctcttccccatccttggctggcaaggccgtgaagctgggcccatcagcccccgaagtcgggagggtcagcatgaggaagaccgtcaccaagcaggcctcctccggaagcccatggtacggcccagaccgcgtcaagtacttgggcccattctctggcgagcccccgtcctacctcactggcgagttcccaggtgactacggctgggacactgctgggctttcggccgacccagaaaccttcgccagaaaccgtgagctcgaagtgatccactccaggtgggccatgctcggggccttggg

SEQ ID NO: 59931 - DNA, 153 bp, Glycine max
actctttgtgattctgattcaatccattactataccttccccgaaatgcttctacaaattggttttaatgaacgtgttcctataacacaagaattttttattgaaactgttgctgtcaaacacaatgatcatataccctctgttctctttcct

SEQ ID NO: 59932 - DNA, 221 bp, Glycine max
ggctgccacaagactacagaatggggttttcctctgttctttctctctctctctctctgtcgacaccacatctttcagtgtcactaacattgactgtttcgtctggggactgggtctctagcaccgagcgttctctcactacacttgccccacttgaacgaatgctctctcccgtacatcgcactcgctccgattcagatccactcccctacgatgccttc

SEQ ID NO: 59933 - DNA, 78 bp, Glycine max
gaggttaatttctttgtttgtgatgaaaatgttgagagcagattcaggatgccagagaactcaacaccaaacgatgca

SEQ ID NO: 59934 - DNA, 416 bp, Glycine max
gatctggcagcagaagaacaagtagttgagaactaagaaggagaagcaaatggcttcctcaatgatctcttccccagctgttaccactgtcaaccgtgccggtgccggcatggttgctccattcactggcctcaagtccatggctggcttccccaccaggaagaccaacaatgacattacctccattgctagcaacggtggaagagtgcaatgcatgcaggtgtggccaccagttggcaagaagaagtttgagactctttcctacctgccagaccttgatgatgcacaattggcaaaggaagtagaataccttcttaagaagggatggattccttgcttgggattcgagttggagcacggtttcgtgtaccgtgagcacaacaggttcaccagatactacgatggacgctactgga

SEQ ID NO: 59935 - DNA, 361 bp, Glycine max
  unsure (1)..(361): unsure at all n locations
ggagtgagcaagagtgaggagcgaagagaatggctcccaagggtttaatctttttggctgtgttatgcttctcagcactgtcactgagtcgttgtcttgcggaggataatggacttgttatgaacttctacaaggaatcatgccctcaggctgaagacatcatcaaagaacaagtcaagcttctctacaagcgccacaagaacactgctttctcctggctcagaaacatcttccatgactgtgctgttcagagttgtgatgcttcactgttgctggactccacaagaaggagcttgtctgagaaggaaacagatagaagctttgggttgagaaatttcanggtacattgagacatcaaaga

SEQ ID NO: 59936 - DNA, 273 bp, Glycine max
gatcttttgcttctgtctctctccaccataaccaatacatcaaagacacccttcaataacttctttctcttctctattggatttcaatctctccctgtcactctgatttttttgtcgttttcaattttcatggagggtcatcatctggatcacgggctccagcagttacaacaacatcagcacactcatcacaacatcacaactactaacgtagagtggcacttataggttcccccaatggactcatccaagataccatatacttcctcgtga

SEQ ID NO: 59937 - DNA, 391 bp, Glycine max
ggttctagtgtatgtgattgttgtgactcgttcttcttcgtcgttatcttcttcttttgttgtttgtgtgtttgttttttctctcacctgaaaatgtcttgctgcggtggtaactgtggttgcggaagcgtctgcaagtgcggcaacggctgcggaggctgcaagatgtacccagacttgagctacaccgagtcaaccaccaccgagaccttggtcatgggagtggcaccagttaaggctcaattcgagagtgctgaaatgggtgttcccgctgagaacgatggctgcaaatgtggagctaactgcacctgcaacccctgcacttgcaagtgaggtgttggagagctaaagcgtcaagcagaaatggcccttagaaataatgataaaaact

SEQ ID NO: 59938 - DNA, 347 bp, Glycine max
ggttctagtgtgtgattgtttgttgttgtaactcgttcttcttcttttgttgttctgtgtttgtgtttgttttttctctcacctgaaaatgtcttgctgcggtggtaactgtggttgcggaagctcctgcaagtgcggcaacggctgcggaggctgcaagatgtacccagacttgagctacactgagtcaaccaccaccgagaccttggtcatgggagtggcacctgttaaggctcaatttgagggtgctgaaatgggtgtgcccgctgagaacgatggctgcaaatgtggaccaaactgctcctgcaacccctgcacttgcaagtgaggtgttgggagagcaagct

SEQ ID NO: 59939 - DNA, 382 bp, Glycine max
ggttctagtgtgtgattgtttgttgttgtaactcgttcttcttcttttgttgttctgtgtttgtgtttgttttttctctcacctgaaaatgtcttgctgcggtggtaactgtggttgcggaagctcctgcaagtgcggcaacggctgcggaggctgcaagatgtacccagacttgagctacactgagtcaaccaccaccgagaccttggtcatgggagtggcacctgttaaggctcaatttgagggtgctgaaatgggtgtgcccgctgagaacgatggctgcaaatgtggaccaaactgctcctgcaacccctgcacttgcaagtgaagtgttgggagagcaagcttcaagcagagatagcccttaattaggaataatgat

SEQ ID NO: 59940 - DNA, 362 bp, Glycine max
gacccacagcgtcaatacaggcgtcagtacgagcagcgagagggcggcataaggggtcaccaagttcacgagctcttgaggagaatatctttgcctggctcgtgtttttcttcatgtgtttctgtgagatgtagcgacctatgctgagatttgaacagttaacatttttaataatagttgtaattgacgtagtgggattaggttcatcgtctgtgtaaggatatggtagagtcaatcgtacacgggtaatttgagtgcttaaaggactgtcttgactattttatgtactcgtgattgtcactcaaatttcgttcgaggtcgacattcacttcgacggatgttaatgcgtatggccattggag

SEQ ID NO: 59941 - DNA, 282 bp, Glycine max
gaggcatgagatgtcagcttgataacgatgtctacacgacccctcaagtctccacctccatacttgagccatacagcatgtgggacgtgacaatctcacgtgaagtacaccgatgtcgccgtcagattgagagacgaagcgcacaatgacgatcagttggcgcacaccagacatagcacttcctagcgtgaacgaacctcgctggatctagtggctgcatgtgaggatcctcttagacagcatcccagatgtgtgctgaggactacaatgatgaagtcattg

SEQ ID NO: 59942 - DNA, 318 bp, Glycine max
  unsure (1)..(318): unsure at all n locations
agccgtcagtacgagcagcgaaagggaggcataaggggtcaagttcacatggagtggtacaggtggaatgcctggcagtcgtagagacttcaactcagcacagcatatggggatctcgnacatgtcatatgacatgcccttatgactgccatctgatcagcgctctaacgtctgatgattaactatagtgctagtgcgattatataagatccaacgtcagggaccttctccgtctaaacccatggataagagagacgcttatgcagtaactgagctattccctcatgactgagattctcggtacatctgacattgtct

SEQ ID NO: 59943 - DNA, 360 bp, Glycine max
ggcagttcaattccaatatattccattctctctgtgtatttccctacctctcccttcaagatgcagatcttcgtcaagaccctcaccggcaagaccatcacccttgaggtggaaagctctgacaccatcgacaacgtcaaggccaagatgcatgacaaggaaggaatccccccggaccagcaacgtctcattttcgccggaaagcaacttgaggacggccgtacccttgctgactacaacattcagaaggagagtactcatcacctcgtcctccgtctccgtggtggcatgcagatcttcgttaagacactcaccggcaagaccataaccccagatgttgaaagctctgacaccatcgat

SEQ ID NO: 59944 - DNA, 155 bp, Glycine max
cccgaaggtttatcgcgacgcaaggcgtgatccaaggagacaggcataccttgtgcggagtcgagtgacaagtcgctggagcagcgcccgacagaagttaccgaacgcgtgagctggggagtctagcacgaaaagagagggatgctcaccagcat

SEQ ID NO: 59945 - DNA, 190 bp, Glycine max
ggggtctctctcattcttcacccgctcagacgcagtggatcagaagcctaagcctcagacatggccagagggtttgggaagcacctgaggatgctcactgctccatggattggagccttgactatctttgtggtgcttttgcatccaggctatcagcttgacctcatcagttcggggagtgtcttcctct

SEQ ID NO: 59946 - DNA, 145 bp, Glycine max
ggtgctaatcgtagctgagcgcgctaagcactctagctgttgcaaatttctactagttgtcaatggcttctgcaggtgttgagttccgttgcgttgttggtgggcgggcttgggtcgcgggcaacggggcccgcgagaaagcctt

SEQ ID NO: 59947 - DNA, 103 bp, Glycine max
cagaaaagacagaggggggccgagcccgagaaggtgtgcgggagccgtttgtggacgaggatgtgagcataaggggggctgatttgaggttggcacgtttcgg

SEQ ID NO: 59948 - DNA, 80 bp, Glycine max
gacagaaggggagttgtagaagaagagtgttgaagccgtttctgtgcgtggtccgctgtcttgtcgtcaacctcgttttc

SEQ ID NO: 59949 - DNA, 262 bp, Glycine max
ggacttggtgctaactagattgaggatagtgatctttgtcttcgccagcaacatcgtccacgtggaagaggagatcggggggagcctgagatagcggagcttttagaggccgcactttttagttgtggtgtgtgagattttgatttgatgggaaaatatcttgacgctgcggccaggctggcggagctgtcgcggattgtgtcagctgctggcggggcccagcaggccaaagagagcgctacccagattgcccaaccgtgtg

SEQ ID NO: 59950 - DNA, 68 bp, Glycine max
gggtgctaagttatttgcgtagggatcgtcctcagcttctgcattcttcatcagcgtcgtcgcgcgtg

SEQ ID NO: 59951 - DNA, 332 bp, Glycine max
ggagagtgatttcagtgagtgatcggtgttcacttgatctcatcataatcgtcagcgtcaattgaagaagatgccgatcagaaacatcgccgtcggaaggcctgaagaggcgactcaccccgacacgttgaaggcggctttggctgagttcatctcaaccttcatcttcgtgttcgccggctcaggctccggcatcgcctacaacaagctcaccgacaacggcgctgccacccctgccggcctcatctccgcctccatcgcccatgcattcgccctcttcgtcgccgtctccgtcggcgccaacatctccggcggccacgttaaccccgccg

SEQ ID NO: 59952 - DNA, 270 bp, Glycine max
gatagaaaggagaggagggatagagcgcgttccgctaagcattaaattagaattccagatttgagctcgaagaggcagcagcacccggtgttgtatggcaaacgcagaggagatgcacgtttcgttcgtgtctcgtcgtcttctatccataatttcaattccatttgctcggctggagcgagtcaggcgggggcgaagcgggatgactcggggctggtgccactggaggaacaagagggagaactcgcggacatgcgcgtcgcggggagg

SEQ ID NO: 59953 - DNA, 304 bp, Glycine max
ggttctagtgtgtgattgtttgttgttgtaactcgttcttcgtcgtttgttgttctgtgtttgtgtttgttttttctctcagctgaaaatgtcttgctgcggtggtaactgtggttgcggaagctcctgcaagtgcggcaacggctgcggaggctgcaagatgtagccagacttgagctacactgagtcaaccaccaccgagaccttggtcatgggagtggcagctgttaaggctcaatttgagggtgctgaaatgggtgtgcccagtgagagagatggcggcaaatgtggaccagactgctcc

SEQ ID NO: 59954 - DNA, 289 bp, Glycine max
cggtattaaggtgacatatagataaatatattggtttcctaagttcacaccataacttcactgtatacgatcatactttacctccattcattcagaaagtgcgattcaccactttattacgtctttgatactggatacatctcgatacatatacttgttattgcataagctgtcacaattcatatacttaccacttgctgcaaccaatcatgacattatctgtggtccattgattttaatacgttcattgcaaccacttaactaaagctcaatcctcatagtgctttct

SEQ ID NO: 59955 - DNA, 274 bp, Glycine max
ggggggacagacacaaatcacaaagcccagttccaaccccacattgaacctaaaaaagcaatgtcacgtccaccattttccccccctcgctcgagttcccgtctcgttgtcggcctgttagcagcattactcttagctcaatcgccaccttcgccttctccttcgtcgtcgtcttcgtcttctgttgcctgcagaggcacactatagtccaagttctccataagacaaatccgcaaacagggaggaaaactagccaaagtcgttgaggactttc

SEQ ID NO: 59956 - DNA, 295 bp, Glycine max
ggcacaagtttgttgagatagctagaagcaataagatgaaaatgaaagtgcttgttttgtttgttgctacagttttggtagcatatgaatgccagtggctcagactaccagaagttccctctccaaatgaaaactgggtttggtgggcaatacagcaatgaggtggcatgtgccagttggaagcttggcgtggaagcaaacaacgtagtcaagtggcaaactgttcctgcagcttgcggagagtacatagctgactacgttctagggagaccaagatagatgagattccaaaaca

SEQ ID NO: 59957 - DNA, 255 bp, Glycine max
gacaagtggaaataatatatgcgttaaccacctacacgctcgatccttaaatcttacaattggaacttcacattattcgtgttctgtcatcggggtatgtgattcctcacggagggtagtgcacacacttcacatcacgctgtcacgtcgatgacggagatcatacgctgcacgactccaaacacgcctttcagtcaaggccctccatacagatttacatagtagactcttacggaaacaatgtctggcttcccg

SEQ ID NO: 59958 - DNA, 271 bp, Glycine max
  unsure (1)..(271): unsure at all n locations
cggggttgttaatatgagcacgagcaagagcgctcttttggtatgaaagcctctccttcaaccctgaagctcagagccatggatgatgcgtctacgtgcggtcagcagatggacgggcagagagaggagagaagggttacagacacttatagagagctatgtgaaagacgagagaggtaagagggtgaagtgtggttatgagattccactgcaactggaggaggcgtcgagggggatcncagggagtgcgaagttcagaggtaggaatttg

SEQ ID NO: 59959 - DNA, 270 bp, Glycine max
ggtgaagagaatggctcccaagggtttaacctttctggctgtgttaatatgcgtttcagcactgtcactgagtccttctgttgcgggggaagggcagaataatgggcttgttatgaacttctacaaggaatcatgccctcaggctgaagacatcatcacagaacaagtcaggcttctctacaagcgccagaagaacactgctttctcctggctcaagaacatcttcgatgactgttgcggttcagagttgtgatgcttcactgttgctgg

SEQ ID NO: 59960 - DNA, 353 bp, Glycine max
  unsure (1)..(353): unsure at all n locations
catattgttcaatataagcatgcagtgggttgaacttgtgatagatttgctaaacctatatttcttactatatccattttagtatttagtatagtcacaccttcaataaagtagttttgtttgactgcattgacatcacattgttaagaggtatgctcaactttatgtttcttatcgtatccattttgctttttatatgcctttaacgctgttgctctttccaggattggttttctttactattcgatggtggaatcctgctacctttgaagccatgcatccagagggaactgctangagacctacgtggccttacgtcgaagataaatcctatctctggacatggctgtttt

SEQ ID NO: 59961 - DNA, 113 bp, Glycine max
gaaagatgggcgaagtagacttaaaagccaagagtaaagcttcccttggttcactctcattggctgtctcattcatcacgggtatggccatggattctattcacatcgaagga

SEQ ID NO: 59962 - DNA, 246 bp, Glycine max
ggaggtatgggaatctaaaacagcagatagtctaactctcatcacattctttctcacgttttctcaggctctagaggtcaggcaggtattgctcatcatcagtcttgcgaatcgcatgcttatacgacaatctcttacccatatcatcactcttgagcttagatgattgaatgcatggtgtacatctgcatgtgccaatttggcatactcgtcaatgtgaataaattaatcatagttctcatcttc

SEQ ID NO: 59963 - DNA, 267 bp, Glycine max
ggttctagtgtgtgattgtttgttgttgtaactcgttcttcttcttttgttgttctgtgtatgtgtttgttttttctctcatctgaaaatgtcttgctgcggtggtaactgtggttgcggaagctcctgcaagtgcggcaaaggctgcggatgctgcaagatgtacccagacttgagctacactgagtcaaccaccaccgagaccttggtcattggagtggcacctgttaaagctcaatttgagggtgctgaaattggtgttcccgc

SEQ ID NO: 59964 - DNA, 252 bp, Glycine max
tggggttcatgaggtggaggcggtagcagaggtgtttaccgtggaacttcccagacttatgcagctgcagcatcaactgaacatcctgcgtgttacacatacttgggtgcgatctgatgccttgcgataatcctgtcgtcacacccgcatccgatgttcactattatgttctcatctttgacattagtctcgctaagatctatcgacattgcatttcacggactgtaaggttcattccatcttatgccttga

SEQ ID NO: 59965 - DNA, 356 bp, Glycine max
gaatgaaaaccagagtgaagcagtgaagaagggaacaatgatggaaggccggaaccgaaaattaaccccgaagccgtcaacggattccctccaatcaatccaaagtttcaaccttttccgaaaaggttaccccctaatccaataattgcaaccaaaccttcaactccggtcccaattaacccggaaaaaaaggaattacaccaacctccaaatttggttggaacatgtccttacatgtgcccaagtaaacatattataataacaatatctaatgtatgaatatgaaatcaatttcataatttcatgttagcagagttgcaatgttggattttgtatgatggcatgtctcctttggt

SEQ ID NO: 59966 - DNA, 73 bp, Glycine max
gggtcttgggtgggacaactgatcgcaaagaaagatgcggtttctgtgcctctctgctctctctgactctgtc

SEQ ID NO: 59967 - DNA, 294 bp, Glycine max
gggttatcagtctaatggaacagtatcaccgtttctcttccacttacgcaaatatggtgcagtcattgtcagtcttctcgtctactttcttcttcgctgattcacaattttttcgcgcaatctacagtaacccttgtgccaatcgttaactattacttgaggtattgatcatgctttctgactagttgattacatattgtatttcataatttggaaatttgcattgaattgcatctccggtaacgttcgactgaaacatgatttggaacctactcattctgcgtcttaatcttc

SEQ ID NO: 59968 - DNA, 80 bp, Glycine max
ggtgtttgggtcgtaaaattgtacagatagcagtcccatgccgacgtgacgacatggatccctgctgggctgctgttcca

SEQ ID NO: 59969 - DNA, 244 bp, Glycine max
gagttgtcagtctgtaatgttcagttaccagttgctggctgacgaagacgactgaaaggcaactatcgactgcctacggatctacatacatctcaccttgtcacgtaaaagagcacatctgactaaagtcagcttcgtgcaactcataaggttatccacgatgtcaggatgatgctttccaatagagggataccagacccagtttgacatagatagagcctttgcgactcttaccgatcctgaa

SEQ ID NO: 59970 - DNA, 412 bp, Glycine max
  unsure (1)..(412): unsure at all n locations
ggcacaagtttgttgagatagctagaagcaataagatgaaaatgaaagtgcttgttttgtttgttgctacagttttggtagcatatgaatgccatggctcagactaccagaagttccctctccaaatgaaaactgggtttggtgggcaatacagcaatgaggtggcatgtgccagttggaggcttggcgtggaagcaaacaacgtagtcaagtggcaaactgttcctgcagcttgcggagagtacatagctgactacgttctangagaccaatatagatcagattccaaaacagttaaccaacaagcttatttctatgctaaatccctcaaactcaccaacaaagatgtctttgtcttggacgttgacgacactactctctctaatctccagttatttgctaancatggatt

SEQ ID NO: 59971 - DNA, 83 bp, Glycine max
gcacgcgtccaataggcaccaagaagacaaccgaaggggacaatttggttgtcaaaccgagatccaatccgttgccatgaaaa

SEQ ID NO: 59972 - DNA, 291 bp, Glycine max
ggtgcagagtttgttgagcataatagccattttcttctgattcttccaaatctatggttagggattccatttcccaacttcctcgttctctcccgaatcgttttcccttttctttttcctcctgaaaaattttccctcaatttttctctctcttgcagattactataagcactcttcctcgatatacccttttccgagatatacattgttttattttcccgggaaaatactcctcacaattttctggtccaacctattcgtcctttatatcaatccatcatcgatttgttg

SEQ ID NO: 59973 - DNA, 382 bp, Glycine max
ggttctagtgtgtgattgtttgttgttgtaactcgttcttcttcttttgttgttctgtgtttgtgtttgttttttctctcacctgaaaatgtcttgctgcggtggtaactgtggttgcggaagctcctgcaagtgcggcaacggctgcggaggctgcaagatgtacccagacttgagctacactgagtcaaccaccaccgagaccttggtcatgggagtggcacctgttaaggctcaatttgagggtgctgaaatgggtgtgcccgctgagaacgatggctgcaaatgtggaccaaactgctcctgcaacccctgcacatgcaagtgaagtgttgggagagcaggcttcaagcagagatagcccttaattaggaataatgat

SEQ ID NO: 59974 - DNA, 222 bp, Glycine max
ggcacctgtgagtaatatttgagcttaaaccctaaccgctcttctcttcattactcactttggacacaatcataatggcgttctgtactaacgtcggaaatgtcttgaggcacgctgatgctcacagcacacatacacctgtcgcgtccatgcttacatacatcagcagacactcttcatgcaagcttttcagtgcaggcctattatacggattgatgacca

SEQ ID NO: 59975 - DNA, 186 bp, Glycine max
ggaacctcaaaatcagtctctattatttttctcattgtcttgtctcatccatataattgtatagagagatgagggcagctgaatgatctgatgctgtgttaaatgggttgggatcttacttcttgagtgtacgaatcacgagccagccccttctggccactgctattagaggcacagtttgtgctg

SEQ ID NO: 59976 - DNA, 376 bp, Glycine max
gtatgcagtgtgtgttgatcctttttttttctgtttcttctctttgtgagatactgaaaatcactttttctttgttgacctatgagatctacttgctccattattttatattttatttttttggtgcctttctttggatttgtttaatttgttagcttcaacaattaaggacaaaattatttagtgactcctcattttttatatttattattatgtgaacttgtggctttttgtaagaagccctatatgtgcttcattgctccattagaatagtaagagttcatttctaatttgatcttttttgtaagggatggtagatttatcagatctagtaatatgggacatgatctggtggatatctaatattttgtgtact

SEQ ID NO: 59977 - DNA, 332 bp, Glycine max
ggagactagggtaaggtcgcgttgtgttgcgtcgtgtcgtgcgctgttcctcagtctgtcgtgtttgttgacagaccagatcctagctcagcatcacaaccatgtcgacaaagcaaggtggaaaagctaagcctttgaagaaacccaggtctgataagaaggattacgacgaggttgacatggctaacagtcagaagaaaaacgaagacgagaaagcgctaaaggagctgaaagccaaggcgcaacagaagggaagctttggaggttctgggctcaagaatagtggacagaaataagggctctttaacatgattgtatacatccaatattga

SEQ ID NO: 59978 - DNA, 317 bp, Glycine max
gattgggtggtgctgagtcaagaaagtggctgaaattgggttatggttttggggtgaatccaacagatccacgtttgagccacacacactttgtctttctggctttgttttcattgtcccaatcctagcccaaactttcttgtggctctgacaatcaattacccgttttgttttttactctttagactctccgccacctgaacattacgcatccaactcatagcattcaccccatcattagcaccgtcacttgttcgtttcaacgttcttctagtgatacgttaatgccttctgaatccgttcaaattttttcaact

SEQ ID NO: 59979 - DNA, 399 bp, Glycine max
gagagaaggaaagcgagagtcggaagagatttggcgcgagttgaaaaccctagtgagttccaatgatctccactcccttaacctcatgcaacacaccatattgggaaggttgcaggatagcaatgcggtgttgtcgcatttcaacgacttctctcagcactgctttgctgagatttccggcgacatcgctagaaacacgcgtgttttgaggtctgtcaagtccgaccttgattatatctttcagaagctcaggtattcttttttaggagggtagtttgtcctgaaaactgcatatttgttgagatgtttttgtggatgtaggcgagtggtgtcaaactattaaattatctgtctgtcactatttctatcagtgatgtgtttcctgtgtgatcctatagt

SEQ ID NO: 59980 - DNA, 245 bp, Glycine max
ggatactctcactcgtgcattccaacctaccctttactcttcttcctcaattccacacttcagcatggatcgttttccgatcgtccttctcttcgccaacctcaacactctcgcctccggtgcccgccatgatattctccggttaccctctgagtcatctacttttttcaaatgcacccggcggcgatgaaaatcatgagggcacgatgtgggccgtcttaactgccggtttcaatggctactgg

SEQ ID NO: 59981 - DNA, 416 bp, Glycine max
gggtcgagcacgcgtccatgcagatgccagaacacaatcgaaaggacaaactcttgccatgtaaacgtgataatcggtttccccttcaccttctcggttgctttttcatattctccccttcactccttcccctattgggctaaatattcatcatcagtgaccactggactcacaatgggagcactcaagtagtcagaacaagagttcctatgttacattaatcactttcctcagggaaacatgttatcatggtaggaatgagtcatatgtggttgttcctcctctgtggttgtacttcgtcgcgccctgatttgtacgctcctcctcttcagtgttaggtacacaaaagttgcgcataaaatgcataggtgattgctaaactgcctggtaaggtgagaattccttgggtaaccatt

SEQ ID NO: 59982 - DNA, 172 bp, Glycine max
tggggaaacgacaattttaaatttcagatcagattgcgtctccacaatccttaacaacgacattaacaactcactttagaagatctaggaatcggccatctacctcagatactccctctcttccgcgatcactttcatcttactcacacgtttactgcgtcaacatcaccac

SEQ ID NO: 59983 - DNA, 283 bp, Glycine max
gacctcacccagttgcagaaacaaaagaccatcaaagtttcacttcagccttatccggttcagggtttcggtttttgacccaacctttgacgtggcgaaaccttaagtttccgatcacgtctgagcactctggttggtataacctttggtcttagagagtcatcgttttatgtctgaattacacgatcaaattcctactgccttcgatccttttgctgatgccaatgctgatgactccggtgctgggtcaactgactatgtgcatattcgcgtacaacaacga

SEQ ID NO: 59984 - DNA, 352 bp, Glycine max
gatggcaagctgatacagcctagctcaacccagaagatgcaaaggatagccattactagtcatcgttcccgtttgggtagcaatgattgctcgaatcatcgagactgtgtctgataaggtaccagcacaccttttcgcataatcagtagcacacactgtgaatgaaccattgctggtggtaaacgtatatgacttagagccatcgaatgtctctgtatatatactacacatgcggtttaatgtgtggcacaatgaagagccggctcatcgtgcatagctcccaatagatttgagaagccgtattactggattactatgacatcatggggcgatagctggggagagaatggat

SEQ ID NO: 59985 - DNA, 367 bp, Glycine max
ggttctagtgtgtgattgtttgttgttgtaactcgttcttcttcttttgttgttctgtgtttgtgtttgttttttctctcacctgaaaatgtcttactgcggtggtaactgtggttgcggaagctcctgcaagtgcggcaacggctgcggaggctgcaagatgtacccagacttgagctacactgagtcaaccaccaccgagaccttggtcatgggagtggcacctgttaaggctcaatttgagggtgctgaaatgggtgtgcccgctgagaacgatggctgcaaatgtggaccaaactgctcctgcaacccctgcacttgcaagtgaagtgttgggagagcaagcttcaagcagagatagccctta

SEQ ID NO: 59986 - DNA, 311 bp, Glycine max
ggaagttcagaccacttcaaaattcaaatttgaaaacagcgatatacaaatacagaaatggcattattgtccggaaacatcaacggtttgtaccgggagaacaaaaccaccgccactaacaaatctccgattctctcccaggccatcatctccctcggcggcaaacccgacctacaacatgagcacacggacaccgacgtggtgctcccgcaattccacctgaccatggcgtactggccttgcacccggactaccaggctcgcacggtgggagcgcgcacacatgctccacttcaaccctccgcaggaact

SEQ ID NO: 59987 - DNA, 311 bp, Glycine max
  unsure (1)..(311): unsure at all n locations
ggttctagtgtgtgattgtttgttgttgtaactcgttcttcttcttttgttgttctgtgtttgtgtttgttttttctctcacctgaaaatgtcttgctgcggtggtaactgtggttgcggaagctcctgcaagtgcggcaacggctgcggaggctgcaagatgtacccagacttgagctacactgagtcaaccaccaccgagaccttggtcatgggagtggcacctgttaaggctcaatttgagggtgctgaaatgggtgtgcccgctgagaacgatggctgcaaatgtggacaanactgctcctgcaacc

SEQ ID NO: 59988 - DNA, 292 bp, Glycine max
ggcagttcaattccaatatattccattctctctgtgtatttccctacctctcccttcaagatgcagatcttcgtcaagaccctcaccggcaagaccatcacccttgaggtggaaagctctgacaccatcgacaacgtcaaggccaagatccaggacaaggaaggaatccccccggaccagcaacgtctcattttcgccggaaagcaacttgaggacggccgtacccttgctgactacaacattcagaacgagagtactcttcacctcgtcctccgtctccgtggtggcatgc

SEQ ID NO: 59989 - DNA, 407 bp, Glycine max
gtgataaattttgaaaaaatattcatttaaaaataaatcgtaaattgaaccacgactgtgtacatataggtcagaaatagatttataacttctaaaaaacaatagatgaaaatagggaaaaaaaatgaaagaatgatttacactaatttaagtgtatttttcttgacattattttgacatattaattgtattttatattttacgatacataatttatattgtgctaaatgtatttttaactattactcatttcaatttcaattaaaaacaaatttatattagaaacaaggatgaaaaaagaaaactcaaagagataagatgctaattatttaaaaacaaaaaatcaaattgaaccttaaaaaaacaaacctttcacttgtgcacctaaaaaaactgaaatcgatgtt

SEQ ID NO: 59990 - DNA, 258 bp, Glycine max
ggcagttcaattccaatatattccattctctctgtgtatttccctacctctcccttcaagatgcagatcttcgtcaagaccctcaccggcaagaccatcacccttgaggtggaaagctctgacaccatcgacaacgtcaaggccaagatccaggacaaggaacgaacccccccggaccagcaacgtctcattttcgccggaaagcaacttgaggaccgccgttaccttgctgactacaacattcacaaggagagtact

SEQ ID NO: 59991 - DNA, 404 bp, Glycine max
  unsure (1)..(404): unsure at all n locations
gcacaagtttgttgagatagctagaagcaataagatgaaaatgaaagtgcttgttttgtttgttgctacagttttggtagcatatgaatgccatggctcagactaccagaagttccctctccaaatgaaaactgggtttggtgggcaatacagcaatgaggtggcatgtgccagttggaggcttggcgtggaagcaaacaacgtagtcaagtggcaaactgttcctgcagcttgcggagagtacatagctgactacgttctangagaccaatatagatcagattccaaaacagttaaccaacaagcttatttctatgctaaatccctcaaactcaccaacaaagatgtctttgtcttggacgttgacgacactactctctctaatctccagtattttgctaacc

SEQ ID NO: 59992 - DNA, 86 bp, Glycine max
  unsure (1)..(86): unsure at all n locations
aactgctgtttgattttatgactcaacattgagtgctgtaaaaaaaaaaaaanaaaaaaaaaaaaaaaacggccgcccaaaagatc

SEQ ID NO: 59993 - DNA, 214 bp, Glycine max
ggagaacaaaacaagtgtttcgaatagattatcctaagtctttgggaatagtgctgcaatggcttcaagtcaggaggaggtgacccttttgggagctactggaagcccatttgtgtgcagggttcatattgccctcaagttgaagggagttcaatacaaatatgtcgaagaaaatttgaggaacaagagtgaactgcttctcaaatccaaccca

SEQ ID NO: 59994 - DNA, 134 bp, Glycine max
gcagcttcaacgtatctccacattgtctcctactcttactgtgctcgtggcgtggcatcattttcatttgttccagtcactccagtcctagcatagccatcgctcttttctcccctacgatcctcatctccctc

SEQ ID NO: 59995 - DNA, 303 bp, Glycine max
gaaacacaaacacaaacatagggtaactcgaatgcaatgcaaaactttgatccaaatcaaatgctgataaaattgaagggtcccttagatcttctttgaggtcactgttgcatctctcacctttgctccaacgccacgttgctttggttggagggagatgattgatggagtccaatgaggatgggagcatgtcaaatagagagttcatgccaattggaaccccaatggtaaaaccaaaatttaaggcaaaccttaataaaggaattatccagaaggaaaaaaatcaattccaaaaaggttttt

SEQ ID NO: 59996 - DNA, 238 bp, Glycine max
ggaattacacctccaccacacacggtttagggcacactcaatgtgctcacattgacactgttaggccatatctcctttttttctctgacctgtacttaggtaaaactcacaaatactatacctttgatctggggaaacagttacattcatacgacatcattccaccaacattaaacaacttccgtttttgatgttcgagtcaacttctgtacactcaactgcaaaggcttttgtggac

SEQ ID NO: 59997 - DNA, 88 bp, Glycine max
gatagcagtgtgagagaaagtgttgcagagttgcacacggagatggcggtggccgccaattctgctgaaaaaaccctccaaactagct

SEQ ID NO: 59998 - DNA, 248 bp, Glycine max
gatcgatttctcgcattaactcttgacctctcacattcgccaattccgcagctcgcgcaatcgctgctaaattccagggttccgcaatggactctggcggaaagctcaagaatggctcctgatgtacaactgggtgccgtcgatggacgtagctcgtcttcaagttcgtcagctactctcaccagttcgccgtcgggacatttagccgttatttgtcgtaaggtaagtacgctcaacgtgtcggtaca

SEQ ID NO: 59999 - DNA, 327 bp, Glycine max
ggaaacagagagtgatttcagtgagtgatcggtgttcacttgatctcatcataatcgtcagcgtcaattgaagaagatgccgatcagaaacatcgccgtcggaaggcctgaagaggcgactcaccccgacacgttgaaggcggctttggctgagttcatctcaaccttcatcttcgtgttcgccggctcaggctccggcatcgcctacaacaagctcaccgacaacggcgctgccacccctgccggcctcatctccgcctccatcgcccatgcattcgccctcttcgtcgccgtctccgtcggcgccaacatccccggcgggcacgt

SEQ ID NO: 60000 - DNA, 320 bp, Glycine max
gagttcaattccaatatattccattctctctgtgtatttccctacctctcccttcaagatgcagatcttcgtcaagaccctcagcggcaagaccatcacccttgaggtggaaagctctgacaccatctacaacgtcaaagccaagatccaggacaaggaaggaatccccccggaccaacaacgtctcattttcgccggaaaacaacttgaggacggccgtacccttgctgactacaacattcagaatgagagtactcttcacctcgtcctccgtctccgtggtagcatgcagatcttcgttaagacactcaccggcaaga

SEQ ID NO: 60001 - DNA, 267 bp, Glycine max
ggattgaatggcgattaccatcatgacagtgataccgttgtgaacgccaatgacatgactcaaggtagcatcagtttcgcagaggtactgctgattcagatcgcgcaacgcatctgaaactactgagttcaacaatgcgattcgggcaagtagtaggtgttgactctactgaagtaaagctcttgcatatatattgatgtcggataggcgatattgctgacagatagctctgtgcagagtgacctgtacgtgcgttgctggtaggtc

SEQ ID NO: 60002 - DNA, 366 bp, Glycine max
ggaaactcgttctagtgtgtgattgtttgttgttgtaactcgttcttcttcttttgttgttctgtgtttgtgtttgttttttctctcacctgaaaatgtcttgctgcggtggtaactgtggttgcggaagctcctgcaagtgcggcaacggctgcggaggctgcaagatgtacccagacttgagctacactgagtcaaccaccaccgagaccttggtcatgggagtggcacctgttaaggctcaatttgagggtgctgaaatgggtgtgcccgctgagaacgatggctgcaaatgtggaccaaactgctcctgcaacccctgcacttgcaagtgaagtgttgggatagcaagcttcaagcagagat

SEQ ID NO: 60003 - DNA, 340 bp, Glycine max
ccgggccgacctacgatgttgaagccgtaggtacacatgcagggaaagtcatagatcttctaacgagttgccttgtttcatttcatgggttgtctctcgtttcatttcttgcggataatcatctgatattacgaagtttagtcaccttgcataaaactaccagatatgcaacagtgttttaacagatcacggccgttgagatcgattcttccaacaattgccaatgacttttagtgacatcggatatatacatgtatccagcttttaaacatcgttgatttagtgactacacgcaccatcttagtcagactttcacaaggtataccatgcattccatact

SEQ ID NO: 60004 - DNA, 255 bp, Glycine max
ggaagatccccgtgcgctcaattacattcggttccatgtgccgtcgttttctgtcgcgagcgcagtttcgcagtttctcagtcagcagcatggcaggagcagtatgtggagtgagaaatgcggtagtgcaggatttggaaaggggttctcgggctcagtatcctggaatgcacgagagccatgaactgacgttgtcgttcatcaggttagtggactccatagtcaccatcgagttgctcgtaaccattcgtcgtc

SEQ ID NO: 60005 - DNA, 251 bp, Glycine max
gaattttcctctttttctgtcctaaccatcatgcccggtaatggtttcccttggaactcgtaagattttcaaccacattcaataatggcacgtttaataatttccttttccggtaaaaaatcaattttggaaagttttaaactgaaaattaagaatgccaattaaagtcacatgaagtacatttgattaaattggaaatgttcaataagtattgggaatgaattgtccctcctggtggtcctctctgctgg

SEQ ID NO: 60006 - DNA, 357 bp, Glycine max
gagatctagctagaatcttgccgtcttctgctctctcgatagttcttttctcgcgcagaggataagcaacctttacctcataaccttgctgaatcgcatcaaatgaaaccctttttcaacgctcacagatgagtttctgccaccaaatcattgcgactctcctcaagtctagtcatcgcaactcaacaatgtctcagatccgtgatagagagactaaaagaatcaattggaaaaccctagttctatatatatatgatggaaaaaatgctttttgctggttttgaggcaatgcattaaattggattttggagatgcagggctgaagaagcattggaacgtagccaacctgtggattta

SEQ ID NO: 60007 - DNA, 317 bp, Glycine max
gatctatttgtgtatctgcaaaaaggaatcctacccttcattattttgttgtaccttaagcttggttcggacttgtggacagctccaatttgatcactccattacaaataagatatcaatccaatccaatccatctaaatggctctcacaattcacattatttcccctttcttctcaatcacgaccacctccaccgctgatctctccaaccgtcgaatctcctgcactgctgcctgtgattgacgcatcagctatgccgcactcgcatcagacttggcggcgaaggtcgccataatgatcacacatacggcgaatgc

SEQ ID NO: 60008 - DNA, 355 bp, Glycine max
ggagcaagagtgaagagcgaagagaatggctcccaagggtttaatctttttggctgtgttatgcttctcagcactgtcactgagtcgttgtcttgcggaggataatggacttgttatgaacttctacaaggaatcatgccctcaggctgaagacatcatcaaagaacaagtcaagcttctctacaagcgccacaagaacactgctttctcctggctcagaaacatcttccatgactgtgctgttcagagttgtgatgcttcactgttgctggactccacaagaaggagcttgtctgagaaggaaacagatagaagctttgggttgagaaatttcaggtacattgagaccatcaaa

SEQ ID NO: 60009 - DNA, 328 bp, Glycine max
gagagtggtggagtgtgcagacacagcgtcgcagtcgcaaccctattcagaagacccgcagcttcaagctagtgacagccatcagccatgggtcatatgcatagctgccgtaaaggtatatcctcgtctgcattgccccacatacggacacctcctaactagctcaagcatctcattcgcaaggatgtcaaaaatgaatatctgctagtttgcgaagaaatgtttgactccctctcaaattcgtctcattctcagacattcacacggtattgctcaggtcattatcgtcactggcatcataatccttcgcatcctcaaagctcaggta

SEQ ID NO: 60010 - DNA, 362 bp, Glycine max
ggaagctatgagtttgaaacatccctatctatgtctttaattatatgttcctgaaacatcactctctaggctttaactttgaacctagctagctactatccctttgtttccttaaattagtttatctatatatatacacactcctgtgacaaacaatagtgtcttactgtcttatattgtccccttttactgctattccctctctgtctcctttctgtttttctgtcttacataacaaatagatacaaacattgaaattgttgagttttttttttttttgcattttattatattgtttctcatgatgttgagaacaactgaaaaggtgtgctacactcctgattttaatgagaaaccaatca

SEQ ID NO: 60011 - DNA, 358 bp, Glycine max
ggttctagtgtgtgattgtttgttgttgtaactcgttcttcatcttttgttgttctgtgtttgtgtttgttttttctctcacctgaaaatgtcttgctgcggtggtaactgtggttgcggaagctcctgcaagtgcggcaacggctgccgaggctgcaagatgtacccagacttgagctacactgagtcaaccagcaacgagaccttggtcatgggagtggcacctgttaaggctcaatttgagggtgctgaaatgggtgtgcccgctgagaacgatggctgcaaatgtggaccaaactgctcctgcaaaccctggacttgcaagtgaggtgttgggagagcaagcttcaaacagaga

SEQ ID NO: 60012 - DNA, 367 bp, Glycine max
aggcgtcagctgcaaacagacggggcagtgaggagagtgtgagcatctaccacagaggtgcagatattatcatccatgtaccttgtttcacatgctgaacagtcattgcatacatatgggatatctgattacatcttcggaaatcagcttacagttgctgataagccctgaattctgcgtcaccgttacgatattgctgtacgtgcattctcaagattcatatcaatatcattgataagttcatcatctacatcactccgcacaagtctgatcccagttaagaaggccttagggaccacacgatgagatacaatctttcagttgacatccatgcaatctggccaacgaccaatcttttatccatttc

SEQ ID NO: 60013 - DNA, 292 bp, Glycine max
ggttctagtgtgtgattgtttgttgttgtaactcgttcttcttcttttgttgttctgtgtttgtgtttgttttttctctcacctgaaaatgtcttgctgcggtggtaactgtggttgcggaagctcctgcaagtgcggcaacggctgcagaggctgcaagatgtacgcagacttgagctacactgagtcagtcaccatcgagaccttggtcatgggagtggcacctgttaatgctcaatttgatggtgctgaaatgggtgtgcccgctgataatgatggctgcaaatgtgga

SEQ ID NO: 60014 - DNA, 89 bp, Glycine max
ggattgaagccatcgactgagtgagcgagccagctaaggttttcggtgttcccctctctgtgttcgttcgcgaacaatgggtccatccc

SEQ ID NO: 60015 - DNA, 331 bp, Glycine max
gggcgaaacgaactctctctccttggccaccgcgacgcgccatcacataacttcttctcattcttcattcactctttctttctcttcttctgtttgtttctctttcaatctcaaacacactctttctctctctctataaatcttctttttctatgtcaattttgtcaacaaaaaatcagcataaagggccacaaaatccgtttttcttatcttccaattaatagagtaactgattaagcgcttcctcttcaacaacaaaaaacatacaccagaaaggagttacattttcttctcttcttcgtctccttcaacttcaatttgggtcatcaaa

SEQ ID NO: 60016 - DNA, 370 bp, Glycine max
gaatgaagcaaagtgagaaaattccccttctctcccaaacatgggaacctttaacctgctcaaatactggaaaactgctgataatggcaaaatcggccctccctaaaacgaagggcctttcctccaatttgaatttggcaaaactcacagaaacactttaacttaacgccttctccctctaattttaacacacacatgttctccacagaaaaactcacatctaaacctcacatcacacatctcacaaattcacagtggatgaggtgcccacagtgtccctgtgcgccaaaacctctcagcacgggaaagttgctgaaactgccaaagtgaaatttggtcataagcacgggaaagttgctctgcctgcggg

SEQ ID NO: 60017 - DNA, 356 bp, Glycine max
  unsure (1)..(356): unsure at all n locations
ggcacaagtttgttgagatagctagaagcaataagatgaaaatgaaagtgcttgttttgtttgttgctacagttttggtagcatatgaatgccatggctcagactaccagaagttccctctccaaatgaaaactgggtttggtgggcaatacagcaatgaggtggcatgtgccagttggaggcttggcgtggaagcaaacaacgtagtcaagtggcaaactgttcctgcagcttgcggagagtacatagctgactacgttctangagaccaatatagatcagattccaaaacagttaaccaacaagcttatttctaagccaaatccctcaaactcaacaacaaaagatgtccttgg

SEQ ID NO: 60018 - DNA, 361 bp, Glycine max
gatttttctgctgtgaaaacccgagagtgttgggggaaaacaatgaaaatcttgtgaaaacagttgaaaaatgttgttttgggagaagacagacattacaatttgcaacggctacattgttgggtggttgtctctctctcttcctttttttcccttacacggcaaatccaaacccaacaacagctttcaaaagtgttaggtgtaaagaaagtaaagagagtgagagagtgagagagaaaaaaaagcaaaggcccacctgtgttaattttgcaatggaatcacaaagagaatatgagaaagaagaagaagcactagtgttgaaaacaacaaaagtggtggagtatttggtgccaaagatgtc

SEQ ID NO: 60019 - DNA, 361 bp, Glycine max
ggagtgagcaagagtgaagagcgaagagaatggctcccaagggtttaatctttttggctgtgttatgcttctcagcactgtcactgagtcgttgtcttgcggaggataatggacttgttatgaacttctacaaggaatcatgccctcaggctgaagacatcatcaaagaacaagtcaagcttctctacaagcgccacaagaacactgctttctcctggctcagaaacatcttccatgactgtgctgttcagagttgtgatgcttcactgttgctggactccacaagaaggagcttgtctgagaaggaaacagatagaagctttgggttgagaaatttcaggtacattgagaacatcaaaga

SEQ ID NO: 60020 - DNA, 346 bp, Glycine max
ggagtgagcaagagtgaagagcgaagagaatggctcccaagggtttaatctttttggctgtgttatgcttctcagcactgtcactgagtcgttgtcttgcggacgataatggacttgttatgaacttctacaaggaatcatgccctcaagctgaagacatcatcaaagaacaagtcaagcttctctacaagcgccacaagaacactgctttctcctggctcagaaacatcttccatgactgtgctgttcagagttgtgatgcttcactgttgctggactccacaagaacgagcttgtctgagaaggaaacagatagaagctttgggttgagaaatttcaggtacat

SEQ ID NO: 60021 - DNA, 354 bp, Glycine max
ggcacaagtttgttgagatagctagaagcaataagatgaaaatgaaagtgcttgttttgtttgttgctacagttttggtagcatatgaatgccatggctcagactaccagaagttccctctccaaatgaaaactgggtttggtgggcaatacagcaatgaggtggcatgtgccagttggaggcttggcgtggaagcaaacaacgtagtcaagtggcaaactgttcctgcagcttgcggagagtacatagctgactacgttctaggagaccaatatagatcagattccaaaacagttaaccaacaagcttatttctatgctaaatccctcaaactcgccaacaaagatgtctttg

SEQ ID NO: 60022 - DNA, 382 bp, Glycine max
ggcacaagtttgttgagatagctagaagcaataagatgaaaatgaaagtgcttgttttgtttgttgctacagttttggtagcatatgaatgccatggctcagactaccagaagttccctctccaaatgaaaactgggtttggtgggcaatacagcaatgaggtggcatgtgccagttggaggcttggcgtggaagcaaacaacgtagtcaagtggcaaactgttcctgcagcttgcggagagtacatagctgactacgttctaggagaccaatatagattagattccaaaacagttaaccaacaagcttatttctatgctaaatccctcaaactcaccaacaaagatgtctttgtcttggacgttgacgacactactctctc

SEQ ID NO: 60023 - DNA, 275 bp, Glycine max
gacatcgatatctgcgttctttttccagcttatgcgtgacggcacacacacattttacactcttttcatcggctcgctgttgcttcgctgtagtctcatggatgaatcagtcgaattcagcgttctggattcaatgggaatcacgttcatcggggtgaattatcaaggcggtgtcgctaacgcgtgagattctctgaacatgcattgagtgtatattcgcaaccgaacatcggacaagatcagtcatctcaatgagaatatatatatgtatcgct

SEQ ID NO: 60024 - DNA, 386 bp, Glycine max
ggcacaagtttgttgagatagctagaagcaataagatgaaaatgaaagtgcttgttttgtttgttgctacagttttggtagcatatgaatgccatggctcagactaccagaagttccctctccaaatgaaaactgggtttggtgggcaatacagcaatgaggtggcatgtgccagttggaggcttggcgtggaagcaaacaacgtagtcaagtggcaaactgttcctgcagcttgcggagagtacatagctgactacgttctaagagaccaatatagatcagattccaaaacagttaaccaacaagcttatttctatgctaaatccctcaaactcaccaacaaagatgtctttgccttggacgttgacgacactactctctctaat

SEQ ID NO: 60025 - DNA, 283 bp, Glycine max
caggggcacaagtttgttgagataactagaatcattaagataaacctgaatgtgcttgttctgtttgttgctccagttttggtgacatatgtatgctacggctcagactaccatccgttccctctccatatcactactgggtttggtgggcattacagcactcacgtggcatgtgtcatttcgaggcttggcgtgctccattcaacgtcctcgcctggctgcccgttcttgcaccctccgcacagtacttcactcactacgttctacgataccaatatctcat

SEQ ID NO: 60026 - DNA, 386 bp, Glycine max
ggttctagtgtgtgattgtttgttgttgtaactcgttcttcttcttttgttgttctgtgtttgtgtttgttttttctctcacctgaaaatgtcttgctgcggtggtaactgtggttgcggaagctcctgcaagtgcggcaacggctgcggaggctgcaagatgtacccagacttgagctacactgagtcaaccaccaccgagaccttggtcatgggagtggcacctgttaaggctcaatttgagggtgctgaaatgggtgtgcccgctgagaacgatggctgcaaatgtggaccaaactgctcctgcaacccctgcacttgcaagtgaagtgttgggagagcaagcttcaagcagagatagcccttaattaagaataatgaataac

SEQ ID NO: 60027 - DNA, 173 bp, Glycine max
catctgggctcacttggatcctttatcgctcagttgctatgatatctagttccacgttgtcgcagtaacgtctaccgtccctcatcgttgacctagggtcctcggggggtctttcgactcattgcaattatctcagtgccctgcttccgcttttccactaacctttctccttt

SEQ ID NO: 60028 - DNA, 363 bp, Glycine max
gatactacacacagacacacagaggatcatatacacatacaacttcacaacatccacacagtccaacatggcttaattgatctctcttcaaactccttgcattctttctatcgttacaacaatgactttcgaagagaagacaatttagcataccgctttacacctcagttcccagctacacccttcaagagtgtgtcgtggggctatgcttcaaattgatcagcatcctccttcatcatccgtatgtgtacatacactacaatcgaagtcccaccatagccttcaagggtctctcatgaagcttccatgccttcagagcatgcataatcgtcgcattctcaggtgcgaccaatgcacttgtgg

SEQ ID NO: 60029 - DNA, 369 bp, Glycine max
ggttctagtgtgtgattgtttgttgttgtaactcgttcttcttcttttgttgttctgtgtttgtgtttgttttttctctcacctgaaaatgtcttgctgcggtggtaactgtggttgcggaagctcctgcaagtgcggcaacggctgcggaggctgcaagatgtacccagacttgagctacactgagtcagccaccaccgagaccttggtcatgggagtggcacctgttaaggctcaatttgagggtgctgaaatgggtgtgcccgctgagaacgatggctgcaaatgtggaccaaactgctcctgcaacccctgcacttgcaagtgaagtgttgggagagcaagcttcaagcagagatagcccttaat

SEQ ID NO: 60030 - DNA, 381 bp, Glycine max
gatcgcttcggctgccattgaaagaaactgttgaatcgcgtcgattaaggtgattttcgtttcgtgctttcacttttgaactcctttcaattttcctttggtttttcgtaaatcaagtttgctttttacttcctttcgaacccgaaatttgtcattttcaaaacgaagtggtccttgtttatatgaatttcgagaggaactaggttgctatgaaacaaacatggtttggtcttgatgacgaaattgagtgacctcttattagtatgaattgaactgtggagctgatagtattaatttcagtttcctttctgagggtattgtttcatgctctaattcccttttgtttgatttgatgcatctcaatttcttttgcaggttttg

SEQ ID NO: 60031 - DNA, 344 bp, Glycine max
agaaaattgatgttgttttttgacttaaagtaaaacccgaaagcctttcctgtttgtgctcagtctcgcaaagacactctacgcactcatcctcgcagcctttcctatgctcctcctaccctgtgtccagcaaatacgcgaactgattctgctatgatgctcactctcatcgtcgtgtccaccttctcgtaaacccagtttgctgtgatgctttgccaagtccagggtacacactcatttgctgtacaacatctacagagttttggtgcgctaacaaggaactatacagtttggttaatgaagaatcgcgcttagcgcgacaaaccaagcttagtggacatgat

SEQ ID NO: 60032 - DNA, 273 bp, Glycine max
aggtgtcagaacaagactcaacggagacttctgtacagctgtgatattattatatgacggggtagtaatcttatcttatctctctgattcactccacactgcttgcaaatttcatactatttttcacatggcctcagcacatcttaagttccgttgctttggtggcgagcatgcttggatcacagtcagcgatgaccttcatacacacttttcaatctaccgtcacatcgttgaattttgcgttaacacctagcgttatacatggtagtcaac

SEQ ID NO: 60033 - DNA, 282 bp, Glycine max
  unsure (1)..(282): unsure at all n locations
aaaaaaagttgttgctgatcatgaagaaggtggtgatgatgattactctagcgattaacattttttcctgtanttggtgtgttgctttccttgganggggtaagcctttccaactttcctttgggttcaattttaaaaatttgcccaaaaaaaagaattacggatttggtaataaatacctaaattaagcctgttgtaagcttttcttggtcccaataaataaatgggtttaacacggattaagtgtatcaaagtgaatttaagttttttttttggaatttt

SEQ ID NO: 60034 - DNA, 338 bp, Glycine max
gttgcagttcatgaatcagtcgcagtatgatatttacatctgcgattagctatcttgtcgtgtctttgctgtgtagctttcgttcgcgggggtatgcgtttctgtcttgcatttggatgcactttcacgtgtctgtctcggaacggttgtggtggttcagattgtactgactgcttttatccatgttttaagcttttcttgctccgagaatgtagtccagttttataatgtattgtgtctttcacagtgattctatgtaattattttgtcttgtgaatccaatgctctgtatacgatgtacaaacacatgcctatgcacctttgtgtgataatataac

SEQ ID NO: 60035 - DNA, 263 bp, Glycine max
gatgcatcatacaggcaaaaacttgtgcgtcttcacttcttccattctcctgcaccgacaactcaattaccatcacagatggtggcataagcgacatggggaagcttgatctactggtgccaatcagtgcaaatggacgtgtccctgactctcccaggctcacctctcctcagccctctctgtcacatccaattcgttggaatcagggacacgccaatcgtctccgtagtatacgacgccgattcagcactcttcgatgtcgt

SEQ ID NO: 60036 - DNA, 244 bp, Glycine max
acgcgtcagtccagctgcaaaagaccaccgaaggggctacgtgctgatcattcttcttcatctcatgatgaagccagtgcttttcctttaagtccttgataattgcgtacttgtgtgaatttcactcgaagccagactgatgttcatcgtaagtttcaaggttgagagtctttacatgtcatacacaaggactcgacagcagtccctgtacaactagggaaccactcgacttgttcacgagagg

SEQ ID NO: 60037 - DNA, 298 bp, Glycine max
tcaacggggacattgatacgggtgtgaaaatactcttctgaggcattaacgcgaggagctctgttgttgctcaagtgatcccatcaggatttccatggattcgcaaaccccaaaaccacgttctcaccctccttcggcagcgggcaatctcatcatcgcaatgttcaaaacgtcccaaacatatatcccgacatcactcccatgttcatcgacaagtcttgctcttcgccgaaacaagatttcaacaacaaggtcacgaatctcaaagacgagctcattagaaattcctgcgactctg

SEQ ID NO: 60038 - DNA, 81 bp, Glycine max
gaaacacgacaggaggggaacgcaattgccacatcgatttcttcatggatttcaccttgagcacaaggctttacgtttcac

SEQ ID NO: 60039 - DNA, 336 bp, Glycine max
gaaagtgcttgttttgtttgttgctacagttttggtagcatatgaatgccatggctcagactaccagaagttccctctccaaatgaaaactgggtttggtgggcaatacagcaatgaggtggcatgtgccagttggaggcttggcgtggaagcaaacaacgtagtcaagtggcaaactgttcctgcagcttgcggagagtacatagctgactacgttctaggagaccaatatagatcagattccaaaacagttaaccaacaagcttatttctatgctaaatcgctcaaactcaccaacaaagatgtctttgtcttggacgttgacgacactactct

SEQ ID NO: 60040 - DNA, 328 bp, Glycine max
gaaagtgcttgttttgtttgttgctacagttttggtagcatatgaatgccatggctcagactaccagaagttccctctcgaaatgaaaactgggtttggtgggcaatacagcaatgacgtggcatgtgccagttggaggcttggcgtggaagcaaacaacgtagtcaagtggcaaactgttcctgcagcttgcggagagtacatagctgactacgttctatgagaccaatatagatcagattccaaaacagttaaccaacaagcttatttctatgctaaatccctcaaactcaccaacaaagatgtctttggcttggaccttgacgac

SEQ ID NO: 60041 - DNA, 382 bp, Glycine max
ggcacaagtttgttgagatagctagaagcaataagatgaaaatgaaagtgcttgttttgtttgttgctacagttttggtagcatatgaatgccatggctcagactaccagaagttccctctccaaatgaaaactgggtttggtgggcaatacagcaatgaggtggcatgtgccagttggaggcttggcgtggaagcaaacaacgtagtcgagtggcaaactgttcctgcagcttgcggagagtacatagctgactacgttctaggagaccaatatagatcagattccaaaacagttaaccaacaagcttaattctatgctaaaatcctcaaactcaacaagcaaaaatgtctttgtcttggacgttgacgacactactctct

SEQ ID NO: 60042 - DNA, 264 bp, Glycine max
ttggggcagcttggtagttgcattgaaatggaggtggtacgtatgttggagttagtcgctagagttttgcgcatcacaccaatgtcacggcccataccagcagatgttccggcatcagaatgaaaactcggttaggttggcaatacaccaatgatgtggcatgtgacagttctcggcatggcatggaagcaaacgacgtattccaatgtcacgctgttcctacaccttactgccattagatacctcatcacattctatgacatc

SEQ ID NO: 60043 - DNA, 277 bp, Glycine max
ggaaagactctgaaccagtgcaatctccagtatgactccacgcttcatggacttcttaggcctcgcagtttcatgaaatagccctgtggcatagacatggctagtaatcacagagtgggtaaaataatttgccgcaaatgtgctccacgtcaggatcttatagcctttcatcgccgcctggcttggtcaggtcttacacagtaatggaggcctcaagacatgattcagtaacttctgtgtgatggtgttggtcacagtcttcgtgttggtcaatgtt

SEQ ID NO: 60044 - DNA, 325 bp, Glycine max
tggggtagttccaccgattaccaacattgtccattcgacgtcattgacgatacgccgtaaacaagttccccatgtccctcggtctgcaggttgctgcgacggtgaaacgtcccgttgctaccggcgcgaaaaatcggaacatcattgcagctgaaagcgatacattggtcgacttaacggttgctgtctgctacattccgataactcttacagtggaagtataaatgggaacgctcaatctgtgtatgatggtattgctcaccactttcatttgctttctcatacctttgagccaaaatgaccgtgtagtcttcggtttcaaaca

SEQ ID NO: 60045 - DNA, 314 bp, Glycine max
ggttctagtgtgtgattgtttgttgttgtaactcgttcttcttcttttgttgttctgtgtttgtgtttgttttttctctcacctgaaaatgtcttgctgcggtggtaactgtggttgcggaagctcctgcaagtgcggcaacggctgcggaggctgcaagatgtacccagacttgagctacactgagtcaaccaccaccgagaccttggtcatgggagtggcacctgttaaggctcaatttgagggtgctgaaatgggtgtgcccgctgagaacgatggctgcaaatgtggaccaaactgctcctgcaacccct

SEQ ID NO: 60046 - DNA, 295 bp, Glycine max
cggggaaacagagagtgatttcagtgagtgatcggtgttcacctgatcccagcataaccgtcagcgttgatcgaagaccatggcgatgatgaagatcgccgtcgggaaagcctgaacacgggacgcaagccttaggcgttaaatgtcgccttggctgagtctacctcatccctcatccgtctgttcgtcggctaaagatcaggtctcacctgatcgtcactttttccaaggcgtactgccagtcctgctggggagaactaggtgtctactgcgcattgaatcacgttccacatgt

SEQ ID NO: 60047 - DNA, 221 bp, Glycine max
gggatgggatgtcattgatgactgctgtggtgcctacctccttattcaactgtgcgctcgctcttgtccctttcactgtcacaagtggccggggccgctgccggtgttcatgttcctgacctgcaaatcttatgctcttcatgcatcctcagacttttatggagtggctaccatgtctagtcctccaatcattcatcctcgtcttcgtccacttccttctc

SEQ ID NO: 60048 - DNA, 278 bp, Glycine max
gacagaaaccatgacgacggtggtgcccacctccgaagaaaacgctgcgctctctgttgtccgattcgcctctgagatcgcctgggccgatgccagtctcgaggttgctgagcctcaaattattagactctgcatggaggctgaagaatttttcgttatgggaaaaaggtttgtactagcatcattgatgattaccacctctgcagaattggtttccacagttgtttctgaaacttataaatcctccatcttcaccatcatctgcattcttgtgacaa

SEQ ID NO: 60049 - DNA, 201 bp, Glycine max
aaaaggggtaaggaaaaccctaaaaaacaattccaaaaacgccgtttaccgggttggtgccaaccctcaaccaaattgaatgggtccccaagggtggctaaccccaacaaatccgaaaccttctgtttctgttactgggtttaaatacccttccgcttctgctgctgccacgtctcttgcccaagacgctcagaacaaagg

SEQ ID NO: 60050 - DNA, 310 bp, Glycine max
ggcacaagggggagacagagaggggttccacccagttcatgtatgctattgtcattcgttcatcttacccctgcgtcgttcctctcgaactcgatttttcttccaaaagaacatgacgtgggaatgggaagactatgaatacagcatcaccggcacctaacgcgaacgcgactccggctccgattcctacctcaatttcgatttcatcgacgcactctccagagacaacgattactaggaaatactggaagtggatgacgactctacgggtgacgctattcgtgtcaattacgttagccacgcgctgaag

SEQ ID NO: 60051 - DNA, 358 bp, Glycine max
  unsure (1)..(358): unsure at all n locations
ggtctcgcggcactgatgttcaagtacaaaaaacatgacatcatctcactctcgcaatacagttaacactatcgtctcccccgctgcttccgttctccttctcgcaaggaatcgatctgcttttgctcaatacgacgactgcatcaagagatgtacttgttgcacacgtcgacatgcacagttgcaactttcacgctgctgttatcatgggcctagatgctcatgttctggatcatgctgcagatgctaaggtgccaganatgactagtcccagatccacagatcctatggcaaataaggctaaagttaataatgttaagaaagtcaacgatcctaacatgcctaagcgtcctcccac

SEQ ID NO: 60052 - DNA, 329 bp, Glycine max
gagcacaaacgttaaccaccgattccatttactgctgctacaactgcccaaaagttagcttccgcaaattccacactttcgattcagattctctctctcaaacctgctttcacaaacactcatgtggaaagggtgaggagcacaagaaacccttcatatggaaaaactctgaaattagggttttggtttcccccatagggagataatgaccgtagaaataatgaaagagggacgggatgatgaaacagctgttgggtaggcccgggacgattagcgggttcctgttgatgttcagccaatgcaccttcggtgccgcttcgattgccatt

SEQ ID NO: 60053 - DNA, 318 bp, Glycine max
ggttctagtgtgtgattgtttgttgttgtaactcgttcttcttcttttgttgttctgtgtttgtgtttgttttttctctcacctgaaaatgtcttgctgcggtggtaactgtggttgcggaagctcctgcaagtgcggcaacggctgcggaggctgcaagatgtacccagacttgagctacactgagtcaaccaccaccgagaccttggtcatgggagtggcacctgttaaggctcaatttgagggtgctgaaatgggtgtgcccgctgagaacgatggctgcaaatgtggaccaaactgctccctgcaaccctgcac

SEQ ID NO: 60054 - DNA, 237 bp, Glycine max
acgacagaacgggaacacatacgactcatatattgcatctgctaactctctctctctgcgctctccactgaatcgagtctgaaataggagaagaggtaggaactccaatcgctgcacgtgtggctgcaacgtaccgatccagaaggctatttagcagtggttcttggataatacttatccaggaggacttagctgcatagaatgctttatttattaatgctgagcattataatttgg

SEQ ID NO: 60055 - DNA, 210 bp, Glycine max
acggaagggggggagaccgccgcattttggcagctacagagaggaatgagctcgactcgtctaaattgaccttggatcatcgtctttggggccgtctccaatacgtttttcgttggtcatcttaaggcttcttccagcatgaacagcccggccatggttgcttacgagctcaacgcttcgcacaataacgtttcccacttcgtgcttttt

SEQ ID NO: 60056 - DNA, 303 bp, Glycine max
gggtgaaaggatgtgcaagattaaaccattctcctgccatgaattgttgtttcctgagacgatttgggcgttttggaactgtgtggactgcggcgtttggttccactctgtcgtgctctaatgacagtgctctttttagagcttcggttgcatcttcggtccctgagccattgcataaatcactatggttgacctgtcctgtgttgcgtgatgtgtctccgcaatcctcaccttttctcgactaattcggaatgcgtccgctctaatcttaaacagtcagtctcgttacaacatcgtgtgtat

SEQ ID NO: 60057 - DNA, 115 bp, Glycine max
cgcgtcagcccaagcttcgttacggttgcaaaaaaacaacagaaggggggaattgaacggcaatcacaacttcaaaaacgttccaattggcaacttttccccatttgggttaaac

SEQ ID NO: 60058 - DNA, 334 bp, Glycine max
gatatagaatcaatgttatacgcctcatgttatgttatggcactccctaacagagctaaatattcttccttggtttcattttttttcctttctctttctgcaactgcaacttgaataggcaggctattttaaccagcatggacaggctcacgctgagaccagacaattcctgcttcttttcacacattcaaagagcttactcacacaccccttttaccagaactacctcgtttcaacgttttcactttcatctctcaccatccaaccacaccctcaggctcagaatagtttctagctctcagcaaaatgccaaagaaacccatacagtgtccat

SEQ ID NO: 60059 - DNA, 278 bp, Glycine max
gaagtagactgctgacatagacggatggacgtacgccacgtcagtccttacgtgccgttgggcactctttcatatgcgcgttcataggcatggtcccaacactttctcacggccatgctttcaggccaattactaatagcatctctaccgttccacagtcagcagtcggtgatgtgcgcttctctatccaactaacggccgtctcagttgaccagctgtcgtagtctcagccgattcatctcgttacatatgtataactggttgagctccgtgtatgg

SEQ ID NO: 60060 - DNA, 329 bp, Glycine max
ggccaactcggttgctatcatcgagtgagattgagtgattggttctcttgcagcatcaaggtttagtgacaccattcagacgggaaatgggtcgtggggtcaatgctggtggtggacatagttccttggattatctctttggcagtggggtacctgccatcagtgcaaatagtgctcgcactcaaaatgcaagtgctccttcaccaccggttgataagcaaagtcgagcaccatcaccagcaccagcacctgcatctgcagcagcagcatcactaccacctgcagcatcaccaacaccagtaccagctgataagcaaattccagctgga

SEQ ID NO: 60061 - DNA, 387 bp, Glycine max
gcacaagtttgttgagatagctagaagcaataagatgaaaatgaaagtgcttgttttgtttgttgctacagttttggtagcatatgaatgccatggctcagactaccagaagttccctctccaaatgaaaactgggtttggtgggcaatacagcaatgaggtggcatgtgccagttggaggcttggcgtggaagcaaacaacgtagtcaagtggcaaactgttcctgcagcttgcggagagtacatagctgactacgttctaggagaccaatatagattagattccaaaacagttaaccaacaagcttatttctatgctaaatccctcaaactcaccaacaaagatgtctttgtcctggacgttgacgacgctactctctctaaact

SEQ ID NO: 60062 - DNA, 127 bp, Glycine max
  unsure (1)..(127): unsure at all n locations
gacttgtcattgtcaatatcagtattatgccttgtcacaantctataactgatcaatttacttcaagtgctaccttcaaaaggccgatggcttaagaggtcactcaccatttaaccctcagactttt

SEQ ID NO: 60063 - DNA, 217 bp, Glycine max
gcagacactcatgagatagatgacagaactctagacagagcatcaccaagatcagcatacgtgagcccttgtccagtttttggcgggaggggttcttcacttcttgaggatcgcatcggcttcttttacatttgttttggataaaacattttgctgatagtgaatttttactttctcttgttttcctctcttttcgacattttcttcctcttcttct

SEQ ID NO: 60064 - DNA, 382 bp, Glycine max
ggttcaatggtagttaatggtggtaacccttccttcttcgtcgtaaccttcttcttttgttgtttgtgtgtttgttttttctctcacctgaaaatgtcttgctgcggtggtaactgtggttgcggaagcgcctgcaagtgcggcaacggctgcggaggctgcaagatgtacccagacttgagctacaccgagtcaaccaccaccgagaccttggtcatgggagtggcaccagttaaggctcaattcgagagtgctgaaatgggtgttccgctgagaacgatggctgcaaatgtggagctaactgcacctgcaaaccctgcacttgcaagtgaggtgttggagagctaaagcttcaagcagaaatggcccttagaaataatga

SEQ ID NO: 60065 - DNA, 102 bp, Glycine max
gcctccgaaaaccctaacagcacaggcgcagacgcaaacgcaaacgcaaacgcaaacgcaaacgcagagcgtgatccattgacgaagatggtgcaccgtctc

SEQ ID NO: 60066 - DNA, 307 bp, Glycine max
ggcaaccaagggcattgcccttacggatgtgggcaacgaaataatttggagaccacgcatctcgagtgaaggacttgttgcagaagtcgttcagagatgttagagggcaccaaccgtttacgaatgccagtcgtcaccttcagtcactcagcaactggatgagatatctgatggtcgagaacggagtgacctacatacaacaggatgaccgtagagtcgatgtcgctccttagcaatgaacagtagagacaatgtcatcactagttcacagtctactgctcagagctcgttgacgattgtagatcag

SEQ ID NO: 60067 - DNA, 430 bp, Glycine max
accacgcgtccatacaggctgccaaaaaaacaacaaaaggggggattggcagcacaaaaaggtttgtttccctccccaaaaaattgccgcacctttcgtttttttttcgtgatgttagtcggtataagctggtgacggagaattagagagattatccaatccagtatccattgatcccgagatctagcttcactctgcgaaacgatcaccgtgtcatctccatctatctatcgctttcaaatctgtaagttttttttatttttcgtttcgcaagatctacagagtcatcttcgcaataaacaatcattctttctgatctgccaaacaatgtctcacagataggataataataattattcttccttacccattagctcgtagctagaattgcagccgcaaaatgatgcctcaaaatccttacaaatgccca

SEQ ID NO: 60068 - DNA, 375 bp, Glycine max
acccacgcaaacagccacgcgaccgtgacggagcgggggaatggcagcacaaagaggtttgtttccctccccaaaaaattggcgcacctttcgtttttttttcgtgatgttagtcggtagaagctggtgacggagaattagagagattatccaatccagtatccattgattccgagatctagcttcactctgcgaaacgatcaccgtgtcatctcgatctatctatcgccttcaaatctgtaacttttttttttttttcgtttcgcaagatctacagagtcatcttcccaacaaacaatcatgcgttctgatttgccaaacaatgtctcacagaaacgattataataattagtcgtccttacccattagctcgta

SEQ ID NO: 60069 - DNA, 323 bp, Glycine max
  unsure (1)..(323): unsure at all n locations
ggaatgtagtcaaatcacaaacaacccaccaattataagttgccgtttcccctctcacttgctcgccgaattggaagaaaccttcggtcgtgtcctgcggcattgaaccctgaacacatgactcaaagcaagagacaatccagatccatggaaccattacagagatgagaagacaatctcctccgttatagttcctcagangatgangaagaggaagagatagagaagggctggctgatgtaacatttgaggagttgcagaaagctcgctcgaatgggacacatgcatttttccagaaacccaaagaagacaaaaaatttaaa

SEQ ID NO: 60070 - DNA, 239 bp, Glycine max
agggggttccaaattaccaaaagaagaaaccagggaaggttcctcccgaaggttttggcctaaatggccccaaaattttttccatccaagggccaaaacggcctttgaagcctttcaaaaaggggaacaaggtttttgaaaataaattccctttccttggatccaaggacaacaaccctgtggcctttcggaaaccccttgtccttggaaattggaaaaatcccatgcaaaaagggctt

SEQ ID NO: 60071 - DNA, 342 bp, Glycine max
cccgggccgaccaacccttccataaggctccaaaaaaacaccaaaaggggaacccaaataatcccaattgcaattattaattggccttgcttctaaggatgccaaaaaaattggtggaaaaaattttaaggttgtaccaaaaaaagggtttccaaaatcaccatctcggaacaaaagatagcaagctgatattactgactccaaggatggagcaacaagcaagatgcagaaacacgacagccacgcatcccgatccattctagatctaaatatgcctgtagacgatggtgaagagggtgtcaatgacaatgaccatgagagtgactccatgtcataaaacac

SEQ ID NO: 60072 - DNA, 320 bp, Glycine max
gatgtcactggagagtgatcactaggatactaagttatttactactatgttctgtcgtaatcctttcaagtcacaagcgttaaaagagggtgtaagtgtcacttttcaattcctcaacctcacgattgtaataaagctaactcataggattgaggactgactagtagaaacagaagccagagcttttattttcttcttcgtcatcttctttcgagcgccatgtcggggagccatcaagagcagcgactgttatagaacgcgtccatagaagacgacgagccgcaggaaacagcttatgattcgtctgataagatagtggt

SEQ ID NO: 60073 - DNA, 305 bp, Glycine max
ggtcaatggtgggagtggttactcgtgcaactccttctgctgctctgggtgtgcggtggttgtgtctctcatctcacacagtcgaacagctcttgcaactgtggtaactgtagctcctgcaactcctgcaactgctgcaacggctgcagaagctacaaaaagttgacatacactgactcaactagaatcgacaccatggacatcgtagtcataccagttaaagctgaaattgctcatgttgaaattgctgaaatcgctgataacgatgacaacaaatgttgcacaaattgctcatgcagctcctg

SEQ ID NO: 60074 - DNA, 333 bp, Glycine max
gagcacttgtttgtgttaggtactctaaatcttgagttgagcctgcgcaaaaaccctaaaccctgtgaatgaagaagacgatgaacagtggcgaagaaaatgggggcaagctcaagttcaagggcgcggagaggtcagcttacttcgcacgcagagaggcagcgaaggttttgaaagtgattctcgaaggagacgccaaacgccgcgctctagcctcgagcatagcgctcattcatcaaccttccgttagacataagaaggccatattcgctctcacttgtcaaatcctaacatatcttcccattatctacgatgtcttggaagctgcctcta

SEQ ID NO: 60075 - DNA, 300 bp, Glycine max
ggtgagacgatggtaaggtcgcgttgtgttgcgtcgtgtcgtgcgctgttcctctgtccgtcgttatagtttaaacatcacacacgagctacgtatcgcacacattgtatagcaagcaaggtggaaaatgtaaccgtttgaagacgatcaagtctgataatcaacgatatctaccacgttgagatagcgaagattcagaagataaacgaagaggagaaggcgctaaaggagttgaaagccaaaggttatcagaacggaaactttggacgttcagggctcataagaagtggagggaaataa

SEQ ID NO: 60076 - DNA, 338 bp, Glycine max
gatgagacgatgtgccagttgcgatttgaatcctcagtttctttcttcaacgtctcgatcatagacagatcccaatcatctcgcaagagctaagttcccctcatttctatagccagagaagtagccactgtcgccgttggaccagctcccgtacctgcctcacgcggatccacccacgttgagataacgaagagaccagaactgaagcgaagaggaaaaggcaccaaagagacttaacctaaaaaggtttccagaccgtcacaatctcacgttcagcgttcctacgaagtgatggttaatgatgcaactacctcactaaaggagaaaaccggttcgag

SEQ ID NO: 60077 - DNA, 169 bp, Glycine max
gaatctagtggacgagtgaataagagatatcaatatattatgatactggagggatacaatacgacggttatgattgtggggatggtgttcggcatggccatgagtgggatggccagtgctcaatcctccttttgtcgcatgcccatcgatgggttggctgcctgtacgc

SEQ ID NO: 60078 - DNA, 387 bp, Glycine max
  unsure (1)..(387): unsure at all n locations
ggcacaagtttgttgagatagctagaagcaataagatgaaaatgaaagtgcttgttttgtttgttgctacagttttggtagcatatgaatgccatggctcagactaccagaagttccctctccaaatgaaaactgggtttggtgggcaatacagcaatgaggtggcatgtgccagttggaggcttggcgtggaagcaaacaacgtagtcaagtggcaaactgttcctgcagcttgcggagagtacatagctgactacgttctangagaccaatatagatcagattccaaaacagttaaccaacaagcttatttctatgctaaatccctcaaactcaccaacaaagatgtctttgtcttggacgttgacgacactactctctctaatc

SEQ ID NO: 60079 - DNA, 169 bp, Glycine max
ttctactacatgcttcagtgttcatctcggacaaggtttgttagatctctatgttaatcctttggttccggttcagcgggtcgcagctgcgccactgtcggattcaaccgcttctgcctggaatctttcttccaatagctttaattgcttcatgtcacaatccatacac

SEQ ID NO: 60080 - DNA, 141 bp, Glycine max
aggcgtcagaagaaccctcagggggactgacacacacagatattctggcggaacaatcgtccctctcttcacttcattcccatttaccacttcacttctacagcatcagattactcctcatccgtcatccgatccatccat

SEQ ID NO: 60081 - DNA, 56 bp, Glycine max
gacggggtgcctcacgtcgccctttgcagaaaccctaacacctagacgccagagga

SEQ ID NO: 60082 - DNA, 70 bp, Glycine max
ggtccttgagcggatgatagcgagaatgtgtttacttgcagttccatcttcgcgcccctgtgaagtcacc

SEQ ID NO: 60083 - DNA, 224 bp, Glycine max
agggacagcgaaacagagagtgatttcagtgggtgatcggtgttcacttgatctcatcataatcgtcagcgtcaattgaagaagatgccgatcagaaacatcgccgtcggaaggcctgaagaggcgactcaccccgacacgttgaaggcggctttggctgagttcatctcaaccttcatcttcgtgttcgccggctcaggctccggcatcgcctacaacaagct

SEQ ID NO: 60084 - DNA, 161 bp, Glycine max
ggaagaagcagagggaatagcagcattaagaatgcagatcttcgtgaaaactctgacaaggaagactagtaagcctcggagtcgagagcagcgaaggatcgacgatagtcaagagcgagggttcaagagaaggaggggagtcgggccgggtgagcagcgtg

SEQ ID NO: 60085 - DNA, 202 bp, Glycine max
ggcccataaccttttcgggtgattgttcttcttcgctcagccacgcacacgttacgctcaaggcatgaatgcgttcaaggcatataacgcctgtgtgccaattgcttggaaccccaatatcgagatagctctacttaggggtattccggggaccagaacgcgccagaggcgcactttggaagcagttcgcttgcgcaaatgc

SEQ ID NO: 60086 - DNA, 84 bp, Glycine max
aggaggtgagattgggagtggcagtgaggcgggcgcccgtgagttccactgtgaggtttggatcctgtggcgagtccatcgcgt

SEQ ID NO: 60087 - DNA, 88 bp, Glycine max
agagaagagaaaaaggaggccctagctggagaggtcaaacatcatcaggtcggacgaagagcaccagttcaagtcgaaggcagacgcc

SEQ ID NO: 60088 - DNA, 106 bp, Glycine max
gatgcctttagtttcttcgagccgaaacaggaaaatttgaagatatgttccttttttgttacgacggttgttgtttccaacggtagagcggtagatgatgggaacg

SEQ ID NO: 60089 - DNA, 182 bp, Glycine max
taatgggtctttgactaattctgttgacggtttggcgcacttcgttgggattgccgagcatgatgaaatcactgggatcggtgaaaagactcggcaactcgtcagggaagggggttgcctgccttttctggtgcattcagatctgcagatgtcagccatgtgtgtgacacctgactggctcg

SEQ ID NO: 60090 - DNA, 284 bp, Glycine max
gatcgagagaaagtgagagagaattacagaccattttccaagacgattacacgaccgaatcaaagccctctttctctccgaagctgcgtttaagatcgtagtaggcttcgattgttctcctctttaagacatactgttctctcgtcgatgtgagggaagagtcgaagactctgagcagcggttaagccaactgcacaggtagtctccaaatagtggagcgtcatgatgacactggatgcgagggtcctgaagggcgccattctttgcattaagaagtgtggctt

SEQ ID NO: 60091 - DNA, 58 bp, Glycine max
taaaggggggttcagaagaatggctccatcgtggcattccacactccagtaaggtccc

SEQ ID NO: 60092 - DNA, 139 bp, Glycine max
ggcagagcagagagggaagaggaagaaagtcttaagttgtttcttgttttctctgtcgtttcgttcccttaatctttgatctctggagttacaagttagaagagaagaaatagacaagagatataaagatgtggaagaa

SEQ ID NO: 60093 - DNA, 187 bp, Glycine max
gctagaagcccagttcaaaggtaaggtaggttaacactcgtcgtcatcgtcgtcgcagtgggacgtgtgatccggtgcgcacgataagggagcaggctcggtcgtcaaatcggagacgcagcagcggaagggccctgcaggcgtcaggagcctggaggtgcgggagcgcaaggggtacctcaagggc

SEQ ID NO: 60094 - DNA, 330 bp, Glycine max
gatccagaggggttcccacaaatcagtcaaaagtttaactttcataggctgtttggtttttatttttgttgttcagtcgaatgtcactcaagagtcacaactcacagcaatgtataagtagaacttattttaagcctgccaagtgatttgggcttcagctacttatatgtcagttctagtagcctcctctctttatgtgtcaagaagaattgttatcctgttattgtagagcatccttgaaaagttgtacagagttttgctgatgagttaagaatcaggttggtgcaggttagtacttttagtaaaacttgcgaggaacaaattgatagt

SEQ ID NO: 60095 - DNA, 368 bp, Glycine max
gatgaaggaaggaggtgaatgaaagacttttgtgacaggtagcagctcagctaaatgcaatggttggttaacgttaatgctgtgttgtggacacactctcacatctcatatctcatatctcaatctccgtgtgtttagatgtctctcaatttgcaactaaaaaataaaaatgttgagacaatcggttttcagtttgttcgtagtaactctttctctttcacttttccttttcaccatcaatatcaatgtcatgcccatgcctctctctcttttccctcaccaccacgcactcgcttttgccctccgacaaccgtcttctctgccgttacggcggagcatccagccgcgccaccggtgaggatggtggc

SEQ ID NO: 60096 - DNA, 303 bp, Glycine max
gaacaacagcagatgggttggggcagaagagatatgaggacaagttggcaatttggctggggttgccgttgcagttgggcccggtgcgttggcagccttgttcaagttttttcaacatccctaatctgaaacccaatgccattggtgtgacatggtgcaaagcaatgatttcgaatccggcattgatccactacgcctgcatcactccattcggagactatccctggggagcatcatagcgagaaagatcccaacatggatgccttggcgggccaatgcgtggcccaaaacactccaaccact

SEQ ID NO: 60097 - DNA, 334 bp, Glycine max
gagacgatcgctcattcttctctgaaggacctacatctcagttccgatcgtaaattacttgcccctctgggaagtggtggccctcgcaatgttcgggacatttcttcatcaatggtctgagcatcactaccagtgaaaatcacgaaacttttaactcttgcagattttctcaaaactatgacgagactctgatcctatatactgctgccatgacagatatacgtggaagcattatgacctgcattacacaaacatgggaaatgatggcatcaaagcatactatgcgatgataaactctctgcatttaatgtctcacctgaaggaaagtttcttg

SEQ ID NO: 60098 - DNA, 250 bp, Glycine max
gatgagagcttgccgttcctgcttgacttttgtgacaggtaccatctcagcattctgcaatggttgcttaccgttggtgaagtgttgtggcaacattctcacatctcatatctcataatctcaagctccgtgtgtttatatgtctctccattcgcacgtgggcattaacgttgttgctttcgtcagttttcacgttgatcgcaatcgctctctctcttccactttccctgttcctgaccaagtttcatgt

SEQ ID NO: 60099 - DNA, 180 bp, Glycine max
tggggcgttccttctccttctgtccgctgcgactctctttccttccctctttttccgaatctgaattggggagcgatccaatttctctttggattgagaagaccactgaaaaggagatttctgatgatgatgacgaggaagagaataaggattacgacggttaagttgaagatctggatg

SEQ ID NO: 60100 - DNA, 117 bp, Glycine max
ggaaaccgagaagaagaagatggagatgtatcagatctggagcatgagaataccgttgggagcgttcgcgtgtggccggctttgcccaacggcctcagctaacgacatctttgttct

SEQ ID NO: 60101 - DNA, 90 bp, Glycine max
gtgccaaaagaccacaaaaagggttataacttataaaaaaaggtgttaaggtaacaattgaaaatttaaatccgccattaaatcctaaaa

SEQ ID NO: 60102 - DNA, 80 bp, Glycine max
cggggtagttccaccgagtagctatggtgtctaacctatgtctccgatgatatgctggatattcgtttctcttcttgctt

SEQ ID NO: 60103 - DNA, 288 bp, Glycine max
aattggacgctatatttctagatttgtgcttcgatgtctctcgagttcatcgactcgtaaattcttactccgtgcaataactataagtttatcttcttcatcttcttcgcatctggtcttctccaattggaattgcaccctcttccgtccctttcttcacatttccttcagaccatttccttcgtctttctctttcgcattaattcacactatgtccacctcaaacgtcaaatcagtctaatattatagcgtctaagttatcttttttgtttatgttttgcatattca

SEQ ID NO: 60104 - DNA, 83 bp, Glycine max
ggttctagtgtgtgattgtttgttgttgtaactcgttcttcttctttcgttgttccgtgtttgtgtttgttttaggggtcagg

SEQ ID NO: 60105 - DNA, 363 bp, Glycine max
cacccttgaggtggaaagctctgacaccatcgacaacgtcaaggccaagatccaggacaaggaaggaattcccccggatcagcaacgtctcatcttcgccggaaagcagctcgaggacggccgtaccctcgccgactacaacatccacaaggagtcaacccttcaccttgtccttcgtctccgtggtggcatgcagatcttcgtcaagaccctcactggcaaaaccataaccctagaggtcgaaagctctgacaccattgacaacgtcaaggccaagatccaggaccaggatggaatccccccagaccagcaacgtctcatcttcgccggaaagcaacttgaggactggcgcaccctcgccga

SEQ ID NO: 60106 - DNA, 104 bp, Glycine max
aggggtatttgaggtttacgaaaaaggtgaaaggccaaaacacgttcctcccccaaatgctgaaattcaggacatagcacgaagttatatggattacaaatcac

SEQ ID NO: 60107 - DNA, 298 bp, Glycine max
ggagagacagtggcagcggcggtactctcacactgatactctcactctgaggaacgcacacggtgcgttcgtaaaaactgctaagaagatggcagaactgagtttgggaaagcacacggatatggtttattacgaagtcacgagagatactctacctgataaagatcgttcacgctgccggttctggtcgtaaggacggttgatgctgaagattcactacatgatacgctggctatggctctggagccatggcctcaatgctgacctggctcatgacgtaagttgcatcgttaaccac

SEQ ID NO: 60108 - DNA, 404 bp, Glycine max
ggcacaagtttgttgagatagctagaagcaataagatgaaaatgaaagtgcttgttttgtttgttgctacagttttggtagcatatgaatgccatggctcagactaccagaagttccctctccaaatgaaaactgggtttggtgggcaatacagcaatgaggtggcatgtgccagttggaggcttggcgtggaagcaaacaacgtagtcaagtggcaaactgttcctgcagcttgcggagagtacatagctgactacgttctaggagaccaatatagatcagattccaaaacagttaaccaacaagcttatttctatgctaaatccctcaaactcaccaacaaagatgtctttgtcctggacgttgacgacactactctctctaatctccagtattttgctaac

SEQ ID NO: 60109 - DNA, 301 bp, Glycine max
gcgggagacgacataagggggctcactggcgacataccagaaccctacgacccttccggctccgatcgcacgcgccctgatcgccccgtatgacgaccggctgtgaccttggtggcgccgagcatgatgccgatcccgggtagagcgggcagcttgcagcgcatgacagccattgttcacaccctcactcacactgaaagctggtccattgacttgtcttgggaatactataccacgtttcgggacgcaagagtcaatgcccacacacttccctagacattttgtcaacgccgcacacgat

SEQ ID NO: 60110 - DNA, 324 bp, Glycine max
  unsure (1)..(324): unsure at all n locations
gggagcaagagtgaagagcgaagagaatggctcccaagggtttaatctttttggctgtgttatgcttctcagcactgtcactgagtcgttgtcttgcggaggataatggacttgttatgaacttctacaaggaatcatgccctcaggctgaagacatcatcaaagaacaagtcaagcttctctacaagcgccacaagaacactgctttctcctggctcagaaacatcttccatgactgtgctgttcagagttgtgatgcttcactgttgctggactccacaagaaggagcttgtctgagaangaaacagatagaagctttgggt

SEQ ID NO: 60111 - DNA, 176 bp, Glycine max
cattacgcatagttgttaagtttcgttcagagtcacactcagatcctatcctgggttgggcttcaaactgtttagcattccagaggcggcaccttttattgcctttctcagattcaccacccactaattcaatttctcgccccatatcagcgctttcatcaccaactatggtgttt

SEQ ID NO: 60112 - DNA, 318 bp, Glycine max
ggttctagtgtgtgattgtttgttgttgtaactcgttcttcttcttttgttgttctgtgtttgtgtttgttttttctctcacctgaaaatgtcttgctgcggtggtaactgtggttgcggaagctcctgcaagtgcggcaacggctgcggaggctgcaagatgtacccagacttgagctacactgagtcaaccaccaccgagaccttggtcatgggagtggcacctgttaaggctcaatttgagggtgctgaaatgggtgtgcccgctgagaacgatggctgcaaatgtggaccaaactgctcctgcaaaccctgcac

SEQ ID NO: 60113 - DNA, 210 bp, Glycine max
atttcttgtccaactctacgtcactttgtgttttggctgtggacctcaaataatgggacattcctttgattgtgggctcttgtctacttcttcctcttcgtcttcattatgtattctccatccatcagaaattcacactttcatgaatacgacatatgcttcctctgatttgcacatgacccctaccaatctcaatacctttagatccat

SEQ ID NO: 60114 - DNA, 224 bp, Glycine max
gcgtcctcatcatatcaagacataccagactatccaaactcttttttcatttgcagcatcaaaatgattcgtagcaggcatgggatctggagctcgacctctacgtttttgaacgtcgctactccacctgccgctacacccgccgttgccggctgtttatatgctattctttcaacctcaacctctgctatctctgagatctcactgccctttggcatcccact

SEQ ID NO: 60115 - DNA, 392 bp, Glycine max
ggttctagtgtatgtgattgttgtgactcgttcttcttcgtcgttatcttcttcttttgttgtttgtgtgtttgttttttctctcacctgaaaatgtcttgctgcggtggtaactgtggttgcggaagcgcctgcaagtgcggcaacggctgcggaagctgcaagatgtacccagacttgagctacaccgagtcaaccaccaccgagaccttggtcatgggagtggcaccagttaaggctcaattcgagagtgctgaaatgggtgttcccgctgagaacgatggctgcaaatgtggagctaactgcacctgcaacccctgcacttgcaagttaggttgttggagagctaaagcctcaagcagaaaatggccctagaaataatgataaaaact

SEQ ID NO: 60116 - DNA, 326 bp, Glycine max
tgcaaggggaagcaacaccgggcatcaatgatacgcgcaattgatacgggctccaattgatggcgttacgctcacgacgtgcgcgcagtacctgttcagacttctcgtagagtcctgacacaacctcccaaaacaaactcatcgctgtcgtcgaccgctgtcgcctccatctccgcagactgtttcaacatatcgtcgcaacctcgcttcatatattcgctatacacaagcttcagtatgatcggtcagcaagctaaggcaaagccgcaaggatctgacgtgagtgtgtgaagtgactgaggtaagtgattcatgcatgtgcttca

SEQ ID NO: 60117 - DNA, 77 bp, Glycine max
cgcgtaagacgaaccgacttgaatcatcttgatgaattcagcactactggaaagttgcctagggtgctgcttctttc

SEQ ID NO: 60118 - DNA, 395 bp, Glycine max
gggatgatgatgaacacttttatgaagctggtttaccttggtggaggtgttaaaatgcttgaaatgtgtgcttggattgaggataaggatctttatagctaatgttttcatctttcctcagttttacatgcagatattcagaaggtggaagactggtcacggatcactgtatactggtttctcctgctgtggtgtaagaatgatgcaatattttcttgaggttgtagaggggaggcaatgagactatcgctggtttgaaaagtgaaacacaaataaaagggaaagaggagcttcatatggggatttaaattgtgcacgctgtcatatactggtgactgtggcgattcctgtaaccacatttctagcagaatcaagtctgaacaggtaaaccagag

SEQ ID NO: 60119 - DNA, 173 bp, Glycine max
gaccattcgccattccaatgtcaccttctttttgcacatccctcttcctcttcacactctcggttcgggtcttcccattcatctcactctccgtcggggtccacaccggccaccatgaccacggtgaccccgactcctacaccaccctccaccctccgtgctcgggtcttgac

SEQ ID NO: 60120 - DNA, 130 bp, Glycine max
gctgctagcagagggaagttctacacttttttgtttggattgatcgagtgtactttttcttttcgagattggcttggtgtgcagtggaaaaagggtggaaaagagtggtaagggggaaggcggcgccctc

SEQ ID NO: 60121 - DNA, 285 bp, Glycine max
gacatcatattcacatgtggtgcgataaacacaatggatacaagggctttctataaagtgctcgtggctttggtgacccgtatggttttcacatttgctatgtaccaccgcttcaccatcaagaccaatatcaactccaccaccgtgtggatcaattcatcgacgaatctgcttgctacttgccttggcacaactcctctaacgtcgtagaacacttgcaatcattctaactgtcaaattactcacactcatgtcacagatactgctgacgcccttgtttctact

SEQ ID NO: 60122 - DNA, 226 bp, Glycine max
gacaaaccaaacaactactactactactgcacacactctctctctctctctctcaatgtatgggcgccaattccagttaccgaaggattaacgcctttgggaaaccaatccccaaccaaatttggacttccaaccccccctcagctcctctcacttccaggaagggagcaatagcagcttgcatacagtatcaaccggcggtcaatgtatgacaagaaacctgatg

SEQ ID NO: 60123 - DNA, 302 bp, Glycine max
ggttctagtgtgtgattgtttgttgttgtaactcgttcttcttcttttgttgttctgtgtttgtgtttgttttttctctcacctgaaaatgtcttgctgcggtggtaactgtggttgcggaagctcctgcaagtgcggcaacggctgcggaggctgcaagatgtacccagacttgagctacactgagtcaaccaccaccggagaccttggtcatgggagtggcagctgttaaggctcaagttgaaggtggctgaaatgggtgtgcccgctgagaacgatgggtgcaaatgtggaccaaactg

SEQ ID NO: 60124 - DNA, 173 bp, Glycine max
ggccgagcaacagtgaatttggccaccataccataccatgagcataagggcgcgcgcgcgcaaaggattatggtttcgaacgtagcgattttggagcttccatttcgatttatacttgcgcacgatctggtactttcgcttctcttactgtagctcttaataatgcacatttt

SEQ ID NO: 60125 - DNA, 292 bp, Glycine max
gacacgagagaagagaagagaagagctattgtgatttgtgagtgatatgagtatgtcgattatgcatgcaatgtcaatcagaagcagcgctttcttttgcgttcaaataaattgctccgattcaaagcaaggccgtggtcttggagaaaacactaacagtaacaggattaacaccaacaaatctgacaagggattggtgtctcagcagaggcaagggatcagcagataagcagttctcgcggtctatctgtctagggaccccgtttagggttacaacgtgacggcaaatcta

SEQ ID NO: 60126 - DNA, 89 bp, Glycine max
attcccagaatgtgaatccagctgtaaagtcaaggccacttggggaggatagccaccgtgaccgcagggactcaagtactgatggtacc

SEQ ID NO: 60127 - DNA, 195 bp, Glycine max
ggcgttttcttcgtcacaacaacccttctctgattcgtcgtcaatttttgtgtctcgtcgtagaaaagcttaggtcagatttctgggtttgtcttttctgagaatctggagtggggctaagtcaagatgccgtgggtttccttgtttgtggatgacaaaagaaattgtgttcgcgtggtggggttttttcgtgtg

SEQ ID NO: 60128 - DNA, 310 bp, Glycine max
ggaatggaagtcactcactgtgggttttgggagtgattttttggtttgactaggtggcctaacttgttagtgggttgtaccattgattgccattctgaaatctcaagctctcttgtttgttcgtggacatgtgcctggatccaatttgcatggagctgtaccaccattggtgatcgcttccaatttgtgcaaagtggacccgcatgacgcatgtttcaaatccctccatttcccctttcttttagcgatgatttgtgggttcctccatttcactgttgtttttaggtacttttttggtcattcctgtgtc

SEQ ID NO: 60129 - DNA, 356 bp, Glycine max
gtggtctgaggacttaggaattacaagcagatgcattgaagctgttgctgcaaaagttctaagtcacccttctaaggtgagtttgtcacatagccattcacgaagagtgagggatgatgtgtcttgcaatggcaaccaaagtgtgaggcataacaagtcaggaaacaaaggatggtgggctgaagatttggcagaacttagcatagacttgtattggagaaccatgatagctatcaaatctgggtggaagattccctcaaatcttattggagatgcattgaagatctatgcatctaggtggctaccaaatgagtacaagaatggaggacatatcaagaagcaagctgttgctgact

SEQ ID NO: 60130 - DNA, 286 bp, Glycine max
gaataataattatagtaatagttagttcaccagacagacacatggaaccaaagtgcaccataaactgtcgccggccggagttcgttccgacccctctgccggagagtcctcgtgtgcccatggagtttctgtcacgctcatggagtgcctcagctcttgaggtctcaaaagctcttgcacctcactcttcttacaacaactcctcttccattccagaacaaacttctgcttctgctcccaaccacaacaacaaccctttttctgaagacttgtcaaacatctcctc

SEQ ID NO: 60131 - DNA, 354 bp, Glycine max
gcacaagtttgttgagatagctagaagcaataagatgaaaatgaaagtgcttgttttgtttgttgctacagttttggtagcatatgaatgccatggctcagactaccagaagttccctctccaaatgaaaactgggtttggtgggcaatacagcaatgaggtggcatgtgccagtcggaggcttggcgtggaagcaaacaacgtagtcaagtggcaaactgttcctgcagcttgcggagagtacatagctgactacgttctaggagaccaatatagatcagattccaaaacagttaaccaacaagcttatttctatggcaaatccctcaaactcagcaacaaagatgtctttgt

SEQ ID NO: 60132 - DNA, 338 bp, Glycine max
gattccgtggccgtatttaaaaaaacactgtttctcttctctgtacctccccctatatattcctcccccgttattattagagcacagaaagaatttctgtgcctgttttgattagaagggaggagggagaagaagaagaagggagggaatagaaattaacccagtgtttgatcaatttgtatggttcaagattgaacacaaaaaatggcggttactactcgcactctatctgccacagaagagaaacactggtggcttaccaaccgaaaggtaaggtatcacacccttttgctctaattacatcatgttttgtgtagcaagggagggaaaggggaggg

SEQ ID NO: 60133 - DNA, 301 bp, Glycine max
ggaacctttgcattctattcattcaagattcagcaagtgcgttttggaagcagagaccgaaatacttcgagatggcccgtacaaagcaaactgctcgtaagtcaactggaggaaaagctcccaggaagcagcttgcaaccaaggctgcacgtaagtctgcaccaacaactggtggtgtgaagaagcctcatcgttatcgccctggaactgttgctcttcgtgagattaggaaataccagaagagcactgagctcctaatcaggaagcttcctttccagaggttggttcgtgaaattgccca

SEQ ID NO: 60134 - DNA, 93 bp, Glycine max
cttgctggtctatggggcacttctttagggggaagtgagccacgccgtgttgatgctgccgtggcacaactaaagaagttgccattttaccat

SEQ ID NO: 60135 - DNA, 102 bp, Glycine max
tggggcactgcaaatcacttttctactttgagtcttcttgatccttctttttctccttgaactcagtggtggcagatcaagtcgttcttcaacatttcgggc

SEQ ID NO: 60136 - DNA, 352 bp, Glycine max
ggagcaagagtgaagagcgaagagaatggctcccaagggtttaatctttttggctgtgttatgcttctcagcactgtcactgagtcgttgtcttgcggaggataatggacttgttatgaacttctacaaggaatcatgccctcaggctgaagacatcatcaaagaacaagtcaagcttctctacaagcgccacgagaacactgctttctcctggctcagaaacatcttccatgactgtgctgttcagagttgtgatgcttcactgttgctggactccacaagaaggagcttgtctgagaatgaaacagatagaagctttgggttgagaaatttcaagtacattgagaacaat

SEQ ID NO: 60137 - DNA, 338 bp, Glycine max
ggaaaccatcaaccacaatcctcatcacatcctaacccaagatcaccaccataacagtgatgatgatgatgatgatgaagcccatggcacatcacaaccccagcatcatagaagaagaagaaagtacaaaaggccaggtctgatattcctcccaactaaagagatcataagagacacatacaggcttgccaccattgcaagagacttaggtctggacttgtaccctacaccatcactctctcacatcatcttctccaacccatcatcatccaaaccctcatcactttccatctctttttcctgctctcttcaaagcgaagctggtcccaattcccttc

SEQ ID NO: 60138 - DNA, 308 bp, Glycine max
gataaatgaaaatgatcactgcttaacaatcatctgttctgtaactttttttcaatataattttagaattgggtttgaagtctggagttgaatctgttgttctggagtacatccacaacttggttgacatcttgaaagatacgacctttgagaaaggtaacgcaggccttgttaagaattatttggaagcacgtgggacatttaacactctcaaaggtatcatagctctgcaatcttataatcgtggccagttggttcgactaacagctatttctgcattacaatgtgttaagtcaatagttgaattt

SEQ ID NO: 60139 - DNA, 239 bp, Glycine max
tggggtaataacactcacgtgacactgctaccagagtgagagaaattggctgcggcggtcgcggcggggtacagtggacttactccggataaatggcagtttcagtgatgcgcaaccgcattaacgaccacgactatgaattacaccaccacccccttttctactaccatcgtgccttccaagaagacccctatgctcccccacacgtccttgacctccccgcttccgctcatccacgc

SEQ ID NO: 60140 - DNA, 265 bp, Glycine max
gataaatcatactgctctatagaaagaagccgactgtactgtagagcgacttttgagttcaaatgatgactgagtttgcagtgttgagttttgacaatcgcactggtgaggaccgaaaccatggtttagaacattttaaatatccatcgtgaaactggggaatccatgagctgtgttaatcattgcagttcgcacgacggaaattacactgtcgagaaggtgaccaaggtgcacaacctgatattcatggaccataggttcaagg

SEQ ID NO: 60141 - DNA, 355 bp, Glycine max
ccaagccttcacccaagccttcgttacggctccaaaaaaacaaaaaaagggaaataatggaatcctgtgtaaccccaattttaaaccaaaggataataatttcaacaaaatttcctggcctttgaaaagtaccaaaaatggtcccttagaaaataacaatgctggaacgactccttacttggtgcaccatggatgcatacactttgcattcaagttttgaaatttataatgccaaaagggatgattcaaagtgtgatagccaatgtaatcgaaccatgaaaaacgatggatgctatttttataatcagttccaaggccccttggagaagatgttgttttggaatattccaaaact

SEQ ID NO: 60142 - DNA, 180 bp, Glycine max
gaatgatgggattcttgtgtatctccattgtaaatcgaatgatcatgattttcaccaacatttgggggccgttggatagtaccaccattagtcctttagacataacattgctggcactactctttattggtgcaccatggattcacacactttgcatccatcttttgaccatttataatc

SEQ ID NO: 60143 - DNA, 299 bp, Glycine max
ccacgcgtccattctggcgtcaatagagcaacgaaagggagacaaataggggcaacatattcgaaaacttattttggctagtttcctggtaaacagttctagatatcaacagatctgggagtcggtaccctagttagagtaatcctccgcatacggatcaccatcatgattaagtacaagatcagaatgatagtcaccccgaaaacgatatgtagaatatgggcacgtataatcccaggttcctaatagcaacaataattttactcagtcatcattggaccttgctgggttactggaat

SEQ ID NO: 60144 - DNA, 176 bp, Glycine max
ggcagcttaatcgacaaattatttctcctatattcctcttcgttcctcctagccatcaacaaatgggtcagtgggatcactattattcataaccatcggcataagagtattcgtcatgatcaggatcaagattagaatcatcttcttacggagtatgatatgtataatatgggcac

SEQ ID NO: 60145 - DNA, 295 bp, Glycine max
gatcaatggaaaacgagaattgcacttttgttgctcagcctattcaaagaaagcgcaaacgttatgccattcgtgatttcccagaaggatgtggctcctatggcaaaagggttgatcctaacaattttcgccaattaaatgacactattttggagttgggactgcaagatttggaagatgaagaattgataagtgctgctgaagttgttgtagcgtgtgactcctccaatgtgtcaaagttttcttctttttcagaaggggttctttgtgatggttcagaattcgcatcatctga

SEQ ID NO: 60146 - DNA, 310 bp, Glycine max
cacaaaagggggtcctagtgtgtgattgtttgttgttgtaactcgttcttcttcttttgttgttctgtgtttgtgtgtgttttttctctcacctgaaaatgtcttgctgccgtggtaactgtggttgcggaagctcctgcaagtgcggcaacggctgcggaggctgcaagatgtacccagacttgagctacactgagtcaaccaccaccgagaccttggtcatgggagtggcacctgttaaggctcaatttgagggtgctgaaatgggtgtgcccgctgagaacgatggctgcaaatgttgaccaaactg

SEQ ID NO: 60147 - DNA, 190 bp, Glycine max
atgttacgcagcatgtgttggatagaggacatcctcaggaaaggagtcacattattcacatggctatctggacatacttggcaattaagccagcatatctttgcatcagctgttgttgataaatgtttggagtatcgtgatgctattgatcgggagttgtaatctgcggcgattgttgagactcacaatc

SEQ ID NO: 60148 - DNA, 272 bp, Glycine max
ggagaacatcgaggaaaagataaagggtgaataattagcagctccttctagttccggtgtcggtgtgggtgtttgaggctggtgaaggatgtcaattgttccaatcagataaggtgatgccaaaggctccaaacccattcgcttcgtagggtcaacacgtggattttcctcacactccctggagctccggctatcatcacggcttggaattcggattcggattccgatcaaccgtgaacacacgtatggactggagggagattcctatagcg

SEQ ID NO: 60149 - DNA, 321 bp, Glycine max
ggttctagtgtgtgattgtttgttgttgtaactcgttcttcttcttttgttgttctgtgtttgtgtttgttttggggctcacctgaaaatgtcttgctgcggtggtaactgtggttgcggaagctcctgcaagtgcggcaacggctgcggaggctgcaagatgtacccagacttgagctacactgagtcaaccaccaccgagaccttggtcatgggagtggcacctgttaaggctcaatttgagggtgctgaaatgggtgtgcccgctgagaacgatggctgcaaatgtggaccaaactgctcctgcaacccctgcacttg

SEQ ID NO: 60150 - DNA, 275 bp, Glycine max
ggagcaagagtgaagagcgaagagaatggctcccaagggtttaatctttttggctgtgttatgcttctcagcactgtcactgagtcgttgtcttgcggaggataatggacttgttatgaacttctacaaggaatcatgccctcaggctgaagacatcatccaagaacaagtcaagcttctctacaagcgccacaagaacattgctttctcctggcccagagacatcttccatgactgtgctgttcagagttgtgatgcttcactgtttctggact

SEQ ID NO: 60151 - DNA, 136 bp, Glycine max
ggggggaacatcagatagcagtggttgcattgtgtcacgacgattcgatcgttttatctatgatgttgctgggttcagcttcttggatttcaagtggtgtaaatgatcacatacatcatattactttcaatgctgt

SEQ ID NO: 60152 - DNA, 396 bp, Glycine max
ggttctagtgtgtgattgtttgttgttgtaactcgttcttcttcttttgttgttctgtgtttgtgtttgttttttcgctcacctgaaaatgtcttgctgcggtggtaactgtggttgcggaagctcctgcaagtgcggcaacggctgcggaggctgcaagatgtacccagacttgagctacactgagtcaaccaccaccgagaccttggtcatgggagtggcacctgttaaggctcaatttgagggtgctgaaatgggtgtgcccgctgagaacgatggctgcaaatgtggaccaaactgctcctgcaacccctgcacttgcaagttaagtgtttggagagcaaccttcaagcagagatagcccttaattaggaataatgataaactattaatgtg

SEQ ID NO: 60153 - DNA, 368 bp, Glycine max
ttttttttggtttttttttgttttgtttgttttttttttttttttttgttttttgtggtgtttttttttgtgtttggttttttgttttttttttttttttgtttttgttttttttttttttttttgttgttttttttttttttttttttttttttttttttttttttttttttgtgtttgttttttgttttttgtttttttttttttttttttttttttttttttgttttgtttttttttttttttttttttttttttttgttttgttttgttttttttttttttttttttttttttttgtttttttttttttttttttgtgtttttttttttttttgtgtttttttttttttttttttttttttttt

SEQ ID NO: 60154 - DNA, 325 bp, Glycine max
aggggttctagtgtatgtgattgttgtgactcgttcttcttcgtcgttatcttcatcatttgttgtatgtgtgtttgtttgggctctcacctgaaaatgtcttgctgcggtggtaactgtggttgcggaagcgcctgcaagtgcggcaacggctgctgaggctgcaagatgtacctagacttgagctacaccgagtcaactaccaacgagaccttggtcatgggagtggcaccagttaaggctcaattcgagagtgctgaaatgggtgttcccgctgagaacgatggttgcaaatgtggagctaactgcacctgcaatccctgca

SEQ ID NO: 60155 - DNA, 230 bp, Glycine max
gaacccatcctaaataagcatcgtaattcatactccctcggtccttccttccttcttctgcgcaataactgtgtgtgggtccaatcaacttaccaccctcttccagacgtagttcttctccctctgttctctattctctatactgtgaaagcaacatgaacgtcacattttcagctgttctacttaaatgccatgtcctcagctcctccatgttcgacgtgtcaatggca

SEQ ID NO: 60156 - DNA, 55 bp, Glycine max
tactgggattctcattcatttccacattctcaaattattctttttctttttttca

SEQ ID NO: 60157 - DNA, 304 bp, Glycine max
ggttctagtgtgtgattgtttgttgttgtaactcgttcttcttcttttgttgttctgtgtttgtgtttgttttttctctcacctgaaaatgtcttgctgcggtggtaactgtggttgcggaagctcctgcaagtgcggcaacggctgcggaggctgcaagatgtacccagacttgagctacactgagtcaaccaccaccgagaccttggtcatgggagtggcacctgttaaggctcaatttgagggtgctgaaatgggtgtgcccgctgagaacgatggctgcaaatgtggaccaaactgctcc

SEQ ID NO: 60158 - DNA, 287 bp, Glycine max
ggcacccctttaaatgtgactatgtaaacgtcaggttatcaacacagatccccacgcacattcaatgtctttctgatcatagtggacaatgaatctattacaagtatacacattgcacatacatcctatgctacctatagtccgtgtactagggcaacaccaactaccacattaaacacatctcagataccatgttctacgcttgcctcaatcatgaaccagacaccaagtttacctgtaagatcttcaccatggccaacttcgtcatattcttcagataattcacc

SEQ ID NO: 60159 - DNA, 67 bp, Glycine max
ggttttggagggagagaaagaaaaaaggggaatttcaatggcgtcaagggtttctctgaacgccaac

SEQ ID NO: 60160 - DNA, 380 bp, Glycine max
gagaggagaacagatccaaacccctaaacaagaaagtgagtcactgacccaatgatggaatatgtacaaagttggtaggtaatgtattgacataggttggagagattttaaattagacaagaaagtaactaaataataaattattatttattttgaaaaaataatttaattgttacaaaaaatgattcaaatttgattaaggggaggagggtgtgggtgaaaaaataaaagaaagttgatactcctctcttccttccctttatcttatccgcagagagagtggtgtgttgcgaattgcaatggcagttaaccgtcctgtccttcctgttcaccaaaatccaaccattaccattaactgttgctcctcaccaattcctccc

SEQ ID NO: 60161 - DNA, 381 bp, Glycine max
gattgaaagatgaaataaccaactataccttgcttctattggtaacggtcaccaaacacactacaatgctgaaagtgagaccctggatttgcacaacccattaccccttttcaatttcagatcaccctctctcattcccaatcgccattctcaatccaatttctcttcgcctttcgcaatcgcatccaactcccacaatcccatgcgctaagacgcgcggctggtcccaaccatccaatcgaaaaattcttcaactggcttccaccgtcgcgttcaatctcaagatcctgccggatcccttcaattccctcgctggcgaaatccccccgcggcaatcccagactctgagctttctcgtcggtggtggccggatagggaaaa

SEQ ID NO: 60162 - DNA, 240 bp, Glycine max
gctataatactacataatggggctctaaataatataaatctactgtcgcatcatctacgacctatgcgaacccaatgtcatctgcctcaactcaaccctcgcactgtcacgctctcatactcattctctcactcgctcaccctctacggttttttgcaatcaccaaactaaatatggttttatccccactatcatcgtaccatctaaggttttctcggcaatcgcccgcatacctttcat

SEQ ID NO: 60163 - DNA, 374 bp, Glycine max
  unsure (1)..(374): unsure at all n locations
ggttctagtgtgtgattgtttgttgttgtaactcgttcttcttcttttgttgttctgtgtttgtgtttgttttttctctcacctgaaaatgtcttgctgcggtggtaactgtggttgcggaagctcctgcaagtgcggcaacggctgcggaggctgcaagatgtacccagacttgagctacactgagtcaaccaccaccgagaccttggtcatgggagtggcacctgttaaggctcaatttgagggtgctgaaatgggtgtgcccgctgagaacgatggctgcaaatgtggaccaaactgctcctgcaacccctgcacttgcaagtgaagtgtttggagagcaggcttcangcagagatagcccttaattagga

SEQ ID NO: 60164 - DNA, 265 bp, Glycine max
cggggacagaaagactgaggagaaaattacagaacattttccaacacaattacacaaccgaatcaaaccctctctttcgcgccggagctgcgtttaatatcttacactccatagattattcttctctttcattatactgttctcttttcgatttgacggaacagtacaagagtgtgaggatcagttaacccatcttcatatgtagtcactaaaataatgtattctcactatcacactagctgccacactcctgaacgctccattc

SEQ ID NO: 60165 - DNA, 154 bp, Glycine max
agtcagtacagcacagaagggggaaccacagggtgattgcagtgcatgtcaagtggttacaccactacaccatgatcgtccgcatcgtttcacatagctgctgttgagacccagcgccgtctctatgcattacacggcgactcaactggatcca

SEQ ID NO: 60166 - DNA, 281 bp, Glycine max
ggatgacgtaagtgtaagtatcattcatataatactctgtttcacttcatttcgataatcatcgagatctattgatcacagtggcacccatctctgctgctatcacagttccatcgctctcacgcgcaactcttgtgcagaagcgggtctcatcgccagttcttggtttgccatcactgcttaatgtcgtcatagtccattgctccatcgaggaatcaccttattctgtgaatgaaagcagctctagcatcttgagctattatgcatctctgatggtacct

SEQ ID NO: 60167 - DNA, 382 bp, Glycine max
  unsure (1)..(382): unsure at all n locations
ggttctagtgtgtgattgtttgttgttgtaactcgttcttcttcttttgttgttctgtgtttgtgtttgttttttctctcacctgaaaatgtcttgctgcggtggtaactgtggttgcggaagctcctgcaagtgcggcaacggctgcggaggctgcaagatgtacccagacttgagctacactgagtcaaccaccaccgagaccttggtcatgggagtggcacctgttaaggctcaatttgagggtgctgaaatgggtgtgcccgctgagaacgatggctgcaaatgtggaccaaactgctcctgcaacccctgcacttgcaagtgaggtgttgggagagcaagcttcaagcagagatagcccttaattangaataatgat

SEQ ID NO: 60168 - DNA, 294 bp, Glycine max
agtcagtaaagaaccgaagggggaacagtagggggcagatatcgatattctagcacaatcgatggataccatcagtcggctatcattgcttggatcgtgtttggcattatcatgattgggattgcaacaggtcattgctcgttttgtcgcattatcatcttcgggttggcagcattcgtaccgaatgtgattgcggattttcctgctgatacctctgcagcgttttgcttcgtcatatccaatgctcatatttcattcttcagctgcttctcggcttcatgccttctctctatg

SEQ ID NO: 60169 - DNA, 229 bp, Glycine max
ggcagcatgcaagtgagtgagtgagttgctttgtctcattcagtcagcgacgtctccatcgatctcgacgtagtgatggaacccctacactttcattttcttgagcccttttttctcttcaatcctagatacagtgtcaggtgtaatgcaggcgtagttggtttctttttgcctctgttactcgatagatctgacgtatgcggggataccgagtaacaactggattttg

SEQ ID NO: 60170 - DNA, 201 bp, Glycine max
ggcatcgaacagcattactccatcgcatcttgaagcataaattttctcccacactcgtcgcttcatggctcgtaacaagtgcatcaatcgtcaaatgcactagttagaccgatcgtaactggtaaccctacagccaaggttctagaaaatccgaagctagcacctatggcagtctgctgctgctactgctgctttcatgca

SEQ ID NO: 60171 - DNA, 208 bp, Glycine max
gaccacaagatggcgaggcaattgcaagagatcggagtagtgaagagtggtgaacacgtacttgtgactcgcacacgagttcaagtgctagcggccgtggtcaccttcgctgccggtgacagtggcaggtgtaaggcacgcttgcgctgttgttctgtggctcagtacctgcatccatctcaccgtcgctcggatcccgactaagttg

SEQ ID NO: 60172 - DNA, 295 bp, Glycine max
  unsure (1)..(295): unsure at all n locations
cgggattgcaaacgttgaataatgagatattgttgtgacaaggcatcttatccatagttgtgcatacataataaattgcaagttgagacccacagcataggaattgaagagcatggaaagtgaccagaaagtccaaatagcttcttggagtgaggtcatgtcaggtgctggggtggagtttcatcaaggggctcctaatttgggacaacgtggtggtagtggccttcagagacaacctagtatgaccaagaacaattgtctttgttctccaancacaaattctggttcgtttcgt

SEQ ID NO: 60173 - DNA, 180 bp, Glycine max
gagaattgcgttatcgagagagagagagagaaacgccatttagtgtcgtctgcacacatggcgtccctacagggcttcaccatcaccaactaccatttagtggatgaggatcaatacgtttcacacactgcatactcctcggtgcatgaacgtatgcaatatatcagctcttcacattca

SEQ ID NO: 60174 - DNA, 154 bp, Glycine max
tgggggagttggattatcaaaagagatggcgagaaacgcattgagtgtcgtctgcacacatgtcgtcgcttcagggcttcaccatcaccagctaccatttagtgcatcaggagtaatacgtttcacactctgcatactccttggtgcatgaacg

SEQ ID NO: 60175 - DNA, 273 bp, Glycine max
tcacgaaagggatcttcacagactccaacttgcggaaatttccgaggctgggtttacctccaagatcagataaatattcgggaaaattaacaactctcattagacacggagaacgtgactcagccgttatactcaccgctttcgatatatcataggactgtaaactccacaatcactttgatgccgcgtttcaaggttccatcacatgggaatctaactctgtctacatcaacatctctatgatcagtgttcgaatcagttacctcaatgcca

SEQ ID NO: 60176 - DNA, 200 bp, Glycine max
gtgagggaatggtgttctcagattggaacttcaggctacatctcgttgctgggtgtcactactaatcgttatcatcatctcggttaagttctgtctcactgagtcacgcatgcatcacctctcttctatcagtctctcttgtgtatctatctcagtctgattcagtgcacttgcgtctctgatgtgtcgttctgacgttg

SEQ ID NO: 60177 - DNA, 263 bp, Glycine max
gattgtgactgcgctgcatcaccatcgagcccaatccattcacgagcatttcgcacgagatgattggatgtctgaattggccacggttgatgccaatttgtcgttctttaaatcacttttttttcaacctttgttacatatatagttattgctgtagtcttgactccggaattttgtcatttatcacattctcgttattggtatatgcacaggttggcaaatgtgtcacttcactcccgatctttcaaccaccaacaagtatt

SEQ ID NO: 60178 - DNA, 394 bp, Glycine max
gatcatcagaatccacagtttccgttagcgctctccaatacaaaataaccactcactgaatattcggtcgaagatgtccgccgccgaagaagctaaagttcccgccgtcgaaaagccggtggaggaggtgaaggcgccgaagcttgccaaggagaagaaacctaaggctccgaaggaaaagaagccgaaacaggccaaaactgcttctcatcctccatatctccaggtaatttcgcgtaaatttctttcatgaatccacaattattacgtgattgttatttttttgtttgttgatttttttttggttgtcttaatgtttgtagatgattaatgacgctttgattgctctgaacgagaaaggaggatcgagtccatatgcgatagcgaagtacat

SEQ ID NO: 60179 - DNA, 412 bp, Glycine max
  unsure (1)..(412): unsure at all n locations
gatagtactgttaaacgcaaaggcgatgaaacaacagaaagaagaggtaaggttgtatcgtatcatcattcattcatccatccatctgtgttctgtgtgccatttccattgccaccaccgatcactctctcacccaccaactgataccagtaacttcttcaccttcctttccttccccaattaaaattaaacaaaaaaaaaaaacgaataaacaaaaaaaactgtccactaaggttgaggcacgtgacccatcccgcccttcctctcgctcatctcaaatccatgcttctgaattagggtttccatttggatttcgcagttctggtgcccccaatttgagcgacggaaaaggaaaagggaaaagggatgaggatganggtttggggatccgagatcgtgttcgccctattgc

SEQ ID NO: 60180 - DNA, 293 bp, Glycine max
gagcgaaacagagagtgatttcagtgagtgatcggtgttcacttgatctcatcataatcgtcagcgtcaattgaagaagatgccgatcagaaacatcgccgtcggaaggcctgaagaggcgactcaccccgacacgttgaaggcggctttggctgagttcatctcaaccttcatcttcgtgttcgccggctcaggctccggcatcgcctacaacaagctcaccgacaacggcgctgccacccctgccggcctcatctccgcctccatcgcccatgcattcgccctcttcgtcg

SEQ ID NO: 60181 - DNA, 321 bp, Glycine max
ggcacacaaccgctctttcttcttcttctcttaaaagagcctttgctttttctttaggcctttccgaattaagtacttgtttcattttctctcgaagcaagaaaaatgttcatcgagagtttcaaggttgagagtcctaacgtgaagtacacagagactgagattcagtccgtgtacaactatgaaaccactgaacttgttcacgagaacaagaatggcacttatcagtgggttgtcaagcccaaaactgtcaaatatgaatttaaaaccaacacccatgtccctaaactaagggtaatgcttgtggggtggggtggaaac

SEQ ID NO: 60182 - DNA, 306 bp, Glycine max
ggtcccgacttcccgggaacgaaccatccgtccaaccgtcagcccaaacctctctttatggtgccaacaattccaaacaaggggggaaatgacccccggacaattaacctttaataaaattcccaccggttttttggtttgtattttcaatttgtttcccggggctccctcttatgtcaccgctggctcaaagtctccacctcaaaatgccttttcacttatgttttcataagataactttcatctattttttctcgcttcgattcctcgtcccttggagctcataaccatgataatgtcaaaatt

SEQ ID NO: 60183 - DNA, 237 bp, Glycine max
accgagggggggagacgcaaggggtggccaagcgtcccaggagagtatcggcaagatgcaggcacggcagagttaccggaatttatggcatatcgatctcatgagatccattcaggccgatactccttagtgttgcctcacgttgtggtgtgcaccacgtgtgtcgtaccttcatcgcaaacgaactctcgatgacgatctgtcatcgtacatacgttgtcccggggacatgtcacc

SEQ ID NO: 60184 - DNA, 277 bp, Glycine max
ggagcaagagtgaagagcgaagagaatggctcccaagggtttaatctttttggctgtgttatgcttctcagcactgtcactgagtcgttgtcttgcggaggataatggacttgttatgaacttctacaaggaatcatgccctcaggctgaagacatcatcaaagaacaagtcaagcttctctacaagcgccacaagaacactgctttctcctggctcagaaacatcttccatgactgtgctgttcagagttgtgatgcttcactgttgctggactcc

SEQ ID NO: 60185 - DNA, 214 bp, Glycine max
agccaaagcccaatccaacccaactcaacctccaaacacaaaaaccttccttcaaaaccaagcaattcattcccaataataatgtctcaaaccctcggttccgatgagccaccccaaaccaccgattcccacaccccctccctcctccacctctccttcaaccaggactccggttgcttcgccgccgccaccgaccgcggcttccgcatctata

SEQ ID NO: 60186 - DNA, 264 bp, Glycine max
ggaacctttgcattctattcattcaagattcagcaagtgcgttttggaagcagagaccgaaatacttcgagatggcccgtacaaagcaaactgctcgtaagtcaactggaggaaaagctcccaggaagcagcttgcaaccaaggctgcacgtaagtctgcaccaacaactggtggtgtgaagaagcctcatcgttatcgccctggaactgttgctcttcgtgagattaggaaataccagaagagcactgagctcctaatcagga

SEQ ID NO: 60187 - DNA, 282 bp, Glycine max
gccttcgtccaagcgttcgttacggtgccaaaagaacacaaaaagggggttcaattgtgtgattgtttgttgttgtaactcgttcttcttcttttgttgtttgtgtgtttgttttttctctcacctgaaaatgtcttgctgcggtggtaactgtggttgcggaagctcctgcaagtgcggcaacggctgcggaggctgcaagatgtacccagacttgagctacactgagtcaaccaccaccgagaccttggtcatgggagtggcacctgttaaggctcaatt

SEQ ID NO: 60188 - DNA, 273 bp, Glycine max
gactcgcagttgtattgttgaacaagggtttctctgtctgcttcttcactttctctcgtttcaatcgaaaccaaaacaaaaacatgggcagaaaattcttcgtcggtggcaactggaaatgcaatgggaccactggggaggtaaagaagattgttactactttgaatgaggctaaagtccctggagaagatgtcgtacaagttgttgtgagccctccttttgtgttccttcctgttgtaaaaagtttgctgcgccctgatttccatgtttcgg

SEQ ID NO: 60189 - DNA, 284 bp, Glycine max
cttcggccaagccttcgttccggttccaaaaggacaacataagggggtgactgtggactgagaaaaacgacgacgaattgcgattcttcgccggcaccgctaacaaccaagaacgaaggagttgcatgcaatgctgcaaagagaatgaataggtgaagtgtcttgctttgtaaaacattgattgatttggattgggtgtttgtaaaggcaattcaaaattcagcgaccgggttcagggggtgacttgccccaaggaggtgagtacaaaccttcttcatcttttc

SEQ ID NO: 60190 - DNA, 264 bp, Glycine max
gttctagtgtgtgattgtttgttgttgtaactcgttcttcttcttttgttgttctgtgtttgtgtttgttttttctctcacctgaaaatgtcttgctgcggtggtaactgtggttgcggaagctcctgcaagtgcggcaacggctgcggaggctgcaaggtgtacccagacttgagctacactgagtcaaccaccaccgagaccttggtcatgggagtggcacctgttaaggctcaatttgagggtgctgaaatgggtgtgccc

SEQ ID NO: 60191 - DNA, 235 bp, Glycine max
ggcacaagtttgttgagatagctagaagcaataagatgaaaatgaaagtgcttgttttgtttgttgctacagttttggtagcatatgaatgccatggctcagactaccagaagttccctctccaaatgaaaactgggtttggtgggcaatacagcaatgaggtggcatgtgccagttggaggcttggcgtggaagcaaacaacgtagtcaagtggcaaactgttcctgcagcttg

SEQ ID NO: 60192 - DNA, 278 bp, Glycine max
gagagtgttggggataacacgacacgaaactcatcacttagttgccatccatcttctttttttatttgcttccaccatttcccaccgatgtacacactcaacgccgattccggcacggcgccgcatccgcgccgcaacatcatgctccctcagcgtcgctccgccaatgcctgtcatctctgccgccggcagcgccagcccctgccccatgaccctcgtctccagcttcatcggctccgatgccgctgctgattgccgctccttcgcgcagctcctcg

SEQ ID NO: 60193 - DNA, 250 bp, Glycine max
ggagaagaagaagaagaagaagatggagaagtatcagatctggagcaggagaatagcgttggcagcgtttgcgtttgctctgctgttccaatcggcctcagcagacgacgtcgttgtgctctctgaagataacttcgagaaggaagttggtcaggacagaggagctctcgttgagttctatgctccttggtgtggacactgcaaaaagcttgctccagaatatgaaaagcttggtatcagcttcaagaaa

SEQ ID NO: 60194 - DNA, 273 bp, Glycine max
ggagttcagtccatcataatcttaccataactaggccatcataacactcacgattctattgctcatactctacttggccatgctcctaccgcatgcgacatgagtatgagcaacctaataatgacacctagaaaaatccctacgaggtagcccccatgatcgacgagctgacgtatccctgtcgtttacaagctctacctgcattgctagggatgcttcaatacgatccaacgcacctgtcgccacttcgaatgtctggaaaccgttatggca

SEQ ID NO: 60195 - DNA, 268 bp, Glycine max
ggagcaagagtgaagagcgaagagaatggctcccaagggtttaatctttttggctgtgttatgcttctcagcactgtcactgagtcgttgtcttgcggaggataatggacttgttatgaacttctacaaggaatcatgccctcaggctgaagacatcatcaaagaacaagtcaagcttctctacaagcgccacaagaacactgctttctcctggctcagaaacatcttccatgactgtgctgttcagagttgtgatgcttcactgttg

SEQ ID NO: 60196 - DNA, 251 bp, Glycine max
ggttctagtgtgtgattgtttgttgttgtaactcgttcttcttcttttgttgttctgtgtttgtgtttgttttttctctcacctgaaaatgtcttgctgcggtggtaactgtggttgcggaagctcctgcaagtgcggcaacggctgcggaggctgcaagatgtacccagacttgagctacactgagtcaaccaccaccgagaccttggtcatgggagtggcacctgttaaggctcaatttgagggtgctg

SEQ ID NO: 60197 - DNA, 154 bp, Glycine max
cgggatgcaggattatcacgactccagacgggatacaaggcgaaaggcatgacatgatgctcattcgaatcacaggtcgctggtaagccgacctactaatcttacctaacgagccaccttgggattcctgctccacaatgttctgaggctcatt

SEQ ID NO: 60198 - DNA, 279 bp, Glycine max
ggagcaagagtgaagagcgaagagaatggctcccaagggtttaatccttttggctgtgttatgcttctcagcactgtcactgagtcgttgtcttgcagaggataatggacttggtatgaacttctacaaggaatcatgccctcacgctgaagacatcatcacagaacaagtcaagcttctctacaagcgccacaagaacactgctttctcctggctcagaaacatcttccatgactgtgctgttcagagttgtgatgcttcactgttgctggactccac

SEQ ID NO: 60199 - DNA, 397 bp, Glycine max
  unsure (1)..(397): unsure at all n locations
ggttctagtgtgtgattgtttgttgttgtaactcgttcttcttcttttgttgttctgtgtttgtgtttgttttttctctcacctgaaaatgtcttgctgcggtggtaactgtggttgcggaagctcctgcaagtgcggcaacggctgcggaggctgcaagatgtacccagacttgagctacactgagtcaaccaccaccgagaccttggtcatgggagtggcacctgttaaggctcaatttgagggtgctgaaatgggtgtgcccgctgagaacgatggctgcaaatgtggaccaaactgctcctgcaacccctgcacttgcaaattganggtgttggaaaagcaagcttcaagcagagatagcccttaattaggaataatgataaactattaatgt

SEQ ID NO: 60200 - DNA, 200 bp, Glycine max
  unsure (1)..(200): unsure at all n locations
gtccgtcttgctgcgagctgccgcccgggggggattcgctcgctcgcttcggtgtccttttttcttcttctcttccgctctctcttctctgtgtctcggnggcgccttttgggggcttctggctggttgttcgggtgcttctgctctttgggtcctttttcttcgctttggcttctctgttgctttcggccttttggttg

SEQ ID NO: 60201 - DNA, 379 bp, Glycine max
ggcacaagtttgttgagatagctagaagcaataagatgaaaatgaaagtgcttgttttgtttgttgctacagttttggtagcatatgaatgccatggctcagactaccagaagttccctctccaaatgaaaactgggtttggtgggcaatacagcaatgaggtggcatgtgccagttggaggcttggcgtggaagcaaacaacgtagtcaagtggcaaactgttcctgcagcttgcggagagtacatagctgactacgttctaggagaccaatatagatcagattccaaaacagttaaacaacaagctttattccatgctaaatccctcaaactcaccaacaaagatgtctttgtcttggacgttgacgacactactct

SEQ ID NO: 60202 - DNA, 292 bp, Glycine max
ggcacaagtttgttgagatagctagaagcaataagatgaaaatgaaagtgcttgttttgtttgttgctacagttttggtagcatatgaatgccatggctcagactaccagaagttccctctccaaatgaaaactgggtttggtgggcaatacagcaatgaggtggcatgtgccagttggaggcttggcgtggaagcaaacaacgtagtcaagtggcaaactgttcctgcagcttgcggagagtacatagctgactacgttctaggagaccaatatagatcagatttcaaaac

SEQ ID NO: 60203 - DNA, 254 bp, Glycine max
gccaaaagaagaccgaaggggaacgtggaagaaattatttagcgtcaaccgtcgcactcgggccttcgttcagcacagtttcgcaatccctttcgaagaaacgcgttttgtcgtccctttctgagcgtgggcctttgtttcggacttggaccccacattcgcgcacattcgcaccacagtatatcccccctttcgatgaattcgcgtgccctttcacagtttccaccaggacctagtcccaaaggttcacctta

SEQ ID NO: 60204 - DNA, 96 bp, Glycine max
ggaaaagaagagtactaactcgagcttgttcttctcctcaatatacctctttctcaatccctatccatctctctcgttcctcaacttcagagctct

SEQ ID NO: 60205 - DNA, 189 bp, Glycine max
tgggatagaactgacaagggcgatacacctcatttcgcgaagcattagattagacttccagatttaacctccacgatgcagcagcactctgtgttgtactacaaacacataggttatgcacttttctttcttttctcttcatcctcaatccatcatatctattccatttgctcactggagagaatcacg

SEQ ID NO: 60206 - DNA, 280 bp, Glycine max
ggagttggatgagtttctgaagctttctatggagatgaagaatccactgtcctgcatggctgtgcccacggtttctgttcacgttaatgtgtgttgttgggtttagttggtttggtttgtcagcctaagttagtggatgttctgcccacggctgtccctacggtttctgttcaagtttatgtgtgttgtttggttcgtctgttgacgtttacagatgtcgttcggttgagttcgtttggtatgtgttacctgctaaatttagttctgcactgctaaggtt

SEQ ID NO: 60207 - DNA, 376 bp, Glycine max
ggttctagtgtgtgattgtttgttgttgtaactcgttcttcttcttttgttgttctgtgtttgtgtttgttttttctctcacctgaaaatgtcttgctgcggtggtaactgtggttgcggaagctcctgcaagtgcggcaacggctgcggaggctgcaagatgtacccagacttgagctacactgagtcaaccaccaccgagaccttggtcatgggagtggcacctgttaaggctcaatttgagggtgctgaaatgggtgtgcccgctgagaacgatggctgcaaatgtggaccaaactgctcctgcaccccctgcactttcaagtgaggtgttgggagagcaagcttcaggcagagatagcccttaattaggaat

SEQ ID NO: 60208 - DNA, 306 bp, Glycine max
ggttctagtgtatgtgattgttgtgactcgttcttcttcgtcgttatcttcttcttttgttgtttgtgtgtttgttttttctctcacctgaaaatgtcttgctgcggtggtaactgtggttgcggaagcgcctgcaagtgcggcaacggctgcggaggctgcaagatgtacccagacttgagctacaccgagtcaaccaccaccgagaccttggtcatgggagtggcaccagttaaggctcaattcgagagtgctgaaatgggtgttcccgctgagaacgatggctgcaaatgtggagctaactgc

SEQ ID NO: 60209 - DNA, 147 bp, Glycine max
gacacacccctcagcacatacctccgtcgcgccttcaaaactctatcgatcgggattctctacctgtcctgccacgtatggatcgcgatccatggctcgtatcaaccattttgtgtccaaatcgacacgtcgactccgctcctcaga

SEQ ID NO: 60210 - DNA, 427 bp, Glycine max
tgcgagaataggacagaacgggacagacacaaatcacaaaccccatttccaaccccacattgaacctaaaaaagcaatgtcacctccaccattttccccgcctctctctatttcccttctctttgtcttcctgttagcaccattactcttagctcaatctccaccttctccttctccttcttcttcttcttcttcttctgttgcctgcaaatgcacactatatccaagttctccataaaacaaagcctcaaacaggcaacaaaactagccaaagtctttgacgactttctccaacgtccacaaaaatcaccttccctcaaccatgctgtaaatgcagtcacttggttaatggaatctgacctaaaacaacttcaatgtggactacttggcgttctatatccgaggagctcaaatccgcaagctcctc

SEQ ID NO: 60211 - DNA, 389 bp, Glycine max
ggttctagtgtgtgattgtttgttgttgtaactcgttcttcttcttttgttgttctgtgtttgtgtttgttttttctctcacctgaaaatgtcttgctgcggtggtaactgtggttgcggaagctcctgcaagtgcggcaacggctgcggaggctgcaagatgtacccagacttgagctacactgagtcaaccaccaccgagaccttggtcatgggagtggcacctgttaaggctcaatttgagggtgctgaaatgggtgtgcccgctgagaacgatggctgcaaatgtggaccaaactgctcctgtcaacccctgaacttgcaattaaggtgttgggagagcaagcttcaagcagagatagcccttaattaggaataatgataaacta

SEQ ID NO: 60212 - DNA, 129 bp, Glycine max
gctgcagaaaaagccggaggggatatgagaaaaaccgggacggttatatctctttgggtatgatcgcctctctctgagcgctgcatctcatgttcatcgatgatccttgcactttccttgagggaaatg

SEQ ID NO: 60213 - DNA, 256 bp, Glycine max
tgagtgggacagctgcagtaccaccggctggcatgcacgctccaatgcggataatccgtgtcaggccaccacctcgcatagggatctcgacatccatcgtgatcgcgcacatccggggcatcttgggtctgtgaagaatgcggccgttacggcctttgtctgtgtgtctaactcctaccacatcgctactcaaagatcaggacctttgagatctgctgttggaaccgtcgtagacaccgtttccaccgtgctgggt

SEQ ID NO: 60214 - DNA, 357 bp, Glycine max
  unsure (1)..(357): unsure at all n locations
gacttcaattgcaatcaaattagttcattctctttgcgcagttccctacctctcctttcaagatgcagatcttcgtcaagaccctcaccggaaagaccatcacccttgaggtggaaagctctgacaccatcgacaacgtcaaggccaagatccaggacaaggaaggaattcccccggatcagcaacgtctcatcttcgccggaaagcagctcgaggacggccgtaccctcgccgactacaacatccagaaggagtcaacccttcaccttgtccttcgtctccgtggtggcatgcagatcttcgtcaagactctcactggcaaaaccataaccctagaggtcgaaagctcntgacaca

SEQ ID NO: 60215 - DNA, 339 bp, Glycine max
ggttctagtgtgtgattgtttgttgttgtaactcgttcttcttcatttgttgttctgtgtttgtgtttgttttttctctcacctgaaaatgtcttgctgcggtggtaactgtggttgcggaagctcctgcaagtgcggcaacggctgcggaggctgcaagatgtacccagacttgagctatactgagtcaaccaccaccgagaccttggtcatgggagtggcacctgttaaggctcaatttgagggtgctgaaatgggtgtgcccgctgagaacgatggctgcaaatgtggaccaaactgctcctgcaaaccctgcacttgcaagtgaggtgttgggaa

SEQ ID NO: 60216 - DNA, 276 bp, Glycine max
gatagcacatcaattaatcttacgcaacttcgaatctcacattacagtcctccccgcgtagtcttcctctatcagtccttcttcaaggctcatattatacaaatagctcgcatgatccaacagatgtgaaatgcacctaagaatcagttcaccaccagagactgcaaagaaattctgcaagaaaatcggtgaagttatcaaccatcattgctatcaccatgaaactgataccctacttgagatccaaacataccacaagagcaaattgcttctgat

SEQ ID NO: 60217 - DNA, 385 bp, Glycine max
  unsure (1)..(385): unsure at all n locations
ggttctagtgtgtgattgtttgttgttgtaactcgttcttcttcttttgttgttctgtgtttgtgtttgttttttctctcacctgaaaatgtcttgctgcggtggtaactgtggttgcggaagcccctgcaagtgcggcaacggctgcggaggctgcaagatgtacccagacttgagctacactgagtcaaccatcaccgagaccttggtcatgggagtggcacctgttaaggctcaatttgagggtgctgaaatgggtgtgcccgctgagaacgatggctgcaaatgtggaccaaactgctcctgcaacccctgcacttgcaagtgaggttgtgggaaaagcaagcttcaggcagagatagcccttaattangaataatgataa

SEQ ID NO: 60218 - DNA, 379 bp, Glycine max
  unsure (1)..(379): unsure at all n locations
ggttctagtgtgtgattgtttgttgttgtaactcgttcttcttcttttgttgttctgtgtttgtgtttgttttttctctcacctgaaaatgtcttgctgcggtggtaactgtggttgcggaagctcctgcaagtgcggcaacggctgcggaggctgcaagatgtacccagacttgagctacactgagtcaaccaccaccgagaccttggtcatgggagtggcacctgttaaggctcaatttgagggtgctgaaatgggtgtgcccgctgagaacgatggctgcaaatgtggaccaaactgctcctgcanaccctgcaacttcaatttgnggtgtttggagagcaagcttcaagcagagatagcccttaattangaataa

SEQ ID NO: 60219 - DNA, 107 bp, Glycine max
ggattgagtttgcctgtcgcactgctctcacccatctgaaaatgtcattcaccttgcccactccgccttctacagcgcggtcttcagcatctctcattcatacaacg

SEQ ID NO: 60220 - DNA, 385 bp, Glycine max
ggttctagtgtatgtgattgttgtgactcgttcttcttcgtcgttatcttcttcttttgttgtttgtgtgtttgttttttctctcacctgaaaatgtcttgctgcggtggtaactgtggttgcggaagcgcctgcaagtgcggcaacggctgcggaggctgcaagatgtacccagacttgagctacaccgagtcaaccaccaccgagaccttggtcatgggagtggcaccagttaaggctcaattcgagagtgctgaaatgggtgttcccgctgagaacgatggctgcaaatgtggagctaactgcacctgcaacccctgcacttgcaagtgaggtgttggagagctaaagcttcaagcagaaatggcccttagaaataatgata

SEQ ID NO: 60221 - DNA, 264 bp, Glycine max
cggggtggttgggcgcggtgcggagccggacacaacgtcgtgccgttcaatcccctccgtgttcatcactccaatacacattcttcccttcttgcgtgttgtcacggcaccattaacatcctaagcagtaatcgtcgtcagaatatcactgattccctcagatggctattccctaatcgcaatgccattgatgatagttgcaatgatttctaagctagaattgatccactacgcgtggagggctcgatcggagacgatgctggg

SEQ ID NO: 60222 - DNA, 299 bp, Glycine max
ggcacagccggccagtgttcatactcaaccatcactcaagatctaaagtctgcaccttgcttccgagtcagcgattcatggcatgtacctacgaaatcgctcagcaagtccatcggctgaaatcgcacgaggaagccgttggtcacaaatgatgcgcacagttctaccctgggtccaggctgactcacaatcactcaacactccgtgccaggaatggtagttactatggagataggtctgcagtcttcaagtttggatcgagtcatggcacacgcgccggctgagaggcgcgtgtccgg

SEQ ID NO: 60223 - DNA, 244 bp, Glycine max
ggtgagtgagggattgagtttttcctctgttttttttttttttttttctgtctatgatccattttactgaactctgattccttttcctttttacatcaactcttggcttcttagtgtgtcacaatgacttcagtcctttccactaagggtgtgtttgacttaagagcaagcctcaattggaatatgggattttttttctctttcattctggccattcatctcgctcttgggacattttgttctc

SEQ ID NO: 60224 - DNA, 269 bp, Glycine max
ggcagttcaattccaatatattccattctctctgtgtagttccctacctctcccttcaagatgcagatcttcgtcaagaccctcaccggcaagaccatcacccttgaggtggaaagctctgacaccatcgacaacgtcaaggccaagatccatgacaaggaaggaatccccccggaccagcaacgtctcattttcgccggaaagcaacttgaggacggccgtagccttgctgacgacaacattcagaatgagagtactctttacctcgt

SEQ ID NO: 60225 - DNA, 286 bp, Glycine max
tcagtgggatcgagaatatatttgagaatggggaatcagtacctacttctggttaccctggtgtcagtctcctagggtgatcggtcggaaccaccgccgttcttatcgatccctcgcactgacgctttcaattctcaattcgccaatatcgcttcatcttcgcagacctatttgcacacacgcacttgggacaattgcaattttgacacatgtcctcttcggcgagacttaggacatatccggcgttatccacagtccagtcgaccaagcctttgacggatatggc

SEQ ID NO: 60226 - DNA, 334 bp, Glycine max
aggcgtcagtacaggagagaaagggacacagaacggggagatcggaggacaaaatattctcacgcggaacacaatgtctatatacactcaaatctacgcagcaacggctgatcggaaaaatcgggccttacatcgtacttcatgactccgccatctacactcaatccctctgacgacgaccccatcaccaacaatattgcagctcagcagcctcaaatgcccaaaacagttccttcaaccgaaaccgtctccgaacgagacgattccgtctacggcttcttcagaaatgccgttatgaaagtataatccgcatagtcaagtttggatgattcat

SEQ ID NO: 60227 - DNA, 164 bp, Glycine max
ctcattgtctctcattctgaggctcacagacataggcactcacacgactatgcttgaaggttggtcggaaccacatgtgcacgaagggtcttagcggaattatcatgacaccatctatggtgttcggtgtaagcttccgcagagctttcacagtggcggcggtg

SEQ ID NO: 60228 - DNA, 375 bp, Glycine max
ggagtgagcaagagtgaagagcgaagagaatggctcccaagggtttaatctttttggctgtgttatgcttctcagcactgtcactgagtcgttgtcttgcggaggataatggacttgttatgaacttctacaaggaatcatgccctcaggctgaagacatcatcaaagaacaagtcaagcttctctacaagcgccacaagaacactgctttctcctggctcagaaacatcttccatgactgtgctgttcagagttgtgatgcttcactgttgctggactccacaagaatgagcctgtctgaaaaggaagccgattggaagctttgggttgagaaatttcaggtccattgagaccatcaaagaagctttggatagg

SEQ ID NO: 60229 - DNA, 310 bp, Glycine max
gagaacacacacgagaactagagcagataaacagtgtgtctgctctagaagacattttagtgccattaggagagaagaaccttgccttttcacattagaactagaacaaaaccagaaatgctgcttagagaaaccattcgcaagaccagggttttatttcacaagactctccgaagcttcaagtctgtcatctttggagggtatcaaaaactacccatatctctctccttcaatccgtatctcggtcgcagtggcattgcaagaacttacagttgcgagcaattctactacgagtttgatgacatgctgc

SEQ ID NO: 60230 - DNA, 383 bp, Glycine max
  unsure (1)..(383): unsure at all n locations
ggttctagtgtgtgattgtttgttgttgtaactcgttcttcttcttttgttgttctgtgtttgtgtttgttttttctctcacctgaaaatgtcttgctgcggtggtaactgtggttgcggaagctcctgcaagtgcggcaacggctgcggaggctgcaagatgtacccagacttgagctacactgagtcaaccaccaccgagaccttggtcatgggagtggcacctgttaaggctcaatttgagggtgctgaaatgggtgtgcccgctgagaacgatggctgcaaatgtggaccaaactgctcctgcaacccctgcacttgcaagtgaggtgttgggagagcaagcttcaagcagagatagcccttaattangaataatgata

SEQ ID NO: 60231 - DNA, 367 bp, Glycine max
ggacttgtacgtagacagacactacaacatcgtatgtgtgagagtgaagtgggaaaaagcatatcagattcaccccacattattattttatcttcctagtttccaagacattattttgtgtacattattctttgaatctgggatgccccaaactcctagaattgtaactgttttcaaccttgatcttactcaacatcatatccacactccaaaagggttaaaagaataaaccacttctgaaaacattgcaacaacaacaagaacaaggaacttcacaagtggggggaaaagctagtcatattttactgttattgtttttttttttttttttttgctgctttttctttttctgttgtgcatgtctgac

SEQ ID NO: 60232 - DNA, 390 bp, Glycine max
ggttctagtgtatgtgattgttgtgactcgttcttcttcgtcgttatcttcttcttttgttgtttgtgtgtttgttttttctctcacctgaaaatgtcttgctgcggtggtaactgtggttgcggaagcgcctgcaagtgcggcaacggctgcggaggctgcaagatgtacccagacttgagctacaccgagtcaaccaccaccgagaccttggtcatgggagtggcaccagttaaggctcaattcgagagtgctgaaatgggtgttcccgctgagaacgatggctgcaaatgtggagctaactgcaactggaaaccctgcacctgcaatttaggtgttggagagctaaagcttcaagcagaaatggcccttagaaataatgataaaaac

SEQ ID NO: 60233 - DNA, 102 bp, Glycine max
ggttctagtgtatgtgattgttgtgactcgttcttcctcgtcgttgtcgtcttcttttgttgtttgtgtgtttgttttttctctgccctgaggctgtcttgc

SEQ ID NO: 60234 - DNA, 385 bp, Glycine max
ggttctagtgtgtgattgtttgttgttgtaactcgttcttcttcttttgttgttctgtgtttgtgtttgttttttctctcacctgaaaatgtcttgctgcggtggtaactgtggttgcggaagctcctgcaagtgcggcaacggctgcggaggctgcaagatgtacccagacttgagctacactgagtcaaccaccaccgagaccttggtcatgggagtggcacctgttaaggctcaatttgagggtgctgaaatgggtgtgcccgctgagaacgatggctgcaaatgtggaccaaactgctcctgcaacccctgcacttgcaagtgaggtgttgggagaacaaccttcatgccaagatagcccttaattaggaataatgataaa

SEQ ID NO: 60235 - DNA, 271 bp, Glycine max
gacgagaagacgacatttcggggaattcgtaccatgaaagtaatttctagggtgtcccgaatgttgcactaccaatcggctctcgcgctgtacgcctgagaaggatgccggatttccggttgtccctgtagatttcattcagggggagcatcaggatctttattaacacatattatagccacttagaattattccagtcattcccaatcgacattacatctcatataaatctccaactaggatgacgtactatgtataacagatcacctta

SEQ ID NO: 60236 - DNA, 279 bp, Glycine max
gatactcaactcactttcgtcgtcgctcacgctcacttccgggtacgagcgtcacggttcattagcctcagccaccagcagttcaatttgagcagcttcatgcactcatacagccgctcagacaatgacgtcatcatctgacaaagtgtctatctctagtccgtatcgcccctatattatagctccgccttgcaccagccgactactcatcctcaattcctcacgcttttcttaacctcacaggcggttgccggtggtgttcgtgctgctgtcaagcct

SEQ ID NO: 60237 - DNA, 286 bp, Glycine max
cacgcgtgactacagctgccatataaccacgcatggggagaccgcatttgcaaaatctagcgacccagactacattacgtcgccgtctacctcacccccaggttacgtccagacagatataccacggagatctgcaaatgacacatcgaatcaggagtttaccttgctaaacacgatgtcactttggcgagtcattctcacatgcatatcacatatccgcaagtgattaggctgatgcatacttttcactctccccagtacgtgacggacacttatgcatcgatgc

SEQ ID NO: 60238 - DNA, 90 bp, Glycine max
aaggggtaacagagagggttcgatctcgcaggcctggctgtttcacacacgggcgttcaatatcgccgatctcactgcatcggaggtggt

SEQ ID NO: 60239 - DNA, 175 bp, Glycine max
gaaatcgaaagtgttttggaaatagcaaaaacgcactttctctctcgtctcgttgctggcagatttctctattcggactctctctcactcttcaatctattccacaggggcttcgaacttgtcatcactgcattttgcctttctatgggaatttgaaaagcctaattttcgtttt

SEQ ID NO: 60240 - DNA, 112 bp, Glycine max
gaatcataaagtggttgataaatagcaatgtcttatgacactggacggatattattagaaggttatgtctgtgacgaaggtgtctcagcacgtctatgattgggatggccaa

SEQ ID NO: 60241 - DNA, 292 bp, Glycine max
gaagagcagcaatgagtattagaatccatcatgcattggcattgcttattgctacaaagccattacacactcacatatcctcaaagataagaaacaaagcaccataactcatagcaaggtggccaaaaggccaagatttggtaagcctagcatgctccaagtctcttgccatccacaagtcgcttccagtagaaagcaatctctttctgagtctctattgcagctttcttaatcttctcaccagtctcactagtgatagctgtgatatgaacagctttggtagtgagggggc

SEQ ID NO: 60242 - DNA, 161 bp, Glycine max
aacaaaccgagaaagcttttctgaagcaaccaaaagtgtttctcagcacaaagaacactgggaagggaaagagacctggaaaaggtgggaaccgcttttggaagtccattgggcttggatttaagactcccagggaagccatcgaagggaactataatgac

SEQ ID NO: 60243 - DNA, 164 bp, Glycine max
ggttgttgttgtcgttgcttctgcactttgcagcatcttggttgcatcagcagttcggacgctctgtgattcgacaccgcaggactctctagactctcacgctgcagcatctctcatctcgtttccacctaactttatcttccttttgcgtccctttcacttct

SEQ ID NO: 60244 - DNA, 228 bp, Glycine max
caaaaaaccacccgtcgggggcccatttaaaaaaaacaaatccccgaaattgagggtttcaacttggggggaaccacccaaattgaggaactggaattttacggaaaccccacttagaattcatcaaaaacggcattcaacaagaaaccttggccttccttatccggcctccaaggaaaggtaattcccttaaaggggtcccttgccccataacaaagttttaacaaa

SEQ ID NO: 60245 - DNA, 366 bp, Glycine max
acatcagtgaaggtgacacaaaacggtatctagggaacacaacattggagagtatcgagctagaaccacagaaaggaccggttcatgatcaatatcactgatcatgttggttctatttcttcttcatcctcaagatcatcttctgtttctggaagatcaagtgggtcatcattcgtatctgattcatttgaggatctaacagcctctgcgtcctcttctgcatcaacatcagctgatgatcaacttgtagttgtagctgatccattgggtgacatgacatcgctctttcaacaacttctcatcaacatggggctatcacaattctaccagggagagtcacaaaccttcacttcactgacccatgtg

SEQ ID NO: 60246 - DNA, 213 bp, Glycine max
cacgcggacgtacagctgtcaaaaatccagctaaagggactgccacagaggggcactagggactcactctcttcacagcaggactcacagtggctttcatcttctcggggtaagttttgatcatgtacacatcatatgaagacaattcagaaggctaacgatgtggatccaactcaatttgatgaatcagttggtaatgacagtgtttgatct

SEQ ID NO: 60247 - DNA, 296 bp, Glycine max
ggaacagctttttgcagatgtcactggctcctcctgttgcagtccttattctcagcttgttggctactttcctagtggtgattcactccccgattgcatttatagaatcttttaccagcccttattggacagaaagacacttcacgctttctctctcacatccctttctctatgctcacatatatatataataaaactctacaactggccaatataatcagcttttgctccctgactcatgagtatatgatatatactttttatgtgttgtgtaccactttagattactacttact

SEQ ID NO: 60248 - DNA, 306 bp, Glycine max
ggcacaagtttgttgagatagctagaagcaataagatgaaaatgaaagtgcttgttttgtttgttgctacagttttggtagcatatgaatgccatggctcagactaccagaagttccctctccaaatgaaaactgggtttggtgggcaatacagcaatgaggtggcatgtgccagttggaggcttggcgtggaagcaaacaacgtagtcaagtggcaaactgttcctgcagcttgcggagagtacatagctgactacgttctacgagaccaatatagatcagattccaaaacagttaaccaacaag

SEQ ID NO: 60249 - DNA, 412 bp, Glycine max
ggttctagtgtgtgattgtttgttgttgtaactcgttcttcttcttttgttgttctgtgtttgtgtttgttttttctctcacctgaaaatgtcttgctgcggtggtaactgtggttgcggaagctcctgcaagtgcggcaacggctgcggaggctgcaagatgtacccagacttgagctacactgagtcaaccaccaccgagaccttggtcatgggagtggcacctgttaaggctcaatttgagggtgctgaaatgggtgtgcccgctgagaacgatggctgcaaatgtggaccaaactgctcctgcaacccctgcacttgcaagtgaagtgttgggagagcaagcttcacgcagagatagccctttaataggaataatgataaactattaatgtgtaactaagaacttatg

SEQ ID NO: 60250 - DNA, 265 bp, Glycine max
tcaatggggatgcaagaagttgtcatttgggagcaccgtggattcattacaataatctcaatggttgcccaatagcagaacacacgtgttccatatgtttaaccgcaacggctcacggagtaataacacaatgagctcacctagcccctgagtaatcggtgcaccgtcaactcagataatgccctgaatcctatgattcagaggattcacgtcaacagcgacagttgcattgacattgacaattttggagatctgtatcagacca

SEQ ID NO: 60251 - DNA, 312 bp, Glycine max
ggagcaagagtgaagggcgaagagaatggctcccaagggtttaatctttttggctgtgttatgcttctcagcactgtcactgagtcgttgtcttgcggatgataatggacttgttatgaacttctacaaggaatcatgccctcaggctgaagacatcatcaaataacaagtcaagcttctctacaagcgccacaagaacactgctttctcctggctcagaagcatcttccataactgtgctgttcagagttgtgatgcttcactgttgctggactccacaagaaggatcttgtctgagaacggaacagatag

SEQ ID NO: 60252 - DNA, 283 bp, Glycine max
  unsure (1)..(283): unsure at all n locations
gactcgcagttgtattgttgaacaagggtttctctgtctgcttcttcactttctctcgtttcaatcgaaaccaaaacaaaaacatgggcagaaaattcttcgtcggtggcaactggaaatgcaatgggaccactgangaggtaaagaagattgttactactttgaatgaggctaaagtccctggagaagatgtcgtagaagttgttgtgagccctccttttgtgttccttcctgtcgtaaaaagtttgctgcgccctgatttccatgtttcggcacaaaactg

SEQ ID NO: 60253 - DNA, 261 bp, Glycine max
ggggaggaagcacagaccacaggggcatatcccaaatttgtttacacagtggctcacataacatacattgactaactgagggtttggtacttaagttcaacttagttaaaattgtttgtgtctggaattggagtttggaagtggctctcattgctgcaatttccaattgtgcagttgccactgatgcagctggagttgcaggaaatgtctctgcctttgggttgtctgtgtcgcccatacccacatttaggacgattatca

SEQ ID NO: 60254 - DNA, 394 bp, Glycine max
ggttctagtgtatgtgattgttgtgactcgttcttcttcgtcgttatcttcttcttttgttgtttgtgtgtttgttttttctctcacctgaaaatgtcttgctgcggtggtaactgtggttgcggaagcgcctgcaagtgcggcaacggctgcggaggctgcaagatgtacccagacttgagctacaccgagtcaaccaccaccgagaccttggtcatgggagtggcaccagttaaggctcaattcgagagtgctgaaatgggtgttcccgctgagaacgatggctgcaaatgtggagctaactgcacctgcaacccctgcacttgcaagtgaggtgttggagagctaaagcttcaagcagaaatggcccttagaaataatgataaaaactata

SEQ ID NO: 60255 - DNA, 257 bp, Glycine max
ggcacaagtttgttgagatagctagaagcaataagatgaaaatgaaagtgcttgttttgtttgttgctacagttttggtagcatatgaatgccatggctcagactaccagaagttccctctccaaatgaaaactgggtttggtgggcaatacagcaatgaggtggcatgtgccagttggaggcttggcgtggaagcaaacaacgtagtcaagtggcaaactgttcctgcagcttgcggagagtacatagctgactac

SEQ ID NO: 60256 - DNA, 259 bp, Glycine max
tcagtagagcagagaaagggatatcaaaagggctgattcttttggaacctcgcgattcctgaccgtccaagtgttaaccatcggattaaggtctatcgactcactacgtatgcagcgtatagagctcatgagaaggagtccgagatcattatctactctgctcagccatccatgtaagaagtcttcctcgcaattggtcttctagcttgtatccgtcgccttacacgtcgcataactttgatctcatactatcatcgcc

SEQ ID NO: 60257 - DNA, 216 bp, Glycine max
cgaggaagacagggatcggagggatgacgcggacttcctgcataagcatcctcagtgaatcttctgatattgacacggaaaccattgggtcatccagcaggcctccgaggacattgattttgcccttgtgatatgccgaacatgataccaacgacgcctaatgtcacttccattgaacgcacatgccatccacaacatctcaacctaggaccaagt

SEQ ID NO: 60258 - DNA, 313 bp, Glycine max
ggttctagtgtgtgattgtttgttgttgtaactcgttcttcttcttttgttgttctgtgtttgtgtttgttttttctctcacctgaaaatgtcttgctgcggtggtaactgtggttgcggaagctcctgcaagtgcggcaacggctgcggaggctgcaagatgtacccagacttgagctacactgagtcaaccaccaccgagaccttggtcatgggagtggcacctgttaaggctcaatttgagggtgctgaaatgggtgtgcccgctgagaacgatggctgcaaatgtggaccaaactgctcctgcacccct

SEQ ID NO: 60259 - DNA, 341 bp, Glycine max
ggaacctttgcattctattcattcaagattcagcaagtgcgttttggaagcagagaccgaaatacttcgagatggcccgtacaaagcaaactgctcgtaagtcaactggaggaaaagctcccaggaagcagcttgcaaccaaggctgcacgtaagtctgcaccaacaactggtggtgtgaagaagcctcatcgttatcgccctggaactgttgctcttcgtgagattaggaaataccagaagagcactgagctcctaatcaggaagcttcctttccagaggttggttcgtgaaaatgcccaggatttcaagactgatctgcgtttccagagccatgctgtg

SEQ ID NO: 60260 - DNA, 374 bp, Glycine max
gtagaaccaaaggtataccaaagaagggtcaacaggcagaaaaaggttgttgctgggaaatggtgtggcaaagtttggatgtccaatcacgtccatccccttttagcaaaaagagactccgaagatgttgaggatgagaaactcttacttgggtggatattacctgatgagaaattggagagatcagaaattaccctcaaaagtgagactactagcacaacatcaggtaagaagatgaaaatgacagctgagaatggacgatccaagaaaggaagttatgccaacgacaaatgtagttgcacataattccactgaaggtaaacacaactcacagccatggaggattcttagaactaagaaagctaggtgtgttg

SEQ ID NO: 60261 - DNA, 362 bp, Glycine max
ggagtgtgtgagagagcgagcgagcgagcagtttcaaagagaggatttgggattgggaaggcgagggattgcgctgcgtctcttcctcttctctttcgattcatccctcattcataatcttccaatccaacaacctcagcctcacactcacacatacacacatctgaacgcgtatcgtccctcccatggcttcaaagcgcatcctcaaggagctcaaggacttgcagaaagacccaccaacttcttgcagcgctggtccagtagctgaggacatgttccattggcaagcaacgattatgggtcctgctgatagtccttatgctggaggtgtattcctagtcactattcactttcctcggatt

SEQ ID NO: 60262 - DNA, 370 bp, Glycine max
tcattttctttttcacttaatttctatcttttttttattttcaaaactcctacattgttttcccccctttaaattagggctaggttgttggatcttgcttcttggtatcgttttattttttctttatatatttattcggttttcggtggacatcgatagacgactagtcaaccaagagcctcgtcaattgaactccgaaagaaacatatttttatgggctgagaaattgttgttttttacggctatgatgggttgagaacattttgctcgtaatcttaatgaaagtagaaaaaccgttttgaacacgaatcctatgttttgtaattaatcatgttgactacgcgagggatctgcatttgcagctcttgac

SEQ ID NO: 60263 - DNA, 341 bp, Glycine max
gagagtagagcctaagcacacacctctcagtagccaagtccacacactctctcattctcatctctctcgccgtaccccaggaaattaaagagcagaaaaaatatggtttcccttgaacctattgagggcaacctcagatctagtgatgcaccttcaagtcctagaatatctttctcagcagagttcttagatgagaacaacttcatctccatcagtccaaacgctgagtatgaggggccagatcaagagaaggaatgtgagagagcaaggaatgctgctgagtttgagtttctctcaaacaacacgaggaacagcaacacagtggtaactgctgacgagct

SEQ ID NO: 60264 - DNA, 269 bp, Glycine max
agaagggggagaagtggaaagggagcctcagtaaccgtttcctgtggtcgattagatattgccttcataccagcatctgcgtcctctgcgacgttccttcaatccttcacctccattctctctaggccgagagtctcgtactgtttgtagacgctaaggatgtcagggaaaggggctaacgggttgatcacatgcaaatcctccgccgctaacgagatagacaatgccaagaggatccccatctcaccttcgtcacatgccgggcttca

SEQ ID NO: 60265 - DNA, 249 bp, Glycine max
gaagtcatacagaggttccgatgagtagtaaattctcgcactaaagagctttcatgagccacactgctcataattccacaagacagaaatgctcctagcgaatcaacttacatggagcgcttcaacctccatctgcactaacgactgggccatctacatacccatatccgttaaatactattacagttgcacatcctgaaattaggcaataccaacagaatcacgatcatgtaataatgaaactcccct

SEQ ID NO: 60266 - DNA, 347 bp, Glycine max
gaatgttggttggaaatttaagtataactaccgaatggacgggacgagcactgacagatgtcaactcgcgctgaacttttccttccgttcaatcgccgccatgctcatcctctccgtcacagtcacctcaaccgatcatgttctaaacgtctcgctctcaggacatctggagatgattcaacattctatagcttcaacattttgtgagtatagtctgcgcagatgtaaaatggacttgcctaaacgtgatacacatctgactgttgctgtgacgaatatacattgagagatctgcacaatgattataaactcatggtgccaacctctgttggaagctcttcattttc

SEQ ID NO: 60267 - DNA, 250 bp, Glycine max
acagaaaggggagagagagtgacatggaatgagagggagcagacggttctattagaagattcaaagatgtgagactcctcctccccatcaatgcgtcttgaataacaacgatacaaggggccttaaacggtaatcactggacgttcatgggaatggtttttacgcatgtacgcaaacagggtttaacacttccatgagaatccgcagcaattccagcagtcaattttaccttctgtgatcgagaaataca

SEQ ID NO: 60268 - DNA, 141 bp, Glycine max
gatcgcaaagcggcctcaacatctgacacagactctatccctaatccctatcttcatctctgctctctccgcacgctttggagcctctgatggcagtttctggttatgacttgtacgtgttattcgcgtgctatccgtgca

SEQ ID NO: 60269 - DNA, 252 bp, Glycine max
ggaaatcgagagaacgagtgaggagagaattacagagcattttccagcacgagttacacgagggtaatcgaaccctctctttcgctcggaagctgcgtttaatatcttactcgccttagattgttcttctctttcattatactgttctcttttcgatttgagggaacagtacgagagtgtgaggatcggttagcccaagtgcacaggtattcactagggtaatggagtctcacgatgagactggatgcgagg

SEQ ID NO: 60270 - DNA, 293 bp, Glycine max
ggaaatcgagagaaagagtgaggagagaattacagagcattttccaacacgattacacgaccgaatcaaaccctctctttctctccgaagctgcgtttaatatcttactcgccttagattgttcttctctttcattatactgttctcttttcgatttgagggaacagtacaagagtgtgaggatcggttaacccaactgcacaggtgttcacaataatatagtggtctcacgatgagacaggggatgacacgcccgagagcgccacactctgtgctaaaaaatgtggggtctc

SEQ ID NO: 60271 - DNA, 304 bp, Glycine max
  unsure (1)..(304): unsure at all n locations
gaccgcacagtttctgaattctgggtgttgagtttcattttctccatttttttttctctcgcttggatgtgtgagtttcaatccaggagatcagggattacactatatttgagaatctgaaagagtgactatgtggtctatttgagcgtgtgaagtttgtgtttgtgtgaaaggtgtgaggcttattattcatacaagagtttgtgtctgttcacagaactgatggtggtgtggtgtgtgtcggtggcaatgtacgcaactttggtggagaggggtaganagagagctggacatgtcaagaaag

SEQ ID NO: 60272 - DNA, 162 bp, Glycine max
acgcgtcaattcagtcgtgagaccacgagtccgtggagctgttagaagatcacaatatgggtttgttcgtgacatgaggatccctcgcattataggatcgcagagtattacgatttgtgtgagacgtgtatgtggcttattgatttgtagtgtcgttactca

SEQ ID NO: 60273 - DNA, 114 bp, Glycine max
catcagtcgtgctgccagacgagagaacaggggagacaggaagcggttctcagattttggaaaatcctcaaatcacgtggaattcagtcacattcatactactgaacaatattt

SEQ ID NO: 60274 - DNA, 300 bp, Glycine max
ggggtccttcttcctgtactccctgatggtcgtcgaagagaacaatggtgatcttcacaaatagaaagcatctggcttcatatatgattttgtactggctgatttgtggtaagtgctttacacaatgcttgttaaattcaacttcgttatttagacttgcttgatcctcttttgaaagttgtgataatatttgtacagaaggttgacttttaattgcaagctctgcagattaacatgttaatttatagtagctgatatacatttctttggccaaaaaataggttttaccctctttgaaaa

SEQ ID NO: 60275 - DNA, 386 bp, Glycine max
gaagacgttttcgggtctcagatacaatctccagccagaattcaagtgcatcaaaatgtgaaccagcaactgagaggctatccctccaacctttacaattcaagcgtgataggatcgccctcattcagggttgatccatctggggcagcagccgcaatggctttgaatccaagaaatgctgcctttgctaatcggagccagagctttatggttaacggtgatactgagtttccttctcctgctacctctactgctgccaagccttctaccttctctggttggggtccctctgatggcaagttagattggtccatccgtggtgatgaactaaagaagccgagcaaatcttcttctgtaggatttttgaagcagcagtagtcctttta

SEQ ID NO: 60276 - DNA, 325 bp, Glycine max
gaagatattagggtttttgagtgcggtgcggcgatcctagcactctcttctgcagctttcgccgacagcttcattcaccatggctgagcaaaccgagaaggcttttttgaaacaaccaaaagtgtttctcagctcgaagaaaactgggaagggaaagagacccggaaagggtgggaaccgcttttggaaatccattgggcttggatttaagactcccagggaagccatcgaaggaacctacattgacaagaagtgccccttcactggcaatgtttccatccgtggccgtatcttggctggaacatgtcacagtgctaagatgaac

SEQ ID NO: 60277 - DNA, 340 bp, Glycine max
gacccatattcgtttccctactcattccaccctttgattaataataatcatagccacacccacccacccaccctttgcccccacaaaatgtcacattcattctctttccccttaacaccccttgtgctcactttataaaccacaccatcatttagtcatcatctaaactaaaccactctctcttcattctctttctcttttcctttcacacagactcctcttatgatgggtcttgatcaagatgctagcagcaactctggacttcagcttattctacggttagctttgactgccaccatcaccaccactccatcatcaccaccatccatttccaacaagc

SEQ ID NO: 60278 - DNA, 54 bp, Glycine max
tgacttgcagatttcaaacattgctactaattccctccttttttcttcttcttt

SEQ ID NO: 60279 - DNA, 228 bp, Glycine max
ggagcaagagtgaagagcgaagagaatggctcccaagggtttaatctttttggctgtgttatgcttctcagcactgtcactgagtcgttgtcttgcggaggataatggacttgttatgaacttctacaaggaatcatgccctcaggctgaagacatcatcaaagaacaagtcaagcttctctaccatgcgccacacgaacactgctttctcctggctcagacacatct

SEQ ID NO: 60280 - DNA, 57 bp, Glycine max
ttggcaacagtcggtgccttcaatttccggtcgcccgaccttcctgttttgctttgt

SEQ ID NO: 60281 - DNA, 55 bp, Glycine max
ggagagtgcggtcggctcttccgtgacccttaccacccatggggctcgctctccc

SEQ ID NO: 60282 - DNA, 179 bp, Glycine max
ggttaagggttgctggtatggtctactggcatttgtcatcagctattactcgctctatggatcttcctagagttgctggagaaaggaatcgagatgaggagtggcatcctgtatctcaagtacacgatgtattcgcaagagatgactgcagtggatttggtgatactactggtaagaca

SEQ ID NO: 60283 - DNA, 141 bp, Glycine max
tggggttctagtgtatgtgattgttgtgactcgttcttcttcgtcgttatcttcttcttttgttgtttgtgtgtttgttttttctctcacctgaaaatgtcttgctgcggtggtaactgtggttgcggaagcgcctgcaag

SEQ ID NO: 60284 - DNA, 58 bp, Glycine max
tagggtctcttactgtgtctttgaacgcttctttctctctcttcttcccttgctctgt

SEQ ID NO: 60285 - DNA, 81 bp, Glycine max
ccacgcgtagaggctgcgagatatcacgaaggggcagacaggattcccaatttagaccaaataatcctccgctggtctctc

SEQ ID NO: 60286 - DNA, 89 bp, Glycine max
cgggcactaagcctaagctaagtcacgacatccttcacgatttcatgtcctgcaattcctcttgtgccttctcaatgttctttgggatt

SEQ ID NO: 60287 - DNA, 121 bp, Glycine max
ggaggctgaggaaagtgagttaggatagccccagacatagaaactcgacgttactcacttactcaactaccaccagcaccaccatgttctgatattcccccaggggcacacagtcactctt

SEQ ID NO: 60288 - DNA, 97 bp, Glycine max
gggtgttgtagctgaaggaacatgaaagggtacaaggtttggaactcaaccttcatacctttcaataataatctctccccaaattaccccttaaccc

SEQ ID NO: 60289 - DNA, 214 bp, Glycine max
ggcagcctcaagaatccacacaaactcagggtagggcagagagagagagagagagagagagagagagagagactgggacggttggccacctgggttcatgctcgtcctggtattcagacttatccctcactcgcgcatctccaagtctcgaagcttcctttccagaggttggttcgtcatgttgcccaggttttcaactctgatctgcgtttcc

SEQ ID NO: 60290 - DNA, 238 bp, Glycine max
gtatatatgggatgcatgagcccgcttctgtggctttctcagctctaaatctcgcaatgcattttcatggttgggtctcccttttcactcttatatactagaaattgcctctaacagatggatagaacgcgtattatgagtatgctagtttgttgcatacgtattggcttgttataatgaactcctggttctggaatgttgttttccaaagtccgagatattcatataacagggattt

SEQ ID NO: 60291 - DNA, 203 bp, Glycine max
ggatttcttctccgcacattctgtttagggttctgctgagttgctgtccgatcgcgtgtcatcgcgctcaccgtcaccggcaaggtgactacacacagggactccagttaaatgccatacacgatgaccctagaacattgaaaatcttccactctctcgtgtccagtgacacgataccgcgaggaatcttgatacgtccaaac

SEQ ID NO: 60292 - DNA, 151 bp, Glycine max
gaaagaggtcaaaatcgtgaagtcagaccacgagatgtcgttggtatcaagcatgttcgggtgtggagtggtgatagctgcgtcgcaagccgagggaagtgtaacgagagtctattgtggattgacgattgtgtgttcgtctgggccgcac

SEQ ID NO: 60293 - DNA, 307 bp, Glycine max
gcgtacgagagaacgacagatggggaaaggtctgcagttctgatgatgatgatctacatatttttgcggagctgcatcatcagtctcacaacgcagatcagattcacgtccctatccccagcatccagaagtttcacattcacatctagtttccaatgcctgcgagtcatactgctatatggtgtaacatggggcatagatcccgagtatcaaaattggcaccgggaatccatgtcggaataccatggtgactaaatggagtatgctgttgtcgatctgatatggcatgacgtccatgatgactttt

SEQ ID NO: 60294 - DNA, 72 bp, Glycine max
ggtggagcgaagtgaattgaacttgaagtgactcggggtgagttcacccagcagtggccgaacatgtcaccc

SEQ ID NO: 60295 - DNA, 96 bp, Glycine max
acgcgtacgaacagccgtcagtagagctgcgagaggaagatagaaggggacagaccagatctcggaaaccctcgctcgataggtcgtacttcatca

SEQ ID NO: 60296 - DNA, 102 bp, Glycine max
ggatggtacgttttagaaagtaaaatagctactactggttaaaaagaaatgtttttttttgaccattctcaagtgcacatgcacttcagatgatccagatct

SEQ ID NO: 60297 - DNA, 302 bp, Glycine max
tcgggacaactgaatttgccgatttgcattttaagccggagtttcattcgtcagcgtttcaattttggacagcatctcagcccatcacactgcacaatgtacttccacattcaagtgtgctttgcgatgtatggtggcggtgcaactagtggcggatcttggggcagaaagtcatctaacggaggttgaagctgatactcgacgagagccacctgtgtttccttactgtgatatatttttgtagtagtgacatatattgacttccatgtctatttttcttactacatttcagtgtatcatag

SEQ ID NO: 60298 - DNA, 82 bp, Glycine max
ccacgcgtacgaatacgcctgcgagaacacggaaaggggcagttcaaagccaaaaaagaatccaaaccaaaaaagaaagcct

SEQ ID NO: 60299 - DNA, 130 bp, Glycine max
cggggttctagtgtgtgaatgtttgttgttgtaacacgttcctcctcctttgttgttctgtgtttgtgtttgttttttcgcccacctgaaaatgtcctgctgccgtggtgactgttgtttccgaagctcc

SEQ ID NO: 60300 - DNA, 249 bp, Glycine max
ccacgcgtaagatcgcttgccaaaagaacacgaaagggaagctgggaaattcaatataacggtcggaaaaaaaagttatatcctagtttcccctaattcaaatacaccccatgtcatgaaaattcccaccctcttcaataaggcgtatacatcatgaagaggtgtgctattagcactttgcacacatcttaaattgttgaaacttcccattcctagctagggtcagtctcaaatgtttaaacgtcatgg

SEQ ID NO: 60301 - DNA, 150 bp, Glycine max
ggttgggtacgtcaattccaatttcaacgtttcatattgcatactgttcttctcttcctctctgtgttcccattgactctatgtcgtccaccccgtttttctgggggccacctctttacgttaccgttgtttcgtgcctcctcttctctc

SEQ ID NO: 60302 - DNA, 57 bp, Glycine max
aggactcgttttcttcagacttttgccatcgtttagagacgcttgagagccttagtc

SEQ ID NO: 60303 - DNA, 212 bp, Glycine max
ggacttaaaatttgcttctcttttccttccttcactgtttctttattctcttttagagaaaatcaaaataacaatattatataaaatattgcacctttattttgaatgttcaatttctactgttttggtgccaacttgaatcacttcaactcatagtttcactattcacctcaccttctgacactttcgtttcactcctccatctttcctcc

SEQ ID NO: 60304 - DNA, 199 bp, Glycine max
gagaatggtttgattactccatagatggatgtttttgcgtttggggttgtgcctttggagcttctttcggggatagaacctcgtcgtttgttgacaccaggtaggatgcggggacactctccaggctcctgccggttagaacctcatggagcccccgaatccttcttatcacaccactagtcatcagccatctcacttt

SEQ ID NO: 60305 - DNA, 191 bp, Glycine max
ggtttgtgcagatgagatgacatggaagccgtaataggctcccaccactttttccactctctccctctgctttctctcacaatatttgccctgcgtctcttcttctgtctagatatttaggctttcctcctcgtcgaccaactcttccttatcttctataaactggttcgcgaaagatgtatctggttggg

SEQ ID NO: 60306 - DNA, 267 bp, Glycine max
agggagactgatcgtgggagtgagagtgtgatgttgtaaatcgttcgtcttcttttgttgttctgtgtttgtgtttgtttttgtctcgcacctgagaatgtcgtgctgcggtgggaagcgttgttgctgtagctcctgtaagtgctggaagggctgcggacgctgcatgatgtatccagatttgagctatagtgtgtcaagctatcagctgataccttggtcatgggagtgggatctgttaatgttcaatttgagggtgctgaaatg

SEQ ID NO: 60307 - DNA, 77 bp, Glycine max
ggcctccgtcacttttctcatctgctgttcctgcgcgtgaatccgcctcatgttcgccaaagccatggttattcatc

SEQ ID NO: 60308 - DNA, 93 bp, Glycine max
gtccgcccaagcgtccgcggaagcattcggccacgcgtctgcccactcgtccgggggacacaacaattccatgggtaaacctaacaacttagt

SEQ ID NO: 60309 - DNA, 280 bp, Glycine max
gaaacttcagagccctctattgcctctctttcttcgcttattgttgcactttcttcgtcctagatatttcctggtcggtactctttttagtctctttatctttattcttcttctattctcatgcgcccatcttatacctctcttcattcatcatctttctttctttgcattcttccttcactttcttcccttcttcgatcccaactcattcatgtccctctctatcttctcgcattgatcttatcgatcactctcatctagcactgcattttcattacca

SEQ ID NO: 60310 - DNA, 55 bp, Glycine max
tgggattgcattattcacttcagagttcaattcattcactgtcgtcgctctttct

SEQ ID NO: 60311 - DNA, 67 bp, Glycine max
gatctcacgcagttgcagattgatttgactatcagtgtttcacttctgccttagcccgtttcagggt

SEQ ID NO: 60312 - DNA, 274 bp, Glycine max
acgcgtcagacagctgcaagaagacaacgaaaggggacagcatatataccattaaccaattttaaactatacctacattttgataattttctttgtagttgaaagccatggctacccgtgaaaagcctgaggttgacattgatcggaggtccaaggcagacaagttactggcaaacccttaggatttctactgatcgattccctaagggcttccgacatgagttaacaaaccattgatgttcttgagggtgatggcaagtctcctgggttctat

SEQ ID NO: 60313 - DNA, 168 bp, Glycine max
caagggaaaaaaaggaggtcgatattcattaaattttctagattaatggttgcttagttaaagctattaagttgcgttccaaatattccttttaatccccttaacgttattcctcgtcgattctcaaggccccaacttttatccctcgttcctcaataaactttcttc

SEQ ID NO: 60314 - DNA, 77 bp, Glycine max
agggcaaagagatgtgggtctatgtctgagcacgctcgttggtgatactcgttcgagatcttgtgttgttctctgtt

SEQ ID NO: 60315 - DNA, 339 bp, Glycine max
ttttttttttttttttgtttttttgtttttttttttttgtgtttttgtgtttttttttttttttgtgttttgttgttgtttttgtttttttttttttttttttttgttttttgtttttttttttttttttttttttgttgtttttttttttgtttttgtttttttttttgttgttgttttttttttttgtttttgttgtttttttttttttgtttttttttgtttttttttgttttttttttttttttttttttttttgttttttttttttttttttttttgttttttttttgttttttttgttgtgtttttttgtgttttttcttttttttgtttttt

SEQ ID NO: 60316 - DNA, 100 bp, Glycine max
ggagtgcagtgatatagattacaaaatgtagcttgtgtagcttctagttccttttctgaatagacattgtcatttctggatccttctctcaaagcatatt

SEQ ID NO: 60317 - DNA, 226 bp, Glycine max
cggggggcaatcgtgtaacgcagtcgtattggactggaataggcacatagagaagattcaattccaatcccaaccgaacaaactagaaattatggttcatatcccatttcctcagatttcatctcacatttcccattggtttgtcttgcgtggtcggttttgctgtccctcttacttctcacggtgtcttcccgttttcctcgcctttactcttttctcttttctc

SEQ ID NO: 60318 - DNA, 208 bp, Glycine max
gattggtgctagttctccgtagcggtttataggtccacactatccttaactataagctacagtattgtcatattctctgccttgtggactcatttttaaatccatgtctgtggtcactggtataacaagttcattctgaagtagttttttaaattttattttcacacttcttttattgtatagattgcgttattttgagggtattcta

SEQ ID NO: 60319 - DNA, 310 bp, Glycine max
gtgttgttggttttttttttttttttttttttggttgtgttgttctttttttttgtttttttgtggtttttttttttttttgttttgttttttttgttttttttttttcttttgtttttttttttttttgtttttttttttttttttttttttttttttgttgttttttgttgtttgtgtttgttctttttgtggttcttttttttttgtttttttttttgtttttttttgttttttgtttgtttgtgtttgttgttcttttgtgtttttttgtttttttgttttttttttgtttttttggttttgtttt

SEQ ID NO: 60320 - DNA, 139 bp, Glycine max
cgggacactcgtttggtttcatctctttctctctctctctctctagtctatctatcttatttttctctctctaaaatcctctgtgagaacgtgcacagcaatcgctacagaggtgggctctctgattatggtgatgggt

SEQ ID NO: 60321 - DNA, 179 bp, Glycine max
aggtggtgctggttctctgtggtggtttatacgtctccaatatacctatcgaaacactaatgtattctcaaagtacttgctttgtgactcattttctaatctatttcggtggtcatcggtgtaacatgttcattctgaagtagtttttgaagttttacgttcacatctgttttattgta

SEQ ID NO: 60322 - DNA, 363 bp, Glycine max
ttttgttttttttttgtttttttttttttttttttttttttttgttttttttgttttttttttttttgttttgttttttttttttttttttgtttttttttgtttgtttttttgtttgttttgtttttttttttttttttttttttgtttttttttttttttttttttttttttttgtttgttgtttgtttttgttttgtgtttttttttttttgttttttttttttgttgtttttttttgttttgtttttttttttttttttttttttttttttttttttggtgttttttttttttttttgttttgtttttttgtgttttgttgtttttgttgttgtttttttttttttttttttttttttt

SEQ ID NO: 60323 - DNA, 109 bp, Glycine max
ctgcgagaagcgaacgaatgggagagctcttggctttaccagtttccaattctcaattcacaattcgaaatacttattcctttcaaataaccacattcagtcatcgtga

SEQ ID NO: 60324 - DNA, 170 bp, Glycine max
gcgatacgacgacaacaacggggttgggacgaatacagctctcacatgagcactgaattgtatggagagatatagacctgtggtatagagccttggtctgcgccgtgggtgctctccggcggtcatagtcatcgcgaggtgggggcctctcctcggccgttcagtcagtg

SEQ ID NO: 60325 - DNA, 75 bp, Glycine max
gaactaagtagagagtaaaatcaaatcaggagagcatgcatatgaacatgatgatgaagacggtgtgtgggtttg

SEQ ID NO: 60326 - DNA, 73 bp, Glycine max
gactgaagattacggcgattgagagggagagtttgagaacggtgaacaccgcggcgttcctccgcccctccct

SEQ ID NO: 60327 - DNA, 346 bp, Glycine max
ggttcatcctttgggtatctcacacacacatgatggacgcaaatttggccaccattataatacttactttctccgtactttggcttatcacggtaaatggcataaactcttgtgcctctcatgcggcttactcctacctgaacgttattcccatctacaacaaatgctcatcgttcaatgcaccaaagtcaaacacatcgtgggagatcacacttatatacatagcctcattataccactctgatccatatacttgtccaacttactgggccaaaatcacgatctcacagtaccatacactttcgactagatcttcaacatcgttatctacatcctcaaggtcaaa

SEQ ID NO: 60328 - DNA, 60 bp, Glycine max
ggagtttgtgtgtaaccctagctagcctcaatgcagatattcgtgaaatctctaatgggg

SEQ ID NO: 60329 - DNA, 341 bp, Glycine max
gagcgaaacagagagtgatttcagtgagtgatcggtgttcacttgatctcatcataatcgtcagcgtcaattgaagaagatgccgatcagaaacatcgccgtcggaaggcctgaagaggcgactcaccccgacacgttgaaggcggctttggctgagttcatctcaaccttcatcttcgtgttcgccggctcatgctccggcatcgcctacaacaagctcatcgacaacggcgctgccacccctgccggcctcatctccgcctccatcgcccatgcattcgccctcttcgtcgccgtctgcgtcggcgccaacatctccggcggccacgtcaaccccgccg

SEQ ID NO: 60330 - DNA, 282 bp, Glycine max
gatgaggaacatggacagttcacagctttctaggcacatgaacaaccatcacgtggaggagcatgcagagattcttagatcatggagctccaggcatgcacatatgactcatcacatatcgtagaaaggtgcttcgactgctactcgtcacctgcaagtgtgtgctgacagctgtgtgatgtgtcagtctcctcctcttcagctcctgagatgtacactcgtcatcatcaactggcatttatgcgttacccatttatgccatgtgcgccctatattatccag

SEQ ID NO: 60331 - DNA, 307 bp, Glycine max
ggcactaccagtggataacaagaatatccagacgagattccagaagatcagtcgcatccctcatcggcatggaggaacactggcagcctcgacaggattactccctgcaatcaggttctgtcttctatcaatgcaccagatctcactactctgcatgattatgggagcagtggttgtcttggatcctttatgcaatccgccacataattgctactgcagatgttccgccaaaacgatttatgaatcaaagtgtggcagcagacaatcctatcacatcacacgatttctggatcaccagcacgcatga

SEQ ID NO: 60332 - DNA, 230 bp, Glycine max
gatgaccatgaaattgcatccagatgtcccgtatgtcgtcaggagattcgagattcagtgcggacttattaagcttgtacagacacatagtgagttttctgttcactctgcagcaggaaacttttatgactgctactgtacacatcatttgttctttactagttctatgatatatggaatattcagttttacggacaacttgcttctgcgcttgttacctgtaaacttag

SEQ ID NO: 60333 - DNA, 324 bp, Glycine max
gaccgaatgcttgctgtgatcaacatgtaaatccagacgtttggatgagtgtaacgtcaatctctaccgctatcatttgcagatgcatcactagaacagaacgtatttcactggtatagtagaatatgtcaatttatcagatcaatgaaatgtcacatgagcaggatgatgagagccacgataaaaatcatcagccatctttgaatctggttgtggttgacctgcttacgttgagggttttcaacaggatatcgatcgattacctgacccagataggacgaagactgagaaaacttgtacatcatgtcatgtgcacatgagtca

SEQ ID NO: 60334 - DNA, 161 bp, Glycine max
gatttttaaaacagtatgtatccatcatccagaaacatattcaacaacgcaactcattcaacgggcgacattggatgcattagctccatcgcatgttctcatccattgcgcgttcaagcaatcaactcaatccctagcctcattattcattaccactatca

SEQ ID NO: 60335 - DNA, 232 bp, Glycine max
tgggatagcgaatacagtatgtctcggtcaccctgaatcatagatagaaactcaacacattcagcctagacattggagagcatcggcttaatgcaggttcataatcattgtgagatcaaggaatctttacaatcgattgtgtcatcagtcaagaactgagtcatggagtaaccctacaagtataagtccgatgttgtcatagatgcctcgggtcaacaggacaaagacattg

SEQ ID NO: 60336 - DNA, 214 bp, Glycine max
gatgagatgttgatcaatggagcgtgttgtccactgggcaattttttcagaacctttttcgctctcgcaagctcacctcttcctcgttcactgtctgtcggacattcgcaagatccgcactgagaggacgacatggttctgacgcagaagtttcatgagcaccatcaactgcatcgtctagaggattacaggaccacgaaccgtttccgtgttt

SEQ ID NO: 60337 - DNA, 262 bp, Glycine max
gatacagggtggggtacagtactgacagaatcaacattagattgacaccattatcaaatacaatgtcgcggctgtgaatggactgtgacggagtagagttgtcgatacacgatagcacaatgtgatgagttcatagtccggtttggagatctgatgctaagagaataatatacaaatcgtcaactcttagtctatggtcttacacgttcagtagatgagtttggcaagaattatattctgagcaggagtatgtagtctgaat

SEQ ID NO: 60338 - DNA, 251 bp, Glycine max
gaagcccaagcgcaaacccactcaggtccaccgtcgccgttccaagcctgttccaacaccgttctcccgccaatgtccaccccaatttccccaaaacaaggtccgaattccttttcagccccaattggcttaaaacccaccaggattaaagccaaaattgttccctcaccccatgaaaatggccatcattgagaacccaaaaaaccttgcaaccttaatgaaccccttaaaccttccttcaagcccaaaaa

SEQ ID NO: 60339 - DNA, 170 bp, Glycine max
aattcccggcccgacccacgcgtccatccaggcgtcagtacacgagtcagtggggttgcgaaaagactatagaacgggggcttcgttgattgggttgtgactcctccctttcctcctttgcaattaacaataaagggttaatgaaggaccacttaaagatctcgctccgg

SEQ ID NO: 60340 - DNA, 372 bp, Glycine max
  unsure (1)..(372): unsure at all n locations
gagagagaggggtttgggattggagggattgacgctgcgtctcttcctcttctctttcgatccatccctcattcctaatcctccaatccaaccacctcagcctcacactcacatatacacatatctgaacgcgtatcgtccctcctatggcttcaaagcgcatcctcaaggagctcaaggacttgcagaaagacccaccaacttcttgcagcgctggtccagtagctgatgacatgttccattggcaagcaacaataatgggtcctgctgatagtccttatgctggaggtgtactcctaattacaattcacttccctccggattatcccttcaagcctcctaaggttgcctttangactaaggtgtttcacc

SEQ ID NO: 60341 - DNA, 271 bp, Glycine max
gcgatcaaggggtctgagagtgagtggtgtcaagtctgatctcatcccatacttctctcattcattgttgcgactttggagtcgtgttgcgatgtctagctcgctgaatctgatctatccctcgcgacacgagtatggacaaggggaacgcgtcaatccgagacgtctaagaacaaagtgaccagtagttgcatggatgatgttctcggggagcgggtatataaggaactacgatctctcagttgtgatttggccgtgaaaactcgcagtt

SEQ ID NO: 60342 - DNA, 319 bp, Glycine max
ggttctagtgtgtgattgtttgttgttgtaactcgttcttcttcttttgttgttctgtgtttgtgtttgttttttctctcacttgaaaatgtcttgctgcggttgtaactgtggttgcggaagctcctgcaagtgcggcaacggctgcggaggctgcaagatgtacccagacttgagctacactgagtcaaccaccaccgagaccttggtcatgggagtggcacctgttaaggctcaatttgagggtgctgaaatgggtgtgcccgctgagaacgatggctgcaaatgtggaccaaactgctcctgcaacccctgcact

SEQ ID NO: 60343 - DNA, 235 bp, Glycine max
gactaacagggatataaagctgcagcgattcaccatctctatcaggatactcaatagcacctaattcctcacagcctcctcggttccatcttccgtggcactttctgagtctcattcatcctcgtcttcctcttcatgttcatatacttctaccctcactctaaatttcaactcggatggtcaccttgattcgcaatccaatttccgctacgcttcatcctccttcgcttcctga

SEQ ID NO: 60344 - DNA, 394 bp, Glycine max
ggaacgaagacagcgaaggagctacgctgcgagatttagaaattgaatccctaatttcgaggttccgactcctgtggagtgatcatatagcgaattttgtgttagcgaatcaatttgcagagtaaggaataaggatgggaaaaaaccaagcctacaaagctatgcagagagccaggctcggcggcgcctccgccggccccgacgaggttgaagacggcatgaatggcatgcagctcgtttggctagccttaacacctctcacaccattacctgggaggagtacaaaatgaagcaaaaggaagaagaattgagaaaaggggaattggaagcagatgcagataggatgatgagagagtacagagctcaactagatgctgaaagggctcgtaagctt

SEQ ID NO: 60345 - DNA, 392 bp, Glycine max
  unsure (1)..(392): unsure at all n locations
ggtaactctttcttttgagttaattttatcaaaatatacttaatttgctttcaatcaaaatcacccactccactcttagcttatcatcatttactgagattttaaacgatcgtctcttattatacattgaaaggtaaattattaaaaagtttaatgtaaatttaattagagacgatttttataacatataagaaagatgttacatgttttgatagatgattcgtgtaattaacattttgaaacatcatattattaatattttatacataaaaatttatgtatatataatttttgtatgattttttgtttacatagtcggcccccgacgaattgaatgttgggttagtccctgcaaataataatgattttctgnacattcaaacagtagctct

SEQ ID NO: 60346 - DNA, 282 bp, Glycine max
ggagcaagagtgaagagcgaagagaatggctcccaagggtttaatctttttggctgtgttatgcttctcagcactgtcactgagtcgttgtcttgcggaggataatggacttgttatgaacttctacaaggaatcatgccctcaggctgaagacatcatcaaagaacaagtcaagcttctctacaagcgccacaagaacactgctttctcctggctcagaaacatcttccatgactgtgctgttcagagttgtgatgcttcactgttgctggactccacaag

SEQ ID NO: 60347 - DNA, 365 bp, Glycine max
gcttttaagtttgaaaatgccccatctctttgggtattaatgtgttggcacgatctctgatttgttttgttgtttttgtttttgcaggaaagaagcagagtgtttcttttgaaatcagctagaaaagatgtcagggtatgccatttccccccactaggagaagttcctttttttctcttaaattttgaaattaatatttagtagaacgaccttttcaaaatcatgttactgttgcctgagaatggttccttcagtacgaaaattttggtagcgaggacacatttactaattacaatgtctgtttgtgggtatgcgctgccttgaggttagattttggtgggttcaagtttcgtttttttaacata

SEQ ID NO: 60348 - DNA, 287 bp, Glycine max
ggcacacgtttgttgaggtaactagaaccactaacatgaaactgaaagtgcctgttttgtgcgttgccacactgctggtagcatatgaatgccatggctcagattaccagatgttccctctccaaatgaatactgcagtttgctgggcacgacggcaatgatgtggcatgtgccaattagacgcttgagcgtggaaccagacaccttagtcgagtaggacactgttcctgcagcttgcggagactacatagctgactacgttctatgagaccactatagatcagatt

SEQ ID NO: 60349 - DNA, 416 bp, Glycine max
gatccaatccaattgaattctccagagagaagaagaaacttaatcgatcatcacttcacttcactaatacatcatggcagacgagacccagaacaagtatgagagctctgaggttgaggtccaggatcgtggtgtttttgactttctcggtaagaaaaaggatgaagaagacaagcctcatcctcaggaggaggtcatcgccaccgagtttcaaaaagtcactgtctcagaccaaggagagaacaagcacagcctcttagaaaagcttcaccgatctgacagcagctctagctcttcaagtgaggaggaaggagaagatggagagaaaagggagaagaagaagaaggaaaagaaagggctgaaagagaagatcgaggagaaaatagagggtgatcatcatcatcacaaggatgagg

SEQ ID NO: 60350 - DNA, 309 bp, Glycine max
gagggaagcaaggacgatgagtatagtatgagtaatcagattcagagtgtatagtgattctgattctttcattttccatagattagcaagcaatcgagcgagggagggagagagagagagagagagagagaatggttcgggaagtatcagagagttgcattgatagcttattgacggagatggtggcgtgctattgcaaccgattctacgcaaacaagcctgaactcgccgcacgccggatcgaggccattggatatcaggtataccatggattggcctcggttcacggatcatctggaaggcatcaag

SEQ ID NO: 60351 - DNA, 394 bp, Glycine max
  unsure (1)..(394): unsure at all n locations
ggttctagtgtgtgattgtttgttgttgtaactcgttcttcttcttttgttgttctgtgtttgtgtttgttttttctctcacctgaaaatgtcttgctgcggtggtaactgtggttgcggaagctcctgcaagtgcggcaacggctgcggaggctgcaagatgtacccagacttgagctacactgagtcaaccaccaccgagaccttggtcatgggagtggcacctgttaaggctcaatttgagggtgctgaaatgggtgtgcccgctgagaacgatggctgcaaatgtggaccaaactgctcctgcaacccctgcacttgcaagtgaggtgttgggagagcaagcttcaagcagagatagcccttaattaagaataatgatanactattaatg

SEQ ID NO: 60352 - DNA, 386 bp, Glycine max
ggcacaagtttgttgagatagctagaagcaataagatgaaaatgaaagtgcttgttttgcttgttgctacagttttggtagcatatgaatgccatggctcagactaccagaagttccctctccaaatgaaaactgggtttggtgggcaatacagcaatgaggtggcatgtgccagttggaggcttggcgtggaagcaaacaacgtagtcaagtggcaaactgttcctgcagcttgcggagagtacatagctgactacgttctaggagaccaatatagatcagattccaaaacagttaaccaacaagcttatttctatgctaaatccctcaaactcaccaacaaagatgtctttgtcttggacgttgacgacactactctctccaat

SEQ ID NO: 60353 - DNA, 433 bp, Glycine max
  unsure (1)..(433): unsure at all n locations
acggtctatatntccggtcgccccacgcgtccaacagctcctacataacgatgcaaggaggaggcagtggggggaagaactgtaacactatactgtcacactataaccccacagaaagaaaattaaaatggattgtttaagtggatagaatgatccgccaataaggtgcactctcaacggccactctcatcatcaactctaattatctgaactagttaaatcaactggttcagtccgccatcagtggtcgcccgctgtggatgcttagctcgtgtgcggacatcttatgcgtcgacacgaattgtcccttcaccattcactgctagcagagaatgtcggacaaccacatcatgcacctgcagcaactgcacgatgatacctctccaaagttcttcacatatgttgtcaacattcagttccacttctcagaaat

SEQ ID NO: 60354 - DNA, 291 bp, Glycine max
ggagttgtacttgatcacagagctcacgaggttgacatctccaatatgtcccggctgattaagcaactcagtttacttttccgattaattctgagtcactgctgctatggcgctacgcctagttcctgtgttggggatgttgctgatattgtgccgtgttaaggtttcatcggatcctgagatattagaagaacaattggaatcaacattggagctgcacctttctccataaggagccacatatcatgggagactcgaacataaagctattacagtatatggattgtggtg

SEQ ID NO: 60355 - DNA, 327 bp, Glycine max
gggacaatagacggggacactaatcgtgaaccaatatcgaccttcaactataccctgaccctgtgttaatttcctgtgttgagaagcaatgagaggcagagatgcagagaatcacaccttacagttaaaccctggagttcaagccttaagacgataacatgatggacgaggaccgcacccctgacgccgacacttcaccgccacaacctaaactcaaatccgcgatgaccgccgccgcagcaccgatcaagaccaccggtcgcagattccggcaagacatcgaagccaaccgtgagactcgcatctccagttccgaattcgactcgc

SEQ ID NO: 60356 - DNA, 293 bp, Glycine max
aggggaaggtgaggatgaacacgaagaggaaaccagagagaaaattccactgtattcgaagcatgtgtaagtttcctgtgttaagaagcaaggtgaggcagcgctgctaggaatcacatctgacggttcaaccttggatttcaatccttaagacgatgagatggtggacgaggacggcacccttgacgcccacacttctccgctctcatcctacattcaagtcggctatgaccgcgtccggagctccggtctagaccaacggtcgcagattccggcaggacgtcgacgccaac

SEQ ID NO: 60357 - DNA, 404 bp, Glycine max
gagcgaaacagagagtgatttcagtgagtgatcggtgttcacttgatctcatcataatcgtcagcgtcaattgaagaagatgccgatcagaaacatcgccgtcggaaggcctgaagaggcgactcaccccgacacgttgaaggcggctttggctgagttcatctcaaccttcatcttcgtgttcgccggctcaggctccggcatcgcctacaacaagctcaccgacaacggcgctgccacccctgccggcctcatctccgcctccatcgcccatgcattcgccctcttcgtcgccgtctccgtcggcgccaacatctccggcggccacgtcaaccccgccgtcaccttcggcgccttcgtcggcggcaacatcaccttcctccgcggcatcgtctacgtcatcg

SEQ ID NO: 60358 - DNA, 111 bp, Glycine max
ggcagcgcttgagaccaagccccactcaaccaccacaacactctctctgctcctcctctaactttcaagtttttaaagtaataagattgaagagacattcctaattaactc

SEQ ID NO: 60359 - DNA, 318 bp, Glycine max
gggagtgagcaagagtgaagagcgaagagaatggctcccaagggtttaatctttttggctgtgttatgcttctcagcactgtcactgagtcgttgtcttgcggaggataatggacttgttatgaacttctacaaggaatcatgccctcaggctgaagacatcatcaaagaacaagtcaagcttctctacaagcgccacaagaacactgctttctcctggctcagaaacatcttccatgactgtgctgttcagagttgtgatgcttcactgttgctggactccacaagaaggagcttgtctgagaaggaaacagataga

SEQ ID NO: 60360 - DNA, 184 bp, Glycine max
gaacgaatggggggccttcactctgaaccagatactataagcttcactttgtccgtgacaaaacagttcccgcaagaggagtacaaacaaagaacagaaacaagcggctactctagaggatctatccttagttacacttacatgctacgtcaaagctcatctatactgtcaacgaatttcagtt

SEQ ID NO: 60361 - DNA, 97 bp, Glycine max
gattcaagggacggcaggggtagggatgattattattctcctgagcgatcaagatcttattctaggtctctctctcccagtggtgggaaggactacg

SEQ ID NO: 60362 - DNA, 349 bp, Glycine max
gtcctcccgaaggaatctctctcaccggttattccttttccctcactacttcatacgcttaagttcgcgacacaggcatgggtgcaccatcgacgaagtacacccaccagagctgcactagcagatgctccggttccgaacatgattgagccatttaacccgagtctagactcctcagtataagcgtcacagataccgacgcaatcgactcctccagctacgacaaatagacgaagttttctacgcgcgattgacattaggtagctcatcaacgagatttcgatcgccagagcttcagatactcggctcggatacgaattccgcggactgtgacagacgtctctgggaa

SEQ ID NO: 60363 - DNA, 251 bp, Glycine max
ggctccacaaccgaatcgccatggcgtcccaggatagtatcggcatcatgcaggcacggcatagttaccggaatttatggcatatcgatctcatgagatccattcaggccgatactccttagtgttgcctcacgttgtggtgtgcaccgacctgtgtcgtatcttcttcccaaactaactttccaccaatttttctcgcttcgattcctcgtcccttggagctcataaccatgatagtgtcaaaattagct

SEQ ID NO: 60364 - DNA, 248 bp, Glycine max
gaagagccatttcttttctttctcaatggctttacactttgatttgatacactgtctgttgagctgattccaaagcattattattacgttattaacttccccaaacgagaatccccctccttacacatcacaacaccacaaacccaacaccatcatcatcgttcacgccaagtaaacgatcctctcttctccacctcaccctttctctctcttctctctcatttttctctctgttacttcacaatacc

SEQ ID NO: 60365 - DNA, 240 bp, Glycine max
gacagctcttggctttagcaaattccaattcccaattcccaattcgaaacccttattcctttcaaagaaccaaattgagtgatcgtgatggcaccaaaggcagagaagaagccagcggagaagaagcccgcggaggagaagaagtcgacggtgggagacaaggctccggcggagaagaagccaaaggccggaaagaagcttccgaaggagggaggcgccggcggagaagggaagaagaac

SEQ ID NO: 60366 - DNA, 313 bp, Glycine max
cacgcgtcagtacaactgtgagacaagcctcagtggagagtcgacatcatgtcctcctgagtgccacattcaggtgtgcttaccattggttttgacaccatcgttgacatgctcggctctgctctgtctgtgcggtctcttgcagtcggactggcttctatatcatttcctagtgcataagcagatctggtcaatgtaattttacgcgagggttgtgttgaccacatcctaacacctagctactaccactgcgttttgtatctacagctcaactgcttacaagatttactcctcgatggtattgcagtttttt

SEQ ID NO: 60367 - DNA, 273 bp, Glycine max
agccgtcagtacagcagcgaaaggaggacagaagggggatgtgatgctttcacatccatcacaccaccatggaaaacatgtaactgttggtctacatggtgcagctgtccgtgttgtggatctaagaacattaagattaaatcaaattccagtgtgaataagaagataaataataaggataatttaaagcatatgcatgcactagaaaatattgatgacggaattgaacgaattgataatgataactcatcattaacgtctcaatctaagttt

SEQ ID NO: 60368 - DNA, 88 bp, Glycine max
gagcgaaacacagagtgatttcagtgagtgatcggtgttcacttgatctcatcataatcgtcagcgtcaattgaagaagatgccgatc

SEQ ID NO: 60369 - DNA, 251 bp, Glycine max
gaagcaaaaccctaatccctctttcttcctcttcctcagtagtgcgattttcgattctcttctctgcaactatgcctaaccctaaggtcttcttcgacatgaccatcggcggtcaacctgccggccgcatcgtgatggagctctacgccgacgtgactccgagcaccgccgagaacttccgcgcgctctgcaccggcgaggagggcgccgggcggagcggcaagcccctccactacaaaggctcgtccttc

SEQ ID NO: 60370 - DNA, 228 bp, Glycine max
tgggacagactctctgaaagagagagaatatgacgcggggaaagcagatgatcgaagcgcagattcgattcgcagagaggaatgagaagggagagggctctcagctcgaggccagagccgttggtctcaaagtcacctgcctcatctgtaaggctcatcttgcaaatcacaaccaacttgttgatcagtacgcttccaaacatccgacggagaaaccacctgcagaga

SEQ ID NO: 60371 - DNA, 382 bp, Glycine max
ggttctagtgtatgtgattgttgtgactcgttcttcttcgtcgttatcttcttcttttgttgtttgtgtgttgttttttctctcacctgaaaatgtcttgctgcggtggtaactgtggttgcggaagcgcctgcaagtgcggcaacggctgcggaggctgcaagatgtacccagacttgagctacaccgagtcaaccaccatcgagaccttggtcatgggagtggcatcagttaaggctcaattcgagagtgctgaaatgggtgttctcgctgagaacgatggctgcaaatgtggagctaactgcacctgcaatccctgcacttgcaagtgaggtgttggagagctaaagcttcatgcagaaatggccttataaataatgat

SEQ ID NO: 60372 - DNA, 389 bp, Glycine max
ggtatgtgattgttgtgacgcgttcatcttcgtcgctatcttcttcttttgttgtttgtgtgtttgttttttctctcacctgaaaatgtcttgctgcggtggtaactgtggttgcggaagcgcctgcaagtgcggcaacggctgcggaggctgcaagatgtacccagacttgagctacaccgagtcaaccaccaccgagaccttggtcatgggagtggcaccagttaaggctcaattcgagagtgctgaaatgggtgttcccgctgagaacgatggctgcaaatgtggagctaactgcacctgcaacccctgcacttgcaagtgacgtgttggagagctaaagcttcaagcagaaatgagccttagaaataatgataaatactatatgt

SEQ ID NO: 60373 - DNA, 371 bp, Glycine max
ggttctagtgtatgtgattgttgtgactcgttcttcttcgtcgttatcttcttcttttgctgtttgtgtgtttgttttttctctcacctgaaaatgtcttgctgcggtggtaactgtggttgcggaagcgcctgcaagtgcggcaacggctgcggaggctgcaagatgtacccagacttgagctacaccgagtcaaccaccaccgagaccttggtcatgggagtggcaccagttaaggctcaattcgagagtgctgaaatgggtgttcccgctgagaacgatggctgcaaatgtggagctaactgcacctgcaacccctgcacttgcaagtgaggtgttggagagctaaagcttcaagcagaaatggccct

SEQ ID NO: 60374 - DNA, 401 bp, Glycine max
  unsure (1)..(401): unsure at all n locations
tggggttagtgatacttctaatttcaaaccgttgtaatcccttggaaatttttttcactctcttagcatctanggtttactctatcattttttgcgtttcaagattttctgaatttcttttaccaattttgttcgcgttttaaggtcaatattcatgcatcttattagtgcatggagaatccctgtgaggtgctcggttccaaagggttaattagaaggcatgaatttgtgaggatcataatccagtgtctatattcattacggtacagtagctctgcatcgtgtttggaatcggaatctggtatttcgtacaagtccaatgaggttaagttgcttgaatcacttattttgaacgggagttgggacgaaagcattgattatctcaattccataaaggatga

SEQ ID NO: 60375 - DNA, 366 bp, Glycine max
cgatgcaaggggggcattggtgggaaccatagccttggatacctcagcaatcacattattgctatcagcactcatacatgcaagcatcgcatcattcaactctggaaaccattgggtatttttgcttcaaaacggttcgttgaatcgacccatcgatgagtgtttcgctccttgttcatcacatccaattcccctattggtgtggaaattctaaatgtgcagtcacgcattagtcgtccgtatcgtgggttcactacgactgcgtcactatggatctctaaagcttgcatgattgtgaatcattgtagtttttagtgtagactgtatagttcacacaggcacacttcatgtaattggggtctatgt

SEQ ID NO: 60376 - DNA, 100 bp, Glycine max
cgtcagtctcggcgcgaggggggctctgtgggggccctcgctcttggctcctttctcgttcctgttgttgctcttggggcttatctgtgcgctcgggctc

SEQ ID NO: 60377 - DNA, 251 bp, Glycine max
ggttctagtgtgtgattgtttgttgttgtaactcgttcttcttcttttgttgttctgtgtttgtgtttgttttttctctcacctgaaaatgtcttgctgcggtggtaactgtggttgcggaagctcctgcaagtgcggcaacggctgcggaggctgcaagatgtacccagacttgagctacactgagtcaaccaccaccgagaccttggtcatgggagtggcacctgttaaggctcaatttgagggtgctc

SEQ ID NO: 60378 - DNA, 269 bp, Glycine max
ttccaaaaaaagaaaaaaaggggccccattaacgaaaattaaggtttggaatataccctgaacaagccaccattgcccccaaagttacactccatggtaacaaaaccccccaatttaaaaagggaaattgaaagttatccaagtcccaaattttccaccagaagggccatttggccaaccatggccaatactgtggccttttaactcgccaacaacctaaatccaaaacttaaacacacgcctaaaaaccacccaaaatttacccttcc

SEQ ID NO: 60379 - DNA, 354 bp, Glycine max
ggaaacagagagtgatttcagtgagtgatcggtgttcacttgatctcatcataatcgtcagcgtcaattgaagaagatgccgatcagaaacatcgccgtcggaaggcctgaagaggcgactcaccccgacacgttgaaggcggctttggctgagttcatctcaaccttcatcttcgtgttcgccggcccaggctccggcatcgcctacaacaagctcaccgacaacggcgctgccacccctgccggcctcatctccgcctccatcgcccatgcattcgccctcttcgtcgccgtctccgtcggcgccaacatctccggcggccacgtcaaccccgccgtcaccttcggcgcctt

SEQ ID NO: 60380 - DNA, 87 bp, Glycine max
gaattcccggcgctatacacgcttcagtcttaccttcgcttgcgtgcgaagtcgtagatcttcgagagtgtcaactaagtttcaatt

SEQ ID NO: 60381 - DNA, 364 bp, Glycine max
  unsure (1)..(364): unsure at all n locations
ggttctagtgtgtgattgtttgttgttgtaactcgttcttcttcttttgttgttctgtgtttgtgtttgttttttctctcacctgaaaatgtcttgctgcggtggtaactgtggttgcggaagctcctgcaagtgcggcaacggctgcggaggctgcaagatgtacccagacttgagctacactgagtcaaccaccaccgagaccttggtcatgggagtggcacctgttaaggctcaatttgagggtgctgaaatgggtgtgcccgctgagaacgatggctgcaaatgtggaccaaactgctcctgcaacccctgcacttgcaagtgangtgttgggagagcaagcttcaagcagagatagccc

SEQ ID NO: 60382 - DNA, 274 bp, Glycine max
agggttctagtgtatgtgattgttgtgactcgttcttcttcgtcgttatcttcttcttttgttgtttgtgtgtttgttttttctctcacctgaaaatgtcttgctgcggtggtaactgtggttgcggaagcgcctgcaagtgcggcaacggctgcggaggctgcaagatgtacccagacttgagctacaccgagtcaaccaccaccgagaccttggtcatgggagtggcaccagttaaggctcaattcgagagtgctgaaatgggtgttcccgc

SEQ ID NO: 60383 - DNA, 314 bp, Glycine max
tggggaataaaaggtgtgagttgtaagggttgggtaagggaatatgagattgtaattggtccaaggcatatcatcttatccatatcgacatccaaaatctcctactttactctctctctctctctgacaatctcaccacttgtattgtctcaagcaatcatggcaatggcaatccaagcctctctcttaaccccacccctctccggtctcaaaaccagcgaccgcgcctcagtgccatggaagcataactccagcctctccttctccagtccgaagctactcaagttctccagaacaatcagagcagcattcgc

SEQ ID NO: 60384 - DNA, 261 bp, Glycine max
ggttctagtgtgtgattgtttgttgttgtaactcgttcttcttcttttgttgttctgtgtttgtgtttgttttttctctcacctgaaaatgtcttgctgcggtggtaactgtggttgcggaagctcctgcaagtgcggcaacggctgcggaggctgcaagatgtacccagacttgagctacactgagtcaaccaccaccgagaccttggtcatgggagtggcacctgttaaggctcaatttgagggtgctgaaatgggtgt

SEQ ID NO: 60385 - DNA, 264 bp, Glycine max
cggggttctagtgtgtgattgtctgttgttgtaactcgttcttcttcttttgttgttctgtgtttgtgtttgttttgtctctcacctgaaaatgtcttgctgcggtggtaactgtggttgctgaagctcctggaagtgcggcaacggctgcagaagctgcaagatgtagccagagttgagctacactgagtcaaccatcaccgagaccttggtcatgggagtggcacctgttaaggctcaatttgagggtgctgaaatgggtgt

SEQ ID NO: 60386 - DNA, 274 bp, Glycine max
ggagtgagcaaaagtgaagagcgaagagaatggctcccaagggtttaatctttttggctgtgttatgcttctcagcactgtcactgagtcgttgtcttgcggaggataatggacttgttatgaacttctacaaggaatcatgccctcaggctgaagacatcatcaaagaacaagtcaagcttctctacaagcgccacaagaacactgctttctcctggctcagaaacatcttccatgactgtgctgttcagagttgtgatgcttcactgttgct

SEQ ID NO: 60387 - DNA, 264 bp, Glycine max
gcactgtgaagccgcaactccccgtcgaatctccctaaaccaactacgccattctgttcctcaaagctgcgtttggcgcttaggaattttgctgtacgctcacccctaactccagaactcatcacgagctcccactcatactctccgcacaatccacaatcgctcgctcaatcattctcgtcgccgacctcgttaatgacaattcttcgctagcgacaacagcgggaaacggtgtcatattgtgcgtggtcacggaggacgtag

SEQ ID NO: 60388 - DNA, 270 bp, Glycine max
gaagagtgaagagcgaagagaatggctcccaagggtttaatctttttggctgtgttatgcttctcagcactgtcactgagtcgttgtcttgcggaggataatggacttgttatgaacttctacaaggagtcatgccctcaggctgaagacatcatcaaagaacaagtcaagcttctctacaagcgccacaagaacactgctttctcctggctcagaaacatcttccatgactgtgctgttcagagttgtgatgcttcactgttgctggac

SEQ ID NO: 60389 - DNA, 263 bp, Glycine max
ggcagttcaattccaatatattccattctctctgtgtatttccctacctcacccttcaagatgcagatcttcgtcaagaccctcaccggcaagaccatcacccttgaggtggaaagctctgacaccatcgacaacgtcaaggccaagatccaggacaaggaatgaatccccccggactagcaacgtctcattttcgccggaaagcaacttgaggacggccgtacccttgctgactacaacattcagaaggagagtactcttca

SEQ ID NO: 60390 - DNA, 297 bp, Glycine max
gatacgtgttattgccaaatgccatttcacaccgcagttgcctctgtcagcatcctcttcacgagcagatatcattgctgcttcccagttgcaaattcggatctcacacattcccaagagcttatgtgagcaaagtgtcgccgtgcaaatcgatccaaaaatcgactttgccgagcgtgatcgggcagagatggatgaggtgagaactaatgccaatgctaagataagtccagaacaacgattgagggagttgccacataagagtatcctgggatgtagcattactaagaggacatg

SEQ ID NO: 60391 - DNA, 259 bp, Glycine max
gacaaaacaagtgtttcgaatagattatcctaagtctttgggaatagtgctgcaatggcttcaagtcaggaggaggtgacccttttgggagctactggaagcccatttgtgtgcagggttcatattgccctcaagttgaagggagttcaatacaaatatgtcgaagaaaatttgaggaacaagagtgaactgcttcccaaatccaacccagttcacaagaaggttccagtgtttattcacgatgagaagcccatagcag

SEQ ID NO: 60392 - DNA, 270 bp, Glycine max
gggtggtgctggttctctgtggtggcttaaaggtctacaatacacctatcgaaagctgaggtattgtcaaagtacttgccttgggactcattttttaatccaattcggtggtcatcggtgtagcaagttcattctgacgtagttttttaagtgttacgttgaaatttgttttactgtagaaatggggttgttttttgttcagtgtactcgaatgttgtgcgtgattgggtcattggaagtgtaggtgggtttttggtttagtgtattgaa

SEQ ID NO: 60393 - DNA, 84 bp, Glycine max
aggcgtcagtacagcagcgagagggcgaccgaaggggcattctactgcagaggattgcaaagatatagagagagaggaagagag

SEQ ID NO: 60394 - DNA, 234 bp, Glycine max
gaatcaaagtgaaacagtaagatgtttttggtggtaagagcctgtggttcttcttctgcacatattcagcccactctcacaccgcagcgtagtagcataaacgtcgtcgttagatgctccatcagcagcgtgcaggagaaagaagagaagggcactgaattggactcttcggtgtcattccctctgataagggcggcgaagagggtggttctggtgaggcacggccagagcacg

SEQ ID NO: 60395 - DNA, 299 bp, Glycine max
ccaggcgtcagcccacgcctcagcgcgagacgtccatgctgctgctacaagactacacattggggcaatcatcactgttccactcatatgtcatttcgcgtcatgatgctgtcgttcttcgtctgcatcgattcacaccactctcacagcgtcacatacttgcaggggactcctcattagatattcgatcaacattctgcaagatagcgtacgcagaggcacatgatctgaactcttctgaggcattcccgctaatacgagttgcaaatcgagtgattctggttcagcaacatcatagc

SEQ ID NO: 60396 - DNA, 289 bp, Glycine max
cccacgccttcgttcaggcttcaataaaacaacagaaaggggcacgaacaagggtaatttaaaatttaatcggcatcattcaagtagaacatttcgaagaacaagagagttagggcaataaaaccctacaaataatatggcaaaaagattaaccccggaaaagcgtcacagtttcgtccacaactgtcataaggtgttcgaatggggtcaaacccttgacgaggtcaatatttacatatctcttcctcctaacgttcattccaagcaattctactgtaagattcagtcc

SEQ ID NO: 60397 - DNA, 300 bp, Glycine max
  unsure (1)..(300): unsure at all n locations
tcaggcggccaaaaaaacaacaaaagggggtttttcgtcagggtttccttttcgcacttggacctccaaattgaaaccaatttcgtaatccctccacactttctcgttcgggaaactcgcgaattggaaagacatcgacggctccgcgtgatacgttctcttcctgtctggttatcactgttggctattactgcaattgcatctttgcccgtattaccaccagtcaaaanatgtggccactgcattgaacagaatgttgtttccacattgagctttccaagacgactacagacaactaat

SEQ ID NO: 60398 - DNA, 261 bp, Glycine max
agcgaaacagagagtgatttcagtgagtgatcggtgttcacttgatctcatcataatcgtcagcgtcaattgaagaagatgccgatcagaaacatcgccgtcggaaggcctgaagaggcgactcaccccgacacgttgaaggcggctttggctgagttcatctcaaccttcatcttcgtgttcgccggctcaggctccggcatcgcctacaacaagctcaccgacaacggcgctgccacccctgccggcctcatctccgcc

SEQ ID NO: 60399 - DNA, 234 bp, Glycine max
ggagcaagagtgaagagcgaagagaatggctcccaagggtttaatctttttggctgtgttatgcttctcagcactgtcactgagtcgttgtcttgcagaggataatggacttgttatgaacttctacaacgaatcatgccctcaggctgaagacatcatcaaagaacaagtcaagcttctctacaagcgccacaagaacactgctttctcctggctcagatacatcttccatga

SEQ ID NO: 60400 - DNA, 144 bp, Glycine max
gcgtccgtcctggcgtctgccctcgcgtcggttcggctgccggacgttgcctttcggggcttcctttttttgttttcttcttcctcgttccctgtctcgcttttctctcttcctcgtgctgttttgctttcttttctcggcgcc

SEQ ID NO: 60401 - DNA, 270 bp, Glycine max
ggttctagtgtgttattgtttgttgttgtaactcgttcttcttcttttgttgttctgtgtttgtgtttgttttttctctcacctgaaaatgtcttgctgcggtggtaactgtggttgcggaagctcctgcaagtgcggcaacggctgcggaggctgcaagatgtacccagacttgagctacactgagtcaaccaccaccgagaccttggtcatgggagtggcacctgttaaggctcaatttgagggtgctgaaatgggtgtgcccgctga

SEQ ID NO: 60402 - DNA, 268 bp, Glycine max
ggcacaagtttgttgagatagctagaagcaataagatgaaaatgaaagtgcttgttttgtttgttgctacagttttggtagcatatgaatgccatggctcagactaccagaagttccctctccaaatgaaaactgggtttggtgggcaatacagcaatgaggtggcatgtgccagttggacgcttggcatggaatcaaacaacgtagtcaagtggcaaactgttcctgcagcttgcggagactacatagctgactacgttctaggaga

SEQ ID NO: 60403 - DNA, 385 bp, Glycine max
aaccaaggcttcagccaaaccgcggccaagccttcgttacggtggcaaaaaaacaacagaagggaaccttaagggatttcagttagacacaaaccgctggaaccccctggagttaaaaaaggaaaagtcgactaaagataaggtaaattggatgtcatgcatatatacttctgatctcaagaaaattgttccccattttaaaactcatcctatggactgttctgcatgttatatttcttcttaattaaatgggttttgcagctaacaaaaaattgaacaaaattgtcctgatgatgtcaacaagataaatccagcatgtacaacaagagaagaaactgatgagtcagaggatgaagaaaacaacatcgacgatatatccaagaat

SEQ ID NO: 60404 - DNA, 274 bp, Glycine max
ggagtgatttcagtgagtgatcggtgttcacttgatctcatcataatcgtcagcgtcaattgaagaagatgccgatcagaaacatcgccgtcggaaggcctgaagaggcgactcaccccgacacgttgaaggcggctttggctgagttcatctcaaccttcatcttcgtgttcgccggctcaagctccggcatcgcctacaacaagctcaccgacaacggcgctgccaaccctgccggcctcatctccgcctccatcgcccatgcattcgccct

SEQ ID NO: 60405 - DNA, 297 bp, Glycine max
ccaaaagaccacagaaaggggtcccctcaaagaatttaattttaattcctggggtgggggttccaacgcttttccccttcaacaatggcaaccggaacaatactccaattgccaaacaaaattggccaaaacttaagggccttttgagtgggttgaaacggaaagtccccactccttcaccgaaccaatttttccccccccaaagttgcatccttttgtgtgggcctaaaccccctggctgtgtccttcagtggtaagctccttggtgggtttagtttaattttgactgaacgaatg

SEQ ID NO: 60406 - DNA, 241 bp, Glycine max
  unsure (1)..(241): unsure at all n locations
agggaactcaccgaatcgcaacgattgaagtttcacatcaaccttaaccaatttaagggttccgttccttaacctacctttgacgtatctaaaccttaaatttgggattangtctgagcaatctggttggtaaaacctttggtcttagagagtcaagttttatgtctggattagacgatcaaattcccactgccttcgatccttttgctgatgcaaatgctgatgactccggtgctgggtc

SEQ ID NO: 60407 - DNA, 388 bp, Glycine max
  unsure (1)..(388): unsure at all n locations
ggttctagtgtgtgattgtttgttgttgtaactcgttcttcttcttttgttgttctgtgtttgtgtttgttttttctctcacctgaaaatgtcttgctgcggtggtaactgtggttgcggaagctcctgcaagtgcggcaacggctgcggaggctgcaagatgtacccagacttgagctacactgagtcaaccaccaccgagaccttggtcatgggagtggcacctgttaaggctcaatttgaaggtgctgaaatgggtgtgcccgctgagaacgatggctgcaaatgtggaccaagctgctcctgcaacccctgcacttgcaagtgaagtgttgggagagcaagcttcaaacanagatagcccttaaataggaataatgataaacta

SEQ ID NO: 60408 - DNA, 139 bp, Glycine max
aggctgcaaaaagacaacagaaggggggttccattcaagttccgatccaaaaaccttttcctcattcgcggccccttcgtcacggcaaaattcaaatccccgtgtaactccgtcaaaccaaccttttccccccccccaa

SEQ ID NO: 60409 - DNA, 73 bp, Glycine max
aaggctgcaaaaaaacaacaaaagggaaccaaaacccgtaagtccttccccaataaattgcctgcttttggcc

SEQ ID NO: 60410 - DNA, 297 bp, Glycine max
  unsure (1)..(297): unsure at all n locations
agggggttcaatgtgttaatggttggtggtggtaatccttcctctcctttgtggtccgggttggggttgtttttcccccacttaaaatgtcttgncgcggtggtaactgtggttgcggaagctcctgcaagtgcggcaacggctgcggaggctgcaagatgtacccagacttgagctacactgagtcaaccaccaccgagaccttggtcatgggagtggcacctgttaaggctcaatttganggtgctgaaatgggtgtgcccgctgagaacgatggctgcaaatgtggaccaaact

SEQ ID NO: 60411 - DNA, 76 bp, Glycine max
ggggcccaaagggggaactgttttttttccaaaatttcttttgccatttaacaagggttccctacttggggtttta

SEQ ID NO: 60412 - DNA, 395 bp, Glycine max
  unsure (1)..(395): unsure at all n locations
ggttctagtgtatgtgattgttgtgactcgttcttcttcgtcgttatcttcttcttttgttgtttgtgtgtttgttttttctctcacctgaaaatgtcttgctgcggtggtaactgtggttgcggaagcgcctgcaagtgcggcaacggctgcggaggctgcaagatgtacccagacttgagctacaccgagtcaaccaccaccgagaccttggtcatgggagtggcaccagttaaggctcaattcgagagtgctgaaatgggtgttcccgctgagaacgatggctgcaaatgtggagctaactgcnactgcaacccctgcacttgcaagtgaggtgttggagacctaaagctcaagcagaaatggcccttagaaataatgataaaaactatatg

SEQ ID NO: 60413 - DNA, 221 bp, Glycine max
gcgataagacgacacaacgggatgggtgctccatacagtgtcgggcgtcactcctttccatactttcttctaagcacacactgatctcacacagcacctaagtttttttctggggatggatctgaacagaatcatgtgtgttgatattgataggaagaccaattaggtgattcaggaagatggtatagaagatttcattgattcagcatccattgggttca

SEQ ID NO: 60414 - DNA, 359 bp, Glycine max
cagtaaggcggcagtaaaggagcgaaagggggccaaaaaggggaagttttcccaatccaaggttcccggagccacttaaccaaccaaccctccttacaaattcacttacagttccacctccacgcgcaactgccacgatcatgttgtccggattcaccaacctgctccacgtcctagccctgctaaccggtttatgcaattgcagggtaacagcatcaaatggcgacgtgcacaccctagacacaaacactcacttcatcccacaagtccgacacctccgaatccactcttcctcgaagcggttcgaatgttcctcagagttcgtgatcctcaaagatgacatgggacctgtgctatcg

SEQ ID NO: 60415 - DNA, 245 bp, Glycine max
cacgcttcagggatgcagaaaaaatatgaaggaaaccgcaccagggtgttacaattgcggcaaacctgttcactggtcacgggattgccctttctccgctcccaattccaatcctaaccctaaccctaaccctaaccctaaccccgccaccactctcaatccaaatactcgaaatccttcgtcgtcctccttcaagcccaaaatccccggcgaaaagcccaagaaactcccccgaacaaagccta

SEQ ID NO: 60416 - DNA, 200 bp, Glycine max
gaacctacgttgccctcagatccaaccaaatccatcgtcaccaagaagaccccttttgcctaatcagctttaccgcactcttcaacagtgtcgccgataaggttcagcccatcctttgctccctatgccatttccccaaggatggcaagtgcaacggttgtgggaagttacgaagaataacgcaagtcatatgagcgcgt

SEQ ID NO: 60417 - DNA, 342 bp, Glycine max
ggcacaagtttgttgagatagctagaagcaataagatgaaaatgaaagtgcttgttttgtttgttgctacagttttggtagcatatgaatgccatggctcagactaccagaagttccctctccaaatgaaaactgggtttggtgggcaatacagcaatgaggtggcatgtgccagttggaggcttggcgtggaagcaaacaacgtagtcaagtggcaaactgttcctgcagcttgcggagagtacatagctgactacgttctatgagaccaatatagatcagattccaaaacagtttaccaacaagcttatatctatgctaaatccctcaaactcaccaaca

SEQ ID NO: 60418 - DNA, 99 bp, Glycine max
aagccttcagccaagccttcgttacggtgccaaaaaaacaacaaaagggggctccaaattcaaaatttaaccaaaaggcaaaaaacgttcccccaaacc

SEQ ID NO: 60419 - DNA, 223 bp, Glycine max
tgggacagctacttagagtcacatataaaagcgctccggctgttagaggtactctcacccgatcgcgggccaggtctgggctctaatcctcactccttttgtgacgggtccctctttaattgcagtcatccgtgggttcactccttactacttccgcgtctctccctgttctgtggacctcccacggatccctctcttctcaagttcttcccttccgtgttcc

SEQ ID NO: 60420 - DNA, 116 bp, Glycine max
cgtcgatacagctgcaaaaagaggagagagaggggttcgagtgtgtaagtggttgctgttgtaacgcgatcgtcatcatttgttgctcagtgttagtctttggtatttctttcaac

SEQ ID NO: 60421 - DNA, 127 bp, Glycine max
ggagttgttgtctatctcttcttctctttgtgttttggctgtggacgtaaaataatggctctgtcttttggttttgggctcttgtcttcttcttcttcttcttcttcttaatgtgttctccttcaac

SEQ ID NO: 60422 - DNA, 357 bp, Glycine max
ggcaagagtgaagagcgaagaaaatggctcccaagggtttaatctttttggctgtgttatgcttctcagcactgtcactgagtcgttgtcttgcggaggataatggacttgttatgaacttctacaaggaatcatgccctcaggctgaagacatcatcaaagaacaagtcaagcttctctacaagcgccacaagaacactgctttctcctggctcagaaacatcttccatgactgtgctgttcagagttgtgatgcttcactgttgctggactccacaagaaggagcttgtctgagaaggaaacagatagaagctttgggttgagaaatttcaggtacattgagaccatcaaagaag

SEQ ID NO: 60423 - DNA, 321 bp, Glycine max
gactcaccacttcaaaacactcataacacaaagcacaaagcaaagctcatccttgagttaaaaaatggcagcagcttcttccatggctctctcatccccatccttggctggcaaggccgtgaagctgggcccatcagccccagaagtgggaagggtgagcatgaggaagaccgtcaccaagcaggtctcctcaggaagcccatggtacggcccagaccgagtcaagtacttgggcccattctctggcgagcccgcgtcctacctaaccggtgagttcccaggcgactacggctgggacactgctgggctttccgcagaccc

SEQ ID NO: 60424 - DNA, 169 bp, Glycine max
cccactcgtcagtcccgtcggttcagctcctacgtaagcgtacatgggggctgcgaactctactctctgtgttcgcatgttcagttcactggcagtatgagcgacggctgactgacagtgggtgcactagcgttgcccccctcgctaacagggcgtccgcctcctcttt

SEQ ID NO: 60425 - DNA, 381 bp, Glycine max
ggagaaggaaaggctgaagaacacatagagagagagagagaagtgcagaaaaaatgagactgttcgatccatggcctgttttcttcaagagagaatggaagcggaattggcccttcttggttggattcgccatcaccggaactctcatcaccaaactttcccttggtctctctgaggaggaagccaaaaagtcgaaattcgtccaggcacacaagaggtgacgatatactcaccaaaccctagcttttttctcacgcattctcgctatttttttatatatatatttccttgatgtgaatgtgcatcaatgtgcttctcgtttgtccgactatttaaatttgaaatttcaactcatttgagttcaatgcgtgtatttggtac

SEQ ID NO: 60426 - DNA, 349 bp, Glycine max
ggaacctttgcattctattcattcaagattcagcaagtgcgttttggaagcagagaccgaaatacttcgagatggcccgtacaaagcaaactgctcgtaagtcaactggaggaaaagctcccaggaagcagcttgcaaccaaggctgcacgtaagtctgcaccaacaactggtggtgtgaagaagcctcatcgttatcgccctggaactgttgctcttcgtgagattaggaaataccagaagagcactgagctcctaatcagggaacctccgttccagaggttgggtcgtgaaattgcccaggatttcaagactgatctgcgtttccagagccatgctgtgcttgcagt

SEQ ID NO: 60427 - DNA, 297 bp, Glycine max
gacccccccttttttttaagataatttctctcaagtgttaaaacgtgagagattttgcaatggatataagaactggtagctaagtcgaagaagtatcagtcttttagggaatcttccaattgattgaccaagccaaataatatatggatatagatatatagatagatctatcgatatatatatctaactaatataggaatcttaaatagataattagtctattcataagaggagatgagatcatattagggatatagccgattctttcctttgtttgggctactggccaaccgccgg

SEQ ID NO: 60428 - DNA, 338 bp, Glycine max
gacgctagtttccattgaaattgtcaggtggaataaaaagctagaaaaagaaacaaggttttccccgaaaagggaatagaaatgcatgaatcttcaatgtttgtttgagtcttccgatttaatcctcctcgtcactttcagatcttttcttagatctttatttcttgttctggttgtcttctttcgcgacaacaaacctctcccttttctcttttccaaacactttcgccctctttgatcttgaataagagcttcaaattcggttcaaccaattgggggggcataaaaagatcatgttttgagcctcgccatcaatcgcgctcttcagattcaattct

SEQ ID NO: 60429 - DNA, 335 bp, Glycine max
ggttctagtgtgtgattgtttgttgttgtaactcgttcttcttcttttgttgttctgtgtttgtgtttgttttttctctcacctgaaaatgtcttgctgcggtggtaactgtggttgcggaagctcctgcaagtgcggcaacggctgcggaggctgcaagatgtagccagacttgagctacactgagtcaaccaccaccgagaccttggtcatgggagtggcacctgttaaggctcaatttgagggtgctgaaatgggtgtgcccgctcagaacgatggctgcaaatgtggaccaaactgctcctgcaacgcctgcacttgcaagtgaggtgttg

SEQ ID NO: 60430 - DNA, 370 bp, Glycine max
taccggtacggaattcgcgggccgacccacgcgtcaatagaggcttcgacagctgcaaaaaaagggaaggtagggaatctcgactattgtaaccaacaaccttagagttactgagcatagggacaccattccaaaccatctaggcatcaccgattcctcaatgacaacacgcactcaccccctcttctatgtggtctccgaccgttttcaacaaacagaagtcactgcagatccattctaacaggcactcgctgaagaatatatatctcatggatatgctaacatttgttactcacccttcttgatgaagtcaccatacttcaaaacttagatgaagtcgcttcagacgaactctttactgacaccactg

SEQ ID NO: 60431 - DNA, 204 bp, Glycine max
gacgcagaagaagcatcttaaggttccgaatgatcatcctgacgacggtgggattcagcgacgtactacgttgtctagtacaaaggatagggttgctggtgagggtgtagtgaagccttctgctactgttgaacaaagtgggaatgttggtagtggtaatgttggtgtgaatgctggtgctgctgctgctgccaagcgtttcaa

SEQ ID NO: 60432 - DNA, 353 bp, Glycine max
atccggtggtaaaaaaacacataaggggggacgggttgaaagcgatgccttgaagactgaactggtgattacttgtgccagatatggacagacatccaaatttaactcagtgtgcatgcagcacgtagctcacatagaggaacttctcggatgataacgttggattccatgtgatgaatgttgctcggaacgatatcaggcgttgtgatgttgcctcaacctcataggactataatggtagcgatgctgcaaactacgatgtacaagttaacaacagaagctcatactgatgatactgccaatggatatgttcgtgcgcgtgactgccaaacatctcaaaatggatgcacgtt

SEQ ID NO: 60433 - DNA, 389 bp, Glycine max
ggcacaagtttgttgagatagctagaagcaataagatgaaaatgaaagtgcttgttttgtttgttgctacagttttggtagcatatgaatgccatggctcagactaccagaagttccctctccaaatgaaaactgggtttggtgggcaatacagcaatgaggtggcatgtgccagttggaggcttggcgtggaagcaaacaacgtagtcaagtggcaaactgttcctgcagcttgcggagagtacatagctgactacgttctaggagaccaatatagatcagattccaaaacagttaaccaacaagcttatttctatgctaaatccctcaaactcatcaacaaagatgtctttgtcttggacgttgacgacactactctctctaatctc

SEQ ID NO: 60434 - DNA, 359 bp, Glycine max
cgacccacacgtcaaccgatgcgtcagcacaagcgtccgtgatgttgcgacatgcgagtgaaaggaaaaatggaataatgagtgatcacaagccagactccttcaacaccataagcaaagctgagacaaccaatatagcccctcaccccacttagaagtcacgccgggatccaggtcagcatcatctgatgagaaggctcctgcctgaaacatggcatttaaacggactgcgtcatgcctactgacacgatcttgagtggatccactatcccctcgtaccttcatcagctacaccagtatagccagacttgttgcccgtactgacatcttcaaggtcccaacccacgtcatacaatacg

SEQ ID NO: 60435 - DNA, 289 bp, Glycine max
ggtaacgtgtgagtacccatgccatgtggagataggcaaccgatgaacacggtgcattcgaacgatgaactgggacgactgtccctaacagcgaagacagtgatgtaaatgcttcgagacacgggcattctggtgggtcactacgatagtaacatcatcaattcatgaggtcagctccaactgctgcaaccacataaaccccgacgaactgtgcatcaccaagtccaagaaggacaactccggagagcagatataagtcttcatccccgacgagacgattgacatcgtc

SEQ ID NO: 60436 - DNA, 321 bp, Glycine max
gattgaaaccaaaagaacagcttctccaacaacatcttctcagagtaatgcgaatactggaggcattggatgaaaaaggctgtcgtatccccctaacctctggggattctgaacttgctgagaaattagccagaatatctagaaagctgagacgatctggatcggaactgtctagagtagtacaagtcctactaagtgtatctcatgttaaagctaagaacaacggacttggtatctccgtatagcgtccagggtcatccatcattcatgaacagagtcttggtgatctatgctaagtgtcactgcatcaactggacgcca

SEQ ID NO: 60437 - DNA, 385 bp, Glycine max
  unsure (1)..(385): unsure at all n locations
ggttctagtgtgtgattgtttgttgttgtaactcgttcttcttcttttgttgttctgtgtttgtgtttgttttttctctcacctgaaaatgtcttgctgcggtggtaactgtggttgcggaagctcctgcaagtgcggcaacggctgcggaggctgcaagatgtacccagacttgagctacactgagtcaaccaccaccgagaccttggtcatgggggtggcacctgttaaggctcaatttgagggtgctgaaatgggtgtgcccgctgagaacgatggctgcaaatgtggaccaaactgctcctgcaacccctgcacttgcaagtgangtgttgggagagcaagcttcaaacatagataccccttaattaggaataatgataaa

SEQ ID NO: 60438 - DNA, 378 bp, Glycine max
cggctcgacccacacgtcagcccaggcgtcagcacacgcgtcagggtgctacaagacgacagaaggggggcttactaatggcttctacgggagtcagccatacggtcttggcatgccatattctggaaagcagattgcaaattccacacttccttctcttggatctggaaatccactctttgagaatgaacgtatatcacgcttaaattctatgatgagaagttcagtgggaggttctggtggctcatggcatgctgatattggcaataatatagagggaagatatgcttcagccttacgagatgagttcacgaacaagaaaaccatgccatttgaacttccagatatcattgatcatgtggttcaattcagtactga

SEQ ID NO: 60439 - DNA, 349 bp, Glycine max
gactcaccacttcaaaacactcataacacaaagcacaaagcaaagctcatccttgagttaaaaaatggcagcagcttcttccatggctctctcatccccatccttggctggcaaggccgtgaagctgggcccatcagccccagaagtgggaagggtgagcatgaggaagaccgtcaccaagcaggtctcctcaggaagcccatggtatggcccagaccgagtcaagtacttgggcccattctctggcgagcccccgtcctacctaaccggtgagttcccaggcgactacggctgggacactgctgggctttccgcagacccagaaaccttcgccaagaaccgtgaactc

SEQ ID NO: 60440 - DNA, 349 bp, Glycine max
aattcccggctcgacccacgcatcaggccacgagtcagtaaaggagtgaggggaaaacatagcgggacacataagtccatttgcaacatgacacattggcaatccgcatagctgatccatgcgtcgttgctgtgcagtaccgtccacaaaggctctctgaacatcatccttggtcggcaaagccgtaaagctgcacttaacatctccatatctcgcaagggagagcgtgccgaatatggtcatcaatcaggactcctcaggagaacaatagtggtaccgatactcaatcaagtacatgtgcacattctctgcacagcaaatctcctaaataattcgagaattacaaggc

SEQ ID NO: 60441 - DNA, 119 bp, Glycine max
gtgaggtggtgagagatgtgcctccaggcgcaaaagccaccggggtctccggggagtgatcttccggctgatcggcccgaccgtgctttctccgatgcctcgatgctgatgatcatctt

SEQ ID NO: 60442 - DNA, 378 bp, Glycine max
ggttctagtgtgtgattgtttgttgttgtaactcgttcttcttcttttgttgttctgtgtttgtgtttgttttttctctcacctgaaaatgtcttgctgcggtggtaactgtggttgcggaagctcctgcaagtgcggcaacggctgcggaggctgcaagatgtacccagacttgagctacactgagtcaaccaccaccgagaccttggtcatgggagtggcacctgttaaggctcaatttgagggtgctgaaatgggtgtgcccgctgagaacgatggctgcaaatgtggaccaaactgctcctgcaacccctgcacttgcaagtgaagtgttgggagagcaagcttcaagcagagatagcccttaattaagaataa

SEQ ID NO: 60443 - DNA, 348 bp, Glycine max
gaacaaagaaagaaagaagttcggagtgagagaacgtaagcggcgttgttccttctttgttcattgttcattcacatacactattctctctttctcgcaaactctcaaaccctgaaacctttttctttgttgttgtttcgttctaacaccttcactttggtgggacgaagaacctgaaaaaaaaaaccttttttatttatttggtgaaactgagacataaacgtgtttttcctcggagacacaggcatcctttcgattacttgaacatatggtttgctcgtaatgttccttgttcgtgttcagttgctaccctcttggcccctttttaagtttcggtgattttccgga

SEQ ID NO: 60444 - DNA, 358 bp, Glycine max
tggcaaaaaaagaacagaggggaacacacgcacgtctcttgcttccacttccagtccagcatgccgtcagatcatctcaaacatcgggtcaccagcacaatagcaaccaccagccacgtcaataggaccagcagaggctcacgactgctgatggccgcacgcggtcttaagtcactcgccagagccgttgtccgccctctctctctcagctccttatcatcttacagaggctcctcctcctcaagtgcatactgcgcgtcgagaatctccttcaggttcccaccctcgagggccctagacttgacgtgtccagcttcaagcttcatgatggtgtctctctgcatggatggtgtgagca

SEQ ID NO: 60445 - DNA, 295 bp, Glycine max
caatacgacaggtcgtgatatgcctatgtttagtatgcagcttgcgatggtgtcctatgctctctctttgggacctgcttgtgtcaaatctcagggtatcattacatgacttatcccgtctccgtgtgcattctcattgcgaatcccgtggcatcttaaacttgtctggtgttgaattgcattgagattcagtgtttctgcctataaggtcacctagattcatttcaatggctgactttatttaactacatggtagattgcaccttggtttcggcatccaatctattcaacctag

SEQ ID NO: 60446 - DNA, 355 bp, Glycine max
gaagagtgaagagcgaagagaatggctcccaagggtttaatctttttggctgtgttatgcttctcagcactgtcactgagtcgttgtcttgcggaggataatggacttgttatgaacttctacaaggaatcatgccctcaggctgaagacatcatcaaagaacaagtcaagcttctctacaagcgccacaagaacactgctttctcctggctcagaaacatcttccatgactgtgctgttcagagttgtgatgcttcactgttgctggactccacaagaaggagcttgtctgagaaggaaacagatagaagctttgggtggagaaatttcaggtacattgagaccatcaaagaag

SEQ ID NO: 60447 - DNA, 192 bp, Glycine max
ggtgagtgaagaagcagagggggtagcggcattaaaaatgcagatcttcgtgaaaactctgacagggaagactataaccctcgaggtcgagagcagcgacaccatcgacaatgtcaaggccaagattcaagacaaggaaggcattcctccggattagcagcgtttgattttcgccggaaagcagcttgaaga

SEQ ID NO: 60448 - DNA, 218 bp, Glycine max
cattggggacactctcgcgacgtcatcttcattgacatatcgtcagcaatattacagcattatcttgtgactcatcaggcacatcacaccattatgaattgttaacagtcatttggtgttacatcgtcatacctatgatgtttatcaagtctgcagcaatggcgcccgctccatccttaacctggacatgcttcattctgtgcgtctggtgcttttca

SEQ ID NO: 60449 - DNA, 61 bp, Glycine max
cagtcacacgacgcagtaatgaaaggcttcacttcacaagttgtcttacattttttgacca

SEQ ID NO: 60450 - DNA, 396 bp, Glycine max
ggacgccaccagcagcgaagtgagtgagtctctgattctcaacaatggtagctgcaaaaccaaagtagacaactttagtagctgcaaatccgaaatagacaacctaagaagtaagaaccccttctttagtgtttgatgtcttgtttgttaatgcaatccctcaagtcacaccctgctcttttattttccctttccaatcacttctctttctcttctcactctgtcagatcctttctctcttctttctccacatgccaacactcaaaggaaagcacttccattattgattatctaaatgccaagttcgatttctcgagaactcaatccttctacatctcaaaacgtgtttcaagcagcacattcccccaaaaccccttgtctgtgctcagttttttc

SEQ ID NO: 60451 - DNA, 361 bp, Glycine max
  unsure (1)..(361): unsure at all n locations
ggcacaagtttgttgagatagctagaagcaataagatgaaaatgaaagtgcttgttttgtttgttgctacagttttggtagcatatgaatgccatggctcagactaccagaagttccctctccaaatgaaaactgggtttggtgggcaatacagcaatgaggtggcatgtgccagttggaggcttggcgtggaagcaaacaacgtagtcaagtggcaaactgttcctgcagcttgcggagagtacatagctgactacgttctangagaccaatatagatcagattccaaaacagttaaccaacaagcttaattctatgctaaatccctcaaactcaccaacaaggatgtcccttgtctgga

SEQ ID NO: 60452 - DNA, 343 bp, Glycine max
gagcgaaacagagagtgatttcagtgagtgatcggtgttcacttgatctcatcataatcgtcagcgtcaattgaagaagatgccgatcagaaacatcgccgtcggaaggcctgaagaggcgactcaccccgacacgttgaaggcggctttggctgagttcatctcaaccttcatcttcgtgttcgccggctcaggctccggcatcgcctacaacaagctcaccgacaacggcgctgccacccctgccggcctcatctccgcctccatcgcccatgcattcgccctcttcgtcgccgtctccgtcggcgccaacatctccggcggccacgttcaacccgccgtc

SEQ ID NO: 60453 - DNA, 139 bp, Glycine max
gagatcgaagcttgtactcgaatgagagtttagagtaagcaccttgcgaccagcgctctccgttcactatatccccgcacactgtcgtattcacgacggatttacgggttactcgctcacggtgcggctgaagtttcct

SEQ ID NO: 60454 - DNA, 357 bp, Glycine max
  unsure (1)..(357): unsure at all n locations
ggttctagtgtgtgattgtttgttgttgtaactcgttcttcttcttttgttgttctgtgtttgtgtttgttttttctctcacctgaaaatgtcttgctgcggtggtaactgtggttgcggaagctcctgcaagtgcggcaacggctgcggaggctgcaagatgtacccagacttgagctacactgagtcaaccaccactgagaccttggtcatgggagtggcgcctgttaaggctcaatttgagggtgctgaaatgggtgtgcccgctgagaacgatggctgcaaatgtggaccaaactgctcctgcaacccctgcacttgcaagtgangtgttgggagagcaagcttcaagcagag

SEQ ID NO: 60455 - DNA, 310 bp, Glycine max
ggagcaagagtgaagagcgaagagaatggctcccaagggtttaatctttttggctgtgttatgcttctcagcactgtcactgagtcgttgtcttgcggaggataatggacttgttatgaacttctacaaggaatcatgccctcaggctgaagacatcatcaaagaacaagtcaagcttctctacaagcgccacaagaacactgctttctcctggctcagaaacatcttccatgactgtgctgttcagagttgtgatgcttcactgttgctggactccacaagaaggagcttgtctgagaaggaaacagat

SEQ ID NO: 60456 - DNA, 289 bp, Glycine max
ggagcaagagtgaagagcgaagagaatggctcccaagggtttaatctttttggctgtgttatgcttctcagcactgtcactgagtcgttgtcttgcggaggataatggacttgttatgaacttctacaaggaatcatgccctcaggctgaagacatcatcaaagaacaagtcaagcttctctacaagcgccacaagaacactgctttctcctggctcagaaacatcttccatgactgtgctgttcagagttgtgatgcttcactgttgctggactccacaagaaggagc

SEQ ID NO: 60457 - DNA, 296 bp, Glycine max
gagcgaaacagagagtgatttcagtgagtgatcggtgttcacttgatctcatcataatcgtcagcgtcaattgaagaagatgccgatcagaaacatcgccgtcggaaggcctgaagaggcgactcaccccgacacgttgaaggcggctttggctgagttcatctcaaccttcatcttcgtgttcgccggctcaggctccggcatcgcctacaacaagctcaccgacaacggcgctgccacccctgccggcctcatctccgcctccatcgcccatgcattcgccctcttcgtcgccg

SEQ ID NO: 60458 - DNA, 57 bp, Glycine max
tgacgaggagattaaaggaatggtggttcagcataccagcagctcctgttacactgg

SEQ ID NO: 60459 - DNA, 455 bp, Glycine max
  unsure (1)..(455): unsure at all n locations
ggtctagaattcccgggccgacccaagcgtccacccacgcgtccgggattcaactcagaaaggacttttggctgctggtgatggccacaaggttaaattttggaatatggacagtgttgagctctggacaagcactgatgttgatgctgaattactggaaaatccatgcattcgctttaacaagaagggaacattactggctgttgctgcaaaaggaaacaaaataaaaattttagcaattgatgacattttgcagaaacagaatgaaacacattcaattcatgtccccaataatcaacatgaagccttaaagtgtacacaaagtccaattttggttgatgctggtgctggaatcgcaggtgaaggcattgtcatgaatgggtaccaaaaggcttggangatgggaggtataattcaattgaggagtctcataacaactcaaagttttggaatgt

SEQ ID NO: 60460 - DNA, 283 bp, Glycine max
gatcatagcatcagaatccagtctcaaccgtctggcatcgctcaccagtcagtcccgtatgcatgagtctggaggcctctcgtagatgtcatgcacagaggacagtcccggatagaatcgcagccagacgctcccgtacctgctgtgaagcacattggagcagccaccacagctctgactcttgcgcgcccggggacagcagctgaagatcttaacgttcgtacatcgtggccgcgtcatccccacctgcacacgcatgagttgaagactgtgctctctcccc

SEQ ID NO: 60461 - DNA, 402 bp, Glycine max
ggagaacaaaacaagtgtttcgaatagattatcctaagtctttgggaatagtgctgcaatggcttcaagtcaggaggaggtgacccttttgggagctactggaagcccatttgtgtgcagggttcatattgccctcaagttgaacggagttcaatacaaatatgtcgaagaaaatttgaggaacaagagtgaactgcttctcaaatccaacccagttcacaagaaggttccagtgtttattcacaatgagaagcccatagcagagtctcttgtgattgttgaatacattgatgagacatggaagaacaaccccatcttgccttctgatccttaccaaagagccttggctcgtttctggtccaaattcattgatgataaggtttttggtgctgcatggaaatc

SEQ ID NO: 60462 - DNA, 359 bp, Glycine max
agggatttttaacctgaaacaaacacattaccaaaccccaataaaactaacctcaatccgcaacccttcggttaaccaaaaatccgaaaatttaatgactcaagggcggcaacaagattaaattaataatttaaccttgcaatttgggttacctggcctaacaattcaaagggtgttagttcaggttcaactagtgagcctacaattcaccttcccctggtgttttgccttaggcgactgccccagatatttcctcaattttccccactccaagagccaatcaaccaatgagttctggtgctccttttggggccgaagcaccagcaccggcaaccagttcaggagagtttgagggcaag

SEQ ID NO: 60463 - DNA, 283 bp, Glycine max
ggagcaagagtgaagagcgaagagaatggctcccaagggtttaatctttttggctgtgttatgcttctcagcactgtcactgagtcgttgtcttgcggaggataatggacttgttatgaacttctacaaggaatcatgccctcaggctgaagacatcatcaaagaacaagtcaagcttctctacaagcgccacaagaacactgctttctcctggctcagaaacatcttccatgactgtgctgttcagagttgtgatgcttcactgttgctggactccacaaga

SEQ ID NO: 60464 - DNA, 378 bp, Glycine max
ggttctagtgtatgcgattgttgtgactcgttcttcttcgtcgttatcttcttcttttgttgtttgtgtgtttgttttttctctcacctgaaaatgtcttgctgcggtggtaactgtggttgcggaagcgcctgcaagtgcggcaacggctgcggaggctgcaagatgtacccagacttgagctacaccgagtcaaccaccaccgagaccttggtcatgggagtggcaccagttaaggctcaattcgagagtgctgaaatgggtgttcccgctgagaacgatggctgcaaatgtggagctaactgcacctgcaactcctgcacttgcaagtgaggtgttggagagctaaagcttcaagcagaaatggcccttagaaat

SEQ ID NO: 60465 - DNA, 431 bp, Glycine max
  unsure (1)..(431): unsure at all n locations
gatatgcaccctgtggggaaaaacaanacacacaataataaacaaaataaaaactttctcctcctccttcaatgtgacaattggtggtggttgttgccctttggtccgtttccccccaatgccaaaggttggtctttcgagaaggccttcaatcgctttatccccgtatccggcttttctccttggtgctggttcctgtcctgccgctttttctcaacaaaccaacatccatcaatgatgataacnaagccaattaactttgttagcctctcgctgtgtctgaaaactcttaaaagtttggccaagactttggagccacagtttggagactttgtgttggcaacgggttaattgggtttcttggactcagcatgtggaaaccgttggtgggggttggaggtggaggcattttcgttcccatgctcaatctg

SEQ ID NO: 60466 - DNA, 315 bp, Glycine max
gatcactcggtggggacagaagtggcagttagttgctctgcagaggaatcctcatctggttcagcaacggcatttatcgttgcaatctacgtatagtatgtggaagtttggtgtaatacaataggattcttccgatcaggttggtcacagtcgaagtccagttcacacatggagcgctgacgatgtgccgttcagtgatcctcacgaggatgctagagatgtttcggaaagttcacctgcaatgacatccagatctgcttccacttcacatgacgcgccaaattgggtttcgttccgtatccattcgctaatctc

SEQ ID NO: 60467 - DNA, 208 bp, Glycine max
aggggagcccaatctattcttcatgttcatcatgcctggagctgttatggttttggttttggcttcttccatcttgaactcttctcatcgtggcgagtgacacgactctgaggaccaatgatgtcgattatgacgcttctacggctcaccaagagcgtggttaacctgtccaatacgttcttcgcataatcgctttacacaaagctct

SEQ ID NO: 60468 - DNA, 305 bp, Glycine max
gagggttattcattataatcactactaataagccattccaaaggaatctgcggtgatttatagaacctcctttactcattattgtatgtcgcgtcgccttgacgcagtgcctcctctgttgccattgtcactccacaattaatactcgttgtcgctggacattttctacgacgatgcctggtagctgctgattgacaccaatcaatccgtgaattgtctccacgcatctcgcttaacactatcctttcggacgactacttggaccaattgaaggcgtttttagagctctggtttgggttttattc

SEQ ID NO: 60469 - DNA, 210 bp, Glycine max
gattctgagtggtcacaaactcaactaataagccaatccacacgaatctgcggtgatccgtagaacctccattccccatcattatatgtcacgtcgcccccacgcagcgccgccgctgtcgccgctgtcacgccagaggccacactcgtggtcgccggacatgcgccgcgacgaggcgtggccgctgccgatggacaaccttcaccccgt

SEQ ID NO: 60470 - DNA, 406 bp, Glycine max
ggttctagtgtgtgattgtttgttgttgtaactcgttcttcttcttttgttgttctgtgtttgtgtttgttttttctctcacctgaaaatgtcttgctgcggtggtaactgtggttgcggaagctcctgcaagtgcggcaacggctgcggaggctgcaagatgtacccagacttgagctacactgagtcaaccaccaccgagaccttggtcatgggagtggcacctgttaaggctcaatttgagggtgctgaaatgggtgtgcccgctgagaacgatggctgcaaatgtggaccaaactgctcctgcaacccctgcacttgcaagtgaggtgttgggagagcaagcttcaagcagagatagcccttaattaggaataatgataaactattaatgtgtagctaaaaa

SEQ ID NO: 60471 - DNA, 101 bp, Glycine max
ggagagaatcttgtgcagcaacgcagtgttgtgagtgagttgggtctggtctttggtatttggcagtcgtatattacgctcgggttctttcactgtatcct

SEQ ID NO: 60472 - DNA, 346 bp, Glycine max
ggttctagtgtgtgattgtttgttgttgtaactcgttcttcttcttttgttgttctgtgtttgtgtttgttttttctctcacctgaaaatgtcttgctgcggtggtaactgtggttgcggaagctcctgcaagtgcggcaacggctgcggaggctgcaagatgtacccagacttgagctacactgagtcaaccaccaccgagaccttggtcatgggagtggcacctgttaaggctcaatttgagggtgctgaaatgggtgtgcccgctgagaacgatggctgcaaatgtggaccaaactgctcctgcaacccctgcacttgcaagtgaggtgttgggaaagcaagc

SEQ ID NO: 60473 - DNA, 155 bp, Glycine max
gagcggacgaagggtttcagtttcggggtgagacacttgcttcagtgaacagagatctcgcgaggtcgaatcagaacgacatcgatttagtgatgcactggcgaaggagcaggactgtgtcagctgggactcgaaacatcttcacccggacagac

SEQ ID NO: 60474 - DNA, 248 bp, Glycine max
ggacactcgcttcacagttacatattctcagaaaagcatgcattgtgagagacaacgtctctgggtttccaatagtgctggggccctcacctcttctggtgcacacaactcccatggcagccgctgtcccatgtatccccgtctcgtcaagtccatgtttcgcggcattcacattctctctcccattttcgacaccttgttgctcgaaggtgaggtcacataggcttcttcactgtactgacgtcata

SEQ ID NO: 60475 - DNA, 407 bp, Glycine max
  unsure (1)..(407): unsure at all n locations
ggagcaagagtgaagagcgaagagaatggctcccaagggtttaatctttttggctgtgttatgcttctcagcactgtcactgagtcgttgtcttgcggaggataatggacttgttatgaacttctacaaggaatcatgccctcaggctgaagacatcatcaaagaacaagtcaagcttctctacaagcgccacaagaacactgctttctcctggctcagaaacatcttccatgactgtgctgttcagagttgtgatgcttcactgttgctggactccacaagaaggagcttgtctgagaaggaaacagatagaagctttgggttgagaaatttcaggtacattgagaccatcaaagaagctttggaaagggaatgcccangagttgtttcctgtgctgataacctcg

SEQ ID NO: 60476 - DNA, 203 bp, Glycine max
aaaagggaaataaaagaaatggaaaaaggtggcaaatccggaacaaccggctcaatggctccctgttcaaaagctgcaatgcctctccaaaacctgaattccccaatcctcccaaatcacttggaagagaaatccatgacctgaaaattgaaatgctgaaagagcgtttcacgaggaaaaaaatgtaactctgcgctatcaca

SEQ ID NO: 60477 - DNA, 276 bp, Glycine max
gatgcacaagtttgttgagatagctagaagcaatatgatgaaaatgaaagtgcttgttttgtttgttgctacagttttggtagcatatgaatgccatggctcagactaccagaagttccctctccaaatgaaaactgggtttggtgggcaatacagcaatgacgtggcatgtgccagttggatgcttggcgtggaagcacacaacgtaatccagtggcaaactgttcctgcaacttgcggagagtacatagctgactacgttctaagagaccaaga

SEQ ID NO: 60478 - DNA, 65 bp, Glycine max
caacatcaagacggatttacccacacgtgcactagtacaggcaaaatctcaactggttgggattc

SEQ ID NO: 60479 - DNA, 77 bp, Glycine max
ccacgcgtcaggagtgatgtgagagaagaagagatgggtagaggagaagatcgagaaggggtcgcaataaccagggg

SEQ ID NO: 60480 - DNA, 216 bp, Glycine max
gttgccgcagtcgcaacagagagacagcacgaggagattcatttgcaggagacgattcaatggcgccggagatgccccgaagcacgtccaggaagaccgacttggtacggggaatggggatgctatcgaggtcactgatgtatgtcagtaggggcagttgggcgctctgtgccaaaaagagccgtgttttgccgctccgcgatatagagcctcacc

SEQ ID NO: 60481 - DNA, 127 bp, Glycine max
gacaacaagcaactcttctctcaatttttcttttctggtcaccatcatgccgaccgggacaaatgttagaatcgcgttctccgatgatgctgcaaggagggcagcattcaggaaaacgaggattgga

SEQ ID NO: 60482 - DNA, 124 bp, Glycine max
ctccccaaacaaaacaacaaaaccaaactcaaaaacaaactcaaaaccaaactccccaaaactaaggttttgcattgaaggcactgtgcaaacgcgtcagatttggaaactctctccttaacaa

SEQ ID NO: 60483 - DNA, 213 bp, Glycine max
ggccattgttgttgctattatcatccgcagctgcttttattcgcaccgcaaacagtgagccatggccgtcggaaagaacaagcgcatctccaaggggaagaagggtggcaagaagaaggcagctgatccctttgccaagaaggattggtatgacattaaggctccttctgtttttcaagtgaaaaatgttggcaaaaccctcctctctcgtac

SEQ ID NO: 60484 - DNA, 278 bp, Glycine max
ggatcatggccggatgtgaaaacttaaagggcacagattgggacactgttgttgccactcaccttccgctgaagctcactctcactccgtccatcacgcaacagtatttcagttgcatgatcacccatataccctcatattcgcccctataggacccgcagatcacacgtttccgcgttttctacgtgttgcttcttctgggcgtgataacacccgcaccgggggtccactgtattcaccccattgtcactgacagcggttttaagaaatatcagctt

SEQ ID NO: 60485 - DNA, 382 bp, Glycine max
gatttgtgagtgtgtgagagagagagcgagcagtttcagacacagagagaggggtttgggattggagggattgacgctgcgtctcttcctcttctctttcgatccatccctcattcctaatcctccaatccaaccacctcagcctcacactcacatatacacatatctgaacgcgtatcgtccctcctatggcttcaaagcgcatcctcaaggagctcaaggacttgcagaaagacccaccaacttcttgcagcgctggtccagtagctgaggacatgttccattggcaagcaacaataatgggtcctgctgatagtccttatgctggaggtgtattcctagtcactattcacttccctccggattatcctttcaagcctcc

SEQ ID NO: 60486 - DNA, 109 bp, Glycine max
gacgctcaattcattttcttctcctctctctctctcctaaggttagggttttctctcttcatcactctctgtgtcgctccgtttcaatggctcagcaagacgcctcaaa

SEQ ID NO: 60487 - DNA, 354 bp, Glycine max
ggcaacgcctttaacagacttaacaacaacacaaaaccggttaacgtccgttcaagccaacaactccccccccccttcctaatgcctcctttccaaaagttaaaatggcccaagaaactttcctattcacatctgaatcagtgaacgaggggcaccccgacaagctctgtgaccagatctccgatgctgtgctcgatgcatgcttggagcaggaccctgacagcaaggttgcctgtgaaacctgcaccaagaccaacatggtgatggttttcggagagatcacaaccaaggccaacgtggactatgagaagattgtgcgtgacacatgcaggaacattggttttgtctctgatg

SEQ ID NO: 60488 - DNA, 388 bp, Glycine max
gaatgtgagtccgttacactcaaaacaactggcttcaattgaggccccttcccaattgccaaaacaacttccagttttcccaaccgaaaaataaggaccactttgggccttctccctcctggtccggggttggttaaaataagcaattgccccaagaaagattttgccccgccccttcggaaccgaaatcaaagcccctttattggaaagtcgacaatcccactctctctcctagccaccttcaagatttgcctggattcacacgcagtgtctataagagtaatcatgctttgatatcaccagaaagtcatgtatatggccctttgcctgattggatcaacacgttaggcacacatttaatttcaccagaaatgggttcacaccttgt

SEQ ID NO: 60489 - DNA, 397 bp, Glycine max
ggatttcagtgagtgatcggtgttcacttgatctcatcataatcgtcagcgtcaattgaagaagatgccgatcagaaacatcgccgtcggaaggcctgaagaggcgactcaccccgacacgttgaaggcggctttggctgagttcatctcaaccttcatcttcgtgttcgccggctcaggctccggcatcgcctacaacaagctcaccgacaacggcgctgccacccctgccggcctcatctccgcctccatcgcccatgcattcgccctcttcgtcgccgtctccgtcggcgccaacatctccggcggccacgtcaaccccgccgtcaccttcggcgccttcgtcggcggcaacatcaccttcctccgcggcatcgtctacgtcatcgcccagctc

SEQ ID NO: 60490 - DNA, 383 bp, Glycine max
gatgcacaagtttgttgagatagctagaagcaataagatgaaaatgaaagtgcttgttttgtttgttgctacagttttggtagcatatgaatgccatggctcagactaccagaagttccctctccaaatgaaaactgggtttggtgggcaatacagcaatgaggtggcatgtgccagttggaggcttggcgtggaagcaaacaacgtagtcaagtggcaaactgttcctgcagcttgcggagagtacatagctgactacgttctaggagaccaatatagatcagattccaaaacagttaaccgacaagcttatttctatgctaaatccctcaaactcaccaacaaagatgtctttgtcctggacgttgacgacactactctct

SEQ ID NO: 60491 - DNA, 196 bp, Glycine max
cagcagcacacgacgacatgggggtgcagcatacaaatcgatatgggaaaccgtccagattcaaaacattaagggactgaggctctcacaggtgaccagcaattacaccaggtgcaacacttccctcttgctagtctgcattgcagttccattgtcgctactaccgctctacactcgctatctgatcgggacctat

SEQ ID NO: 60492 - DNA, 382 bp, Glycine max
aaaagggattcgtgacaaaacgttttttgcaactgcgatactggctatgcgacaacctaaacgcctaatcctaacaaggtgtcctaaccggcttttgattggtgaataacaatttccccccggcccctgttgggctggggcaagctccaaaatctgatctctcgcacatggactcatcacattacaacatttttaatcctgggatttggactttggtccttgaaagatgctatatttgaacaaggggatgcggaagaattggctgaagttgaagttaaattggataaagattggaaggctagcaatggagctacaaaaaatagcaataaggatgatgatgccacaaaaaagcataaacggtcatttttatctcagttttttt

SEQ ID NO: 60493 - DNA, 243 bp, Glycine max
cacggggacttgagagcttccgtacaggtgtaaggtggctccaagagtgtggagtaacttcgtgatcaacgggatcatctgttgccagagggagtacatgaggtctcacgaagagctcattagcatgaggaacgtgtttgaggaggaaatataggaatggctacatgttcgaacgggtgatcttgtaaatatctattcagatgactatgttgttcaatggatatttcctgagaagctgatcaa

SEQ ID NO: 60494 - DNA, 52 bp, Glycine max
gatctcttacaacgaaaccctcttcatcttgttctatctgtgacgagcatca

SEQ ID NO: 60495 - DNA, 268 bp, Glycine max
gactccgaagtccccaataaagtccaaattggaagccgaaggaaatctcatcgtgtgattgaaatttgcccagtgtgacgatggcgatggaactggaccagaatcaggaacatcaattaaggtttcccttctggaaatcgctccgtcgcaggttcagagcccagtcacctttcctcgctcatagcaacctcgaacgggaacttctcgccaaacaacctgccttggaattaacacaagacagacaacagcctcagacatggatgcaaca

SEQ ID NO: 60496 - DNA, 276 bp, Glycine max
ggtctagatgacgatacaacgggactacgggaaacagacatctcaattgatacagattccatctgatggtaatcaatacactaccataacgtctaacagttcccgagcttcgacatcctcttatggcaatacgaattctcctatatccacagatgtggatgtcaaccaattgccagatgagattggattatgggtacaattcaaactcaactcttaccagcactgcatgtcagagtgtagtcaatgagacactatctgtgatccccattacatata

SEQ ID NO: 60497 - DNA, 255 bp, Glycine max
gatgctcagttcattttcttctccactctcgctctcatatggttagggttttctcgcgtcatcaatctctgtgtcacacggtttcaatggctcagcaagactctcaaatcggctggtcagagaatggcgctgctgctgctacagtgtcgtttgtcactgtaaaaccgcagctccacatcaaatctccctcagccaatgacgccattctgttcttcaaggctgcgtttggcgctgatgaagttggccgtacgcaca

SEQ ID NO: 60498 - DNA, 265 bp, Glycine max
gaaacaagtacctcccatgactcacagcatagagccctgaagttgtgatgttccgccatacccatattcctcaatcaggacaccgaatgtcctaattcgggtaactgctacctacatcatggctactgtgttcacattgtggtggtaataagcacaggtttttcacatctcttcacacacagaaccacctcggtttcatccttttcagcacccttatctcaaagctttttcatttttggtgggtttttttctcgtacatagttgt

SEQ ID NO: 60499 - DNA, 272 bp, Glycine max
ggaaacagatattgctctcagtgagtgatcggtgtccatctcatctcatcatactcctcagtgttaattgacggctgtgctcatcgtgtccaactgcgtcgcaaggttgggtatgacgagtcggcccgtacgttgacatgggtcgtgtgctgagttgaattcagcttcgacgtccgtcaacgccggtctgggattcggcctcggcaacactgaccgttacttcaacaacggttcgtatcctgagcgtgtcagtagcggtgctcacgtttact

SEQ ID NO: 60500 - DNA, 291 bp, Glycine max
gggcagtcataagacatcctaggcagcagcaatatctagcgagtaagtctttgttcttgttctcatcattcatcgcagcttattcgatcaggggatgtgtacgtagagttattgattcagagcctgatcgactgtatagttcatatcacatgcgaagttgtcatttccattggggaggttttggcacagcaagctacctcagtcacattcatctggttgatacctccacttatctcaatgcacccaaatgcattggcatcttcactgagcaatcaaactgttatgatgtcc

SEQ ID NO: 60501 - DNA, 51 bp, Glycine max
gcgtccgacccgacgtcagtagagtagtgagtggggcagagagaggggtac

SEQ ID NO: 60502 - DNA, 354 bp, Glycine max
gatcgacaaaaagataaagggtgaataattagcagctccttctagttccggtgtcggtgtgggtgtttgaaccgggttaaggatcttcatatgttcaatcatatacggtaatctgatcaggaactacctcatcgaatcctacaaggcatgatcgctatatctccttcagaacgtccattttgctctctccaaatgtgtcgacgccaagcctgaaaaacctactattctttcagacaccccataacaatgatacggaatagctggaagctttcaatgcataaatcgttgagatctggcagttcattgtcattttgtatccttctgtgatgtttaattcaattgcatcgttttttt

SEQ ID NO: 60503 - DNA, 156 bp, Glycine max
tggggaaaaatcagttgtgcagagcaaggcaattaaaaaggaaaaaggaaaataaatataaatataaaaaaaaaagaagccaagcttcgttcatgttcctcaactgaaaccctctttgcgggcaaatcaaaaccctattccaattctccattcact

SEQ ID NO: 60504 - DNA, 234 bp, Glycine max
gattgacaaaacagatcgggctcatattcctacacattaccgcaaatctctcacggcgtgaatcttatcacgtgaattgtgaagacgtcgtcctcacgtagcaaaatcaacacggttcgagatgctaaatgtactcagtgttcttagtcaattagataggtactggttaatactcaccgtaccatctacaagattcactatcatctcatacgacttattcagccattcaactat

SEQ ID NO: 60505 - DNA, 173 bp, Glycine max
caaaagatcaacgaaagggggttaattcttaaggtttttaatctctctcatcacacttgaatcatttaaggtcctcctaaaagaattttcctctataagttgggtatctggaatgtctacttcactgtagaggttacatatcatcatcatcttggatttgcactcattctcct

SEQ ID NO: 60506 - DNA, 208 bp, Glycine max
gcaaaaagacaacagaagggcattggctcacaaaattataagaattggcaccatggtgccgcctccgaaacaaaaccaagccccgaagttccagattcaatgtccgaagaaacccacaggaaagaaaaaagacctgaggactatccacgaactctctctgttgttggagttaatgttctaaacggtatcagaattaatgagatgttaa

SEQ ID NO: 60507 - DNA, 391 bp, Glycine max
  unsure (1)..(391): unsure at all n locations
ggttctagtgtgtgattgtttgttgttgtaactcgttcttcttcttttgttgttctgtgtttgtgtttgttttttctcccacctgaaaatgtcttgctgcggtggtaactgtggttgcggaagctcctgcaagtgcggcaacggctgcggaggctgcaagatgtacccagacttgagctacactgagtcaaccaccaccgagaccttggtcatgggagtggcacctgttaaggctcaatttgagggtgctgaaatgggtgtgcccgctgagaacgatggctgcaaatgtggaccaaactgctcctgcaacccctgcacttgcaagtgangtgttgggagagcaagcttcaagcagagatagcccttaattaggaataatgataaactaata

SEQ ID NO: 60508 - DNA, 190 bp, Glycine max
  unsure (1)..(190): unsure at all n locations
nggacaacgtactaatttcacatgaagccaagacacaacatgaactttggtcgaaacttccgttgttccaagtactctgaatttctgttcccggaagaagaagaccatacatgnnntgctcagtttgcctgtagtcagtcctagtggactgaagttgcagggtttcctcggcactcccttgagttcctca

SEQ ID NO: 60509 - DNA, 368 bp, Glycine max
  unsure (1)..(368): unsure at all n locations
gaagataataaggtttggtagaaaagagaagaggatggatctttttatttcctttccttaaccccctccctctctccctctcagtagaaaaccccagaccccaaacacatcatcatctttcattcattcctttctatttctccagttagaactcgtttccctaactcggccgagtccgcaccagcgagtcatcatggcgaatcacccctcccaagcctccaccgacgacttccttgaccaaatcctcggcctctcgaccttcgcctccgccgacgcctctccgatgatgcttcagctcaactccggcgacgccgccacccacctagcctccttcnacgcgccgcnctaccagctcgggctcagcctgg

SEQ ID NO: 60510 - DNA, 330 bp, Glycine max
  unsure (1)..(330): unsure at all n locations
gaatcacagctcttggctttagcaaattccaattcccaattcccaattcgaaaaccttaatcctttcaaagaaccaaattgagtgatcgtgatggcaccaaaggcagagaagaagccagcggagaagaagcccgcggaggagaagaaatcgacggtgggagacaaggctccggcggagaagaagccaaaggccggaaagaagcttccgaaggaaggaagcgccggcggagaagggaagaagaagaagagaaacaagaagagcgtggagacatacaagatctacatcttcaaggttctgaagcangtcnaccctgacattggtatctcaag

SEQ ID NO: 60511 - DNA, 153 bp, Glycine max
ggtactccatcatttccttggtcctcctccttctcctcattccggtctccaaccttcaaaggcactttctttcctttccaatgagcttccaataatctcacgccttgcaatcgtagttgcaccctccaaactccttcccgtttccttcatctg

SEQ ID NO: 60512 - DNA, 319 bp, Glycine max
gattgtgtgacaatgtgaggatctcactcaacgcacaggcttcatgtcctccgcgtcctgatagatcaccacctcggaaggaaagatcacaccacagaagccagttgttgagagctacgttggtagggcatcatcgattcgatgcgaattatcaggcatgacttgtccttccatttcgatttagagcccgagacgatctatcgaggccacctctaaagattattcttagatcgcctcgatagtcgatcactacaacaagctggttaaactagcggcgacggctttctacgatgatctgacgagtacatgagagaatcaa

SEQ ID NO: 60513 - DNA, 378 bp, Glycine max
ggcacaagtttgttgagatagctagaagcaataagatgaaaatgaaagtgcttgttttgtttgttgctacagttttggtagcatatgaatgccatggctcagactaccagaagttccctctccaaatgaaaactgggtttggtgggcaatacagcaatgaggtggcatgtgccagttggaggcttggcgtggaagcaaacaacgtagtcaagtggcaaactgttcctgcagcttgcggagagtacatagctgactacgttctaggagaccaatatagatcagattccaaaacagttaaccaacaagcttatttctatgctaaatccctcaaactcaccaacaaagatgtctttgtcttggacgtttacgacactaatc

SEQ ID NO: 60514 - DNA, 337 bp, Glycine max
gacccacacgtcaggccacgcgtccgcccaagcgtgggtccggctgtcataggactatacattgggacactaacaaatctcacttttccatttgccatccgttgggttgtgtacagtgtgaatgggttggcttatgatgtgtgttccatagaactccaactagtcacagaatcctgtgtgggacaaattgcactttgacactcctaaagcgtgcgcagcataaaggcatacacaccacatgggatggatacagctctcactaagctcagcagcatgcaggtagcgttgacgaggtcatggatctccagataggcgatcgacgatttcgctaagatct

SEQ ID NO: 60515 - DNA, 283 bp, Glycine max
gatgtcatagtattatcattcattctcatctttctctcttctctctccacccaaaccctaactcccgaccctgttcccctctcgtatccgtcatgaaaggaggaaagtcccagaccgaatctaagagagccgatcccaaacttgctgtgaataagaagggagccgccaccaaggctaggaaacccgccggcaaggggaaggcagcgaaagaccctaacaagccaaagaggcctccaagtgctttcttcgttttcatggaggagttcaggaaggtattcaacaa

SEQ ID NO: 60516 - DNA, 57 bp, Glycine max
ggatgtggtactgttatcattcattctcatctttctctcttctctctctacccattc

SEQ ID NO: 60517 - DNA, 290 bp, Glycine max
cccacgcgtccgcggacgcgtcggcggatgcgtcaatacggcagcaaggggcattgcaagtgggaacataagtctttacacccttcacctcacacacaagatatgtgtcacgctacgccagctcattcattatgttcatgcactgccatcacaatccgaatcattctctctctctctcgcgcttctcgctcgcacattcatttaggcattttctctgtcaaatcgcaatgcctaccatggcgatgcgtcttcctctggatcgcgttacccacatacttatctgggcaaaa

SEQ ID NO: 60518 - DNA, 386 bp, Glycine max
gaagcagaagcaggcgagtgaggaagagcgaagagtgaagagaatggctcccaagggtttaacctttctggctgtgttaatatgcgtttcagcactgtcactgagtccttctgttgcgggggaagggcaaaataatggccttgttatgaacttctacaaggaatcatgccctcaggctgaagacatcatcacagaacaagtcaagcttctctacaagcgccacaagaacactgctttctcctggctcaggaacatcttccatgactgtgctgttcagagttgtgatgcttcactgttgctggactccacaagaaggagcttgtctgagaaggaaacagatagaagctttgggttgagaaatttcaagtacattgagaccatcaaag

SEQ ID NO: 60519 - DNA, 225 bp, Glycine max
ccagccgtcagaacacgagtcagtgggactgcgtaaacgaaatcttgcgatagtgcacagtaactctcgtaacagatctctcgaatccgctctaaatgagaatcccatttgatcaacgtcgaccttggttgatcccccgatatctcatcacacgattcagacatcaccacgactcatatcacgatcgttcagcgcattgtttatctcagagattccgtctatttc

SEQ ID NO: 60520 - DNA, 275 bp, Glycine max
ggcacacaaccactctttcttcttcttctcttaaaagagcctttgctttttctttaggcctttccgaattaagtacttgtttcattttctctcgaagcaagaaaaatgttcatcgagagtttcaaggttgagagtcctaacgtgaagtacacagagactgagagtcagtccgtgtacaactatgaaaccactgaacttgttcacgagaacaagaatggcacttatcagtgggttgtcaagcccaaaactgtcaaatatgaatttaaaaccaacac

SEQ ID NO: 60521 - DNA, 269 bp, Glycine max
tgagtcgtattaactacagaaggggaatagagagatacaccgtgtgtgtgtgtgtgtatgaaagaatgataaccgatgacacggcaattggtggtgaccaccggtggcggattcgctgctgtcgggaacggccccagagccgccgccggcaatgagcaccacatcctgtcgtcacaggtgatacttctgctggcggcgcttacgaagtcaatgctcgtctgcaacatggacattccccacgatgtaatctccaccctccatcatctcat

SEQ ID NO: 60522 - DNA, 391 bp, Glycine max
  unsure (1)..(391): unsure at all n locations
ggttctagtgtgtgattgtttgttgttgtaactcgttcttcttcttttgttgttctgtgtttgtgtttgttttttctctcacctgaaaatgtcttgctgcggtggtaactgtggttgcggaagctcctgcaagtgcggcaacggctgcggaggctgcaagatgtacccagacttgagctacactgagtcaaccaccaccgagaccttggtcatgggagtggcacctgttaaggctcaatttgagggtgctgaaatgggtgtgcccgctgagaacgatggctgcaaatgtggaccaaactgctcctgcaacccctgcacttgcaagtgaggtgttgggagagcaagcttcaagcagagatagcccttaattangaataatgataaactatta

SEQ ID NO: 60523 - DNA, 387 bp, Glycine max
ggttctagtgtatgtgattgttgtgactcgttcttcttcgtcgttatcttcttcttttgttgtttgtgtgtttgttttttctctcacctgaaaatgtcttgctgcggtggtaactgtggttgcggaagcgcctgcaagtgcggcaacggctgcggaggctgcaagatgtacccagacttgagctacaccgagtcaaccaccaccgagaccttggtcatgggagtggcaccagttaaggctcaattcgagagtgctgaaatgggtgttcccgctgagaacgatggctgcaaatgtggagctaactgcacctgcaacccctgcacttgcaagtgaggtgttggagagctaaagcttcaagcagaaatggcccttagaaataatgataaa

SEQ ID NO: 60524 - DNA, 284 bp, Glycine max
ggagcaagagtgaagagcgaagagaatggctcccaagggtttaatctttttggctgtgttatgcttctcagcactgtcactgagtcgttgtcttgcggaggataatggacttgttatgaacttctacaaggaatcatgccctcaggctgaagacatcatcaaagaacaagtcaagcttctctacaagcgccacaagaacactgctttctcctggctcagaaacatcttccatgactgtgctgttcagagttgtgatgcttcactgttgctggactccacaagaa

SEQ ID NO: 60525 - DNA, 209 bp, Glycine max
gagatgaacatttttaaattaatctctcaactcatccgaatatctatgagatagtcctgcttgtgctgtggatagggattggtgtctgctcaagtttatgatagatggcatgaattcccgtatattgctggactctgcattgagttgcgtgttggcttcttctcctgtttgcagaaggcaacaattcttgattgggtgtgtgggaggct

SEQ ID NO: 60526 - DNA, 218 bp, Glycine max
ggtccaatggggtaatggttggtggtggtaatccgtcctcctcctttggtggtccggggttggggttggtttttcccccaaccgaaaaaggtcttgcgccggtggaaatggtggttccggaacccccggaaattgcggaaacggttgcggaggctgcaaaatgtacccaaactggaccaaaacggattcaacaacaacggaaaccttggccatggaat

SEQ ID NO: 60527 - DNA, 278 bp, Glycine max
ggcggagaacattcgtagagtccagcataagcatttcggcgccaatcataaagcctctgtctgagtctgaccattaattttaacatttttcattcgttcttatgataaaattaaaatcgtgcacaccaacaggaaacactatttgagttgaaaccatattggactgagaaacgattaagtgagcaacagaacactaaccagtactcatcattatctccttctccatctccatggcttccttacccagttttgctccttttgtacttctactgcatgta

SEQ ID NO: 60528 - DNA, 111 bp, Glycine max
ggtaatagtggacgcgtgcatgttgtaagtttaattttgtgcatacatacttcatgacaaaggactgcttttggttcacaataagacttgctaatcattacttctcatgta

SEQ ID NO: 60529 - DNA, 356 bp, Glycine max
ggagcaagagtgaagagcgaagagaatggctcccaagggtttaatctttttggctgtgttatgcttctcagcactgtcactgagtcgttgtcttgcggaggataatggacttgttatgaacttctacaaggaatcatgccctcaggctgaagacatcatcaaagaacaagtcaagcttctctacaagcgccacaagaacactgctttctcctggctcagaaacatcttccatgactgtgctgttcagagttgtgatgcttcactgttgctggactccacaagaaggagcttgtctgagaaggaaacagatagaagctttgggttgagaaatttcaggtacattgagaccatcaaag

SEQ ID NO: 60530 - DNA, 274 bp, Glycine max
ggaagcatcgttgtttatccattattaccaatagaattgaaaagaagaatctatatatataatataatataaaagctcgcttcgtgatcaacgattaattctgttgttgcagaatgcatatggctaattcctgagatggtaaacaatttctctctcacatttccgttgtttcctattcgctctttacaggaatacatatacgctttatgcagattctcgattttcttcgtctggtatttttttttcaatttctattattctcgctagattaggc

SEQ ID NO: 60531 - DNA, 121 bp, Glycine max
gattgtgattcatttgcacatttggaaagtgcttgtttttctttttttcatttgcattgcagtgcaaacagcttgcacattgcagtggcttccactacggttatggccagcatcttggttc

SEQ ID NO: 60532 - DNA, 118 bp, Glycine max
agggaatgcaagtatccacacaaccctcccaacgattcaataacttcacacacagacaccgtgtttccaccacaccatagcatatagtactaatagattaaacgcccaagaaattaat

SEQ ID NO: 60533 - DNA, 83 bp, Glycine max
aagaaaaagggacggataggcagaaggagaaatggtgacgcagggccgaaatgcttaacgtggggaaccaggactttgccatt

SEQ ID NO: 60534 - DNA, 321 bp, Glycine max
ggttctagtgtatgtgattgttgtgactcgttcttcttcgtcgttatcttcttcttttgttgtttgtgtgtttgttttttctctcacctgaaaatgtcttgctgcggtggtaactgtggttgcggaagcgcctgcaagtgcggcaacggctgcggaagctgcaagatgtacccagacttgagctacatcgagtcaaccaccaccgagaccttggtcatgggagtggcaccagttaaggctcaattcgagagtgctgaaatgggtgttcccgctgagaacgatggctgcaaatgtggagctaactgcacctgcaacccctgc

SEQ ID NO: 60535 - DNA, 194 bp, Glycine max
gactgataagcaaattgatattagtagttctgattggtgttagaggtgttctttttccccagttaaatgattttacactgttgtctgttgttgtaacacatgttgctttttggattctccgtacaaatagatttggctactgtttacgttttcaatgttgtattatggtccgtctgtttcgataaagtgttccc

SEQ ID NO: 60536 - DNA, 146 bp, Glycine max
tgtgcgagagagcgagcgagcgagcagtttcaaatagaggatttgggattgggaaggccagggactcgccgttttctgatgctcatcttcgttgattcactcactggtcatactatctctctcgaactcgctacttctcataccac

SEQ ID NO: 60537 - DNA, 276 bp, Glycine max
gagtgcagaatcagagacagatggatgaggagaatggctacagtgggagtatcagcattaacgtggagactacgatagcagagagatccgtgtggcacaggaagtgccctttagcggtcgatacgtcatgtgaggaccatccgcattctatcgttatcgcgctggtcgtccccaaccctcacggcatccttggcaaatcctcctctaaccctgctctcatgtccacgcccagagttctcgcgctctccattgttggtgacgacgtggcgtttcctg

SEQ ID NO: 60538 - DNA, 345 bp, Glycine max
  unsure (1)..(345): unsure at all n locations
gaggtgacttgttataaaacacttcatcactttgtgttttggatgtggacgtagaataatagatctgtattctgggtttgagctctagacttcttcatcctcttcttcctcttgaaatgttctcactccatcagaaatccacactttcaagattatgccttctgcttattctggttagcacatgatacataccagtcgcattagctgatgcaccctttctcaatcctctaagctagactgaaaaatctgtgatatcatgaaaccccacagagtctanctcgatatggaatacctcttcagttctcgcatcatggatcgaacccaagtccacaaactgatttgggc

SEQ ID NO: 60539 - DNA, 352 bp, Glycine max
gcagtgtgttgagtacaaagaatgcatgacgaaaggggcatcggagagatagaatgataatagatgagtggtggtcgactttgtccattgcttggagaattatggtactaatgctgggaagcactggatcctgacagcttcgactggtcctttcagtacgaagatactctctctcttctccactggatctgctccaatcttcgctcctccaacgtcctctctctcgtagaactcaactactatgagcacttcaagcatcatcggaagctgttatatggcgacgatttggactttgcttactacatcatctctgcattctctgacactagacacactcatgatgccctttttg

SEQ ID NO: 60540 - DNA, 126 bp, Glycine max
tggggtgcattgttcgtcgttgtcattccttcttctacgtctgttgttctgtgtatgtgcttgtcctctagcacgagctatcagggcttcgaatcgtcgccgtcgtggttgccgaggattacctcc

SEQ ID NO: 60541 - DNA, 339 bp, Glycine max
gaggggaacactgctacaaatcgcgatgtgacaactgacggctgtcaacgatcactttagttccctgcccagaggctttggctgtggcatttccttccacccatttccctcattcgcatcaattccagttcattgacgacttgtagatccacaaagcactatctatttcagctgatgatgacgttcactcagcaccgtcaaatcaatctgcattgaacatgcatcgtgttcatgctcatagctatggaactgtatgtactgcaattgacaccaatgtgtgacacttctgatgcagcttggcattgcctcatccatgctgagggcactgtcatattctga

SEQ ID NO: 60542 - DNA, 398 bp, Glycine max
cgtcggccggtggcggagttggtagggtcgcctccgccgaccccaccaccgaccgcctcttcgccagctcgcccgtgccgccgcatttcctgcagcggccgggctccgaccacttcttgccacttgtgtcagtgccggcgttgcagcagcagcagcagcgccaccaccaccagcacttggcagtggcagcttccgcggcagctggccaccgccaatttggcttgccgccgaatgggcactttgagcttcccattttatcgaggatgggggctccggtgccgggttatgcggccgaggatgtggaatccggaaggaggaatgttcttactttgtttcctgctggatattaatgaatatgtttaatggttatattcaaagttttaaaaatttctgttgtg

SEQ ID NO: 60543 - DNA, 340 bp, Glycine max
ggagcgaagaagatattagggtttttgagtgcggtgcggcgatcctagcactctcttctgcagctttcgccgacagcttcattcaccatggctgagcaaaccgagaaggcttttttgaaacaaccaaaagtgtttctcagctcgaagaaaactgggaagggaaagagacccggaaagggtgggaaccgcttttggaaatccattgggcttggatttaagactcccagggaagccatcgaaggaacctacattgacaagaagtgccccttcactggcaatgtttccatccgtggccgtatcttggctggaacatgtcacagtgctaagatgaacaggacta

SEQ ID NO: 60544 - DNA, 142 bp, Glycine max
gacttcgaatctcgtgcatgtgccgttgccgtacttcatctgccataaacttagtcgggtgtggttagtgtgagatcacattgaactcatagtggcaaggtcttgctgccgtgagtggtgtagttgctggaatccctgcata

SEQ ID NO: 60545 - DNA, 303 bp, Glycine max
gaagagagaatgatgatgaagtctgctatgtgtgcattggtgcttgtggcactggttgtggttgaagtggggcccatggctgacgctgcggtgacttgcaacccaccacagttgactccctgtcatccggcacttcactcacgtcctgcaccttcgagtgcttgttgccaaaacctcaacgagtcaccccacgcctctgtcgctacctcacattaccaagtatcgaacaatcacttaactccccgaccggaagcctcctttccagaccttgcttcatcaacattgcccaccatttcaagcacc

SEQ ID NO: 60546 - DNA, 92 bp, Glycine max
gagtcaaaattgtatatgcttcttcaaaggagaacggggaatccccaacccaagtggtttggagtaaaaggaagacacaatgtcatggcaat

SEQ ID NO: 60547 - DNA, 391 bp, Glycine max
ggagttacaaaatgaagagtgacgaagccattttcgccattatcactcctctcgcaccaaaagcgatgaagctctagttgctgcttttctcgttttgatccgtacattttccctctgccgttgcggtccccgaagccgcgagattcttctgcctcgattgcgttcttcatgtgattctgcttctctctctaaccaagtattctactcattcggtttacattttaggagtagctgaatcatatgaggcagatggtcttttgttaattacctcaacttaggtagacgaatctgccttggtgaatctgtcaagattgaagaatagatttgtatatattaattaataattaatactgcagattacttgtctaccagaaaggattcaaaatgagtt

SEQ ID NO: 60548 - DNA, 251 bp, Glycine max
ggtgaagtgtagtggtcactgacctatcgtggaagagttatgaagtataaaacttcaaatccttttgccgttagattctgagtctgagtctctgctgctatatatggcgctcacgcgtaattcttgtgttggggatgttgctgatggtgtgtcatgtcaatgtttcgtctgattgatcgattgaataagaaattctggaatatgcactccagatgcttgattcagagtcacatattgtcagagactggttt

SEQ ID NO: 60549 - DNA, 110 bp, Glycine max
gggccaagtctgaagacactcgcatcattagcagctgaagcataagctcaatcccttgcgtggatggttgattgtcagtactaattcgagtttggaagtcacttggcgat

SEQ ID NO: 60550 - DNA, 145 bp, Glycine max
gaatctcctaggctatcattaagtactctctcacttccgctcgttagctctctctctcatggcaattcgtttcgctcctttctgcgtttaaggttgatatcaggagttttggttggtactgcgagttggaccactgcctattgtg

SEQ ID NO: 60551 - DNA, 58 bp, Glycine max
gatcggttgaacataactgctccgtatcctgttaggtctcattcgttttcttattttc

SEQ ID NO: 60552 - DNA, 343 bp, Glycine max
tgctgagtcatgacagaaggggaaagctgaactcctttcagactcgattacaatgctattagctagatcgccgcgttgtctctcacacatatgtcactgggtcgttgttttcgctgctgtcgctggtcctgtggtgggcttgtaccagggatcatggtcgcaagttgaactgctcgcaggtgagcacctgacacttctctactggcgctaccacaacgcttcatgcccctgactgtggctcttctgcagatcatattgtgctacaagatcactgaccttctgatccgcttgactcccaatcgagaggctcttcctacgaatgactcaggttttcactttaggt

SEQ ID NO: 60553 - DNA, 390 bp, Glycine max
ggacttaagagagagttttacttttgcaaatcaaatctctcaatctctccctattttcgatctctctctcttttcaatctctctcttccatggctgtcaaatcacaatccccaccattgcatcaccagtttctcagcacaaccccaaacgactacaccagcgatattgaatcaattgatcaagaaggtccagaatcactttcaaaccctactccattcatggaaaatgcagaacaacatcaccatgaagatcaaaaatcaatgaagaacaagaggtacaagtttctcttgtttagaaattatgttttgctctttgtgggatcagtctcctctagtttgctcacaaaatattactttaaccacaaagggtcaaacaaatgggtctctacat

SEQ ID NO: 60554 - DNA, 325 bp, Glycine max
ggagtgtgtgagagagcgagcgagcgagcagtttcaaagagaggatttgggattgggaaggcgagggattgcgctgcgtctcttcctcttctctttcgattcatccctcattcataatcttccaatccaacaacctcagcctcacactcacacatacacacatctgaacgcgtatcgtccctcccatggcttcaaagcgcatcctcaaggagctcaacgacttgcagaaagacccaccaacttcttgcagcgctggtccagtagctgaggacatgttccattggcaagcaacgattatgggtcctgctgatagtccttatgctgg

SEQ ID NO: 60555 - DNA, 230 bp, Glycine max
gaagggagaatagacagatcgaaggagacatttacaaaatgcgctttccctgtctcaaaatctcgcacactcactccatttttacctttctctctcgctcgcaaacacagattctacacaacaacgttttacccatggcatccagtgtgatcttgaacgaactcatagatctcgacaaggatcctcctacctcaagcagtcgccagtcatgttgcggaggagatgtgtca

SEQ ID NO: 60556 - DNA, 348 bp, Glycine max
ggcctaggaatgttttagaggatcgatttgggattctgacacctttgaatcagaaccgaaccctaatttcccattcactcatccttccctgcaaaattttcttgccagctgtgacagtcagtgacccccaacctttgcacctcggctctccatagtttatgatcattcgtgagatcttcggaggcatttcctggccaaccgtgacacgaatgctgctttgccttgttccgtccctgcgttgttctgttttgtgatctcctcaacacagcaaccatcctccaaccttcgataacattttcaaggttggtcgctccatgccactgtttgggattgacaactatgacacag

SEQ ID NO: 60557 - DNA, 311 bp, Glycine max
ggagcaagagtgaagagcgaagagaatggctcccaagggtttaatctttttggctgtgttatgcttctcagcactgtcactgagtcgttgtcttgcggaggataatggacttgttatgaacttctacaaggaatcatgccctcaggctgaagacatcatcaaagaacaagtcaagcttctctacaagcgccacaagaacactgctttctcctggctcagaagaatcttccatgactgtgctgttcagagttgtgatgcttcactgttgctggactccacaagaaggagcctgtctgagaaggaaacagata

SEQ ID NO: 60558 - DNA, 373 bp, Glycine max
gattgtagaactgaacaagggtttctctttctctttctctgtctgcttcttcactttctctcgtttcaatcgaaaaaaatcatgggcagaaaattcttcgtcggtggcaactggaaatgcaatgggaccactgaggaggtgaagaagattgttactactttaaatgaagctaaagtccctggagaagatgttgtagaagttgttgtgagccctccttttgtgttccttccttttgtaaaaagtttgctgcgccctgatttccatgcctcggcccaaaattgttgggttcgcaaaggtggtgcttatactggagaggttagtgctgaaatgcttgttaatttgggaattccttgggttattattggtcactctg

SEQ ID NO: 60559 - DNA, 342 bp, Glycine max
ggcacaagtttgttgagatagctagaagcaataagatgaaaatgaaagtgcttgttttgtttgttgctacagttttggtagcatatgaatgccatggctcagactaccagaagttccctctccaaatgaaaactgggtttggtgggcaatacagcaatgaggtggcatgtgccagttggaggcttggcgtggaagcaaacaacgtagtcaagcggcagagtgttcctgcagcttgcggggagtacatagctgactacgttctaggagaccaatatagatcagattccaaaacagctatacaacaagcttatttctatgcgaaatccctcaaactcaccaaca

SEQ ID NO: 60560 - DNA, 427 bp, Glycine max
  unsure (1)..(427): unsure at all n locations
cgcgtccagggaaagaaaananaaaaaatcaaaagtggataatggcttcgttatcgctttgcatagccatgacagcacccactccctcagcttctctcattctcactgccccaaaaccatcttcgctctctttgaaccttacccgcacttgctccaacgctcgctctccgcttctccattgctccttcctctcttctccttcccttctctctcccccttcctccatttcagaagaggaaaaggttctggccttgttgtgagggcaggcaaggctgctctttgcctgactaagagaagcagatcaagaaaatcattggcacgcactcatggtttccgcaaaagaatgagcacaccaggtggaagagctgttttaaggcgacgacgcgccaagggacggagagtcctnatgcacaagacgcatccaaat

SEQ ID NO: 60561 - DNA, 308 bp, Glycine max
ggttctagtgtgtgagtgtatgttgtggtaacccgtccatcttctcttgtggttctgtgtttgtgtgtgtattttctctcatctgacaatgtcttgcggcggtggaaactgtggttgctgaagctcctgcaagtactgcgactgcatcggaggctgcaagatgtaggcagagttgagctacattgagtctaccatcacgagaccgtggtcatgggagtggacactgataaagctcaaattgatggtgctgatatgggtgtgtccgcgtagtaccatagctgcacatgtggagctcaatgctccatcaa

SEQ ID NO: 60562 - DNA, 369 bp, Glycine max
agggaataagaattttaataataatggaatggaataataaccaaggggaacttccatccacaagttaatggtaaattccaaaaaggggttgcaatttaatattccaatcaaagggttggaaaaaattggcctttgggattaacaagtcaagtcccttgaaaggggaaaagacattgaaagtcatgatatgctaagacaaggtttcactcatgctttcttgatgacattcaatgggaaagaggagttcaacgcatttcagactcacccaaatcatcttgagttctcgggagtgttttcacctgctattgagaagattgtggtgctggatttcccatctaacctcgtcaaagcaccagcatgaatctcaac

SEQ ID NO: 60563 - DNA, 382 bp, Glycine max
acccaagcgtccatacaggcgtcagtaggctacaaaaagagaatagaaggtgagagattaatgtattgtcatattagccatggggactttcaatcactatgtgattgtaaagtgcaaagatggtgtggcagttgatgatctcattcactggttggagatcatagtcattgggattgaccaagtcaagtcctttgaatggggaaaggacattgaaagtcatgatatgctaagacaacgtttcactcatgctttcttgaggacattcaatgggaaagaggagttcaacgcatttcagactcactcaaatcatcttgagttctcgggagtgttttcacctgctattgagaacaatttggtgctggatttcgcatctatcctcgtc

SEQ ID NO: 60564 - DNA, 386 bp, Glycine max
  unsure (1)..(386): unsure at all n locations
agggacagcganacagagagtgattcagtgagtgatcggtgttcacttgatctcatcataatcgtcagcgtcaattgaagaagatgccgatcagaaacatcgccgtcggaaggcctgaagaggcgactcaccccgacacgttgaaggcggctttggctgagttcatctcaaccttcatcttcgtgttcgccggctcaggctccggcatcgcctacaacaagctcaccgacaacggcgctgccacccctgccggcctcatctccgcctccatcgcccatgcattcgccctcttcgtcgccgtctccgtcggcgccaacatctccggcggccacgtcaaccccgccgtcaccttcggcgccttcgtcggcggcaacatcaccttcctc

SEQ ID NO: 60565 - DNA, 289 bp, Glycine max
  unsure (1)..(289): unsure at all n locations
aaaagaccaccgaaggggaataaaaattccaacaatccttaccttgcctccccataaaaaagggaaaaatttaaaccaaaaatcccctaataaaaactttacatcaacaacccccaataattgcaataaacaaataaattccacaatttacagcatcccaaaaaggattttcagacggtagaaaaccctcaaaaaataccttcagcanaattactgttacaacaaaagacaagacatctagcctaataccctacacngtgaggaaaaaattaacaaaaaaaccctagta

SEQ ID NO: 60566 - DNA, 155 bp, Glycine max
gaatcagacttgcattgcatggccaagcattgcaagcacttcactatctcttagggagtgcttggtatgatgggtgaaaaattaaaagataggaaacgtagaagagaggagtagatgggagtgtttgttattgcatttttactttcatctctata

SEQ ID NO: 60567 - DNA, 73 bp, Glycine max
cggctgcgagcggacgacggacggggatgcggcgtctgtccgctcttttctttgcgtctgcttcttgtctgtt

SEQ ID NO: 60568 - DNA, 337 bp, Glycine max
aatggcatggttgcagttgcagagaatcgtgaccaaaggaggtgctaatttgatctcaccactcccactttcacgattcttctcgaaatcttcttccccctatgttgtaacagttggcattccagactttccaaacggcatagggaatgcggttgcatcccactctcgcaattgattcctccggtgtcagtctagtcctccttctctcccgtgtctcctacctccgctgtgttccaccgtatagtggttggtgctgtattcattcgaagtggaggtggtgctgttgcagctgcacctgcaggtggtgctgctgcaactgatgctgccccggctgctg

SEQ ID NO: 60569 - DNA, 311 bp, Glycine max
aggggtgtgttgtgtgtgagaaagaaactctctctctcaattgtttccgtttggtcctgcccactgtcctgtttgtttccgtttctgttttcctttgaaaacagaagaatcaaatcaaatcaatccttcaacgttcgttcaatccttcaaatcaaatgaaatcccttccttccggttttcctttttttttccccccaaaaattaaaaatccgaaatttgccttaaaccttgaaacccaacctgaaaatttgcccccaaaaaccttaatccctttatcaaaaagggtccttgttggtttttttccaattggg

SEQ ID NO: 60570 - DNA, 372 bp, Glycine max
ggaggcgagagtccagagcatagtggagaaaagaagagtgtgtgtgtgggagagtgagagcaggacagcctcccactttgtttcgtaaatgctcaattttatctccgttacccaatttaagctgtttcaattcacaaacacaacacgcactaagcaatagcaaactagtactattctcttctggttacttccaacttgttgctttgcttcgtcaccagaaaatgagtgctcatcaaaaagaaaaacacaacgcaccttcgtccaaaccaacggtttctcattcacttcacaaggttgatgatccaatgaaggtaaccgatgaaaatgaaaccttgcgtgcttctaataatcaatggaagcgaacgaatctgc

SEQ ID NO: 60571 - DNA, 340 bp, Glycine max
ggcgaaacagagagtgatttcagtgagtgatcggtgttcacttgatctcatcataatcgtcagcgtcaattgaagaagatgccgatcagaaacatcgccgtcggaaggcctgaagaggcgactcaccccgacacgttgaaggcggctttggctgagttcatctcaaccttcatcttcgtgttcgccggctcaggctccggcatcgcctacaacaagctcaccgacaacggcgctgccacccctgccggcctcatctccgcctccatcgcccatgcattcgccctcttcgtcgccgtctccgtcggcgccaacatctccggcggccacgtcaaccccgccg

SEQ ID NO: 60572 - DNA, 213 bp, Glycine max
  unsure (1)..(213): unsure at all n locations
gatattgaagcaagctcagcactgtgattcgtcgctgtggatggtgaagatgaaggggaaaagccaaagccaaaggattggaaaaaagagtagaaaaatgaagggcgcgttgagtaccactaacaacaacactagacaanttcagcttcaccaaggtcaagtgtccctcattccactccaacaaccgtcttctactactgctactacctcttc

SEQ ID NO: 60573 - DNA, 55 bp, Glycine max
aggggaaaccgttttgtcctgttgggtaaaaaagaaagaaaagaaaagaatccaa

SEQ ID NO: 60574 - DNA, 96 bp, Glycine max
taccggtctagaattccagggccgacccacgcgtccacccacgcatccgcccacgcgtccgcccacgcgtccgcccacgcgtccgcccacgcgtcc

SEQ ID NO: 60575 - DNA, 336 bp, Glycine max
  unsure (1)..(336): unsure at all n locations
gacccacgacntcaatccgctcgntacgatgacgacgtgaaggggagacaggaatcggattgacagaaaagtgacgcctgtggtagtgttcttcttctagatttcatgctggatctgtcgaaagatgacggtcgttcatttcttcagttgcgcgattctcatattcggaccacactccgtctagtagattgtcacgcccttatctgagtacgatatattcggcatctctatcatagctgctgttgtatatcttgtaacggcattaattatgcttatttgtctagctacttttctcaaggtttcagagagcgatagctttgatccgtatcatgagtt

SEQ ID NO: 60576 - DNA, 159 bp, Glycine max
gatccaaaggggcacctttgggggccagccaatcaagatttaacttgtgcatggatggttgccctgatggaactacttcgacatcgtttgtgtttcccacagtgctcgttggtcttctgcaagagggtctctggatatcctgcgttcggcaacgctgca

SEQ ID NO: 60577 - DNA, 192 bp, Glycine max
agggggaccagttcaacccttgaatacctcacccaattaccaaggaagccaaatttggcaacaacccaattcctaatttcccccctaatttggctaataaggttaattgcaaaaaaccctgtgcccccccaaccgaaaaatcccaacccgaccttaattccaacttttggcaattcccaacctttaaacccc

SEQ ID NO: 60578 - DNA, 173 bp, Glycine max
gggggacaagacgagcaattgccgtatttggtcagctgtgcacgttggcatcatgagagcaatcttcgaatatccattgtcatggatagatggactgcttagtatctcccatcacctttacagtcgaccgagttcccgctaaacgcagcagtttcaatagtggcatttccgag

SEQ ID NO: 60579 - DNA, 149 bp, Glycine max
taccggtcgagaattcacgggtcaaccaagccttcgaacaggcgtcaatacggcaacgaaagggggaacttaaggggaagcttagagaaataacgtgcacttcttcaaaaggtgtgtaaattggtgttcctcagcatcggcattacagg

SEQ ID NO: 60580 - DNA, 105 bp, Glycine max
tggggggtccatcgggcatcgtcccgcttgctcgatgacgttatgacggtttgcgtcaagctgcactgtgtcgtcgcctggcactcttgtcatgggcatgactgg

SEQ ID NO: 60581 - DNA, 290 bp, Glycine max
aggggaaacaatcaaaatgacatttaaagagaatgccgataggaactaaggaataatatttctatctaaatggtgaaccgcatctcatactaggttcatctcatcatcaatttgattgttttggtaacatggcaaaggcaaatggaaggatataaatgtttgagcagatatcggtttatgtgatgaacatgtcacctcgaatgactgtgattttagatctcaatcccattatcatgatggaaacgggcactgtgataacatgatgatctgtaactgtattcagcactgtg

SEQ ID NO: 60582 - DNA, 276 bp, Glycine max
cgggactggaacattgtctcagagataccactttaccatgatattggaaggactcaataagatcgtcacgaccgtcgggatagtattaggcactgactgaaatcggatggcacatggccaataatcgtcttgtcgcatgcccatagatcggttggcggcatacagccgtgtgtgactgaggactaacctgctgatatatccactgcctttagcgcatccattgacactgcatatcctatatgcatctgccgcttcatcgattcgagcctactcacg

SEQ ID NO: 60583 - DNA, 167 bp, Glycine max
ctcggcactttctttcaatctatcgatcacgccgctcagtgcaaatttttccgtcttcatctactgggttcttcccctatcccccatcgtctcagatggatccacttatcgtccgatcgcgacgatcggttgcttcaatctcaatgtgtaaatggtacggctcgagg

SEQ ID NO: 60584 - DNA, 317 bp, Glycine max
ggaaacagagagtgatttcagtgagtgatcggtgttcacttgatctcatcataatcgtcagcgtcaattgaagaagatgccgatcagaaacatcgccgtcggaaggcctgaagaggcgactcaccccgacacgttgaaggcggctttggctgagttcatctcaaccttcatcttcgtgttcgccggctcaggctccggcatcgcctacaacaagctcaccgacaacggcgctgccacccctgccggcctcatctccgcctccatcgcccatgcattcgccctcttcgtcgccgtctccgtcggcgccaacatctccg

SEQ ID NO: 60585 - DNA, 314 bp, Glycine max
agggggcgtccatccaacatcatcacgttcgcatgatgacgttattacggttttacacatgatgacctgcgacatcgactggccttcttcttatgcgcatttctgcgtcatctccatcctgcactccttcatatcagtcacatgtagtgggctgattatgtcccacatcaacgatgtccacatcttcggccacggactccagggcgccagcaagctctagggatgcatgcctcactaccagcttctcagctcgacctccgcttccatctccggcttgctccttgtcgcaatttcgtgcctcctcttcatggtca

SEQ ID NO: 60586 - DNA, 231 bp, Glycine max
agaaggaacaggaggattcaatggatgacccagttgcctctgatgccgacgaggacgacgacgatgctgattcagctggccattacaccgatgctgagtcaaagagcgaagctggaggacacaccacggcacatggtgtgcatgattggctcgatgaagtttgcactgcagctacctagtcagcggatcttatatcccggaaagttatatcattctcagttgtagtgtttc

SEQ ID NO: 60587 - DNA, 58 bp, Glycine max
accaaagggacaccaaacgggggaatttccaaatttcccgttcgtcaactttcccgga

SEQ ID NO: 60588 - DNA, 368 bp, Glycine max
agggagataggtggaggagtatatcaaggctcgataccatgcatatctacatgacgattaataacgtctgtgggtctgcactagtgatggtggcagtgcagcctctggtgaaggtcactcgcacggcataggctgtcacttgtaccccagtgtagctgacatccttgtatgggggcagatacttcctctcatccaccagtcaggattttgttaccacaacgtcacggaacctcagcgttgcctctgtagtcacttcatacagtccaagtctaacgccatacgccatttcacctggctccagaagggttgctaactcatgtcaggtactcttgccaccttgttatttaccgatatctcatctcagacat

SEQ ID NO: 60589 - DNA, 168 bp, Glycine max
agccgtcagtagagcagcgaaagggaaagcaaccggggcaattaaacgctcacgcatttgccacttagcctgaaactcaagaagactcacttgattcgtcacagacattatgtcgatgatcagtcacatgtctgaagtcggaggtcacgactccgctcatggcgcagc

SEQ ID NO: 60590 - DNA, 414 bp, Glycine max
ggccttacaactttcgatatgaactttcaactatgaactttcaactcactcgaacaaaacaacaaaaagcttaaaaccagcaaattgaatcgctgcatctcattcacatcactgtcaccatcatcaaccacaacaccaacaccaacaacgctaactgcttctctacgctctctctctctccctctctctcaacttccagattcaagaagtagcagttactgtgcccttggttcctctggtaaacagtagtaccttgattttcatgactggtaaaacgagatccctgtttggcaaaacttttgatccttagtgtttggtgaagtagaaatattaaaaccgcagcttgagatgtgaagacatacaatggaaactacaagacggtggtttagtaagttcaggtcaaatgaataaatg

SEQ ID NO: 60591 - DNA, 134 bp, Glycine max
aacaggtgtcagtagagcagcgaaaggggcacagaaggggtagtatctcttggtgctgtaccttaaatgaatatgaatcaatttatcgtctctggcgtcactgtttctggatatctgtcatgtgctactcagtc

SEQ ID NO: 60592 - DNA, 217 bp, Glycine max
tgggaccacaaaggttgcaaatgaccaggtcaagccacaggtacctatctcagcgttaccaacacatgcatctgtctgtcgtcacacgagcgctaagttctcatcaattccaaggtcaggaacgaacccactgtctcggtggtacgagatactgaatctgaatgagtcaatagtcacgcggacgagaatgatgtgaccatgtatgacatcaacgcta

SEQ ID NO: 60593 - DNA, 383 bp, Glycine max
cgtccgaacagaagtgagaagacgagtgaacgggggtctctgtgtagatgctgcatcctttcacagagctgtctcacgcccccagcgttcatgcattgtttcaccccttttcttctcctcacattctcctgaacttccttcttcatttcatcttcgtttatgtctatgccacacgatgacctctcaaacttcttccttctcatctcatccgccttgactctgcgacaactctctacagcgaccgtcagcgtcactgatccgcgattagtcgtagtctcatctgaacatgttagagatcttcaaggttttgtatcctagagatggctgaatctcacttattgattgatctacaccaggcctgctcttgagcttaagatctatgc

SEQ ID NO: 60594 - DNA, 376 bp, Glycine max
gattctttgtcttttcttccccctttcctttccaccaccccactcctacactgcctgcattcctctgtcaaaaccctagattttcaaatctatggttttgttttcttaacctgttaccgacatgattcagaaactcaactcccacccttgctagtttcagttttctcttctcaatctaagcccctgcgtttttttttttttttttacattttccctcgctaacctctgccatggggttttcaatgctgattcattttcacctctaaaaccacttcctctcttaatttcttcaacttttgggcattcaaaactcatcttccttgtggtgtttctaggttaaacgagaccttgttcctcttgcaatcacttgacatga

SEQ ID NO: 60595 - DNA, 315 bp, Glycine max
aaacaggcgtcagtacaggagtgagtggggctccgacgggaccacagaaggggttgcaggtctatatatcgacatcaacggttttacgttctaccaacaacaccaccagctccatcatcttcgatgacaacatgtcaaatttgacctctgcatcatgtcacgctagtgcttcctcacgttacctatctcaattttgcatctgctacatggctccaccaccaattcatgttcaaccaccgcatgaactcaagagacctccttggcgatccatacaatgattctgaagttacagcctagtctcccaagagtcttcct

SEQ ID NO: 60596 - DNA, 84 bp, Glycine max
aacaggcgtcagtagagcagcgaaaggggaacaaacggggttgcagcttcggttcatgttcactaagtcgacatccagtgtttg

SEQ ID NO: 60597 - DNA, 318 bp, Glycine max
gaagctgaaggggtttcttttttaggggtagtacattgattgtacttccagttattttatcttctgagattatatttccaattttgctgtgaaaacagtaatagcgattgatttgaaactgatacatacctgagagcatcaaggaatcgacgaatagaagattcatttgtatttcttgttgatatggaaactgatgtttctatcatgtgtgttgcgttttcacaatccttagttggacaaaacccaagttctccatctgtctctctgctatggaggtgttacacccatcacattgtgcattacaagtctattgcgctg

SEQ ID NO: 60598 - DNA, 249 bp, Glycine max
gatacgcaagaggtttatccaagagcgatgcctcagtcattgggagaaatgctgcagcagcattcatcgtcatgacgacgtgaaaattgcgctaacgtccgaatacctaattctctgccagcttcatcttactcttcagtttcaaggagtctactaccgctatatacatcaacttttgatgactacttcttaactgcttctaaaacctcacctacttcacatcattgtcctcctgtgtaatccaagtcc

SEQ ID NO: 60599 - DNA, 116 bp, Glycine max
  unsure (1)..(116): unsure at all n locations
gcacgcgtccgaacaggagtccgtacagntgtcaagggactaccaaagggggcttccgggtttaagtttcccaaactcgttatgcacctcccttaggaatccacaattcatcttcc

SEQ ID NO: 60600 - DNA, 286 bp, Glycine max
  unsure (1)..(286): unsure at all n locations
ggaaaaaggaaaaaaacaaaaactggaagagagaaccatanaaaaatccaatcaaccaactcaattcatcccatccggtttatgtntatcttcagcgatgacctctactatttattaactgtcatatcaaangaaagattctgggagcaatggttatangcaaacttactggacctgtacaaggttcagtcctccagtcatttagcatatctacaatttcagagcttttgagtaaccaacactggtcagagctcaaaccccattttagaacaaccaaacctgcaat

SEQ ID NO: 60601 - DNA, 300 bp, Glycine max
aggggagggagacggtagcacatgagcttatacactaaactcgtagacaccttcactactggagtcgatggacaattcattgtgggaatcagctgagctgagtaagcatgattcaaaatggttgcattgtatcacacgggtgtgcccctctgaattctatgtcacacatgcatggcatacgtagtacctctgcttttcgttgcgcttctcgaaggcatctcaatgttgccgtctctgatatctggaactattggggagatactcgggaatgtcaaaacttgttgccatgacgaatgacat

SEQ ID NO: 60602 - DNA, 244 bp, Glycine max
aacaggcgtcagtacagcagcgaaagggcaacaaaaggggactaagaaaaacaataagatcaatggttggtcagcctcactccatctgaatacatccaacaaaatagaatatatcttataccctcatcaactatcaacgatagcgaatactgatgatctcgaccttgattcatgggaaaccctctatcaaaggctgagcgtcggcgataatcatctccgatcggtcttcatccgcaaggtctac

SEQ ID NO: 60603 - DNA, 90 bp, Glycine max
aggggaacaaacggggtcgatgatatggtacatggtcattgaattttcatccatcgttggcagctgtcatgcaatctcctcggactgatc

SEQ ID NO: 60604 - DNA, 231 bp, Glycine max
aggggtgcccacagtgcaacgtgacggggcctgacataatatcgatgcatatccaccaagacgctcgtcatcccaagatccccatccatgacgagaaagttgtcaatcgtcattcaatcagcatcgttccctagtcctccatacctcgcatcggtgttcgcggaaacccctcgaagtgatcacaatcgatcgtcggaatctttatgaccccaccttcattcgtagatcgca

SEQ ID NO: 60605 - DNA, 405 bp, Glycine max
  unsure (1)..(405): unsure at all n locations
ggaacaaaacaagtgtttcgaatagattatcctaagtctttgggaatagtgctgcaatggcttcaagtcaggangaggtgacccttttgggagctactggaagcccatttgtgtgcanggttcatattgccctcaagttgaagggagttcaatacaaatatgtcgaagaaaatttgaggaacaagagtgaactgcttctcaaatccgacccagttcacaagaaggttccagtgtttattcacaatgagaagcccatagcagagtctcttgtgattgttgaatacattgatgagacatggaagaacaaccccatcttgccttctgatccttaccaaagagccttggctcgtttctggtccaaattcattgatgataaggtttttggtgctgcatggaaatccgttt

SEQ ID NO: 60606 - DNA, 61 bp, Glycine max
gatttgtttttgtatttattttcaatggtcgttaatacaaacagggattcctttagatttc

SEQ ID NO: 60607 - DNA, 128 bp, Glycine max
ggggaccaggagaaaagttaataatgttgaatggataattaagtgtaagttctgatgggacaggaagaaccatgtaacggaggtcaactcgctctaaacttttccttccgtccacgcgcctcgctcat

SEQ ID NO: 60608 - DNA, 306 bp, Glycine max
tggcgcgcctaaattggtatgcttagaggagattcaggtttatatttattgagtaacaaggagatattgatctacgttaagaaggcaatgcaatatcattctcagctgttggacacttcaactattatcattgtgtagattttactgggatattgacattttggttgtcacgactttggatgcagttcttagactttgatccactagatgggcctcatcacccaatgaaattcttcaatcattcgacgtagctgcaagcctcaacttcaccactggtgacggtgaagccgtgggatatatttagtt

SEQ ID NO: 60609 - DNA, 387 bp, Glycine max
ggtgattgtttgttgttgtaactcgtccttcttctttggtgttccgtgtttgtgtttggtttttctctcaactgaaaatgtcttgctgcagtggtaactgtggtcgcggaagctcctgcaagtgcggcaactgctgcggaggctgcaagatgtacccagacttgagctacactgagtcaaccaccaccgagaccttggtcatgggagtggcacctgttaaggctcaatttgagggtgctgaaatgggtgtgcccgctgagaacgatggctgcaaatgtggaccagactgctcctgcaacccctgcacttgcaagtgaggtgttgggagagcaagcttcaagcagagatagcccttaattacgaataatgataaactaataatgtgta

SEQ ID NO: 60610 - DNA, 350 bp, Glycine max
aaaagggggccaataaaccggcaaccgatttccggcaaccctttttgcattttgcaatgccctttctcccaatttcggattttttttccttaaaaaattcaaggaaacggggttgtttgaagatttggatttgttgttgaaaagttgagcacttttttgtgtcacaagtttgattttttgggtattgagaaggttgtgaattattttttataattcttctttttttgcggtgtttcaatggggtgtgtgattgatgggcgtttcactgttgagattcaaaatggagtgagcaatggttgtggtgaagtgggtttgtggaatgatggtggtggtgccattgaggatgctgt

SEQ ID NO: 60611 - DNA, 388 bp, Glycine max
gaaaaacccacttgttaaattgcaatcccctttcaaaatggtgttccaatttggtttcaagtttctatctttaaacatgtctcaccttccatctgctgctactactttttctcgtttccaactcttgaccctcaacaacacattcataatccaacctccctttctcggattcaagggtacatcatgtttttttgagaagcacagttgctgcttgagtgttaaaccattttgtgcatcccagaagaaaagggccaatatcctctgttctatgaatatgtcagcacaacaatcagatgattatgggaaaatgaagcttgaacaattaatagaccaagttcaaaagctttgggacagttctcctgaacccgtgaagaaattcccgcataac

SEQ ID NO: 60612 - DNA, 442 bp, Glycine max
  unsure (1)..(442): unsure at all n locations
aagcgtcaattcgagtggcagtagaccaccgaaagggacgccaaggtggaacccattagtaataactgggtaaacaatttggggggtcccccaataattcctcaaaacttaacctaatcgcataataatttccccaaaagggtgaacggacaagtacaacaaggatccccccaattaaaaatgcccccttttctcagatttccgactccgaactccagaatcccaactacctactcctgactaactcctaggacgatggcagagggacgaaggcctttcgccgacgacctttgggccaaacgcctaagaattggtgaagaactccgtcatcgcccggacgaacccgaagcggcgaagactcggacggcgaactttcgcgccttctcggaggcgctggagagtcncgcgatgaaggagctgcacgaggagctcgaccctttga

SEQ ID NO: 60613 - DNA, 281 bp, Glycine max
ggaagagtgaagagaatggctcccaagggtttaacctttctggctgtgttaatatgcgtttcagcactgtcactgagtccttctgttgccggggaaaggcaaaataatggccttgttatgaacttctacaaggaatcatgccctcaggctgaagacatcatcacagaacaagtcaagcttctctacaagcgccacaagaacactgctttctcctggctcaggaacatcttccatgactgtgctgttcagagttgtgatgcttcactgttgctggactccac

SEQ ID NO: 60614 - DNA, 209 bp, Glycine max
caagcgaagaaggtcaaggtggcgacaggtcgtcatattcaagtctcgtcactcgctctctccgcaaatgcttacaccagagcaaaggcaacaccattggattctacatcaactatctgcccaattaccttgagatccacagcattactagcactgagtgctactaaatgcatattgccatcaagtcaagtgtccgcgataactgctca

SEQ ID NO: 60615 - DNA, 226 bp, Glycine max
tgccaaaagaccacagaaagggacaacaaccattacaatgggaacctcaataaaagctggaactaacttcaagcaacccaacaaagggggcaagggcaatcccaaactcaaatccacacaatgcaattccaaaggctttggctttggaaccgctgcaactaaactcaattgcccccctaaacccgatttcaaaaaatttgccccaaaatgtttccaagccaacaaa

SEQ ID NO: 60616 - DNA, 406 bp, Glycine max
  unsure (1)..(406): unsure at all n locations
gggaggttaacaacaaggaaagttgaaattggtgccgccaatttttttgccgcaaaacgcaaccgcgaaaacaaaaccggaatggaacaataaatccccgtcgaactggaacctggcaataatggctaatccattacccctggcggcaaaaaaggatggaaaacttaacccaaaaaggacttcccttggatggtccccgaccaatggagatgcgacaaattcgtgcagagattggtgctgtatccaaagcagatggttctgccattttcgagatgggtaattacaaagtcattgctgctgtttatggccctagagaggtgcanaatangaatcaacanataagtanccatgctctggtagcttttttccttttaagttataatacattgagtgtatttttagtgta

SEQ ID NO: 60617 - DNA, 86 bp, Glycine max
ccaagcgtccactagagggttcaagcctaagttcgcctgcatgccaactcaaaactcctccaaagtggcaactaaattcaattcaa

SEQ ID NO: 60618 - DNA, 113 bp, Glycine max
agggaacgagagaaagaacatgggttcaagttcaacaaccgaaagtgtttgccttacaagaacctccgggttcaaccggtcaagggctgtcaagaaactcaaccaaccttggt

SEQ ID NO: 60619 - DNA, 278 bp, Glycine max
ggtggtgtagactgtcgaccagtgaattacaattgcacctagaaccagcgcatatctgcatggcgggaatggcattcacgacccgttgcagatcattcatttgcatgaagcttctctccatatcgcaattcaactttgatatccatcatccactgagggcttatgtcaccattggtgacctgaaagttagattgagctgaatatatttcgtgcaagtttctctgactgtatatgtcttcatgctcctaactcatgttgttagcgtatcttccaccttg

SEQ ID NO: 60620 - DNA, 389 bp, Glycine max
caaaaaaacaacaaaagggggaagctaaacacaaccgcaatcaactgggtttgaattttgatgaacggtaaacgatgaacgcagtgaggcgtagattgttgcacactcttcgcagcgacgccccctctggaacactgaagagaagggcgttggaattggagaagaagagaaagactcggcactcgaagagcaaggaccagttcatcgtcacagttcccgaatccctctcctacctcgacaccgccaccatccccatgtacttcgccgccatcggaatcgctctcttcgccaagctcctcatgacgtacgatgattcgaggtcccaagagctgctggagcggaagataaagaatgcccctgaagggcaaggcagtgttagaatgctcact

SEQ ID NO: 60621 - DNA, 366 bp, Glycine max
aggtgtacttgcaatttgaaacaatggaaacaacaagtgctgctcaaccttcaatgcccacaaaggtgtttgcaaggaaaatgacatccgccatccaaaagccacctcaaatgtttgaaaccaaatttaaaagtgacacttgaagaaagtacttacagactttttgactcacatggcaatcctcttaattttctcaaattactttctgaaattgagtttagtttagaaattttaatcataacttgcaccattatatgtatgtttacagaaattttactgtcaaagttgtgtgatattcatgatcagtaatttttttccaaattaaagatattcctcaggaaaagaaacggccgctctacaggatca

SEQ ID NO: 60622 - DNA, 404 bp, Glycine max
  unsure (1)..(404): unsure at all n locations
aaagaagacaaaaagggggtccaatgtgttaatggttggtggtggtaatccgtcctcctcctttggtggtccgtggttgtgtttgtttttttcctcacctgaaaatgtcttgctgcggtggtaactgtggttgcggaagctcctgcaagtgcggcaacggctgcggaggctgcaagatgtacccagacttgagctacactgagtcaaccaccaccgagaccttggtcatgggagtggcacctgttaaggctcaatttgagggtgctgaaatgggtgtgcccgctgagaacgatggctgcaaatgtggaccaaactgctcctgcaacccctgcacttgcaagtgacgtgttgggagagcaagcttcaatcagagatagcccttaattaggaataatgatanacta

SEQ ID NO: 60623 - DNA, 340 bp, Glycine max
ggagagagaacttagagagaattacagagcattttccaacagtattacacgaccgattcacatacctctttctctccgaagctgcttttaatacacgtactggcacttcgattgttctcatccttaatacatacagtatctctcttcgatttgatggaacagtacaacactctgaacaacggttaacccaactgcacaggtagtctccaagtattggtgcctcatgatgagactggatgctatgctcctgaaggccccattctgttgcattaataattgtggcgtctttggtcgatcatctcacatgaacatgtgttccatgtgttacattgacatactg

SEQ ID NO: 60624 - DNA, 349 bp, Glycine max
ggcatgtcaacgtaattgtcatgagaaacaatttcccactagttagaccatataaaaccccagtcagttcacccacacagggtggtatggagacagcactgacacttgttccagactctcctcactagatttatcgatgtgctccacttctacaaattcatcttccgtaaagtcacttagatgattctaagcaactgaatacttcatatgactctgccatcactgcaggccatttcactgtagtagctggatgctgttggcctctactacttttgagagatttcatgtgcaaacatctacgatgaactgatgtcaggactggtcctgtcacccatggtctcactcctac

SEQ ID NO: 60625 - DNA, 159 bp, Glycine max
ggcaatgagtgagagtgttccctctcctctcctctgctcaaacaatgtcgcaaacaacgctgcacgctttcgtcgccaaaaaccttggatgtggaatggcagaaggcaagtgtctcccatgttcaagtgtttctggaagaactgctgctgtataatcct

SEQ ID NO: 60626 - DNA, 211 bp, Glycine max
gatgtttgtgtgatgaaaagcaatgcaattgaacgtgatgttgatgtgcatgagttgatcatcagtgcagtagaccagtgaggctcaaccctcaaatggcgcacttcagagtgcgattgtctccgagatgaaggacactctctacgagatggaggctgaaccttcatatcttacacttggttgtgtccctgactttcgaaatggtgcactg

SEQ ID NO: 60627 - DNA, 350 bp, Glycine max
ggcacaagtttgttgagatagctagaagcaataagatgaaaatgaaagtgcttgttttgtttgttgctacagttttggtagcatatgaatgccatggctcagactaccagaagttccctctccaaatgaaaactgggtttggtgggcaatacagcaatgaggtggcatgtgccagttggaggcttggcgtggaagcaaacaacgtagtcaagtggcaaactgttcctgcagcttgcggagagtacatagctgactacgttctaggagaccaatatagatcagattccaaaacagttaaccaacaagcttatttctatgctaaatccctcaaactcaccaacaaagatgtc

SEQ ID NO: 60628 - DNA, 241 bp, Glycine max
ggagtgagcaagagtgaagagcgaagagaatggctcccacaggtttaatccttttggctgtgttatgcttctcagcactgtcactgagtcgttgtcttgcggaggataatggacttgttatgaacttctacaaggaatcatgccctcacgctgaagacatcatcaaagaacaagtcaagcttctctataagcgccacaagaacactgctttctcctggctcacaaacatcttccatgactg

SEQ ID NO: 60629 - DNA, 400 bp, Glycine max
gattcccttcgtgtgtttcgtaacttattcggtatccttaaatcgcaactcaaaaccctagccattgaatttgggcacggatcttctcccacgctatctcaggtaacatgcctgagaatccactgcagaccttgttccataacattgaacaagtctcaagctttgttcaacaccatctctctaatttcataggccttcatcaccacccatcttcaggacccctcttgtccatctcttcctccaccaaaggcccactttcaaaaactgcaacttctgtacaactcgctgatactgctgtcaatgaaaagtctgctgccccagtgactaaggaagagcttggaagggctacttggactttccttcacattcttgcagctcagtacccggataatcctacaag

SEQ ID NO: 60630 - DNA, 78 bp, Glycine max
  unsure (1)..(78): unsure at all n locations
gacagacagagagaaagatgcagaagagagagcaaggcaagtccggcggattcgccgganggagggcgacgccacctg

SEQ ID NO: 60631 - DNA, 295 bp, Glycine max
agggataactggcctggccgttttccaaaacccaatcctcaactggaactaattggaatgccgaattttggtaataccaaaattactgaaaatggcgcaattccttgaaaaagttaccaaatcccaaatagaaggcaaaatggtgggaaatttcaaaggaaaattgggtaaagcaaccaaagaactggacaatccaacctccgtgaaatcaagcaataaacccaaaccaaattcacaaaacccttaaggattcaaggtctggaaattccccaaaggcttccccaaggtcctttgg

SEQ ID NO: 60632 - DNA, 331 bp, Glycine max
gatatcatgcaacaacatctttttcagatcttacacatcactgtctcactctcttctctttctctgcgtttctctgaaataccataacaagctctggagaaaccgccacactggtcagaaaagaaacgcaaacctaaccgcaaacggtaaccccattatgccatgcgtcacaccacaatcctcacatctcatccatcttctcacacttctctctatatccatcatcgctccttccaacgatgtaagaacctcatcattcgaatcattaagtatttcagatggagtcgaagatggtggtgatggagagtactaccacgaggtactaccatgg

SEQ ID NO: 60633 - DNA, 334 bp, Glycine max
  unsure (1)..(334): unsure at all n locations
ggttcttgtggcaaaggaaggggactcanacaacttacggtcaagacaagctcgcagcaactacgccttgtgacgaaccacaggtagatcaactgcagcggggtatctatcaagcggatcaggcgcatgttgtggtctgcagaacacttaaccgggtatacgagaataattcgaactcacaaccgaccttcgttttcacaagtgcatttttggacgcccgcttatccttggaccctgttggacacgttttttcaatttaatactggggtaaacattttcaaacggacaagagagcattcaccataactggtggctaaagaaggttcctgattga

SEQ ID NO: 60634 - DNA, 388 bp, Glycine max
agcacaagtttgttgagatagctagaagcaataagatgaaaatgaaagtgcttgttttgtttgttgctacagttttggtagcatatgaatgccatggctcagactaccagaagttccctctccaaatgaaaactgggtttggtgggcaatacagcaatgaggtggcatgtgccagttggaggcttggcgtggaagcaaacaacgtagtcaagtggcaaactgttcctgcagcttgcggagagtacatagctgactacgttctaggagaccaatatagatcagattccaaaacagttaaccaacaagcttatttctatgctaaatccctcaaactcaccaacaaagatgtctttgtcttggacgttgacgacactactctctctaatct

SEQ ID NO: 60635 - DNA, 212 bp, Glycine max
ccaaaagaccaccaaaagggaagaccaagaagaagaaacaaccttcaaatccctttcctgtgtccatttaattactttcaaaccacaagtccttccaaattctttaacttccttctctctaagcccaaaacctcctactgtttttggccgttaaagatgtccgggaaaagaaccaacgggttgatcaaagcaaaacctcgccgccaacaaag

SEQ ID NO: 60636 - DNA, 131 bp, Glycine max
gggagcgaagtgaattgacattgcagtgactcggggtgagttgagtcaccagtggtggaagatgtgactcgggtgatggtggcggtgatcgggtccagcattaggggatatgctgacctgtgcgatatcag

SEQ ID NO: 60637 - DNA, 218 bp, Glycine max
gacgacagcgtggggctcttgtcttctcagagtcagactgtagcagtggctcgattcacagctggagtggttatgagtatgatctcggattcttacacgactgatcgtgttctggtctcgatgatcactgtggctgtcttcgtccatgtcaatctcgcaaaggggtatttggctgagcattgtgaggttgcgtgctcagcactgagtcatggcatata

SEQ ID NO: 60638 - DNA, 208 bp, Glycine max
gacaccaggatttgccaattgccatttcaatccccagtttcttcttcaacgtcctcttacgagcagatgtcacttctccttcccagtttcagagcctaaatcactcattcccatggtctcagaagagcccactgtcgcggtggaacacgttcgctaagatgtcaacgatgggcctctacgtgtggataaggatgagctgacacctgaa

SEQ ID NO: 60639 - DNA, 239 bp, Glycine max
ggatttcatttcgtttgcaattgaatttcactttccctaggggcttaatatctcccctcacttgtgcctagccttatgtcatactattatcattcattctcatctttctctcttctctctccacgcagaccctagctccagatcgtgttcatctctctcatctatcatgcaacgctgtgcgtccaactactggtctaccagaacctcttccatgcttgctctgattatttgggatccag

SEQ ID NO: 60640 - DNA, 395 bp, Glycine max
gttctagtgtgtgattgtttgttgttgtaactcgttcttcttcttttgttgttctgtgtttgtgtttgttttttctctcacctgaaaatgtcttgctgcggtggtaactgtggttgcggaagctcctgcaagtgcggcaacggctgcggaggctgcaagatgtacccagacttgagctacactgagtcaaccaccaccgagaccttggtcatgggagtggcacctgttaaggctcaatttgagggtgctgaaatgggtgtgcccgctgagaacgatggctgcaaatgtggaccaaactgctcctgcaacccctgcacttgcaagtgaggtgttgggagagcaagcttcaagcagagatagcccttaattaggaataatgataaactaataatgtg

SEQ ID NO: 60641 - DNA, 369 bp, Glycine max
gttctagtgtgtgattgcttgttgttgtaactcgttcttcttcttttgttgttctgtgtttgtgtttgttttttctctcagatgaaaatgtcgtgctgcggtggtaactgtggttgcggaaacgcctgcaagtgccgcaacggctgcagaagctgcaagatgtacccagacttgagctacactgaatcaaccatgaccgataccttggtcatgggagtggcacctgttaaggctcaatttgagggtgctgaaatgggtgtgcccgctgagaacgatggctgcaaatgtggaccaaactgctcgtgcaagccctgcacttgcaagtgaagtgttgggatatcaagcttcaagcagagatagcccttaatt

SEQ ID NO: 60642 - DNA, 131 bp, Glycine max
cagaagggggaaaccctaggggtatacaatccatccggttctttgaaatggtatccgaaaactgacaatggtggctcgctgtaggtgcttcgctcgagtctcattccgtttacgcgcactaacgaaggttg

SEQ ID NO: 60643 - DNA, 316 bp, Glycine max
gtagtgattatatatgtacttggcttatcttctgctcggtacatgctcaaggttcttctgtttttttttgtaattcgactagtacttgcatctcaattgttttgaatgtacctaagtataatgattgatgaatgttgcatgttcgacttcacaaattatatgattgtgagtagaagcgtgggcataatcatcctgttactgtgtcgcttcttgacattaggatataccacatgagtaccttccttttgatccggaagctcccttccacatgctggttcgtgtcattgcccatgactttaagactgatttgcgtttc

SEQ ID NO: 60644 - DNA, 177 bp, Glycine max
gacaccaaattttgcaacttggtttccaattgcgtgtacccatgtcctcttttctctccttatcagtctctgctccctcgctcgaggattcgtccttcctccatggaacatagctctttcccttctctcgatcagtggtaccacgccgcttcagctcttcctctgccaggtgctccc

SEQ ID NO: 60645 - DNA, 195 bp, Glycine max
ggacatttaggaggaagcaaacagatgtttatcgagattcacatgtggtggtttcagcgctgcatagaacctaatatgagagcatgctagtgaagatgcaatcgagcgttctggaatgtcggggcatggagatactcggcgtgatgagctcaatcgcgatcagcatggtccttgtgatcctgtcattgtaatcgc

SEQ ID NO: 60646 - DNA, 341 bp, Glycine max
gaagctttgttagtgtcccagaagagaaagagaaagacacagcagagagtgatgataccagagagacaacaaggtggaggtgcgccacacgggatccgcctggctctggtggtggcactcgtgctcatagggcccttcctccttggggatcagggccacgccataacgcaggcattaccggacccgctaagcccactcggtctacgccgtctgcctatcgttcaccttctccacattgagtacctcccccccgatcggcgctctctcgtcgccggcatcctcatcatcggcgacaccctcaccagccacagcattacccgatacgctgtcagctccggcgc

SEQ ID NO: 60647 - DNA, 370 bp, Glycine max
aacacacgtccgccggtgggaaaagacgacaaaaagggggtccagtgggttaatggttggtggtggtaatccgtcctcctcctttggtggtccggtgttggggttggtttttcccctaaccgaaaaatgtcttgctgcggtggtaactgtggttgcggaagctcctgcaagtgccgcaacagctgccgaagctgcaagatgtacccagacttgagctacactgagtcaaccaccaccgagaccttggtcatgggagtggcacctgttaaggctcaatttgagggtgctgaaatgggtgtgcccgctgagaacgatggctgcaaatgtggaccaaactgctcctgcaacccctgcacttgcaagtgaagtg

SEQ ID NO: 60648 - DNA, 158 bp, Glycine max
atcgtcatgacaatttaggctgttatggcacttatgattttgaggactactcactatgggagcgtcactcttgacttaatttgctatactggtcctagtcctggtcgattactagtgactgtgggttaagttgttatatttaatgtgttgtggtatca

SEQ ID NO: 60649 - DNA, 68 bp, Glycine max
ggtcgtgtttttgatttgacaattgatatcgactcttttgagagttggcatctgtcgttggcaccatt

SEQ ID NO: 60650 - DNA, 356 bp, Glycine max
  unsure (1)..(356): unsure at all n locations
ggagtgagcaagagtgaagagcgaagagaatggctcccaagggtttaatctttttggctgtgttatgcttctcagcactgtcactgagtcgttgtcttgcggaggataatggacttgttatgaacttctacaaggaatcatgccctcaggctgaagacatcatcaaagaacaagtcaagcttctctacaagcgccacaagaacactgctttctcctggctcagaaacagcttccatgactgtgctgttcagagttgtgatgcttcactgttgctggactccacaagaaggagcttgtctgagaaggagacagatagaagctttgggttgagaaatttcaggttcattgnagacatc

SEQ ID NO: 60651 - DNA, 355 bp, Glycine max
atggcaattgggcttctgttgaaacagctagattaaatgctgaaggcctctcatgcaaggttcttgacaaggaggcgtttaaaaagcaaatgttgaagacacttatatggatttgttccgttaagcttgttgtcacactgtatgaaggggttactgtaagtgtcgttgtaaatgaattccgcactgaattgtctatccttataacagaactggcatcagtatcaacaaatgaaaaggggttaaaatttgaagaatccatggaatagcgcttgtgtgcatattctcgagctgtatcccactttcccactgaagttaaagaattcaaatgtgcaaatggttagatttgttctctctc

SEQ ID NO: 60652 - DNA, 405 bp, Glycine max
  unsure (1)..(405): unsure at all n locations
ggacaagtttgttgagaatanctaaaaacaataggatgaaaatganagtgcttgttttgttttgttgctacagttttggtancatatgaatgccatggctcagactaccagaagttccctctccaaatgaaaactgggtttggtgggcaatacagcaatgaggtggcatgtgccagttggaggcttggcgtggaagcaaacaacgtagtcaagtggcaaactgttcctgcagcttgcggagagtacatagctgactacgttctaggagaccaatatagatcagattccaaaacagttaaccaacaagcttatttctatgctaaatccctcaaactcaccaacaaagatgtctttgtcttggacgttgacgacactactctctctaatctccagtattttgctaac

SEQ ID NO: 60653 - DNA, 340 bp, Glycine max
ggtcaagcgttctgatatcactccagcgactacgacctggtggtgttcgaattcaatctcaggatcagtggtgtcctcgctcgctgcgagcacagcgtcatcctagctgtctcccattgggctacctgagagcttctctctctgtcactcctgtcctcttgtgacatgtattagttagtcgtcagcgcgatggttcacttctctgggcaaggtacaatgtgctatctgcatcttgcgtagaggctacaggactcccttgtgattgaacagttcgctgatcatctgcaagattacattatgattcttgttgtctcgaatgttcatcacttgggttcacgga

SEQ ID NO: 60654 - DNA, 267 bp, Glycine max
acagaaggggaatcacgctgactgaaattcctgaattcaatccaacggcgccgcaaccttcaatcctatctgcaccggccgctgtggtagaaactgcaactcctgttacaggatcaatgtctcaccctggcgctgatatcgtcgtctctcttgcgttatctccgaatcggcatcgcctttcatacgttcgtccatgggatatcggtcactaatgtatctcagtgaccagctattcattcatcatgcgtcgccgtttacatctcacca

SEQ ID NO: 60655 - DNA, 296 bp, Glycine max
gaagggggctaaatttgattccacgaaaatggattgggtttggaaggattacatcgaggacgatgtactactctataagtcatcataacgatgagccacgaccatggtcgtcacatcttattgcagaacatcagcagtctaaactgggaagttcgtcacgaggtgcgagacatccgactagagtctcacgaattgcatcagagaactcgataaagtgttgcaatcattcaaagagtagactgatgacgataactcagatgatctatttatcggaatgtctgttccatttagcttat

SEQ ID NO: 60656 - DNA, 277 bp, Glycine max
ggatacgattcctttggtttgcagtaatgggtgctctggatcacatatcggaactctttgactgctccatgtggcacttccaagcacaagaagcgcaagcacttgcagacggtggaagtgaaagtgaatatcgactgtcgaagatgccagaggaaatgtgaggaacgcattgtcccgggatgagaggaggaagacaccatgaccttggaccagtgcgccaacaaccatcagagtcgatggctacgtcggatcccacacctgtcatcgctcgcatcca

SEQ ID NO: 60657 - DNA, 298 bp, Glycine max
aacacccgtcaacctctcatctcaaaacgtccatatatatacccgatgcctaccgaaccctttcggcgcttgttctcaggtccttgtcattcgtgtgtgattcgcaatataatggtttggcattgagataacacacattagcatcatcagcgagtcatttaaagatgacttcttgaaacaccctggtagttaatcagatgatggggatagggataagtccccactttgtggtctgagtagtaataagagatcccgtcacgtcactcacatggcaaacgttgatgacccttattcggga

SEQ ID NO: 60658 - DNA, 332 bp, Glycine max
acccaaacgtcaggccaaattatgattatgattatggatatcactgccaggatcatcaggatttcgattctatggcatgcacattcgcacttgtacacggtctcggacccccatcctcttgagctctattctacagtctaaagctatctagtaatgttgcctttatgattctcgagtctagaactatcagacgccgtcctcttagagtggatagtggaagatttggcagtgcccatttgggaagcactgctgcagctgtggccatcatagctggaaggtcacctattaacaacaattccacctaaggtcagagaactaaggtcaccgtctct

SEQ ID NO: 60659 - DNA, 96 bp, Glycine max
aaaaaaaaaaaaaaaaaaaaaaaaaaaaaaaaaaaaaaaaaaaaaaaaaaaaaaaaaaaaaaaaaaaaaaaaaaaaaaaaaaaaaaaaaaaaaaaa

SEQ ID NO: 60660 - DNA, 340 bp, Glycine max
gtatagaattcccgggctgacccacgcgtcaggcgtagtgcaactggggtacatgaaagcaaatattggcgtggtggctatggcgactatggtggttggcgtgatggtggttggcgtggtcgctattgaggctggcgtggttgctatcgtggtcggcttcgtggctatggtggctggcgtcgtggctatggtggtgggcgtcgcggctactgctgttgccgtggtggctttggccctaacgaacatactgaggctgtgattgatgcgatccctcacaactcacagtgaaaactgctaaagcctatatatgatttaagttatcgtactaaataatacttca

SEQ ID NO: 60661 - DNA, 311 bp, Glycine max
gtgagtcgtataaacatcatctctggtcacaggcatccgtggtagcggaagaactcaatcctgtcgaattcccttgggcttttctatcttcgatctcatgaattcgtttgtaccactctcataacatggcggtgttcttaactagatgcctctccgttgagggtttctctagctatggtttgtattagagtgtctgaagcggaagaaatataaaagcttgagagcttttgcccctctgtgtgaaaaatgtgtggaagtggagagagaggtccacgaataatggatctcaagagatcataatttcaactact

SEQ ID NO: 60662 - DNA, 97 bp, Glycine max
aaaaataaatcataataaacaaaaaagaaaaaaaaaaaaaaaaaaaaaaaaaaaaaaaaaaaaaaaaaaaaaaaaaaaaaaaaaaaaaaaaaaaaaa

SEQ ID NO: 60663 - DNA, 168 bp, Glycine max
agaaaaaaaaaaaaaaaaaaaaaaaaaaaaaaaaaaaaaaaaaaaaaaaaaagggtctaaagtcaagtggctcaactcttaagcacgcgggcagtcgacctaaaggatcgaccataacgtgcgcatcccttcaatgcatatgattctcctataatgacatcaaaactg

SEQ ID NO: 60664 - DNA, 233 bp, Glycine max
ggtcgaggcccgcgtcagcacagacgtcccttcatggattttggtataatccctacactttgagggtggtatggacctgaaagttgaacgataggccatagcattacatagaagaacatcgcaagaataggagtcttcaacttcttgcatacaacccattcatagaacagtcctccagtgcctgtccatatgggaaaaccctgatgtgagtccatgcttactgttggctacat

SEQ ID NO: 60665 - DNA, 328 bp, Glycine max
gacagacaaacaaacaatttaccagctatacttgttccttttgaaggttagaagtgctacaatacaaacaatggcagctactcaggaagatgtgaagcttttgggtattgtgggaagcccatttgtgtgcatggtccagattgcccttaagttgaagggagttgaatacaaatttttggaagaaaatttgggcaacaagagtgatttgcttctcaaatacaaccctgttcacaagaaggttccagtgtttgttcacaatgagcagcccatagcagagtctcttgtgattgttgaatacattgatgagacatggaagaacaaccccatc

SEQ ID NO: 60666 - DNA, 409 bp, Glycine max
gacagacaaacaaacaatttaccagctatacttgttccttttgaacgttagaagtgctacaatacaaacaatggcagctactcaggaagatgtgaagcttttgggtattgtgggaagcccatttgtgtgcagggtccagattgcccttaagttgaagggagttgaatacaaatttttggaagaaaatttgggcaacaagagtgatttgcttctcaaatacaaccctgttcacaagaaggttccagtgtttgttcacaatgagcagcccatagcagagtctcttgtgattgttgaatacattgatgagacatggaagaacaaccccatcttaccttctgatccttaccaaagagccttggctcgtttctggtccaaattcattgatgataagattgtgggtgctgtatcg

SEQ ID NO: 60667 - DNA, 247 bp, Glycine max
ggaaccagacatcaaataatcatggctttcggtagtctcacaatcgtcttcagtcttcgtgtttcatctgcgacagcttgtgatcgctgcctgtctcaaaccaaggcttcctagttcgccaatgcttctgctctttcagctggggcacgtgggtaaggctctttagtacaacacataagtgccggatacgttgacgctggtgtggattctcgcgtcataattggattacgaagtggagcttgctttc

SEQ ID NO: 60668 - DNA, 93 bp, Glycine max
gaatggtccggtgaagtgttcggattgcggcgacgtgagcggttcgctgcccgcgacgttgtgagaagtccactgaaccttatcatttagagg

SEQ ID NO: 60669 - DNA, 390 bp, Glycine max
  unsure (1)..(390): unsure at all n locations
ggatgttgataactttgtaaagggaactaaagattccagggtttgtaatgctttccctgcaaaaggtcattttccatttccaactcaggcagcattgtcatctggggttaatgctgttcctgatcctctgaaaacatttgaaggtctttcaaagaccttaattaaatctccaaaacctgatgttgggacaattgtcagtgcaattcatgttctttcagaattgcttgtgcaaacatccatggatggagtagactcaaatagtgaacatggtcatgatgagattatgattcagcanataatcaataacctaaatgatttcagcacaaaaagatgtggcctaacgattccaaccttgattcaactcccacagataatccatttggtcctgat

SEQ ID NO: 60670 - DNA, 396 bp, Glycine max
gacaaaacaagtgtttcgaatagattatcctaagtctttgggaatagtgctgcaatggcttcaagtcaggaggaggtgacccttttgggagctactggaagcccatttgtgtgcagggttcatattgccctcaagttgaagggagttcaatacaaatatgtcgaagaaaatttgaggaacaagagtgaactgcttctcaaatccaacccagttcacaagaaggttccagtgtttattcacaatgagaagcccatagcagagtctcttgtgattgttgaatacattgatgagacatggaagaacaaccccatcttgccttctgatccttaccaaagagccttggctcgtttctggtccaaattcattgatgataaggtttttggtgctgcatggaaa

SEQ ID NO: 60671 - DNA, 93 bp, Glycine max
gcaaagactggatgagaaattgcccaatgctggaagcaaattgggaactcctcaattcaaaggtggggtttccaaccccttgctgaacgttgg

SEQ ID NO: 60672 - DNA, 360 bp, Glycine max
aggggaacacaacaaaatcaaaggacaagcctaaaaaactggcaagcccaaccaaaatcccccaaaactttcaaccatgaactgaacaacaacaacaacaaccacaagggcaaccctacaaaaccaactccaaagagattaattttaataacaaatttcccaattcacaagaaaaaaccttgtgggcaactcctcaaaaatgtcaagcttccccaacacagtggccgaaagccccacgtcccgcaaagcacccgaaaaatccaccttttctcacacatgcagactcttgagccaatttcctaaagagaaacgtgcttctgctgagtccacccttggaatttgtggaaaaatggaacctaa

SEQ ID NO: 60673 - DNA, 326 bp, Glycine max
ggagaacagcaaagattggggatggtatgtgaatctaatctcttgtaattttagacggaattttttaattttcctaaatatttttgttcatactgcacgccccttaaaaagactcaaatccctaaagaacattggtaaaaattaaaataatccccttaaagggttttaaacttgggcaatccggtccggtaaggcaccctggtcctttaacaagcccaaatccggaacccttgacaattgaacaaattaggtagaatttgccttggcctttccctttcaagagaaattatggttccttattcattgttaatcttgtttcatttcct

SEQ ID NO: 60674 - DNA, 262 bp, Glycine max
gggccaagagaatcatcagcgaggttttgtgccgtctagggtggtggctcctcatattttcttgagggacaatgggcttcttcaggacattgttccaacgcagatggggaatgaggagaatgaagatcgtgtgtacgtgatgatcatcataatatatagtcatattttgggttaattaattaatcatagaacttaattatgacaaattagtttattttaattattttgttgtatattaattatatgtatctttgtatggtat

SEQ ID NO: 60675 - DNA, 414 bp, Glycine max
gaaaaacaagtgtttcgaatagattatcctaagtctttgggaatagtgctgcaatggcttcaagtcaggaggaggtgacccttttgggagctactggaagcccatttgtgtgcagggttcatattgccctcaagttgaagggagttcaatacaaatatgtcgaagaaaatttgaggaacaagagtgaactgcttctcaaatccaacccagttcacaagaaggttccagtgtttattcacaatgagaagcccatagcagagtctcttgtgattgttgaatacattgatgagacatggaagaacaaccccatcttgccttctgatccttaccaaagagccttggctcgtttctggtccaaattcattgatgataaggtttttggtgctgcatggaaatccgttttcacagctgatg

SEQ ID NO: 60676 - DNA, 414 bp, Glycine max
ggcagggtaaaagtaacggagtttttgttgcttggttactctgatattctgcattttctcgtttagttttcttcagcattcaacaaacttcttcaccctctctatcttccaatcctttttttccattccctactattccctatcatctttctttgtgttctcatctttttccttttcccaaggttcgttgtttcttcttcttcttcttcttcttcttcttcttcttgctgttttttccttctaattctcacttctctttcttcaatttttccccttttgggtgatcggggatttttgtgcctggatatgggtttagggttttttctttaatgatcattggtgtgcatgtttcaagtttgatgtattggcagtggaaatcaagggttctttttgtgttattggatgcaaaagttt

SEQ ID NO: 60677 - DNA, 342 bp, Glycine max
  unsure (1)..(342): unsure at all n locations
ggttctagtgtgtgattgtttgttgttgtaactcgttcttcttcttttgttgttctgtgtttgtgtttgttttttctctcacctgaaaatgtcttgctgcggtggtaactgtggttgcggaagctcctgcaagtgcggcaacggctgcggaggctgcaagatgtacccagacttgagctacactgagtcaaccaccaccgagaccttggtcatgggagtggcacctgttaaggctcaatttgangggtgctgaaatgggtgtgcccgctgagaacgaaggcttgaaattttgaacaaaatggttctggaaacctggaatttccaattaagtttttggaaaac

SEQ ID NO: 60678 - DNA, 287 bp, Glycine max
gggggagaaaattgttgtggtcagtttgacatgcatcaaaaagacagacacaaaggtcagtgtgcgtgcagtgttcgaatcggtgaatctcaagatcatcactgctaacaccacttcgttttcagacacgcttttcaagatcatcttcattgaggcaaatgacgatgagaaagatcaggtgcagataaagatgcatacagccagtaaagctcgtaatgacccgttaaaccccatgagcattttaggaacaacatatatgaatttggagcgttctcactttggggtca

SEQ ID NO: 60679 - DNA, 347 bp, Glycine max
ggttctagtgtgtgattgtttgttgttgtaactcgttcttcttcttttgttgttctgtgtttgtgtttgttttttctctcacctgaaaatgtcttgctgcggtggtaactgtggttgcggaagctcctgcaagtgcggcaacggctgcggaggctgcaagatgtacccagacttgagctacactgagtcaaccaccaccgagaccttggtcatgggagtggcacctgttaaggctcaatttgagggtgctgaaatgggtgtgcccgctgagaacgatggctgcaaatgtggaccaaactgttcctgcaacccctgcacttgcaagtgaggtgttgggagagcaagct

SEQ ID NO: 60680 - DNA, 343 bp, Glycine max
gattttaaaacttcaagaacactccatttctaaccttcccccaatcaccaccaaccatcctaacccttgataccaccggcgtttgcacatgctaacgccaccttgactcattccggtgggtgactccattcactacaacccagcacaccgcgacgagacgatgatgaaccaccacatttcatcgacgaaccaccacacctccagcctcacttcgccaacaatgcctctatttttggttttttcttttcagatcgcgttgtgatagtgtatggtggcgctatgcgtgtaggttttagtttttttctatccagatctggctaccgtgaagaaatggtgcaccacg

SEQ ID NO: 60681 - DNA, 341 bp, Glycine max
ctcccatcatcagaacctccaacattaactctccttatgctgatcacgaacttattgggctcgttaacttcggatcttgctctgccaactcccccgttattgccacttacctcttcaagtacctccctaccttgcccgctcaaactgctgccccccctgccggaagtcccgctaacccgagatctttcgatggtaactttgcctgtggagatggcgttgttcaagatggtggatatgagaaatgcgatcctcccacaaccgttatcgctgacagagaaaaccctaacctctgctgcaacccttgtacttgccaatatgaggtcgccggaactgcttgcact

SEQ ID NO: 60682 - DNA, 363 bp, Glycine max
ggggcggtggcgttcttatcgactttaaactgcgcgtgaagttcaagagtgtttgacgatggtttcaacgtccttggattgttgttcaacgttctttcgtgtcttgttcctatttggttattgtttctggcggtcggcaaatactactctagttaccaacaactttgatgtttttatgcattgaattttaataggataaaacttagtccaagtatgttttaaggtacttcaatctaataatatttgaaaatttactttaataatttatgtaataaaaaatgttataaattaatattaatattagttattaaagtaaaatttaaaagaaaaaacaaaaccacaaaaaaaaaaaaaaagcggccg

SEQ ID NO: 60683 - DNA, 157 bp, Glycine max
gacccacacgtaagttcagatgtcagtacagcagagaggggaccatagaagggggacagttcttctcttcactcttcacattctgttcatcctcgtgactgtctatcgatatcttggccgcgttgatctctttctctggcatattccgtcgactctg

SEQ ID NO: 60684 - DNA, 68 bp, Glycine max
caagcctccattcaggtgccaaaaaacgacaaaagggggcttgttccaatccgacaccagaaggtttc

SEQ ID NO: 60685 - DNA, 385 bp, Glycine max
ggttccagtgtatgtgattgttgtgactcgttcttcttcgtcgttatcttcttcttttgttgtttgtgtgtttgttttttctctcacctgaaaatgtcttgctgcggtggtaactgtggttgcggaagcgcctgcaagtgcggcaacggctgcggaggctgcaagatgtacccagacttgagctacaccgagtcaaccaccaccgagaccttggtcatgggagtggcaccagttaaggctcaattcgagagtgctgaaatgggtgttcccgctgagaacgatggctgcaaatgtggagctaactgcacctgcaacccctgcacttgcaagtgaggtgttggagagctaaagcttcaagcagaaatggcccttaaaattatgataa

SEQ ID NO: 60686 - DNA, 335 bp, Glycine max
gaatggggatatgctgtctttgacgattagtgcaacactgcaaagcaaagcagtagagttgaatccttccacactggatgatccactttccaatggcaaatccgttcccagaaatggcacacaagcatcaacaccaggttcaaacttaatctctaacgctatcactcttataacgatgctacatatggcatcattgtagatcaggcttcgcaatgacagcaaggacgttcattgctatactcaactacatgcagcctgatagactaagctgatagctaggagttctgatgacgcagcacctcttgcaatggcacctgaaaatgctagggtttcac

SEQ ID NO: 60687 - DNA, 366 bp, Glycine max
gccaaaaaaacaaaaaaagggaatcatcacaagccaaaactgcagtagccaatgaagaacaatggcaaaatgctttagaagaatcaaaaaataacttgtccaaaaattccgaaggtgccaccaactcaggacatggaaacatcaaagaaaataccaaggggaagaaaaacaaatcaaagaaaagcaacggtgggagaacgggtaagaagtgaaaatgtacttatgactggttgtttgtatattcagatatataggaatatgtgttcaaactttaaactgtctggttggtctatctttgctatattttctttgctgtggacctgattttggacttttaatcttgatcatctatgaaaagttctttat

SEQ ID NO: 60688 - DNA, 282 bp, Glycine max
ggattgactactgacaatggcgcttcaacggttaccagaaggatgaattgctattacacacacttgcacttcgacgtgcgaacatgtgtatgtcttccgtcgtatcaacgatttactctccggctgtcgatcccgccgctgtgtcgcaccgttttcgccatgtcgactaccactccagcaattgacattctcgatcagttcgcaatcaactctctactctcgcgctctagctagatctctaggatcggcctaggatcactcatcacggtaagaagagctttc

SEQ ID NO: 60689 - DNA, 305 bp, Glycine max
gatgttcaataatatggaataattttcttcctagttcatatgtctgtggagcaacctttaacattcgcctatttcttcttcttcttttgatatagctccaacgattaatatactatataacatcgctgtggtgataacataaacaattgaatcatgtcgcggagaccggcgaatccgtctcggcgattcggggacagtggaggtggattgttttcatcttcgaaatcaaaggcgtcaccggttttgtcggttgggctcataattgtgggatgtctgtttctcattgcgtatgtgtacaagggctc

SEQ ID NO: 60690 - DNA, 262 bp, Glycine max
gtagcatctgaaactgatcattgcagaccattcttctgttctcgtagtattaagatatttgatgtgctgagttttcaattgggaaacgaaccattcactttgttttagattcgtattcttttgctcaaacgcatggcttgacagtttacaatgtggcaattcaattattttccattttttaaaattaaaattagaactctacatttttatttttatttgttttcaaacatgttattagtttcaaggtctagcttctgtaagt

SEQ ID NO: 60691 - DNA, 338 bp, Glycine max
ggcagcagacacacacaccataaacgattcagttcagtcactttcattatcaggttatgtcgtcaatcaacgacattttcggaacgtcaacaacatgcacttacacgatcactatcactcagtctcactctgctgttcatctacctcatgggtatccatgaaatgacacatagacacgaccacggtatcctgcacattgataacctccaccatggtatccaccccagcagctatgccccacagtatgctcagcagcctctcctcatgcatcatgttgggtttcatgacggatgtttggctgaactctgctgctgatgcatgcttgatgcctgcattta

SEQ ID NO: 60692 - DNA, 205 bp, Glycine max
aggcgtcagtagagcagagaaaggggaacaaatagaggtcgagacaaaagaatatctttcgctcgctgtttggaattgcctctttctttgagaaactcacaacatcatcgtttacctctctggtacaccaaaggctttaacacgtctaatatcggctgagctttatgtcaaatatgccaccatcattatcattacacgtgtaata

SEQ ID NO: 60693 - DNA, 252 bp, Glycine max
gcaagatgaccaaccacgtcatactggacatgtttcaaattagactatcttatggtgttgatgcaaacctctgacaccatggggtgcaaattaggggtatttggtcatgcaacatcctgtgctcaatgctccacagtctgcgatgaccctagccacgatagacagtcccgtctgctacacctagaatgacatgctcgtcgatatcaggcactcaagctcactccacttcacagcatcattcatcacattata

SEQ ID NO: 60694 - DNA, 272 bp, Glycine max
gatccttaatgactttcttggacatccatggaaatggcagtctagaaaactcgagtggtagtcatcttgatcctaatggcgcatctggatgtacctcacagcagcgatcttaacactcatgatcgagttcacatatccagtgtggtgcaccataatctgcaggtgagctgcgtgatcggaactgagcgaccagcttcaaacacctgaaacgcaattctggaggcccttccggactcaatttagcatactctcatcgctccggtcaatctctc

SEQ ID NO: 60695 - DNA, 152 bp, Glycine max
ggatagaggattcaatggcgactctgcctgcatactgactcgtcacaattctctcctcaccggcatcttcagcgcaatgacctgcgtggtggtagttcatgcctgggtgttcagcatgataacgcatctcacgttcacagtatgggccgccc

SEQ ID NO: 60696 - DNA, 65 bp, Glycine max
gcggctgcgacacagcgaggggatggctcttcactttcatgttcactcctgcgatccattccgta

SEQ ID NO: 60697 - DNA, 312 bp, Glycine max
  unsure (1)..(312): unsure at all n locations
cagtcctgcgtacagatgacaaaagacgggggatcgggatatgcctgagttgcttacgaatatggtgctcatgtccccaacacattgcttaaggtatgagtatgaagatgctgacttggatgcccaagatgctgaggtgtcactatggaatttctcaatttaataatgtgttttggtttggtttatgttgttagttttttggagtgaacagtgtctgtactggttttttattagtagtacggatactagttatacgtggaaagattgcgagggaccanaaggaattttcttttgaacccttttttgtcaatg

SEQ ID NO: 60698 - DNA, 374 bp, Glycine max
  unsure (1)..(374): unsure at all n locations
ggaacaaaagatgataacaaaacaaacagagattctgttctcacaaatggtctaggcataggagaggatttgcaagtgcctgtgaatctccagctaagccagccacagcaacaacactacaaggaaccttcaggaactacaaaattgggcagattgcaattgcattgatccatttacaggacgtgtgtttctcaattgctatcaaggaaaatggactcaaattttaacctcaatgttttcatataaatgtggcatatataccacaaacaaattagcttaaagattttaatttganattatcaataccagaaaaggcaacctatcatgtatgtaagaaacaatgaaagcatcttatgagaaaccaagactcaaat

SEQ ID NO: 60699 - DNA, 275 bp, Glycine max
gactgcgacgaaggaacatcgctatgatcatggctatgacagcatcagcagcagtgcaagttcttaaactgctgcatcacctatctattcagaatgtttatcggaccacaataccgacggctgtgcctcaatttctctccctcatctcactctctctctctctctctctttttcctttctccataacttgttatacattaattagtgaaaattacacaagtgagatggtatgcgtctttctggttgcgagtcctagtgctaatagtctgttgtta

SEQ ID NO: 60700 - DNA, 437 bp, Glycine max
gctggcagaaaacgaccgacagggaggatcagggcgagtctctgtgtctcgtggcctcggttcgataagtcggtggtggcgttgattaagggattgcttggacgccgcgtgctaccggggttcgagtttgggttgagtgacgacgacgttttgaaaattgggaggagtacggatatggatgtgcagtctgagttgtatatttgatttactgtgtgattgtaatttatattcatggtttgatcccctgaggagtagttcggtactttaagttactgtgtgatgttgtgattggtaatttgattaattagtcacagctacagattttacattgacacatgtgtcatgactagacgaattgtttggcataacgagtagttggtttgtctgttgtggtgcactttacagctttgttgattcactttagacatggccacgga

SEQ ID NO: 60701 - DNA, 85 bp, Glycine max
gattgctatacgatctcttcactagcgctccggttcaagttctgcaatcagggcaacatgttcatgttccacgccagtccctgtc

SEQ ID NO: 60702 - DNA, 409 bp, Glycine max
ggaacaaaacaagtgtttcgaatagattatcctaagtctttgggaatagtgctgcaatggcttcaagtcaggaggaggtgacccttttgggagctactggaagcccatttgtgtgcagggttcatattgccctcaagttgaagggagttcaatacaaatatgtcgaagaaaatttgaggaacaagagtgaactgcttctcaaatccaacccagttcacaagaaggttccagtgtttattcacaatgagaagcccatagcagagtctcttgtgattgttgaatacattgatgagacatggaagaacaaccccatcttgccttctgatccttaccaaagagccttggctcgtttctggtccaaattcattgatgataaggtttttggtgctgcatggaaatccgttttcac

SEQ ID NO: 60703 - DNA, 388 bp, Glycine max
gtagcagggtggacaccactgagagacttttatcatctgaccggagatcatcaagtgtcgctaacccattagggtaagagtcgtattctttctcaccactaccacgagccatcgccttccatgctcattcacaagatgacactcagtataccatcacgtgccaaattctgtcactttcaatgtgtaactcactccgcacagacttacctgcaacagcctagaagttccaagcatcacgtactacttttctaacgacaaaggccagactcatgcgtattcggaggatgttatcgaatgccggcttgtgtccaatccctggatagatacagttaatagtggacctggatgatcacatgtttgctacaccctgtcctacatagctgaccac

SEQ ID NO: 60704 - DNA, 358 bp, Glycine max
gacagacaaacaaacaatttaccagctatacttgttccttttgaaggttagaagtgctacaatacaaacaatggcagctactcaggaagatgtgaagcttttgggtattgtgggaagcccatttgtgtgcagggtccagattgcccttaagttgaagggagttgaatacaaatttttggaagaaaatttgggcaacaagagtgatttgcttctcaaatacaaccctgttcacaagaaggttccagtgtttgttcacaatgagaagcccatagcagagtctcttgtgattgttgaatacattgatgagacatggaagaacaatcccatcttaccttccgatccttaccagagagccttg

SEQ ID NO: 60705 - DNA, 63 bp, Glycine max
gagtgctgcgctaacacggcagtagggctccggttacagcatagccatcagtgtggcagcatc

SEQ ID NO: 60706 - DNA, 427 bp, Glycine max
aggcgtcagtacagcagcgaaaggagtactgaatggggctgctcctagacgaccttcgaccttcctaacgtgatcggtcacttgctctcgcagcaattccgccttgtacatcagtgagaagttcctatctgcaaaagcatctgcaacaccttaagattctcactgatgattgggcacacgtatctgtggttgatcctttgcttgatggatttatcatgcgaaattctgtcatcattctcctttagactaatcagaagtggtctaaacaagacatatctatatcatgatagtatcagagcagctagagtgctacgagaaagtcaaacattacgtagaggtctgttgtgttcgtatgatcagcatccttgcaaacgaaataaccaaggacatactaccatgtaaaaattatgtgcatgctcatcattat

SEQ ID NO: 60707 - DNA, 258 bp, Glycine max
  unsure (1)..(258): unsure at all n locations
ggatctggtangtgttaccgaatgtcagttttgggatgagcaacttgatggtcttccagaaccaaatagcctataaatacaatgtgtttggattgttagctaattaaaaaaatcatggtgttccaccatgatattttaccacaccagaacatgatccaccacatttctaaacactcaattgcaatgtttggattagctttatgatgattaataatcaattttttttttttggtggaaacaaagcaacaaatatttgtt

SEQ ID NO: 60708 - DNA, 366 bp, Glycine max
gatatcagcgaggtcttgatcaagaacagacgcaagaaggagaaggcggtggaggagttgtttgagacgttgaagctgagagcggagatgaatgagaagagtggtgttttgaggggaaaaaatgtggttgaagaggaggaagaagaggaagagcaagagaagagggctttggacagtgagagtcctaagcaggagtcagagattgaggacaattgcaaggaggaggaggaagaaaagaagatcaagtgatatatagtgatgtgataataatgttgtttgttcccccgtccaatggagagaatggatcctatccaagtgtagtactcgatcatcatcaacaattttttttacgggggatatcagata

SEQ ID NO: 60709 - DNA, 258 bp, Glycine max
gattcagctctgcgcctccatgttctcctgggatacatactcaaatgatccatgacacccaaagtaatggggctatctcggtgacttcagattcttcaaccgtcatgtgtatcagccatactgacgtacactctcgccgtcctgcgtcaccatacagtactcacaaacagcatcatcactcgcttcatgtactattgattccattcttcatatcacgctacacttggcaccaatcttcaattgttgctcacgtcactc

SEQ ID NO: 60710 - DNA, 234 bp, Glycine max
tataagggggaagtagggttaattatgcatgtgtgggatccttaacagaagcggttgcaagtcttgaggagctcacacaagaacagcagtcaacagattgggacgagggtgctccactggctgaaaggattccacctgcgaagaaactccgcagtgctgggatctacttccaaccagctaaaagtggcgccatctcatctattgatttcgttgaagaaagttgcattttctact

SEQ ID NO: 60711 - DNA, 283 bp, Glycine max
caacgggttggaataaacatacaacacgaaatgtcatagaaagcgtaagaatctgcaacagatagggatggctgctcttgaggaccaatcataggaactagccatggctgcccaacctaaacctcaaaaccgactcatctttaacatcgtcatcatcattgctatgcacactgaagcacttcccattgctaacagattccaactcactgatgaccctgacaccccgtttacacaatgggttccttgtatccattatcatgtcacatacaaagatcttaatata

SEQ ID NO: 60712 - DNA, 306 bp, Glycine max
  unsure (1)..(306): unsure at all n locations
aagaagcacaagggaatttgagcttgaatgatattaatatggggaaggctcancaattcaaacctctttaataagaccacatctatcaaatgatacatgaattgctacattactggtctattgagctatgctctctgattccaccactaactctttgaactcacattcatcaaacatttttattgttacttcacattcttactctgctaatttaatcaactcattctcttagacaatttcagtctctattattattaaatgctttaagttctagactatactatactatactatttctatcttcta

SEQ ID NO: 60713 - DNA, 243 bp, Glycine max
  unsure (1)..(243): unsure at all n locations
tggtgttctagtgtgtgattgtttgttgttntagctctttcttcttcttttggtggtccgtgtttgtgtttgttttttctctcacctgaaaatgtcttgctacggtggtaactgtggttgctgaagctcctgcaattactgcaacggctgcggaagctgcaatatgtacccatacttgagctacactgattctaccaccaactatacctttatcattgtaatatcacctttttaagctcaatt

SEQ ID NO: 60714 - DNA, 138 bp, Glycine max
acataaccatcattactatttcacctccaatgacactgattatatcttatatataaatcatatatactgttctattgttttcattacccatattctctattactactttatcatataattcaaatacaatatctattc

SEQ ID NO: 60715 - DNA, 259 bp, Glycine max
acccactcgtccgcccacgcgtccggaatacgacagatagtgtaacaaagagaggtaaatgagactggtatgccggtttccatcttgtttgtgggccgggtttcggcataattgggttcgactcccatagtcccgctgcattccccctgacctctatataaaatgataaaacggactataaacactttgattgttaatggttccattattctcatttctaagggaatttttattgtaactggcttctattccctttata

SEQ ID NO: 60716 - DNA, 172 bp, Glycine max
tctctctcaaaactgaaaaattaaagctaaagactgtatgtttggaattggcgattatgattatcctcatcacgaatattatctaagttgtgttgaactatcgatttgggaataatgtgctccttaattgcaacaactatgactccatcttataccttaataatctactagc

SEQ ID NO: 60717 - DNA, 189 bp, Glycine max
tgattcatgcattgtactttgaagccgactccaaaatatggtggatggtgaactatactggacgcaattactgttctaataataacgatcatttgtgcaacaatgttattgatcaagaatcaaatcaagtattgggcatttcacaaattcactgtattctgcattgtatctatgtgaaaacctatatat

SEQ ID NO: 60718 - DNA, 205 bp, Glycine max
tgttacggctatgaaaccacatatatacacagtacatagttagttattgcgcctgctccacaactctctaccaacatatgtatctccagatattctatacacaatatgcctaccactaatagcaataataatgcctttatcaaatatctacattctgatctttctctccatccttctaacactaatctttcattcaacaatacat

SEQ ID NO: 60719 - DNA, 130 bp, Glycine max
tggctatgctctaaaattttcacccagcagattgtattgttcttgaaggataaggtgcttatagtctttacttcatcttttacggatatgctaatgtttttatctctgctaatgcttactattattatca

SEQ ID NO: 60720 - DNA, 323 bp, Glycine max
tatagggagacattaccgagcgtaaaggggagatgatgatgagaaatgagaggtgttgatgatggataagcaaatgagtattatgataagatcttagtatttgggattagattagattcatctatcacatgacacaacacaactcatcgattatcactttcccgcactttgctctcccatttggtgtcgtttgtactttttatgttatgctgctttttgtcattccctttgaatgacttttgtactacttgtcctataatctataataattattcaattacaattaaatatttatctttataataattataattaatctaata

SEQ ID NO: 60721 - DNA, 347 bp, Glycine max
agccgccataacaccccagaaagttatacttaaaggcgctactccaaactcgaaattctcaacaacattctcggtggcttatctttccactttattccaaaactggacctcactttaccccaatctaaatccaaacccgaaccaaccatgttcctaccaccccaattcacttccgaacctcctaaatccactctcaaattcctctgtagctactgctgcaaaatcctccctcgctaccccgacagcaagctccgctacctctgcggccacacccacatcctctcctactatcgctccattccattctcctagctattgctgaaactgaatgatctctactgcacctc

SEQ ID NO: 60722 - DNA, 149 bp, Glycine max
ccaaagaaaataaaatcctcagtgttggtgatcatccaaacacggtctgtctgtctctcgaaaattctcattttccatataaaatctgaatcatctcttgtcaaccttatttttacaattactttcttattaactttaaatttaaccac

SEQ ID NO: 60723 - DNA, 176 bp, Glycine max
  unsure (1)..(176): unsure at all n locations
tanagggctaattaaattataaaaaaaaaactctcactctatatgagtggatttaatccctggcggggtggtcaaattctacttgtaattgtcattatatcactaaaactattcgattctattccttgttttcaatggacacctttttcaattctcaatcttcttcttcttcaata

SEQ ID NO: 60724 - DNA, 330 bp, Glycine max
acaacaattgaagaaaataaagttcttaaggaaggggaggatggcgagcatgcagagtcggtggatggaacagttgcacagaacttggatcatggaaaggaggaaaaccatttactggagttgcctgttgaattgcctgaatcccctgttgaaaaatttgagagttcagattctgtggaacattctcaagagaaagagattgctgatccgggaacctctgggaatccaatggcagtgcaatttatgccttctaatcttggggacaatgtaattgatggtattactagggaatctgattaatcacatgacattaatgatgggcatgaaaaa

SEQ ID NO: 60725 - DNA, 398 bp, Glycine max
tagtaagggaattcaacttcactttcaacaacaatctctctgttttccattctcatgcctgggggcttcttgtaacacacccttttctcttttctctctaactcccctccaagaaattctgagagaatagaatagaaaagagggtgagtggttttttgagttttgatagaatatctgcatgggggagctggttgatattcttgactaaggggtcaagattgctgcaaggtttcactctaattgcccccaaacatgccttaagtactaccaccctccatccctctccgacaaccactgccaccactaccatggtggtgccaacacaatcagcggcctaatcaaataagctgtagtcataaataacctttacttaaatcttatatattcttaacataacc

SEQ ID NO: 60726 - DNA, 324 bp, Glycine max
aagcataaatgagctaacaatcaacatactctactcaatattctcaagcctatccatacaaagaaaatttatcaatatataacactactctataacctttaatggcctccaaatattctctaacatcttcatataatcacatatcatcactctaaaactcctatcttaatatattaatctgacaacattacacatcttacattaatatatataacacttactaattataacatacactattacatatatcaacttcttaaatccttatattactatcattctcactccataattcatatatatctcaatctctataattttatt

SEQ ID NO: 60727 - DNA, 127 bp, Glycine max
ttaaggttctgcttctagaagacgacataagggtacgtgtgctgtaagacgacagagaggggagggtattatgctgtttttatgtcatgaagtttaatcaccattgttggaatctatttctctctta

SEQ ID NO: 60728 - DNA, 80 bp, Glycine max
tgggtcaacaatccgtgcttgggcttggactgtggcagctaagtattaagtggtggaggccaggaaagatcatggtatct

SEQ ID NO: 60729 - DNA, 333 bp, Glycine max
  unsure (1)..(333): unsure at all n locations
ctaaagggccctgttcaaagtgctggaccaatcattgtccagatcaatgagtctatgtcctggaatgtcccgaggacttcttgggcgatgacattcaaaagccagcgggtactcatgnttcctctataatagtcaactgatattctctacacaggacttctcaaagtaggatatgcctgtcgattatcgctacacaaggagcacaaggtggattctcagggaattttcttaaccagaattctcaagctggatattctcgctttggttctggaaatgactttatgtctcacgactacatgggccatggatcacaaagtcttttcactcagtggg

SEQ ID NO: 60730 - DNA, 266 bp, Glycine max
atccaaaaatctctcggctgcctttataaaatcaccagaaagtaattcatattttccattcccatcctcattccaactattttgcataaaattttccttctttacaacctcatacactcattcctcctctttcttgtccccaaaaaatttcctcccttccttcccctcttcattattccaaaccataaccatcactacaccttcttcttcttcttcttcttattacatatccctcatctatcattataactacttatttaccccaa

SEQ ID NO: 60731 - DNA, 336 bp, Glycine max
tggtaagacagattcatagatttataataggggatataacctaataaatccgctgggttggatcccttttactcttaaaggattatcccacgtactttattaaatattttaatgtaacaaataatttcattgattcattctcatttagtagtaatatttttatacttttattttaataacgattattttaaaatactcattattaaaattgatgcaaattgtagtaacggaaagaaatgaaaatagtcagttgataatccaaattatttttctttctattgcagttacttataccgttttcattttattgcaccaaattaatgtgagctatttctt

SEQ ID NO: 60732 - DNA, 344 bp, Glycine max
accactcctccataacgatgcgagggtccaatcaaaagtgagagagagagaatggagagattggaagaaatggtagggatgggcgtgacaatgccagtgtaatacggttgggattttgcataggactgggactcaaccctcctcacactctttatagggatcaagacggcattgccatccatcaagatatttataaggacgctcctgatccttccaattgcccttatcgcactcatagctctctgactatcattcaatcaaattccaatctggcaacatttgttagatacatgatcccattaagtcattaagtttgaattcggagaccttcaatggattgcctt

SEQ ID NO: 60733 - DNA, 347 bp, Glycine max
catgatatgagtgctgaacgccctgagctggatgatgacaagacaatgatgaacatacacagggagcagaggaagcgtgaaagtagggagaggagaatgcgtgatcaagatgagagagaacatgatcttgataacaacagggatttgaacttgcaacgctttcctgacaaaaagaaatctgtcaagaaggctgaaggcatgtatagtcaagcattcagtttctgtgagaaagttaaggagaagttgagcagttctgatgattaccaaacgttcttgaagtgccctcatattttcagcaatggaataattagaaggaatgatttgcataatttggtaactgatttact

SEQ ID NO: 60734 - DNA, 391 bp, Glycine max
gggcacaagaaggaggaggagcataagggtgagcaccatgctggagaatacaaaggggagcaccatggtgaacacagtagtgagtacaaaggagagcatcatggtgaacacaaagctggagagtaccatggtgagcacaagccagagcacaaagaggggttcctagacaaagtcaaggacaagatccatggtgagggcggcgccgccgagggcgagaagaagaagaaggagaagaagaagaaggagcatggccatgagcatggccatgacagcagcagcagcagtgacagtgattaagctgctgcatcacctatatatttaaaaggtttatgggaccatagtagcgaaggctgtgccttaatttctctccctctctctctctctctctctc

SEQ ID NO: 60735 - DNA, 387 bp, Glycine max
  unsure (1)..(387): unsure at all n locations
ggttctagtgtgtgattgtttgttgttgtaactcgttcttcttcttttgttgttctgtgtttgtgtttgttttttctctcacctgaaaatgtcttgctgcggtggtaactgtggttgcggaagctcctgcaagtgcggcaacggctgcggaggctgcaagatgtacccagacttgggctacactgactcaaccaccaccgagaccttggtcatgggagtggcacctgttaaggctcaatttgagggtgctgaaatgggtgtgcccgctgagaacgatggctgcaaatgtggaccaaactggtcctgcaacccctgcacttgcaagtgacgtgttgggagagcaagcttcaagcagagatagcccttaattangaataatgataaact

SEQ ID NO: 60736 - DNA, 409 bp, Glycine max
gggttcattgcgggatggcagtggaagcattgcatgaacagcacacaggagtgcacctgaagaatatggctctgaagaaccgcactttgggcatcactttcaccgagataagtcccactgatcacgtcaccgggtttcacaagcgcaagagcaagcgaatagaggaagcccagaagcaacatatctgaggctctgctccacagacgcacctctgaccgcaaatcgacgaaattggtaagataccatgttcttaatggaggcctgccatcatctgatcatattgatggggaccaagcagaaaccttcgagcaagtgtaatctattgctgaaacaaagatcatacacaatgatcatctgaaagtcactgttgtcacaagtgagataaaccctgatgacggtagttatccta

SEQ ID NO: 60737 - DNA, 411 bp, Glycine max
ggttctagtgtatgtgattgttgtgactcgttcttcttcgtcgttatcttcttcttttgttgtttgtgtgtttgttttttctctcacctgaaaatgtcttgctgcggtggtaactgtggttgcggaagcgcctgcaagtgcggcaacggctgcggaggctgcaagatgtacccagacttgagctacaccgagtcaaccaccaccgagaccttggtcatgggagtggcaccagttaaggctcaattcgagagtgctgaaatgggtgttcccgctgagaacgatggctgcaaatgtggagctaactgcacctgcaacccctgcacttgcaagtgaggtgttggagagctaaagcttcaagcagaaatggcccttagaaattatgataaaaactatatgtagtttcaaaacttc

SEQ ID NO: 60738 - DNA, 266 bp, Glycine max
gacacagaaggggacggtttaacaccgatgcatgttcgtttgcactgttacctgtgataccgcacactcaatggaagctgctcaagccgacgagaaccatgtgggtcatgtatgtcgcagagtcgagtgcaaggtcgagctcgccctgtatgtcacaggagttgactatgcagtcttagatctcgttttcttgatcataagtgatgcggatctcaattgcaatcccgttcacagcaacgtgcatgtatctgttcacgatacgtatg

SEQ ID NO: 60739 - DNA, 170 bp, Glycine max
gacatactcctccaaattctaatgcaaacccttcactactccaaattcgaggacttcagcatagtccatcttttcccacaacggtggcccgattctaagcctctaatgctcaggcacttgggaatgatcacctgcagtttgcaatggttgttcgttatagagtgttgtga

SEQ ID NO: 60740 - DNA, 400 bp, Glycine max
ggaaaaaagggcacatacttttttgaattctcgaggtctttgaggactatggatcatcttcaacaggacgtgcaatttaacattggtggatccagcaagatgtctgttgcattctggtatccagtagatggtcaaccttggcatggttctgggcactactctgtttactgtgattgggttcccagtgacgtatctgttggtaaatctttgaatggcaagtcagtagatgcagcatcaaatagctcgtggaatgttgctagtgccttttctgttatactatcagtagcagcactttgtgtgtctgtttttgtgagctatagggtgttcagccccaagagtgtctcttttacaccgatagagaacaacaacctttaaatattgaaccaagagcttgagtttg

SEQ ID NO: 60741 - DNA, 318 bp, Glycine max
agccgtcagtacagcagcgaaaggtccagatgcgggtactaaacacaatggtactggcgccaaatcaagacaaaacggtgaagctgcaagcagctcacagcccggtcgcgatgaccaaacactccatctagctccagcagacagaagaccacagacgggtcttgatgcgattcgacgctagattggtacggatgcatatacgatcacataatggtacagcgtccacagatcactcagacgcagcgtcgcgacagcagatctcaagggtatcattgccaaactacaccccaacgataacgcttccattaaccacacaaa

SEQ ID NO: 60742 - DNA, 248 bp, Glycine max
gaagatgaaagggaacgaaaggaatggaaggaggtggtgtcgttgacgctgctgaggtggccaggccgtggacgaggatgggcccacgcgccgaggtatgtcgcaagggcccccaagtttgtcgggcccaaggtgggcgcacggcgcattcaccagcccaggtaggcgcaggccgcggcattcccgacgagctagagctgtgtacataagcgcagatgacttcagagccttccttctttacattttcc

SEQ ID NO: 60743 - DNA, 394 bp, Glycine max
cacttgaagagtgataaagaagtggctaacctgtggaatgggatgagcaagtccttgagattatcaagggtgccattattggataatgtcattgaagatgttaacaagtattacaatggtagaacgaaggtcaaaatttggaaattcatgaaggtttatgtgttcagttcttggcagtttttgacattcctagctgccatatgcctcttgctcttgatggctttgcaagctttctgctctgtctacacttgtagtcgctttttccgatctgcactaaattcccagtgattgatatgcatgatgtcaactattcacacatggactctatttagtaagtgataacccaaattcacgatgcggtgttggttgctactgaaacgtaccctttgtgatg

SEQ ID NO: 60744 - DNA, 219 bp, Glycine max
gatcaagtatttacctgacttggtgggtgattctccctgaaggttacaaaaaacaagtctcaattgggtaggaatgcctgaagaaaacaacggttttaatccatgggttaaggagaactatcccaagaagaataccaagtttgagactcacaacgcccccgttgtgccggaacaccatttcgccctttctgcctgggtgtctaaaaatgttaaagagga

SEQ ID NO: 60745 - DNA, 308 bp, Glycine max
ggaagaagaagaagaagaaagagaagcaaggagaaagagaacggttagaaggccaagaagcatggcttcactcaagaacaagaaaccctaatacccgcttccgttaaatcccaaccaataccaactccttatcaaaagggtaaaatattctcctcctccaagagaccgcagagaggtacattttccgctcttttctcggaaaattgacgctttgtgctcatattgtgcgcgatatcacccaatttaccctgtgcaggggttttatatcttcacactgtagccttttctctctctctctctatctctct

SEQ ID NO: 60746 - DNA, 345 bp, Glycine max
gcagttcaattccaatatattccattctctctgtgtatttccctacctctcccttcaacatgcagatcttcgtcaagaccctcaccggcaagaccatcacccttgaggtggaaagctctgacaccatcgacaacgtcaaggccaagatccaggacaaggaaggaatccccccggaccagcaacgtctcattttcgccggaaagcagctcgaggacggccgcaccctcgccgactacaacatccagaaggaatcaagccttcacctcgtcctccgtctccgtggtggcatgcagatcttcgttaagaccctcaccgggaagagcattaccctagaagtcgaaagct

SEQ ID NO: 60747 - DNA, 402 bp, Glycine max
ggtcaatggatgggataaagattgtacctctctgaatggacaactctatgcagtaggttgcccggatggatgcaagctcactgtatatgatagagcaacagattcatggagaaagtttattgatagcaagcttcatgtgggtaaatttccaactctagtagctgctgcacctgtttcccttaatggaaagctctgcattatccgccacaatatgaacatcagtttagttgacgtttcaagtcctaacaaccaagtggaaagcaatcctcgggacctttgggaaaatattgctggaaaaggtcatcacattcgcaggtctttagttagaaagttatggtcaactataacaaggcgtggttgttcaaaaagttgcattgtttgctgtcaggtgctacaagcctg

SEQ ID NO: 60748 - DNA, 339 bp, Glycine max
ggtggtttaggtcatgagaggcagggaatattggattggttcaatcttgagttggaatggcgtttgaagactttgatcctatcttcagtaaacccaaagtgaagtgggattctgaaagttgttcttcctcgtgtccctttttccttcatgcctatgcccctgattcttctcaccttgtaattcatgtcaccaatatctacgatgcctgggaaactcgtctttcgctctccatgcttgaggacattgtcagcattattattattctctgttcaagaacattaattttatgatttttgtttataataatatcggttcccttttttgaaaaggaatattgtt

SEQ ID NO: 60749 - DNA, 362 bp, Glycine max
ggaggaagaatgacgacaaagataactttagataaaatgaatagctctagcaggggtctgctctctgaattaatcccgacacgcgttcatgtctgcaaaacatttacccatcactgtcttcgcccatgatatgaatgctttcggtcatggcgtggatgctaatcagataacaaccactcttaagtagtgaccgcattcgatcagatcataaatagtgtgtcactactctgatacaccaactggctatggtgttagcgtagattcgtatctcttgattaggctactcctgatactggtggcacatcaatgcatctgtcgcaggaaaccactgttaccaggtagctcaatggcctatacacatg

SEQ ID NO: 60750 - DNA, 256 bp, Glycine max
acccacacgtccaccccgctgcgacaagataacggatcggagggacaaatacatccaatgattttgacgctaaagttcttcttcacgtgtctctagcaattatggctacatgcgattttggatatattgtgacagtgtggattgcagtccgtgctgcatatgctctacatagaccaccttgctatagatagggatggacgtcttgattcagaagcatgatcctatacatttctaatacacttggtcagtctatgtt

SEQ ID NO: 60751 - DNA, 311 bp, Glycine max
caatgggaatcatatgatacaaccgtgggaggcatcggtttcactaatcttttgtttcgagtacatgatactggtatctacaatggtgtcaatttttgtacaaatatcgttactatgtcagttccacacttacggccggacattgcaaataaatgtcagtcttcacattttacctgcaacgattaggaacttgcatcacctgtctatgtctatgtgcgtccatcttgtagcttctgtaaagaatcgtattcccttgcatcatacacagaagcattatgaaaatttcatgaacgtcatggtccgtgctgcac

SEQ ID NO: 60752 - DNA, 319 bp, Glycine max
ggaattgactgtggataactcaattcatggtgatcaatcttcaggagaatctataataagtttatgtccgtgtgcaatgtatcactacctcctgctataatttggattggaagttgtctctctttaagttttctcagtttttatatccgatattcctttactataactcaacagcatattgcatctccctgttgggtccaaagatactcaaaagaatcttttccaatttcacaagtatacacattacgtccactgacagatttactttctgctttgctttgcctattttaatcccaagttggttggctgtagtcatata

SEQ ID NO: 60753 - DNA, 250 bp, Glycine max
ggattgatctacttatactatcatatatgtttactatgacgttggctatctttactttgctatcgcttctgctcgtgatgccgtctctgtgacatggaatatcgttcacgagggaggcaggaccttgatctcatactttatttgtgttctgtttgtgatcgttacgttcgtgcgttatggtgatccaggtcatctcttaggtcacatcgtggttctcgctctgttcgcttggactcactcctttgctgcc

SEQ ID NO: 60754 - DNA, 228 bp, Glycine max
ggcggcacactgcattcactgtgtcggctatgtaacacgatattcttgatgatcgacggaggacaactatatggcgcctgagcgttgccggcgccgccactaggccctccgcctcgtcccccctctctccctcgcctcgaccccgtcgatcgcgatatgacgtgtctgttactgctgctactgttcactaatattcggagtcactattccatggtacattttgccgtc

SEQ ID NO: 60755 - DNA, 256 bp, Glycine max
ggaatagtttaagatggtccactattttattgtttatgctctctatgttgaacatatctatgttttatactaaatgaggtgtcgtgcctgcactgtcataataactcttggaagatttgattactcattagtcgtgtcctcacttaacgatttcttggcagttctcaatgcactatctattttcgcttaccttaactctagcacatactgctatcacagttttcttgtcaattattcatccttgattgttccgggg

SEQ ID NO: 60756 - DNA, 304 bp, Glycine max
catcacatgctcgaacgctttactaggtttgtaaccaatggtcaccttttgctcgatggggttccgggtgtgtcaaaaccttactattaattcactgggcaagcgttcagcaaaattagccgtaacagttacgcccgatctgtagccagcgacctaattcgtctatgatctatttcagcagaccaatgaatttatacttcgcaacggtcccattttcgccaatttcgtaatggtccatgaaattaaccgcgccacagcacaggtgcacatcgccctgcttgaagccatgcacctcagccaactc

SEQ ID NO: 60757 - DNA, 214 bp, Glycine max
agggggatctggtgggtttgcattgtatgattatcagtagttgtacgacgcacttgatcattatttgatctcgtatggaagtatgcaccatcatctctatggttgtgtcatactcactgaggtatgtgtagatgccttcgatttgtcttatgcatctataggcgtttgggttatatgatgcagtctgtcttgaactatatcatcttcaacttta

SEQ ID NO: 60758 - DNA, 247 bp, Glycine max
cgacccaagcgtcagtggaggcgtgggcgaaaagacgacaggagggggtctgaaatagaagaagataacaaagatgagcgactgaggaaaacgacaaggtggaagaacgttgccgtcgccgccaagaggccctccgcctcatcccccctctcatccctcgcctcgaacccgtcgatcgctgacagacatgttcgttattgcttcgagtgtacactacgatttggacttcatatcctatggaacactt

SEQ ID NO: 60759 - DNA, 89 bp, Glycine max
taccgctgcgagaataccaccgacgggtgtcgctgtcacatgattcccgacgggtatcgctgccataagaccacataatggtaccgctg

SEQ ID NO: 60760 - DNA, 374 bp, Glycine max
gaacttaacacggtttacacttttcaccttcatccatacgttgttcatctgggttatgcctcctataggcatctaccctccttttgttcttggcttacagcaagtactttagcttaattatctccagcattttatttgtgcgtcatgtggtattcatctctcgatgagttaacacatccgtggatctcaacattaatctcacagggatcattatcaaattctcatataggacgtcgaaaacaactttttgtcaataagtttgcatgtgacgaaatcttccagtcataaagtctctgctgcctttttggcgtatgacttaatgtgtgtaaattcatgctgctctaagttaaccgaaatgctcacagatatgtatg

SEQ ID NO: 60761 - DNA, 358 bp, Glycine max
cgtcaatccgacgtcagtacagagcgaggggagacaggaagggacccaaagtattcttattggcttattcagaatatatcggcctgctcttccgccatagtaaatgcatcatcacatttcacaggcctataacgtgatctttggttgttttatccaaggatcaactctagccgattcaacttcaatatggtcggctgtttgtcacaatgttgaaacttgagaatttgttactccggattcaggaattaaatatgattcgcattacatctttgggtgataaactttaaagaatgcaagggcgaggaagaccatacatgggtgatatggaaggtaataaatagtatggctcataatggaa

SEQ ID NO: 60762 - DNA, 361 bp, Glycine max
gggaacgatgtaactaacccagtcccgtgacttggctttctggttcgagtcgatgctattctcagagatgcataagggcttgatgcatagctatggccttgctgtaattgtattggccttgagtttgtgtttgggttcatcatcgggacaatgacattcacgagaatgcgagaatctcagtttcatcggacgcgctttgtgctcagagtgcacaatcctctgagaatacttcaaggacagtcagttggtatcggactgtttcaagctgatgcacggaagactgcgaacgatgccactactatggttacttactcgggagctgtcttgagagtctgcatcaggaaacttgttttctatcctg

SEQ ID NO: 60763 - DNA, 324 bp, Glycine max
ccctgtggatcaattagattcactaaaggcaagaaacgccacaccttttagcaacactagcaatgatgtcaaactaacaacccactgggaaacctttgaatctggaatggaaagctcggatgcttcatccgacaactcgtcttcaacgatagtaacccaagattgggagcagtttgattaaatcttgtacatcatactactgtctcttcatcctttgttcgagattcatatatacattgacaggtcttggtacaaaaacataaccatttaaaatgccagtgttagagctgacgtggacaatctctcaaatatggtgacttccat

SEQ ID NO: 60764 - DNA, 366 bp, Glycine max
gttcgcagaggcacgtgcaagaatgagtggaggagccattacttctaagcagccggacgctcagcaaagtttagagagctaactttacgatacctttattttctgttgaagcatatggtagcacagctcttctcgtaatcttcccgatgcgatgttaatttagctcgaatttgcagaagtctccatccacgagtttgctggcttacgtgaaagtgctcgccacttgtgttcttttagtaatccataattgtaagttaaggtaattacatggagttcttctaaatcctcgtcgagttagaatagatgtatcttacttcagttacctgttgtagcgcctacatcagctactactggcgttattttgac

SEQ ID NO: 60765 - DNA, 336 bp, Glycine max
gaagatgatgttgctcatgcatgatcatcatcatcatcatcatatgtaacagatatatacctttcttaaagactagtagtaaaagtgtagcagatttcagtgcatgcatgcgcgtatgctcactaccgagaaattctcgacaattactgtgggatgattataaggagcggtttgctaccgggcacttgcaggaagaatttgctttgtggtttagtaacgatatgaatataagacattatggttacctacggtgatgatgcatctgaaggttattctcgtggcagcagaacatatgtcactagatatcatgtcgaagcttttgcatatcttttcagt

SEQ ID NO: 60766 - DNA, 405 bp, Glycine max
gaagatgatgttgctcatgcatgatcatcatcatcatcatcatatgtaacatatatatagctttcgtaaagactagtagtagaagtgtagcagatttcagtgcatgcatgcgcttgtgctcagtaacaaaaaattcgcgacaattactgtgggatgaaaatagggagcggtttgctaccgagcacttgcaggaagaatttgctttgtggtttattaatatattaatataacacattatggttacctacggtgatgaagcatctgaatttttttctcgtggcagcagaacagatgtcgctatatatcatgttgaagcttttgcataccttttcagtggagaaaatttaatccgcttcattaccataacgttatcctatatcaaggacacgggtaatcacaaatgac

SEQ ID NO: 60767 - DNA, 309 bp, Glycine max
caacggtcccgctgcaacaacacgacataacgggaaccacgaacggttttctgtgtgattctttctccattgtcgtctaacacgtttttcattcgtttctgaaccacgcaatccatcgaccaatgcccacagggttaccgaaggctaactcctccgtagcaccggacgaccagcgatggttgtggacgcagatcactgcggatgcgcaccgtgacaccgagttggagcccacgctggccatctacctctactcggcgatcctctcacactcgtcgctcatacgctcactgtcttttcacctcggaaaca

SEQ ID NO: 60768 - DNA, 407 bp, Glycine max
ggttctagtgtgtgattgtttgttgttgtaactcgttcttcttcttttgttgttctgtgtttgtgtttgttttttctctcacctgaaaatgtcttgctgcggtggtaactgtggttgcggaagctcctgcaagtgcggcaacggctgcggaggctgcaagatgtacccagacttgagctacactgagtcaaccaccaccgagaccttggtcatgggagtggcacctgttaaggctcaatttgagggtgctgaaatgggtgtgcccgctgagaacgatggctgaaaatgtggaccaaactgctcctgcaacccctgcacttgcaactgaggtgttgggagagcaagcttcaagcagagatagcccttaattacgaataatgataaactattaatgtgtagctaaaaac

SEQ ID NO: 60769 - DNA, 339 bp, Glycine max
gaggtattcagatcatcaactgaagacaatgacattgggccagttgtcgcagagaactcacatgaatttgcgcaagagtagcagcaaaaaccggaatttgcggagctcatgctatcactgggcgcactgggagatggcaaccaatatgaaggtataccctctgcagaggaatgggaggcagcatatttatacatgtcagttgcacagagaatgcgacgtcaacctgacacaacgcagcagagtggcagaaggaagcgacggtcaatgcacatgttagacgaagacatcatgtacattaccactgatgactagacgtgaataacaaacagctagtgactg

SEQ ID NO: 60770 - DNA, 391 bp, Glycine max
gggccacgttctttgcagtaatcagaggctcagagactaactcatccttctccattaattttattacttcactttcattggtgaactttctctaaggcaatttgtatgatcatccagatcctctttcaaagattgctcatcactgaaatatatatagcagagggagacaaactcaaaccaaccaaagactaaagaaaagaaaaaaaagagcttccacaatggtaagcgctgcaattgctcgtaacgtcgtcggcgtaataggcaatatcatttcctttggcttgttcttttcacctgctccaactttctatggaattgtaaagaagaagacggtggaggagttcaagccagatccttatatagcaacggtgttgaattgtgcgttttgggt

SEQ ID NO: 60771 - DNA, 184 bp, Glycine max
tcaaaggggaactcacgttttgcatcttttaatatgcctcagaacacctcctcaagagaacattctaaagctccaacctctgcaccctcaagatctgctctttattgcacatttctcatttcactgccatctcttaccactgatacgtttcccttcagctctttactctcattttcaatatgca

SEQ ID NO: 60772 - DNA, 404 bp, Glycine max
caatgagttctccaacaagcaatgttgttgttagcaatagtaaccgtggtgatggtggggctgtgaatatggatcatggacgtttctttccaaacacttcttcttcttcttgattgatgaatctgaatctgaatctgattaaagaagaagatgaagaaattaagcacttcattattctccagtaggaacacgggtagcagttttttttgtttttgtttttctttggtccgcatgctgaggctcgaaagtgacataaagcagacagttaggtgctaacttggccagaattgttgaccaaccaatgtaaaatactattattataatagtacactcttctttaggtttttaattacttttattattactactgttatttacttttttttttttttacttttagtttt

SEQ ID NO: 60773 - DNA, 102 bp, Glycine max
gaacaacgaaagggggaaacagcatcgtcgaacggagactctccactctgtacatacaattcctgagcctagctctactcgtcacatgcaccggtatcttca

SEQ ID NO: 60774 - DNA, 260 bp, Glycine max
tcgtaaaaaaacacctcagggtgatggagcaaataaacaagcatttggtgttgtaacaaaaactagacatggttgtagcatcgtaatatcacgtgccccaggtgcagtcgccacaattcaacctcatggtgatgcctcgaatatcatagatctttgctacagtcacttacagactagatatcggtcatgcagactacactgcgactatatgctcattgtacaactgaactcctactcgattctgctatgacataacgaca

SEQ ID NO: 60775 - DNA, 159 bp, Glycine max
gaacaaaacaagtgtttcgaatagattatcctaagtctttgggaatagtgctgcaatggcttcaagtcaggaagaggtgacccttttgggagctactggaagcccatttgtgtgcagggttcatattgccctcaagttgaagggattcaatacaaatat

SEQ ID NO: 60776 - DNA, 324 bp, Glycine max
tacggctgcgaaaaaccaccaaaaggttccgcctccaaaaaaccaccaaaaggttccgcctccaaaaaaccaacaaaaggttccgcctccaaaaaaccaacaaaaggttccgcctccaaaaaaccaccaaaaggttccgcctccaaaaaaccaacaaaaggttccgcctccaaaaaaccaacaaaaggttacgcctccaaaaaaccaacaaaaggttccgcttccaaaaaaccaactaaaggttacgcctgaaaaaaccacccaaagggaaatttctccaaccaaaaaaaaaacaccacaaaaaaaaaaaaaaaccgccgctct

SEQ ID NO: 60777 - DNA, 402 bp, Glycine max
ggaacaaaacaagtgtttcgaatagattatcctaagtctttgggaatagtgctgcaatggcttcaagtcaggaggaggtgacccttttgggagctactggaagcccatttgtgtgcagggttcatattgccctcaagttgaagggagttcaatacaaatatgtcgaagaaaatttgaggaacaagagtgaactgcttctcaaatccaacccagttcacaagaaggttccagtgtttattcacaatgagaagcccatagcagagtctcttgtgattgttgaatacattgatgagacatggaagaacaaccccatcttgccttctgatccttaccaaagagccttggctcgtttctggtccaaattcattgatgataaggtttttggtgctgcatggaaatccg

SEQ ID NO: 60778 - DNA, 378 bp, Glycine max
ggttgaacggtgttgagatattcatatagtcaaagtgcatagaggaattactatcctctcacacttgttatctgttaatttctattttttgttttgcaggacacttgataaagaggcacatgttcttaaaaatattttgactagatttgatgcatcatcaggcctacttgtgaatttgctatccacatgggtggtgattaaagatggcattagacaacgtttgggtgatggaaatacaatgaatatttggagggacacttggatgtatacaagtgatagtccatatattaaaactactcctattcaacgactagaacatctcaaggtttatgatttgattgagagtaagtacatcatgaagtatgaacttagtcatga

SEQ ID NO: 60779 - DNA, 227 bp, Glycine max
caacacagagagggagatgcgaagagacaacgatgtgaaaccgtggtcatagtactacggcagggaacagcttccacatgtcgctgggtcggtcagtcgccgagacggtgaactgcggcctacgctccgaggcgacgacactctggttcagctccgatgaaaggactcaagctctgtcaacagtctacccacggcctacattggcgacatagtgatagccaccgtta

SEQ ID NO: 60780 - DNA, 204 bp, Glycine max
gaggatatattcgattttgtgaaatgctgatgactgtgcaactagatgtagacttgccattatttattggacattagtatcatctacagcctcgtatatagttttgacttcagatgctttctaactttagtcagtagcaactccatcttcgagcaaaattttttattttgtcagatcccttggtctattgtacatattgctact

SEQ ID NO: 60781 - DNA, 225 bp, Glycine max
tgggacagcacaagttgtatatcggaacgttgccacaaacgttgtagttttcagatcagcacctaactaactatctatcggtctcgatccctgaatacaaccgaacgctacgccgaaactatgagcacagctcgagtaccagcgttgaaccagtaccagtcgctgctgtggctacggtagaacccaaggaaacggctgctaaagcaccaccgctcggatcagact

SEQ ID NO: 60782 - DNA, 176 bp, Glycine max
gcaccgagaggggaatacgacggggtacggcatcttgcgtcgactcggaagatggaacaggaagagcacgacgtgtactgacgatagatccctgatgacggagagatggacggagaccttgacatgtctgccgccgacgatgagcccgccgtcaaggagctcgacgagatgaaacg

SEQ ID NO: 60783 - DNA, 353 bp, Glycine max
gggaggagccacacgatttagtgatgttctttggaaactgaaagtgatagtttgccaaaagtccaagtcgcaggaatcacttccatcagcatcattctgatgatgagaacagattcactgataatcacggactgcctgtgagctataccctcaaggggaaatcttggatccgctgaaccaacgaaaggaacaaccataaacaagtcccaagcaatgacattagcaatccacgacatactggacactacgaggctaggtgcgtttgcagctctggactcaggtgtcacaatgcattggcatcatcatcggcactgcagacgactaagacccatgcacatgaacatgagcatcca

SEQ ID NO: 60784 - DNA, 109 bp, Glycine max
acccacgcgctctatccagccgtcagcaacgacgcactcgatgggaacgtcactacggcttctatacgacgacatacggacggtgaatcacctcatcacgatccttctc

SEQ ID NO: 60785 - DNA, 267 bp, Glycine max
agaccaccgaaagggtgactcgaacaccagatgaaatttcagtgagttggcctgacaagtcaattggatcatcctcaatagtatgggtgtcaaggacaatattaaccatcacccagaaaacacatgtaagcacgatacaatgatctagtatcaagagatatatcacatgcggtaatatcaattgtcttggactcatgacgtttaccccaatgatgatagtatattcattggtgtgtcgaaagacgcaggcacactgtactcaaagaa

SEQ ID NO: 60786 - DNA, 384 bp, Glycine max
ggagtaggtttgaggaggagcaagaagaattggcctttgaaattgaaacagctatattgcatagtttggttgctgatcttcttgacctggatggttaatacttaatagtttttcttttcaaagttcaaatcaagttctggcaattgcttcctccacagttgtttcctgcaccttcctaagcttacggaacacctaattgggaatgtaaaattacattccgttaggtgcaggaagcaattgtctcaattttcaatttcttttaagatctctgggcctttagcctcacttttctcaacagaaattatctggcccactatagcacttgaagcccaaatcagaaaagtaggtctcctcctacagcatccatttagacctaccaaccac

SEQ ID NO: 60787 - DNA, 327 bp, Glycine max
ggattttggtctttctttgatttggatttctcactttttgtggttattcccttccgagctatgcgtgttaattatgattctaagcacacgcaagctacgcatgtttattaattttgaatttggtagaccattttattaatattcatgtgaatgggattatacaccgtgaatataagatattttaaaaaaggagatggaattataatatgctttagcaattttgactagttagtaccttttgataaggaagatgggatgccattatgatgtgctcactatctgtttgataaaatgctccagttgaatccttttgtataagatgtggtt

SEQ ID NO: 60788 - DNA, 205 bp, Glycine max
gatgctctatcggagacctgaatctctcggattatgtgggtaattcccttgcgaacaagggatttcagatacgattccaatcataatccatctacccatgtatgatagtttagaaggtagatgtatgacttgaaagtgactcatgtaacatgagactatggccacgtgaatatgacctttttcaccaatggatatgcatttatga

SEQ ID NO: 60789 - DNA, 316 bp, Glycine max
gaattaaagaaagagaaaggtattcagacaaagatttcgggttctgggggccaatatggcataagggtcacaacaatttcaggggaaaataaatgtgcatgcatgcaaataaccaaatcccacaataaaccctatcccaaaatgacatctctgtatgctaacaacaatgtgcagtgcctgaacaactcaatggtgttgcacagtaatttaacacaccatgatccacgagtgtaccttgttatcccaaaaaagccattatgccaaggattccacctcaaggaacctgatggtactgctcaacgcaattgatttcatt

SEQ ID NO: 60790 - DNA, 211 bp, Glycine max
caaggcttgggggatggaacgtgagagacacatcttgttcacactgtccaatcgtgctgctttaactctagtcattgccggcacctctatctcatcacctaggttgttgagtgataagagtctggttgtgtctgacagtactctggtggctgtgggaatcattcgtgcacgtcgtgaagatggtacatccttttctccttctgataatcct

SEQ ID NO: 60791 - DNA, 393 bp, Glycine max
gagagagagagagaaagcaaatacaagaaacttctctgtggaaaaaagctttgtgttcgttctcttcagcacgtccacgttgacgcttttctgaagaatcacaaaggctcgagaaaagaaataactttgttacacaaagcatttttctctatctttcttcgaaattcagagatacttggcgatcactctgatttggctcctccgaagtgatcctcttcgcggaggcaggggtttggattcaagcttcgcgttgattcgtcgcggttagatctgaactgtgctcgctgatcttgctcgattgagaagcttgagttttgaggattttgaattcattcagagtttggaagcatgatttgttgtagaagatagatagagagagtgtatgtttctgtg

SEQ ID NO: 60792 - DNA, 80 bp, Glycine max
tactgctgccagacgaccacggaacggttacgctgcgagaacactactcatgggtacggctacgataatactacgtaacg

SEQ ID NO: 60793 - DNA, 258 bp, Glycine max
tcgtgagggcagcggagctcatgctcgagcagcctatctatctcctcgtgatgactcgtgctttggataaatgatagaaattctcatgctctcggtgctgatgaagacttggagtctggcaatgtgtatacgttctatcgagatgaggagagtgaacgtcgttggcatcttcaccgatatagctgtactcgttttggccgcgagatccaccgcgatgagattgtctggtggaaatgcacgtgttctccttgacaactg

SEQ ID NO: 60794 - DNA, 401 bp, Glycine max
gaaagagctgatggattagccacttgttcagaaaagaagatctatgaacgatcagtaggttgtgttcgtagcaaatacaagacagacagatcaagagccacagggttctcaaccgcttgagagaacaacaagatctagaggagtgacagtttctgccactaccaaaaggcaaacatgtggcaacatcaaagacaacccatacaggtccaagtgattcacatccagcatcacatgcaccaactggaaaattttccacaccaccaagagtcagggcaacggcaacaccaaacttgtacacaaatgttcttggaagtgtagactctcttgacgtatccattaatgcatcgcgaactgacaagattgccgaagtcacaatgacgatctgcgaagatcctttttca

SEQ ID NO: 60795 - DNA, 180 bp, Glycine max
aggcgtcaggctacgagtcaacgggagagtggggatggtagaagaacatagagaggcgctgagttcttgtagagagatgtaggtttgagttcgagtcatatgcatggggattcttcgcagatgcaagcgtcgccatccgatgatatatgacgggagtacatagtaatagtagcatcagag

SEQ ID NO: 60796 - DNA, 380 bp, Glycine max
gaaggtaagagggtcatcgtggaaggatttgtaaattttctcaactcaactctcaccatgaggaccagttgcttcctaagccttcccccttttacttcaaaccaaccttccattcccccaaaacatcctcaactttcatcggtgaagaacgaagcatgttggaagaggcaatgcgttgtgatgggagtggcatccattattggactagaaatgtgcaattcagtggcaatggcccacgaagcaattgaaatcaagaccatgccatttagtaaccaagtagtatcaaatagcaattcttacggtggcgccaaatggagcgagaaaagaatgtgcccaccttggcaaggcaattcgctcgaaacgatcgtgccggagaatct

SEQ ID NO: 60797 - DNA, 187 bp, Glycine max
cacaaaaggggacaaacaacaacaatttaccagctatacctgttccttttgaacgttagaagtgctacaatacaaacaatggcagctactcaggaagatgtgaagcttttgggtactgtgggaagcccacttgtgtgcaaggtccagattgcccttaagttgaacggagttgaatacaaatttttgg

SEQ ID NO: 60798 - DNA, 132 bp, Glycine max
aacaccaaaaaagatgctttagtcttcagattcccacccatggaaccatggcctccgtgtatagctctactgactgcggattcagcctgaatacttaactccgcacatacgtactctccagacctctacttc

SEQ ID NO: 60799 - DNA, 112 bp, Glycine max
ggacactatttttctctaataggactacgaggttattttagatatacactgttactctgccttcatctacctgctctattcatgtgttaaggccttacactagagacgatgc

SEQ ID NO: 60800 - DNA, 124 bp, Glycine max
gatgccaatgacagaatagaagccaagtgagagtgagaaagactacaaatcattgagcagaatgtcagggatcattcagaggattggggagacccttcatgtgggagggcgtaggaaggaggat

SEQ ID NO: 60801 - DNA, 293 bp, Glycine max
ggtcccaagttcttagaccatccggagaatgtcacaaaaaaagctacggaagagatctaatcctaaaatcctacaggggcgacctcagctccatgaccacataaccatgtccagaaacatgcgacatgttccttctgcagtacccagcttcctcgatggctcagaagcacaagcgatacacgtcgtaggtgatgccacaggctggattatcgctcccggcggcgccgctctatacaccacctacgcttccaatacaatattcaccgtaggcgacactctcgtgtctcacatca

SEQ ID NO: 60802 - DNA, 177 bp, Glycine max
tgctaaaacgcaaactcaagggtcaagcattctccttacctagtaagcaacttgctcatattttatgctttgttatacttcctttgatctgtgtactatgtgatgctactgaatgtacttcctggttatgtattcatctaagtattctggttttattgtggctggcttataccttct

SEQ ID NO: 60803 - DNA, 229 bp, Glycine max
ggttctagtgtgtgattgtttgttgttgtaactcgttcatcttcttttgttgttctgtgtttgtgtttgttttttctcacacctgaaaatatcatgctgcggtagtaactgtggttgcagaagctcctgcaagtgcggcaacagctgtagatgctgcaagatgtacccagacttgagctacactgagtcaaccagcaccgagaccttggtcaagggagtggcaactgtt

SEQ ID NO: 60804 - DNA, 320 bp, Glycine max
gagattgaaggggtagtatttttgcttttgcatgcatcaatcagaaacgagggattcgatcgagtagctaactaaaacaagctttttgattgcgtttacacgtgtctgttaaaggtggcaaatcctaaagagaagaagggatacgaggttgacaatatattactccatgaagggatgatgaacaaccctgcattattgtcaaggctgtttccgggtatcactagggagagggagatgtctgccatggtctcagccttgacccacgttgtctccggataggtccatacggtgagtcatcttcagtccttcatcatcaagct

SEQ ID NO: 60805 - DNA, 195 bp, Glycine max
gatcacaacagtgtcacagaggaaacgtacttttttttttacacaaattatcatatttgagtgtgatcgatggcagacccagacgcttatccggcgcatccgtagccctccacctccgtgccgatgccggcggtgcccagtgccgtgatcggcgtccacttctgtgcgccctagccgctggatctggccgtggtg

SEQ ID NO: 60806 - DNA, 199 bp, Glycine max
cgggggagttcagtgtggcatagaggatcaatccactatgctataggataattatctcactttagtgttatcaatcgcggagacacacagttaccccgcgcagccgtaccagtaccacttagtaccgacgcgagcggtacccactaccatcattcgtccttagcaccctgcgtgttagccgcagaatcagtcgccggtg

SEQ ID NO: 60807 - DNA, 156 bp, Glycine max
ggaatctgtaaggcagaaagtagggttaaacaatttaaaagtcaaggagttgccattggtatgccatgagaaggccgacagggaggatcaaccacttggggttggtggggcagtgcgactctgtctggggcgccgcctgacacggaagccttaccc

SEQ ID NO: 60808 - DNA, 80 bp, Glycine max
tacagctgtcagactacgacatatgggtccggctgcgaaaagatcacagaacggtactgctgctagactactactgattg

SEQ ID NO: 60809 - DNA, 115 bp, Glycine max
attcccgggctgacccacgcgtcaacaccagacgacagaacgggtacgaggacacgtgatgacggcatgcctcgcaaatttgagttatcaggaactccctctgctccgacaggtg

SEQ ID NO: 60810 - DNA, 277 bp, Glycine max
gattgtccactccaattcaaaccttctctgcaatcacagaggactacataacctatctaaagccatggggaactgcatacttctacaacattacgtcattcgggtcattaacactaatcgcaacatcctagaatacagcgcacacaatcatatcgatcaagtccttatcaactttccgggccacacctcaaccctcaccttaccagtcatacctctagctatgcctttttcatatcacatatcggccagttagtctaccgcgtgcctacgcgtgtac

SEQ ID NO: 60811 - DNA, 261 bp, Glycine max
ggcagacaacaccaagtctcaccttctcacactcatcatcatacaccccaacccttttccacataggcgtatgcacatggggtgtcatattgaccaagatggtgggtgacccctgtggcacatgctactctttagcgagcactagttacagatgcagaacatgtcatcgaaaaggcaccagacctccatacgcatgtcgacaacattgaggcaaattgtggcttatgcattacagatatcattatgatcctgtatgatgga

SEQ ID NO: 60812 - DNA, 350 bp, Glycine max
gaaaggaggtgagtagtgaatagggtttttgattgattgagaattgaaattgatggatcgcagtgtgtcgcgctcacgctctccttcccgcagaagaagatactctccatccaccgtttctcatcatcgccactccagaacttcccacaggcgccgccgaaggcacagaacctcttcctccccctctctttcacgcagccccactcccaagcccaagaaagatcacaagagaagcaagcgtcaccacgaggaagagttgaaactattggaagaagagactgcaagaagactggaagaagcaattcgaaaaaatgttgaggaaaagcttaacacagaggaagtcaagttag

SEQ ID NO: 60813 - DNA, 352 bp, Glycine max
cgacaagaaggggatctacactcagaaccacattacactggtcaaagtgctacagataactaaccattcacaccacaactccacactacttagcacaattcacttatgctgggattggcagctttgaaatcaactagaacaatcaacagtcgattccgtgtctcacaggtggacgaggaggatgttgaccttcaactacgacagctttgagtcaaaagaatactcacgaatcgacctccttttgagtcagatgaagagtacgtggctctttgcctcagtcagtcttacacataaccgtaacgataacaacacaccaataccgtcgtcctcacagtcacactgataagcctca

SEQ ID NO: 60814 - DNA, 84 bp, Glycine max
gaagacgacataagggggtatttgtcactgtgttcaaacgacatcgagcattttcacccacagaaataggggttcggcattgaa

SEQ ID NO: 60815 - DNA, 228 bp, Glycine max
  unsure (1)..(228): unsure at all n locations
ggaggaagcanaccactgcatgctcatccattcattgccggcccacaccagacagagcaagcatagaaagaaatagcacacagagagagagagatagtttatagagagaactgactgaaggagaaagggtttgtctgtctgtgtgaaagagagagagaggatgcatactgagtgccagcccgaccagttagttggtcatacttcggtgaggcagcccgtcctttacca

SEQ ID NO: 60816 - DNA, 412 bp, Glycine max
cgacctacacgtcagtgcactcctacgtgacgacgcaacgtggcgcggacacggatcattctcggtaggcattataccaggtgcaaccctatacacgaactaatcgcatcctcgatgttctgtgatccatggagttaagtggtccacatgagtgttgctccatgtagactcttttgagaaacatgtgggagctagaggtgattgttctgataatcatgtgagctgtgcagagatggacttcacttggagaatgcacttatgatcctgattatactattggatcctcagacattccaggctattctagctaaagctgcatagcgtgttacaaactttactgactactttcctatatagtacatgccactctcttcctcgggtttcacgtttcaatctcattcttgattttttt

SEQ ID NO: 60817 - DNA, 176 bp, Glycine max
gactttcttttttcacctaattacttatcatacgtaatttgtggtactacgagtacattaagagtaattgcttgctccaaccccttcaatcccctaagctttcaacggccgctctagacgatccaagcttacatacacgtgcatgcgatctcataccgcttccagactctcacctc

SEQ ID NO: 60818 - DNA, 66 bp, Glycine max
cggcgtcacgacatgtctagatccgctcaagtagttacatcagcgctgttggtgacgggaaaagtg

SEQ ID NO: 60819 - DNA, 95 bp, Glycine max
ggctgtgagtgagacagcgatagatagagagcgcggcataacggaggggtatctttcttctctcactgtgtgtgggcttgatcggtaatcagaac

SEQ ID NO: 60820 - DNA, 364 bp, Glycine max
gatgcaagtgtgacctaactacacacatgaaatttttttggtttcttcaagtcctgttctgcgtggccatggctctcagcaatcactccgttgctcctagagcaccagctcctcctacaagccgagacccaatccatccacagctacgtaaagtctccgattcatggccatgaagattttcttgattagcttatatatataaagtttggttcttcaaatcataccgatatatgtattatcacttttcttcaaaacctctttaatttctgcttgggatcaccagatgataagcatagtcctagctagctactccaatgtttttggctagatgtgtttaatgaatactttgatcattcttgttacg

SEQ ID NO: 60821 - DNA, 119 bp, Glycine max
accacgcgtcaggccagatgtcaatagaacggggagaggaccaccagcagcgtcttggtttgtgagataaactgcggcagagatagaaaatagttttggggtcacgaatctgcccgaag

SEQ ID NO: 60822 - DNA, 282 bp, Glycine max
gcaatctagagatacataagattcaggaggcaacaacatcaaaaacacagggtggtcaatgtgtatggtccaaccaaaggatcccccaacagggtcccggtatgtctgattgaaaaggaaactcaatgtcaaatagtgcatcttgatctcttcagtgcatagattaatgaacctgagttccaaaagcagcagtcatttagataccatcccgttagacattatcgtaactacactcgcaatgactctcgtggttaaatcacatacttcactgagaagtatacc

SEQ ID NO: 60823 - DNA, 410 bp, Glycine max
tccggctcgaccccgcgtcaggtactggcgaaaaaaacaacaaaaggaaaaaaaaaatttaagaaccggtttgaacccattgaaaatttacaaatccaattgaattcaataaaaaaacaaatcctggaattaaaaaccccggcaaaggcagaaacaccaccttttgaaaaaaactcggatgcaactccttcagtttccgctccaactcaaggtgccaagctttcaaagccagaaacggatgatctgccaaactcaccttcagttaagacagaccagatattgtatcatgacgctgaattatcaaaactggactcagattttggaaatgttactcaggattattcaactgaggaaattggtgattgggaatttgatgagcttgaaagagaattgagcaagtagttacgttg

SEQ ID NO: 60824 - DNA, 357 bp, Glycine max
caatgggaacacgcaagtttaaccaatagagggctgcatcacaaacagacagatgcaatagcacaacagagatctgacacatgttgtcaagaaacacctctttggcttttccgtgcaaatttcacccacagtgtggccagttcatttgcctcagatcctgatccaatcctatacctcagcatactaaacacaatatttggtgccagcaaaacagcacataacatggactacattcgctcatgcacgaactcctccgacgtcatcactgacgactttgtcgtctcacgacgcatacaatcctcatagaacttctcacacacacggctaactgtgggcccagcaaaaccatacaacttt

SEQ ID NO: 60825 - DNA, 358 bp, Glycine max
agtcgtcagacgacaacacaacggggtgtgatcgcccacactggcttctacgacctcaggatctacggtgtcagagcaaacacgcatattaaaggcccagttcctaaaggatgtccaaacgtatcacacgcacactgctctcaagtttggttcaaccctacattttctccaccagagacttccccagtacaaggtatgacagttgaaactccgtgctgagcatagggatcctcaggatctaacaccacatattgataagtacataaacgatgtttctatattgaaaacgaagaaaggtactgcagaggaacttattgctgattttgaagcatcagagtgcaacaatgcaacatcacgc

SEQ ID NO: 60826 - DNA, 397 bp, Glycine max
agaagggggttctagtgtgtgattgtttgttgttgtaactcgttcttcttcttttgttgttctgtgtttgtgtttgttttttctctcacctgaaaatgtcttgctgcggtggtaactgtggttgcggaagctcctgcaagtgcggcaacggctgcggaggctgcaagatgtacccagacttgagctacactgagtcaaccaccaccgagaccttggtcatgggagtggcacctgttaaggctcaatttgagggtgctgaaatgggtgtgcccgctgagaacgatggctgcaaatgtggaccaaactgctcctgcaacccctgcacttgcaagtgaggtgttgggagagcaagcttcaagcagagatagcccttaattaggaataatgattaactaat

SEQ ID NO: 60827 - DNA, 330 bp, Glycine max
agaatggggttctagtgtgtgattgtttgttgttgtaactcgttcttcttcttttgttgttctgtgtttgtgtttgttttttctctcacctgaaaatgtcttgctgcggtggtaactgtggttgcggaagctcctgcaagtgcggcaacggctgcggaggctgcaagatgtacccagacttgagctacactgagtcaaccaccaccgagaccttggtcatgggagtggcacctgttaaggctcaatttgagggtgctgaaatgggtgtgcccgctgagaacgatggctgcaaatgtggaccaaactgctcctgcaacccctgcacttgca

SEQ ID NO: 60828 - DNA, 340 bp, Glycine max
gtaggaggatgcagttgggaaatttggtggagtcgatcaaatcgaaggtgagatctttgaagccgaagaagggaaagaagccatacatgaagatggacaagagtgccagcgtcaaggtagagattcgcagcacaaaagcccgcacgcttatacaaaagaccttgaaggctgctgatatttccaattaatcctaccttcttctcttctcttttcagaaagagtaacaacattccgcctcttgcgtcgttactggttacgctcaagagggttcttttcactacgagatccgccttcttccagacgccctccgccagtcctcgaagccgttgcttgtaccaca

SEQ ID NO: 60829 - DNA, 157 bp, Glycine max
aggcaaggggataacgaaagggggaaattagggtatggtcaaattgtgttacatcttgtcttgcgcagttcctcggtctgtcgtttatgtatacaaacaataccggatttcagcaaggcaacaaatttaataaggcaaggtggaaaagcaagacatt

SEQ ID NO: 60830 - DNA, 350 bp, Glycine max
gacagacaaacaaacaatttaccagctatacttgttccttttgaaggttagaagtgctacaatacaaacaatggcagctactcaggaagatgtgaagcttttgggtattgtgggaagcctatttgtgtgcagggtccagattgcccttaagttgaagggagttgaatacaaatttttggaagaaaatttgggcaacaagagtgatttgcttctcaaatacaaccctgttcacaagaaggttccagtgtttgttcacaatgagaagcccatagcagagtctcttgtgattgttgaatacattgatgagacatggaagaacaaccccatcttaccttctgatccttaccaaa

SEQ ID NO: 60831 - DNA, 381 bp, Glycine max
agccgtcagtacagcagcgagagagaactaaagggggtctcgtggaattctaagcatgctcaaccctagcggcttctgcattctatgttcgtgtcttgcatcaggatgcattcacatgtcaatcacacatatgttgtcaaacttatgggtcttagtggatccagacgaccagtgatccaggttagagtgatgtctgtggatgatctcaaacttcagatcctgacgactgtggcatgacctgtgagacaatgtgacattcacagtttaactgagtctgaaagggaagcaggacaatggcgcctcacggtcgcttgttgatggcatgcctccaacatcgaacaacagccctatcttacttgatgattatggtaattaatccgt

SEQ ID NO: 60832 - DNA, 350 bp, Glycine max
cagttcagttgtgagtaaaggaaagaaagggatcagtagcgtgatgacgatttgttggggcttatgtgatgatttcagttgcattgatcaaaacaaagtttctggtttgtggtcaatctgcgttgacaccgatgcattctcatgagtcgccattgatggattacctctatttggcttatgcaataccaccacatgaattataagactttcacagtcacatcttgcatcatcaattcagcgtacgtccagttacaaagttcattcactgttaattctatgttcgccgtctacagagaaccacagtttcacaaccttactcgcgatcgctagacaactacatcctcagggaa

SEQ ID NO: 60833 - DNA, 99 bp, Glycine max
gacccacgccgtcagcgccacgcgttccgtacaggcgatgacgaggacaaacacagggggttacccaagttatggaatccaagccacaaacactttgct

SEQ ID NO: 60834 - DNA, 294 bp, Glycine max
  unsure (1)..(294): unsure at all n locations
caagccttcattaaggcgccaaaagaacaacaaaagggaaaaaccaacaaaacatttaacaagccaaaactgttcccttttaaaggtaaaaattcctgcaatacaaacaatggcagctactcaggaagatgtgaagcttttgggtattgtgggaagcccatttgtgtgcanggtccagattgcccttaagttgaagggagttgaatacaaatttttggaagaaaatttgggcaacaagagtgatttgcttctcaaatacaaccctgttcacaaaaacgttccagtgtttgttca

SEQ ID NO: 60835 - DNA, 68 bp, Glycine max
gaaagaaaaaaaaacaactcccccctttcttcctcttcactccccaaatagacaagattgtccattcc

SEQ ID NO: 60836 - DNA, 326 bp, Glycine max
ggaataaaggggaccgtcaaaggatggatgaaacgtaacctcgtcactttaggatgcagttgagcgtctgctactagctaccacggacagtcgcactgcatctgataattctcacatccacgatcacatgttgctgagtttgatacagagcatattgcatatcaccgtatgaatgccaatctccctttattactgtggaaactatgggtgatgacatcacactaacatcctctaaatagatccctataaatagactgagagttcaatacatctgtacgttgatcaacacagtaaccgcgttcttgaacatgttcacacatttacca

SEQ ID NO: 60837 - DNA, 277 bp, Glycine max
aggggagcagaatgagagcaatttatgtcgggaagagattgtggacatattggaagacgttcaggcccgaactgaaatatccatgtgtattgtaggtgtaaaacagtgagtataatacttaattcagaatgaactgaaattaatttttgttaccacaatcatcactacacatccttgacctccgaccaagatttggcatttcaatgcaaacactatagcggatcaaatcagcgtttgtggcaacaagttccctttggtgcctaaagacttgtttttt

SEQ ID NO: 60838 - DNA, 351 bp, Glycine max
aggcgtcaggacacgagtcaacggaggggagtctacggtgtggagtagactagagttgggggactcaaaattcaccacaattggcggcacttggtgagcccaaagcacatcatgggttcactatcaggggatactagagatttcagatatgccaataccttcaaatggattcagaagctcctcattcagaatgacagtcacacgcacatttagactctctcgaacacactaatcgcacttagcaactgaacccgtttagcaaatgatagcgacctcagcgtatcctctatgagcaataactacggcacacttcattcctcgagaaaaaatagtgcacactgtggctcaaca

SEQ ID NO: 60839 - DNA, 245 bp, Glycine max
tcagttgcgatgcagacaacacaacggtagggtgaggctcgatgacgtgatgtcatggatgccataccactacccattggtagtgcttctactcgcaaagtgttaggagtggatggctgcatttctcgtactcatttcaccgtgttgcaatgattttccggttcccaggttaaatatttaccatatcgagtgctgtacatcttttgcttccaagtttcccttcaatgtccatctcgttagttgcg

SEQ ID NO: 60840 - DNA, 276 bp, Glycine max
actcatctgtttaccctgaaaggatgcaaattatttgcaatagtgttacaacacctctcaagtcgaaaaggtctgcaagaacagaattatcgtctggggattgtttggtggaaggtaaggatcgctaccaaagtgttgcttcttgttcaatattcaattcaaatgttggacagctatcaaatacatatgtccccttttatcgtaaatctttgatcatgaagttcccaagaatttcaacctaccatccaaagaacagttagtaaagaagtttagtgt

SEQ ID NO: 60841 - DNA, 382 bp, Glycine max
  unsure (1)..(382): unsure at all n locations
ggttctagtgtgtgattgtttgttgttgtaactcgttcttcttcttttgttgttctgtgtttgtgtttgttttttctctcacctgaaaatgtcttgctgcggtggtaactgtggttgcggaagctcctgcaagtgcggcaacggctgcggaggctgcaagatgtacccagacttgggctacactgagtcaaccaccaccgagaccttggtcatgggagtggcacctgttaaggctcaatttgagggtgctgaaatgggtgtgcccgctgagaacgatggctgcaaatgtggaccaaactgctcctgcagcccctgcacttgcaagtgaagtgttgggagagcaagcttcaagcagagatagtccttaattangaataatgat

SEQ ID NO: 60842 - DNA, 384 bp, Glycine max
gcactattttgagtggagatgttatcataagtcatctggcagcatactcaaagcctatatatgttgtttttctgacagatgtatatggggtatatgatcgcccaccaacagaacctaatgcaatactcttaaaggagattgccgttgctgaagatggaagctggtcagttgtaaaaccgaagttgcagaactcaattgaactaactgttgctgctcatgatacaactggtgggatgaaaacaaagatagcagaagctgcaatgatagccaaacttggaattgatgtctacattgtaaaggcagcaacaagccactcattaagggccttaaatggagatctgagaagcagcatccctgacgactggctcgggacggttgttcggt

SEQ ID NO: 60843 - DNA, 76 bp, Glycine max
cggggagcttacgaggtatgtgtctcatgacatttctcgaaagtcttgcattacgacgcgtgcgtctgctcaccct

SEQ ID NO: 60844 - DNA, 370 bp, Glycine max
  unsure (1)..(370): unsure at all n locations
gacagacaggattaatagaaagcggctcattagacagaagtttcaatccgatgaattattttgtttggaatgaaacatctatatactaaattatagctaattatctagaagtattacaatagccgagttgagtttatcatgtggtgggctttccgatccctttccttttgtgttttacttttgctgggccatttaacatgttatttcttggtaacactaccagccaagtttgaatcttaaggcaaggcaatcctccatcaccgcanaaacaaaatcattttagtttttaaatattacaatttaattagatatttcaagaatatttcttatctctcattttaaattttaatatgttcttgaaattgaacgt

SEQ ID NO: 60845 - DNA, 193 bp, Glycine max
ggcagttcaattccaatatattccattctctctgtgtatttccctacctctcccttcaagatgcagatcttcgtcaagaccctcaccggcaagaccatcacccttgaggtggaaagctctgacaccatcgacaaagtcaaggccaagatccatgacaaggaacgaatccccccggaccagcaaagtcccattt

SEQ ID NO: 60846 - DNA, 328 bp, Glycine max
gacagacaaacaaacaatttaccagctatacttgttccttttgaaggttagaagtgctacaatacaaacaatggcagctactcaggaagatgtgaagcttttgggtattgtgggaagcccatttgtgtgcagggtccagattgcccttaagttgaagggagttgaatacaaatttttggaagaaaatttgggcaacaagagtgatttgcttctcaaatacaaccctgttcacaagaaggttccagtgtttgttcacaatgagaagcccatagcagagtctcttgtgattgttgaatacattgatgagacatggaagaacaaccccatc

SEQ ID NO: 60847 - DNA, 272 bp, Glycine max
ggagcaaagcagtgtccatatctgacaatgatgaacgtttcaaggctgttgaacgtgacagagatcgcatggatatgtttgacagcatcatggaggaacttcgaaacaaggaacgagcaaaggtacatgacgaaagaaagcgacatataatggaatacacaaagtttttggaatcttgtgactttataaaggctagtacacagtggcgacttcgctcaagatcgcttagacgctgatgagagatgttctcgtcttgaacaaattgatcgctt

SEQ ID NO: 60848 - DNA, 223 bp, Glycine max
tcagtggtgctgctacaagaagacaaaagggagttcaggatgtaattacaccatagaagggggttcaactgtgtgattgtttgttgttgtaaatcgtgcttcatcttttgtagttctgtgtatgagtgtgtattttctcatacatgaaaatgtcgtgctgcggtgcttactgtagttgaggaagctcctgcacttactgcatccgttgcaggggctgcaagat

SEQ ID NO: 60849 - DNA, 251 bp, Glycine max
gaggacaaaaaccatgaaaggaattgatttgttctgttcttcctctggttccacagcagtaacttctagcatgcaccatcgttctacgttacaacgaagcaccagaagcttcgaccatgatcgaaggaaaagccaacttcatgtcccttgttcatcccaattgcccattaatcctaagccttacttcgagaagcacagaaagagttcagctgataagcaaaactgggacatgcgtagaaaaagttctgctg

SEQ ID NO: 60850 - DNA, 393 bp, Glycine max
  unsure (1)..(393): unsure at all n locations
nagggacagacaaacaaacaatttaccagctatacttgttccttttgaaagttagaagtgctacaatacaaacaatggcagctactcaggaagatgtgaagcttttgggtattgtgggaagcccatttgtgtgcaaggtccagattgcccttaagttgaagggagttgaatacaaatttttggaagaaaatttgggcaacaagagtgatttgcttctcaaatacaaccctgttcacaagaaggttccagtgtttgttcacaatgagcagcccatagcagagtctcttgtgattgttgaatacattgatgagacatggaagaacaaccccatcttaccttctgatccttaccaaagagccttggctcgtttctggtccaaattcattgatgata

SEQ ID NO: 60851 - DNA, 234 bp, Glycine max
  unsure (1)..(234): unsure at all n locations
agggggagtccgcaacaattcaagtttcaaacaaccctaaccaatttaagggttccggtccctaacccaaccttggccttaccaaaccctaaatttgggaataagtccgaacaatctggttggtataacctttggtcctagagagtcaagttttatgtctggattagacgatcaaattcctactgccttcgattcntttgctgatgcaaatgctgatgactcgggtgctgggtc

SEQ ID NO: 60852 - DNA, 295 bp, Glycine max
tatggctgagcaagccaagcagaaacgtgaagggggggtggatgtgtcatctggttctcaaccagctaaagatgtgaaccgcagatctttatcaacatctggaagaagtacaaacgataatcatgaaggggagaaaaacagttcatctacttttatagcaagttcagtggctagaaaacttggcgggagtcatgccatggcatctcaaactatagtatctcgatacatctctgtaaacgatgtgattgcagtcctgcagaaggaacccacatgtctagattctcactcattcatc

SEQ ID NO: 60853 - DNA, 363 bp, Glycine max
gtagcacgaatcgaaggggacaaaatacaactttaggaatagtatatttgtaagtagatgtagactgtagtggcccatataagaaggatcgagaatagaaaacgtgtttcacaatctgaatagaaatcaatgcgatgacgtatagtgattaggtgaattgcacatgtcgttgatatgaaagaaatttccgcgctggaaatgaattcacctcactaagaatgcaatgattaagttgttatatttattataacttattataatatttataagatttaatgtgactttttatttttgtatgttttacggttattttgtatattaaaatttaaaatttcactataatcctttaagtatctaaaatat

SEQ ID NO: 60854 - DNA, 212 bp, Glycine max
  unsure (1)..(212): unsure at all n locations
ggaacaaaacaagtgtttccaatagattatcctaagtccttgggaatagtgctgcaatggcttcaaatcaaggagaggttgaccctttgggagccactggaagcccatttgtgtgcaaggttcatattgccctcaagttgaanggagttcaatacgaatatgtcgaagaaaatttgaggaacaagagtgaactgcttctcaaatccaaccca

SEQ ID NO: 60855 - DNA, 85 bp, Glycine max
ttaggtacagctgcgaaacagacaacgaacggtatcgctgctataccacgacataccggtaccgctgctaaaacactacaaaatg

SEQ ID NO: 60856 - DNA, 225 bp, Glycine max
gaaggatgtcaatgtcaggaacaacatcgtagattctgtggaacaagcagtgtattcagtaacttgatactgccccagtcgagatgaatcccacatgtaatgtttagagatgaattattcacattgaggtgtagggccggttcgtgatgattgctttcgctgtttgcagaatcttgtgtatagtacgccagccgattagaatgtgccttagattgctgtgcgagt

SEQ ID NO: 60857 - DNA, 369 bp, Glycine max
  unsure (1)..(369): unsure at all n locations
accaaatccaactctaacgtttcaacctgtttttgtggacctgggctttggtaggaaatccactaaagataagcaatcacataaaggcataagcaagggcttgtgcttggagattacagggcgagtgcagcatgatagaaatgaccagaagtatgttatgatggaaaaccaattggcaacagcttcaaatgaaaatgtttggcaagtatcttcaggaaatggaatgcacatcatggaagatgatggtcaatgtttactgaactatgataagtaaagtgccttatccagcttttagcgattactgttacattcttcatttgctttctcncattttctttttgatttgcgcgtctaagccatgaaattgat

SEQ ID NO: 60858 - DNA, 382 bp, Glycine max
  unsure (1)..(382): unsure at all n locations
ggaacaaaacaagtgtttcgaatagattatcctaagtctttgggaatagtgctgcaatggcttcaagtcaggaggaggtgacccttttgggagctactggaagcccatttgtgtgcagggttcatattgccctcaagttgaagggagttcaatacaaatatgtcgaagaaaatttgaggaacaagagtgaactgcttctcaaatccaacccagttcacaagaaggttccagtgtttattcacaatgagaagcccatagcagagtctcttgtgattgttgaatacattgatgagacatggaagaacaaccccatcttgccttctgatccttaccanagagccttggctcgtttctgggtcaaatttcattacgataaggtttt

SEQ ID NO: 60859 - DNA, 377 bp, Glycine max
ggttaaaagaaattaatgaagaaagaaaagaatccccactctagctccacttacacagactgtataggttgccacatgtgatcttctgtttctcttgcttgttccaggaacgttgggttaactttccatgcatgccagttgttttctccaaatttgttgcttctcttacatttcatgatgaggtgaaaacttatgataattgttgggtccaattgtccatgtttactattaggacaaaatttagatacattatttatttatttatttttggtgaatttcaccttaaaaagtgatgattcaagagctaggcttatcatgctatatggaccaagctgtaatccctccactgtcaagagccactggtggtcgctgctatg

SEQ ID NO: 60860 - DNA, 351 bp, Glycine max
  unsure (1)..(351): unsure at all n locations
gacgatgatccaaagcaacaaaaacttcaaaccgtagtgaccaacaagaaggtttcatatcttgagaccttgggagtcatgagaagccccacatcgcgtcattaaaagtacattagcctcacagaggtgtttgttggattcttgatcaattctttccttttgtacataagaatgtgcatacaaaatcatcggctttgaagcattgtcagagatgtgttttatccatataaggaggatttgtagtccggtaggcacccagatgtgatttttttgacaatacctaccacaagtatcaagtctgtccttcnccgtgaccttttaactcacttttcctttctgacagtgttgatg

SEQ ID NO: 60861 - DNA, 139 bp, Glycine max
gaagaagaagaaggttggttgattggtcccattgattccgaagagaaaagaaaagatgtttgagccacaacagctatacacttgcgcgaagaccgaggaattcgacctcgaatcaggagaaaccgtctacccagggctg

SEQ ID NO: 60862 - DNA, 394 bp, Glycine max
gggtcaaagaacacatctccattcgatgaacactacataattatgtgggcagtttctgtggccttatcactttatgcaatgatgttaattgctgagttcacagtggagcttcacaaacacagtttcctttcgatcatcaaacggttcactgtgctaatgggagcccttgtcgctgttctgctcactataatcattcttcccctgtttggatatttcaagttgcttctttggaccatttgtttcgtgaaggcaacatttgtgagcttcgaagaaatttgtaattgtttttggaaaggattgtgtcaaaccattgacatggtaagcagttactttggcagggaacatgctagtttgccagtataatgtataattagtactcgaagcaacatgagtg

SEQ ID NO: 60863 - DNA, 315 bp, Glycine max
ggagtgtgtgagagagagagcgagcagtttcagacacagagagaggggtttgggattggagggattgacgctgcgtctcttcctcttctctttcgatccatccctcattcctaatcctccaatccaaccacctcagcctcacgctcacatatacacatatctgaacgcgtatcgtccctcctatagcttcaaagcgcatcctcaaggagctcaaggacttgcagaaagacccaccaacttcttgcaccgctggtcaattacctgaggacatgttccattggcaagcaacattaatggtcctggctgatagtcctt

SEQ ID NO: 60864 - DNA, 187 bp, Glycine max
gaccacgcgtcaactgcgaaaagacgacaaaaagggaaaatttttggtaatccacatttttttcttctgttcctcaatcagacaatcacatcagaagcgtttaatttccttatcacaaaaatgggttgctgctacatgaagctgtgtgtgctcacaacaatgattctggtgttgagtttaaagaaaa

SEQ ID NO: 60865 - DNA, 250 bp, Glycine max
gactcaaacaatgattagtacagcataataaaaacatcgatcagtatcaatatcagcgcacaacatatccacatccagagtttgagaattattctgatttttgagaattgaagttcatagaactaatggcttttagagggtttgcctctgtctagttgcggtcatagtggccactatgtggagtcaaaatgcttgccaatcgggttgcaccaatacactaacaagcttaagcccttgtctgaactacata

SEQ ID NO: 60866 - DNA, 338 bp, Glycine max
agccaaaagacgacaaaaaggggggcaaaaatccgccccagcaaaaacaacaagttgaatttgtgcaaaaatggaaacctttcaagttcaaaccgaacaaaggcgtgtccgcaatggcacatttggaatttgacaaggcgttgttttaactgaagtcctccgattacgatctgtatgccaatcactccattggttaacacgcctcccaagaaaattaagcgtcccttgggttctttaaggaacctccatttccctggggttcggtctctatttctgcatcagctttccttgctgtctcttatatttatgcaagacgagacaagctttttagaaacaaa

SEQ ID NO: 60867 - DNA, 404 bp, Glycine max
gacgatcaaacaacaaaaaacactgcacctcttcttctgggtacgccactttttttttttttttattcttctttttcttcaacccctctattcgcaaaggaatcgattctgttcagttttcttcgtttttagtttaaattcacagtcttttgaggaaaaaaattaaagggtaaccgctcgtttaatccaccaagctcaatttccatccctccacaaaaaaaaaaaaaaatcaacaaaatcagcttttttattattattattatgcataagatttctatggaggctttgacttatatcgtgggcatcgaatcgggttattgattgatgaggtttgatgggtgtgatcagatttggtgaagaagaagaagaagaagaagaagaagaaagtgtgacttgatgattat

SEQ ID NO: 60868 - DNA, 280 bp, Glycine max
agggaatagagttgggaaaaataaaaagaatccatgagatattaatcaacactacacatatagtataaatacaacatctatgtagccacttaataatacactttccctcaatttttgtgccccgaatatgcctattatttccagctatttcaatggcttcgtgattcacatatgttcagcaacagtagactcttcagcatactcacacgagatagcattcagatgtatcttagtcaccaatcacaatatgactgtcactgcaaagatagtgatgattata

SEQ ID NO: 60869 - DNA, 136 bp, Glycine max
aaaaattatcgtgtcaactcgcgttcacacattatccatgaatcctgtctcgcctactaccaggatactactgtattgctcatataattcacgatgtattgcacaacacgtgttagggataactcgaatcactcat

SEQ ID NO: 60870 - DNA, 433 bp, Glycine max
gaattccaggccgacccagcgcgtcaggcgagacgacgatagagcggggtgtgcttgtgcttaagagctagaacactgctgagctcggaggactaccatgcccacatatcaaaagctcataggacagagtgttctcactgatgttcctcgctactccaatggtcacctagccttcaacaaccaacacagccatcacaagatcctttctaatgcaagggttgggtatgatgaatccactcctgctgagacagatggtggtgaagtcgtggatgttgaaagggatcagtgcaccaacaagaagataaaggtcgctttgaattgcacaagtggaagacctattggccttaacaagcttatagccacaagcctagtttgctattaaaaaaacctatctaataacaacatcataatcagcaacatgaatgtgttaaaa

SEQ ID NO: 60871 - DNA, 318 bp, Glycine max
ggaactagttccaaagatattgggaacgaaactgagaaaggtaaagatggtgtttaggtagagactacaaaaatggcgtcgaaggcttcttcctctgcttctcaaacccaaacactctcttcaatttccgaccaaaaggagtttcctcaacatgtttctatgacccgcacttggcttaacaaattgggcatcgacaaacccattcctcagagttgcgaaacccgcggcttctactcccacttctttggaagcttcgtcaaactcaacgatatcaagaggggacgaatctcttgcactattgctgtcaaaccccaaatc

SEQ ID NO: 60872 - DNA, 373 bp, Glycine max
gaacttcaacttgaagtagatagaaagaggctatggctggtcttcaaagatctgcagtgtccttcaggaggcagggttcatcaggcttcgtttgggacgataggttcttatcagaggaattgaacaaagccaaagaagatcagaacaacaacaacgatggcggccccgagattaaagagcttcatcaagttcaaacaacgccgccaccggagagaacccgctccaacggcggagcacggggttaccgcaccggaaaagtttcgccggcaattgagccaccgtctcccaggctctctgcatgcggcttctgcgccgcctttgggaaagcaggggacagcaagccccaacggactacacccgccaaacatcgacc

SEQ ID NO: 60873 - DNA, 259 bp, Glycine max
aaaagaccaccgaaggggggaaatggaatcagtggactacatcagttcttatgattgtctactctggaggacatacatctatcgttcacctttgttaatcataatggtttaaactcaccgtgttgacactcaactcataagtcactaaatttcgatgctcgccatattaccgttacaggactagcatccttaacaaatttgactgggcttacataactggaattgtatggtgcacgacgaacagactttggaacaaact

SEQ ID NO: 60874 - DNA, 216 bp, Glycine max
gagagacttattgtagtaacttttgcgtagcgttgttagttgacgcgatgtcgatgtggttgcacgagaatctcttctcggagggcctgtctatgccacgttcgcttctgatatggtcgatagtgcgttggcgtacgctatccggtgccgcttgccgttagacggctaactgccccagagtcatgtcgtctcagggatgatggactttggagcaca

SEQ ID NO: 60875 - DNA, 91 bp, Glycine max
tacggctccaaaaaaacacacaaaggttacggctccaaaaaaacaaaccaaggaaaaaaggaacctaaattcctaaaagaaaaaaaggaat

SEQ ID NO: 60876 - DNA, 104 bp, Glycine max
acgcgtcaaatacggaggccaaaaaaacaacaaaaggggtttgtaaaaaaccataaactttccaatgcaaaaactaaattaaataacccggtattaaaacaaca

SEQ ID NO: 60877 - DNA, 202 bp, Glycine max
acagaaaggggaaggaaaattggctagaatccctccgaatcgaacccgtttccggcacgttaaaggaaactgtttaagattcagtactctgttaactgggaagattcttcaacccgtgctgccccgaatttcaccaaccaagtttaaaaggtgttcaattccaagaacccctttgtgtccaaaaatcccaaaagttcgtttt

SEQ ID NO: 60878 - DNA, 296 bp, Glycine max
acgcgtcaatacgggatgccaaaacaacacaaagggggacaacggttccttaacatgggaagcatttgcctcttaagtttagaaatctcattccaatttgctacgcacatcttatcttagacgaattcgagactcaccgacaactgatgagaatttttactccaatccctttcctaacagtgtgttcaacatgtctcacgaggaaatgaccaaccataatctagactaccatcggtttggtattggagcaccaatattctgtgtagtgtccctggttttgtcacatattttaagct

SEQ ID NO: 60879 - DNA, 132 bp, Glycine max
gatttcatttctctctctctcgccgcttagactagtagggcttctcctattggtcgcactcttaaccagcgccgcgctctcctgcgcccccgaaggtgatcctcttatcccacactcctccctttccctttc

SEQ ID NO: 60880 - DNA, 309 bp, Glycine max
tgcggttctagtgtgtgattgtttgttgttgtaactcgttcttcttcatttgttgttctgtgtatgtgtttgttttttctctcagctgaaaatgtcttgctgcggtggtaactgtggttgcggaagctcctgcaagtgcggcaaccgctgcagaggctgcaagatgtacccagacttgagcgacactgagtcaaccatcaccgagaccttggtcatgggaatggcacctgttaacgctcaatttgagggtgctgaaatgggtgtgcccgctgagaacgatggctgcaaatgtggaccaaactgctcctg

SEQ ID NO: 60881 - DNA, 308 bp, Glycine max
ggagtgtgtgagagagagagcgagcagtttcagacacagagagaggggtttgggattggagggattgacgctgcgtctcttcctcttctctttcgatccatcccacattcctaatcctccaatccaaccacctcagcctcacactcacatatacacatatctgaacgcgtatcgtccctcctatggcttcaaagcgcatcctcaaggagctcaaggacttgcagaaagacccaccaacttcttgcagcgctggtccagtagctgaggacatgttccattggcaagcaacaataatgggtcctgctgat

SEQ ID NO: 60882 - DNA, 138 bp, Glycine max
aatgggggttgctgtgttgcacaacacaataagtagccgttgctgcaatgaaaaacaatcaaaaaaccttccctggcaacaaaaaccttcttcccccgtcaatctccagttcccactaacctcaatggacttgccttt

SEQ ID NO: 60883 - DNA, 362 bp, Glycine max
tcccgggctgacacacgcgtcagtgctgctacaagacgacaacagggggaggtgacgtcaatcaacttgttcccgtacaaaaattgtgttgtatggtatgctcatttctgagaaagctgtcgtaatgtctagtggcacttatccatctgcatgacatgtgtggaatgactcttctgccaaacctagttcaggcacttccaaagccccggtctcgaaaccaagccgctctaaaagttcaagccatacttagacgtacgtacgcagtaatagatcatctgaagatgcaacagtattcagttcgatagacttcgttataatacttgttgcacgtggaaataccggaatagtcctaatgatactgt

SEQ ID NO: 60884 - DNA, 353 bp, Glycine max
tcgatcaaaaaaaaaactttttaattcaaaggctttactggtatattttatttgttgacgtaaaaaagacgaaaatcgtgtgataaagttgagtatctaaaagtaaaaactaaaagaaaaataaaaaaatagtgaattgaaacaacttagtaactatatatagagtaatcaaaagagaagtggttagtagtggcgagcgaaaatcgataattaattttggtttttattattttttaaaaaaatcaaaaattgaaaatttcaataagaatttataaaaaacaaaaatggaaaataatacaaaacatggtaaaactttgtaggaataaaaaagggaaaaccactctccaaagaca

SEQ ID NO: 60885 - DNA, 129 bp, Glycine max
acccgttttaatggcccgaagagactgtggagaccctgctgcttgctacactttatttatttctgaagtttggatgcatgtgtgaaatttgagttggaaataatattgagatatttgtggcttttcttc

SEQ ID NO: 60886 - DNA, 365 bp, Glycine max
ggagaacaaaacaggtgtttcgaatagattatcctaagtcgttgggaatactgctgcaatggcttcaggtcaggatgaggtgacccttttgggagctactggaagcccatttgtgtgcagggttcatattgccctcaagttgaagggagttcagtacaaatatgtcgaagaaaatttgaggaacaagagtgaactgcttctcatatccaacccagttcacaagaaggttccagtgtttattcacaatgagaagcccatagcagagtctcttgtgattgttgaatacattgatgagacatggaagaacagccccatcttgccttctgatccttaccaaagagccttggctcgtttctggtccaaat

SEQ ID NO: 60887 - DNA, 153 bp, Glycine max
gaaagcaacgtcgtagaacgcatcaatctcaagtcctcagttccatcccgtgggagcagcctacctctccacatcgacacatgtcctcaacatgatgcatcagcgtacagcactgatccaaccatcagcaccatgggaaacaacgatcgagtt

SEQ ID NO: 60888 - DNA, 254 bp, Glycine max
ggttctagtgtgtgattgtttgttgttgtaactcgtgcttcttcttgtgttgttctgtgtgtgtgtttgttttttctctcacctgaaaatgtctcgctgcggtggtaactgtggttgcggaagctcctgcaggtgcggcaacggctgcagaggctgcaagatgtacccagacttgagctacggtcagtcgacgggaccgatacgttggtcatgggagtgacacctgttaacgctcaattgtagggtgctgaaat

SEQ ID NO: 60889 - DNA, 235 bp, Glycine max
gacgatatgaagatagaaaagtgagatggattgcatctctcgctttgtattggaagatgggaagcgtaaatcggaatgccttctttcgtttgagaagaattttgtgatcagaattagtgagctgaatacaagacaatgtgatagtgggaagcttttcgcaagtgacgactcagccctttcatcaagtacgacatgaagttatcacgaggaggacatcataacgctgggaagaggt

SEQ ID NO: 60890 - DNA, 373 bp, Glycine max
gaatccaaatatttaatcctatcctatcgtagcaaagaaagaaagaaagaaaaccctagcttaccttttcaactttcaagatgcaaatctttgttaagacactcactggtaagacaatcacccttgaggtggagagttcagataccatagataatgtaaagtccaagattcaagacaaggaacggatcccaccagaccagcaacgtctcatttttgctggcaagcagcttgaggatggacgtacacttgctgattacaacattcaaaaggagtccactctacacttggtgctccgtctccgtggtggaatgcaaatctttgttaagaccttgaccggaaagacaatcacccttgaggtcgagagctctgacac

SEQ ID NO: 60891 - DNA, 393 bp, Glycine max
ggggttacaatggggaactcaaagaaacatatccacagcaagcatatgaacggatcgaaaaattaaatgctgggaatagatagagcttaacgtccatatatgcttattgaatggaaagtgatttggaactggaatacagcttccaagaaaatgaaggaaaattttgttgactaagtgctttttgacttgtgtcgtctagcttcaagctttaagtacagtccattgccatggcaaactccacaatgacatggcatagtagtgctactgctatctagctaagattaattagcatacaagtccatggcttccttaaagcatgtctacatctttaccctactcagcttcatcaattttaaggagtgaagaaaaacgtttttggaagttacgcttttg

SEQ ID NO: 60892 - DNA, 311 bp, Glycine max
ggcagttcaattccaatatattccattctctctgtgtatttccctacctctcccttcaagatgcagatcttcgtcaagagcctcaccggcaagaccatcacccttgaggtggaaagctctgacaccatcgacaacgtcaaggccaagatccaggacaaggaaggaatccccccggaccagcaacgtctcattttcgccggaaagcaacttgaggacggccgtacccttgctgactacaacattcagaaggagagtactcttcacctcgtcggccgtctccgtggtggcagtcagatcgtcgttaacacact

SEQ ID NO: 60893 - DNA, 67 bp, Glycine max
tatcctatccagggaatcatatttgcttcggaggatatggacttcaagcacttgagccatcatggac

SEQ ID NO: 60894 - DNA, 367 bp, Glycine max
ggaaccgaacagctacacaaagttcgcgtcggttggagtaacgggttggtgaagccgcgtaacaatgaacaaacactgaaacaccgattatcattacttacaagcgtttttgtctttctttctttctttctccatttcctcatcgatcagatctgaatcaatctcacattcttcaatttaatttcactcgtaattcacttatcgtgatttccgaatctggccgccaaaccctattacctttgtatagatcatctcaactttgctgctcgggagaaataacaaacgaaattagcggaggaatatctccgccattgacgacaattgacaaccggtgagtatatgcgtccctaattggtcctgttacgga

SEQ ID NO: 60895 - DNA, 144 bp, Glycine max
tgtgtgttcctgcgtgtcttctcttctggtctttctgccgcgtttgctcgtgggggctgggggtcgtgcgtctggtggtcgtggccgtgggcctcttggcccggtggcttcttttggtcgtgctttgtggcttgcggctccttt

SEQ ID NO: 60896 - DNA, 299 bp, Glycine max
cgggataccaacggcagaacacaagccaagtgaaagtgagaaaaaataaaaatcaaagagcataatgtcagggatcattcacaagattggggagacccttcatgtgggagggcacaagaaggaggatgaccataagggtgagcaccatgctggagaatacaaaggggagcaccagggtgaacacagtagtgagtacaaaggagagcatcatggtgaacacagagctggagagtaccatggtgagcacaagccagagcacacagaggggttcctagacaaagtcaaggacaagatccatg

SEQ ID NO: 60897 - DNA, 316 bp, Glycine max
aatcatcatatcgtgtataacatatcactacctgttatactatttgattttactgcagcaaagaattcttgtttccttaccattcctctctcctcatgtgccattttttgagatctaaggagtttgattatgctaaacgtaatagtagcactgcataaaactagaagatattaattttgtgtagtgaagcaaaaattgacacaatctgacttaccttgatgccagttggcaaataagagacttactttttcatattttcttcaattcattttatagctggtgaaatttatctgttcatatttcttttaccagtttt

SEQ ID NO: 60898 - DNA, 246 bp, Glycine max
ggggggaaaaagaggaagatcttccggcaagttttcatgtgctaaatggggtcccctgtcaacctgcagggcacaattcttttgatatgggcaactccttgacagcataagatgcaacttcacgctccatgacgttaacttctatccatttaatgcaagcgttgctaagttcctcaattcaaattttcaagtcacgctcagctcgcttaattcgattgagcgcatccgtatttacgataatttcct

SEQ ID NO: 60899 - DNA, 380 bp, Glycine max
gaccattgaaaagcctaatggcaatgcttcactgaagactgaaccaggagaaatccaaaagcaaggcaatggcccaaatgaaaaacaagtgacaaacatagaaaatgaaaccaaagggaatggtattcaatcaaagctttcgagttctgagggaaatggcataagggtcataacaatttcaggggaaaacagaggtgcacacatgcaaataaccaaatcccgaaagaaacaacaacaacccattcatcacaagatgggaaattctgatggtgagaaagtgagaacactatcttcgcctccaatgagaggtgtgtacgggaacagcaatgtgcagtgtgtcaacaactcaatgttgttccacactagtttaaccaaccatg

SEQ ID NO: 60900 - DNA, 304 bp, Glycine max
gacctcaagatacagttgtcaataccttacaaaaggctgaagcacaaagtcgattcatcacttcatttttgagagagactgggatggcttcacctatcaaaatcacactgaagagttcagacggtgaagagatctatgtgcaggacgttgcaggtggggagtctcatacaatcacgcatatgatagacgaaaactgcgcatactagcgcaatgcatctcacgaatgttatgccaaatagtctggattatgttctcgagtattacatcagacacattgacgcgaactgcacttaggacaagccca

SEQ ID NO: 60901 - DNA, 88 bp, Glycine max
cgggattcacacaaacgggacaagatatatatatagaagagccttccatatatagcctctcaaaaaaatggaagagttacaactcctt

SEQ ID NO: 60902 - DNA, 413 bp, Glycine max
acaaaggggggaaattgatcccacaggattggcagaaaaaaacgctgccattctcaacaagggcctcccaaaagctattggaaccacaaccaatggaacccccgcaagttgcagcacgtcagcaacagcatcctcaaccctgaacttcccttctcctttcatcagatgctgtactatggttgctacaaggattacagtcacgactcacccgcttggatacccaagcgggaaagtgctgctttgactaatgtttggcagttgctagagacgaagggtgaagagtttctgggttcggcatataaggatcctattacaagctttgatgatttccagaaattttcagtctcaaaccctgaggtgcaaccgattttacattcatctgggatgttaataagatttgctagcacactttc

SEQ ID NO: 60903 - DNA, 124 bp, Glycine max
ccaacacttcagcgaaggcttcattacggatgcaatagcacgacaaaaggggaaccaccattacctccctgacaatctgcagtctgtgcatccaccattcaggggctaccttaaggatatgctg

SEQ ID NO: 60904 - DNA, 165 bp, Glycine max
tggaagaacgaagctgaagtcatagaagacaagaaggaactggcagtgaccgcagacaagaaggaaattgaactaacacatgagaataacgaagctgaactcatacacgagacgacggaagtgcaactgacggacgacaagaacgaccttgaactaacacaacag

SEQ ID NO: 60905 - DNA, 206 bp, Glycine max
  unsure (1)..(206): unsure at all n locations
gggatcaatcacattatgtcctttgcaatcatctccaatgtatggatgaacaatcaccaaagatcagaggcttcatcacaagcatgtgtcagtantccttccgatcctcggaattctcagcaggagagttgcagtgaagaatcactcactgttacgtacactaatgtcacccaaactttgattaatggtacattgaggtacattgg

SEQ ID NO: 60906 - DNA, 329 bp, Glycine max
gaaacgtagctctgccatgttcagtcagggtcgtcttcactgaatcagcggcttatgctttgcaaattttcatttctctgagaatgctataaggtacaaagattccaattattcgactcagtaactcgctatatctaatcagtatccatatcttacagcgattcgagagttcagaacatgcatgcattcatcgcatctgcaatgggtataatcatgagtacattcacgttcaatgcatggatacccattagggtttacatagctcagatttatctaatccctatcatcatgaagttagctgagactgccttgttacatgcgatgcattc

SEQ ID NO: 60907 - DNA, 351 bp, Glycine max
  unsure (1)..(351): unsure at all n locations
aaaagaccaccaaaagggtacggttccaaaattccacccaaaggttacgcttcccaaacaacaccagaagggtaccgttccaaaaaaaccccacaagggtacggttgcaaaaatacaacaaaagggtacggctccaaaaagacacaaaacggtacggcttcaaaaaaacaactcaagggtacggctcccaaaacacgatcataaggctactgctttctantaagacgacatcacngggtacngcctgcgaagatataccatcagactgggattgtgcccaattcatcctttcttttcattacatacgcacaacccactttactccctctttcacataaagaattttgatat

SEQ ID NO: 60908 - DNA, 392 bp, Glycine max
  unsure (1)..(392): unsure at all n locations
gacaacaaggatgtcaggcatgatcgggatagtcataatgatccgaaaggtgacaccaagacagagaaagatggttataatgtggttagcagccacttgaattggaaagattcaaaagagtaccatagaggaaaaagatattctgattcccctggtgggaattgggacacatggcatatgtcacgtggaaatacacaaggctcagttgaggttgggaaggagagttcagcagcaggagaaagagatcatgttgaagctcatgaagctgtttgtgagaacaaagttgatcctaaaggtgatgatagatctaaagagaaagatagaaagaggaaggatgtgaagcatacggaatggggagatanggaaaaagaaagaagtgatcgtagaaacag

SEQ ID NO: 60909 - DNA, 282 bp, Glycine max
cagggggcctaatagtgtgtccacataactatactaaactaataactaagggagtcactcccacattttgataattaatcattattatatatatatattgttggcttactagttactaccataccatggacagtgattctcagtgtatgcccattttgtacctatatttaataagttgttatagtatatattggtaacctatggctctattaactgagtgtatgataatgcgttaggtcttatggtttgctttgttaatgtttattacatctctatcatcat

SEQ ID NO: 60910 - DNA, 331 bp, Glycine max
ggtcaccaattagcgccttaacatgttcctcgcccttaccactctgtcaacgccgtaatgtctctccgttaccactgccagtccttgttcagtgcttgacaacgatggtgcacactgagaattggctcagcctcagcttcggcagtgattggaacgacacgccatggccttgcatgaagtgttgtgtatcatgctctacgcgtcatcagggtctatcgtgtccgtctaacgattacattttcgtagacccttctgagctccagttgtgtggtgcttgaaaggttctgatcgatggtgtcatcactatgagattcgtactctgaaatgcccc

SEQ ID NO: 60911 - DNA, 353 bp, Glycine max
gactacatcatacttcacatcacgggctacagctgctattcatcacatttgccaaaagtgcatggcagctaaacgactaccaatcctttctctgctattcataactctcaccctccatacgtcttgcatcaacgtacatgcctcagtaaataatccaaacctaacactaagacctacaacatacgtcatcaagtcctcatgcactgccatgcgctaccccgccacttgcgtacatacactctctcgtcactccatcactatgcgacagatcgagcaacaactcgcattcaaggttcacttcgtgatacatgtaaatactctcttatgaacgtcgatcgtgaaaagaatgggct

SEQ ID NO: 60912 - DNA, 150 bp, Glycine max
caaaaaaccaacaaagggggaccccaactaacacctttccagagaagtaatttaatccttcaaacccatttaataattcaaaatgggtattttcccatttgaggaggaaacaacttcccttgtggccccagcaacgctttaccaaactct

SEQ ID NO: 60913 - DNA, 349 bp, Glycine max
  unsure (1)..(349): unsure at all n locations
gatgggggttaataatgcagtcaaggctggatctgttgaggtagcacgaagacacgtatacattgaagagcggagaccaaacagtaacatcccttcacgacgaggaangangggtagaggtangagtagctatcaattatcagaggcacaaagaggacgttttggtccaaggagcttttgcaggggaagtggccaagatggaggtgaatgggagtataacaaacccaaaggaaacggtttctatagacaaagtacccgtcaagagaggggatattcttcaaggtatcaagggccaagaaatggtcagaaccctgcccaatcagcataaagttttaagagaaacaaattt

SEQ ID NO: 60914 - DNA, 123 bp, Glycine max
agatccattagttagattaacgcggtgatcttgcaagtgtggcgggggaagagggaattcccataacaccttttcgtggcctgcaggtgtctcaagatctgagggccttgatgacatttgcga

SEQ ID NO: 60915 - DNA, 340 bp, Glycine max
accacgcgtccgtattcgagcggccgcattatatattgttgatttcacttgttattgctttgatcaggacaatgacagttcagttcagcacctaataacagttacatgacttacaagcatacttgacaattgatcagtatcattatcgaccaaatttagtgagcacatcgtgtatatttgcagaatcagcatagcgggataattgcctatagacagagcagtaccacatagtgtcaaaaagtcactatgataggaatttgagactgtgtaaagtatcaactcatacatacctgataggcgacatttaagacactgatattagatttgacaacacaacaaa

SEQ ID NO: 60916 - DNA, 223 bp, Glycine max
ccgggtcaacccagccttccgacggcccaagagaacaacaaaaggggttctgtggaaaattgggggttttcccaccactttggcttccattggaaccatggtttggttgcaatctaaaccccctgttgaaaagcaaaaaaggttgtccctgttgatggcttcggccttgtttcagggcccttccattggacctctgattgatttggctattgccattgatcct

SEQ ID NO: 60917 - DNA, 411 bp, Glycine max
caaaagaacaacaaaagggagacctgaataataaaaaacccataataattgcctccttttggaaaatttttcccaaaaagcctttggcaatttgcttaaccatattcaggaaagcaattcgtccaagtcagccattcacatctaaaaggtaattaaggaacaaaggacaaaattgcaagcaaattgcacttaaaattctttaaaaataacttgagaagggcttttatagataagtaatcaagcaattagtacacttcagactattgtcaactaactcgtcgtagtcagcatcttgtagatgaattaagaaccaagaacaagagtgcaagcaagttgcacttataaaatgttgtgaaatagctaaaagggacttctactcaaggagaagtaatactaattaattaacattgt

SEQ ID NO: 60918 - DNA, 138 bp, Glycine max
gactcttcggtggaatcatcactgcgtcatcttcaaccaagtaccgcgaccagaactcttcgcggccacgtccggagctcttcaccaacaggttcaacttggttaaggataatgggtcggaaagctggtacccatttt

SEQ ID NO: 60919 - DNA, 312 bp, Glycine max
gcaatttggaggtggctcattcttgctttcatgcaactcaacagtttatttacttagtgagttttgtttaaatttaaaaaatttagttagatgacaatttgcaaaaaggatggtataataacctagcaaggctataggatatagaagttgggcacgacgcaagttttctgcttcagtaactactaccctttactgggttcattgaatctacattttttcccaatctattttctttcataaatgttcaattgacttgtaatttgtaactttcgattgaccgaattacaacattgtagtgaggatatagtattc

SEQ ID NO: 60920 - DNA, 328 bp, Glycine max
gatcgaatgtaagaaaccactaaaagtcctattgaatactcagtaatcgtatttgcacggttttcctcagtatctcatattacacaatggagtacagagtgaaaacttaacattaacacgttactcacatagttcaaatccatgttcccactatgcatgtcaaacacacctccatcatcatcttcttcacatctttcagagactcgcaattctttctcttcacactctcatgggtctctctcagctgtaccactgtctgagcagcagtttctgacaacggtagtggttagcccttgtgctgcctgcaagattctccaccatatgtgtg

SEQ ID NO: 60921 - DNA, 130 bp, Glycine max
aatagaagcaaaattccatccaggctttaaaattgaggttatttgcaaataggtgtccccaaaaaccaccggacttgaaccgtatttttgaaaaattggacttgaagggcaacggattggtaacccttga

SEQ ID NO: 60922 - DNA, 350 bp, Glycine max
gggaccctacaaatcaaagtgaaacatgtggggtggcatggattttggagcctgaaatgagaggaaagttgggtaaacatgaatgcttatgtcatttgatgaagattgatagtgaaagaccaaagacagagcaaggaatgaagatagagacacggatagctttaatttgccttaagctttttaattacttagggtttatcaataagggttttaagctgaatgaaaatatcgaatgatcaatactgaagcacgtgtagttgaataaaacgtaatcttgctctcttgagaaattccaaacagtataccacacgattaatgaacggtagacttagtaacttttttttcatttc

SEQ ID NO: 60923 - DNA, 182 bp, Glycine max
gaccctgatttggagcaatggatgcatgaaccttaggctcaagtgggaacatttctaaaccatttcattttccttacactcttaaagtcacagcgtttagaattgatatcatcatacgcagtatgctgtttcatgcatatgcagataagaactttgatgaggtgtggaagaccacttgtatt

SEQ ID NO: 60924 - DNA, 257 bp, Glycine max
gccaaaagaccacacaaagggcgaaccaaaaagctctgagaatccacaaccaacctctaaaacaaaagtgggttttggggcacatacaacctcccctggtaaaaattacaaggccaacaataaccaattttgccaaggtccttaatttggataataaaaatttcaaggaaattacctttgaaggtttgcccaatttaaatttaaaattgaagaattgggttcaaccaccaaaatgggtgcctttggtggattttttc

SEQ ID NO: 60925 - DNA, 290 bp, Glycine max
agacggggatctcagatggaatttatgcaatcacatattccgattaatagtatcacctccgttgtatttgagaatcccggctatgtatgttcttgctccgagtccactcggtggaagacgaccacactctggatccctaatagatcttccactctaagtccacaatcccaatcccaatcgcaatccaataaccctaaattcatctaacgcagaggtgcactccatgtgttcggttcctcttcccattcctcgttctgaccccagtcctcacttgcgtctctcgtcttcat

SEQ ID NO: 60926 - DNA, 410 bp, Glycine max
caaagaaaaagtaaacaaagcaagaaaaaggcgttgcagatcggagtttcaactgccagaatcgaagccgtggttggtggtggagcagatctgagtttccgatagaagctgtggtcggtgttggtgcagatctgagtttccactctcaatcctttcgtgccggtggcggtgcagatctgagggtcgcttatggcggatttggaagcgccgcgagtcttctccaccgccgacagaacgagatggcaaatcgtaatgcatgtctaacatggttcatttctgtgcgatttggttgctttttcccttctttttgaatgtgcacttggccaatcctaatgcatactattggcgaaagaaactatttgcctttaatttaattatcttaatgaatgggcgttgctgaatgcatctaa

SEQ ID NO: 60927 - DNA, 341 bp, Glycine max
ggttctagtgtgtgattgtttgttgttgtaactcgttcttcttcttttgttgttctgtgtttgtgtttgttttttctctcacctgaaaatgtctcgctgcggtggtaactgtggttgcggaagctcctgcaagtgcggcaacggctgcggaggctgcaagatgtacccagacttgagctacactgagtcaaccaccaccgagaccttggtcatgggagtggcacctgttaaggctcaatttgagggtgctgaaatgggtgtgcccgctgagaacgatggctgcaaatgtggaccaaactgctcctgcaacccctgcacttgcaagtgaggtgttgggagag

SEQ ID NO: 60928 - DNA, 236 bp, Glycine max
gacaatggggttctaatgtgctgattgtatgctgttatttcacgtactgcatctgatggtggtctgtctctgtgtttgctgtttctctcacatgatggtatcgtgctgctgtggtggctgtcagtctgcggtagctctgccggttctgcatctgctgcagatgctgcaacatgtatccatacctgagctgaactgagtcaaccaccaacaataccgtggtcatgggagtggcacct

SEQ ID NO: 60929 - DNA, 386 bp, Glycine max
ggttctagtgtgtgattgtttgttgttgtaactcgttcttcatcttttgttgttctgtgtttgtgtttgttttttctctcacctgaaaatatcttgctgcggtggtaactgtggttgcggaagctcctgcaagtgcggcaacggctgcggaggctgcaagatgtatccagacttgagctacactgagtcaaccaccaccgagaccttggtcatgggagtggcacctgttaaggctcaatttgagggtgctgaaatgggtgtgcccgctgagaacgatggctgcaaatgtggaccaaactgctcctgcaacccctgcacttgcaagtgaagtgttgggagagcaagcttcaagcatagatagcccttaattaggaataatgataaac

SEQ ID NO: 60930 - DNA, 298 bp, Glycine max
aagacgagagaacgggcagaaggagctcctcatgcctgacctgatgatgacaacgaagtggaatcccattgtgtgctgcagtggccatctgggccgttggattgagttcatcggcatggaaagacagtgccgcatgacacgcaccgtcagtggactgctcactgccggaaatgtcctcaccgggatcgcctccgcgtcgcattgccctggatcacggtcaactgaccacctggaaaagggcgacccgccatgaaaattgtgcgatgtacagccccttcatgagttggctacagcgctc

SEQ ID NO: 60931 - DNA, 322 bp, Glycine max
  unsure (1)..(322): unsure at all n locations
ggttctagtgtgtgattgtttgttgttgtaactcgttcttcctcttttgttgttctgtgtttgtgtttgttttttctctcacctgaaaatgtcttgctgcagtggtaactgtggttgcggaagctcctgcaagtgcggcaacggctgcngaagctgcaagatgtacccagacttgagctacactgagtcaaccaccaccgagaccttggtcaatggagtggcacctgttaaggctcaatttgacggtgctgaaatgggtgtgcccgctgagaacgatggctgcaaatgtggaccaaactgctcctgcaatccctgcacttgc

SEQ ID NO: 60932 - DNA, 383 bp, Glycine max
gattcttataaaacataacaaacaacaaagtgcaaaataaggaaaaaagttcacgatgttgacacattgccatcaattgtgcaagccagtttccatcatgattctagttaacttggctctggcttttgtcaatttacttctgaagaaggttcttaatgaaggaatggactacatgtccattataacatatcgacaggcaatttcatttatcttcatggcacctattgcctgcatctatgaaaggaaacacaaacaaatcaagatgtagaatgtcaatagcagagccaccaatggcaatgaataactttgatccaaatgtgtcctctaatcttcccgggatacaagttctctaaataacaaaaaaagaagtaatatgctgttat

SEQ ID NO: 60933 - DNA, 118 bp, Glycine max
gacacaatcagaacatgatccttcatgttcaagtccgtagatacatggaaatgtcatgtggtattctagctatgatgatgattctgcacatggcattgagcggtgttgattcatgctg

SEQ ID NO: 60934 - DNA, 326 bp, Glycine max
ggtgaatcaactgcagaagcacagatttctttacagttatgaagaggaaatgtggcacatattaatgaatcatagggtctcatcagttacatattaaccattcaaacattgcaatttgcaacattaaccattgtgtgtaagcacacctttaggccttagccagttagccatatgctgcctacatttctagctagtatatttttcccaagtttctttgcgtagtcattggtcaaggactttgtaattttcatattttatgtaatggatggttgagttttgaagtatatgaatttgagccctgtaatgcaatatcgactgattttact

SEQ ID NO: 60935 - DNA, 401 bp, Glycine max
gagagaatcaagacatgaagcttcatgttcaagtccgtagatatagggaaatgttaggtggtagtcgaattaggatgaagataaagacgtggtttggagggtgttgattcatttgaatatgatggtggtgtgggcccgtgaagctgcttctctttgttgtaaagcgactcgccgctctcaagctttcatgtgcggtaacaagttgcatcagtgtgccccacagccaccatgcaggtcaaccccaccacacaacagaatacatctctttggttgaggattgcaccaaaggtgaagagctgttgggtgagagacactgctttctctcacgcagaagtgtgagttgctgagacatacagaaaccttcaaaagctagtggttgaattctctcttccttccatata

SEQ ID NO: 60936 - DNA, 167 bp, Glycine max
cggggggatcatccatatcgctgcgctcatgctacaacccgagccacttgctgtgttaacacagcttagcaactgctactaatttggctggcctccaccatggcgcttggcatttatacctcgcctggtggtcttcctggtcatccttgtatcaacgctttcagtcc

SEQ ID NO: 60937 - DNA, 296 bp, Glycine max
gaaggaaacgggaaattcaatttccaagaaaacatcaggtggtatacgtaaaggtgcttctgcatctgggaagaaggttgctaaagctccatagactactgcatcatgaagatggtgaagatatatcaatcaatgcgcctttctcaggaaccactatttggaggaattgtatagaaccccgctctttacgtaattgtgccttcacaaatttagtggttgactttagtatattttccacggaggacatcgatgattacttataatggccctctgttttttgaatttagatgatgtgt

SEQ ID NO: 60938 - DNA, 156 bp, Glycine max
ggagtgatgcaggacgagaagaagatgaacgtgaagaaaggattccttggtgttcaagtgggtttagaagacgacgaagaaggtggctattcccctcaaagattcgtgatcccaatctcttacctttcccaccctctcttcaagcaccttctggac

SEQ ID NO: 60939 - DNA, 191 bp, Glycine max
gatggcaagaatggtcattaagaagaccatttcgcggggtggccaacacttacgtcatggtggaggaaacatctccatcagcagcatcctgcgagaggcccatgtatgacggataggcttcacgctattgaatctcatcctatctgtccgctctctttatatgtcatggttaccatggatggggtagccac

SEQ ID NO: 60940 - DNA, 215 bp, Glycine max
  unsure (1)..(215): unsure at all n locations
ggagcaacagttagttaacactgcaaagtcagatatttcncgttgactaataactaaataattaatcttctacaagctcactaacgcaccatcaaagaccctagatttagtgtataagtataaagtataatataacctcaaccccatgatgtagttgtaagctccacagaatagggcgaacacagtcgtttttagtttagctgtggatctaatca

SEQ ID NO: 60941 - DNA, 347 bp, Glycine max
acgagaggatggtcagctatgtcttgcagtagtaacgtgaacacaataccacttcaacatactatatgcgagtacatgctggcatccttagccagtgctttgctcaaaccaacagatcatccaggaacatgtatcgtgcattaggctactactggttaacaattgccatctatacatgcaatgtgtataagtttagccattaattttccatgatcagcgtacaatttatcgctcaactcatgatataagttcatttcgtatgtttgcatcctcaatcatgatattcatgaccattgacggcatcacttcgattgtagttgagatcaaagtgttcgatcgttgaacac

SEQ ID NO: 60942 - DNA, 212 bp, Glycine max
gggcagagtttaggccacacacgttgttggagaagcttccgacacgagagtgcaaccttgtggtactggagcccctcgcttatccggtgttacaggctggtcccaagatctgtctggcgcaggacctggacttaatgcagatccacacgttggtggctggtactctcaggacgtgcatcgtgattccaatacccagcccacgggcctagcct

SEQ ID NO: 60943 - DNA, 99 bp, Glycine max
acctaaatatgaataggagaaactattgcacactgttgcagttatttaatttgcatatcccatgcatgaggccccatcacccccatcccgctccaaaaa

SEQ ID NO: 60944 - DNA, 325 bp, Glycine max
gatgtttcacactcagcatcttcagagcatgtctatgccacgtggctccttacggaatgcttttgatggcacattcattgcactgtgttcccttgcttcacagaattctacacaccctatactgggtgcttccaccagatgtaactttctcattaggctcaataattcccctgctgggttattcaccactttcgcaattgcgtatgcaatgagagatgtggtacgttttacgggctgtgatgtctcaaatggtccttctactacatcctcaagtgggttgcaatgcaggtattttgacctctaccatctacgccatcctcttgct

SEQ ID NO: 60945 - DNA, 80 bp, Glycine max
gatacttcatgctccggatcttacgcttcattatattggacgcggcacgttacgggatcctatcgttggcactgtgatgg

SEQ ID NO: 60946 - DNA, 60 bp, Glycine max
aaaaaaacaacaaaaggggcaacggcaagttccaaaaaacccccaattgaaggaccggcc

SEQ ID NO: 60947 - DNA, 233 bp, Glycine max
ccaacgcttccaacggatgcaaaaaaacaacagaagggcaaccaaaatctggaaatgttaaatctcccagggcaactgaaaattcaccggtacaacctgaattattgattcggaaaatccgtactttaaaacaacaccgaggtggcagttccgattcagccagcatagttcagtatttcaaggaccgtattccctcgaaaaatcgtgcgctgttcaagaaccctttaaaggaa

SEQ ID NO: 60948 - DNA, 408 bp, Glycine max
cttcaaggacaagttcctccttcacttggtcaacttaccagcctgcatatgctaaatctctcatataaccatcttaatggcctcattccctcaaccttttcagggtccccattaagctcctttctgaacaatgaccacttgtgtggccctccactaacattgtgcttggaagctacgggtaaggagcgaatgcagctatcaaacgcacaagtagcagcaatcatagtagccattgtccttacttccaccctgatatgcttagtaatgttgtatataatgttgagaatctggtgcaactggataaaggtagctgtttcaagtgaagatggtggcatggttgagcagcagaagacaagaaatggagagtactggaatatgaattctcctgagtttgtttcttcaccagat

SEQ ID NO: 60949 - DNA, 69 bp, Glycine max
gattacatacagaattatatcgaacaaaagattgtgcttctttcagagcatgcctggaatgtcttcgca

SEQ ID NO: 60950 - DNA, 213 bp, Glycine max
gatgaactcaacacgtgtatcgaataggagattgttcttctttgtgaagattggtgcgatgtcatcatatcacgatgaagtgacgcttttgggagctactgggagattatttgtgtataaggttcataatacgcacagattgatgggagttttgttcaactatttctattataagttgatgtacaagagtctactgtctcactgatcgaattt

SEQ ID NO: 60951 - DNA, 454 bp, Glycine max
  unsure (1)..(454): unsure at all n locations
ggtcgacgccgttatgctacaaaaacttcaacacgtccagaccgtcgtcaaaggtgccgacaatctccatctggctgtgctctttaattagccagctcagttcctgttgtgccaggaattcgtcttcaacaatgatgactttcacaatatcactccggctcaaagcaataacgtagcctgtgaggcgactggggtgcgttggttaggaatgtaaaacgcaatttccgtccccggctccaggcggcggatatgcagcccctcgccatacaataacttcacgcgatgatggacattcagcanggcaattttattgcccggcatttcattcgcttcgacncgctcaatcanctttggattcgatgcgtgcccggtatctcgcaacgcaatgcgtacccgatttccgcactctgcaacgctgatggtgacaacgcctttacctttgcaaggctgaata

SEQ ID NO: 60952 - DNA, 97 bp, Glycine max
aaaaaacaacaaaaggttacggctccaaaaaaacaacaaaaggttacggctccaaaaaaacaacaaaaggttacggctccaaaaaaacaacagaagg

SEQ ID NO: 60953 - DNA, 414 bp, Glycine max
ggagaacaaaacaagtgtttcgaatagattatcctaagtctttgggaatagtgctgcaatggcttcaagtcaggaggaggtgacccttttgggagctactggaagcccatttgtgtgcagggttcatattgccctcaagttgaagggagttcaatacaaatatgtcgaagaaaatttgaggaacaagagtgaactgcttctcaaatccaacccagttcacaagaaggttccagtgtttattcacaatgagaagcccatagcagagtctcttgtgattgttgaatacattgatgagacatggaagaacaaccccatcttgccttctgatccttaccaaagagccttggctcgtttctggtccaaattcattgatgataaggtttttggtgctgcatggaaatccgttttcacagc

SEQ ID NO: 60954 - DNA, 357 bp, Glycine max
  unsure (1)..(357): unsure at all n locations
acgcgtcaaaagacgacagnaagggggaaaaaatgaggaaagttgaagtattatctcaagttagaagaagagagacaacagaaattgcatgatgacgaagaagctcggaaacgtgaagatgctgataggaaaaagaatgaagaagaggaacgcttgcggaaattggacgagatagctgaaaagcagacgcagagagaaagggaacttgaagaaaaagagaaactcacgagagaagcattgttgggtacagctgctgctgaatcagctcctcctgcccgtccattggaatcgggatctgctgctcctgctgcagccgcagctgccgccgcagctccaacatcactgaaatatgtccct

SEQ ID NO: 60955 - DNA, 135 bp, Glycine max
gaacaaggtcagcagtgcttaagcagtttaccgaaatgtgaacgtgcatgaagagccaatgattaagtacaagggaagacgattgactacggcaccagttggatgcacttcccccttcttcacatactgctgcac

SEQ ID NO: 60956 - DNA, 228 bp, Glycine max
gacagcataacttgtttatcggaatgttacttgaagagtcatcggcatgatagcgatgggtaagtcactatctatctagcaatcgatatctctgagttcaggcgaaccaaactccgaagctatggcatttctggagtgagagttgaacgtgttaaggtcacgagatctggtgggttggtattgacgatagctttggcgccgacgctcgacaagaagacagtggtagtg

SEQ ID NO: 60957 - DNA, 351 bp, Glycine max
  unsure (1)..(351): unsure at all n locations
gggagggagcaggaacactacgaggtgatttcggcctcaatggaggtctctgctttaaggtcacactgccctttatgccgccgctgcttctcaagtcccttctctcttccttcccttttaccttctcagcctctccagcgaagatccatgcaatcattccaaatttcatagactgggctccgtaacatcactgttcttagaaattttgtgcactctagatcagatttctcatgctgtctgaacggcacatctgtcgggttacataaatacaatggcgcgatgtattaacgtaattttctgtgcangagtccagtttgcatttcatccatgaaaatttcaaattcatcatct

SEQ ID NO: 60958 - DNA, 153 bp, Glycine max
agaccaccaaaaggggtaaaatggcacaatttgaatagaaaattaagctgaaaggccattcaacttaaggtgaagtcctccaattgccgtccggaaagttgaaaacaccaacagaaaagtgttttccaaagccttgtgggtttccgtccacct

SEQ ID NO: 60959 - DNA, 52 bp, Glycine max
tacggctgccaaaaacgacaaaaaggtacggcttgcaaaagacgacaaaaag

SEQ ID NO: 60960 - DNA, 384 bp, Glycine max
  unsure (1)..(384): unsure at all n locations
ggagaacaaaacaagtgtttcgaatagattatcctaagtctttgggaatagtgctgcaatggcttcaagtcaggaggaggtgacccttttgggagctactggaagcccatttgtgtgcagggttcatattgccctcaagttgaagggagttcaatacaaatatgtcgaagaaaatttgaggaacaagagtgaactgcttctcaaatccaacccagttcacaagaaggttccagtgtttattcacaatgagaagcccatagcagagtctcttgtgattgttgaatacattgatgagacatggaagaacaaccccatcttgccttctgatccttaccanagagccttggctcgtttctggtcaaattcattgatgataagtttttg

SEQ ID NO: 60961 - DNA, 54 bp, Glycine max
gactcccccttcttaagttgttccttcaactttcttatactcagggaagttaga

SEQ ID NO: 60962 - DNA, 243 bp, Glycine max
aggggatcactgacaaataacaaagggacaagcctgagaaaagttaatgaacaatttgaaaaattggaaacccaatggccgaataatcctcaaaaaaaattttacacagatacaccaacttttgcgccaaaatccgagaaaattccagggtttaaaaaaaattctgtaaggccaacctcccaattttaacaaatcccaaaaccttttatgcccttcctgaaggtttaaaaaaaaggaaccaat

SEQ ID NO: 60963 - DNA, 360 bp, Glycine max
ataacagccaaagaaaagaaaagccacatgccaaattgttgaagactgaaaaccatgaaagcaaagaagatgccaatgacatgaaagtgaataatacaaaacatcaggtgacaaatagtggaagtaacatatactcacagaagatactggatgaaattaggcagtcagaagagaatgaacagagtcaagtccaagaaaactggaacaaggggcatatcaacaaagttgacaggaatgctgcgcaaacaaaatccaaggtgttacttgaagggcttgaagaattaaaggaggttttggatgtacagaagcaagagaaggattccattgacagtggctaagatgatgaggacaatgattacg

SEQ ID NO: 60964 - DNA, 227 bp, Glycine max
ggacagacaaacaaacaatttaccagctagacatggtccttttgaacgttagaagtgctacaatacaaacaatggcagctactcaagaagatgtgaagcttttgggtattgtgggaagcccatttgtgtgcggggtccagattgcccttaagttgaagggagttgaatacaaatttttggaagaaaatttgggcaacaagagtgatttgcttctcaaatacaaacct

SEQ ID NO: 60965 - DNA, 272 bp, Glycine max
gcctccaaccaaacctccggccaagcctccgtaacggtgccaaaagaccacagaaagggaaccaattaagaattccgaagggtaaaatgggaactacaatgttaccaatagacaacctaatagaagaaatgctgcctaagagatatgataatttggaaactcaagggaacaattgatctaaggaaactgggtaaaaggttaagaagtaatgtgaaatcatacatctccaacaactaagagatacaactcaaaaaggaaatccacatatataa

SEQ ID NO: 60966 - DNA, 369 bp, Glycine max
  unsure (1)..(369): unsure at all n locations
gaaggagaagaggaagttctggatcgctctctcccgtgaagagatcgaagaagacatcttcgtcatgacgggctccaggcccgctcgcaggcccaggaaacggcccaagaatgtccagaaacaaatggatagtcgctgatacacccaccaagaggtgaagagaatttaggaaggtcttgggagattggaggtacagaggcgtggaattttgtaaagaggaaaccgaaaatgttggattggaaatttggaatttagaaacgaaccatgatgatgatgctcatttccttgcttgtgttgttttgcggcacactanggttttaggtgcaaggggcagctttagttgatttttagtagtagtagtagtagttt

SEQ ID NO: 60967 - DNA, 146 bp, Glycine max
ggccttgagtttttcataaaggagtatattgtgaaaaccaataaagatctaactcaaaagtttaagttagcaaaaagggccctcaacaatgtggaaggaattttaacgtgaaagtaaattttggattcttcccaattttgtagctg

SEQ ID NO: 60968 - DNA, 226 bp, Glycine max
ggaagacaagaaatgaaggagatcaatgaccctgcagcaccatcgcctcctacagaagccattctaatggatcagatgaaaacttttttgccagatatagcaaaaattaaagatgaactggatagtgaccctcaattatattggcattcaatttatcgtagataacaaatggacgttagcggcgacgactctgtggaaaagctcacaagcaatattttgcaatgca

SEQ ID NO: 60969 - DNA, 308 bp, Glycine max
tgccaaaagaccacagaaagggattcaattataatttcaaatttccgccattctgaacctcaacaatggggaaaccaaaggaatccccgcctccaactcgcaagtcaacctcctccttcaagccgaatccgaatcccctcctggtcctcaacctcctcggtctcaatcccctcggtctccggaacctccccaatcccaactcctccccccggaattttgccaaacctaacgatttcgcaaccaacggtccgaacacaatccaaacattcgacaattaccaaaagggggaacaattggtttaaataatg

SEQ ID NO: 60970 - DNA, 386 bp, Glycine max
gatgtaccaaactcagcaaattcaaggcttgtctatgccaaatggttctttagggaatgcttttgatggctcattcagtgcagtgaattcccttgcttcacagaattccacacaacctagactgggtgcttccaccaattgcaacaatctcattaggcaaaagagttcccctgctgggtttttctccaattactcagttgataatgcaatgagagatgtggcaagttttaggggctgtgatgtctcaaatggacaagctattacatcctcaagtgggttgcatggtggtactttgaacttatcatctaggccatcctcttgctccacccgaatgccacagattgctgaaaatggaaatgaaggtgtggaaggaaattatgttgaaa

SEQ ID NO: 60971 - DNA, 63 bp, Glycine max
ggagctggctgtggtacatgttatcaggtaaagtgcctaatgccaaaattatgcgatgtgaat

SEQ ID NO: 60972 - DNA, 88 bp, Glycine max
agacgagacaagggggcagtcagttagtcacagtctgagtccgcatataattgttcatggtcacaactatggtgcgaaccgcatcgtg

SEQ ID NO: 60973 - DNA, 210 bp, Glycine max
ggacagagaaatgtcaaaagtgtacatagagatttccgtgatagttcatcttcttcttcgacttcgtcatcaacggtgggtctgtacaatcgtccttgcagcatcatcatggatgatcgaaattgtgttattgatgtaatgggacttccagagaatgaccctcttttccaattgaatttgcctcctggttttcagttttaacccaacgat

SEQ ID NO: 60974 - DNA, 316 bp, Glycine max
gactacacgaaatttacaaaaaaaaaaaaaaaaaaaaaaaaaaaaaaaaaaaaaaaaaaaaaaaaaaaaaaaaaaaaaaaaaaaaataaaaataaataaaaaaaaaataaaaaataatttaaataaaattaaaaaaaattaaaaaaaaatcgggtctctttaaaggtttcaggtttacttccgtttcaatccaagttcaaacttcttcaatagtttccctaaatttcatttcagggtcgttctttttaaatttttgtaactggaaatccccggcttttccccattttaatccctttgaacaatatccccttttccc

SEQ ID NO: 60975 - DNA, 183 bp, Glycine max
agggaacaacgacgagcacaagattcagttacatattattccagtatacaacgcaggcacatagtatggcgggaccctttgagttggggtcatcaaagaagaaaccacaggatagagtgaatgagttacacacatttaaagcggaaaatatgcacagcaacatgtgaattatttattacagcc

SEQ ID NO: 60976 - DNA, 307 bp, Glycine max
tgcgggtgcacgacagcgagggaacggcaacgagcacaagatccagttacatattattctactagacaacgcacgcacagagtatggctggaccttttgagttgggttcatccatgaaggtaccagcggattgcgtgaatgatttacgcacttttagggcggacaatatgcacagcagcatgacaattatttactacagccgaacatttttgtccaaaattggtgaacttgttgccggcattttggggttcacaagcttgttacggtttgtaatttacttccttctcatgatgggtacttcacttgg

SEQ ID NO: 60977 - DNA, 186 bp, Glycine max
tcaaggggacgggagaagtgatcgagtgaacgatacatttatgatctcgctctttctcttcgcctaaagtcctcatcctcattctatttttacctttcactctcgctccataacgttgatggtgattccttctgttttagcgactgccatcgatgccgctcatgaacgaactcatggatctccaga

SEQ ID NO: 60978 - DNA, 187 bp, Glycine max
tggggcgacccacacctccgaagcgaaaagaacaaacaaagggggggggggaaccagaaaaacccccatcccgaaccttaacctaaaatcttcgccctttccttttgatcaaggttccttctttcccagagaactaaaccatttcccgaacagtttccaaatccaaaaaatttcccaaactccttta

SEQ ID NO: 60979 - DNA, 332 bp, Glycine max
gttctagtgtgtgattgtttgttgttgtaactcggtcttcttcttttgttgttctgtgtatgtgtttgttttttctctcacctgaaaatgtcttgctgcggtggtaactgtggttgcggaagctcctgcaagtgcggcaacggctgcggatgctgcaagatgtacccagacttgagctacactgagccaaccaccaccgagaccttggtcatgggagtggcacctgttaaggctcaatttgagggtgctgaaatgggtgtgcccgctgagaacgatagctgcaaatgtggaccagactgctcctgcaacccctgcacttgcaagtgacgtgt

SEQ ID NO: 60980 - DNA, 288 bp, Glycine max
ggatacaaaattgagcgatttctccaattttaccaattcggattcgacattcgtcaagaacttttaagcattggaactctaagtgttgaaatgcgtatctgagcgctttaaggtaccgattaaaggaccaatcgtcccttcgggttagatggaagtgaggactacatgggacaaatggtatcgagcacgtctatggactatgcgcactgaatagttcagcaattggtatgaatctcaacctcctcagtctgttctatacaactcctatgtacacatcgtgtcattgac

SEQ ID NO: 60981 - DNA, 353 bp, Glycine max
caaacctccgtaacggtgccaaaagaccaccaaaaggggaaaaaattcaaggttaaaaccaggttccaaccgattcttttccaaacaagaatccaaaccccctggtcaaaataaaagggtaaccctccgaaattaaaaatcccaaccttccgaattccttcccaaaataaattaaattgaagggaaaaaaacccattttaaatccaaccaaaaaaggggggaacccattttaaacccaaaaaaggcgaaaccggcaaatcccttcaaccgatttcaacaacagcaccttacctaattaccttaaccctttcaacgggcttggccctgctgaatccttttgatcaataaaacag

SEQ ID NO: 60982 - DNA, 303 bp, Glycine max
agggtaataaatggaggatcaaaacaagatactgcttatctatggctactcaggactagtcaactccctgatcacactatatggtaagacttctgaattttagggtccaaacgctatgaactccttctaacaataaatctaataccaggaataaaatgctatgcttagaccaacttcaggtttttagatactgagaaacaccgatatattgaattagcataagacggctataccatatgatactcaactggcggaaacttataccattacactgtctacagtttaatcgcatattgagacttt

SEQ ID NO: 60983 - DNA, 360 bp, Glycine max
cacgcgtcagttacagctgcgataacgacacaaaggggtcgtaaaagcatgcacaaagttgatgggttgacccctgaacagcgcaagcaaagacatcccaaggcacttcacgagatggcggcactaaaagctgcacatgatgcatgagggaatcatgcatgtagaaccttccatcttggcaatatttcaattagtggttagagttcgacattgttatttgaagacatggaatttatagaatatttaagttgcattaatcgtgcagtatgatgtctgcactaacgtcatctgtgacagatgaatatataactactacaacactgaaaagtgttatcactcaggggctgaatctagatcttg

SEQ ID NO: 60984 - DNA, 362 bp, Glycine max
gtgtcaaaacaggtaataacattagcagcaatgactcaatctccaaacccattggattcccctttggcatactcaggttccacccatttgttcacagtatccaagagcaactccatcagcatcaatcctcagcatcatgaaagatatcaagctcaagactagtgctatatattttgagttgaggcttggaaattgatttgatttttgtatatatggaagttaattaattctgagaggcttatacttttctttggtgggggtggagacggttacatataatttggataattggtattttatccttgtttgattctctctctgtacataccttcttttactgcttttatccatggtgaaatcag

SEQ ID NO: 60985 - DNA, 280 bp, Glycine max
aaaagacgaccaaaaggggaagaagaaacaatggtaaaaaaaatttgagaaaaaaaaaaataaaaaagggttgaattggtttcctctccctctcccaaaaaacaaactcaacccaatcctcaataatcacctatctaaagatttcttcattcctcactcaatcatttctgttttcatttccctctttgatatcctcgttatcgccgaatcagctaccactaagatattgttttctgatgtaattttcgtcctgttgttaattgactcagttgtctgaatc

SEQ ID NO: 60986 - DNA, 56 bp, Glycine max
taccgcagaaaaacgacagcagtcggttacagcttccaatcgactcgcgtatggta

SEQ ID NO: 60987 - DNA, 57 bp, Glycine max
tgggggtgaccaaatgcaaagacggcattgaaattgaacacaatccatgactaacac

SEQ ID NO: 60988 - DNA, 322 bp, Glycine max
ggcagcgaaaagaagacaatagggggtttcagatatgaatacacgagctcagggtatcgatgcaagatggctatatactgttatagcttcatcgaatgatcatggggttacgtgcagatattcaacacagattactcatgatgtcacataccttatcactggtatagttgatatcgtagaatatatggatctcgttgctacttacaaagatatttacgtcttcatctagagatttgagagtgtgacacttcgtctatggaaccctctcgcaatagatataaccttgagatgtcgcattttatagcattctcgtcaaggtcta

SEQ ID NO: 60989 - DNA, 257 bp, Glycine max
aacacctaaagggggccgcaaaaatacgagtgcagtgggatacaggcaccgatctactggtgtttggtactgatgagcaagaactactctccgctgaattttcaccatgatcattatgagcccgtgagtacattgggcatcagactttgcacgtgagtcacggctcaacactcggattgtctctgtggcttactccaaagatatgctctcttacatatttcacatgttcagattctctgagcatactctcatccgct

SEQ ID NO: 60990 - DNA, 136 bp, Glycine max
gaccggagcgataagacggcagtcaggttcagtttcgcgtactctcatgtaaggtaatgtttcgatagatcgactctcaggtaaggctatcacatgatgatcacacaggttgtggcgcaaggatgactacatagcg

SEQ ID NO: 60991 - DNA, 372 bp, Glycine max
gacaagagaactgatgctgctttgaagaatccgaacaaagagtgggatggagcatcacgtagaaacaatgcatgtctctgtaattctttactcactgtcacacgtccatctgttcctctggcacaatatgttcgctatgttgagcaatagtgggacaaccttaatgctcttggacgtactgatggaagtagactccgcctgctgacttataacattgttctgatattagctcggtttgcatcaggaccatcattcaatgcagattgccgacgtggtggacgagaaagtaattcctcgttcctcccaattatgatccaaatggcatgccagctccttgatcaaggaagaccctcacagtgtcgaaccatggcc

SEQ ID NO: 60992 - DNA, 77 bp, Glycine max
caaaaaaccacacaaaggggcacgtttaagggaatgtgatcaaagaatttgacctctaggataacgactttaaatcc

SEQ ID NO: 60993 - DNA, 106 bp, Glycine max
aagccttaagccaagccttcggacaagccttcattggggtgccaaaaaagcaactaaaggggaaaccaaagccaaattgtacccttaagccattaaccccaaaaag

SEQ ID NO: 60994 - DNA, 332 bp, Glycine max
ggtcacagtgatactcatctacttgccctgagggatgtggcacatcacatacagaggcgtggctaatgatcttcgttcctctgtggtcatagtattttatcaggcaagaattctacaaacttagggtcaagcttgtcgcattaagtgactctgagcgtagcgaacgatctgtaatgttccaacgacaagtgcgtcgtcagtctcataaatcaacgttcgtctctgctcgtatggccaaaggagtctccaacactctcaccacgcgtcactacgcagctgcgatttaaaatgtaagatgatgatgagcttcatacataagcagcatcatagct

SEQ ID NO: 60995 - DNA, 398 bp, Glycine max
agtgaggacacggtcaaatgggaagaaagaagtattgatagagtcgatgataatgaaggatatccacatcagcagttgagtcactcaacatacaatggagtcagaccttttctggtttatactacgaggaatggtagaaaggtctttggtggctaacgttgttagcaaggggtgacgtgtcatataaagaaagcaatccagcacatttgcttcgatgattgaatgaggggaaagagactgatatgggtatggggagattttggctgctagctaagattggatagaaggttgtatcagccttctacaatggctaagcctgtgtcacatcagaggaatatatttccatatctgtaaccttcaaccattaccatataataaagctctctttatgcccgcat

SEQ ID NO: 60996 - DNA, 119 bp, Glycine max
ggctcgggcacgcgtcagtccaagctgtcagagcacgagtccggggaataggaataacaggtcatggtgcgagaatactacagaatgggacgatacgcatgtttctgaaattgctgggt

SEQ ID NO: 60997 - DNA, 103 bp, Glycine max
tggcctaagcaatgcgggacttttttattggattaagtttaatagtatgtttggaggagccatctttttaatcttaattcaaactatatccattcattattca

SEQ ID NO: 60998 - DNA, 245 bp, Glycine max
tcgtctattctatcccgcgggagcatactacctgtcttcatctccaaacaacctcaaaaacattcatcaactttcactattaatccatccatcattaactcataaaataaagttctatttttttatctttgatttgcttctaatccatcatttaagtacctagttccttagattcccttctcaaacaagctaaaaaactttaaacttaatttgaataactaattaattcttttcctaaatttttt

SEQ ID NO: 60999 - DNA, 139 bp, Glycine max
gaaaaaaggaagaggaactaatcaatcgcaaggcgtctgttctgtcccgcgggagcagactacctgtcttcatcgccaaacaacctcaaaaacattcatcaacgttcactattaatccatccatcattaagtaagaaaa

SEQ ID NO: 61000 - DNA, 71 bp, Glycine max
acatcagataaatactcctggctctctctttacagctatcaatccacactctccaagcttgatcttcaatg

SEQ ID NO: 61001 - DNA, 278 bp, Glycine max
  unsure (1)..(278): unsure at all n locations
taatgttgggtttctgaaatcangcttcccggtatgcgttaacgaatatggcgagggtcttatgactctcctgaaaaggcatcactatccttcgatgctgccctttactgtctacattgcctccatgccaatttcaatttccccaacacaccttgcaacattgacactgctaccaatgctcctcctaaccaatctcttaccccaccatagattcaagatgttgctgctaaattctcaaatcatgtgtcccctcttctaccaaaaccttaagaacaacc

SEQ ID NO: 61002 - DNA, 297 bp, Glycine max
tgtgattggcaaaattattatttacctgatacgctcaatcctagagaaaagcagttggtggaaatagtgaagcatcatgcctacaaaaatgtgtacgatttgaaattgattgaatagactaagttgagctatttaaatctatctgcatgtctaaaagcaaggcagtctgacactcaagatcaaggtctgcaacatgttaatatctcaactgcacaaggtcaatcagtaacatttccagattatagtcaaccatctatctctccttcatatactgatgaaagaattcattaccaccaa

SEQ ID NO: 61003 - DNA, 85 bp, Glycine max
tagggggatgatgggggcagcacttgtctcttctgctgagtcaactggtggtttctttgctgcatccatactttctggtgcaaca

SEQ ID NO: 61004 - DNA, 211 bp, Glycine max
cgtggaaaaagttggtctgacgcagagaaaggtcaggatcaagatttgtatttcaagaatgctgtaaaatatgtggaagagccaatgatccgtttggaatcaattgcttcctctgcggttcgggcagctatcaaagttaatgcctttgttattatttgcttcacttcatctggaatagcttgcatattgattgctgagttcataccaacca

SEQ ID NO: 61005 - DNA, 243 bp, Glycine max
ttaaggggttgagggattggataaggctgcgggctgataaataaacagaatcggatggacttgttaaacagaaattgaagttggacgaatcacttatagaatctgaggataaagtgactggtttggagtccactattcttcaattgcctgaggaatctaaggaatcctacagggtgatcatatcactgaatgaaaaggcagttgacactgttttacacaatctacatatgtttttatggtgta

SEQ ID NO: 61006 - DNA, 141 bp, Glycine max
tcaataaactacagaatgggaacttgtgctgataaagcatattgccgtaatgttttatatgcacattgcgaaggttgtatttattctagcatcaatattattggcatcaatttagaagttatccctaactaatgtgaattt

SEQ ID NO: 61007 - DNA, 88 bp, Glycine max
tggtacagctgctataatactacagaatgggataaaaagtgggttgaattcagatcctttccttaaactcactagaaatggagtttat

SEQ ID NO: 61008 - DNA, 134 bp, Glycine max
gaatataaaattaatgttaatatagaaaaacaaataatgtgtattactgtattatatactatactataatcaacaattcataacacaattaattcttcctattttggcttggggaatgaaatttcttctattac

SEQ ID NO: 61009 - DNA, 239 bp, Glycine max
acacaaaatggtatctaaatgacagaacgtttcatattatggatcgataaccatagaaaggacctgttcatgatctatactatgatcttattggttctttttctttttcttcttcttcaacatcatcttctgtctcttgaatttcaagtgtgtcataattggaatctaactctttttattaaatttcattctctgcctcctcttcttcattattaacttcattttatcaacttttattt

SEQ ID NO: 61010 - DNA, 306 bp, Glycine max
taattggatgacagaaatgaaatgaactgagttagcaccaactctgttttctgctgtctttccttcgaatttgttctctgtttctcgcgattgaatttgagggaaccatcctcgattttctctttctgggcacccctgaattgctctgaaagtggttcagttcgaacaacgaaaacgatgtctgctctattgatgaagaaagttctgaacgaacagcatcaccttccgcaacacgtgagcggataagattaagaataagaataagaatactattctgaacccatcactcgttccttcatcaacccc

SEQ ID NO: 61011 - DNA, 218 bp, Glycine max
ctacccactcgtccgcgagaatactacataacgggacacttatttgttattctttcttaatgttgtggattgttagcttctgaaggtgggagcactataagaagaagaagatcgaatacggtatacgattactaatacagaatatagaatgtgaaagtggatgaggaacaataatctaggaggaaattcagatgagttatacataagcctttggggaa

SEQ ID NO: 61012 - DNA, 187 bp, Glycine max
  unsure (1)..(187): unsure at all n locations
acccacgcgtccggcgagaagactacagaatgggagcacagatacgaacaccgtgattcctctcgccgganatgtgttccattttgctgtgcatgcattgcctacgacttctaattctccgacaaagtccctccttccttcaatcgctcgggttcaaaaaggttcaacccagctttaattgctctcc

SEQ ID NO: 61013 - DNA, 338 bp, Glycine max
gaacgacgtgtaagagaaatgagaggatgggcaccaccttgatgagatgctcccacgcaaacgctctcttcatagctctcaaacccaaaccccgcaattcttcactgccactttcttcaatggccatcaacaaaggtaatagtaataaggcatatgatgcattgctgttggatgctgtgggcaccctattgctattgtcaaagccaattgatgagattatgccacttttggatccatatatggttttacttttgatccatctattataaagcttattattttataattcttttatcagttccttgctctttattattctcctctttcattgatattat

SEQ ID NO: 61014 - DNA, 140 bp, Glycine max
tgtcggcagtgatgatgttgaaacaacactctgttcgatttactcactagggagagcttcctcatattggctactcaaatacatgttgtcaagtaacctgtatacaatatttccaactgctacactttaatatggaccaa

SEQ ID NO: 61015 - DNA, 295 bp, Glycine max
taaaacacctactacccatactaacgctcgcttcatctatcacgcgacaaactttaaactggttttcttttaccgttcgcaaccttctactaaaatcctccttcacttcaatctttttccactttccacctaatccaattcaagtctataatttccaactaacctaacaaaggaaaatcccctcttatatccaatccaaattaatatttgttcatctagtcaatacccaattccaactcattgtctatctaatttctcatttagtgttctctttattatttattatcaactcatt

SEQ ID NO: 61016 - DNA, 174 bp, Glycine max
ttggtgatgctgatacgaagaagtgaagagggaagatataagggatttggggctgaaaagacaagatggggggaggaatggaatctaacattaacaagttcataaaggattggggcactgccatagaaaatctggagttcaattatccgttggacttctcctaaccttgctctt

SEQ ID NO: 61017 - DNA, 114 bp, Glycine max
tggggtctcgtggaagtgtaatcaatcaaagccctagctgcacctgctttctgtgttggtgttatacatcaagatggattctcatgttaaacactcacttattttcaaaattat

SEQ ID NO: 61018 - DNA, 231 bp, Glycine max
acaaaacggggcatcattcttattgggtagctacataattcagcgggaaaggaaaacctaatcaacaaaacaatggcacttaaaaccctatccactttattatcacctatatctctaaccaacaccaaattcccgcaattccataacaccaaacattacctcattctctgctatttccctcactctcataaatctcattttctctcacactattcaaaatgcaccatcacc

SEQ ID NO: 61019 - DNA, 93 bp, Glycine max
cccactcgttctgctctagatgatccaatcttacgtactcgttcatgctacgtcatatctctgggttggtttcacctaaattcggttgagtgt

SEQ ID NO: 61020 - DNA, 148 bp, Glycine max
gaccgagcgcgttcttgcagcatgctacaaggctctaaatgatcaccatgttctgcttgagggcactctgttgaagcccaacatggtcacccctggttcaaagtctaagaaggtcaccccagatgtgattgctcaatacactgttaca

SEQ ID NO: 61021 - DNA, 253 bp, Glycine max
tgacgtttatatgctacaataaatccaaacactcagtccccacctgtgtctgattaagttttcccatgtatacatttatgctattctcatataataattaaactccttcactgcgcctatacattttactctcattttaaccaatataataaaaatccaacatgccatcaaggctttatgcacaacgccgcatcaccaaacccataaacctaagagatatagaaatgtaacagctttattaaccatatccctt

SEQ ID NO: 61022 - DNA, 99 bp, Glycine max
  unsure (1)..(99): unsure at all n locations
gatgacgaaattgagtttaagatctgattgggcngcgacgatggagaacggcgacggtgtcatatcgcgggagaagatcgaccaggcggccgtgtggct

SEQ ID NO: 61023 - DNA, 73 bp, Glycine max
ccagaacacgactgcagggtacagatgatagaagacaaccaaaagtttcagctacaaggaggggacaaaagga

SEQ ID NO: 61024 - DNA, 117 bp, Glycine max
cggtaccgctgctacaagaccaccgaagggtcctgctgcgataatactacttatagggtacatcatagtacatctttcaaaatgataatatccagccgttcttaataatccaacctt

SEQ ID NO: 61025 - DNA, 298 bp, Glycine max
acaggtataatctaatcaatggatgacaaattgacagcatgcaagaggaattgctcggaaggaaagattagttgctcattcacttcaagtattgttctcacaaggtagcacatttgaagtccgtggagaatctgtggatattgtccatattgataattgggaattgaacctgcaaggattgccacttactggtgtgcccctgttgtcatccatttctgtctttgaaatgtttggtatgaacccatttgattattgttccaaattccttactattttaaattattcatttaccttattc

SEQ ID NO: 61026 - DNA, 325 bp, Glycine max
agaggcacacaccttactcgactcaaaagatcatcatgattggatcatctcatagggaggacagttaaacatacataatacgttctcgaaacaaccgtatgcatggcaaccaaaccacaaccagtcatcgatgacgtcaaaatcgatctcatccaacacgatcatcactaataatagtttgaaatcaatgaaaattgcgatgacaatgatgaacgcatagaagtgactcagcattaagatgatcattgggatgattatgaaattagccataagtgctcaattcaatagaacaagtatctgcataacaacactaataataattaaa

SEQ ID NO: 61027 - DNA, 178 bp, Glycine max
tgtacatacaaacaaacaatttaccagctatacgtgtgcctttaaaaagtgagaggtgctacaatacaaacaatggcagctactcaggaagatgtgaagcttttgggtattgtgggaaacccatttatgtacaaaatccagatatcccttatatttaatgtaattaaattctaatttt

SEQ ID NO: 61028 - DNA, 315 bp, Glycine max
gttgagtgtaaagctgctccgaaacccgggcgaccctaagtggttggtatcatggttgagaatggtggagaagcgaaggtataaaggagagtggttcacgtgagtcaccataaccttcaaagcgccttcatggctgcacatttataataaagctcctaaacctataatgagataatgaaatttgcccaaaatgccatggggaccaatgatgttagggtggatgtaatttttaacatatttttctggtaccattgtaatctgatttttccttagacgattattatttataattgctttcaaatttatttttttatt

SEQ ID NO: 61029 - DNA, 349 bp, Glycine max
tttagatagagattggagcaaagtttgatgaggaccgttattcaatgcttgcggagtgtgatataattgttatcaacatgcctcttactgaacatacaataggattgtttgactaatacataatttctaatttctttaattgatttttgatttctttacatttctcttttgtatttctttttctattatatttttattaattttgttatattttttattattctttatttttatttatatttttattattatttttttttttttttttttattatttttttttttttttattttttttttattatttatttttttttttttttttttatttttttttttatttttatta

SEQ ID NO: 61030 - DNA, 159 bp, Glycine max
tagttacttgtaataattcttataacacaacgcatgcccataaccaccagctgggcattcctcctccttcccctcctcctgctgctccacctcgccatctccgctcactgcatctacttcaactactgcacactcggcaacaaccttccacctcccact

SEQ ID NO: 61031 - DNA, 118 bp, Glycine max
gtaacctgtgatgcaccggtgcctaatatagaagagccgttttcattactttatcacattgcatattctattaaaatgcccaatattccttgttttctatccaaataatcaaacgatt

SEQ ID NO: 61032 - DNA, 266 bp, Glycine max
tggtgttaacgaacaaatagaaaaacaaagtgggcatcttctgtacgcgtggagatttgctgaaatgttcgtgatcgtgagcttcctcttcaaaactccggctaggaatctggtgatcttcacattggatcggctcaatctcggtctctgtcccattgtcgtctttacttttttctttactctactggttatgttttctttattttttatttattattttatttttattattattaaattctttgattatctatttttttttattt

SEQ ID NO: 61033 - DNA, 236 bp, Glycine max
ttacacaactgcgacttagttcatcccttctcaagccacctatacctcactttttgaaattacttgcatagatagataatcatggctattatgaaacttgctgcttcctctgcgcttcgctctcttattgcctcatcctccaccttcaccataaaccttcatgcctcatgtgattagatgaatattgttttgtgttctacatttgtatttaatattctattattaatctatatttt

SEQ ID NO: 61034 - DNA, 158 bp, Glycine max
  unsure (1)..(158): unsure at all n locations
accgtagaaaattgtacgctaattttggtgtgctggtcgcatatngtcctgaagaactttctgtctgccaagaccttgatcaagttccttcctttattgaaaaatttcccccctatcaatccatttttgcttaaccatcctatcgatacatccctatt

SEQ ID NO: 61035 - DNA, 89 bp, Glycine max
tggtataataataatggcaatggcatcattgaaggttaccggtggaattggggttgttgggatcaatgatgccgtttcatatctttata

SEQ ID NO: 61036 - DNA, 64 bp, Glycine max
tatagggggaagtactgaatatttattgtactgtgacattgcaattgagcctggatcgttctgg

SEQ ID NO: 61037 - DNA, 242 bp, Glycine max
aggttaaactaacaacaactataaaagaccatgtgagtgaatgaatgctagcgccgcaaagcgaataatatgaagatcttccggcaaatgttctggtgcttaatggtgttccttctcatcatacttgtcacaattcttttgatatgggcatttcttttaccctcctaacccaccttcactctccattacttcaccttttacaccttcaacgccaccttggctaacttcctcacttctaattt

SEQ ID NO: 61038 - DNA, 328 bp, Glycine max
aaaagggcgcctaagcaaaatctgaggcatcagagtagcatgaacttcttgcctgcaggttgagaggagcacatagatctccggagcgagagcttggctaacagaagatccaagctttccagtgcaactcaacaagcatccacagcataaatctgctttcagacagatgaagtttaatcttcgctctagtacttgataagtctcatttcatgatccctttcttttggtattctggtattctaattcttttataaagtatcactttaatgctttgctctacagtttaatggaatttatgtttttattctttgttgttattttatgtact

SEQ ID NO: 61039 - DNA, 317 bp, Glycine max
catcttgaatgcaagaaagtttttgtgttatgtttgggggggcagatgacagatttatatctaagtgccaattactagaacttttttattttgacatgacttgctgatgataggttctattctgcaattaatttgtttttaatctgagttttattagtgataaatgtagatttgggaaaaaaaatcataatttcgtatcatgtgttattggatttgagttccctaacataagcattgcatgtttaatcaagatctatagtgcattgatgtcatgatttcaaattatgtattatgattttgatttatcatttatatta

SEQ ID NO: 61040 - DNA, 80 bp, Glycine max
tgggaaacctggtggtctgatcgagattactgtagggaagtaagtctgtcgtatttactttcaaagacttttgcttatga

SEQ ID NO: 61041 - DNA, 168 bp, Glycine max
tgggaaagcaaaaaacaggtaacgctgcctataagagagaatggagtactctaatggattccctataaaaagagatgttactcttcaggaacttaccaaaaggctcgctgagtttgctgaaataatatgattgtatcattattacaatccctttaatcatattatacc

SEQ ID NO: 61042 - DNA, 119 bp, Glycine max
ctatatgggtaacaaaacaagtgtttctaatacagtatcctaaaacattttgcgatagtgctgcaatgacttcaagtcatgacgaggtgaccctttaaggagctactagatacccattt

SEQ ID NO: 61043 - DNA, 101 bp, Glycine max
ggctcgcgcacttgtttgtaggcacgagtgacgggagagggtgtctccggagaagacaagttaggttctatggctgctgtgaaagtggagaacatgtgtgc

SEQ ID NO: 61044 - DNA, 109 bp, Glycine max
tctcgtcagaaccagtcgtcaaacacaggcgtcaaacagagtcgtcaaaacacagtcgtcaaaacacagcgtcagaaacgaggtcgtcaaaacacaggtcgtcaaacac

SEQ ID NO: 61045 - DNA, 85 bp, Glycine max
taggggatgaaggaagagtgagcgtgaaagatgccttgggcaatgctttggggggctagaatgctcgacgttgctattgatatgg

SEQ ID NO: 61046 - DNA, 157 bp, Glycine max
aaaaaacaacataagggataaacattgattatcaatgggttgctccaaaattaagcatggtcaaaacccaattattttccttccttggaacttaattattattagcttacatatattaaggaatgcactaaataacacattattatattacattatc

SEQ ID NO: 61047 - DNA, 297 bp, Glycine max
ctcgactcactcctgcttacagatgcacagaacgacagaatgcggctcctagtagacgacaaaaggagtaacagcagagtcataacaacggaagggtgcagatgcgagtaagacaaccaattgtgtacgcctgccacaagaccacagccagttaccgctccgaacataccacttaactgtactgcttccagaaaacaccgtaacctttctgatacattatgacgccccaaggatcctgctccgaacccactacctatcggggtcatccaatgttctcttatcaaatcgatatgatca

SEQ ID NO: 61048 - DNA, 326 bp, Glycine max
gataccacaccatttcaaacaattgtgtgttgaggtgaatagctgtgcgagatagaaaatgaagaggggttataattatctttcagtggctatttatgtgatgatgtttttggccttggtctcgtactcctccatcaagattgagggaatgagaccgctgaaagctgatccatccttcataagtttgataatcaaccgggcttattctgggccaagccacagaggacgcggtcattgaacttacaaacttgccctctatttttgtccatatatatcatgatttatacatcttgagaatatatattgtgacactttcatattcaaca

SEQ ID NO: 61049 - DNA, 146 bp, Glycine max
tagggcaactgaagaatctacacaagttctccttttggatgtgcaatgtgaatgaggcggtcaaaaatatcaccatccaattttcaaaagtgttcccaaatttggaagagatgaacatttactactgtgatattgtgtaattacca

SEQ ID NO: 61050 - DNA, 157 bp, Glycine max
ggaacaaaacaagtgtttcgaatagattatcctgagtctgggggaatagtgctgcggtggcttcaagtcaggaggaggtgacccttttgggagctgctggaagcccatgtaggtgcatggttcatagggccctcaagttgaatggagttcaatacaa

SEQ ID NO: 61051 - DNA, 56 bp, Glycine max
gagacctcaggtcaggcggggctaccggctgaggttaaacaaaaaggaggggaagg

SEQ ID NO: 61052 - DNA, 138 bp, Glycine max
aatcccctggccgacccacgcgtacgcccacgcgtacgacgggctggataagactacagaatggggagtgaaagaccacgaacaagaatgttggttgggcgggtgtgaatagattggaacatggaatatcttggtggt

SEQ ID NO: 61053 - DNA, 170 bp, Glycine max
gacccaccgtcgcccacctccgtacgcagaaacacgaaggtatcaaactttccatggcttgatcattcaacgtgtgttgccctattgaagaaaggggggattcactgaataagggtggctatgtgtctcaacgccttttattcttaatgggaatattcactgcaattttc

SEQ ID NO: 61054 - DNA, 171 bp, Glycine max
tatagggtcccaaaataattttgttacgtttcgttccggctttaccaatccatcgtttaattcaccttctcccccttgtaacccaacacatattacatgcatccaattcctcagatatttcctctcccaaatttctgttgttattaattatcatattaattatcaatattc

SEQ ID NO: 61055 - DNA, 137 bp, Glycine max
ggttattaaaacgacggggccagtgtgtgtggcagcatttaatgggcggcgtgtgatcatagtcacggccttggcctgcatagtcctctcagagaaacttcaccttggaagtattattggaggagtggtggtggtaa

SEQ ID NO: 61056 - DNA, 207 bp, Glycine max
tactataaggggcagctattaagcagagtttgtgtggtaatggcttaattaattagttctgagtgtttaataacaataaactctctacaacattttattttttctttagttattgatttgtttaaatttgcttattacctttagtggatagacaataataccaactaattacaagcactatgtattatggacatcaagttttggggt

SEQ ID NO: 61057 - DNA, 150 bp, Glycine max
gggcccccaacgaaacaaaccccaaacgctaagcagtttcggcaagattcaccagtggctttctccaaagcattgatcctcgccgtcgtaatgtcagtgttcgtctccgtcatctacgcctctgaagctccggcttctaaccctacctct

SEQ ID NO: 61058 - DNA, 99 bp, Glycine max
tggcattgcatcatggacaccttatcatgatggcttgggtttctttgatatgtgcttgcctacatattatcccagtgaaccccctatggagcatgataa

SEQ ID NO: 61059 - DNA, 209 bp, Glycine max
tatagatacgaaacgacgacacagagggcccggcacaatatgacgacagaggctgacatttgaagaaactgagatcattgggtgtgaaatatatggcagacgttgtcttgctattcgatgatgtgaaactactttctgctattcctcgctgtctaatttctcatgaataagagtctgaaagcgtacaaaccttggaagcaccttgtgct

SEQ ID NO: 61060 - DNA, 169 bp, Glycine max
tatatcacaggttgaacaatccacacccaacggtctggcaagtcacatcgcgagggccatgtcattaattcttgcagaatattgcttagttttgtattatctgaatttggaaactactattaaattactttttcaagaattgcacttctaatattcacggtctggtatt

SEQ ID NO: 61061 - DNA, 243 bp, Glycine max
caagaagaaaaacattctctcaccctcttcaccgtccggtccatcttctctatgggcaacctcagatcattcttccaaagtagttccaatggggaagcatggaataaggcgctttctaaactttggttcatcttttgactttagatgatatgatgaagaagagagtgctagtgctagtactactactacttcaactacttcaaaactttgctttggcattactcattctacaaacactttgac

SEQ ID NO: 61062 - DNA, 206 bp, Glycine max
gataccacaccatttcaaacaattgtgtgttggggtgaatagctgtgctggatagaaaatgaagaggggttataattatctttcagtggctatttatgtgatgatgtttttggtgttggtctcgtactcctccatcaagtttgagggaatgagaccgctgaaagctgatccatgcttcataagtttgatgatcaaccgggcttatt

SEQ ID NO: 61063 - DNA, 324 bp, Glycine max
ggtgtattcaaaggtgaacataatagtggcagagatacaagtaccacgggccgtttgaaggaacagcatggtcttggaatgcaacaaggtaagaaaacagtagtagatatcaatgacactttcactgagtacattgaacgtgctaggcacagaatcagaaccgtgtcaaatgttggtagggggcagagccactctgtgtcagatgaaactagtgggaataagaataacaagatggaaaaccatacagaccaattttctgattttattcaatattctaagaagaatatgagaactactacatcaaatgttggaaagactaataca

SEQ ID NO: 61064 - DNA, 166 bp, Glycine max
gaccaatgaatgcaattgcagagtgattttgttcggggaacagcgacatggagagttgcctgaatccggaggagttcagactgagtcacatagatcgttccatcgaaacgttggagaaatggagatccgcatcgtggttggtcagtaacccttaaagacggttcca

SEQ ID NO: 61065 - DNA, 98 bp, Glycine max
taggggtgtccgtgtagcttccttaatttctgcttcggcttattatcatggagggttctgagattgagctcatgttgggtgtatgtgagaaaggactc

SEQ ID NO: 61066 - DNA, 53 bp, Glycine max
tactgctgctataatactacagaagggtactgctgctataagactacataatg

SEQ ID NO: 61067 - DNA, 55 bp, Glycine max
gatggttaataataataagagcagaaattcatacaggcttttaaattgatgttat

SEQ ID NO: 61068 - DNA, 150 bp, Glycine max
tgggctcacacatcacaacaacaacgacaacgaaaaaagacaagaacgacttgcttctctcctttgctgtgttttctttctcaaaaataggtcgtacctatgttcttatgatggttgctgcattgttgttgagctccaccatggctcaat

SEQ ID NO: 61069 - DNA, 76 bp, Glycine max
gatagaagagaagctaggaacagcagatcctgatgtggatgatgagagacgtgggttggaagagttgttataagaa

SEQ ID NO: 61070 - DNA, 130 bp, Glycine max
gacccacaaactccaggagtgggacaagtcataactcggtagggagagtttgtgtgtgttttataagtgtatcataatatatctcttttatttggattgattatataaataatatatcttattatttttt

SEQ ID NO: 61071 - DNA, 211 bp, Glycine max
gaagtatataacttcttctatgtgtccggaaagcattggtatcatcactgtgtcagatctcgaaccctctcgttcgtgccgatcactaggtcacactacatcaatagcgggtataagcaagaccctatgatccagcgccgcttataaggccacctcaatgagcagcaaagccggcctgcaattccccgtcggtcgtatcgccaggttcctc

SEQ ID NO: 61072 - DNA, 103 bp, Glycine max
gagaataaggttgaataaattctcgtaggatcgggttgtttcccatcgggcgctggtgctctccctctgtgcagacatgttgttcttctcatacttcagggat

SEQ ID NO: 61073 - DNA, 388 bp, Glycine max
ggcagttcaattccaatatactccattctctctgtgtatttccctacctctcccttcaagatgcagatcttcgtcaagaccctcaccggcaagaccatcacccttgaggtggaaagctctgacaccatcgacaacgtcaaggccaagatccaggacaaggaaggaatccccccggaccagcaacgtctcattttcgccggaaagcaacttgaggacggccgtacccttgttgactacaacattcagaaggagagtactcttcacctcgtcctccgtctccgtggtggcatgcagatcttcgttaagacactcaccggcaagaccataaccctagaggttgaaagctccgacaccatcgataacgtcaaggccaagatccaggacaagg

SEQ ID NO: 61074 - DNA, 285 bp, Glycine max
gcatcttttgtgcattttgcttcaaattgttcataatggtctaactccagccaaagattttgctgattttaggcatactcactaatggatcggtctccttgtttggtagttgcgatcttcatctttatttcataaatttgagtagcatcaccaaccttggatagttttgtttacagctatcccatacatccttgtggtcttcatgaacatgcaagcatcgctcacctctggtaccatggaattccacaaccacgacatcactactgcatctgcttcatcccatgc

SEQ ID NO: 61075 - DNA, 323 bp, Glycine max
gtaggaaaattatgggcaaagcgttccttttttcttttctattgcttggagtgattaaagtttggggtttgttgatttcgtgcagtgattaagagaatggcacaagaaatcaagggaacccgtaatgaaagggagatcgtacctatttggttctctggttcgatagtggtggctgcccaatgaggactcgtggagaccaagtgtaagaaacgagtaaggaattcctaattcttctattgattcttttattatctcttttatatgtactctttctaattattgacgatgggaaaatgcgtgtaagccactgtcgtcccccatac

SEQ ID NO: 61076 - DNA, 257 bp, Glycine max
gagagagacagttgtcgcttcgtgaactgaatggaatgaatgtgaacgggacctgtatgcttcaacgacttcacattgtcttcacctaacactgctttgactgcaatttggccatgtaattttacatcatatcacactacgggaacgaggcgcctttgaacctcgagtgattctgccagcaatgcacctatgaggttatcagcaccagaatcggaagatcaaaactgagcattaaaggctggtgaactatactcgac

SEQ ID NO: 61077 - DNA, 231 bp, Glycine max
tttgacagtgtcctcaacagggcatacactgtgggggcatggcaacaggtgatatgcgatcagcgtctgacgatatcgacgcggtggaacatcgtggacctaggcataagaggccatgagtgtagctcgagtatgaacattacacgaaacctatgagtctctataaggaatgaccgtgactgttacaacgactcactaagactgagagagactatgccgactgctactttt

SEQ ID NO: 61078 - DNA, 312 bp, Glycine max
gcttgactgtactgctgctgatttgccaatggaggcaacccttaagccttggataaagcacttcaagttggaagtgtgccatttgatcagtacttgaggagcgtgaaggccctgtccaaggagcaattctttcaccgcgccactgtcaccaaagttagggctgctcaactgcaagctcaggttgccaatatggctgctcggagtcagcattatggttgctgaagctcgcaacaacgccatctggtttggtttgtgggtggttcaaatgatgaaatctgccattgtgagtacagaactacggaatggattttt

SEQ ID NO: 61079 - DNA, 121 bp, Glycine max
gcagacgacagaaggcggcagacacagttgatgacgaagttgcgcgagatcaaagctgaatgatctttgatggagtcatgtgatagctcgcacgtaggcagtgttagttgatgctgatgta

SEQ ID NO: 61080 - DNA, 363 bp, Glycine max
aggcgtgcaagcacgacgcaaggagacagcgtaagatgcacgcgcattgctacaactaacagctgcagctgcatcaggattggctcccagactatgaggaaaggctccaacatctacgtcgctataagcaaccctgagaaggtcccaatgcagtgcatgagaatcgttctatgcatgtccgaatctttagggacgaagccttcgtatagagacttgattctgcacttagaagagaccaaagaatgctgaaattcaaagtaggagaaggatactaaatcacatgcagaagggacatcaaagtcatacccagcttaccagagctgtagacgaaggactaccgtcgactctgttgaagttgcttat

SEQ ID NO: 61081 - DNA, 363 bp, Glycine max
  unsure (1)..(363): unsure at all n locations
gtttgaaggtcatcgacgacccgtgaagtgtttggctatggctgttgactccaacagtggtggtcctcgtgaggatgatcataatagtagctcttatctggtttacagtgcaggtttagattgtgagattaaagtgtggcaaatacgcgttccttcgctgtcgttgtgatcctttttttgttactacaattttttgctcccttcattggatttgtaaataggatcagaattttttttgttattttgatgtgtaacttggcttctttttttcggtgtagtggtatttttactactaatttgactganaaaataaagaagatttggagatggattcataccaccaagtttggattgggtttttct

SEQ ID NO: 61082 - DNA, 399 bp, Glycine max
ggaagagccagaggaaggaaagaggttcaaaccaacccacaagtttatgggatgccaagtccacccccaggtgcagttgcttcaaacaccttcttaccttcacctactgcaccccactcccactccaagcctgacaacactgataatgtttgatttcaacccaaacaccattcacatatatacatatcacattatcctaatcgctcacctcaggttggctgttgtgttgcatatttactttaggtatattggtgtaattatttggtccttgtagtaattcactccaataagatttagacccctgccccattttattcattaatttgtataacctctgttattttaattttgtctgttattctatgtatcccttgtttacaggttgaaagttcaatccac

SEQ ID NO: 61083 - DNA, 377 bp, Glycine max
ggaccaaacaggaaaagtcaaaatgagacaccgcggcgacgcagagccaccgtcgcaaccccaatcttcaccgtcaaattcccttcctcatcggaagaagaaccgcaagcgcagagccaccacttccgtttcctccgaaaccagctaccccaatggccctgaccagctcaacactcacattcatcacgctactgttgtgtgccaggacaaacctaaaccggaagagagtaaatccgctgtcgtcggcgaaggtttccgtttcggtgagctaaggcagagaagcgtgaacggtcgcgatagtttcggagaatcggcggttacagcccgtggtgacggctacgtgacggaaggtaagtcggttgcaacggcaacgtcag

SEQ ID NO: 61084 - DNA, 104 bp, Glycine max
cagcacctgtgcaagaagactactgaaagttacgagttatataagacaacataacgtatcagttcagtgatgacgacagagatattctgatgcgagaagactac

SEQ ID NO: 61085 - DNA, 405 bp, Glycine max
ggaccaagatcacgatcatattcatattctctagctcccacaaactccttttccatttgccttttggcttatccaaaataaaaaaccaatcgtgggttccgtcaattctcaccccatgtcagaaaagtattgttgcatggtcatgagaatcaacgtcgactgcaattcttgttgcagaaaattaaggaggatcattctaaggatgaaagcgatagagaaccatatgatagagaagcagcagcgcagggtatttgtgtttggcagatttgaaccaggggatgttgcaataaagataaagaaaaagatgaaccgaagagttgagatccttgaagttcaagaaatggagggtgaagctcaaaatgaaggagaatagaaactagatagaagagagaagagagaatcatg

SEQ ID NO: 61086 - DNA, 392 bp, Glycine max
ggaatcaatctacaaacagaaacaaagaaacagaatgtgaatcaaccccaatacaatgcaggtagtccaagttcagatgtggagaccgaattgatcattggacttccggatacaagaacaaggcgcatcgttcatcaggtttagtagaagattatttattccctggctatggaaaataaaataagggtaaaaataatgatagaataattccaaatcctcttacaatatcttcctgataatccttctaattattaataaaatgaagaaggtattaatttttttctctgtttccaaagtgttaaaatgtttttacaattttcctttaatactttctttatgaagtattaagaagagtattgggaagatgcatgttataagaggatatattatta

SEQ ID NO: 61087 - DNA, 135 bp, Glycine max
tcgactgatggggagagaaggagagagaaggatgtctaaccgtgttcgtggtggttcggcggggaacaagttccgcatgtcgttgggtcttccattggcggcgacggtaaactgcgcagacaacacgggggcaaa

SEQ ID NO: 61088 - DNA, 352 bp, Glycine max
ccactcgtccgtactgacgccagaagtttacagttttcggagtcgagagaacgcctgggcactagtctctgtcaaggtctataatcggttcgttcttcattcacgaatgatctggtaggactctttaacgactccatctctgtaggttttcaaactacgatctgggcattaacagtattccatgactagtcccttaccatatgatgatcatgatcataacataagttaattaccgtattaattcactactctattaccaattgaaacgacttttgttgtcaggtcattttcagattcttcattttgtcgatcatcatctatgtgtttcacatcatcattagatattttaatt

SEQ ID NO: 61089 - DNA, 301 bp, Glycine max
cttcatcgagggcaaataataagatacaaaaaaaagatcgataaaggagaaagacagagaaaaaagtagaaaagagaaagaaaaaatttgaaaaaagtaaagggtgagcagagataaacgaatagaatgataaaaaaaaaaataaatatgaaaaaaaaagaaaaaatcgaaaagagaatatatggcctgatagaaaaaaaaaagaagtcatagataagaaagaaagtaataacaaaattagtagcacttaaaaaaataagaactgaaaaagaataaataaatgaaaacaaaaatagcattg

SEQ ID NO: 61090 - DNA, 366 bp, Glycine max
gaaaaagaaacacttaaaaggagaagaaaataggaaggaaaaatgcattgaatttttcccacaagctaaaattaacttgtatgataatggaatgttggtagacacaataactagaaatattgtcaccactctaaactgttttgggtacaatatattggtgaaggttgtgaaatgttagaaaaccaacccatgtgtaggaaataaggaaacttttagtgagtggtgacacatttgaactagaatttgggtattttgtatccggtccagaaaatcgttttgtttaaagacaataacaacacattaacttcgtgggattgcaaggaaaaaaatgttgggagaaattgtagttgtattggattggtaaaa

SEQ ID NO: 61091 - DNA, 387 bp, Glycine max
gacaaaacaagtgtttcgaatagattatcctaagtctttgggaatagtgctgcaatggcttcaagtcaagaggaggtgacccttttgggagctactggaagcccatttgtgtgcagggttcatattgccctcaagttgaagggagttcaatacaaatatgtcgaagaaaatttgaggaacaagagtgaactgcttctcaaatccaacccagttcacaagaaggttccagtgtttattcacaatgagaagcccatagcagagtctcttgtgattgttgaatacattgatgagacatggaagaacaaccccatcttgccttctgatccttaccaaagagccttggctcgtttctggtccaaattcattgatgataaggtttttggtgct

SEQ ID NO: 61092 - DNA, 376 bp, Glycine max
gcaacaacttaaaataaagccttcttcaaaatcttatggctctcactcttatccaaggaaggaccaagcccatggaattttgggggctgcaccttcaaaacccaaggaagataagggtaagaccatagataaatacacccctaagactagttcccaagaaaggactagcaatattgaatgcttcaaatgtcttaggtgaggtcacattgcctctcaatgccccataaagaaaaccatgatcatgaggggtcaagatatttacagtagtcaagaggagactacttcttcccattcctctagtggaagtgaagatgaagtaaggggtgaagagtctagtgaggaagtctacccccatgaagaaggtgacctcttaatg

SEQ ID NO: 61093 - DNA, 240 bp, Glycine max
gtacaccatgccgaacaactatcctatctcggtcagaccgtaccggtctgttaatacatggattcaattctcatccacatgattcgggatacgcttcatttatgttggcccgaaccggaggctgagcgtaatgtttcgccccctgcttcacaattcttaagcagacttccttgtacatacaccgttcattgcactggaacgctttctgggacactctgaactattcagttccaatgctat

SEQ ID NO: 61094 - DNA, 350 bp, Glycine max
gaccaccgaaggggaactgaaacaacaaatattagacatcgatcggttaggttacttgctcgaattgcctcgaatcgctaaattggaattagattaggtaaaccgcaacgagtaatctatcgcctcgaactggatagctctcaggcaagaggttcagacgctgattacagcaacaagcggttggtgctcacactgcatgactcactacactccggcgactcatacgccgtcgtaaacatcgtcgccggcgacctcaagtggtggatacatggtccgacctcacaccagtgtctgatgggcatgctcaccgtcaactgcgctgtcgacaactgcttccacttccttacgga

SEQ ID NO: 61095 - DNA, 70 bp, Glycine max
gggtacggctgaagagacgacgagggtacgtggagaagacaagagggacggctggagaagacaagaaggt

SEQ ID NO: 61096 - DNA, 355 bp, Glycine max
gtctgctcttatcgcagaatgattcagatcgaagaatgagcgcgtcatgaagattgtctgaagagggtcacgggatctgcggtcacagcgtatatgatttgaacgtacatttatcgagtggtgaagagtgcgagttgtaggtagggtgggatttgctgttatatctttcaatgcctgtcacattatgggatgcatgcttgcttagtccgttaagatgcatctgcctgtgatcgtgcttaccgtggatgcacctgaattatatactgccttgattgatctgctactagatgctctgtgaaccgacctgttattggaatgaagcgtgctgatggccttggatgcggctgccaacaat

SEQ ID NO: 61097 - DNA, 380 bp, Glycine max
  unsure (1)..(380): unsure at all n locations
aggcgtgcagagacgagtgagggcacaccgaacaagaaagcatacgctcggttgtgagaagtacctcggcaggcgtgatcgagagggatgcataacagttggcatgtgggagaagagagngaaatacgctattgaggagcattggaagcacgtggctcctagctaactcactgggatacttgattggagaccgcattgtgaagatcatcgtggactatgccagatctggacatgatgatccgacccatgacgcgattccatctgtgcatggtatgtaagagctgcgaacatggatcaagagctgactcatagaattagaataagcgctgagacagtgcagatggcggtggcgagtatgatgctaatagtgtatatgttaa

SEQ ID NO: 61098 - DNA, 387 bp, Glycine max
gacagacaaacaaacaatttaccagctatacttgttccttttgaaggttagaagtgctacaatacaaacaatggcagctactcaggaagatgtgaagcttttgggtattgtgggaagcccatttgtgtgcagggtccagattgcccttaagttgaagggagttgaatacaaatttttggaagaaaatttgggcaacaagagtgatttgcttctcaaatacaaccctgttcacaagaaggttccagtgtttgttcacaatgagcagcccatagcagagtctcttgtgattgttgaatacattgatgagacatggaagaacaaccccatcttaccttctgatccttaccaaagagccttggctcgtttctggtccaaattcattgatga

SEQ ID NO: 61099 - DNA, 377 bp, Glycine max
cgcgtacgcacacgaccgagaggacgactgatagggaacgatagcgtgcgagcagcgccactcgcgtattgatgtatattggtatcagacatcacattgtagatagagttgaccacaaatctgatatgaggcacacgctgccacacactcatgactatgaccttcttcgtacgcgacgcagcgatacgcacagaggcaattaacctatatactgattacgagagtaagctgctgatcaaacaccagcccatgcaactgacgtctacgtgcaaccgcatgtgttgaagtcaactgtactatgagattgctgaggtacacaaagtgccatgactactatagatgctgctatcagatatgcacggatcataatatgtcta

SEQ ID NO: 61100 - DNA, 165 bp, Glycine max
agggtcggcatttgaaagagatcaagcagcttgcattgaagatctctgtctcttgcaggttgcatgcactactcctactggagtggtagtatcacaagctacgattccgggtccagctttaattgcatatctactctctatgcactatagccactccattcacta

SEQ ID NO: 61101 - DNA, 417 bp, Glycine max
cccacgcgtccggacgacagaaggggattgtgtatattaatagagagacataaaaaataaacatatattgagaatggagggttgtgtgaagaagttgctatgccttgaaggttttgtggagctagttatttttttttatttaacattaacatttgcgcaaaaaactacacccttccaaccgacattgccaagttattacaatcacacttaccaattttgaccaagcttcatgctgtgtttttgttttttttgtttttttttttattatttaattttatttttttttttttttttattttatattttattatgtttttttttttgttatttttatttttttttattttttttgtatttcgttgatattttgtctttgggatttcaatgaaattgtattggttttggctatgtattttg

SEQ ID NO: 61102 - DNA, 286 bp, Glycine max
ttttctctcttttggtaataaatgaatctattctttgttgttttttagtgtgaaaaaatatcattttgcaccccaaagatacatacagttaggataattatatttaaactcactctttctgttaatctattttttcatctaatttttctttttaatttaatccctttacttgtcatgttttcacattctttctctttctctttcttttctttgcttttttctgaatcctttactctacacctatatatccactccaaatttagatggacattaacctttaaccttc

SEQ ID NO: 61103 - DNA, 377 bp, Glycine max
tatgttcaactgtggctgcagttgccactgtagaccatgctgactaaatattcactataggtgctgtgatggcaggctgaatagtgttatgagagctcactatttagcatatatatgtatatgatcaactttcaacactaagtgctctttatcctttttgggtgtgtgtcaacataaaattaaactaggtagagaatctgtggtgcatgcacatctaaaacatatagattattgactaaacttaccttaataatgtctggtggtattatatacggtccaatggaagataaagctgccgttacttgagcacgtttggtaccgaatacagttattgctgggttgattatcatactgtgattcctgacctagtgtaagca

SEQ ID NO: 61104 - DNA, 357 bp, Glycine max
ggcagttcaattccaatgtattccattctctctgtgtatttccctacctctcccttcaagatgcagatcttcgtcaagaccctcaccggcaagaccatcacccttgaggtggaaagctctgacaccatcgacaacgtcaaggccaagatccaggacaaggaaggaatccccccggaccagcaacgtctcattttcgccggaaagcaacttgaggacggccgtacccttgctgactacaacattcagaaggagagtactcttcacctcgtcctccgtctccgtggtggcatgcagatcttcgttaagacactcaccggcaagaccataaccctagaggttgaaagctccgacaccatc

SEQ ID NO: 61105 - DNA, 138 bp, Glycine max
tcgacaaaagtttatgtttgacacggataaacattcttacaggtaagaagtgattgaaaagcaatctaaatcttaagtcattcctactttgagccacagtcatagatttgtaactaaatagcattattcaaacccatt

SEQ ID NO: 61106 - DNA, 278 bp, Glycine max
gggctataggggggatggttctaacagcaggcttgatgtttataagcaaaaggaaaagccataaccaacgccagaaactagcagctataaagcgaactgcaaggaagcttgaaagcaggatgatggaacaacggccttctaatgctcaagaaaatagaagagtttctagataagtgttaccttgtatgtgatgttaagaacataattagttttactaatttgtaggtgaatctcgagttgtacgtactcttgctttcacgatctatcttctttttgcc

SEQ ID NO: 61107 - DNA, 291 bp, Glycine max
gaggcatagggagagggacacgtgtttcatttgttgaatccagattgtggcaatgctgtttccttgctcgatcgagttgcttcctttatcaaccatagttatggatacagttatgagtttctatgtgatatgtctgtttgcacttgttacttgttacttgttagtaacatccttcctttacttgaggttatttatgagaatctgcactttctgtttgatgtagcgtatgtcactcacactgactatgtatgttgagcaattctagcatctgcttgaaaatatgttctattg

SEQ ID NO: 61108 - DNA, 409 bp, Glycine max
gaattttattttttttaaatgaaataaaaaaaactaacataatgttatttaatattttttaatatttgttttattttaaatacttaaattttaaaaaactaaaattttaaaataaatattaaaatattttattattaatattaacttataatttatgaaataatattatttattttatataaaaaattactattaacaacatttaataatttaataataaaagtaattattaaattaaaaaacataatatattaatataaaatcaacaatacaaattaaaaaaattaaaaaaatagaaattatattaaccgtctacttatcaataattactaggattatattagaaaatatattaattttacttaaatgtcttaaatttttgaattaaaggcttttaaaaatttctttt

SEQ ID NO: 61109 - DNA, 336 bp, Glycine max
tctagtgtgtgattgattgatggtgtaactcgatcttcttcttttgttgttctgtgtttgtgtctgacttttctctcacctgaaaatgtcttgctgcggaggtaactgcggttgcggaagctcctgcaagtgcggcaacggctgcagaggctgcaagatgtacccagacttgagctacactgagtcaaccaccaccgagaccttggtcatgggagtggcacctgttaaggctcaatttgagggtgctgaaatgggtgtgcccgctgagaaccatggctgcaaatgtggaccaaactggtcctagcacccctgcacttgcaagtgaggtgttgggag

SEQ ID NO: 61110 - DNA, 303 bp, Glycine max
acggaggtggcattgtgaattaaccgaagaaccattcaattattgagaggccttaaccttattatgggaaattatggaagggtgacctaatggtgaaaattctatatcctttgtgggttttggggcctttgagagctctattaaaggtggagagactctgaaagtggaaatatccaccccccaatatgaggcgtataagcttgtaccatgtgcctcatcagcacaagatgagaatgctagtgtttctcagagttgctgtgctcatgtgaagaaaattgtgcaaaacccaagctggctctgtac

SEQ ID NO: 61111 - DNA, 252 bp, Glycine max
gtcttaccgtgtgaacaatatctgaagctagggatgaaattggttcttttcgctcacaggagatggtacttatgacaaattcaagtggactgaatgcatacagtgcaggagtagggcgtctacgacactgaggccctaatgtttctgaaatacccgactcccaattaaccgtccactcacctctatgctctctgcatgttaataactgatagtgtgtttcttctgctgattacctatatgctatatgatgat

SEQ ID NO: 61112 - DNA, 362 bp, Glycine max
ccactgaaaggggaaccgtgaaccaaaaggttactctagaaaggtacagggatttcataaagccagacatgaatactgctaacggcaatcttgcaaagcaggctatggtgataattgctgtacgtaataacttctagatggatactttcaagccgatgaacgagttccttgagctaatgtaccttaggaatcactgatcaagtatgagtgacaagccaacaagataactgctgaatactattagaccttggtcatgtattatacatcacagattttgcgttgttgtaacgtgctacatagatcactcattatgtaaatgggactgtgctaagcattgataaaaaccattctacaaaagctag

SEQ ID NO: 61113 - DNA, 166 bp, Glycine max
acgtgagaactgctggtgttggttactgaatggactccaagttgcaaaaggatggcattcgaaacatggtaacggagctttctatgcgattgaaacatttccaatggcatagaaagcttcatgagtaggcggacctaccgccgtctgctctgcagcaccaacgata

SEQ ID NO: 61114 - DNA, 362 bp, Glycine max
gacatacttaaaataatacgggttaaccatgaagtttatgtatcttgcattgctacatctatgtgtgatctgtagacaattcttgctcggaggagcatatgctttccccagacaagtgattgacacataatgcacgaaagttcgagctgtcgtagattactatatcagaccggtcctaacatccacatgtgatggccgtggaccgtgtgtgattggaagtggctatgtactgatagcaagttcatcctaccacacttgcccacttagtgttgcgttgctggagggcctccatggactatcgagcacattaaaactagttaaccctaacaaaggtgtcattaggctgtctactgacttgaaca

SEQ ID NO: 61115 - DNA, 364 bp, Glycine max
ggcagttcaattccaatatattccattctctctgtgtatttccctacctctcccttcaagatgcagatcttcgtcaagaccctcaccggcaagaccatcacccttgaggtggaaagctctgacaccatcgacaacgtcaaggccaagatccaggacaaggaaggaatccccccggaccagcaccgtctcattttcgccggaaggcaactggaggacggccgaacccttgctgactacaacattcagaaggagagtactcttcacctcgtcctccgtctccgtggtggcatgcagatcttcgttaagacactcaccggcaagaccataaccctagaggttgaaagctccgacaccatcgataacg

SEQ ID NO: 61116 - DNA, 354 bp, Glycine max
taggggtcaggaacaaaggcagatgcgcgaaaattagcgaatctaatattgagaaacatccagcatgcttcgagatcgagtgcgcgaactccttttaggatgagattatggacattgcttctctggagaagtaccttcaagagaggtttaagggctgcggcctggcctgtacagtcgactattccattaccatcaccagtgacaatagcacgataacagacacttttaacagcaatttctctaagatagagctgaaatattctagctctacgaactcgataaagcgcagagcaagggatcggcatcacagtgttgaatccaacacggagctcagtgtgtatcaatggagatgct

SEQ ID NO: 61117 - DNA, 226 bp, Glycine max
tgatagctaagattggtaaaaagatgcccattatcacaccggctggctattttgaggagctgggagaaaatgctattgccggcgcacaggctattgactctgtaaatgatgcgctcgaaaacgggtcgccattgacgaatggcttaaaaagaatgcacgtataccatgtacccgcaggctattatgaacaactgcctggccaggtattaaaaacaattagagcaca

SEQ ID NO: 61118 - DNA, 92 bp, Glycine max
cagagagggttcactactagtactacgacccaagggttcagatgctagtatacgacagttgggggcaccttcttaaagactacagagggctt

SEQ ID NO: 61119 - DNA, 55 bp, Glycine max
atagcataggcaaaagggatgaccatagctcatgacgcacttagatgggtgtacc

SEQ ID NO: 61120 - DNA, 352 bp, Glycine max
aacaaacaatttaccagctatacttgttccttttgaaggttagaagtgctacaatacaaacaatggcagctactcaggaagatgtgaagcttttgggtattgtgggaagcccatttgtgtgcagggtccagattgcccttaagttgaagggagttgaatacaaatttttggaagaaaatttgggcaacatgagtgatttgcttctcaaatacaaccctgttcacaagaaggttccagtgattgttcacaatgagcagcccatagcagagtctcttgtgattgttgaatacattgatgagacatggaagaacaaccccatcttaccttctgatccttaccaaagagccttggc

SEQ ID NO: 61121 - DNA, 76 bp, Glycine max
cacggggaatagtggatgcggcagactagaacatcggatggcgatggtctacatggcattcagtggctgcactgcc

SEQ ID NO: 61122 - DNA, 320 bp, Glycine max
ggctccacagattgtgatgagtttcgatctcctgagatttatagtttgtctgctgtggctacttcaaacttagagatttacaagatagagtctggtacaacaacaacaacaacaacattgacccatgtgtgaaggtcctagtttgtttatgctgatgatgagaacattgtagtgggtggtatatttctcttatacttttttgtggtgatttttatgtaccacatgacatgacaaccctcgttgctgattatataacccctagttgaaagatttacaataaacgaaaacccttaacaaaactgacagctcgaaaatgtgca

SEQ ID NO: 61123 - DNA, 343 bp, Glycine max
agtgttgtggaaatgtggttggtcctatgatggcttatgggcctgtgattgatattgcttcatcttgtactaatgtagcttatgacaggcttcccttggtatgaagaggaatctatgcagatgcatcaagggcaatcatctgctggcagtggtggtagcggctgtagcatcattgattactttctatcggacacaatttctgggctttcattcttcaattggtaccttaacatgcctaagcctcctgttaatggttgttctgtggactctggtggaaggacctcttactgatccagcttcttgtatgcctcagaggtctacaattgaatacatcttatatata

SEQ ID NO: 61124 - DNA, 424 bp, Glycine max
gctggccttccggtacagtacagaggtaatcacttatgaattctataatttcttgctttggctgatgaaagtgaagtcttgaacttgaatgaagaaggatggtggattctgaccttccaccgagtccaaatgatttcctatttcccccaatcgaccacgaaaatctccaaattgcgtcacaaacccctccctcacctccttcaccccaacccttcgattctcgtcttcgcggctggattagtatctccttccacatattgcgttccaagctttcatctttgatgcagagagggccaatttggtcaattgggctgccttctgcagcgcttctaatgtcatgctggatcttcatctccatcaggaagaagataaccctcacgcccaatgaagcgcgtctcgttaacatcatcaaggacaaagatcg

SEQ ID NO: 61125 - DNA, 392 bp, Glycine max
cttactcagactagtttgaaagatcttcgccgctctcacctgaatgctctcttagcaagcattgctgaaactgagaagcaaactgaaatggctacaagggtttcagcgtggaaatcaaaaattgacgacaacttgtaagaacaggacttgcatccaccatttgatatccaagactatggtgagaggattcttgacaagttctccctgctttcccttgaagcaagcagtagtggtgtcctatccttttctgatttagcgaagggtcaaaacaagtatgatgtggctcagaagttcatcttcatttcttcaactggtaaacaatgcagatgtacctctagagagaaatggagttgatgggtctgtctgattactcatgcgttaatcccttacat

SEQ ID NO: 61126 - DNA, 328 bp, Glycine max
aggcgtgcgaacacgacgacgacagactgcgactgtgccaagaattcataacaaggtagctacaaaatcgaatggataggaagcgatgtgcccatatgcataagacaggtcatggaacttgggatgactataagatcactgcatgcttgaaagatgattgccataaggtcaaagcacctgtcattgtagcgttcgctgccgacgtatcaaacatcgatgacgacgagcctacatcagatgcatccgtggacccgacgcagctgatgggcacaagctgctgcacatgcatgtgcactgtaggtaggcacatccttcgacggctcaacat

SEQ ID NO: 61127 - DNA, 53 bp, Glycine max
tacggatgcaaaacgactacagatgggtaggcctaggggaagacgacagaagg

SEQ ID NO: 61128 - DNA, 404 bp, Glycine max
ggtcatattctccgatatattcagcatggcatccttaaagtgaacttcttttaagagtctttggttttccagatccagatggaggaaagcaggaacaacccttctcaagttgacagcttccaggtggatgaaatgcacaatcttagcattgttgaatggaaaaagaaaagaaaattacagagcgatcagctggatttgcttagacctaaacatagatgctgggttggaagtttctcctctgcacatgcttcagtgtttgatgagaatccagttttagagagcatgcataaccacacagttgaaagctcggaacctgaatctgccaaagacagcaatagtcttatggaagactgtgatactgccatttctgtaaatgaagaatcccaacctgaggcggattgcgg

SEQ ID NO: 61129 - DNA, 296 bp, Glycine max
aggcgtgcgaacagacttagggtactacagaagggcatggatggaacgggaagggaggtatccgatgatatctgccaataccatctctattgggcttgcatcagttattgaatggtaatgagtctatagaggtggtccagaaaataagtccgacactagcaattatggctaaactattggatggatggagaatcaatagttgcagcccattcatggactgtagacattgtaaagcaacatatgtcagaccttcaacgaaacgaagcaaatattttattggctcaaccaacataaaa

SEQ ID NO: 61130 - DNA, 153 bp, Glycine max
tcaagatgcgaagatacaaacatgggaagcgtcataacctaccactaagaagaaagcacggatctattttatcattggcaaacgctaacagagttagtacacttcatcgagaacgtatccgcaggacattgtcatataccaagtacttaacga

SEQ ID NO: 61131 - DNA, 380 bp, Glycine max
tcgacagaaggtgatggaatataagatagagtggctgtgtagaactcgagactattcacggctgatatatatcttctgcatagtctacgtgtctatatcactgattcggtaccgcatgagggtgctctagattgcctattgatccagcttaagcatcttctggctgaaagcatcccaaagctagagatctgtgtgttgacattgggtgatcaagatcagcatatgcattgctatgagctgacccttctcattgcctgctgatccatgagtaaagatggtatgcatgctcatgttcactaggtgatagggagcatttagagcattgtggctaagatacttctatgagtcggcttatgctcccgaatatccttcgatgagca

SEQ ID NO: 61132 - DNA, 155 bp, Glycine max
aacagacgactgaggttccagttgcgataaggcgaccgatggctggggttgctcgaggactaccgaagggtacggctcccatatgacaactgaagggtacggatgctagatgaccacagacgggtaccgacgccataagactccctatggctgcc

SEQ ID NO: 61133 - DNA, 365 bp, Glycine max
tataagatttgattgaaaggactttgtgaatttcatattactggagtcatattacaggaaattttaaaagatgtgaatttaaatacattgaagaggcatgttattggagtgtggtcaattggaaagatgaatctagtttcgtatatgggagcgggttgagcaagtatagcagcgattttgacatctgcaatgcaagcattagtgatattagggggcgtgggttatccttttaccctaccatgttcaggcacttattgtgcttagaattgtgtacaaacgggaaattattaagtagtggacatgattgtgaatgtctatattgtctgtacagatagagaaaaaatatgggaaaaaagaaagtccaa

SEQ ID NO: 61134 - DNA, 367 bp, Glycine max
  unsure (1)..(367): unsure at all n locations
gataccaaaaacaaaacacaagccaagtgaaagtgagaaaaaataaaaatcaaagagcataatgtcagggatcattcacaagattggggagacccttcatgtgggagggcacaagaaggaggaggagcataagggtgagcaccatgctggagaatacaaaggggagcaccatggtgaacacagtagtgagtacaaaggagagcatcatggtgaacacaaagctggagagtaccatggtgagcacaagccagagcacaaagaggggttcctagacaaagtcaaggacaagatccatggtgagggcggcgccgncgaaggcgagaagaagaagaaggagaagaagaagaatgagcatggccatgagcat

SEQ ID NO: 61135 - DNA, 399 bp, Glycine max
  unsure (1)..(399): unsure at all n locations
gtacaagaagctacgtaccacttaccacaggaagactctcgtacatcttgctgccaaaacatcaacagtatgagcactgacatgaaatattaagaaattaaaactggttttggcaagtatgtatttgatttttggttcattattgtcaatagttatcattggtcaaagatacttgccaccaaattacatagagtcacagtcgttgggatagaaccatctactacaaattagattgttcatatatgtgcagcctgagattgttcattgtggtgacattgtcgagtggtttcatgccacttggaatgaggtatggacttgcatttacttttctagtttgccatcggctatcttcaactntatttgtatgaactctgaagtgtgctgtancttatgagatca

SEQ ID NO: 61136 - DNA, 145 bp, Glycine max
cccacgcgtgcgcacaggtgcgagcgtccacagagggggactcacgagttaacataattacttgccttgaggaacgttccaaaccacatacacaggtatatctagtgatcttcgatcttctgtggcgatcttgttatgtcatctt

SEQ ID NO: 61137 - DNA, 171 bp, Glycine max
tatagacaggtccacgaaccttgtccgattcaagggttcaactatggttgctgcactagagcacattattgagcccatgaagacctttgacaagctggtacaggctgtgagttaatgatgtgtacatgattgtacgtatcttaactaggccattggaacttgtacgagacc

SEQ ID NO: 61138 - DNA, 381 bp, Glycine max
accactcgtacaagccgacgcaaggagacgcccgaaggggaggatgtgccacaacaggtggatcaaaggtgccaattgggcaatgaagatgcatgagataagtgagttgaacggcattctgctaaagctaattcaagtaatagaggaacagtgcacgatgttactatgaagcagggcacatccatgctctaaactattacacgtatacactgctaggtcacaggacgatggtgatctaacacctggatctagtatatgcaactaacctagtgtgaagcagatgatggtcacggtccatgcttgtgatacatggtgcacactgagagctttacggtatgacatagaatgttgccgagacttcatggacgtaatacatgatta

SEQ ID NO: 61139 - DNA, 390 bp, Glycine max
tatggagactgcttttgaaactaaaaattatgatcttccctccagtcaggttcgaatatataaaatgttttctgcccactaagatacactatcagtaaaaatgtccggtactgtatgagaaagcttctccagaaatacttttaagagaagaaataagaagaaaaaaatgcaataaacttctttacaagataaagttagatcagttagccattatttaatttgtagatgccttctcatcttttagaaaagttatatgagagaacttctacaaatcaattaatgattaatcaatgaaaagataattttagcttatctaaatttcatttcatttttttaaaaaaaaaattgtctcttaaaagtatttctaaaaaaatttacccaaatagatga

SEQ ID NO: 61140 - DNA, 392 bp, Glycine max
gactccgagtgtaaggtggatcttcgaatcaagatctggaagttctccttttaataataattaatgtcttttttgattgattgattgattgttataatcattgcgaaaattcgttattatctatcgacatcaatttcaataatcaatccaataatccatcgatcccttttctctctttttttttttttagtttttgttttcataattgccttgggggatggattgattatggttacttacttttcatgaaacgtgcacaaggtcaaatttgtatggggaaatgaattttgagcttgtaatatgagatttagggcagaaagaaagccctgaatgtagtttttgtattttttaaaaaaaattaaatttgtcattgtagtttggtgatgtaattt

SEQ ID NO: 61141 - DNA, 412 bp, Glycine max
aggggaatctcagcatgatgacacagatgcagaggaacaaatcatatcagcttttcagaacattactgcttccactgcagcctctgacgaagaattgttgaatcaactggagaagcttgaactggagaaacacgatgatatccttaacattcatgttaaggaaaaccaagaggctaccacttccatagatgtcactgaaggagagaaaaaagttgttcttgttcatgctgaagaaagtgctggtgcagtcacagcttcatacaacttggaaaagcatcctctttatcctccaggcaggatcatgcatattgttcctgcaccatctaattcatctgaaaattctaattcagatgactatgatcctgatgagaagtacctttacttatatgaaacgcctaaacagctgtatgga

SEQ ID NO: 61142 - DNA, 129 bp, Glycine max
tttaagtttgaacacgaagactactagattgaggacagggatcttactacgatactataactttaacattttctaatactactttaacatacctttattatcatatatactatttaattacatccataa

SEQ ID NO: 61143 - DNA, 116 bp, Glycine max
gcgtccaacccgcagcgacgacgacagaaggggagacagtgtggatcccacgatcacgactgatgggagccaacccacattgcacaacgtggagcactgatcaacagcagctttgc

SEQ ID NO: 61144 - DNA, 205 bp, Glycine max
ggctgcgactgcacgggatgatgaggactgcagtggcgacgacgccgctgtcgcttctcgactggtctgctccttgcatttctgtccgttctgctgcctttgctcctctgttgtccgtggtctggtcccttcctgctcggcctctctcttgcttccccctactctctccctggtccctccgtcccttgcctgtccttccgccccg

SEQ ID NO: 61145 - DNA, 104 bp, Glycine max
cgtccaacccgatgcccgcggacgacagtaggggggtgtttcagttgaccgtgtgttctcgcaccttgcctggcttgcccccgatcgcccgtccggtggtcttg

SEQ ID NO: 61146 - DNA, 75 bp, Glycine max
cgctgccagacgacgacacactgggggaggatgattgggatgatgctcctgttcgtgctggtttctctctccagt

SEQ ID NO: 61147 - DNA, 334 bp, Glycine max
gatgggagaggttatgcaatatggtatgagatgatgggggttgtgtatagtaataaattaataataccgataatgatgtggttgtggataccaaacaccagtcctcatacgttcaataaataatgatagtagtagtacaattaagaacggaatgacgttagatccacgtccactggttccactacgctacacacaaagcccaagaatatttctacttctacttctactagtcaatttcctcatcgccttcttgtggagagagtgagagttcaccttacaattttcttggtggactcaactttttttttatgtcttcccatgtttaatgaattgt

SEQ ID NO: 61148 - DNA, 283 bp, Glycine max
gaacaataataatagcaataacaatagcaacgagaaaaaattaacgagggaggggagaagagaaagaacgaaggagacatttataaaaagctctttcccttcccctaaatccctcacactcattccatttttacctttctctctcgctcgcaaacgcaaattataaaaaacaaggttttagccatggcatcgaagcggatcttgaacgaactcaaggatctccaaaaggatcctcctacctcatgcagcccccgtcctgttgctgaagacatgtttcactggc

SEQ ID NO: 61149 - DNA, 301 bp, Glycine max
ggcatcccaaattcaaccacctactgcatcataaaattcttaaggatggccacatcagaagaaatttcatctttgaaactgttaggcgaatatctcttgggggatatttcagagccttttctcaccaatctcattccatgtaaaactcgattactgctcatcacaacttgatattggttcaaacttctcagaacatcgcagcttctgcaacttgctcgaatgcattgattttgatccacacacagaagtggtacgtctcacctctcatccttttgtccaaatctccatttaaataagtctt

SEQ ID NO: 61150 - DNA, 173 bp, Glycine max
gaatcacatgaggagcaagtcattgccgtgtttgacctcagaaatcataaccacgacgcgggattgggggcaacgcagctcacgctgccctcgggagcgcagatcatctcacatttcattctcctttatgctcctctctcaccatttttccgttaaaaagattattattctga

SEQ ID NO: 61151 - DNA, 264 bp, Glycine max
acagaatgggacagacaaacaaacaatttaccagctatacttgttccttttgaacgttagaagtgctacaatacaaacaatggcagctactcaggaagatgtgaagcttttgggtattgtgggaagcccatttgtgtgcagggtccagattgcccttaagttgaagggagttgaatacacatttttggcagacaatttgggcaacacgagtgatttgcttctcaaatacaaccccgttcacaagaaggttccagtgtttgttca

SEQ ID NO: 61152 - DNA, 303 bp, Glycine max
gacccacaagtccaaccagctgccaaaagacgggggtaagcggtagcactacggtttgctctcctcaattgcctgcagcccgtagtctcagcttccatacacctactgttctgtgtcaggccaggggaatagttgctggtatctttgccgcagaaggatactttgtcctattattgctgcttagtgcgttagtggtgtagatccccacatgagttaggcttgtactgccgtttgtctccgagacaagcaattttgattgtctattatcttgctgcttaacttttgattttgacccccagtgct

SEQ ID NO: 61153 - DNA, 399 bp, Glycine max
gattgtttgttgttgtaactcgttcttcttcttttgttgttctgtgtttgtgtttgttttttctctcacctgaaaatgtcttgctgcggtggtaactgtggttgcggaagctcctgcaagtgcggcaacggctgcggaggctgcaagatgtacccagacttgagctacactgagtcaaccaccaccgagaccttggtcatgggagtggcacctgttaaggctcaatttgagggtgctgaaatgggtgtgcccgctgagaacgatggctgcaaatgtggaccaaactgctcctgcaacccctgcacttgcaagtgaggtgttgggagagcaagcttcaagcagagatagcccttaattaggaataatgataaactattaatgtgtagctaaaaacttatg

SEQ ID NO: 61154 - DNA, 184 bp, Glycine max
tgggaaacaggatcgataaatagagatataactcggttagaaagggtactaatacgtacttgcaggctgcatcaacctcgtatgctagttcaggctactgggacgttgtgtgcatacaagcacaggcaaattacagaaaaagtcatcatcatactcacaattagtacaaattaggcattgatct

SEQ ID NO: 61155 - DNA, 306 bp, Glycine max
  unsure (1)..(306): unsure at all n locations
cgtccaacnccaaatacgacagaacgggactaattggaattatacagctgcaaactgtgaacggaaattaaggctcgtaagtttcgatttcggttgcacattggggtggtagcgttgcgaatgcaccaagtcttgaagaggaaaaacacaaagattcggaatactttagtcatttggatcctctaaatttgatggactatatctaatctaggaattcgttcctttaagtcttcaaagttcatctaaggtttgcctttacaatttggtatccatcagatcgattaacctgcatctatgggccgaaca

SEQ ID NO: 61156 - DNA, 121 bp, Glycine max
gggagatttttgcggtcctcttctctcctcggtgctttcttcccgtctgcctctggtgtccgtgctgcctctgttggctctgctggtgtttttgctcgtcttttctctgctccggctgggg

SEQ ID NO: 61157 - DNA, 318 bp, Glycine max
  unsure (1)..(318): unsure at all n locations
ggttctagtgtgtgattgtttgttgttgtaactcgttcttcttcttttgttgttctgtgtttgtgtttgttttttctctcacctgaaaatgtcttgctgcggtggtaactgtggttgcggaagctcctgcaagtgcggcaacggctgcggaggctgcaagatgtacccagacttgagctacactgagtcaaccaccaccgagaccttggtcatgggagtggcacctgttaaggctcaatttgagggtgctgaaatgggtgtgcccgctgagaacgatggctgcaaatgtgggacanactgctcctgcaacccctgcac

SEQ ID NO: 61158 - DNA, 268 bp, Glycine max
gatagactaaacaaccaaatagtgtaatcagacatacctacttttttcttgtttaaagtgagaaggaaaaatggatagataagaaagggaacttctcttgtatacccgttaaggctgttaaatgaaatgacgctaattaagagtttccaatgagaagatatagagatcaaattaatattggtacttcacgcaagaaatgaatcaattctcttaatgagattaaaatgatatgaattacgaacgttacatcaaaatttactatgcaact

SEQ ID NO: 61159 - DNA, 368 bp, Glycine max
gttgtggaaagttgcatacaaatgctactgatggggctggcaattgcaatcgccatgcagatataattaatgaatccaaaaatcttgatgttgcggctaaaattacagccacaaactgtttttaaaacaacgataaccattcataggtttgaacgggtttcgcaagtgaggtgtgaagaaacctagttgtactatttaataagttttattgcatgtgttgcatattttattttctgtcagagcatttgtgcccataacgccttaatttgtcagtgtcaagcaacaatagtgctattctaaacttgttctttggcaaaaaaaaacagggataccaaaaaaaaaaagcggccgctctagaggatccaagc

SEQ ID NO: 61160 - DNA, 248 bp, Glycine max
  unsure (1)..(248): unsure at all n locations
tcctctttggcgtttcctcttcttcnttcttcccgtttcccttgcgctctggcggggngcgggtttttcttctccgctttccttcgtgctctggccttctcgggcctgtgcgtgtgccttgctgctcgccttcttttgctgtctcgtcctgctccctctttgccgggtcttccctgtttgccttcgcgctctttgcctcctttgccttctctttccgcgctgcctcnggcccctgttccgcctttgcc

SEQ ID NO: 61161 - DNA, 275 bp, Glycine max
gatgatcaacaacaacaaccaggaaaagacgttctctcctcatagctaggaaccgcagaaccctttcgcaaaattatacgtagcaacaccttcacaacattctataaacgaaagttaaaatctagctagggttaaagaaatgtccggggtgtgggtagtcacgaatggtgtgtttcgtttggtggaaaaccctcaagctgacgcctcagatgggaggcatgggaacggaagtagctcacagagaaaggtgtgggttcactgccaactggtgaggt

SEQ ID NO: 61162 - DNA, 51 bp, Glycine max
aaaaaccccccccgcaccgcaccaaaaaaagcgggcgctctagaggatcca

SEQ ID NO: 61163 - DNA, 410 bp, Glycine max
ggaagaatgaaaaaaaaaatgaaagtggaggaatgaaaaaaaaacgaaatagagtaaaaaaagagtgaaaaataaaaaatgtttggttgaaataaaatagagtgaaaaaataaaaatatttgaattaaaattggttgataggtaaaaaaaaaaaacatgtgcattatttaactctattcaccgtccctcttctctctatttaaaaccttaagatatttattggctattgtatgtaattttcatgtcggaaagaaatcttaaataaacacttcaacaatcgtattgatataggacatgtctaaaatgatagagctaatgtttttgtagccacttttacttttttagaagaaatgcaatagggaaaaaatcaagaggtctaccgttggaaactagaaatccgatgcaatgat

SEQ ID NO: 61164 - DNA, 382 bp, Glycine max
  unsure (1)..(382): unsure at all n locations
ggactggataaagtgtgctcttcaacggaaaattgatcactcctgaaacagtttcacgctgctattttgtttaccaaatacttttgttgaacccttttactcaacaaagatttttctcagttctaactgagaggtctaaagcaactaaatggaggttggagaaacagagagaaacaagcttcaagggcacgttccttgggtccccaccacccctttgatgcncattcttccaaaaccagcgccgatctggactcctatggagggaaaccacctatactctcattccaatgggttttttaaccaatttgctcaatgcgtttaatgcacagttcaaccccccaccgaccctatgcattacttagccatcaatatcatccctctc

SEQ ID NO: 61165 - DNA, 251 bp, Glycine max
gagacagagaagcattagcatttgcacgacgaactagtctgagcatagatggcctcttcagtgatggcatctgtggccctcagacctgcacctttcactgttgagaggtcctcagttataggccttccctccatctcaaggaactccgcttcatgcagagttgtggccagtggctggcaataatgatcatgactgacattcctgacggtattaatggttgcatgtctttgacggaatgagttgatgcatct

SEQ ID NO: 61166 - DNA, 286 bp, Glycine max
cgatacgacaacagacaggtagggatgcgagaagacaacactgcggtcctgctgctagattatcatcatctggtattgctgctataatattactcacgggtatggctgctagaagaccatacatggggatgttggtcttgatgctaacaggtgtcatgtgttggtcaccattgtgcacgcatccccagctttccttcagtgtgtgctcggccactttcacctctcgccctgatgatgttcgtgctcagtaccatggtcacatgtttgggtaagtcagctatgatcc

SEQ ID NO: 61167 - DNA, 355 bp, Glycine max
gatagtgtactcacacacgcttcatttttttcgcgtccgttcactcttttccagttttctacgttccctcttcttcttcagtcattcaagcgtatctcagttccatcctcgtttcgttaaccttctaattcattccattcgtcacttccttttcaaccgaagcttttctctgatcatcgcagagataatgaatggtggattggggaaacgtgactgcggaggatgtgatcgacgcgctccgcaatgtcgattggtcatctccgcggcgcatgctgtcggcattcttctcacgattcactgtgcccagatcttcgtcggattcgagaagccgcctcaggtgcaacctctactacta

SEQ ID NO: 61168 - DNA, 343 bp, Glycine max
  unsure (1)..(343): unsure at all n locations
ggattggnggtgtntnggttgggannnctctncttggtcgctgcggtgtgttgtgtccgtgtgttcgttgcgctcacggtgtcggaactttgcgtgttgcgagatcgatgctgaagtctgctacgtgtgcactggcgcatgtggcactggatgtggttgacattgggcccagtgctgatgctgctgtgacctgcaccacgtcacactctggtccttgtcttccagcaactaattcatgttctgcaacgtccagtgcttgttgaccgctcacttgaggagcaagaacgttccttctgtgggaaccccaatttacctcgctcgaagcactatgtcctcactcctg

SEQ ID NO: 61169 - DNA, 150 bp, Glycine max
ggttctagtgtgtgattgtttgttgttgtcactcgttcttcatcttttgttgttctgtgtttgtgtttgtcggggctctgacctgaaaatgtcttgctgcggtggtaactgtcgttaccgcaactcctgtaagtgcggcatctgtctgcg

SEQ ID NO: 61170 - DNA, 268 bp, Glycine max
gttcgtagaaggcaaattccatgctatgtgtttccggatggttatagacgatctcggccatcgcggccaacatcacaatttgagaattgtggatcagttgaggaggatgaggtttctgtgactgaacaggtggagagaatccgtaagcggaagaggcagtcatggtgtggatctgagggaggatgctatagttaaaaggcagtatgcgtgtcctcctggggatagactggcgagaggcagctgccttggtactggtggtatgtctgtt

SEQ ID NO: 61171 - DNA, 350 bp, Glycine max
gacggtggtgatgatccttttcttgatggaaatttaaaagctgaatcagtagccaagcacatgagagcaataatggagcctctcttgtccacaaagtttggtgcaaaagttataaatgaactattcaccaggtttcaaaagaaaattatgcaactgatggaggtggagaaatcggagtgggctactttgatgatatccatgataaaaactgcttgaagatgttgctcaataaaagatcttaaaaacttgtttttcttcctttatgatttttttatttatttgttcaaataaagttatggagcagtaacgacaaggcatatcataataaaagatgaacaactgtgttaatt

SEQ ID NO: 61172 - DNA, 260 bp, Glycine max
gacagacaaacacatactttaccagctatacttgttccttttgaaggttagaagtgctacaatacaaacaatggcagctactcaggaagatgtgaagcttttgggtattgtgggaagcccatttgtgtgcacggtccagattgcccttaagttgaagggagttgaatacaaatttttggaagaaaatttgggcaacaagagtgatttgcttctcaaatacaaccctgttcacaagaaggttccagtgtttgttcacaatg

SEQ ID NO: 61173 - DNA, 385 bp, Glycine max
ggggcattgcattgtggaggagcaagggaagggtgtggagaggtacacgttgaggttgcccgaagatgtgaggaggtacattctggtgaaccatgggaggagtgttcaacgttccgcgagtgttaagggggtgtgttggagtgatagtgaagagagttataagggaaagagggtcaatggagaggtgagggtggagaagaggtgggtgatctgcacaccaccatttgtgggacatggctgacgaatttcgtcgaacatttagtctgcgttacgctttgcctcttctctctgcgtctttgctgagaggaaaaggttgtgaaaaagtgaacgtttgagatgtttgggttgcttcactacattggtcgttgtcaattcttgcagagat

SEQ ID NO: 61174 - DNA, 312 bp, Glycine max
ggcattgtggaattaatagagagacataaaaaataaacatatatcgagaatggagggttgtgtgaagaagttgctatgccttgttgggtttgtggtgcttgtgagtactattggtggggtggagagtgctggcgaaagtagggatgcaacgacctctgcaactgaggcttatagacttgcgacacgtcatcgcagcagcacaggaacagatgctcttcgtgacgatccagattactatgggcgagtccagaacttctgatacgcaagctcctgttccagcgtcatgttcgtgagatttcacacgacctcaag

SEQ ID NO: 61175 - DNA, 307 bp, Glycine max
ggtgaggtaagaaatcagccatcctgtgagaagtggtcaaatgatggttcagtcttctctgcgtcttcatcctcgatcaatcgttttccatggttcgtagtattcaaactgttcgcaaatctaccggtgataaggctcttacgaagcatagcaatatcacagttacaacgctcacggacttcaaatatagttaagtctgaaactaataccccttcataactataactattactctggcacagatgcaacatccagtggtcccatcaagggctcagataacactgctacgatccacctgtaagttgcc

SEQ ID NO: 61176 - DNA, 246 bp, Glycine max
gggatgggagacacagttggactcatcgaatctaaaatctagagtaggcatcagaagttttctgtcaactcatgctagttttgtcaggcgacaaacacatcacataatgcggtatgtaccgacctctgtcaacgtgcatagcccttataggcaacccgtcatttttcaagggtgcaaaagtggttataatctaactcatcaccctagtgaagacatgaggtaatggcacaatcaacacaacacaaa

SEQ ID NO: 61177 - DNA, 411 bp, Glycine max
ggtgatcgctaaaccatgattcatgattaaaccatattttctatacaagggaaggaaacaaaatacatactcatggagccgagccgagtcaccaagaacagtagtatttgtctgcggatggaagaaaagaagaaatctacaaattagaataagtaaaagaatcatttggctgtaagaagtggattcaacttaagaggcctacgtggtgccatggttcttctcttccatagattaatctctttccgtggctgcacattaagattaagcgcagttgcaccaccaagggtaagaggagcagagaaagggataatgatctcatcatccaatctatcaacatcatcatgaggcgcaatctgagccttccaatcgaaattccaaaaggtttcacgcccacttgcaaatcgcctcatg

SEQ ID NO: 61178 - DNA, 409 bp, Glycine max
gggttctagtgtgtgattgtttgttgttgtaactcgttcttcttcttttgttgttctgtgtttgtgtttgttttttctctcacctgaaaatgtcttgctgcggtggtaactgtggttgcggaagctcctgcaagtgcggcaacggctgcggaggctgcaagatgtacccagacttgagctacactgagtcaaccaccaccgagaccttggtcatgggagtggcacctgttaaggctcaatttgagggtgctgaaatgggtgtgcccgctgagaacgatggctgcaaatgtggaccaaactgctcctgcaaaccctgcacttgcaagtgaggtgttgggagagcaagcttcaagcagagataaccccttaatagggaataatgataaactattaatgtgtagctaaaaac

SEQ ID NO: 61179 - DNA, 80 bp, Glycine max
cgggggactggaagtggtagcaagtacgtcgtatatgtggttgatcttttgctggttgtttcgtgtgttccttccaattg

SEQ ID NO: 61180 - DNA, 394 bp, Glycine max
ggttctagtgtgtgattgtttgttgttgtaactcgttcttcttcttttgttgttctgtgtttgtgtttgttttttctctcacctgaaaatgtcttgctgcggtggtaactgtggttgcggaagctcctgcaagtgcggcaacggctgcggaggctgcaagatgtacccagacttgagctacactgagtcaaccaccaccgagaccttggtcatgggagtggcacctgttaaggctcaatttgagggtgctgaaatgggtgtgcccgctgagaacgatggctgcaaatgtggaccaaactgctcctgcaacccctgcacttgcaagtgaggtgttgggagagcaagcttcaagcagagatagcccttaattaggaataatgataaactattaatg

SEQ ID NO: 61181 - DNA, 300 bp, Glycine max
cggggtgaggcgagggtaaggccgcgttgtgttgcgtcgtgtcgtacgctgttcccctgtttctcgtttttgtgttcagaccggagcctagctcggcatggcgggcatgtcgacgaggcaaggtgggaaagctgagcctttgaagaaacgcaggtctgataagaaggagtacgacgagattgatgtggcggacattcagaagaaaaaggaagatgagaacgcgctaaacgagttgaaagccatggggcaacagaagggaagcgttggaggttctgggctcaagaaaagtggagagaaata

SEQ ID NO: 61182 - DNA, 335 bp, Glycine max
gtaaaaacgatgttttgatccacataaagaattgggtcagttccttgtcggggcagcttggagttgtaggacttggaaaatcaaggtataatttttggcttaactaacatagattagagctgcaaatgtgtagttgtctttacgtttaataataacttgtaaagagagtttgaaattccaattatatattgaattctgcttttgccttttaccttcctactcggggataaaatattttcacacttttttggcagcagggtgtgtagggttctacacacaggcagtgcctgtaggtcttttgtcaaagtccaatcattgatttgtgactgaatgag

SEQ ID NO: 61183 - DNA, 189 bp, Glycine max
ggttctagtgtgtgattgtttgttgttgtaactcgttcttcttcctttgttgttctgtgtctgtgtctgttttttctctcacctgaaaatgtcttgctgcggtggtaactgtggttgcggaagctcctgcaagtgcggcaacggctgccgacgctgcaagatgtacccaaacttgagccacactgagtc

SEQ ID NO: 61184 - DNA, 328 bp, Glycine max
gacagacaaccaaacggtttatcaccaatgcttgtcaccgtttggtggttacaatttcgccagtacaaggttcgctcgctactcacgaagctgtgagcatggtgaataatctacaaactacaggcagtatacatgcgccatgtatggtgatgagttctgaggagcttgccgtgggggtgatgaagatattattgggccatagaattgtggtgcgacgattttgcaacggtgttaattgtaccaccccacagtatggcccccatgattaacggggggcacatgttgctatcactactacatttcctacgaatccttttcactacatttt

SEQ ID NO: 61185 - DNA, 165 bp, Glycine max
agaaaaaaaatcaagaaaaaaaaaaaaaccgtcaaaactctcatctcaaaacgtcgatatatcaaaacgtatacctactgacatcctttcgccgcttgtcctcaggttcttgtcgaacttgtcttaaatgcaatataatggttctgcatttagataacacacatt

SEQ ID NO: 61186 - DNA, 273 bp, Glycine max
agattaaagaaaacctcccagaccatgagaaaatggtggcttttgctaagtttattagagaaaaacgtttggcatgtacctaagaaagtaatcttatatgagatcaagtatgaatcactttgtatctgtctgaatcgttttgttatgcgtgtttctttagtttccactccattattaggatgtcttgacatatctgtgaaagcaataaaagtttaatgggaaaaaaaataaataaaaaacaaaaaaaagtaaaaaaagagaaaactacgagaa

SEQ ID NO: 61187 - DNA, 333 bp, Glycine max
agaaaaaaaaaaaaaaaaaaaaaaaaaaaaaaaaaaaaaaaaaaagaaaaaagggcagcagctcaaaaggttccatacttaagtaagcgggcagccgatctaaaggatcatccataatgtcacataaattcaattcaatgagccctccttttatgacatcgaaattgagatcactgtgccatattatttacattattcgccttgcaaaaaatctgcctttcgccatcttaattactatgcagcagagcctcatttctcgaccttccgaacaattgtacaggctgaatgggatcgcccatccaacctgttacgaagcattaatcgcgaatggta

SEQ ID NO: 61188 - DNA, 373 bp, Glycine max
  unsure (1)..(373): unsure at all n locations
ttttcaactttgctattctcaggctacttcaataaccatatagtataagatttctcattggtaatagaattccaatggtcttgaaaactacttatttagacatggttttatatctgcttctatgagaatatgagattctgaagtttggtaatgtaggataatgtgtcaactttttacttattttggcaaacctcaatttaacaaccagctaaggcatcttttagccaacttttttctgtttgcaacttgtggattacgcagagatgctacctgtatacgggtcctttttttttatcttgccaaataaacttcttttctaattatgcaagctgcaaccctgtttaaagttataaaggagacccttntatacctg

SEQ ID NO: 61189 - DNA, 408 bp, Glycine max
atttctgtttacattcaagagagagaagaagaagcagagcattggcagcaaagacagagagcgtggctcgtcgcttcaaactcctctgcggtttccccttcttgttcatcttcacagaaatggaggtagcagtggccacagcgttgcaaccgcattgaacgttacagttgatagttgatcgactactccgtaattgacagtctagactgcatcacctacacccatctccgacggcgaatatttctccgtcgacgacctatttgacttctctaacggctctcttcacaacgaacaacaacaagaatacgacgaacggaaacaaagtttatcggcttcaaaggaccgcggagaagacaattggaactccaattccaccggcggtttcctatgattcacttttctccaccg

SEQ ID NO: 61190 - DNA, 390 bp, Glycine max
atttctgtttacattcaagagagagaagaagaagaagagcaatggcagcaacaacagagagcgagaagaagaagcaagaagaagaagaggtacaagaacaagtggtgaacccatgggaagtctccgccaaaggcaaaatcgattacgacaaactcattgaccgtttcgggttgccagaagctcgacgaagccctaatttcgcgtctcgagcgcatcacctctcgcactccccacgtctttctacgacgcggcgttttcttcgcccaccggtacctccatccatttcctcccttctctccttcccttattttcttaaactataatttgatgatgtcgtttctttgtgtcgcagcgatttcgcggagattctggacgcgtatgagaggggag

SEQ ID NO: 61191 - DNA, 233 bp, Glycine max
aaaactccagcaggatttgcattgttttcgttgaaataagcaaaagagatcaaaggaagataacgaaaacttgattatattataagatagcaataaaaataagaggtagcggacgcgtgggtttttttttttttttttttttttttttttttttttttttttttttttttttcttttgtttttttttttttttttgtgtctttttttctttttttttcttttttgtttttttt

SEQ ID NO: 61192 - DNA, 406 bp, Glycine max
cagctgcctgcatggacagtactaatgttccttcaagaaacacacaccctttgagaagcaactcttcaaaagaatttagacgtaacgacagggttagcttctttgattggttttaccaattcagaattcttctccagagaagcctcaaggaaagaaaacacgaatccttcaacactctgagagtctgtcaagttattgctgcagcactgttagctggtttaatgtggtggcactcagactacaggaacattcaagataggcttggcctactcttcttcatttccatcttctggggagtcttcccgtctttcaactcggtttttcgcattccctcaagaacgtgccatcttcatgaaagagcgagcttctggtatgtacacactgttcctcctatttcattggctcg

SEQ ID NO: 61193 - DNA, 140 bp, Glycine max
cacgacccctccggcttggaatgcactggaaagagggtggaaaagagtggtaaaggggacggcggcgccccttgaaaaaaaatccacaacaacaaatataacaacaacccccaataaccaatccctaaaaaacgggccgc

SEQ ID NO: 61194 - DNA, 342 bp, Glycine max
aggaaacctttggactttaagttaggagagaggaatttcgactcgggacgcgcttgaattgtgccctaggtttgcattttcgcgctcagattctttggtagatgaaaagtgacactcttagatattaagagtgggatgcatggatgtaactcaggatctgctctccttgtaaatgctgaggttgattctatgggaggtgttgttgatggcggagttggtattggtttgaaaacctctccacgccgagcagcaattgagaaggctcaggcagtgctcagactggagtatgatgcgcgtgaagaaagaagaagggaactagaattctctgaaaaaggagggaat

SEQ ID NO: 61195 - DNA, 418 bp, Glycine max
accacgcgtccgcccacgcgtccggtgaaaccagcaggagctggagccagttggggagaaactttaacatcccaatcatacccatccctatcagtcaatagacctcacagtatgaacctgattagcaactacatgccagatttctacatggcccaccaacaacagcagcagcaacaacaacaacaacaacttcagtcttttgactgcttgatttcagctagcaacagcaacacagacatcacttctgttgaagatgatgatgggatctcaatgattttatctgactgtggaaacctgtggaacaacttcagttatggcagtgctgcgtccacaggtgagtctgagagcaatgcttccaatggtagaaacatagacaatgcagtgtagtccagtcaatattgaagtttgatgaaacagt

SEQ ID NO: 61196 - DNA, 431 bp, Glycine max
atgaacttgactcccaaaatgatactgatatttgtacataatgatccaattgatattgaggttctaattatttggtactatttatcttctgtgtatggcccaaggagtgtcatcacagttgtcggcatgttgaagtgaaatatggtgattttgctacaggcgtacactttactggcggttctttcagtggaatgtactgtttctattgagacatatcactggtttgaggcatcccttccatgcttagatgcttaaaagcaacccaggagaaggcaattccactggatgtgtttcgctgtgttcttgaagcgaattcatttcatggtcgtgcatcttgggcctgcaatttgtatggggtttaagtcatcatttttgtggtagggttctgtgccagtgttgtttcttctgattaaacatgctgttcctgggct

SEQ ID NO: 61197 - DNA, 251 bp, Glycine max
accacgcgtccggtggaatacccaataccccaaatcactcttacagcaacagacaatgacagtgaacaatatctggtgacatttccacggactaattcccttactcagcttttggtaatggattacttgggtccaatatcagatacattatctgatgccacatacaattcaccctttgattttcacattaacactgccaatggtgtaatacacacgttcgtagaagcagagccggttgaaatcccttaagg

SEQ ID NO: 61198 - DNA, 445 bp, Glycine max
ggtttttgaacttgtattgatctcattaattatgatttcaattggaataagttagctcacctaccatagggatgctgctaggaattgatatttgttgtatcttgatgcactgttgcatgcctatttctcctaaatgtcatgttatttcagttaacctatagacacatggatagatttacaatgcatgttttttgtatctttgttctttgatggaaagaaatttaacatgattgcaattgaaacatggtatataataaataaaatttccattggctcaaactcacaggaagtacaataccatgtactgaaatgctctgatattgtttcctgtagaagcagtttgtactgtcaccagtctttgttgctgcatatttggtacttatgatgtctatctaatgcttgcaaacctgcagaaagaacaagtcaaggttatcagcttgaattt

SEQ ID NO: 61199 - DNA, 381 bp, Glycine max
gagaaacatggcttccttaagctccttagtgctgctccttgcagctctaattctatcccctcaagttcttgcaaactatgagaatcccccagtgtacaagcctcccactgagaaaccaccagtttataagcccccagttgagaagcctcctgtttacaaacctccagttgaaaaccccccaatttataagcctccagtagagaagccaccagtgtacaagcccccagttgagaaacccccagtttataagcccccagttgagaaaccaccagtgtacaagcccccagttgaaaaaccaccagtgtacaagcccccagttgaaaagaccccagtgtacaagcccccagttgagagaacaccagtgtacaagcccccagttga

SEQ ID NO: 61200 - DNA, 334 bp, Glycine max
gggaatccttatcgtggactggaatattgggggccttttccataatccctaggcaccactttttgcagcaccaaatcgggatgattggtgggaaacgaaacattaggtggaattgttggtgggtagctctaaggtggacaatttggcaccataggaataagatcatcttctcgaataaatcattcaacgctactaagctgatggattatgcactgtttttgctatggacttgggttcaagcaatcgggaaagacttttcaatgcactttaactattggtctaccaaactaacaataagtttttccgtacattaagagggctcactaactgtggg

SEQ ID NO: 61201 - DNA, 442 bp, Glycine max
aacgctcagaagctctcttctctctctaaccacacatcgccggaagctgtttaccggcgcagtggctggccggccatgggtggcggcgccgccgcgtcggaaaaagaaactcctccctttttttaaaaaacaacatgttttgattcccttttttcccctagttccaaaaccaacggtaattttttgaaaaccaacactgataaagccaaaatcaacccttgaaccttagaaaaaaggtgaactacctttgttcttaggttatcgtttaagcttcagaaaacggttacagcttgggttgtgtgggtgtgggtgtttgacgcagtgcttgtggttggtggtgtttggtgtgggcttgggcgttggtggtggttttgatgtaggttttaggccgcgttagtgagtgggttaccgtgtttgccgtgtccgtggttcacggaggaag

SEQ ID NO: 61202 - DNA, 448 bp, Glycine max
gacaaaagttagacacatatacttttgtcattttactttttgtcttcctggtctctccggacatgtgtgatgtattttctgcaggtcgtaatcttgtgaaattggttgtgaggaacgcgtggttatccgtggatggtttgtgtttgatgccaacgctgacatatttgacccttgagtttgtgagactagatgatgaggacttaagcaggattaatgcctgtttccctaacttgacacaactcaatcttattggggttggtggactaaaggagcctaagattaatctcttacacctcaccacttgtcaatggtcagtctcaaatgctccactttctttgattatatgtgcaccttgccttgttgattttgatctcagatgcatcaaaccaaggttggttgtccttgaagccccttccctgtccaattttagtctatcccttgagaatac

SEQ ID NO: 61203 - DNA, 350 bp, Glycine max
tattttggtgaagagaagactgagttagtaaacacgctcgctcggtcttcttttccaatggcgatttccgatgagcctgaaactgtagccactgctctcaaccactcttccctgcgccgccgtcccaccgccgctggcctcttcaattcgcccgagacgaccaccgacagttccggtgatgacttggccaaggattccggttccgacgactccatcagcagcgacgccgccaattcgcaaccgcaacaaaaacaagacactgatttctccgtcctcaaattcgcctaccgtccttccgtccccgctcatcgcaaagtgaagagtcacgcgggcctcttcaacctctgtat

SEQ ID NO: 61204 - DNA, 399 bp, Glycine max
ttccattctctctgtgtatttccctacctctcccttcaagatgcagatcttcgtcaagaccctcaccggcaagaccatcacccttgaggtggaaagctctgacaccatcgacaacgtcaaggccaagatccaggacaaggaaggaatccccccggaccagcaacgtctcattttcgccggaaagcaacttgaggacggccgtacccttgctgactacaacattcagaaggagagtactcttcacctcgtcctccgtctccgtggtggcatgcagatcttcgttaagacactcaccggcaagaccataaccctagaggttgaaagctccgacaccatcgataacgtcaaggccaagattcaggacaaggaaggtatccccccggaccagcaacgtctcat

SEQ ID NO: 61205 - DNA, 259 bp, Glycine max
ctgcaagaagatgaagttgaggatcacaacggccaatggctaaattgctgtcatgatagctgcacatcacctgattctcctaattttgcatgccttaggcgacatgttagttagggagcactagagaccatttgtggacagatctccaaaactgagcagtttatgagctgtaaccatcggtgcccgtagatgcactgcagctgataatgacgcgaccaactcaactatctgaattgggtattggatcacttgtccatga

SEQ ID NO: 61206 - DNA, 275 bp, Glycine max
gcgtccgaatacaaattcctggcgtcaataccgagcaacgtgcgaaatgcctgacttgaactcacgaacggaggtgatgccgaacccagagtttctaagcctgttttcctcacccgacacactgcagggggtcgtggccctttcagggtcctcctctgtcgcagcttgctcagcagcaatcagcctacgaagcaggtcacacacgtgcatgcactgggactatgatcaaactggcgctcgcggataaaaccccgcatttccgcaggtttcggccc

SEQ ID NO: 61207 - DNA, 195 bp, Glycine max
gtccgaccacgcatccggagtcggaaacaaatgccattcgatctctcggagcacttgagggcccccatggggcaatacctcatgtgccatcccaatagattcgatgtctcggtgctcgcacacgtatcttcggtcagcaacaccataatcagcttgtatatcgtcacagcacaccgtatcctattcagggaaatg

SEQ ID NO: 61208 - DNA, 442 bp, Glycine max
aggacgcgtgggagaagattattcgttaattgattttgtctattcgatttcaaaagctttgttctttattgaaaaatctatgactcgctatttttctgaaatatatgttttaaagcattgaagaaattctagaacgatatgttaatctttcggagggtgaacacggaaggtaagagcttgtgtatttttaacttctgatacctgatactagttaatcagtttatcctaatgttgccacctttgatttatcgaccatgtgggcttaatttaaactcttgttgccgtgaaactctaaaagatgcataataaagagcaaaatcaaaagttgcttagtaagttgaaagatgaagctggtcaaatatgtcaagcccctagctcaatgacttcagattcccaaattgaggatcttcgaagagaaattttcacttgcaagtctcaattg

SEQ ID NO: 61209 - DNA, 319 bp, Glycine max
gaggtcaatggaccagtaccctacaccaatcctgaagcataggctgatgctcaccgatagtcagcttcatgttctgtgtaataccgttaatggtgattccatccgctaacacttgacgcatcattggatatccatagaactcggattgcaatctaagcaccttttaatttcatttcataaccgtcgcactggcaggtataccaatcataccacatgtgactatcattcctccatgcttagtacatagatatcacagctaactaatagatccttctcaaggaaaaggagctgctcttagcataggtagcacagctcacat

SEQ ID NO: 61210 - DNA, 103 bp, Glycine max
gacccttctgccctccccagccattaactgaaaaataataaacaaagaaaaaaaaaaaaaaaaaaaaaaaaagaaaaaaataaaaaaaaaaaagaaagcaaaa

SEQ ID NO: 61211 - DNA, 414 bp, Glycine max
aaagcagcaattatacattttggtaaaaagtggtataggcgcatctcattcatttggaggcacaccatgcagatcatcggaagttttcagaagctatggaatattgctggtgtacacttaaatcttgatattcccaaatggatgcatatccttcgtttggacaggcttaacaccaatgcagtgcaatggcttaacaagaaaggaaagttatttgaacccacatatctttatactatggaaaaggggtatttcttgttacctgaaagtgctaaatctcatcataatatacgtactgtgaatgttagcatatcagcttggcactcctgctttggaaacaggtggcagcaactactcataaacagatttgtcggatatgatacgattttaatcaatagtttattgagttctcctggt

SEQ ID NO: 61212 - DNA, 219 bp, Glycine max
cgtccgcccatgcgtccgcacacacacagctagcagatattacagacacgtgaatcactaattaagccaatggacacgagcctatgtaatggaatttcaagatccaattggtttgtaaatattgtggtttaagtgaattaagttatgaggagtacgtcgcagtggcgaaggtggcttttaaaaatataattttagaaagtgtagaatctgaaatggttt

SEQ ID NO: 61213 - DNA, 119 bp, Glycine max
gctagaaatgctatctggcagcattgaatctaaagaactgtcactgtcatccctggttaaactagcaaaattgcagtccaataatgtgattattgcaacatctggaggtgtgcctcttg

SEQ ID NO: 61214 - DNA, 165 bp, Glycine max
cacacacgtccgctacgtttactcttttgagttttacgtgggtagacctactgtagagaaattttgatgattggatatattgtggcgaaagccatcacaattggaggctttgctctggaggtcaccgtgttattttgcaaacccgcaaatgtttgggaacgcttt

SEQ ID NO: 61215 - DNA, 93 bp, Glycine max
cagctccttcactcgttgatccggatctagagtcctttttacacgcctcacttctcgttgtagtgcctcgctttcctgatccatcgggtttca

SEQ ID NO: 61216 - DNA, 56 bp, Glycine max
agtgcatatggggtagatgaaagcacatattggcgtggtggctatggccactatgg

SEQ ID NO: 61217 - DNA, 157 bp, Glycine max
cggttccagcatgttcagtccggtgaacacatggccgccatgggcgtgtttttcttgcttcaggtatttttcttcctggattgggtgaagcatttgcttagctggaggacgttgtttcaggcatttttggcgataactgtgacgcgggcggctgctg

SEQ ID NO: 61218 - DNA, 102 bp, Glycine max
ttccgggtccaccagcgtccgacacgcgtccgaaaagttcaatcatgcagcactccactctctctctctctagagagctcgggatagcatgtcactacaaac

SEQ ID NO: 61219 - DNA, 94 bp, Glycine max
acgggaggatgcactataggatacaacgcttactgtaacgtcaaagccactccatagcgcatcaaagttgaactcaaagttcagttcattggca

SEQ ID NO: 61220 - DNA, 77 bp, Glycine max
ttcaacgatttgcgctgtgaatcgatcattcattaacgatctttcaaggaaatattcgttgcgatcggtgattctgt

SEQ ID NO: 61221 - DNA, 358 bp, Glycine max
  unsure (1)..(358): unsure at all n locations
attccaatatattccattctctctgtgtatttccctacctctcccttcaagatgcagatcttcgtcaagaccctcaccggcaagaccatcacccttgaggtggaaagctctgacaccatcgacaacgtcaaggccaagatccaggacaaggaacgaatccccccggaccagcaacgtctcattttcgccggaaagcaacctgaggacngccgttacccttgctgactacaacattcaaaaggagaatactcttcagctcgtcctccgtctccgtggtggcatgcagatcttcgttaagacactcaccggcaagaccataaccctagaggttgaaagctccgacaccatccataacgtc

SEQ ID NO: 61222 - DNA, 116 bp, Glycine max
ggaaaggacttaaatcactagaggctgttgacccacatgttaggatgattgctgaacgacaacatattgattaccaattcagtggcctgcaggatgatggcggtgcaaatgataat

SEQ ID NO: 61223 - DNA, 99 bp, Glycine max
cacacgcgtccggttacgccactgactcattcagatactccatgatagtcaccactcgaattatgttcactgatgatcccaaagcacaatccgttgatc

SEQ ID NO: 61224 - DNA, 342 bp, Glycine max
  unsure (1)..(342): unsure at all n locations
ggagctgaagaaaaagttgccagagtatttgaagccccattatcatttttgaagacattaagtaatgccactttgcagaagtcctgttcttccgatgatatcatgggagatgttcagattttgggtgcaaatatgtcagctcttggactatcacagaaacctatttatgttcaagctgtgcacgaggcccctgaaagaagtggggtcaatggcctcgacacccttgaaactattcctgacgcagttccaactgtgttcactgaaccaccaattgaagatcaactagcttggcatacactttggcctgaatcacacanactctatggtcatggaaatgaacta

SEQ ID NO: 61225 - DNA, 437 bp, Glycine max
  unsure (1)..(437): unsure at all n locations
ctttttgagcaggctaatgatccttgcgaaccctccctcagtacagaatttcgaacgcaaactcaaacggagtttttactggaagcatttcggcttcaactgggagcatctgaaactggacagaagctaatggcactgcaaactgaaattgggaagagccattatatttatagggatgagttaagcgagactacactgaccacaagacggtctttcgactctattaggaacaacttcaaagaaatccagcgaaatctggagatatggttggccagaattattggcgatcttgaggggattcttgcgagggaaggtgcatctcgtgtaagagaatattacatttccaaataacctttttgtcaatagaatatgagagactggtggtagctagctgtangaaaagcctcacctctcaagctaacaagttatctcttgtg

SEQ ID NO: 61226 - DNA, 379 bp, Glycine max
attcataccttgctccagatcctactattcaagctctgttttagggttcgattccgatcgatccctaaccggcgagcgcgagttccttcgattcgtttcgtttcgacgactaagcttcttctccgtttaggatccgttgatcgattcatcatccatggcggcgatcgaggacttgtcggagctcgccgattcgatgcgccaagccgcggcgctcctcgccgacgaagacgtcgacgaatcctccaccaattctcgaagaccttccactttcctcaacgtcgttgcactcggcaatgttggtgctggtaaatccgcagttctcaacagtttgattggacatcccgttttgcctactggtgagaacggagctactcgaagc

SEQ ID NO: 61227 - DNA, 397 bp, Glycine max
  unsure (1)..(397): unsure at all n locations
agctattccgcttactattgatggagttgagttggatttacgtatgcgtgggtttgaattcttcagtttggtttctgcatacgctatggattccccaaggcctttgcatttgaaagcatctggaaggatcaagtttcagggaaaggttttaaaacctaatggcaatattagcgaacaaaattttgaaatgacaaggcagcatgtgcaaatgttggagaaaggaattgcagatagtctcattggcgaggtttcaatctctggtctcaaactgaatcaactgatgcttgcacctcagttgtctgggttgctgaggctttctcctgngggtatcaagctggatgcctctggtagaactgatgaaagtcttgcagtggagtttgttgggccactacagccc

SEQ ID NO: 61228 - DNA, 381 bp, Glycine max
aaaaatttaaaattttatgtggtttccatcattttttttctatcaaatatttttttacatttttttttatttttttctttcacacaattaaattcaccttaaccgtgtgtttggtagtgaaaaaaaaaagaaaatttgaaaattttgtataagccccacgtctattgtttttttattttaattcaaatatctcttggataattgttttttctattttttctcttccatctaatcaaattcatcttaaaagatccgttcttaatcttaggttcgggagtcccgaagctggaggctgctgtcccttttcctttatccacttttttttttccattgcgttatttatttgcccgtgtccctcactcagtcactcactcattctct

SEQ ID NO: 61229 - DNA, 362 bp, Glycine max
gttgctcgcagctctatttttcatgtgattgggacctgttagaactatggttgaatgatatgtttggagaaaacattatggaaatatgcatctgataaaatgatttctgctgccttacatgttgattctgttgtctttattcctgttttcaggtccttgagcgggacgatattatgaataagttctacgaggtgacagctcagttggaacagtcattgggtggtatttcccatgataaacttgatatatcagatgaagttaaagagcaggtataaatatttcaattatatataaactattgtatgcatgcaagacagtgatattagtctgccaaatctgattcgttgaacgttccttcctct

SEQ ID NO: 61230 - DNA, 256 bp, Glycine max
aaaagatgtaaataaagaaaaaaaaaggaaagaaaaaaaaagaaaaataaaaaaattaagagcaaaaaagaaaacgttaaaaaattgcaacactgaaatcaaaagttcataaagcctgtggaatgaatcgtaaaataaggggtggaggcatggcaggcattttgcatagtgttggttacttgagagtaataagtcactccaagtaagctcactagatattcgttaatcggcagttccttttcaattccgttacagg

SEQ ID NO: 61231 - DNA, 436 bp, Glycine max
cccacgcgtccgcccacgcgtccgattccaatatattccattctctctgtgtatttccctacctctcccttcaagatgcagatcttcgtcaagaccctcaccggcaagaccatcacccttgaggtggaaagctctgacaccatcgacaacgtcaaggccaagatccaggacaaggaaggaatccccccggaccagcaacgtctcattttcgccggaaagcaacttgaggacggccgtacccttgctgactacaacattcagaaggagagtactcttcacctcgtcctccgtctccgtggtggcatgcagatcttcgttaagacactcaccggcaagaccataaccctagaggttgaaagctccgacaccatcgataacgtcaaggccaagatccaggacaaggagggtatccccccgggacagcaacgtctcatct

SEQ ID NO: 61232 - DNA, 345 bp, Glycine max
aggacgcgtgtgcggacacgtgcgcggccgcgtgggctgagctgcgtacctacctgcacggaaagaacattctgcactcagggctgtgattaaatgcattgcagaactacattcttgaagatgagttccctccacaaaatcataagaagcgacttgaccagttacagaatgtgaagaacggataaaacgaaaccacatggcagttcctgccagtaaccagaactacagcaagcaacggcaatggatgtccaatgccaccatccaaagctgggcgtttgactaatgcgtatgtatcatcattccctgcatgactcagatctgtcaagtctccatcacaccggcaat

SEQ ID NO: 61233 - DNA, 380 bp, Glycine max
aggatccttgcacttcagagatcttaccatggtgacacattgggtgctatggaagcacaggcaccgtcttcttatacaggcttcttgcagcaaccatggtacactgggagaggtctttttctggatcctccttctgtctttatgcacaacagtacatggaatgtttccatacctgaagggtatcatttggaaagtctgaaagggaaaagtatcacctttgcctcacctgatgaaatatttcacaagggcagagataagtctgagcttgctacagtttattcatcttacatatcaaaagtattatctggatttagagggtcgaataatgttggagcattaattatggaaccagttatccaacgtgctggtggaatgcatat

SEQ ID NO: 61234 - DNA, 407 bp, Glycine max
ccacgcgtcaggaatcagtcataacttttccaggactcctttcaccttttgactcattcttgctttcagattttacctttccttcctgattagtttcacacttttgagtatcttgatccaccttacatttcattgtatcacacttgatcctttttgaaattgcaaatgcattacacttgctattaatcttaggatcagttgaattattattctgaaaaatttccgttttatgctctaaaactttttgcataaagctactccctgtattttgcttctcaatcttgtcaaaatcctgaccagatattgactctagtgtatcctccttcactgcttcagtggaaaccattctacatttcacaccatcctttatcaacctccttggatacttcaaaagccttaacagtgac

SEQ ID NO: 61235 - DNA, 275 bp, Glycine max
agtccaagcgtccggtcggtatccatctattcccagaatcaccaggtgcaatcaacttctgtccctgactcaacatcggtaccgtatccacccgcgacattgacctcgagaattaaaggaacacatctcataaagatccggctcaaacttccgaatgccatggctcgctcttctcaccatgcgcactcaatcatatctcgtcataatacgcctgtgatgaactccgactacacatgtgaatagacacggcgtccaagtaaagtatattctccccg

SEQ ID NO: 61236 - DNA, 323 bp, Glycine max
acggcagaggccaatgaggaagctgcctctgtatctgggagtagtaatcttgagatggggaaaggttcccattgaaaggcttctcatcaaatttcccacgatactgtacatttatgtatctaaaatttgtgttaggactacatgtaccatagtgtttttctccctcccacttgggccatttattgattattggaatgagtatgtagggtagaacagtctgcaaatgcaccaatcgggtaaacataataaacggctgtttgtaataaattggaaagagcttttactaacgtgttttattttttataaaatgagaaattaacgat

SEQ ID NO: 61237 - DNA, 79 bp, Glycine max
aaaaaaaaaaaaaaaaaaaaaaaaaaaaaaaaaaaaaaaaaaaaaaaaaaaaaaaaaaaaaaaaaaaaaaaaaaaaaaa

SEQ ID NO: 61238 - DNA, 302 bp, Glycine max
accacgcgtccggagtttctgtgtgctcttggactggttgttaaaatggacggtcacactaagggtagttgcaatgtgattcaaaggagtgacggcaatagaatggatttagtggtggataagtctgcatcaccaacaatggtaacttgtgaattggttccaaagattttgagccgtctcactaaaccttgctacgctgctgttacttcctgggacagataatcaaactgccactgttacgttcacgcttgtggatacgatgccaactttgtaccttcctgttgcacctaagtgtcactaca

SEQ ID NO: 61239 - DNA, 418 bp, Glycine max
acgtacgtgaatgattatgacaccatccctgatgggatggatcatcgtggtctcaagcgtttatagtgtgtgtgggtggtggtttaagtcaagcttccccgttttttgatttcataattatggcttaaattatcatcctgaaggatcatactgtcaattgagcttattgatcatgcatgcagaagagataccggccgaaccagataacttgaaggagcagggtacaacaactataggtcattcaagggagaccacaagtcaatcaggatctttaggttcagttggagattgtcctctgtatcctcctaatgtgtatgctccccaagcccaggctttctactatagaggttttgacaatggcaatggtgaatgggatgaatattcttcatatgtcaattccgaaggtttagacattgga

SEQ ID NO: 61240 - DNA, 386 bp, Glycine max
cacgcgtcagggagggagtgggaattcttcttcagataatgatgttagttttgtcattcgtcttaggtcacgtccttcgtcgcaagaagatttacgttcttcccgaagccagcgcttctcttctcattggcttactcgttggtactctcgctaacatttctcacactcaaaccagcatcagggcgtggttcaattttcacgaggagttcttcttcctcttccttttgcctcctatcatattatatcctctttcatttcattcttcttcttcttcttctttacttttcatccctcttaattcattaattccttgaccttattttttctcgctttactcagtctggcttcagtctctctcccaagcctttcttcgctaatttcggagc

SEQ ID NO: 61241 - DNA, 417 bp, Glycine max
aagcaaaaatactccgtttcaccaaaaaagaaaaagaaaaacccttcttagcttagcttagcttagcttcatcttctccgatcaacagtcacctcctctcctccttattttgcgtcgcctcgccggaaagacagaaaacagagagagagagagagagattcgtgtaaattagggtttctttcgccaaagagaggcttcaaacctgacctcttttttcttatcttttttccctttcgcagagcgagcgactcgcgaaaagaagatcctgctcctgatctagttcgcaaaatcgtagaatcattcgaatttgcgattcagatctccattttttactaccttgcttctcaggaaggatgttcggttcaaacccttttgggcagtcatcgtcgagccctttcggctctcaatcggtttttg

SEQ ID NO: 61242 - DNA, 412 bp, Glycine max
  unsure (1)..(412): unsure at all n locations
acgtacgctcttcttctcttgcggctagggttttagcgcagcttcttctagatttaaggaagatgggtaaggaaaaggttcacatcagtattgtggtcattggccatgtcgactctgggaaatccactaccactggtcacctgatttacaagcttggaggcattgacaagcgtgttattgagaggtttgagaaggaagctgctgagatgaacaagaggtctttcaagtatgcctgggtgctggacaaacttaaggctgagcgtgaaagaggaatcaccattgatattgctttgtggaagtttgaaacaacaaagtattattgcacagttattgatgcgcctggacatanggatttcattaagaatatgattactgggacatcncaagctgactgtgctgttcttatcattga

SEQ ID NO: 61243 - DNA, 220 bp, Glycine max
  unsure (1)..(220): unsure at all n locations
ctttattcttgagcattagatggctctggagaaagacttttaggcttagttcaagggaagactgttcgtctgatgctgaacatanggcactcttagcaaaacggggtgagagtgggccaaacctcaatgaaagtagaggggaaagagcacgcaggaaagctgangagaaaagacaggctaggctagaaaaagaacttttggangaagaagagagaaaaca

SEQ ID NO: 61244 - DNA, 305 bp, Glycine max
ggctcttatttcaagagttttgttattggttcattgtgttgtgcaatggaacttcaggatgtagttgcttgctgctgcactttatttgacatggttttcagtgatggaatgttgatgcttcatgctgccatggatgatacatggagcatgcaggatttagtttgaactttgaagtcaggtttcaaggtagcttctttcttggcctgacttcaaggcttgcttgttggaagaggtagcaatgtacagtcagtatactgtttgttaacattgtgcttcatgatgagttgatgactgatgaggcattt

SEQ ID NO: 61245 - DNA, 331 bp, Glycine max
gtggtgctgggtattctatggcgacacccaacaacagcaacattaacaacgcgacggcgaaaccaggaaccctaggcgttggcgtaggtgcagctcctactccgcccaagtcccagcgcggccacaacaagcccaagtgcaaacagtgtggcaatgtcgctcgttcaaggtgcccctatgaatgttgcaagagttgctgttctagaaatcaaaacccctgtcatatccacgtgttaaaagctaattcaacttttcctgacaaggcatcctcttctggtgcgtctccccttgaccagcaatccttagattcacatccacctcaatcaactgc

SEQ ID NO: 61246 - DNA, 364 bp, Glycine max
atcaaattactgaattaaagtttatgtttttttcaataattgtattaaactgagtgcactttaaagaaggaatccaagcataattttcaacataaatggttaaaggacaaaattggttccaatttacctgaacaaaattaattgcccttgggttgagataaataataatccattttccggggtgggtggtaaaggcctcgtgtatttgacacatgacgggaacacacagatgtaaaaaaaccccagagaattgaagggaaattacagtcgccggtgtgacttgcctcatatctaggaaacctcccttattcccttggcctgttctttcttttttttttcccttttcaaacgacccatttccccc

SEQ ID NO: 61247 - DNA, 401 bp, Glycine max
aggaaaagagaaagaaggaaggcgaagcccacaaagaaagaaaacaatagtttcagaagcagaaagaggttttccgttccgaaacgatgtcctccatggccatcaccaccagagacagagatcgagagcttctcatccccgtcgccgacacccccgccggcgatgccgccgtctccccttcccccaagccatcgtcgtcggcgtcgtccccgcatcattccggacgcgaggtgatctcttcccccaattagggttttcaattctccaccgcaattcgtttttgattcctctttttttctccaattcgctcaatctggactctgttgaatttgttgggtttggggatttactcgaaagtttctcccttcacttggattgaggtttttttggggatgaaccag

SEQ ID NO: 61248 - DNA, 409 bp, Glycine max
cccacgcgtccgattccaatatattccattctctctgtgtatttccctacctctcccttcaagatgcagatcttcgtcaagaccctcaccggcaagaccatcacccttgaggtggaaagctctgacaccatcgacaacgtcaaggccaagatccaggacaaggaaggaatccccccggaccagcaacgtctcattttcgccggaaagcaacttgaggacggccgtacccttgctgactacaacattcagaaggagagtactcttcacctcgtcctccgtctccgtggtggcatgcagatcttcgttaagacactcaccggcaagaccataaccctagacgttgaaagctccgacaccatcgataacgttaaggccaagattcacgacgaagaaggtatccccccggacc

SEQ ID NO: 61249 - DNA, 422 bp, Glycine max
acggtttggtgaactctggattaccatgactattgtcaagttaaatgcaatcttttcaaaatgatgctggtagactcagtctaaagaagaacaagaacgacagcttcttgaaatgatatagaagtttcagcaatcgtacaagcataatttttcagcttcaagtaaggcaagctcgaaggaatcaaaacgaattgatagtctattctattcatatgccaatgggtctaccgggttgattgagtaagtgtgcttcatccaagactgtttgttttctttcctccattcaatatgcatatatcaaattgcattatcctgttgttgttttcttaattcaagtttcaaaccttggacatggatccagtggcagatctaggacaatctatttaaagaataaaaattaacaagtattatcatgaaaagag

SEQ ID NO: 61250 - DNA, 224 bp, Glycine max
gacccacgagtcacgaaataaaaaactgacaatgaaaaaaaaaaataaaaaaaaaaaaaagaaaataaaaaaaaaaaaagaaaaaaaaaatgaaaggcaaccaagggggtctctcttcaggtggctcgacactaaaattagtcttgcagctaacgtcggacctctaaattctcgtcgcgggccgtcattttactggccttcgtttgggaacatcatgggtttaa

SEQ ID NO: 61251 - DNA, 399 bp, Glycine max
gccgacccacgaatccgaacaagcatcggcaacataggttcacatcacaactaggagttgtggttgctgatcattcgcttctcatcactgggacttgatacattcctctcacgcagctaccattcgtaatccacactcacattgataggatgcatcttccgggttctgaaggtgtgactccatcagtaatataaattgtagtaaggaaaagacgtgtctttgcagtttgaacaacattagattcgcaaacatatatggagatgattgatagctacctcgaggtcatgaagaactagtaatacaaggtgttctagcgtgcgtaaggcaggatctagtagagagaaacttacagagtaacgctagacaggtgtacgatgaacaacagaaacttggctgaca

SEQ ID NO: 61252 - DNA, 241 bp, Glycine max
aagcactcttccgctcaacgtcagtgttgcatttacatgcaccaatcacaagcgaggaattcaatctagtagctaacaaaaaaaggcctcttgattgcgtctacacgtgtttgtgaccagttgcaaaacctatatagaagaacggaaacgatgtttaccagagattactccactaagggaggaggataaaccatgcagaattctcaaagcgatctctcggtatccaaagggagatggagat

SEQ ID NO: 61253 - DNA, 252 bp, Glycine max
tcttctttttcttttttttctttcttttttttttttttgttctttttttttcttttcttttttttctttctgtttcttcttgtttttctttcttttttttttttttttttttttgtctttttttttttttttttctgtttttttctttttttttttttttttttttttttcttttgtgttttctttcttttttttcttttttttctttttttttttttttttgtttttttgttcgttgtttttttttttttt

SEQ ID NO: 61254 - DNA, 223 bp, Glycine max
acgaaacatgtaatgacttgatggcatattcgttaattttgtcctggtgttggcaaaacttccgccttaggaagaaacctccgaaaaattttaacaacccaaggggaattaatcaagaattcctcccccaatttaacttctgccgccgttccccttttccaaaaataaaaacaatttaaaatccttggcctaaatggtcctaaaaccaaacaaaccctccaac

SEQ ID NO: 61255 - DNA, 179 bp, Glycine max
aggaacttgattcaaatattcacaaagccttgcaatgccttgggaaataacaatttaaaaaccaccagaccaacaatggtaaactttgggccggggaaaaaaatttgtttgattttcttgctgaacccattcaagttagttcagactcaaaggtggtaaaaataggcggtggcactctt

SEQ ID NO: 61256 - DNA, 110 bp, Glycine max
aatccgaccacgcgtccgcccacgcgtccgtttttttttttttttgcgttttttttttggtttattcggttctgcgggtctctttctttctttttttttgatcccgggcg

SEQ ID NO: 61257 - DNA, 272 bp, Glycine max
gcaatccaacatgtcgctacctttccaccagcagtctgtcccgagacatcctacacgtcacggatccaaggtcctatcgcaatcggaaggaagcgatccatgggtccattcgcgcctgcgaggacaagaagaaacaacgcggagttaaaaatttcccgggtgacacgcgcaatgctccccgccaagaacagcaatccgccgggctcggaaacctccctcacattatgaagcacgccgtgtccctcgtcctcgggcacgtcctccgccccaag

SEQ ID NO: 61258 - DNA, 279 bp, Glycine max
acccacgcatccacccacgcgtccgcccacgcgtccgtttttaagaatttattaaacataagctttctagcaaaaaaaaaaaaaaaaaaaaaaaaaaaaaaaaaaaaaaaaaaaaaaaaaaaaaaagggaagaaaaacaaaaaggtaaaaaaacttaaataaacataaaagcaatagtaaacaatattctaaagtgtcacctaaaattcaattcaagggccgtctttttaaaatgttctttattgggaatcccctggcttgacctaatttaatcgcctt

SEQ ID NO: 61259 - DNA, 268 bp, Glycine max
agtttcatctgctgaggaagtgtcagcacctgatgcccaatctgatattccatctggcgtgtcgctatcagaacttcattcaaaaatatcatcagtcctttaattcaagggcaaaggatgctgatctaaaacagatttctaaagaatataaaacccttccttgaaaaggctatatccacttcaagccatacatctgtatctgccattcaccatgagatcaatccttctaatactacttgtgataaccatggtattactgaaaatcctg

SEQ ID NO: 61260 - DNA, 147 bp, Glycine max
acaaccgatatggtcacatgagcgtcgtcccttcaatcaactatctcgtctgattgcttacagctactatcggattcttcagtttcaatccgtcgaagctatgattcaatggcaccctttaccttctacagcacacttaggttttgt

SEQ ID NO: 61261 - DNA, 204 bp, Glycine max
aaaattagttcattctctttgcgcagttccctacctctcctttcaagatgcagatcttcgtcaagaccctcaccggaaagaccatcacccttgaggtggaaagctctgacaccatcgacaacgtcaaggccaagatccaggacaaggaaggaattcccccggatcagcaacctctcatcgtcgccggaaagcagctggaggact

SEQ ID NO: 61262 - DNA, 262 bp, Glycine max
gagatcagtcagtgatccccatgtctacgttcaacatatgtgtgcgcagttgtgtctaacctaagtcacatggggagatagtgtggacatgggagatttgtgcccgcagtgttctatctaattcagctatggctgactcggcatagaccatccaactcaagcttggcgaattgtgagatctgcatttcgagcggctctagggtgaagcaagttggcgtccctgcattgcacatgacagcgactattggcctgactgttatgt

SEQ ID NO: 61263 - DNA, 123 bp, Glycine max
tataggatccaatcttatctacacgtgcacgaaaggtaaaacctcttctatattgtcatctaaattcaattcattggcagtcgttttataacatcataactgggataacacatactttaccca

SEQ ID NO: 61264 - DNA, 158 bp, Glycine max
acgcgtcggcaactggtttggtgagatgaatggtgttctttccaacagcgtcatgtattcttgcgtgctgctacctatggattcctcagtttcacttcctctaagcattgattcagaggcagccttaaccgtgaagcacatacgtggcttttgtacgt

SEQ ID NO: 61265 - DNA, 114 bp, Glycine max
gcgtccgacagaacttccatatatagcctcccaaaaaaatgaagagtactacctctttggctctctttccactttgtgccctaacttcatcatatcagccttcaaccaacgctg

SEQ ID NO: 61266 - DNA, 110 bp, Glycine max
accacacgtccgcccacgcgtccgcccacgcgtccgtacacttgtactgttctattagttcatactaagttctgaaaatgagttccaaggttttgcttgttctacttatg

SEQ ID NO: 61267 - DNA, 346 bp, Glycine max
tgatgctagcgtcgcatccaactcagtacatatcttctattgaatcagacgagcgaagatggattttgaaaaatatgtgctgcacaataacagcactgaggcacactttactgctgagacttatcaaggaatttctgccatagcacgtaaaaatgagctcacgacagcactccaccatcatatgttagttgattctgtcgaggtccatcgtgaggggaattgcaatgcagtccagaagcacaactgactgttacgttgccgagtaaattatctgcgtgccatgtagcctaacatcgaaagccacagttacatacatggacgtgtgcattacaatacgagcggctga

SEQ ID NO: 61268 - DNA, 82 bp, Glycine max
tcccacacttcctctctcacacccttctttgacctcctattctccccacatcagatcgcaaatctccaaacctttcatccat

SEQ ID NO: 61269 - DNA, 295 bp, Glycine max
cccactcttccgcccacacgtccgttttgcttttgcatgcatcaatcataaaggatgtattctatctaatttctgactaaaattagcttttttatttcatttacatatgttttataaatgtttctaattctataatataatattgtattcattattttttatttattatatcattatttatttttttatatttttttttatatttattttttaattttttttattttatttaatatatatattaaatttttatattttattttattatttttttttatatttatattttttttta

SEQ ID NO: 61270 - DNA, 144 bp, Glycine max
cccactcgtccggtcccagttaaaaattacgcttccaccctccaatatattactcaggtcaaacaaagaactccactcgtcccataaaacctattacttgacatcggtggctaattcctgtttggtctattgttacttctactt

SEQ ID NO: 61271 - DNA, 100 bp, Glycine max
agttgctgttcatagtgatacatgtttacttgcccttgccttttattttatagccgggattttatataatttatgctctcaagaatcttactattcatta

SEQ ID NO: 61272 - DNA, 254 bp, Glycine max
ctctctctccctctctctctcacactctctctatcatacttattctacctctagcgaggggtttacacatttttaattgcaactaatctgaactgtctaatctgcatacaaggatgcaaatggaatacttttagaaaaaaatcctacaattatatttgtgttaagtgtcccacactatctaaactgtacttaataagcaaatatagtttcaaaatcttggtatactcatcttattgcctgtgatcttcttttat

SEQ ID NO: 61273 - DNA, 291 bp, Glycine max
gtttgtaagggagaggtgacacttaaaagtgttaccccaatatatggccgtgcgaacggtgtccgtggtcttgttgaggaatctatcactttttattttttttaatcttctatctgatttttgtttttaattattaatcttttttatattttataatattttgttttttttatatttatattttatatttatttattattatataatatattattatattattttttattatatattattttattattttaatttattttttttttatattattatttatttattattttt

SEQ ID NO: 61274 - DNA, 143 bp, Glycine max
atgaatttgatggatactttcacggactcatatgggcttcctcgtttgaagctgatgggtgaatggaatcattcgccggagcttattccacacgatgacagagtggtgaaacacttcatggacattctgttaccgctcatcac

SEQ ID NO: 61275 - DNA, 94 bp, Glycine max
cccacgcgtccgcccactcgtccgtttttttttttttttatttttttttttttgtttgtttttttatatttttttttttttattttttttttta

SEQ ID NO: 61276 - DNA, 165 bp, Glycine max
cccacgcgtccgcccacgcgtccgtttttaagaatttattaaacataagctttctagcgaaaaagagaaaatataaaaagaaaaaaaaaaaaaaataaaaaaaaaaataaaaatgaagataaaataataagaaattaatataaaataaataagaaataaaaatta

SEQ ID NO: 61277 - DNA, 353 bp, Glycine max
gttgcatctgctgaggaattgacagcacctgatccccaatctgatgttccagctggcgggtcgctagcagagcttgaatcaagaatatcatcagtctttgagtccacggctaagggtgctgacatagagaagatcctgaaggatattaaacacgttcttgaagaggcatgctgcacttccatccagaactctgtatctgccattccccatgatgtcaagccttctgatactacgtgtgatgagcagggtaatactgaagatgctgctggctcaaatgcagaaaaagaaattatttcgtcccagcgacctatataatatgtgcagatgacttctgatttagaagtcgcaacttc

SEQ ID NO: 61278 - DNA, 392 bp, Glycine max
aaattagttcattctctttgcgcagttccctacctctcctttcaagatgcagatctgcgtcaagaccctcaccggaaagaccatcacccttgaggtggaaagctctgacaccatcgacaacgtcaaggccaagatccaggacaaggaaggaattcccccggatcagcaacgtctcatcttcgccggaaagcagctcgaggactgccgtaccctcgccgactacaacatccataaggagtcaacccttcaccttgtccttcgtctccgtggtggcatgcagatcttcgtcaagactctcactggcaaaaccataaccctagatgtcgaaagctctgacaccattgacaacgtcaaggccaagatccatgacaaggagggaatccctccatacc

SEQ ID NO: 61279 - DNA, 370 bp, Glycine max
gtgagatacactaagttatcctcataaatacactctaattatgtggcaagatgagtgtctaaccttagtaacattgccacatattgtgttcatttttgaattatgccactaatattttatttattacatttatatcttcttttattttttcttttctttatttcatatcatttatttttatacttttttatttcttttttattaatttattttttttttatttttttttttattttttatatattatttttatttatttttttttttttttattatttaatttattttaatttttagtttgttttttttaatatttattattttatatattttttattttttttattaattttttttttattattttttt

SEQ ID NO: 61280 - DNA, 258 bp, Glycine max
gcgcgatggaaaaggtagctttgtaaggcttgaagttgtcacagcttcactgggcttcggtaactgattttgattatgtgtataaatttatggcttttgatgtatatattttaaacattacatttatcataataaatatttataattatatatttaatattgtatctatattattataattaatattatattttatatatattttttataatattaaatattattatattatattttatattatattataattatatt

SEQ ID NO: 61281 - DNA, 287 bp, Glycine max
cccactcgtcctaaaaaaaaataaaaaaaaaaaaaaaaaaaaaaaaaaaaaaagaaaggaaaaaatataaaaatataaaaaaattaaataatcataaatacaaaataataaaatataaaataatgtaacctaaattaaatataattttcaataattttataacataaaataatagaaaaaccattaacttttacataacttaataacatttttattatatatctatttttttcaatatatcttatttatctaaaaggtttttactaatattctattttcaatatttt

SEQ ID NO: 61282 - DNA, 236 bp, Glycine max
ggatgccgtcgatgcatattactcagaacctatatactatagaatcagacgagtgaggaaagatattgaagatgaggtgctgcctaataatttcactggtgcacactttactgctgaaagttatcaaggaagtgctggcatatgacttaaaatggagccatgtgacttcaattgaacatcatatgttagtggattctttcaaggtccatgtggatggaacttggtaatgatgcata

SEQ ID NO: 61283 - DNA, 270 bp, Glycine max
acggacgcgtgggcggacgcgtgggttcgaattcttcaatttactccagagccgattgacctttcatttgtgtttcatacacatttccaatacatccaatcccaccaccataatgctggatgagctcggaaataagtccttccaatgtcaattctggtgttttcttctgtgagaatggtaaacagtgtgctacccttcagactgatgaagtccatctgaatctttgaaggcttgaccttgcagagctgttgcacttaaaaagctgagagt

SEQ ID NO: 61284 - DNA, 103 bp, Glycine max
aatatcttcttagatcttcaacacaaatagctcttttacttctaaatttgattccttagttcagcattctaatagtagttacgggcgtcatcaccattcctca

SEQ ID NO: 61285 - DNA, 238 bp, Glycine max
agtaaaacctcccacgatgtcttcaaatttgcagtcgaagatgttaattagtctgatttgtaaggaattcccatctcgtttccatgatatccattgtctgacgaatttgcgaggtgctggactccgatttagatccttcaggtgttgacctgttggcagttcttgatgtcgctatacattacgttggcgcttcgtggaaaaattcaacccattcactatcaggtttcttttcctgcac

SEQ ID NO: 61286 - DNA, 177 bp, Glycine max
actttatcttcgctctctctagctctttctcttctcttgatttgcgatgttgcctcaattctcagtagacggagttcgttggtaggatacatacagacgaaacatccttctctttcttttggcttcgatttctctctcctcttccgcgtcatgtcgatggcaattcggctaggggat

SEQ ID NO: 61287 - DNA, 286 bp, Glycine max
gaccacgcatccagtttcatctaagccctcttgtcgcaacgtattaagaataattaatcaggcccttcgatcttcgattcatctgaaaagaggtcttttgtttcacatcaacacgagttcatgcacagtaatgggtatcgctcactttccttgtatagcatttccagtgcagagagatgtgaaccctcttatgcaaatttctctgcttgtggtgaaagatggttgcaaggtcacttttgtacagactgagttgaacctcaagcgagcagagacttggggtgctgac

SEQ ID NO: 61288 - DNA, 156 bp, Glycine max
agagaaactagattaaataattcatcagcaccagcaacatactcatatggctatagtagcaagaatccaagctacgttgcacgttagcccatgtcaaggaatttaaaccctatggtggattcatcagcctcaaactccatgtctatgattgttaac

SEQ ID NO: 61289 - DNA, 250 bp, Glycine max
agggtagaaggtcctctgtggtggatgtaagaagtgttgaactacatgaacccaaagagactagtgagaagaaatctaagaagcaaaaatcttctaaatctcagtcttctgataaggttaagggattgctaaaaaatgtgattttgcagcagtcaaagaagtgagaatcttgggagtggaagtagagtgagaggaacaaaggtgaaggagcgcatgagacatgtctgcgagagacaatggataagggtaa

SEQ ID NO: 61290 - DNA, 236 bp, Glycine max
gggccgacccacgagtccagggtcattggccaaaattgatatgtgtccaaacggaaggatttgttcagtttgacaatcctcgaaaatctgagaggcgaatggacaaatgctgcattatgcaaatggaaaattagttaaaggagatggagcaatgaataaatgtgtcatagttgtggatataatttgcattgaaggagcagtacaattgtacttggtgggtgaagttgttaagaatt

SEQ ID NO: 61291 - DNA, 353 bp, Glycine max
acttccgcaccagggaacaacttcccctttctttcttcttcttctctcttgcctgaatcgaagtcgaaaaacacagattcaattccaccatcacttcttgttcttcttctgttcgtctttcgttttataaattctaaaaattccaaaacacagtttttccacgcgtgacacttcaccaacctctctcactctgcgtcttcgagctacatatgcctcctctcccaccctacgtattcttcctccttgctaacctcacctgcctctccgtcacggtccaatccaaaagagagcctgatccttaccgcgatcgcgtgctcggttgttagtctccacacgcccccgggtcgcgtcgc

SEQ ID NO: 61292 - DNA, 76 bp, Glycine max
atggagtgttgcgtcttgcggcaaactgagtgaggtacaagagggagagggaggaggaggagagaaagagaaatta

SEQ ID NO: 61293 - DNA, 432 bp, Glycine max
aaacagttagcctcgcagtccatgttacccgtgatcaggtctcaagagcacgtgaacgcgaatggcagtttttatcatcataatcatgtcagctagcggtgtagcagacacgatacatagtgatcaatcgcgtcgaaaaccagataattgttctgacaaatttgatacatgaacttccatcagatcttagcactatcgtgtgttgctacattaatcatgattcacacttgtagtgaacggcaataccctccagctgatgtggctcatatattagattctgccgttaccagtcagcatccatgctgttcacagaaccttcctatttatagagaagttcaaatgtgcatgggatgaatcattccgcatatgttagctcttaacactacgtgacttacatcttttcttctgcatatctccctctaatgtagctgc

SEQ ID NO: 61294 - DNA, 369 bp, Glycine max
atgagcttctttcttattgtcatagagctggaagcatgcttttatggttctcacatttttttgttttacttcagaaggattttctgcagctgcaagcctgctagcaatgttttttgaagttactctcctttatattgaagtttttttttgctgcaaatttgttaattgacaataaaatatgaatgtcttttcctttggcctgcatctaatctttagatgtaatgtccttatcaatacctgatatcatgaaacctttcaactagaaacttacttttcttgtttatgattttcaactgaatttattgttaatgtctttggaatacatgtaatgcttaagtgacaattgttagtatttataattcttaattt

SEQ ID NO: 61295 - DNA, 311 bp, Glycine max
accacacgtccgcataaatcctgaaaatcaggcacttttggttagtatgaagtagttaatcttgcataccaatgattctatgctaattgacagggatcttaaatacaattttattctatattcctcttctatataaataattagctacagtacatcattatgccataaacaatttattgacgaagaattcattctgtactttgcattttatagattaacttaactttcagttccagtaggacaaaaccgtgtgtcgtttgtaatctgtgatctaacttcgtgtgctttctagggtcatgagtcagggcttt

SEQ ID NO: 61296 - DNA, 116 bp, Glycine max
aaaaaaaaaaaaaaaaaaaaaaaaaaaaaaaaaaaaaaaagaaaaaaaaaaaaaaaaaaaaaaaaaaaaaaagggaggcaaaagaagagaataaaacaagaaagaaggaaagaaaa

SEQ ID NO: 61297 - DNA, 96 bp, Glycine max
actcaagcgtccggttcagacctctctttctgtcgtgttttcgacctctgattccaggacaacccttcgtttggtcgtccgcgtgttcaccttttc

SEQ ID NO: 61298 - DNA, 344 bp, Glycine max
  unsure (1)..(344): unsure at all n locations
actagcattgtgtctaaaactaaaacaatgattctctactttggttcttaatttgatttttaaatagtaccaagtaatctgattgtggaaagtagaaattcggcaaggttaaaaaatgggacgaaatcatcgaacatgctgaaaaatgtgcagttgacgatgatgggttctacatgtatcgctatgatgcaaccgtttcccttgtcttgaactgcatctataaggttgaggcgattttttatgggcaacactatcggtctctgcaatctctgaatttggaggagcagcgtttggtggaaagagttaagcaggaagcaatacanaatttgcagaatctggtgcca

SEQ ID NO: 61299 - DNA, 255 bp, Glycine max
acgatgatgtcgatgctttgcaaggaagatttagagactgtagcaacataagccatgcttaacacgtagcatgcctctctgctcgcatcaaactagtgtggttctagcgttgtgcactcagtatatgcagccttacctctcgtatggtccctcataaagcgctttgagtatccacagtggctcaagctcgcttgtgatgaactgtatccttcatgatggcggatggtggcattggaagcgtgcgtgaggtcatga

SEQ ID NO: 61300 - DNA, 204 bp, Glycine max
acgagtccacaaaggccgagtccgtgccatgactgttggcatcaatacactctttgctggtgcagaggatggtgtcttttttgcgtggagaggaagctctaaagccgattctccttttgaactggttgcgtctctcactgggcacactaaagcagtggtttgtctggcggttggatgcgagatgctgtaggccgggtcaatgga

SEQ ID NO: 61301 - DNA, 378 bp, Glycine max
agaaagagtgaacgttaatgagacacgtgaatcaagtaaatcattaggatgatactcgcggtgttcaaatggctgatatgataatccagataacggtatacaaaccaatgattggaacgacttataacgcgttactcttaaacgaacatctcgtgaaacacctgaaaaggaaccgtctctgcacattcgtcaagatacacaggcaaagtcatgttattagcagaatgttatgtcagctgcatgccagatgaatggtggagaatacgtccatgaaactcaggagaattgagtgcaggtgcttgagtgaaaatactctcaagattgcagagtaacatatgctgacgatgaaatgtatcagtctcatatatctatctgaca

SEQ ID NO: 61302 - DNA, 442 bp, Glycine max
  unsure (1)..(442): unsure at all n locations
ccacgcgtccaaacattgttcaggctcctttgattcctagtcacactgatattgctaagattgtccagaaagtgttacaaccaaagcttcctgtccatcccacgtggactcctccatcaagggattatatgaataaggctttcacatgtcagatgtgtgaactcagtgtcaatgaggttgatactgtacttctctgtgatgcttgtgaaaagggatttcacttgaagtgcctgcagccatcagtcttgagaggaattcataatagagttgattggcattgtatgaggtgcttgagtttaagtggtggaaagcctttgcctccaaaatatggtcgtgtcatgagatcctcaaacacaccgccaaaattgccctctaatacaggtggcgttcaaccatgttctgagaagaaagtagagaatatcgattcanaggtcatcccaca

SEQ ID NO: 61303 - DNA, 88 bp, Glycine max
accacacgtccgtacacagacgttatccccagaagcaccctttgcaatactttttggtccttatgaacgttcttcaacatctcagagg

SEQ ID NO: 61304 - DNA, 361 bp, Glycine max
aattttcaggtgatcttgctctgcaggctcgtctattaaaggctatatctccccattaattgccgaaaatattcaaaaatgccttgtcttctaccatactaattgagatcatcaagtgtcttgcatctcttttcactgaagacatggatctggttgtcagttatttggagcatttgaccaaggtaccaagatttgatgtgattgtaatgtgcctttcatcaacaaataaggatggtttgtcaatctgattgataagttggttacattttgtgcggacatacgcaagatctgggatgaagtgttcagcggagaggcaacaccaattgagtatgcagagattctggacaaccttcaatcaaag

SEQ ID NO: 61305 - DNA, 83 bp, Glycine max
aaaaaaaaaaaaaaaaaaaaaaaaaaaaaaaaaaaaaaaaaaaaaaaaaaaaaaaaaaaaaaaaaaaaaaaaaaaaaaaaaaa

SEQ ID NO: 61306 - DNA, 400 bp, Glycine max
acaaacggttcgattcctacatgcttcggattgactacagacgatgtgcatatgattgttgtgtttatgtgagaagccttgatgatgctcgggaagattcacacttcagagtatgcaatcacaactgacaagttcaagcattgcttggacttgtcgaatgttgctgagtgttagatgtgataggaccctcaacccaagaaatcaaggtggagattgttgtgcatggctcatattttatgggttggacaaatgttagagcacagcgtaaaggccacctattgttgggttatgaagcacgttgggggtgcgggtaaagcccgtagtacgcttaatattatatatcgtgatgtaactctattatttatgaataagatatagaaacagtcacagtactcattag

SEQ ID NO: 61307 - DNA, 357 bp, Glycine max
ctccctcaattttctctttcttcatctttctcttttgcatcatcatcccttttccttttattcgttagggatcttcattcatgcatgcgattccagctccatgcacgcaagttgctgaagacgaatttttatcgcaacatattcatctcaagtaattccttcttatttttctttcacgacagctttgtaactaattttttttaaccttcagtttctctgcgagtattttccgcaatggccgaagaaattgtgaatgaatttgttcaccaaaacggcatcgctgtcataacacacaatccccccaaaagtaatttcgttttcctcaaaatcttcttctcttttccttttaatcctttt

SEQ ID NO: 61308 - DNA, 399 bp, Glycine max
ggtcgaccacgcgtccgataaaatctcacacaaattacacatgtcatcaactctctcggttgcatcatcatctcttttcaatttaatctcaatgtgacttcaattaagcaagacaaatccagttcaatgcccgtcaatttcaatcagtcgtcatttatataaagaggggattcagctcaagttattcatttttagtttactttcactaaaactttctagcctaatcattttgcagcttcattttatttgccattactttctttaatcactcttaacagtgaaaatgaagttcttcataacggtggcaccgttgccagaaatctcaatttcaccttcagtataatcgctaaatttgccatcttctatgcttttaccattactatttctgcttataccttc

SEQ ID NO: 61309 - DNA, 420 bp, Glycine max
cttcggttctcaattgaaccaagctggcccaacttcgcaaaatctcagctttcgtttcgtcacacaaacaaacctcgtcccgctcctagttacacactacaatgaatgccctttaacatttgttgtcttctttttttttctcccccccttccccgagcattgtatgacttcacttccgcttcctcggacctcactctctctcttcaattctcggttttgttattgtagaatggttttaagttaggggggcggtgtggcgtgttagggtttttcctagtccaattcacgtcggtctcggaacgacccatcgtaggtttaagaatgtctggtggtggtggtggctgtggcggtgttttcgtgacgtgggaagagcaggtgatatgtcaggagcgtgggaaccgagtgattcacttttacctg

SEQ ID NO: 61310 - DNA, 368 bp, Glycine max
accacacgtccgaaaaaaaataaaaaaataaaatagaaaaaaaataaagttataattaaaaaaaaaaatttctactcagagttttatcggaaaaaattctgtcatatataaaagtaaatcttcgatttgttataaaaattttaaattcaaaagattatcgtgatataatcaaatgatcctagtgtgggaattgttagttgatacagttatagtgctgtttcatttccaattgatgttccccgcataagtgatcttggtgtcagtgtggtcatcacatttaaatattcatctgatgataaaagtcctaacgtaccttatattatgctcatgtaattgataatcatgttagtcatatgagatattaatgt

SEQ ID NO: 61311 - DNA, 461 bp, Glycine max
gcgtccgattcactctacgctcagacctctggttgaagttcttttccatgtaggtcttcctctccgttgttatcgttgctgttgccttaactctcctctgccttctcctcaaatccgttccaactttcgctttcgctctctaactctcccggttgtgattcttctcccgaattccgctgtaaatacctgaatctagcttctctcaatatctaagcagcagtataattgtagtgagtgagatggatcattatggttcttctggatgaagctggacgatgatcctcaaccacaattcaagtattcaatcccaatcccaatcgaaccaggaccctaacctctttcttcaacaacaacaacaacagtttctccagtcacaaccttttcagcaagcactatcaccccaatccccatttcaacagcaccaccacctttatcagcagcagcagcaatcacaacaacag

SEQ ID NO: 61312 - DNA, 366 bp, Glycine max
acatacttctccgatacgatctcataaacttaagctattaatatcggttgaatgagacattaaaatgattgtcggtggttcaattaatcctcagaacatctcacaattctcagctgctttattaggaggtgttgtacaggatcaagcggttatcggaggtaacaatggcgatgatccgctcataataaacaatttgctatccgatctatcaagggaatagtactacatttatacacaattaccttggctgcagttccaggccattaagctctggagataacatgacgattggtcggataagctatacgacctgaatatcatagttatctatgtgattaactcactgcatcaatctgggtctactaa

SEQ ID NO: 61313 - DNA, 378 bp, Glycine max
  unsure (1)..(378): unsure at all n locations
accacgcgtccgcaaacattcgtgttctggtgggccatattctacagagaatcctatgtcattaagagcaaatcttgatgtatagagagcagtcaaataccttacattttgcgtataacatgatgatgaccttgatgacatttagagagcatacgcagaagggcggatgccaggtgcagcggtaatgcaacggtcatgtcaggtcttgacagacctcctcgagatgcacctcagagcccgggcttccgtgactgacgacatggtggacgcattcatggctatcagatcacttccccagatgtntcgactgaactcatcataccttcatcatcccaattaatgcgctgatattactggatatctggattcatcttgctt

SEQ ID NO: 61314 - DNA, 375 bp, Glycine max
cccacgcgtccgcccacgcgtccgtatagacaagatcgagatagttgataaatgtaaaacataatatactgctccagagcatatatagcgacaaacatacagtgttaaatgtgtctctttatgtgctatggatcagtatcctagttgttacattgatatacaagatcgagatagttgatcatctgtgttcttgggagatatttgcggtcggatcctgtactagcaggctgacgtctcgtgaagtgctttggatgtggaagtacaatacttataggaatgaggtaaacatgtgtaatataataatagttgcttcgttcgatatttgagataggatcgtgtaagattaatcgtgaagagtttcgacgtattcctgaa

SEQ ID NO: 61315 - DNA, 397 bp, Glycine max
gtttcattttaaaaggggtaaccaaaacttcctgggttcccggttggcttaaggcccccaacccccgcaaaaggtttggttggccaaaaatttgcaaaacaaagttgtaaaccaaggaaacgggcgggttgtcaaaggggggttgaacaaacaatccccctttgatggaattgtcagaaaggatcccttggagggaacccaagtgcaacttaagtctacatagtttaacacgtatctcacttctgaaaatgagggtggagctgatgttgtatccaaccgtgactcagcttctggttgggaaacattcaatctgtggacgatcagtgactcatccttcaacttgagagtgttcaacaagaaatttgttgagctggaaaatcatgggggtggaaacaaa

SEQ ID NO: 61316 - DNA, 298 bp, Glycine max
agctatcatcatggcacgttaacgtttatggaactcatcactcacagtatccatcctgtcataattcttagtactgaggagcatcaaactcatgtcaattttgagaatcttggtcagacatcgcatggccatcaaccattcacaggcaaccttcctactaacaagtactgttatgctttccatgcctctcagtatccgacagaatggaatgttcctactctcaaagcatatagcattacatctgcacatgacatatctgagatgaggatctctattatctatttgagcgccattgtca

SEQ ID NO: 61317 - DNA, 154 bp, Glycine max
agcacgcatcagcttatgttagtgtttctggatcctatcatcttcagtagtgttcatgtcaatactaatagtacttaggatcctcagatccttgtaatagtccacatgctcgttgagacattctacagctattgaacactcacagcccgacatc

SEQ ID NO: 61318 - DNA, 336 bp, Glycine max
aggagatcgtgggaacaagataaagtaagcaggtcaaagcgtcagcctcatcaaggaagttcgtcctacgtgtaaacattcagagacgactccttcaagcgtacaacctcacatcgccccaccaatttacataatagtgtcacactctaacaacatgcatacattcactagatctctattggactgtatcacgcctactgccaacatcatgtcacgattcatttcaacaattcagtagtaatcatagtactataggagaattgtaatcagaacttcgtagcgtaaaattcacttgccttggatcagatctgactcagaatcaagtgccgcagtaca

SEQ ID NO: 61319 - DNA, 437 bp, Glycine max
atccacccacgcgtccgaccgggacaaacctgctcagcaagaacaaggacaagataaacctgctcagcaagaacaaggacaagatgagcaagaaaaaggaaaagatgagctttgaaagggagctgttcctcacatgggatatagacacaaagttacatgtgggctgcacacccttttgtatctcgttatcagaatttagtgaaccttaggtgctacctatcttcctttgatcttcttttcttttcggttttcttttatgtatggtttacttaataaaaacgggagcttttgcttggtgtagtagagtttagtgcagggaaaggtgtagctgggattcgagttaaattaatggatgtttttagatcacccagttaaaaaagaagacgagattcagaatggtacaacatttgctaaagattgaaaaataaaagggcggc

SEQ ID NO: 61320 - DNA, 324 bp, Glycine max
accacaacgtccgaccacgcgtcagaccacacgtccgctgacatgatcgacgtttatcacagctaacgttcacactcatttcaacgaacaccatcctaacattgcatctgacgataatcacatggtgcacatttcaagagaccttgatattgctaaagatgctctaatgcatgtacttacgcaggtgaaaaccaatcttggtgaaatggaaggtgctctctctacaatccttccagttctgtcatagaccactgtctcagcagatggattaaatcgacgaaactattctggtagaaatggtcagagaaattgacttcgacattc

SEQ ID NO: 61321 - DNA, 420 bp, Glycine max
  unsure (1)..(420): unsure at all n locations
aagaagcgtgggcggacgcgtgggttgtgagagtgccacgttacatcttcatgcagtctctaatacgtgtctttccttgctgtcaccgctacacgctctaatccgtggcatgtttgtttctgtttttgattatttcattgctcccagattcagcanaatatatacatttattaaagttagaaccgaaaacaacaacctttgagttcgtgattctctgacctttgattttaatcaacaaagttatcttgatagcttttattgatattgttataaatataaggtagtgaggaatttggtggtatgaacgtaaccattattactataatttgattaatatatgggtatggtgccagtgaatttgattcctgaggtattgaggaatttggttcatgagcacgcactagtggtgcccatatcact

SEQ ID NO: 61322 - DNA, 398 bp, Glycine max
atccgaccacgcgtccgccaaatttacttacgtgggtgcataaattatttttccattataagaaccgggcagcctgccatttccttgcagacgaggatggggatatcatcatattatgcgtagcattgatcgacatgtgtggctctcagtcagtggatttctcttttacggaatatgtcatgagcatttgtacaatgaagagtttttgacccaacacatgctatacatggtatattgagattgggcaatcattgtgtaaagtgccaagaatttcatcatttacctgtgtctagtttagcacatgtgactgagtaaataggagtttgttcacttcatggtttctccaagaaaggaacctccggatccggttcgggcgtgttcctgccaacggtgccgct

SEQ ID NO: 61323 - DNA, 321 bp, Glycine max
atctcagagatgacttaatttttgtgcatgcatgtgttcaattgttttaagtgagatatgatttttatcatagtttggctccatgttgatgtttgcatgacattggtgaatcgaatttcttcatggcagcctgaagaggtctagaaagtttcaacctgaagataggctcttctcattatcttcagtgacctcgccagcggcagaagatcttgcagctggacgagatgatggtagaccagattatggtcctggtcgttcaaaaggtggaggaatttatgctaatggacaaggtaaaccaaagaaaagtaaaagtggggcaag

SEQ ID NO: 61324 - DNA, 432 bp, Glycine max
gcgtccgacaaacgtccgcggacgcgtgggttttttttttgctctatttataatggaatcatgccaaattaattccattgctgatgatataatggtggtttctgatgtatcttctggcggtcttggaaatgaattggagaggcatatagtgtcttctaccctatgtgttgatgatatatataataagcatgaagctgattcatgtgttatagttgatatgaaaagctctgtgcatgatttaagcactatgataaattcttcaatctcatctttgggcaattcttgttcaggattgagttttagttctgaaaataagcatgtgccccttggaaatcctcgtgtctctgcattgtctatggacaaccttcatgcacttttgcaaaatacagttgctgttgatgttcaatgtgagaaaactgctagccaagatca

SEQ ID NO: 61325 - DNA, 173 bp, Glycine max
ttttatgcctgaatgtgatcacttggcttcaatgccaaaggctttttaacaaaggttggatcatgttgatgtatgcatgaaattggttcaaccaatttcatcatagcaatctgaaggtgtctatcaagtttcagcctgaatatacgatcttctcattaacgacactgacctca

SEQ ID NO: 61326 - DNA, 415 bp, Glycine max
aagatttggttggataatggggtagttccaatttcctggatggtaaaaggcttatgggacaaactaaaacttggaatcctggaattttcaagtttccctggctaaaatcaattggaattttagcaaaatggttacttttcccccggcttttgcacaggcaaatgcaaaagggaaaccggttgttcagcacagcgggggatcatgcattattctgtgttgccaatcaataatagtttttatcacactatttatttacttcaaaaacttgtctgtaatttgagcactaaattgaaagttgtaaatactggaaattccttttatggcagaattgtgtctaagttttgtaacgtgttaaatagaattttccttaaaaaaatttcgttccggttaaaaaaaagagcataaggtataatta

SEQ ID NO: 61327 - DNA, 252 bp, Glycine max
atttttgtattagccatgtatgaatatgtactaacatttgccttggttaacatgttttcttaagaaaaaaaaaaaaaaaaaaaaaaaaaaaaaaaaaagaaaaaaaaaaagaaaaaaaaaaaaaaaaaaaaagaaagggaggaggacgaagaggaatgaagccaggtcggcgtggaggagacgtcataagacctcgagagcgcgatcgaaattgaatgcagcggcggccaatcgggagagtcacgaggggga

SEQ ID NO: 61328 - DNA, 437 bp, Glycine max
atctgacttgctacgccctataccctgccgtgaaaaacttggaaaaggaaaactaatttcaattttttcacaccctgggaacattcaaactttcaagcaagataataatcccatcaagaaggtggtactgaaaggaaattaaaggggggaaaaggtcaaggtcgatcattttgaagctataggttggctttggtgtgaaagattggtgcttaagtttatggcattcaagcacagtggtatccaaataattctgcttctccgttttgcaacaatggtttttgtgctggtgggcttattgactctcatatcaatttccaaccgaaaaatcatcttcaacaacagcagttgcagctatcagaacagcatttgaaagagttatataatgcgagtcatggaactgttgatccaaatcttcatgtttataattcaaaagccgt

SEQ ID NO: 61329 - DNA, 378 bp, Glycine max
acccacgcatccacgaacttcttgtccaagaaagatcaactgccgcagccaaaaatgctgcagttattgcttttttgcaacagttatctggtcagcaccaaaattccacaacacaagccaatttccctcaacaaccacctccacaaaaagttacaatagtacaaccaccaccacaacaagctccacaaccacaagctccattggtgttgtcaaatagtgacaacatggagattcagaaaatgaataatcctcacaatggtggtaacggcaacggtaacggcaacggcaatcctaaccctaacaacaacttccgtgccggcggcaatggcaataacaacaatccctcctccatgaattccttaacctcctccaaggtgg

SEQ ID NO: 61330 - DNA, 300 bp, Glycine max
cggacgcctgggttcgtggtggtcctcagcgtgaacgtatgatgaagtaattaacggattatcggaagagttatattcacacgaagccatataaatctcttgttgagtgatcggacaatccttggcacctactgtcatcggatccggtgctgtgcgccatagctagaaccggtttcaggtacggatatagcatgcttatgctgcagatgaatctgaattctgtggttggcttgttcacgattgtgggttatagatggtgtgttcatgtacgttactcaattgtgtttatcgttaacgtct

SEQ ID NO: 61331 - DNA, 65 bp, Glycine max
cacgatcctttcctagttaggcatgcttcatatctcctctatcgtcacgtcagttcacttcactg

SEQ ID NO: 61332 - DNA, 317 bp, Glycine max
accacttcatggtttttgaccaattggtcttgtttttgtgtagtagtaatttcaagttgttcttgagtttgtgagttttgaaagtttggattgtatttctgtttgacgagtggtgttggaacaagttaggtttggtacggcctggttgggccatccaatatctcattcattggatttcatcgacggcataagtcataatcaagagtcgcgaacgcacgttgtatttaccatctcagaagtccgttctcagaacttacgagctgatccctgagtaccagaaatctgtcggccatacgagcgcatcatagctgccatct

SEQ ID NO: 61333 - DNA, 339 bp, Glycine max
agaaaaaacaaaaaaacaaaaacagactgatccaaaaaaaaccaaagcggttaaaaaggcaacaaggtagggtgcggccgaagatgatgaacgaaagtgtcgacgcctgctaagccgtaagcagcccaactccattatgtctccaaatagtcatggctcggcaagcatccattgctgcagcttgggaggctgtcctgttgagttcaaactatgccagatctgtagttcatatcataacgtctaggtgtgggtgtatgtctgtgccttgctgtacattcttgatcaaagttgtgtggtgtaagatggtagataggccactgttctgcagtgtgcgatcaa

SEQ ID NO: 61334 - DNA, 418 bp, Glycine max
aagaaaacgttactagcacagttaatttagattcttctgattatccaaagcatagtaatttcaagttacacggtgatacaagtaaaggaaaggatgagttgcataagtttgagaaggtgccaattggtagtgggattgacatgtgtagttttgaggaccctttggatgaaaatcctcctgcattgatcagtttacgtggcaatgccaaattgtctgggtataatgataggattccctgtagcttgttgtccaaaagtcgtgacaatgtaccagtagttagtagagatgatgatgaaaactcttatgggtgtactcaccctattaatactaaaaccaagtcctttaggctaaagactggtaaaaggtgataatagaataattaaaaaactggcttcaaacttccagaaagttgctgaaa

SEQ ID NO: 61335 - DNA, 433 bp, Glycine max
  unsure (1)..(433): unsure at all n locations
acgcaaccacccacgcgtccggttcattctctttgcgcagttccctacctctcctttcaagatgcagatcttcgtcaagaccctcaccggaaagaccatcacccttgaggtggaaagctctgacaccatcgacaacgtcaaggccaagatccaggacaaggaaggaattcccccggatcagcaacgtctcatcttcgccggaaagcagctcgaggacggccgtaccctcgccgactacaacatccagaaggagtcaacccttcaccttgtccttcgtctccgtggtggcatgcagatcttcgtcaagactctcactggcaaaaccataaccctagaggtcgaaagctctgacaccattgacaacgtcaaggccaagatccaggacaaggagggaatccccccnagacagcaacgtctcatcttcgccggaaag

SEQ ID NO: 61336 - DNA, 348 bp, Glycine max
gcgtccaaacaaaagcttcttgcacgcacgcctttacgaggcgtgctgctactaccggggcatcgtccgggtcatcggcggtgggcgctctataggctccatcgctactttcgcgtactggcgacctctttactcttctaaagtctcacccagggggatttcactgtcggtctttttagaacttcatgacggggaaacccctggcgtcgcccatcttattcgccttccggcatatccccgatttcgctagctcgcgtgatccccactaggttcgtcccgatcgccactcccaaactttccccagcttgagcggctatgggtaaccgccccgttgcggcccattacccc

SEQ ID NO: 61337 - DNA, 408 bp, Glycine max
accaccgctgttccataatccggcccttcaaatcgccatttcttcctttctcaccaacaaattacaaaggcaaaaaatatgggaaccagggaacaagtttgtccgaccaatggggaaattgaaggtttggcaattattactaagaagaagaagaaaagattaagattaagaagaattggaacaacaagaagatagcagatgcaaaagctgttgcatcaactggaatggacaaggccaaaactgcaccaattgtgggtgcccacaaagtgaagagtgtaacctctgctggcctcaaatgggtcacgaatcactatcacaaaaggacttccaagtgtaactcacacactcacatgcgtcttggacagtttcacatccacagctttggtaaataatacatgatgctctact

SEQ ID NO: 61338 - DNA, 256 bp, Glycine max
aacaaaagctgtttccactggcagacatacattgggtttaagctacaaaggtccaaccggtagttaactactgtgcgtgctggatcgtcagcagcagtgctatcggcaacaagctcacctcgtgctggtaagcctctgcttccaatggatgcaaatgaagatgaagagaacgagaaagcacagccagttacatagtcacatgccatcttccacatgagattctctcttgctagcatgtactctgcaatgcttctga

SEQ ID NO: 61339 - DNA, 170 bp, Glycine max
aacaagcgtccgcaaacatagtgactaccagaagagacaagacacgggtgagcctagaggaagaaagagacatcgatcatcatcaagacaactgcagtttcaatgccccagtaggctttccaaacgtaatacttttagtgatggtaaaacttgcagagcaacttccagtt

SEQ ID NO: 61340 - DNA, 350 bp, Glycine max
atgtttaatttactacgtccgcgtggcccacacaagttgcaaccatagtcactactcactcacaagcatgcacgtcattttaaaatgcattcattgatggaactccaccaccttacaatacaacacaagtgttttgtttttgtcctggacccctcaaaaagcagaatccgatgttaaaagctatggctattgtggctcattggtgaagactgaagagtgaacatccccccaaattaaacaacatactatatggaggaaaggtggtagggctattaaatgatttctttccttgtaattttcttgtttatatagtatagaattctgtgttatgggcgaaaaaaaacagtaat

SEQ ID NO: 61341 - DNA, 197 bp, Glycine max
ccggtcgaccacgcgtccgacgaagcatcagaaactttagacaatgaatgctaaatttacagcactgcatcattcagtatccatcatcttttgggcctcactaaacataaggtgcggccgctctaaaggatcgaggcttacttacgcttgcatccaacttcataggtcttctaaagtctcccctaatttcaattcat

SEQ ID NO: 61342 - DNA, 390 bp, Glycine max
ggctgaaacaaagaagtgaaaataacagcaaaaagtagcagctgctgcagctcccccgaagcttatctcagcagcagatactcaaccctgtttgagtagccgagaataacaccaatgggagaggtgttatctcaatacacgctttctctacctttctttctcaaatcactattatatcatagcatagatatttttgttgttgttattattcttattactattattcctggttctgattttcaggttattgttttgtgtttcaggaggaaaagaaaccagaggaacaacccaaggcagaggagaaaaaaccagaggaagagaagaagaaagaagaagcagcagcagcggaaaaaccaagcgaagagaaaaaaccggaacaagagtcgaaag

SEQ ID NO: 61343 - DNA, 372 bp, Glycine max
agttattagtgaacaattcacatgggaacctcagctggatgtggatgacaatttcttcagcagtttccaaatgtgcgacctagactcctctgcatatgaaactgggtttcccattattgatgagctaagttcatttgataacagtcaaagctgttataacctttctgatcttctatttcctgggatcaattttacaaacgatggcactgaggaaaatatggagtatcccactctcgaggagacaataggagcagcagattttacttttggaggatcctctgaagggtttcaacagatgtttgattcttcatgggttaatcatctcatgtgccatcaggccattgcatttactgaagaactactgtcagcctc

SEQ ID NO: 61344 - DNA, 310 bp, Glycine max
gacgcactcgaccacacttctgtggatccggattctgccgtgaagttcgactcctctttcgcactttctactgtctcttatcgctttgaacgcattccttccctcgttgtaccgtgttcaggtgaaatgacaccgttttaccgttccatcttcgcggcacagtatacgccacgttcgtaaatatatagggaagcatcaacgtgaatgatctacgtgtcggaaatatcaagggactgtcactggactactgtactacaaatgttatggcaagtgtgtgattcgtgacgcatacgtgcgttcttgtacacat

SEQ ID NO: 61345 - DNA, 144 bp, Glycine max
cgcgtccgacgcagcgtccgcccacacgtccgaaattttaaaacatgctgaccgtagttgggaattcttccacctccatccttattatagtcatatcctggtaatccttttaatccttcggtgatttaccccgattcctgttta

SEQ ID NO: 61346 - DNA, 422 bp, Glycine max
aattcggcgtcggactcttgctacgagttgaattgtcactcttggttcgcattctgtggatgcttctaccactgtcagaatcagcatgtgagctatagtttatttttacaatcacttaaatctcttagttcttgaggcaatatgcaagatatacttaaaatccccccttgataattttccattcagtcatgtccacttcaaaatttccctgattactcgagatacgtaaatgcttctgccgtgtcccctttgcatatataaacgccagtttcttcacttgggtctctgaaagttgttcacctcatcctctatgatcacgaatggtttgcagttatagcaacaatgtcagatgacatgctcagacatttctcatctaactcatcaagtcgttcatatcagtctctgtctagatagatcgcaca

SEQ ID NO: 61347 - DNA, 163 bp, Glycine max
aacaacgcattatagcacaccacacagaaacgcaaaacagagagaacaactgttactcacacacgccatgggtaaatgaatggtttttgagcaacagcagttaaaagagaaaagggattcagcgaagatgacatcggttggtgtggcagcaacttccggtttg

SEQ ID NO: 61348 - DNA, 306 bp, Glycine max
ccgggtccgaccacgcgtccgagtacatctaacagatgaagtaactcctaccccttggcctctcattttggaggaaaggcacagtgctgagaagacaaatcgagaggcccatggccatatgttcactcctagatggtttgatttatcagattaagtgactcctaccccttggggtgacttggaagtttaccaatacgaaggtaaatatacccaacattgtgctgccgtagataattctgagtgcattgaagttcctgacatctgaccagatatcatcccttggaaatatgataatttggatgctga

SEQ ID NO: 61349 - DNA, 420 bp, Glycine max
atgaaatctctgtcacgattcaggtcttgcatgcacgggattgatcacctgctcacgatttaatagcatgttgtcaatctgcatactagcacttgagcgatccggcctggatagatatgtgactcgtatgacattgcattcaaagtcaatctatctgcagaatttgctacattgacatggaacaatattgggatcgtcaaagttctcaagaggaacctgccatgcctgatcacctgagggttcaccctataattcttgatttgttgttacaacatactgggtcacatacaattgagggcttggctttgcaggacatacagctattggacttcacttcggtactatagcatttgtgataatgacggaattggcacttttgctacatgatcatgtacaccttgttgcccattatgaatagct

SEQ ID NO: 61350 - DNA, 325 bp, Glycine max
cagcgattgaggtgaggaaccatgtctccccagaaccagagccagagtcggaggaggattccagttgttgttgcccattctgcttgggaccattccttcaactttcctacctcgacgaatgttttcataagttttgcttcaattgcattttacgctggaccaaggtggttgctggcaagcaccgttctccaccttcttctgctctatgccccctctgtaagttttatcttatcaagatcgcacagatattgattacaatgctattacactgaacaaggtctcttagatgacagactctatctatcgcattattggagatctctaa

SEQ ID NO: 61351 - DNA, 419 bp, Glycine max
accacagcaattgtttctgatttttcccaggttgttgttggatgttacatgggaaaaatacattttcttgattttttgaatggacgcatctgttggattttccaaacttctggcgaggtaaaagcacagccagttgtagacacatgcagacaattgatctggtgtggctcacatgatcataacttgtatgctcttgactacaaaaaacattgctgtgtgtacaagctatcatgtggaggcagtatatatgggtcacctgcaattgatgaggttcgtggcttgctttatgtggcctctaccggtggtcgtataacagctatatcaatatcggcttctccatttactatattgtggctacatgaattagaagtccctgtgtttggttctcttgctgtcgcccacaatggaactgtaatatg

SEQ ID NO: 61352 - DNA, 380 bp, Glycine max
accacgcgtccggtacacactacatcttcaagacgcacaatcactcactctacattcttctatttcctctatccctaatttcccaattcgtccctaattctgcattttgcagacacttaattacccgcaatggcagagattcagccgccggagggccaaataaacggtgccgtgggaaccctaattcttcactcctcggagccttccatcggatcgaagcggcagcggcggccgagcgtccgattgggcgacatcggcggcgaccagccctacgatccccacgcccgccgcaacccgaagccgtggaaactcgccttcgacagtcaccaccaccaccaccaccaccaccgcagcaaagacaagggaccaggtaaaccctc

SEQ ID NO: 61353 - DNA, 382 bp, Glycine max
accacccacgcgtccgatttgcacttgtgttgtacaggaggagaggtgcacgagtgttgaagtggagccaagtgtccactcattgctaaggaatgaactttggtcagtcagtattgtgtttttctggaccaatgcgtcgccaaatttggagattcctggcttttcatgtgataaaatcccataactttcaatctggtgtgtggtggctgacagaaattgtgagggttagcagcgcattgtctatgacatgttagaagtttatcctaattttaggtctccagttgattgatacttctgattctggcacgtgtgtttgaatattcatgctccaagtaattccttgtctggaacatcttttaatgtgataagcaagatttttaag

SEQ ID NO: 61354 - DNA, 399 bp, Glycine max
accacccacgcgtccgggagcatggcgggtgaaaaatgggttcaggtggcggttcatggagtgcatggcgtcgtccagacgagcaagggcctcgtcgaggttgcgggaggccatgaggaacaatgatgaaagcaccaattgttagggtatgaaccctaaagctggcttcgagggcagcaaacctccagcaagaagaagaagaagaagacacagaggtaagaaaagggaaatatcattttcttatatcccgcttcattgtttacatagctatatatagaggaatttctcttaacagaattgtaaatcttatccaaaaggaatctaataacgatttctgttttcatatgattgcctacgaaggagcaaccactacaagcaggatttggagctgattcttgc

SEQ ID NO: 61355 - DNA, 211 bp, Glycine max
ttcatggcttttcaaggtccgccaatggacccgggatgctcacacacacatttttcagggccatcgccgcagtcaaatcacgcgccgcctccattttctcctcggggcgaccacgacaaccacctgacgttgcgtcggcgacacgttggcccaacgccccggattcctccctttcccatccttcatttcgaacccgcaaagggacttgcgg

SEQ ID NO: 61356 - DNA, 388 bp, Glycine max
tggttggaaccaacctttgggctgatgagtctatcagctggtggttgtttccccccgccccccccccccccccccccccccccccccccccccccccccccgttggggggactatagctaatatacaacaccaaaaaagggggtacggaaatagttcaatatacggtagccttcctataggaacccttatgaatataaggtatatattagtaaacttattaatcatatttgaagcccttaatcaatagtacagaggaacggagtaatagattagtgatgttttccccagagacggaaagggggcaagggcccaaaatgccttcggcagttgtttcggttattaggggtctatcgggttagtactcgtgtggtaattggtcctcgacgt

SEQ ID NO: 61357 - DNA, 430 bp, Glycine max
atcttaagcagtgcccacgaggttagatcgcaacatttccctgccaaaacttcgtttgctactttaccccctttggcgctgtttgaaggattttttttttttttttgattcagacccactttgcaagacagtgttttgacctctttttatgctactttatcccgaaacagcaaatgggtcgcatcgctttcagcctcggaatttgatgacgacgatgatgatggagcatggtggtgacatgtgtaatcatggggttgttaataattaggggtatattaggttttggactggtttgtatttgtatctggtaatggtgtttaggttcagagaccttgtggagttggcatctctgtgtcaggggtgtttgcatttgttgcaataataatagtactaataataataatgggcaacggcacttctcgtgttgttg

SEQ ID NO: 61358 - DNA, 345 bp, Glycine max
accacgcgtccgaaaaaaaaaaaaaaaaaaaaaaaaaaaaaaaaaaaaaaaaaaaaaaaaaaaaaaaaaaaaaaaaaaaaaataaataaaaaaataaaaataaaaaaaaaaataaataaaaatataaaaaaataaataaatttaaattcaattgaatttttttttattttctaaagtttttggaagtaaccggctttttcatttatttaatctatttgctttatatcacgctttcttttcgtgagctgttgtcatagcgactctgaccgatttcatttcccttcactatcgttgcgataacctgattgtggaatgggaccttttttgtcacatttaattatgcgt

SEQ ID NO: 61359 - DNA, 365 bp, Glycine max
acaggtatccagttggagagattttatgaagggtggaaagaagaataagaaaggggaaattcgtccaccgaagcttaagacagaagatcccaacaaatcctacgttcaaaggcctgtaaaaagaggttaggggttctgccgtcgagttagaagatcacagcaatcaattgaaacaggagtccgagagaacttatttatgcaggctatcttttgtatcagttagatacttttaaacagatttattactggggtcatttgaggcatgttaatggaatgtagacctccaacgaatgactatcccattttgggatgctaggacgttacaccccaatactgataaataggaattactggttgaggcattg

SEQ ID NO: 61360 - DNA, 377 bp, Glycine max
agagagcagttggaagacctcctgccaaaaaatccttcttctaataagctgttcaatatttcatagtttcaacttttgaaacacatttttagacaagaaggaaaagaaataaaattaaagcaaaaacagaatgagagaataataattatgggcataagatatgccatagtctatataacaaggccttttccttttttaagtaactaaagggtgcaagattgattgcaattagcagcactatgatgaaaaaaaaaaaattgaagatgaaggaaaagtgtcaaaataaggtaaggaacaaatggaatggttttaaattaatggaatggttggaataatgtgtgaagtggtggcacgcctaattgactgtgctgggtgag

SEQ ID NO: 61361 - DNA, 179 bp, Glycine max
gggtcaaccacgcatccgattgcgcttactttgtacactgctgggaaagatgttctcggatactgcctccaatgtggtgctcactaacgatataatcacacttgctggtcataggagtacccacgatgcagtgaagaatacagttacgcatattccgaaactcaatgaggccgctgaac

SEQ ID NO: 61362 - DNA, 349 bp, Glycine max
aaaaagctttggcattgttcttatgctgtggttttttggcagatttggttgggaagtattaatcgaaagagagttgcatatgaaaattgtgttctcatgtggataattctgcattaaggactgcttacatcatctgctatcgagatttgtgcgtgttggagccggtcgactatagttgctagtcatcacttgggatagttcacctacgagatattacaggtagttaattcatgtaagatccgtggcttcgactgggtaagaggtctatgctcatcatatgcttcgtgctgtcagttgtgcgaatttatcacctgtcatttgctagacccatccatttaactctcacctc

SEQ ID NO: 61363 - DNA, 346 bp, Glycine max
atcacacgtccgcccactcgtccgcccacgcgtccgggcaacgaccttgctggacaaatttgaggaacaatggctgcatcttttacctaaagttgctgaggaggaaactagacactttgaagaagacacatacgcatatctagacattcagcgtgctctcgaaaccacttttgccaatacgagcacgtaaaggtcaatgcacgctcatgtattaagccgaatgagtaccctgaggacaagaataagatgacaaggcgagattctggtgattcttccgacatgacaacaccaatcaagaagagactatccacattgtgattcattaattgcaccataatagacatta

SEQ ID NO: 61364 - DNA, 143 bp, Glycine max
atattttatgattatatttgtttatgttattttttttttttcaaccttgggttaaccctccaatttggttacaatttgggaaaaaccctctcctttgaatttgagcataaatttgttcaaaacacgggaagaatgaaatctcg

SEQ ID NO: 61365 - DNA, 292 bp, Glycine max
atccgatgcttttcactacaagggattcgcatgtccgacgtatatacatggtcactctgcttccgatcgctccagtagtcacttgcgaagatcttaacgaaaatttaggatgggtacactgcatccagatgacaaatcgggtaatctaaatgctttggtagagcttcagcaacagatagatgtgaatgcaggcgctctcgttgtccgcatagccgaaagttctgggagccattgtgcgtagcacgtgaaaatgtcgattgtggcagcagctcatgtaagtcttccttatgca

SEQ ID NO: 61366 - DNA, 406 bp, Glycine max
atactatagaatgaaggtggagatgatgagaaaggttaaaagaagttagcaaattgaaagtaattaattgatccaagatctgaagattcactagtactttgcagcatcatggttttgtttcatgttgaaaaactggaaactatcttgtgcagctctgagcttccgtgaatagattgtagcattgcaatgtttacagaagtccttgtgaggaatgcaagaaatgttatttcccgtggcaaggaactttgttcgatcaaaggtctttgtttgttatggtagtagatagctggaacatgggaatgcacgaaaacacaactattgagattttaggtactgtgttaatgagcgttgataagaaacttcccgttacttttgtacagatcatcttccaaacatccaatattga

SEQ ID NO: 61367 - DNA, 250 bp, Glycine max
ccgatagattttgtgattagtctcataaacgtcaatcatattctcaacttgattacattatctgtatattatgatcacatatctcgttatcacaattgatctgacaccggagggggatataggctactgaacctgagagacatgcgggataatgcttgaagatgtcgaagtgtggggcatgaacgaaactaaggacacagtatgtagtggtatcattgggtgaagaagatatcatcgacgaaattgctga

SEQ ID NO: 61368 - DNA, 361 bp, Glycine max
aaaatggggaacatgcacaaagaattgattctctggttttcatattgtttttcttattttagtttattgagacttggatatctttttcaatcaattttattgtttaactgctgagtgttatcgatcaaaaatatcaattttaaattattggtcttaatggattaagcaattttcctttttccctttttaattttaaaattgtgttcctttgccttttgaaactgtgtgtttggtaattggtaagaatggaattgatattaacaccaaaaaggtgctccttaatccaatcctttaaataaattgatgctcaaattcaccaaaatgttactggaatcaattttaatttgggaaaaattccaat

SEQ ID NO: 61369 - DNA, 248 bp, Glycine max
aagcttgcctcgttaagacatccattcaactatcttaccaactcttcagatgatcgtagaaattgatgattggaacgttcttatgacgtctgttgatgctgtcttttggggggtggattacgttgataagtagatttatgcagctgcaattgttcatttgtttgggggtctacggggacgacttgcaggttacagtgtatgcattgtcatgcgcttctttgcgaactgatggaacacttctgtctagc

SEQ ID NO: 61370 - DNA, 427 bp, Glycine max
acccacgcatccgaaaaaaaaaaaaaaaaaaaaaaaaaaaaaaaaaaaaataaaaaaaaaaaaaaagggaagaaaaacaaaaaagttaaaaacttaaataagggtggatgcatacgtcggatctctgctatatttgtcatttaagttcaattcatatggctgtcgttttataacagtcgttactgggaaaagcctgtcgttttccaacttcgtcgctttgaatctcttgcccttttcaccatctggcgttttaccgattatgcccttttcgatcgctgttcccatcagttgcacgccttgaatgttaactggtacgcgccttttaccggctcattaggcgcggcgggtgtgctggttactcgcaccttaaccgctgcagttgtgagggtccttccgctcgttcctttcactttcgtcacttcctttc

SEQ ID NO: 61371 - DNA, 323 bp, Glycine max
  unsure (1)..(323): unsure at all n locations
aaccacgcgtccggtctttacatcacaccctctttccccctttgccaaagctctgatcctttccctcctcaaatcccccgntcctcaactttccttgttaagggtgccccgtttcccagtttccgaaaccatttttggtccggggctccccccaacttcggaaaagattcgaattttccgccccctttttttggttccaaaccctcctgaaacctcctttccccattcggggttttaaaggaaacgccttttaaccgttccattaagaaggaaaaggaaaaggaaaatccctgttgcctttgttggcaataacaacaattcca

SEQ ID NO: 61372 - DNA, 396 bp, Glycine max
acaactgtgagggcgccgcaaaacatgaagggcaagtgcattctctgggcggatcgtaaagtcgttgaagaggaagatgcaaagctagtgaaccttagtcgcaaatctgacggagaagaaggaatcagacccatgtatttgcataagcgtaatcctaaccctcttcttgcactgcctccaaacatctcaagtgcgacatgagccccaaattcaacttcactgccaaacccatttcctttgtctcccccgttctcgttgttcctttttcacttctccctttttggttcagcacaaccatcgcgagatctagcttttgtttttaagatcttgaatatggagttaaaacttggctattttgtcaattatgggtgctttttggattcaaattttaagaat

SEQ ID NO: 61373 - DNA, 124 bp, Glycine max
aaccacgcgtccgaaaaaataaaaaaaaaaaaaaaaaaaaaaaaaaaaaaaaaaaaataaataaaaaaaaaaaaaaaaaaaaaaaaaaaataaaaaaattaaaaaaaaaaaaaaaaagtaaaat

SEQ ID NO: 61374 - DNA, 364 bp, Glycine max
accaagcgtccgtttatagatacttcttatgaccaaagattgcagtcccaacattccctttgtttaattgatgcctttcatattattctaatttgtattaggaaccttcctggttcctccttgaatttaagccctttgtttagcacacagtgcatctaccatttcacttcacaacctttttttaaggaatattatttatagatacttcttatgaccaaagattgcagtcccaacattccccttgcttcattctcctgttctcaccatacatgttgttgtcatgatatccatcactttcattgctgcatccagcatcgtcttcctgcatgggatatgcattatacatagtccatccagattcacg

SEQ ID NO: 61375 - DNA, 185 bp, Glycine max
gtttgctggggcttctgatacggctggtccgatggatatggcggtctagtttgacatcgtcgacgctgatacgttaggattggatcagttcatgactgtcgggtagtagtgtattaacgtcaaggataacatcggtggtgtacggacaaagacggcaagttctgtatcacctatgcaggatggca

SEQ ID NO: 61376 - DNA, 365 bp, Glycine max
aatcaattcacaaacagcaaaaaaaaaaattgaaaaaaaaggcgaaaaaaaaaataatccctgcaatgagacatcaaattatgatcctggagaatatcggaaataaaataaaaacagatgtgtatcaaacttacaatgcacatactgggccaccatcgcatcaaaacgcgtgttcgcagcaccaaagaaacacatcgcagcgagtcagacgccccttcaactaatcacatggcagaaccgtcgtccaccgctgccaccatcgctaccgctgatcctccggttccaacgaccaataactgggccgacgaagcggaccaacacaccaacgcctctaccgccgaggcataaacctcctccgttaacct

SEQ ID NO: 61377 - DNA, 340 bp, Glycine max
cgggtcgggtcacgcgtccgagcttaatatttgctttttctttgattattccggtcttatgtcactcctatagccgagttagttgtatgcgtatgctcacctagaagctactagatagcatgcatagtctgctatgaacagtagctttcacattatttcgtcatacaagttgtcgtgaattaacttcacagatccgcagtacacagacgagcataggcctgagatcattgacgatatttgatgtgcatagattctctatccttcattaagttttcaaggcgtagtgtacaggatcacttcatcagtaatctgacatctacagtcgtccactccaattctg

SEQ ID NO: 61378 - DNA, 421 bp, Glycine max
aaacaaacatacattacactataatgtctttgctcatgttcgtagtaacgaaggccaaccttaaggttgcacgtctggtcgccgtgatgtccatgattgcggtggctatcaatgccacacccatggcaaaggtcacattcaggtgccgtcaagtcgacgtgcacatgatctcctgtgcgtcagtgtccatacgaactgaggtaaaccgtctcaggactgctgcacaggtctgaaatcacacatcatcggcacgatgaccattgctgactgccagggagcatacaattccctgaaaatcgctgataacataacgtgacagagtttgaatgccggcatcgtcaacactcactctgtcatatgtgacgtcaagatcccataccagatcagcaacaccaactaatgcgctatcatcaagttctga

SEQ ID NO: 61379 - DNA, 251 bp, Glycine max
ccggccacacgtccgggcactttcagaattcgcatttccatttgcgtcctcgtcggggaacgttatcttcaaatggaaccaagtgttccgaatgtatgttgtttttggcaccacccttgggcatttctttccggcggcttacattcttgggtcgtttgcaaaatcggatcaacatgcacttcctgctgccatccctcacttgttcttgctatcgtttcatctactcaccgacaggattattggtggtttgt

SEQ ID NO: 61380 - DNA, 351 bp, Glycine max
gacgtcagcccaagcgtccgctcatcatttgctgaaccttgttgtgatctgaaattgcagaagaacaccgtgtaacgattctggtggccgttgcaccaagccaaggttggcatccaagttttataacactaactactgcatacaagagtatgagaatatacataacaacagttactgatattgttgtgattgtgtgtgattttggtgtcgtccctttttcgtatgtttaaggttgtaccgagtttatgtgtggattcaattcgtcgatcagacaccttagtttgatatcttgattggttccgtggacagttttttcttccttggtgtggtttttgggttgtgctgtttttg

SEQ ID NO: 61381 - DNA, 318 bp, Glycine max
cacgcgtcaactcaatcgtacgctccttctcaatcaaattatacatacaattcatcatacattccacactaaaggtttcatcaagggtgttgtaacattcaacgatccaagtagctctgctatgggttatgctaccctttttaaaggtccagttaacgttagcgaaaacgttgtttcaaacggtatggatgccttcaagatttttggaaatgtttacggaagtagtagccccaggatcattttccatatcgattgtcatgacgaatttgaaatccaatttgttgtagcccattgttgaagctaatgttgaagctaact

SEQ ID NO: 61382 - DNA, 283 bp, Glycine max
ttgaaccaaaaaaggaacctaaaaaaaaaaaaaaaaccaaaggaaaaaaaccacaaattggaactaaaccctcccagaggaaaatgaagaaaaatctgatccccagcttgcacaggtgaaagtaagacttgagaaacttgaagaggctgtgaaggagattgtggttgaaacacagaaacattcacgcagcaaccttggagaaaatcaggcaactgatgatgagaaaaaacgcctaaattcttctgcaccaagggacccaagtaccactgattctgcatcaaat

SEQ ID NO: 61383 - DNA, 81 bp, Glycine max
cacgcgtcagaataaaaccaataatggttcctaaaggtctctttccattctctcggatgctgcactgagttgatatactct

SEQ ID NO: 61384 - DNA, 337 bp, Glycine max
agagctctcacgtttgtgcttgcacttgcacctctccaacgataacaacgacgagcacaagatccagacaaggcaggcacatagtatggctggaccttttgagttgggttcatcaaagaagaaaccaggggatggagtgaatgatttactcacttttaatgctgaaaatatgcaaagcaacatgaaaattatttattacaggtttgttttggcagcagatttgtttaatgctttattgaatgaattcatttagttaggggccttatacttggtttgaaacggggaggggggttgttcctttctttctctcccagtttatggggttccacacaccagc

SEQ ID NO: 61385 - DNA, 418 bp, Glycine max
gggtcgaggacgcgtcaggttggatttggcgttttgatttgtgcagccacatggattccaatgctggggtttttgtcctatttgtttgagaattggtgtgacttgaatccttcgatgttaagttgttgaatttggagagcttgtgctgtgtggaagttggagttagaaattagttgcatttgagggaaaagggtcagtttttttgttgatcctattcttccatatgagtggacaattttgtgttcgttttctgtggcagtgctggacgaattgaagtttgaattgtcttgttatgaaaatcctgtgggacaagggcaaatcttgttgctagaaaaggccatgtggtgaatttgttttgcggtcattgttttttttttataggtcgtaatgaaggctccatccaacggttacttgccta

SEQ ID NO: 61386 - DNA, 431 bp, Glycine max
  unsure (1)..(431): unsure at all n locations
agataaattgtcaaattatttttcttggcatctgcatagttataaatggccttgaggtctagctcagatccttatttagttctacaattttcttgtgtcaactgaacttatcaccaggaactattcaatatttaagttacccaaaatgtcctgtgagattatattcacgtcggagtttctctcattttttcactagttgctcataattaattttaagtttctgacaatattttaagattagagactgagcaaaaacttttggagttaaaaagcttatacttgattgggaccctcttggtgtataatcaaatgggtaatgatatatattgaacttacttctagaagatgcatgctaagaacactctagtttttgagaaacgagaggttgangagatgcaatagctgaagagtctgaacattcctagttctgc

SEQ ID NO: 61387 - DNA, 412 bp, Glycine max
ctgcacttcttctctggtctctggcttccttggtacgggaaagaaccaatcttgtccaattccctttgggttttccctcttcgatttcttcaacttccaatcgaacaacctcctaacacaactcgcgttaacttaagccctccccgttgaattgacaattcgtgaataatcgcttgagaatttaacggcaaagctggtttaaaagggtttctcaagttgtggtttgattttcagtttctgatgctgaagaaataaaaaagcttgaaggctttgctcttctgtgtgaaaaatgttggaaggtggtgcgaaattcccgggaataatagatctcaacaagaataataacaactactatgatttctctcaaggcttttaacataagctgggggaaggtaccaatatgtcaattgac

SEQ ID NO: 61388 - DNA, 145 bp, Glycine max
gacccaagcgtcagactaagtctcagcagtggggacagtttgtaaattgcgacttccaatggcgagttgcgaatcaagcgatgatggaaaaagtgcggcaaatgatgtgtgtgcttgctccggtgtctgcgctgtgacgtacgtg

SEQ ID NO: 61389 - DNA, 249 bp, Glycine max
gacccaaacgtcagcccagccgtcaggattagggagaatccactagatcgtatcacggttcattgtcagcaagagttaagacagcttgctcacaatcattacgctgccataaataccctgtctgagcagatatgataattggacaattcatctagcaatacgttaaaatgatcacatttatctcacgacctccagccatcatcttagcaggcaacatccatcttcacgtactgagcatcaggctcagtc

SEQ ID NO: 61390 - DNA, 192 bp, Glycine max
agtaatagcaaagatgaataccaagccctttttctccttgtgcttactctgcgcactgcttcccatctgtgttgtggcaactgagccaaccaaagattcgacacaagaagaaacaaagacacggccagatgcctggagaagttgtggaagttgaagaaatggtggaagttggggacaatgtggaaaccgggg

SEQ ID NO: 61391 - DNA, 73 bp, Glycine max
cccaaaagattcaagcttaattaacccttcaagcaaagttaaaacccttcaaaaatgtcaccaaaattcaatt

SEQ ID NO: 61392 - DNA, 219 bp, Glycine max
catgaacattgacgaggacatccattctttgcagctcgattcggcacatccaacgcaagatgttgaggctgaacctaaagctgttcaagctgatccaaaagttaaacctaaagtgaatccttctgttcaacattcagaacaagttcctgaaaatattcctgaacactttaatgttgtctttaatggtcaagttaatgctcgtaattctaccacttgatg

SEQ ID NO: 61393 - DNA, 164 bp, Glycine max
acccacacgtcaggaaatcgatatccaacccgtcctagcagaagcctctgtcagaatagtattctctcgatgccagatgaactacatcaatatcatatcaatcacttgccttacagactgacacgtgcattaacaatcagctggtcctggttacatacagcatg

SEQ ID NO: 61394 - DNA, 146 bp, Glycine max
agcccacgcgtccgaaaaaaaaaaaaaaaaaaaaaaaaaaaaaaaaaaaaaaaggaaagaaaagcaaaaagttaaagaaagttaataaacttaaaagaaatttaaaaaaatcttcgggagggtctccaaggtcgcttttcattgga

SEQ ID NO: 61395 - DNA, 414 bp, Glycine max
gcgtcagcccacacgtccgaccgaatgtaacgtgttggaattggcgtattggtgtgcagtatctatttagagagagtgggaatcattcgtttcgtttcgttcagaggtttgtttcactgtttcagaatgaacggcttaagaagtgaaagagcccctctcttggaggctgagcgtgctgtaagtctatttctcttctcttcttggcccatatgcacagtgccattcattggtgctcaccttcagcttctcctgcttcagcaatttggccacactcaaacaatttttgtcttttgtcaattaattgtgtgatgaattggaaaaaaaaaaacttttttccactgcctctgggataataataggaatatcctattgcactgtttgaaaccttttctatttatgaaatcttttgatgtg

SEQ ID NO: 61396 - DNA, 334 bp, Glycine max
cgtcagacataaaatcaggcctcaaaacaaaaaaaaaaaaaaaaaaaaacaaaagaaaaaaatgcaaaataaaaaaggaggttcacctctgtgatacgatctacagttgacctagtcttttagcagatgctccttctattgtattttctaaatgttgttctcatacggtgtcttatttggaaatggactggagtagcctaatctagttcgtcgagaataatccacacatttcaaagcatactttcttccggtgctttcattaagtcttctcagtccgatcaatttaatcggattttgggataatcctgttttccatgtatgaggtccattccta

SEQ ID NO: 61397 - DNA, 229 bp, Glycine max
gcggccggcggtaataatgacattccataactcccaagctatggctagatagctatataataaataaagatgaccctgtagcttcctaatttcccctaacttaaaaatttaaaaatttcccaaatttaatttggtaccaacctcctgaattctctccctccggaacttcccaaccaaatgttaatagaatatcatttacaaatttaaaattaaaattaattgtaatgtt

SEQ ID NO: 61398 - DNA, 63 bp, Glycine max
acccacacgtcagaaaaaaaaacaagaaaaaaaaaaaaaataaaaatataaaaaaacgaaaaa

SEQ ID NO: 61399 - DNA, 60 bp, Glycine max
acccacgcgtccgcccacgcgtccgcccacgcgtccgcgcacgcgtccgccacgcgtccg

SEQ ID NO: 61400 - DNA, 382 bp, Glycine max
gcgtcagtcgggcctctatattttttccctatacaaaaaaaaaagctctgtgctttgtctaatcaattgagcttctagaataggaaagaataatatgtaggaaatcttacagtactcacaaaatttgttatttttgctgccctgagaatttggagagatatcttgttcggaatttattactaaatcagtaaagtctgaataccttcgattatggatctagtttcttgggtgtgtagagactatatcctctaattctaattcttgatcttcaaatctactcactaatttcagtaattttcaatgttcactacatgctgttaatgatttgaaaaagatgatttcattacattgttttatttagtgttttggattggctatgcat

SEQ ID NO: 61401 - DNA, 259 bp, Glycine max
agatattccattctctctgtgtatttccctacctctcccttcaagatgcagatcttcgtcaagaccctcaccggcaagaccatcacccttgaggtggaaagctctgacaccatcgacaacgtcaaggccaagatccaggacaaggaaggaatccccccggaccagcaacgtctcattttcgccggaaagcaacttgaagacgggcgttaccttgctgactacaacattcagaaggagagtactcttcacctcgtcctcc

SEQ ID NO: 61402 - DNA, 86 bp, Glycine max
aggggctcttcacgagaagatctgatgaaagatgtaggtattggagatgagggagtcgttgcagggtgaggtgactcaggagttct

SEQ ID NO: 61403 - DNA, 191 bp, Glycine max
agcccacgcgtccgcccacgcgtccgaaaaaaaaaaaaaaaaaaaaaaaaaaaaaaaaaaaaaaaaaaaaaaaaaaaaaaaaaaaaaaaaaaaaaaaaaaaaaaaaaaaaaaaaaaaaaaaaaaaaaaaaaaaaaaagaaaataaaaagaaaaagacatcgaaaaaaaaaggtcgagagaggagaaaaagg

SEQ ID NO: 61404 - DNA, 228 bp, Glycine max
aaatgctctcaatctatttctagtttgtgagacatcagatgtcctcacgaatgctggtgcccatagccaagacgcaaccacaaagcagataacggggtcgtatgcaaacctcaaatgaagtgtacgaaacatacctcagaccttagcagcaccgtctgagtctgcggctcctgtctaaaggaacgcctcataaccttctccggcgcgcatgcccatttccaaacccat

SEQ ID NO: 61405 - DNA, 257 bp, Glycine max
aattctaaggccgacccacgcgtcaaataaaatattgtgttacaaataagaaacgaaacccacatcacaatccaattccatgaacccttgtatgggtgcagaaaatatgagccaagtggaagaagagcaaggatatgtcttcaaagaagaaattcaacccacggtgttcaaaacttccctgttcttcgcgggcgaaggcttcaccgtctaagaatgcaaagggtaacttgtgttcaaaattgactcttaagggcccg

SEQ ID NO: 61406 - DNA, 170 bp, Glycine max
agtataatactcgcgctatagctccccctgttcttcctcaatgaccagatacttatggttttggagacaaatttttccgggcagtaaattaaaattatgactcagttattgtagagccctaggttgattcatcattaatcgtgatgagtaatcacatgaggctctacaag

SEQ ID NO: 61407 - DNA, 241 bp, Glycine max
aggaaaaacatcagcccagacgtctgggattggcgaaaagataatagaagtagggtatatcatcacacaaactgtgtcacagattaggggaagtacgaacgcaggttacatacactggaagactctcatatacgaccatgtaacgcatgtcaatctcgaatcaaatcaacatgggatgccaaaatctgaataagtacattcgtcgatatgccaagatggcgcaattggacatgtcacagat

SEQ ID NO: 61408 - DNA, 396 bp, Glycine max
agcccacgcgtccggtgatgccaaaggcattgccaaggaagttcaacgttccctgcacaaaaattttccaaaacaaggttccccccaaaattccaaaggctaaaacaatgttaagaatccacaaactaacggcaaaaaatttccccaattatggtgaataaaaccgaattcaagcccccgggttgacaagaaattaataaaacctagaattatggccattagatattgaaaaggccttatttgcgccacctttcatagtgcccccaaaattgatgggggttcttgttgccatcccgacaacatttcctaccattctttttcaccatattttctaaagaattctttttggttcgtgtaatttatatactgtttatacctagactatgaacgatttac

SEQ ID NO: 61409 - DNA, 376 bp, Glycine max
cgacccaagcgtcagcccacgcgtccgcccacgcgtccgcttttggtgaggtttgtacttgcgtcctccttaagcttgttctgtctcgctagaacagaattgtttactgggctcatgagtctagactctagaagttccaatttatatatttatcctttattattgaataaaggaggatgcggtttggaaaaaaaaaaaaaaaaaaaaaaaaaaaaaaaaaaataaaaaaaaaataaaaaaaaaaataaaaaaaataaaaaaaaactgaatgaagaaaaaacagataattaaattcgaagagttgtgaatgtaataaactaattgcggtgaacatttataacaatcggcaggacctctagatgacagtaactataac

SEQ ID NO: 61410 - DNA, 341 bp, Glycine max
agcccacgcgtccgctcacacgtccgcctgctacttggtatcacaagtatggctggtcttggcaaaactgacgtttctcttacctctcaaattgccatcatgctttcagcttgagtacaacatttgacaattgcgtgagttcgtccactaggacatatcgtgtaatgttcggtgatgatggcccttgatactttggtgattctgaactccgatctccccaatgttctaacttgtcagcctctcatatctaaccctcgttagcagatgccccaagttatttccaaagggagcgtctagtggaatacatcataggggtgaaatctactatggtcacagacctg

SEQ ID NO: 61411 - DNA, 194 bp, Glycine max
agcattttcgtatttgcataatttattatgattttttgaaaatgggaacgtgcagttaagcaagagacaaggcggagaagactgtatattgcttaactgcaggtgcccatttgcgtagttgcataagttattatgattttttgaggagagggaagaggggggtcaccaggggaagagggcggccgctctagagg

SEQ ID NO: 61412 - DNA, 161 bp, Glycine max
cggacgcgtgggaaaaaaaaaaaaaaaaaaaaagaaaaaaagaaaaaaaaaaaaaaaaaaaaaaaaaaaaaggaaaaaaaaaaaaaggaaaaggaaaaaagaaaaaaaaaaaaaaaagaaaagaagaaaaaaaaaaaaaaaaaaaggggggcgccccagaa

SEQ ID NO: 61413 - DNA, 177 bp, Glycine max
agattacttcaacactataattatatcataaaaaaaaaaaaaaaaaaaaaaaaaaaaaaaaaaaaaaaaaaaaaaaaaaaaaaaaaaaaaaaaaaaaaaaaaaaaaaaaaaaaaaaaaaaaaaaaaaaaaaaaaaaaaaaaaaaaaaaaacaaaagataaaaagggtggccacccaa

SEQ ID NO: 61414 - DNA, 217 bp, Glycine max
aggcgtcggaaggaagagaagatgagtgagaatttgatggagaaagtgagcgcactgggagagcgcctgaaaatcggaggcgtggaagtggggagaaagatgagcgaggggatgagctccaagagtttcaagctcaaggagttcttccagcctgggcccaatcaggccgaaaagcttgtggaggaagctacttccgaggccctggaagagcccgaat

SEQ ID NO: 61415 - DNA, 195 bp, Glycine max
gactcacgcgtcagtacagttgtccagattctcatatcgttatatgcgtatttctttcaagactattactgcaaaagagttacatactgtcatgtctttacgagctttcctgttatccgtataattatcattgtcttacattttcatgagtactttgggtgcttccaagtagttgtaatgggtaagcattaattg

SEQ ID NO: 61416 - DNA, 102 bp, Glycine max
aattcaaaggccgaccgacccgtcaacccacgaatccgacccgccttcttccgagaaacaaatcctttgagcaacaagcgcttttcaagcgcaaggggaatt

SEQ ID NO: 61417 - DNA, 197 bp, Glycine max
aggtataagggaagataggtttatatagttaatcaaagtggtttggttttctttcatgaagttattttatgagctgatgcattgatacatacacagatgattcctttgttgagaaaattccaatgcagaagttgctattagctggcaatctgtctatgcctgtatgagtttcaatcaaaggttcccaactttgttgt

SEQ ID NO: 61418 - DNA, 355 bp, Glycine max
aagctgaagaattggaagtgaaacgtcatcggtgtcatgaagagaaaccaagattttctaaggttggtgtccttgaggagacagaagagaaaccgattctttctggaagttgtgtggctgatgactcaatagacgagttgaaggaaatcacaactggctttgaacagtgtcaaacaagtgaagaatgtatggcaacaactttgaaaaatgttaagtctgaagtagcaggagaaagtgaagaaatggagagagaattggacgaagttgtgaaaaactctggcataggttgagaggttaatcactttccgaaggaacctatggatataaccagtaatgcaagaggtaactattggta

SEQ ID NO: 61419 - DNA, 367 bp, Glycine max
aattcattctgtcatgcaatgaatgtcaattctgagtaagttaactgatttttgttggtcctgctctccttaattgcagagctgtgttcccaaagttaatatccactgcgatggttgtgagcaaaaagttaagaaactgctgcagaaaatcgatggggtttaatccgtgagaatagatgcagatgaatggaaagtggtagtggcacgagatgtggatccagcgaaactggtaaaaaagctaaagacgggagggaagcatgctgagatatggcacaaccagaaaggagagatgatgtacaatcacaagtatcccatcaaccagaacatgatgcaacttgggggaaaggacaataataagtctcaaaat

SEQ ID NO: 61420 - DNA, 112 bp, Glycine max
gagagttgaaaacatatagggaaatggtagcccattaacgatcaataagatcactttccttaatgatcgccaaacgatatttgtgctacccactctataaatcaatgttgat

SEQ ID NO: 61421 - DNA, 270 bp, Glycine max
acgcgtcaggtatagtgtcattattcttcgattctgttcgacctagatttactcgtaattggtgttttcacattcaaggataatatctacatccccgtcgctcatgctactcgttagcatgtctctacttacatctgcctacaatgtcggcctcattgctcttgaggctcttaagagtgttgcagtcatatatcgaaatggtggcctcttaacgatcaatcagatcactttccttgatgatggcgaaacgagctttgtgctacctgctct

SEQ ID NO: 61422 - DNA, 293 bp, Glycine max
aacgtgtaccctggtctccaaccctcttcaactcaacagcatctccaccacgcattcacggaacgttgccgatcaggcgtgtgatcccagtggcctgggacgatgacgagagagccactgggtcgttgccttccaacacacccgtggcttcatgtgggacgcaccacacactgtcgcacgcatttacagcaacaagttacacgcgtacttcgccaagacgcctgacttcggcaattgatgtatattaatccaatctcattgcactgctatagcaaagacttggttacagtatc

SEQ ID NO: 61423 - DNA, 275 bp, Glycine max
agctaccattgcccatctccatgtggttccggttctgtttcagcactcgctcaccaagagtggtgatgaatacagcaagactccggtatcgatatctgatgtcatacactcgcgggttaaagcgctcacatttaggaatccatccacagttgctgattttgcccttgcccttaaactctcgaaaaggtataggttgcttcatccgcattatattgacctcgcatatcgagaccgagctcttcacgtttcaataaatagcttcgtaacctctcgac

SEQ ID NO: 61424 - DNA, 378 bp, Glycine max
ccggtcgaccacgcgtccaaggacgcgtgggaaaaaaaaaaaaaaataataaacataaaaaaaaaaaaataaaaaataaatcagcgatataaaaatacaaacatacaaaaaaaatttcaaaatccaataaacatttacaaaaaacttaaaaaaaaggggggcccccccaaaggttcaaactttacttaccctttaatccaaatttcatacccttcaaaattttcccctaaattcatttcactgcccttccttttaaaacttcttcatggaaaaaccttggttttacccaatttaaaccccttccaaaaaatccccctttctccaattggcttaataccaaaaaggccccacacattttcccttcccaacattttccca

SEQ ID NO: 61425 - DNA, 95 bp, Glycine max
gctagaagaatcaaacgtaacttaccttgctatcaatgttatcgcccttctaggttgtcacctaagttcacttaattggccttcctttcagttct

SEQ ID NO: 61426 - DNA, 367 bp, Glycine max
attgatctcacctgatgatttgttgcaagcatgttctctgtgggagaagtttgatgtgtatgttttacattatcttctatttaaattacttctgttactgtgattcggttaattactgtagacatggtgagtgggtgacttcatttcatactccatgggattcatggtagttaaaatcgggattaaaaattataaaattgcagggttttacgatgttaatccctccgaatgactcagatagcacatggaattgtagttggagtgaaattgttgtaaaatcctgatacaagttgtaaaattgtgattttatgatttctcgaaactgacccagttgcgttttcaacccggtttcatattttacctgctt

SEQ ID NO: 61427 - DNA, 136 bp, Glycine max
attagcttgaggggggcaatgatgatgaaaggtccaatactgaaggacaagggccttccaacaatgagaatccgggaacttataaacgttatgaagtacttgccgcaatgtacaaggtcccaaccgaagttaattt

SEQ ID NO: 61428 - DNA, 135 bp, Glycine max
aaccaagcgtccgcccacgcgtccgatagttttataaaaaatgaaagcacataggcataccatcaatgaaaatctgggacatgataaacgtaatgaaactacttgctgcattgtacaatagtccgaactgatatt

SEQ ID NO: 61429 - DNA, 80 bp, Glycine max
cgcgtccgaataaattagtgttttctcttgtcacataaaagtcatctaagaagaattacaagattatcaacacaataaca

SEQ ID NO: 61430 - DNA, 51 bp, Glycine max
aaaaaaaaaaaaaaaaaaaaaaaaaaaaaaaaaaaaagtttaaaagctctt

SEQ ID NO: 61431 - DNA, 343 bp, Glycine max
acggattgagtttccggttatctctggaatatggagtttgtgtaggtcgagagagcttttgttgaatctcgaacgggacatatacggaacttgaatcatcgaggcaaaagaaagctcattgtggatgatcagttctgctgcttaatttaacatggattgttggctttctatggacttcctctaaaacactcactgggtcacggatctaagcaaccccttgcatccttgcctgagggattttagttgtaaatggacaccttgcctgttgacgcttatgcagtagcatatggatacactatagctgtgtatgtgagtacatcattcgccatggaatcagcatctg

SEQ ID NO: 61432 - DNA, 84 bp, Glycine max
agaaaaaaaaaaaaaaaaaaaaaaaaaaaaaaaaaaaaaaaaaaaaaaaaaaaaaaaaaaaaaaaaaaaaaaaaaaaaaattaa

SEQ ID NO: 61433 - DNA, 397 bp, Glycine max
acgcgtccgaacagatatagtgcaaacttccttttgtcatatgttctgaacaacttttactagcttaccaacatcagggagaccatccttccttataacaaatgttcgtttcctctcatgatctagcaccgcaattatgtttggagagctaagatacactcgatccacctgccaggaaggaaggatgaattttgaaaaactctttattcatacccttcattattacaaaacctaaagactttagtgaatttgatatgattgacaaaactgcataggctagtattatggtgctatagttaccacaacttgaagcaaaagcttataattgcatcacggaactatcaatatctacatgttgtaaacattaatataacctggagagatttacctcagattc

SEQ ID NO: 61434 - DNA, 277 bp, Glycine max
  unsure (1)..(277): unsure at all n locations
gacccacgcatccaaccacgcgtccgcacttttcttgcacgttcgatcaacttgacatatcatcttcctgcttggtttgttaaactagaggagaagtttggtcatacctggctccttcactctgccgtgagcttggaattgtggtagtcgcaaccttgccattgtctgtctaagtctcaatagccaaccacaagcttggtcttcacttcgaccatcgtgcgggtgaggtaatcaatgaagggcaagtcatanggtatttggatcaatttggcactgg

SEQ ID NO: 61435 - DNA, 318 bp, Glycine max
gttatttcttgaacgaggtaaatttatttttctttaaatgtaaagcctagaaaataagacttcatttttttcgcacgcgtccgcttctctcgcgttcgcatcaaacacagggaaacactcccaatcgctctcgctctctcgctctccgagctagcgagaccgagcgatttgaccctaagctcgcgatgctccgccgcacaaactcctcccgcctcaccggcacctcccgcagccacgtcgcctccgaagtgccggcgacacccgccgcggagaccgccttcgcggaggcttggaagaaagtgagccccagcatcgacc

SEQ ID NO: 61436 - DNA, 288 bp, Glycine max
cttcgcccaagccttcggccaagccttcgcagggtgatttccaggtgcatccctggtcaaatttgcccaccctctcctgcttccagcgggtttcttgcacaaacgggtttagtccctgttgaacatcaaatgcgtgagatgggcttagagaacctaaagagcaaatgactttttcttataagatgcgtgagatgggcttagagaacctaaagaacacatgactttttcttataagatgcgtgagattgggagcttttctgaagatactcttgaaatgtttgagaaata

SEQ ID NO: 61437 - DNA, 335 bp, Glycine max
cgacccaagcgtacggggtaatgttctgcctgtcactggttcttgtctcagtcaccattgcacattcttcgatgcatattctcttacgcactctctctcgatctcacgctttctccttctgtctccattgatcgatttcaaccacgctccacttcatcagctgtgctccgccgttctcctcggtgttactccgcatcctttggtcctacactcttagcttccgaaaacgaatccatcatgcagtttgtgatttttggggctgtttatagctctgttgcaaaacatgaacaagtatgctctaccacagtaggtgagcattcagacgtctgttgcac

SEQ ID NO: 61438 - DNA, 166 bp, Glycine max
acgcccacgcgtccgcccacgcgtccgttattaacataattatccctctttacaattcagtgtgaattctgaccttccagtagtcctgtttctacttttgcaaaccccagtttagaatttgtgagccccaaacgtgaatactaaaaggtttcggatttaccttttc

SEQ ID NO: 61439 - DNA, 381 bp, Glycine max
cgacccacgacgtacgaaaaaaagtcaaaaaaaaaaaaggaagaaaaacaaaaagaaaaaaaaaatgaggataggggtggtagaggatgtaggactcactgtctacgttctcgtgaagtcaaagttcttcgacagtgtcagtgaaatttaattccagggcagtggctgtcgtttttcaacattgggacagggaagacgttgcccattttaatcgcagtcgacttgatgaacatgtcgctagctgtagtagtagtaaacaggaccgcgccgatagcgattcccaagacttgcactgtctcaacggaaaaggcgacgcggattgtcccggtacatgcagcgtaaccgctgtggttgttatggtcagcgtgaccgtgacatttg

SEQ ID NO: 61440 - DNA, 401 bp, Glycine max
aacttatcatatcgttaacaagaagaacacgtaacagaaagacacatccaaaggaagtctctggttatttcaattaattaagagaaaggactcgaatagttggttattcatggaagacaccgcacaacaaatcaagcgtccttttggtgttcctgaaggaccagaattcactgttgggttggatgtacctttgagcggcgccaaaaatatcttggcgtttgcggagtgataagtggttatcttctttaattgctagaggcatttataatagtcaagaaagtgaggttcctcttatagatctattttgtactctgctagcccatgctgaaccggagcaacgtattatagcatacttgggatgaagttgttgtgctggcatcatctgatttgtcattacaact

SEQ ID NO: 61441 - DNA, 117 bp, Glycine max
cccacgcctccggagatgtggtatacatatattcttgtcccctaatatgttaaattaataaatattacatattatgggacacatctatctgtatctcacatctctggacgcgtgtgt

SEQ ID NO: 61442 - DNA, 127 bp, Glycine max
ccacgcgtccggagatgtgttatataaatagacttgtctcctaatatattatctgtagatctattacttatttcgggacatttctaactgtatcgcacatctacggtcgcgtgcacgtgtgcattgt

SEQ ID NO: 61443 - DNA, 387 bp, Glycine max
acgattccattctctctgtgtatttccctacctctcccttcaagatgcagatcttcgtcaagaccctcaccggcaagaccatcacccttgaggtggaaagctctgacaccatcgacaacgtcaaggccaagatccaggacaaggaaggaatccccccggaccagcaacgtctcattttcgccggaaagcaacttgaggacggccgtacccttgctgactacaacattcagaaggagagtactcttcacctcgtcctccgtctccgtggtggcatgcagatcatcgttaagacactcaccggcaagaccataaccctagaggttgaaagctccgacaccatcgataacgtcaaggccaagatccaggacaacgagggtatcccccgga

SEQ ID NO: 61444 - DNA, 354 bp, Glycine max
  unsure (1)..(354): unsure at all n locations
cacgcgtcaagttaagattagttattcattgcaaccattggatttcaagaaaatctttgagtaacttgatccctcctcatatatatataggcaatatcatgcttttgccttttgtttccttttatattaattgaatttagttatgtctaaattatgctaatgctgattcaaaagtaacgtgcaccataaatagagatagcaatggtgaacagtgcttttagactacagctttatatgttctctttattgaacaatctctttgattgactaaaatttattggaaatcacatatttttgtaggtcncacttgttatttaataattctctcttttgattttgtaattttctataaat

SEQ ID NO: 61445 - DNA, 353 bp, Glycine max
  unsure (1)..(353): unsure at all n locations
cctttaaaattaataaccaaaaaatggtggaattgggaataaaactaatgggaaaataaaagttgttggaaaataaaaaaaaaaattaattataataatataggatttaattcatggatggggctaatttaaggatggccctttttccttgtaatttgaattgtgttttgtgaggaattttgttctgcctagcatttganaaaggcanagatggtttaattaaggggcaagngtggatgtttaaggtttacacccgccaatttcgtttgttgtgtggttcgtgttatgttatccacaattggaaaatganaaaaaaaagtgatattttctagcttagcgaatgagaatagaat

SEQ ID NO: 61446 - DNA, 170 bp, Glycine max
atcaggttgatgcgtgcttaaacaaaggcaaaatgaaaattttgaaaaaattattattgaatgttaaaaatcaagcaacccgttcatacgcatgggtaatctatatctatttatattattgcacgtcgcttgaacaagagcaaaatggaaattttgtaaaataagccatc

SEQ ID NO: 61447 - DNA, 76 bp, Glycine max
tagacgatctaagcttctgtacgcgtgcatcacaagcatcaatagctcattctatgagtgtcacccaaattcaaat

SEQ ID NO: 61448 - DNA, 103 bp, Glycine max
acggcgttcccagcttaattaggcgtgacgtccacgtgattactcttcgatagctgcttcgaaagatgcacttcaaggtgccgtcgttggccagtctctttac

SEQ ID NO: 61449 - DNA, 239 bp, Glycine max
gcactttcggattcccctcccattttcttcactccgtttcccgctttaggtttttttcctggatggttgtttctcgtccccatactcttcgattccgtggtgcgttccatttcgttcaagattcactcgggtcccttttctgaagccaggcctcgctgccatctgttgaatggttcccgcattatgctttctatcacttatcttgccgagtgctactctcttttcggacccccaaactg

SEQ ID NO: 61450 - DNA, 381 bp, Glycine max
acgtacggtttattctatcatatccttgtccaaataactttcatttcacttacaataccccaatcccagaatcttatgttcatgaccatcctcaaggtcccaataacatttacttgaagacacttttgagttgaccttacagcctatttccacctacaaacacccttgatccttcaaagcctctcatagttccaatactggcaacaataatactcttgggcatctaaactatctccattcttttttccccctttctttgcagtggatttgcgaggttttaaagaaattaaatgcgtttttatgtgcgaaagagctaggtgtgatatttttttctgctgaaaaagttcacttcagagagattgttcacagttcaaacgtgta

SEQ ID NO: 61451 - DNA, 384 bp, Glycine max
agcccacgcgtccgcccacgcgtccgcacttttctaatttttccctcgacagcgacgacgacgaccgcgtctgttcgatcggagtgggttttgagtggttgccgaatagttctgaattggagaaagaaggatatagaggaagaagaaggataggttgggaaagaaagaagaacaagaaagaagaaagaagaaaaaagaaaaaagaaaaaagaaaagaaaaagtaatcttagccatagatttaaaatcaaagagatctaagggtgcaagataattttcccacacggtgggagaccctataaaagtttccaccctagtctgttaaatattctctattcgattcgaaactggcactcgcttcgcttcgcttccacagcccacgcacg

SEQ ID NO: 61452 - DNA, 244 bp, Glycine max
  unsure (1)..(244): unsure at all n locations
cctcagggtatggtgattaggcctgcttttttcattaattatccaaatctttctcctntgtgatctacttcctcatctgctgatgcatcttccatgatgtntgttttttcctgtttctctctctctctttgtatctcaagactttagatacaaacccttaattttcttggaaaaaattgttcctttgagaacaatgcatgttagatcctaagaatttgctggcttttcttaatcaccaaatatt

SEQ ID NO: 61453 - DNA, 418 bp, Glycine max
aggggtagttgacaggttttcacatcataacaattggctgcttctgttacagttttaacttcattggaagaatttctcatgtgcttgagtttgtggtggttgatttgcttaaattggtttattgagttctgttaggtcaattcctttgatctatgtggtgtttgtgtttgttgaggttggttatacttatggcttctcacttcactataggtataaactttaaagaagtctgttgattgagaagtgctcttttggttcctgaaaatgcaagttaccttaggttgaatagagagctgttaggggcatgagtgtcatgaatattttaatattattaggtctaaagtgaaaattttgtaaattttttttatcgaatttgagctaactgaatggtttaattgactttatgaatttggtcccc

SEQ ID NO: 61454 - DNA, 431 bp, Glycine max
gacccacgcgtcaggaagaatattactaatggctaaaatatttcctacatgtttctcggccaagatgctttttgatagtagtattgttttacagggttgttgacaagtatttgtttttaccaaatttttggccacagaaataaaatatggcgtgattagagtaaaatgatttaaaaaatgaataaagaaaataacttggattgagctttggtcttttgcaattctaaatatagttcatttctgatagttgaatgtggtatagatgactaggcgttagtcaaataattaaatatgtaaatatttaattttataaaaataagagatgttttaattgtcaataataaatattttatttaaagaatattaaaatttaaaaatattatataatgaagaaattaaagatgtagtttttaatatcgagaaaaaataac

SEQ ID NO: 61455 - DNA, 413 bp, Glycine max
gacccaagcgtcagcccacgcgtccgcgctctgtttctgtctctgtgtttgcggctgaggattccgaacgagcgaccttcttcgtttctcgcaaagtttaagtcatcatgggtaaggaaaagactcacatcaacattgtcgtcattggacatgtcgactctgggaagtcaactaccactggtcatttgatctacaagcttggaggtattgacaagcgtgtgattgagaggttcgagaaggaggctgctgagatgaacaagaggtcattcaagtatgcctgggtgcttgacaagctcaaggctgagcgcgaaagaggaattaccattgatattgctttgtggaagtttgaaaccaccaagtactactgcacagtcatcgatgcccccggacatcgtgactttatcaagaacatg

SEQ ID NO: 61456 - DNA, 58 bp, Glycine max
aaaataaaaaaaaaaaaaaaaaaaaggagccaaaaacaaaagtatcagggcaggggag

SEQ ID NO: 61457 - DNA, 410 bp, Glycine max
cgcgtcagcccaagcgtccgcccacgcgtccggtctttttctttgccgtgattattctaatttcagatctatatttgtttggttgactttgtttctggcgtcctagttgcgttctcgattaggtttgtgtttgcgattctggtttaactaatgccagggaaaattggtcaccgtcactaattgtcataacttgttgggaattagcgtctatcgagtcggtgatggttcagacttcagaatgatatgaggatgcagttgtgttaaaactaggggatgaaacttactgttgttaaaaattttaagatgatgttgctgattagctattgtgttggcttgaaatttcttatcttatggttttagttaggatggccaaatagataaaacaatatgtaggaagtaattaagttttt

SEQ ID NO: 61458 - DNA, 406 bp, Glycine max
gacccaagcgtcaggagaaacatggcttccttaagctccttagtgctgctccttgcagctctaattctagcccctcaagttcttgcaaactatgagaatcccccagtgtacaagcctcccactgagaagccaccagtttataagcccccagttgagaagcctcctgttgacaaacctccagttgaaaatcccccaatttataagcctccagtagagaagccaccagtgtacaagcccccagttgagaaacccccagtttataagcccccagttgagaaaccaccagtgtacaagcccccagttgaaaaaccaccagtgtacaagcccccagttgaaaaacccccagtgtacaagccgccagttgaaaaatcaccagtgtacaaacccccagttgagaagcccccag

SEQ ID NO: 61459 - DNA, 412 bp, Glycine max
ggctcgacccaagcgtaaggttcattctctttgcgcagttccctacctctcctttcaagatgcagatcttcgtcaagaccctcaccggaaagaccatcacccttgaggtggaaagctctgacaccatcgacaacgtcaaggccaagatccaggacaaggaaggaattcccccggatcagcaacgtctcatcttcgccggaaagcagctcgaggacggccgtaccctcgccgactacaacatccagaaggagtcaacccttcaccttgtccttcgtctccgtggtggcatgcagatcttcgtcaagactctcactggcaaaaccataaccctagaggtcgaaagctctgacaccattgacaacgtcaaggccaagatccaggacaaggagggaatccccccaaaccagcaacg

SEQ ID NO: 61460 - DNA, 313 bp, Glycine max
cgtcaatttccaactgccagccacgtggaaaccacgtgcttaacaattaagaataacctcgttaagtttttcaaaactagcttccaacaaatgccttcaaagaatcctaacacagttcaatggggtagtttttaaaggtgattaatttgaccattagcgaagcttaaacatgtataatgaacagggttgattcctaatcctttgtatctgttctacctttggagtaaacacatgcatgtactcccttaattattgtaaggcccgacgacagcagatattattataaaatttacaacttgatatttttagattg

SEQ ID NO: 61461 - DNA, 349 bp, Glycine max
gtcaggctagtactagtcgcgagcgcccttttttttttttttttttcttttttttttttttttttttttttttttttttttttttttttttttttttttttttttttttttttgaaagggatacgactcaataccaaatgctattggaataaacaccaacctgcgttaatacctaaatttccaacccaatttgggctccacataattaaatacaataaatggaaaaaaatcctttgagaccccttatttccgggcaacctccattttacccttagacgaatgcctagcatcccaaagctaaactcctaacaggacctggtcccccgcgaaatttaccccccataccgtg

SEQ ID NO: 61462 - DNA, 374 bp, Glycine max
cccacgcgtccgatttatttatttttattcctagatgttttgaaaagccggttttggagttttccccttccgatgtttcttcaggtatgggagcggtgtatggcatcactaagagcagcgtcggggttgcgtcgatgggtcacgccggagctggattgattttgtgcttggtatcctgcaccttccttgcagttaggcttttacagttttcccctttcccattcatcaattcttttattgaatatgtttgcacaatagttaacaataccaaatagtggcattgagtgacttatcccaaaattgatacagtgggtaatggacacatgaatgagaactgaatgagaatttagttgtttcgaatatgtttgcacaat

SEQ ID NO: 61463 - DNA, 314 bp, Glycine max
gtaaaatgctctcacacaatttgctcaccgttacgcttcttccagtctccatgtcaagctccacctcatttaactattgctactgatgacgttcaggtttactatagcaggtacgctaccaggcttactactaccaggccactatcgatgcttggccatggaatcaccgacatggagattcacttcctcgacgtgaaattccattcagtcggagcttagatgggttcacacttagtatgtcacttggtctagttcacaggagtatctgttaccgcgctggcagatgctgaatagttcttcactgctctcatttc

SEQ ID NO: 61464 - DNA, 155 bp, Glycine max
agcccacgcgtccgaaaaaaaaaaaaaaaaaaaaaaaaaaaaaaaaaaaaaaaaaaaaaaaaaaaaaaaaaaaaaaaaaaaaaaaaaaaaaaaaaaaaaataaaaaatcaaaaaaaaaaataaaaaaaataaaaatcaaaaaaagaaattcttac

SEQ ID NO: 61465 - DNA, 399 bp, Glycine max
agatcacacatcagcacatccatcagacaaatcttctacctaggatcagggattacaacccaatcgtgttgccgagtacgttccagacgttatcagtagggtcattagcattgtgaccgatcacctcagtgcctacaccataggtaatgacaacgacatacactacatctacaacaacataatcaatcatgccgagtatcgctgtgcacggaagacattcgacacacgatacgctttccaaaaagctcacacatcgcagtagtagtttggtatgcctgatgctcatgataatgcgcagcttaacgtgtcatctacatacgcacagatcatccctgaaagtagaacagtgtgcgacacatcacagattaccagttcagcagacgactactgtcacgagag

SEQ ID NO: 61466 - DNA, 243 bp, Glycine max
cccacgcgtccgcccacgcgtccgctgggtcacactgcattccgcacggggtgagagtgtggaccggaacacgattgtgtttgttcatcgtttatcaatgatcatcagacggggaatttacatcttggagagaacgacaagtaagacgcactcacgcaaccttcgctgtcaccgggtgtactttcacacccatctattctgattccacattgagcggatctcacagattagactcttcttcta

SEQ ID NO: 61467 - DNA, 415 bp, Glycine max
agatatttaataataaatttaaatatgcttttgatttgtaatgaattaacatattttgttttaaatttttaataatttcttttctttgcttcgagtttcaaaataaaacaaaagaaaattgactttggtcattgttatttttagtttagacaatttactgtatatatttttgtttttgtcactagaatatttaggtcatttgttattagtttctatcaaatacttttttaaaaaaattaattaataattaattaaatattataaggattataatataacatagatatattacaaggattaaaacacaataacatatattaaaaacataattttatttaataaaaatctcaatatatagaaaaattataaaaaatgtaaaataaaattcattaattaacaatgaaacaaaacatat

SEQ ID NO: 61468 - DNA, 338 bp, Glycine max
  unsure (1)..(338): unsure at all n locations
aggggcgaactgctgaggagaagcttaaacgcagtttatttggtgatgatgaaggagctccacttgaagacattgctgaagaggaagagcaaggagaagaggaagaagatgcagacattggagaagatgatgaaatggccgacttcattgtggatgaagaagaagttgatgagaatggggctcctatgangcagaagaagctgaagagaaagaaaactaggcaggctcctggagtctcttcttcagctctacaagaagctcaagaattatttggtgattcagatgagttgattctgaatcgccagaaaaatctagaaatgagtgaatttagagagact

SEQ ID NO: 61469 - DNA, 415 bp, Glycine max
aggaaaaaatacaaagaaaatgacataaaacagaaaggaaatacaggagaataattatttattctgggatagaatgtggcatgccatttattttgcttcttttttaaaataaaaaatattctgtggctcttgtacggtagtgcgcgtcctttctttcttttactttttagacttctggctggaaaagctatagacagagggttggcaagctgtggatgggtttacacgcgtcagcggaagcttgtttcacagcgaatagtgtgggttcaaaagttctgttacgagaactcaaaagttcaaactcctaagtatttattatttaaacacaataaaagttcctaaaaattaatgatattttttttagtagaaatcacgaaaataaagttatactacaatgtactaattaataatattt

SEQ ID NO: 61470 - DNA, 331 bp, Glycine max
agccgatctgcatcttcacttcttactgcttattcttcttctttccgattcccatttattccttctttcttctcgatttcgtatatttgtattttctcctcttttttcttcccgcgaagaataaaaaaaacactggagaaatagatcgtgttgtgtgttgtattttagtgaaattgattgtgaagtgatggaatctatatttgaatgtttttattctaaaatcaaattaatgataaaattgagtagtgttatttatttacggcaaaaatactcaattgctcaaactcaaatcaattttggatctagaatcaattatgtagtattatgaata

SEQ ID NO: 61471 - DNA, 437 bp, Glycine max
attcaagggccgacgacgcgtcaggacaagaaagacgtttttgatcgtgaagcataaggatatgacaagttagcccaagcaaattatgacaggtgtgctgatgatatcaagcatgatatatttcagcaatctacggaatacaatgaagcaattagtcaatctttctcagatgccacaaaatctggtcctgagggtggagcatctcaaagcgattacgtgtacgaggaatcttctgggtactaatacagcagtaattttggccattattatgatccaaatacaaagctctattactcagcagcatcagggcaatggtactcctttaattatgagactagcacatatgaagaagttcacgacgttgcatccaatgtgagctgaatgactgatttaatgtggagaatacgctaattagcaataccacaatcactgtctat

SEQ ID NO: 61472 - DNA, 306 bp, Glycine max
cgtcaactggaatattcataaggaaaatggtttggacttccgaattaaacatagtctttgcaactttttgtcttcctattggtcctttcagacttgcaagttgcaaatagcaacaaatggcccgagtttgctggttgtgttgctgtccttcacttttgctgaaccaaccgtatcagaagcttgtaaagaggctgttaagtatcaattgattgtcaattctgacttctgaactagagttttcaaggatggtggataaactttaccatgactaagttagtcaagatgtctaactctgatgaacatatg

SEQ ID NO: 61473 - DNA, 419 bp, Glycine max
agaaaaaaatcaaaaaaaaaaaaaaaaaaaaaaaaaaaaaaaaaaaaaaaaaaaaaaaaaaaaaaaaaaaaaaaaaaaaaaaaaaaaaaaaaaaaaaaaaaaaaaaaaaaaaaaaaaaaccaaattcccggggggccccccaaaaggttcaaacctaacttacccttccaggcaagttcaaacccctccaaaagggcccccaaatttcaatccacggcccttcgtttaaaaacttcgtaacgggaaaaccccggggttaaccaaactaaacccccttgcacaaaacccccttttcccaaccgggcttaaaaccaaaaaggcccgaaccattcccccttccaaaaattgccccaccctaaaggccaaatggaaccccccttgtacggcccataaaccccgcgggttttggggttaacccc

SEQ ID NO: 61474 - DNA, 389 bp, Glycine max
aacgcactcgactttggcatttagctagggcattggagaaggcaccgctgttggcggagagcgagtacgactacaaggtggagttcagggcgtacttcgacgactcgtgggacgcgacgcgcgtttcgctgcacggagaaccactgggagtgacatacttcatcttctccgacgactacgacaacgcgtttcaagcctcctagtttgcggacgtgtttgagcatcaggagtttggggaagacttcagagacctctccaaacacgttcacgacaacgattgtgatacacactctgatgctgtctcggtcggcgcgtgtcactgtctctgtcaatgatgatcttcactacgatgaccctgtcgtcgacggggtgcaccatggaatgcatta

SEQ ID NO: 61475 - DNA, 115 bp, Glycine max
acagctcactaaaaatttcatgtatacagaattaatgtgaatcctgttcccttctgacattttttttttgtccccatctagtaattagaccacatccggaacatcgtataaatct

SEQ ID NO: 61476 - DNA, 81 bp, Glycine max
cgacccacgacgtcagcctatgcgtcggatgtgggttacggtcgaggtccgtttacaacagctgatgactcatcagattcg

SEQ ID NO: 61477 - DNA, 84 bp, Glycine max
atcaggatgatctacagaagattgcacggataagtattcgcttcgagctgtcgagtcaggaagttactcggtagctgaaagaca

SEQ ID NO: 61478 - DNA, 419 bp, Glycine max
agcccacgcgtccgcccacgcgtccgcggacgcgtgggctttgcgcagttccctacctctcctttcaagatgcagatcttcgtcaagaccctcaccggaaagaccatcacccttgaggtggaaagctctgacaccatcgacaacgtcaaggccaagatccaggacaaggaaggaattcccccggatcagcaacgtctcatcttcgccggaaagcagctcgaggacggccgtaccctcgccgactacaacatccagaaggagtcaacccttcaccttgtccttcgtctccgtggtggcatgcagatcttcgtcaagactctcactggcaaaaccataaccctagaggtcgaaagctctgacaccattgacaacgtcaaggccaagatccaggacaaggagggaatccccccagaccagca

SEQ ID NO: 61479 - DNA, 142 bp, Glycine max
aattcgccgccgacccacgcatcagcccacgcgtccgctcatgtctctcttcgcttaatgttcatttatcccgctcggtcctcacctttacttcctgggagtgtttgtattagactatgggttcatggaggtaatgatggtt

SEQ ID NO: 61480 - DNA, 413 bp, Glycine max
gacccacgcatcaggccacgcgtccgctctctccctacttcgcaacgatgccgtcttgcaacgtcggaacgcagctaccctcccccgtcgccgacgtgcccctcagaaatgacatcgagatagtctacagaagttacggtggcggtcgaaccaaagtgctcctcatcatacgattggccgcgacgcacgaagcgtggggcccacatatcaacggcttgactggagcaaccgtccccgacgacgtcgtttggagcgaacaataaggcaatggtggcatccatgtatgcgcgtctgacaatctcggcgtcggtcgcaactccgtgactgtccaaaaatctgaattctgaatcaatatcatggcgaacgatgcaattgcgctgttacatcatcaaagttggaaaaaagcccatgtt

SEQ ID NO: 61481 - DNA, 187 bp, Glycine max
ccacgcgtcaacccaagcgtccgcccacgcgtccgataaaaaaaaagctatcaacactctcaatatcatacgataccatttaaggtcaatctcaaaatgggcagcatcgctacaggatcgaaactaacgtaatcgtgcatgcgacttgtcaaggtcttccacgatgtcactcatgttcaattcacat

SEQ ID NO: 61482 - DNA, 314 bp, Glycine max
agcaaaaacatcctggtatagtccctacagaagttcaccatcgtggttgtcaatctcaacagatgaaatgctaccatggaccttttctcggcaattttctgcttcaagtactcaaaactttcatcaaaatctgtggggaaataattgcactacgccatttgtgaatcattcagcagaagttcgctttccttctaatcatcagacttcttctctaggtcccatgcagacgactcctctttcacgagtatcacatggtcatcctcaacatgtatcggttacacactctagcataaatagtgataacagatacataa

SEQ ID NO: 61483 - DNA, 353 bp, Glycine max
aattccccgtctgacccacgcatcaggccacgcgtccgctcttccccaacttctcttaaaatccatctagcccgttcggtacgcaactacacacactggttgtctacatattcgtcgatgagatcatcgccctagtggctccagctacagtttgcagtcgtacattagatatcatcacacatgtcatgctcgcgagctacgaagcctgtggctcatgtctcgacggcttgtgtacatcatgcgtcagcaactacctcgtatatagctagcattaacgcaggagaggcaaacttgtttgcgcgtctgatagtctcagcttctgtcgcaactccgtgacagtcctacagtctgat

SEQ ID NO: 61484 - DNA, 227 bp, Glycine max
  unsure (1)..(227): unsure at all n locations
gacccacgcgtcagacctacatgcatgtaggtgtccaggcttgtacctatggtatcaagtttccattatttctcncttttcattttcaatgcatgggtatttaattctgcagtttttttaggtgtcctgtattcttcctgaaattatatttaacggaaaaaattgtcatctgaaaaacaaactctgattgtattggatttgaagaaagtcaagttattttttattgc

SEQ ID NO: 61485 - DNA, 407 bp, Glycine max
agccaacgcgtccgcccacgcgtccggttcattctctttgcgcagttccctacctctcctttcaagatgcagatcttcgtcaagaccctcaccggaaagaccatcacccttgaggtggaaagctctgacaccatcgacaacgtcaaggccaagatccaggacaaggaaggaattcccccggatcagcaacgtctcatcttcgccggaaagcagctcgaggacggccgtaccctcgccgactacaacatccagaaggagtcaacccttcaccttgtccttcgtctccgtggtggcatgcagatcttccgtcagactctcactggcaaaacataaaccctaaaggtcaaaagctcggacaccattgacaacgtcaaggccaagatccaggacaaggagggaatcccccc

SEQ ID NO: 61486 - DNA, 343 bp, Glycine max
aatcagcccacgcgtccgctgacgcgtgggtgaaattgaaatacaccaatctctctccgtacgatgttgccctgttccgtcatcaattctcgtgtctaaggacacagtttgcttgacaaatttacatgttttcatctcgatgttatgattttgaatatgtatgactatgccattgataacgacacatgtggttttgccacaagtggcttgtaaatggtttcaggtcttgtcaattgtcacatcacggacgatactcaattggatcttagttggtacaatgtctcctgtcccatatgcttggatttacctcagtacagtgttctcctgcattgggcatcgcatg

SEQ ID NO: 61487 - DNA, 247 bp, Glycine max
agacaacacatccaaaataaaaaacacattaaaaaaaaaagaaaaacaaagattacagctcggaaagaatgctatactagatagagaacacaggacaacttggaatacttcgtagtgagataattgtactgtatacatagacgatatcgttccatcctccatttcgctgacgtgaattacttcattgcttcttcactttttcactcactccttctgatctcaagcagtttcccctcatggatcgctt

SEQ ID NO: 61488 - DNA, 409 bp, Glycine max
  unsure (1)..(409): unsure at all n locations
acccacgcgtcagaacaacctcaaaatatattggaccaaggcctactacttctgttattctgcatatgtattctgcatatgctgtcaattttattttaaccactttttgttatttagttaattctgttacaataattatgtttactatgtttagtagtttcctattgtttttcctatatatttgtgtatagctggtgactaagagagacaacttttgtaaactttcttgcaagtctatcaatatactgattctgagttttccctcagcattcttttgtttctttcttccttcttgttttttttcattccaagttattacagggctaataacttcaatatggtatcagatgagcaacaacctttatgatcctcttcctgaatgggcctatgatcntctcctttgtcccct

SEQ ID NO: 61489 - DNA, 156 bp, Glycine max
ccacgcgtcagttatcacttttcagatctctctcccttccttccatcacaaccacaaggttgctgagaggacatatactatggtgaagatttgctgcattggagctggctatcttggtggtgcaaccatggttgtgtttgccttgaggtgtcgtga

SEQ ID NO: 61490 - DNA, 202 bp, Glycine max
ttttaagtttttgattacgatgttttattgtggtcaattgatggatgatattaaatgttaatttattttataattgtatgttggatgtaaatatatttctccgaaggcaatggtggttcagaagttacagggaggaaagaaaggtttatatgttaaatggattttgttcataacttttttagtttatattcaatggttgttg

SEQ ID NO: 61491 - DNA, 316 bp, Glycine max
cacgcgtccgcccaagacgtccgcccacgcgtccgcccacgcgtccgaggataaagatacaaagtgggctgatagctatggctgaaaacttggcttcagaatctgggttcatggaacgcaggcttcctaacggcaaagtggaagtaggcgacgtcacgataccaagaatcaccatttcctctgcggttgaagtcactaaagtactaaagtgaacaattactacaatcaaggcggtggcgtggcatttctactaactttgaaaaatctcattctctcttcaaaccttcgtgggaatataacaacatattcactgtgc

SEQ ID NO: 61492 - DNA, 341 bp, Glycine max
acgcgtcaagcatcgcgtccgaaatttcttactcttcgttgtgatagagatacaatggttatatctaggaaagatgctattctatagacatgacatgggataagtttcaattcttgtccgtgagataattgttctgtatatgttgacgagatcgttccaagctccacttcccttaagtgaattactactttgcttcttcactttttcacttatcccttctgatctcatgcattttcccctcatggatctctttgacttgattctcggttggttcggcttaagctacctggaatatttctgtaccactttttatggtctatctatgttttagccatttttgt

SEQ ID NO: 61493 - DNA, 420 bp, Glycine max
agtgcttgtccagtcctcaatattattatcaccaccaccatctttcccctctaagtctaacctcaacaataacatggatcatcaattctcacacatcatccccacagaaagatcacctagaagagaactccaacttcaaggtccacgccctacacctctcagaataaacaaagactctcataaaatcaagaaaccaccgttggcaccacaaccttcacaccctcatcaacctccaccgcgccaacctataataatctacaccgtgtcccccaaggtgattcacaccaccccaagtgacttcatgaacctcgtccaacgcctcactgggtccagttcttcttcctctgctgaagtggtcatgtccaacaataacaacaccactcatgtcgaccctttcaacaacggcggccgcggaatggt

SEQ ID NO: 61494 - DNA, 213 bp, Glycine max
acgcgtcagccaacgcgtccggagacgcgtgagtaatcatcaatacagtgctgcgtgtgttgctctgtgaatccatcatcttcttccattggaggaccagttcctcctggaatagacatgataatacaggttgccttaatcacttctctgagttgctaagttaattgctccgtcattgtttcactcttgggtctcgcgtacccgtgtcaccgt

SEQ ID NO: 61495 - DNA, 71 bp, Glycine max
taaaggatccaaccgtacttacgcgtgcacgcgaggtccaagctcttctagactgtcacctaaattcgcat

SEQ ID NO: 61496 - DNA, 76 bp, Glycine max
gacccacacgtcaggtccattcaagccctacgaatggagggttgcacgaggacccgagactgaaacttcagataca

SEQ ID NO: 61497 - DNA, 415 bp, Glycine max
  unsure (1)..(415): unsure at all n locations
aggttggtgtgaggcaatgacgcggcctttcggtgtgaagggggggaggaagcgaaagcacgcggaacccaaatacgacgcccatgacgaagaagaagaagaagaaacgcaaccaaagaaaactgtggtggaggtggagcacaaccaagaagaagaagaagaaactccagcaccagcaccagaggatgatggattgagcggtatcccaattgcgcccagtgcgaacaacactaacaaacccaacgtcatcttcattcttgaaaaagcttctttggaagtcgccaaagtcggcaagacatatcagctcttaaactccgacgaccatgccaatttcctccgcaaaaataacaagaatcgcggagattacaggcctgacattactcatcagtcncttctatcaattttggataaccca

SEQ ID NO: 61498 - DNA, 314 bp, Glycine max
agcggacgcgtgggaaaacagctcttgattagattatatagtttcaggcaagaatagttaaaggaggcaaaaggtgaggagtacaaacggatgaatgctcacattcgatttaatggctattccgcaggactcctcgattgtcagtgaagtcaaatttggtgcattgcttgtcatcagcactgtcagggaactccactagagtaaccatgtgatcacctcaggaacaaaaccccacgctgcaaatgtagctactgtcgaaataagcttgaaggaatagttcgtctaaaaggtttctgatctggatctgctcatgg

SEQ ID NO: 61499 - DNA, 371 bp, Glycine max
gcggaaaccgtatcacctgtgattccccataatcaagtagttactactacataaatgacccgatcaagccttgatcctaaattacttgcaacagaccaaaatattccaatcatatcaagctactgagacctaaatttgtggacacggtcactccaaagacataaataccaccaaagccaaaaatctcgatacttcaacatcttaatttgtaaatgtaaaaatggcacaatgaagagtgtacaggtaatttggtgtattgcttaagaaaccttgcctctaccatacaaagcattaagtccttaacggacacattctactacagttgtttagcacttccaatgatgcttgctgtcctaaagcctgaggaccta

SEQ ID NO: 61500 - DNA, 422 bp, Glycine max
agcccacgcgtccgtttcaatgcttgcgtctacaatggcatatcatatctatccagagcacaagagtcagcagctagaattcgtcttgggactgctctcccttctcttcgtgtgatgaaatcttcttcaccctctactgttgctgatacagtgtttgttgagaggattagatcaaaggttaaatattggagagagtcatgtaaaagctccgacacaaacaaaagcagagatgaagaacttgtcaactcccttaggaatattgtcctgggcaatgaacagttcagatcaagaccttgcattaactgtagatgtttgcagtgaacgtcaagtgcaacttattctggagatggtgttagactactcagatgatcttcttcctttgccaatccctactaagagtgggaccattcatgcagtacgaa

SEQ ID NO: 61501 - DNA, 83 bp, Glycine max
gaccacgcgtcagccaacgcgtccgaaggaatttttaaataaagttgaagggttttccgtggaacttttttgttgggttcaac

SEQ ID NO: 61502 - DNA, 371 bp, Glycine max
agcccacgcgtccgcgtactggtcctggtactgttgtcggatcgaaacccctatcttgaattcgactcaacaacatgcggcatggcggaggacgacacggtcgacgacatggctgaggaggacacggtggaagacatggctgaggatgcacatgctgcggtcgagatggctgcaaatgttgctgaggtatctatcactaatatctgaactgaacacactcacatacttgagtgtactccatgtaataactactagatatgtaagatataacagataacagcatggactctatccgtgcttgcgctggcatacgttgatctgttttccgccaaccatgcatgtagttgacacatctttttactagacagcat

SEQ ID NO: 61503 - DNA, 409 bp, Glycine max
gacccacgcgtcagcccacgcgtccgtctcattgctcagccatcacagcctcgtcacaatttctaacgtcctctgcgctgctccatctaatcacagatcgcagagatcaactgcatgtactgcaaggttgtgaaagctagatagtaatgatatagctgagacgaatatcgagacacataccatagtactactacgcttttgtagtatagatatcatctaatatcgtatggtttcacgatttaataaatctcagaatctgccttggtgtgtgatggatcatagatacagataaggagatagatcggatcagatgtcagcatcagctaattcaccgtgcgcggcgtgcaagtttctgatgctaaagtgcatccatgagtgcgtgtgcgagccgtactttccgcaggatgat

SEQ ID NO: 61504 - DNA, 336 bp, Glycine max
ccggccgaccacgcgtcagccaacgcgtccgggtagacgcacggatgtatgatctaccgcaggagagcctccggcagctgttctgcacgctgccattgatggacagcgagatgtgccgcgtagtcttgaaagtcctcatgcaactgctgtcaggacatgcgttccacgaggtccacaccagcgcccatctatagatccagcgcctgcaccaccgcaatcgttatcacaccgcttggcaaatcgctctacacgtcttctactcatcgatccaattatggttcgacatcctcctcgacctcatccctgtccacgtccctatctccgtcgacgtcttcc

SEQ ID NO: 61505 - DNA, 132 bp, Glycine max
acccacgcgtcagaaaatattagtcttacatgttacaactatttctaatgaacctgcatgttgtgtatccgaagtccacaatatttaaggctagatacgatcgttttgtattgtttgtgaggttgacggtct

SEQ ID NO: 61506 - DNA, 418 bp, Glycine max
aggtgctattgaacccagtgagcttgaggatttccagaatcgatatcatgttggacaacctgtttctggccatgttctaagtgtcaacatggagaagaagctattacggttggttgtgcgccccttttctactcttccttgcggaactagtgaagagccacacattaatgttgtggataagggtttaacagcacattttcatgaaggagatattttaggtggaagggttagtaaaatacttccaagtgttggtggattgcttgtccaagttggtcctcgcacatatggaaaagtacattttactgaacttgcagacacattggtgcctgatccgttgtctggatatcatgaagggcagtttgtcaaatgtgtagtgcttgaagtcagccacactgtcaagggtactattcatgttgac

SEQ ID NO: 61507 - DNA, 189 bp, Glycine max
ccggctgactgtacatttaatcatagttagggttcaattctcaatcttggtccttgcagttcccaattcccaataacgttaacctaaatccccgggttcctccggaccaaccaaaaggatttcaccatcggaaaccgaaccgttcggttaagggaattaattaaccagattgaaccaattcaagccccc

SEQ ID NO: 61508 - DNA, 411 bp, Glycine max
agggaacaggcacatacatacctgacttgaattacaattcctactgggatatgagcaccaaggcacctaggccaaggagatttccttcttcaaagcacaatgcatttcccagatcacgtctgagaaagaaacaagtggaagaggttcattctgagatagacataaatgcgaattcagattcaaggttgtttgagttcttaaatgaagatttccccgttcttccatgcaattccaaggctataccgccaacacaagccgaagagtctacgccattagaaaagtttcattctgagacagacatggatggtacttctcggtcatttgagttctcaaatgaagatttcccacttcttccaaaggtttgttctgagacacacatggatggtaattcaaggtcatttgggctttcaa

SEQ ID NO: 61509 - DNA, 387 bp, Glycine max
acgtcagctttctgcagtcggcgcctcttcgctttctcttgaagcttacaatgtctgtgctgttgatgattcaggatggatagtgctgtgttggcatgtacgcatgtatcagttcttcccgtcagtcacgtgttggagaccttgacataccttgggaatcgagggcatgagctatgggatcctcttgtccttacttctgcctcattcttaagtcaattgcctgtagattcttcctctgtagactttgtgacattaagctggctgtcagtagactgtcctgtggatcaactgattcacgatcaacttagagtgtaaaaagtaaatggtacaactctgatgcgcaagtcatctcagtctgcagtgggtacatttaaggagatgatatct

SEQ ID NO: 61510 - DNA, 423 bp, Glycine max
cgggccgacccacacgtcagggcacatggtgacgcaccgtaggccccaaacgcactgccaccacctcatcaggctgatccagctgggtcatttggcatggagcagtatttacagcacttggttcgccagcaggcggccaaccacagggggcaggtgcagacccatgagtgtctctaccagctcagcctcagtctgcagagacagggtttcgctccttttgcgtgccctactccagatcagtttagggctaaggttgcatggcccggagattggcctgaggcccaggcaggggaggcgcccacagaggctcccggcgccacggagaaggcccgtatggatgaggagacgacagatctactcgatttcttgggagggagcagagccacatgaccagaggacccccagattcatattttcttttat

SEQ ID NO: 61511 - DNA, 201 bp, Glycine max
accacacgtccggatagtatccatacctagtagtaactgagcacgacctcgtcgaacaggagtctaagatgtattcgccgcgcagaatgctccaagaaagacatctagatgagtcaaccttgataaaagttctaaagttgggactccaaatatagtggcctaagagacacatcatgagaattctcctgacaatcgaagcac

SEQ ID NO: 61512 - DNA, 433 bp, Glycine max
acgcgtccgaacaaatttcaatcttcttttcatgatttgttcatctttggtctgaattctcttctgggtattcgagattttcggaaaaggttgatttttcagtgaattgacttagttcgttggccatgtctacgtccgacactggaagtgctggatccagtgactccaatgctaccaggagacacagcaagagacgcaagtactcaaagtttactcaacaagaacttccagcatgcaaacctattctcacaccaagagcggttaattcagcattcgtgaatgtcatcattgtgttcattcccattggagttgcttcattaattgcttcacatgatgttgttgaaactaatgatacgtacgactcacactgcataccatcaaatgtgacagacaacgtggcatacactcagactcctggagaataccatgcaac

SEQ ID NO: 61513 - DNA, 600 bp, Glycine max
  unsure (1)..(600): unsure at all n locations
gggtggggggntggggggggggcgggtggggggggggggggggggggggggggggggggggggggggggtggtggggagagtagctgacgggcaggntaggtgtggannggggncnanngnggggaagaggggnggggggggggggggggggggggggggggggnggggggggggggggggggnggggggggggggggggggggggggggggggggggggngggggggggggggggnnggggggggggnggggggggggggggggggggggggggggggggggggggngngggggggggggggggggggggggggggggggggggggggggggggggggggggggggggggggggggggggggggggggggggggggggggggggggggggggggggggggggggggngnggggggggggggggggggggganggggggggggggggggggggggggggggnaggggggggggggggggggagaggggggaggggggggggggggggggggggggggangggggggggggggggggggagggggggggggggggggggggaggggggggggggggggggaggggaggggggggggggggg

SEQ ID NO: 61514 - DNA, 444 bp, Glycine max
  unsure (1)..(444): unsure at all n locations
agaaaattacgaaagagtattgaaaaattggggttaaggaaaaggtgaacggtgaagagctgtttatctctcgagtgctgagaaaaaggtgccattgtccatttctcgatccgtaaattttgctgtgcgttttcgttattttcgcatgttctgcaccgatcttttgtttcgcatgaatataataagctcctgatattattcggaactttcttcttcgtttttcttttctcgaacaatttcggaatttctggtctgagtttttctcgtttccccaaatattagggttccttcaacgctcttttcgagatgttgatcgctgactgaaacaaatcaattgcatgataagtaaattgattgataataatggaattgtctttattgatgttgattccgtggattcaaaccagttccgtacacnttggtttgaagagaaacaacgacaat

SEQ ID NO: 61515 - DNA, 357 bp, Glycine max
cgcgtccgatcgaatgccaggatcgattgcatgcaccttgcagtactcgatttcagcacttcgacgggggcgagaggcttgccggcgatagtggtggtggccgttgccgcacttgacttgacgggatcctccagctggtggacggatatcaactgcactccgctcagacatgatcgcagcttcgaccacctctcatcctctacagaatcgtcgccgctgtcgctctagttcaattagttcgagtacaatggagagtgtcggagtattgttggatcatgcacgacgtcattcacttactcactttcattgagaatgcagttcggtgttaagttgatgtcctccgtcgggatgtgcaga

SEQ ID NO: 61516 - DNA, 307 bp, Glycine max
ataaagcatcggcgtcaatttcgccgccaacttcgccacatcccttcgcatactcgctaacaggccctcaatcgggtcgtcaaactggcaggggagctgcattcgctgtcgaggtcgcagtgaaagttgcagtaacagttgcagcagccgacgcagtgtacgccggatcactcacgcaaaagctcaagtgtatcctgctgtgtttcatggcagtttcgatcgacgtactgggctaatcaaacgggctaacgaacggcgcgaagatctccgtcgatcgatctttcgtgaggcattctgccaggcatgc

SEQ ID NO: 61517 - DNA, 293 bp, Glycine max
accaaacgtccgggttggattggttacatgcgcgtaatttcctcaaccacggatatgttgtatttgattacttagtacgcaacgcagtctctcgattcgcgaactggttactcacagcattggttcgggaactgattccagcttcaagctgtctggtgctcgcactgtatgatcccctaaagtcaggctaatccaacccgtcatgtacatcgtcgacgtcgacatcgagtggtggttccatggtcagcactcacagtagtttctgatccacatgctcaacggagactccactg

SEQ ID NO: 61518 - DNA, 380 bp, Glycine max
aaccgattcaacgttgaggttcatttttaatgagctcattgctttgataaaggatactcgtcaacatacaggatatattgagtggcacattaagatttaagatgtatacatagatgcttctcatgagacgctggtcgacgctattctgctggcatcttgcgagacagaacagtccatctagaagtatccctatggaatttggtcaaagtgggtcatctatgttcgctcccaaagctcatgtggctgccatgcgtgcgattgcctactcaagttcgtgggtatggttctcatgatgctcacattcatgacaagtaatcttaagacgctatgagattgtaagttccattgcctcacacaactttacgtgatgaatccatgac

SEQ ID NO: 61519 - DNA, 311 bp, Glycine max
agcaaatggccgactagattcccttcagcatgatctgcatgctcgcccgtcacgttcccgaaagcggagcacatcctcctctgctgagccctcgattgacacgaccgcaccgacgattggatcactcgcatgatacagatccggactgaatgcgtcacgaatcagagtgtcgtgaaaatcatcaccaccgacgacgccgtcgattccagtcacggcaacaatgacggtgccaccattttctccggcgatactagtcactctactctcatgtgtgccctgatgtcggtttattcccgggacattgtcgttca

SEQ ID NO: 61520 - DNA, 354 bp, Glycine max
aattcaccctcgtgctcggcgttcgtctgctagcagtaagcactttggtttgtctcgtcaagttggattatccctagagccttaacacaatagcggccatgacatagatcaattattgtagcgacattagtcgatacgcagagaaggggaaccacagagtccagttcgacacccggttctgagttccaatcagcagatgacgatcccacacgtcacgaccctacgtacactgtagcagccacacgtttatccgttgctatgattgctgaagttgagatccatgagttagatgcacaggacgaagcatcttacgccaccgtcaggagagaaagaatggtaagtcttcactcctat

SEQ ID NO: 61521 - DNA, 376 bp, Glycine max
ataagaaatccgcaaaatttttgggaataaaggttggcaacttcgaaaattaacaaaatttcgaaccgaatttgttgcccaaattcccggctgcaaatttgaaaattgagatcttccttctcttgattcctaatgttgtaaaattgtaaaataaagatactgggttataaggtgtgagaatttagatcatttgctttaatttgatttgtttattttcccaggtaacgtctccttatggaaataaccttcaccacaatgaaaatgccacgcaaggtcaatttgcatttacaacagcggagagtgggaactatgtggcatgcttttggatggatggtaaacatcaagaagaagcaactgtaagccttgactggaaaac

SEQ ID NO: 61522 - DNA, 399 bp, Glycine max
  unsure (1)..(399): unsure at all n locations
atcaacatgccccctactattcgagctttcatcatcaagtattgcatctccacgtacgcgcatggcgaaatcacatagcagcctgaggattgccctcatcgggcatcagacgcaccgtcatcaactctagagttcacctcagctcatccaccgtatggttagagcgttgcttgcgacccatggccgacgaatatgcgaccaagtcnagtgccaaacgtaagcacagtactacgtccgtgaccgacaagccatcacgcgtctctgctcaagacgttaatgaagcgctactacgatgcaacctaataactttgatatctctgcttgttagatgatcacttttgtttctcaagtcacagcacgacacacctagttgctcatgattctaagaatttttttttt

SEQ ID NO: 61523 - DNA, 152 bp, Glycine max
gacccacgcgaccgacctaccagacctgcattaacttgtgatacattttggacaactgtaaacatacactcaattttacacaaacaaacaacagcagcacagaaaaaaaaaaaaaaaaaaagaaaaaaaacaaaaagggacgctctcacgaa

SEQ ID NO: 61524 - DNA, 423 bp, Glycine max
atccatggatgacaactggattggttttgtcttttgtgttacatttgagcggaacattattcgtcctgcggtttctagtagttctccacattgttcattttcttcgtcacatccgtttcgtctttcttttgaaagtgaatacacagaagaatactttgacatgccacttaatttggagttgaacaagatttatggatcaaaacatctttgggtcatttatatctctcgagaacactgccattttgtgaaaacaggggctcatatcacatttaaagcccactcaagtgttaagatcaatgcatggggcatgaagagtatattcaggcaagatatagatgaccttgaaaggatgcaacaaggagaatctcttccactccatcctaatgatgtagtacaccatgttgactttgatagtgtagaaaa

SEQ ID NO: 61525 - DNA, 547 bp, Glycine max
  unsure (1)..(547): unsure at all n locations
gggggggggggtgtgggggggggtgtgtgggtgtggggggcgggggggggggggggcgggggtgcgggggggggggggtgatgggtatgggagggtagcgtcagtacggtgtagttccggtcgaccagcgtcgaagnggggggggggggggggggggggggggggggcggggtgggggngggggggggggggggnggggggtgggggggggngggggtgggggtgagggggtgtggttgtgtgtgggtgtggggggggggggggggggggtgggctgtgtaggcgcgtgggggggagggtcgttgtttgtgaggtggtgggggggggggggggggggggtggggtggcggggggggggggggggggaggccggggggggggggtgggggcgtgggggggggggggggganggggggtgggggggggggggggggttggggggggtgtgggggggtgggggggggtggggggggtggggtgggggggggggcgtgggcggtgggggggggggggggggggggggggggggggggtggggggggggggg

SEQ ID NO: 61526 - DNA, 174 bp, Glycine max
atcaaacgtccgcctactcttccggcaattgttgtaactttttgagtcttaacgtcagtaaaagtcgaaattactttgtcgttaggggaaagagattgtgtgtgtctcagtcactatcgctggatcgagcgaaggtcttaccagctgaatcgatttgggaacgacttacttgtg

SEQ ID NO: 61527 - DNA, 311 bp, Glycine max
atcaagtacctacgcacagatagatcttgttttttttctgcctccatcattttctcgagagctttcagtttgtgtggctcatctttcttcgtctccttcactcgcccctcagtaacagcccgcctctctgaatcgctttccgtgattcatctgtcgttcaagctaagattttcgggcatgtctaggacgtcaccaagaagcaaacttacaaagatgtttcgaaagctacgtgttttcaggaacgagatgcaagttttattgtcgactttcgctagtccaattaagtttcagaactacatgtttcattgaaa

SEQ ID NO: 61528 - DNA, 397 bp, Glycine max
accatgcgtccgcactcttgcccgtatttgctaatacatacgctcttcccaatgcaactaatggggctgtcgattatggtcaatctgggtctccactctcgcagatttggccactggttgatccaaagcacttgtggaatctcgggggagggtcgttattggggtttggtatggctttccagtgaacatagcatatagcgcttgatgctttctggtaatcttcttgaggatagggtattcgagatgcaggggtgaacagtaccgattatgtatttttggtatctcgcatgagcaaatttggcattatgtaaatgtaccagtgcataagacatatttttggctataattacagtacgaacattgtgtcatgggatgtctacatacttttgagttatgt

SEQ ID NO: 61529 - DNA, 314 bp, Glycine max
aagacacatccagactcgaagccgaagaagacgatcctcataatactgccaacagcaccggatgcagcaatgagcatgacattccagatccctcccttcagccgagtcaaggatcacatgttcaaacaccatggtggcaaagggttcgtctctggccctatgacgtcagttaaagccagaagaaaatcatcagatggtctgtgttgatacgcaagatctcacatctcacatgatcgcctgcatgtgacagatcttgcccacgacgatcaagtagcaaatcaataatgcggaacagatcatgtctatccctacat

SEQ ID NO: 61530 - DNA, 58 bp, Glycine max
aaacaaatgtcagcactaagtgcagtaagcaaatctgcgtatcattaactaccttttc

SEQ ID NO: 61531 - DNA, 73 bp, Glycine max
aagaaacgcagccggtaacactgctcacgccacctccggaaaattcgcaaccaccatttgccagccacgatca

SEQ ID NO: 61532 - DNA, 404 bp, Glycine max
cggtcgacccacgaatccaaaatttgcttcctctgtttccattcattcttcttcattttggtgtcttcttcagttctacttttttcttttgttttcggttgagttttagagctgctgagggcttccatcttcattttattttttgcgattttggtttgggttctttttctttgattggtctgattttttgtggttttatttttggaacaggctacagtaacaacgacaactttggcatagaagttgtcggaaaagttaagaagaagatagaggtcaattatgggaacctcatgtatgggctgatgaaggagtatatccaacataactgaaatgtcctgtctgatccctttttgccaaagagtgctgctgacactggaggaaaaacatctaccttatgaccccaa

SEQ ID NO: 61533 - DNA, 141 bp, Glycine max
gtccgcccacgcgtccgcccacgcgtccgcccacgcgtccggtagaactattattgttgtattaatatcactggatcctaataggtgttgggctaaaggcctagagctgtatatgcaccttatatttcaatttgcagtacc

SEQ ID NO: 61534 - DNA, 113 bp, Glycine max
acccatcgcatcaaaacacggattttctcatcgccagcatcgccttgtaagtgatcgtcaatgggttggtgcagccgattatattcactaacgggaaaaatgccaatccggtc

SEQ ID NO: 61535 - DNA, 254 bp, Glycine max
cacgatcagtttactaatgttgatgggtaacacttaattggtaacataatcaatgtagggaagccgcccaggagattacagccttggttacgcgtactgcgtcatgattcacgctactaaattgttcccaaaatactggacacaggccatcgatatcagcctgttactgggcaaaaaggattgcatgacccacataagaccgctcaaaggattgcccactttcagcacagggctgcaaccagccaatctgagca

SEQ ID NO: 61536 - DNA, 280 bp, Glycine max
acccacgcgaccgagcatacataaggtgaaaataaacatcataaaaaaaaaaaaaaaaaaaaataaaataaataaaaaaaaaaaataaaattaacacaaataaaatttataaaattaaataaaaacatcaaagctagtcaaagggctccccctccataggattctcacttcatttggcttacgtgcaaattcttgccacttccaagttctcacccaaatccaattaatcgatcttccttttcaaatttctctctcggtaaaaccctgtttttacccactt

SEQ ID NO: 61537 - DNA, 113 bp, Glycine max
ctcacacgtccggaaagaatctatacctcgtactcatgcaccatgacttggttcaacaccactctaagctgttttcaccgcgcataaggctccgacaaacacacctgctacac

SEQ ID NO: 61538 - DNA, 52 bp, Glycine max
cgcacacgttcgggtcgcatttctaccacatacatctcgaccatactacccc

SEQ ID NO: 61539 - DNA, 124 bp, Glycine max
ggatatcgctgaggcagcatcagctgatgatcttgctcgatattaggatttaaataagctgggtgaaagagtttccatgtgtgaggccgtgtgaacgtacgatgggagggggattagggaaagt

SEQ ID NO: 61540 - DNA, 223 bp, Glycine max
atcactcttacgtccgactctgtacaagcagcactcacaatacgataacccatccggggcaacacgattcctttccatagtcaatggcacaacactcacattccattcctcgtcccaaacgccgattccgctgtggcgatttgtatgacaacgagagcgcgagtgacacatcagatccgtagagttaaaattccggttctgagtagatccaagtctcttcatg

SEQ ID NO: 61541 - DNA, 133 bp, Glycine max
cccacgcgtacgccttgatatgatccgcaagattgctgatgaggatcctgacgactggactgacaaataaaagaaatatgcatactctgacgatgatgagaagaaaggaccatattctaagttctggaatgag

SEQ ID NO: 61542 - DNA, 243 bp, Glycine max
ctcaaatttcaatctccttttcttgattcgttcatctttggtctgaattctcctatgggtattcgagattttccgaaaaggtatattggttgttgaatcgaattaggtcttttgccatgtgtacagtctacgctggatgtgcaggatgcaatgatgccaatgctaccatgagacaattctataggcgcaagtactcaaagtttactcaacaagaacttccagcatgcagacctattctcacac

SEQ ID NO: 61543 - DNA, 123 bp, Glycine max
cgaaaattaggaaagagtattgaaaaattggggttaaggaaaaggtgaagggtgaagagctgtttatctctctagtgctgataaaaaggtgccattgtccatttctcgatccatgaattttgc

SEQ ID NO: 61544 - DNA, 66 bp, Glycine max
gttaatcttataatggattatgtgctatctttctgttaaccgctaatgtgtatgtggattcaggac

SEQ ID NO: 61545 - DNA, 206 bp, Glycine max
gttaaacatactgataaattgatggttaaattgattagaaagatagtgatagtgtagggaataattaaaatatagagatgattataataatatgagtacatgtattagaacattgagtgtggaagtttgtgacgtaatagaggaggatgttacagagctgggtaaatgcaggtgtgatgttgattaagcatatgataagaggtata

SEQ ID NO: 61546 - DNA, 81 bp, Glycine max
gaaaaataataagatcgaacgaatgctccatccatgattccattcatcgattccatggtggggagaagcgtgccgtcgatt

SEQ ID NO: 61547 - DNA, 136 bp, Glycine max
cttaaacatcctcgtcaatatcgcctacaattgtgtcaaattctttagaaacggtctagaagactttcaataaggtcgataaacttgcatgtgagctgcattggatgaagaggtcacagagaaagttgcagcgtaa

SEQ ID NO: 61548 - DNA, 108 bp, Glycine max
tccgcaacattataatttctattacatacttttgttctaggatgacaagttactactgattggtgggctgggttcgtggcagcatttgtacggtggtgatgatgatgg

SEQ ID NO: 61549 - DNA, 59 bp, Glycine max
gtactatcaaaccctcaatgcttgcatggcgttgaggttgtgtgaacacccggtcgggt

SEQ ID NO: 61550 - DNA, 62 bp, Glycine max
cttaaacgttgaggttcatttatggtgtagttattgataatagtaaggattgtttggtattt

SEQ ID NO: 61551 - DNA, 53 bp, Glycine max
taaattaacattccatcctccaaacctaccggatgcaaacttttccatagagc

SEQ ID NO: 61552 - DNA, 57 bp, Glycine max
cctgctctgttttgaaacataacatgaagcaaagtgaacaaagagccatcggcatgc

SEQ ID NO: 61553 - DNA, 53 bp, Glycine max
cccatacctcccgcctgccactcatggtgctccttccacatcataaaccacgg

SEQ ID NO: 61554 - DNA, 66 bp, Glycine max
gacattcttccttgctctctgatataaaagcttttttgtgctcaatgatatttctgggtttgttga

SEQ ID NO: 61555 - DNA, 52 bp, Glycine max
tggatgacaactggattggttatgtcttgtgtgttacattcaagcggaacat

SEQ ID NO: 61556 - DNA, 240 bp, Glycine max
aaaaaaaaaaaaaaaaaaaaaaaaaaaaaaaaaaaaaaaaaaaaaaaaaaaaaaaaaaaaggaaaaaaaaaaaaaaaaaaaaaaaaaaaaaaaaaaaaaaaaaaaaaaaaaaaaaaaaaaaaaaaaaaaaaaaaaaaaaaaaaaaaaaaaaaaaaaacaaataataacgaaaaaaaaataaaaataaaaaaaaaaaccaccatataaaaaaaaaaagtaataacaaaaaaaaaaatataa

SEQ ID NO: 61557 - DNA, 80 bp, Glycine max
gtcatacttatgcactctcccaccgtaaagataatctgatgtctagcctttggctagggtttaaatgaaataggctcatg

SEQ ID NO: 61558 - DNA, 106 bp, Glycine max
ctcacgcttccctctccgtatccgtgaaaaaccttcgctgcccgcacttattccttggacaccgctccttccagcatgcgatggatgcatgaggcgctggagccac

SEQ ID NO: 61559 - DNA, 60 bp, Glycine max
tcacgctcccatctcgtcgttttgctaactcaagatcttcccaatgcgggggtgctgctg

SEQ ID NO: 61560 - DNA, 81 bp, Glycine max
atctaactaaaccttgcagaacaagaaaacaccgcaaccatcgtgaactactcctgagaaccgggctatacaaccaagtcc

SEQ ID NO: 61561 - DNA, 109 bp, Glycine max
caatttgcttcctctgtttccattctttcttcttcattttggtgtcttcttcagttctacttttttcttgtgttctcgggtgagttttacagctgctgaaggcttccat

SEQ ID NO: 61562 - DNA, 75 bp, Glycine max
ctgacgcgtggggtgccttcttcgcggcatacaattaccgacagtaccaacatctggtggtaacataatccaaat

SEQ ID NO: 61563 - DNA, 71 bp, Glycine max
cacatgcgcacccggtcacactggtcacgccaccgtcggaaaattcgcaaccaccagtggccggccacgat

SEQ ID NO: 61564 - DNA, 52 bp, Glycine max
caatttgcttcctctgctaccattcactcttctacattttggtgtcttcttc

SEQ ID NO: 61565 - DNA, 74 bp, Glycine max
gttaaacgacgactatgcgatcaagaagcgtggatgggtcacgtgaacgtagcagagaggtcgctcattaaact

SEQ ID NO: 61566 - DNA, 176 bp, Glycine max
cccacacgtccgcccacgcgtccgcccacgcgtccgcccacgcgtccggtagaactatgtattgttgtattaatatcactggatcctaataagtgttgggctaaaggcctaaagctatatatgcaccttatatttcaatttgcaataccaaaaaaaaaaaaaaaaaaaaaaaataa

SEQ ID NO: 61567 - DNA, 141 bp, Glycine max
aacccacgcgtccgcccacgcgtccgcacacgcgtccgcatatatgtaaaataaattaataataaaatttctattagtaccaaactcagtaaaaaaaacgataaaacctgaaggttcaataaaatagaagattaaataatt

SEQ ID NO: 61568 - DNA, 432 bp, Glycine max
aactgtttccgaatgctgctcccaatgaaatgaatttttttttaataataataattttgaccttaaatccttgtccttttgaggttaaatttgatggaatatactgttggggtgtctcactgctgcatacagaagtaaaggcatctgcacctgctacattgatggaggtggtcaaagcaattgccaagcacgaacctgcagctcctgaaagtgttgctatcagagctgatcagaagagttatagttacaagcaactcatcacatcggcacagaagatatctaatctcttgtgtggcagtgatgcacagacaggaaatctcggtggagctcgaataggaattgtagccaaaccttctgctgaatttgttgctggaatacttgggatttggcttagtggaagtgttgctgttccgcttgcaaccagctatccag

SEQ ID NO: 61569 - DNA, 321 bp, Glycine max
acccacgcgtccacggacgcgtgggtgcaagcacacaaaaaaaaaaacaagaaaaatataaataaaaaaaaaaacaaaaatgtaaacctgaaaaaagaacaaatcaatcaatcaaaatatagatttggtgtcaggggcggcccctccaaaggttcgtggctctcctactcttgcatgcaacgtcgtacgtcttcgagcctggcacgtgtatccaagtccactgggtctccttttgcactgcctgtaccggggatgcctcgcgataactcatcttatcccccttgcgccatacccccctttcaccattcggctttctgccca

SEQ ID NO: 61570 - DNA, 195 bp, Glycine max
acccacgcgtccacaaaaaaaaaaaaaaaaaaaaaaaaaaaaaaaaaaaaaaaaaaaaaaaaaaaaaaaaaaaaaaaaaaaaaaaaaaaaagaacaaaaataaaaaaaaaaaaaatgattatgcatgtggggcgggggccccagcgtttccgtctttgggtttcctttctttggctttcgttttccttcttcttt

SEQ ID NO: 61571 - DNA, 354 bp, Glycine max
actgatcctttcatttgcaaattgcaaatgcagaaaggaaaagcggattctatctccatcatcagctcccttcctgaagatgttgccctcaaaattgcttcgctacttcaggtgcgggatttgtgtgccttaggttgttgttcgatgttctggaaggaactctgcttctcagattgcatttgggagtctcttgtcagaaacagatggccctcactctcttccttccatttcccttcttcttcttccactcattctcccagtttcgagtacagaaattgtttgtgtggaaaattgggttacagaagtggacgaaattgtacttggagaggcacgtggaattgggaattagagcta

SEQ ID NO: 61572 - DNA, 393 bp, Glycine max
acccacgcgtccggattcccttagttttgaaagtgttcctttcatttgtgtttttagttgaactatggcttttaacagccaaatacttgtgtgacaccacaagtcttaattctgctgttgttagaatgtgttttctcgcatatcggcatatgtggtcgggataattaccgattttttattacacagattgacaagcagagaaaaaaatgctatgcaatcagtttggattcaacaagtcaattttctttttctttttctagtccggcaagtacctgaatgtcatttgttttgtaatttgtcaaaggatacgccacatttatttacactgctttttctatattgggaacttttacatatccaaacacatggtggtgggcctctgtgccggagatg

SEQ ID NO: 61573 - DNA, 369 bp, Glycine max
cttcgatcaattcgtttaattcattcccccggtttttttcattcgaccaacggctagtcttcgtttacatcactaacttcaaggttgatatcataaacatctccttgaaattatactaatcttacttcccttaactttcgtttggtttttaatcttccaattattgtattttacatcatgaagaataagcttttgcggcaattcaaggttctttcttctttcctctgttccctaccatccaagggaataacctctttagatacactttttgctctgagaccacatatgaccacactctcttccatttcatccataaaacttggagtgcactcatagaatcccacattcataacatgtttcctatgggca

SEQ ID NO: 61574 - DNA, 272 bp, Glycine max
acacacatgtcagcttcttctggtaatttagacccctctgcaagtgcaatctcgttcacgaacttcaccttcaccacatcgcctttcaggactacctcattctatggaatcggtgcttctgccttggatcagagaaacccaagacatggtggtttgtcagatagaagtggcgcttctgtgccgacattaattccagaatagaaattgctcggcctctgatactgcctccgatatcacgtacgtcattgcttgagattatgcatgaactgagt

SEQ ID NO: 61575 - DNA, 417 bp, Glycine max
acaaaagatcattaaccgtgcaattcttttatctttattaaaatatttttactctaacttccttaaccacccaaaaacccttcccttagttttccttctcccatgtttttcttatattaagtctacttaggtaagctgggatcgaagaacagaacatcatgagcataagctagcttcgtgttgtgctgtctcaaatgttcatgaagtcgtaaatgccgccacacacctctgttgtctcataaaaatgtctctttttcctcgtctccatatcttcgctaggcctttactttcctcatctctctctgccccttctggcaggtcctctctccctccctacactttcattagcagtgtttgtgttttccttttccaaagactatcagtctcacatattttgtttggaactactacttaccc

SEQ ID NO: 61576 - DNA, 227 bp, Glycine max
acacgcgtcaaatatttgttgggcatcgatgtgcgaatcacaagttcagatgatcttccattgtgggggtatgttggcgagttacatcccgatgagaatggtgataatggcaagcatgtacgttacacacacaagaacatcaatgttcagtagaatgcagggtcagggtagtcatgtgaatctaactaatgactaggcaaggcctctggaagtaagaaaagctttgg

SEQ ID NO: 61577 - DNA, 59 bp, Glycine max
ttcggggccgacccacgcgtacacccacgcgtccgcccacgcgtccgcccacgcgtccg

SEQ ID NO: 61578 - DNA, 433 bp, Glycine max
acacacgcgtccgtataaaactaattaaaatagttctagtccttgcaagaggcagatttgtttgcagaattcgaaaatgttaatgacattcaggaagatatgcttaatgatatatatgataaagctactgaagaaccttctcagtccatgcacaatgtgattggcactagcatggcttcagaaagtaacgcaactgaaaagacatcagaggaaaatggatccagccagtctggcaaagctgagataacagaagaacagagagcccgtatggaagcaaataggttgaaggcactataaaggcgagctgagataacagaagagcacagagctcgtatggaagcaaatatgttgaaggcactagaaaggcgtgctgccttatcacaggcctcccaactttgatctgaattgtagatgaaagcattacttgtcgttg

SEQ ID NO: 61579 - DNA, 294 bp, Glycine max
agaggacgcgtgtgctgtcgcgtgggatgatatggctcaggacttggcattggatctggaggagcttcgccgcctccacagcatcgccaattgacctcgtaccctctctcttctctcctccgaaattcgtgacctcgagaagttatcgtcagaggaagcttctgcgcagattccggcgccgatgtcgaacggaactgaagtggagccttcacctgcgctggggtatgcggcagtcgcgtcgttcagttgggacgatgatagtgacgatgttgggatgtatgtgttgggggatgg

SEQ ID NO: 61580 - DNA, 244 bp, Glycine max
accacgcgtccgatgaaaggtccaagctattatacgttagcacaataatctgggatgacgcgcggcctttgggcgtgacacgggtcaaagcgatactacgcgattttgggaccgtggctccagcgacgtagcgtccaatcacgcgttcagtatataggtccgccttaactcggaaactgtggcatggaagtgcatatactcgacgaatttttaaactgatcagtctgggtagaacatgacgaaa

SEQ ID NO: 61581 - DNA, 309 bp, Glycine max
attcccagtcagacccacgcgtcaacgttcacatacgaagttctgaaaaatgagtaccaaagtgtttcttattctacttatgttcatggccactaaagttttgatctcctcagaggttgcacccgatgatccatagtagactttatgacagaatagacgataagcgtggtgcatatggggtacatcattgcagatattggcgtggtggctatggcgactatggtagttagcatggtggtggttggcgtgctgtctatagacggaggcgtcttgcctatggttgtggacgtaatggctatatgaggctgg

SEQ ID NO: 61582 - DNA, 211 bp, Glycine max
aacggagacgtccggggagagttgtgagttatcttgtcatttattataggcggtatttgatgaggtacaggatgttcgtgtagcagtgtgtggttgtttgttccgttgtcatttgattcaatgatttcagttaggttttctgttctgtgagtgagatcatcagttatagatagagttatacaaagtcttgtactagtcttaacaatgtgaa

SEQ ID NO: 61583 - DNA, 334 bp, Glycine max
acccacgcgtcaagttattcttaagctcgctgctgaatcaatcattctcggttttcgcgtactctactcgttcatcccgacatggtttgcttggcttgtttgctgcacctcattctcgtcccaatcgtcaacatcctcactcttcacttccaatttatcatggggaaaatctatcaggtttttggttgggaataaaggaaaccggagagggttcatcctgcatgtccattcaagcctccagccaacagggttagtgaattaagccaattactaatttcaattgtttacgaaaaagtttaatttttatctgctactatcaatcatacattacaaa

SEQ ID NO: 61584 - DNA, 333 bp, Glycine max
acccacgcgtccactcactcgtcagactcattctccgatcaccattctctgaagacatcggccctggatgtagcaacaacgatatcgagcatcgcgtcacctcggtgcctcgtcatactcttgggagtacacgaattctgcatgtctacattggagtttgctctgctccaggctctagctgctatgttccgtttcagaaactagttagaggacatcagtcaggcaagttcaccagattcatttcagatggactggctatttttataccggtcaccatgtgatctatcttgtaggcagtctgcagatcatatacagacttttcagttcatattt

SEQ ID NO: 61585 - DNA, 199 bp, Glycine max
tcgtagacgaagacggtcgtcatcctcttgctccagctggagctggttctttccctggacgcttcagtgggagatagacgttgcacgcagccatagagcaacctcaataaccagattagtattttgcaggtcatctcaactcatcatgcctcattattgtgtcaatttggaataattggcataagttgaatcaattggt

SEQ ID NO: 61586 - DNA, 432 bp, Glycine max
accacgcgtccggttttagtttttaatcctaaaaaattcaaaacaacaatcaacatatgcacgggtgttaccaagaatatgactatatgcatgtgtaaacattctaaatgtgtttaagctcactgcatatgttgagattgttatgccttgatggatatgaacttgcgatgaatctttcttctttttgcttactctcttgaaaatatatcatttttaaaattaggcttgctgctataagaatttggtttggttaccaaacacaagaaaggtaatattttttgtaatatatcccttgctgttctaagaatttggtttggttatatggacctggtacgctgtagagaagaggttagccttcccccaaaaatgaggttccttttaaattttccgtgctatcaatgagcaaacatctatcatgaaagtttttccctt

SEQ ID NO: 61587 - DNA, 177 bp, Glycine max
acacacgcgtccagtttcacataccgtcaacaatcgcaaccgcaccgagccagcgagcgagaacaagactcattaaaaaaacgtggtgtgtcagtgttactcaatgcgcggcatcgcacgtacgtgaattcggcacgtgagtgtctattcgtcagccgagtcagagggattctcgat

SEQ ID NO: 61588 - DNA, 446 bp, Glycine max
gacccacgcgtcaatatttccctacctctcccttcaagatgcagatcttcgtcaagaccctcaccggcaagaccatcacccttgaggtggaaagctctgacaccatcgacaacgtcaaggccaagatccaggacaaggaaggaatccccccggaccagcaacgtctcattttcgccggaaagcaacttgaggacggccgtacccttgctgactacaacattcagaaggagagtactcttcacctcgtcctccgtctccgtggtggcatgcagatcttcgttaagacactcaccggcaagaccataaccctagaggttgaaagctccgacaccatcgataacgtcaaggccaagatccaggacaaggagggtatccccccggaccagcaacgtctcatcttcgccggaaagcagctcgaggacggccgcaccctcgccgactacaac

SEQ ID NO: 61589 - DNA, 335 bp, Glycine max
aattcggggccgacccacgcgtacacggaagcgtgggaaaaaattgaagaaaaaaaaagaatatgttaatttaacgggttagagaaaggaggggagtccaaaaggatagagacagatataggtgtacatgagaggtgatagctcgtataatgtgagataaattcaggacactggagagtggttataataacagcttttaaccaggtgaaagaaatggtggttattaaacttaatcggcttggtggaaaacggtcttttgtgagctggcgtaatagggaaaaggttagtactgaatgggcttcgcaatagttgcgcatcatgaaaggtgaatggga

SEQ ID NO: 61590 - DNA, 246 bp, Glycine max
atatagttctgacatcggtaataatatatactataatacataggtcattgatgcatgtactgtgcataacggctgagttatgtacttatgttaagaataaaataaagtgctgttgttgcaaaaaaaaaaaaaagaaaaaaaaaaaagaaaaaaaaaaaaaaaaacaaaaaaaaacaaaaataacaaaccgcacaacatgagagaccaaactggggtcgaacaaaacgcaacttccaccacaaagga

SEQ ID NO: 61591 - DNA, 340 bp, Glycine max
tgagttagggcatgtgtgagctgtggctttgcagggaagaatagtgtcagtagaatatacatgtcctcttcgcagggatactctctatttcacagattcatacctaagtgtcagtgcatcgcttgtcgcctaccttcactgagagacagtgacaatgacgtaggctcgattcgagtcgtggatgccgctatactacaccacatgcggcgtggtggtaggttacacactatgctccatcctcctggccatcttcaactatatggccatccccacgttcacctagccaggcctcttaacctcgctccattagctcacctccgcaaccggcgtcgacgtcttt

SEQ ID NO: 61592 - DNA, 259 bp, Glycine max
  unsure (1)..(259): unsure at all n locations
gggggggggggggggggggggggggnggggngnggggggggggggggggggngggnggggngggggggggggggggggggggggggggggggggggggggaggggagggggggggggggcgacgggggggggggcggggggcgggggggggggggggggggagcgggggggcggggccggcggggcgggggggggcggggggggggggggggcggggcggggggcgggggggcgggggggcgggggggggggggggggg

SEQ ID NO: 61593 - DNA, 267 bp, Glycine max
cccacgcgtccgccttcgcccactttcaatttttctctccctaaaaatcaaatcgtggccaccgccacatcccaaacccttcgattccaatctccgtcactttctctctcctccaaaatccctctctccgcattctccgtctcgctccgcccgcaacgccgcgcctcccgccacctcgtgctggtcgtctccgccggcctcgacgcaaagcccacggtgctcgtcgcggagaagctcggctacgcggggctgaagctgctaaaggac

SEQ ID NO: 61594 - DNA, 107 bp, Glycine max
gcagcattgggagatagaaagagagtagagtatgagagagagagaaagacccttagcctgggctatcgctcgctttcctttgacgcttctgacccttgctatgtctg

SEQ ID NO: 61595 - DNA, 235 bp, Glycine max
cgaaactaaagtataatttaatggaccaaaagtgacggtaagtctttatatgtaggacttaaagttttacttgaagatatttcttcatcgtcatgattcttttcttttttccttgtacgactttgcagttttctttaactacttccggcgcatcttcaaaaatattttcagccatgcagagcaaattactcaggtttattttatatttacattgtcttcttgctttgccattttt

SEQ ID NO: 61596 - DNA, 251 bp, Glycine max
cacgcgtccgcgcacgcgtccgacaatatcaaatttacctttccctctctattactctctttcggattagagatattattagatgattcaggacatagtctcattgtagttaaattttttataaaattgaattttttgtttatatgaaccatggtcaagaacatagacgctgctagtttgagattatgtaccaatagtttagatatgatgattgactctgagcctgtgctttcactaattttaaattctga

SEQ ID NO: 61597 - DNA, 130 bp, Glycine max
agctcatacaactgatgcctgctatctactccagttgctggtataacctttcatgggaatgccatacatgcacgaggaagagactcctactatataagccatgctttacacctaccatgccttctaactc

SEQ ID NO: 61598 - DNA, 433 bp, Glycine max
atagacactgaattattactaaatttaatcacttgaatttagccaagcgagagggttaaattgaaggtgaagtcagataacatattatatattgagttgattagtattgagatatattaattatattttaattttatataattatattatttatattaaatataataatattaattatattatattataagtatttaatttttataataatatattatattaatatttttattttatattatatttttatatatttttttatttattttgtattatttatttattattattttaatatattattattattaaatttaatattataaattaattatattatgttattttaataaatgtaatatatattatttattaatttaatttatatttttttatataattattatattattatatattttattatatttat

SEQ ID NO: 61599 - DNA, 59 bp, Glycine max
cccacgcgtccgaaaaaaatttaatttaaaaaaaaaaaaaaaaaaaaaaaggaaggaat

SEQ ID NO: 61600 - DNA, 209 bp, Glycine max
ttcctactccaaccgcacttctgcttcgcaattatcatgggcaaggtcaagatcggaatcaacggatttggaagaattggccgtttggtagccagagtggctctgcagagagacgatgttgaactcgttgccgttaacgaccctttcatcaccaccgattacatgacatacatgtttaaatacgacagggttcatggactctggaatct

SEQ ID NO: 61601 - DNA, 120 bp, Glycine max
ggcacgcgtccggttcgtttatgttttctactcttgatcgtctcatctatcacgggctacaatcaatgaaagccatgagagcattttgttgatagaatgattaggtctatatattggatt

SEQ ID NO: 61602 - DNA, 129 bp, Glycine max
ttttttttttttttgtttttttttttttttgttttttttttttttttttgttttttttttttttttttttttgttttttttggggtttttttgtgttttttttttttttttttgttttttttttttttt

SEQ ID NO: 61603 - DNA, 117 bp, Glycine max
cacgctccgagaagcccgtatgctccgcccgctgcacccgactcccttttcacatgtgtgtgcggcctaacagaccgaagacttaacgactttttgcaggaccacaactccgatcct

SEQ ID NO: 61604 - DNA, 86 bp, Glycine max
aaaaaaaataaattaaaaatttatttaaaaaaaaaaaaaaaaaataaggaggataaaataaaaaaaaaaatggaaaaaataataaa

SEQ ID NO: 61605 - DNA, 124 bp, Glycine max
cccacgcgtccgcccacgcgtccggtgaaagagaaaatccgagactctgatttggagagtcgagtgagtgagtgctgcttcctctgaatcaaatcattcatcactctctctggtcctgagtttc

SEQ ID NO: 61606 - DNA, 161 bp, Glycine max
ccacgcgtccgcccacgcgtccgggcagcagtcctgtatgataatagttctgatggcatcaaacttggtggaaatgaagtatggcagttccgattggcttatgcaactaaatggctatgagttgttcttataatttgtccttatcatgatcgtttcatttt

SEQ ID NO: 61607 - DNA, 143 bp, Glycine max
cgaagtgcccttcttgtgctttttttttaaaataaaaaaaattataaataggaaggttaatttaatatatatagtataaatattaaaaattaatataattacaataatatatatacatttatatatatttttatttttattta

SEQ ID NO: 61608 - DNA, 156 bp, Glycine max
cccacgcgtccgcaacagcatcagttcatggctgcgatgatgaaccaacggcgcgcaatctgaaacgacagattccagccaatgatgtacgcgcggccacctactgctgtcaattatatgtaccctccatacccttaccctactctagatccttac

SEQ ID NO: 61609 - DNA, 135 bp, Glycine max
cccacgcgtccgcccacgcgtccggtcaacatggaggaggagactaggaggaagcagcaacaagctcaggaggcatatgatgaggatgatgacatgcctggtggtgcacagagggtacagtgcgctcatcattaa

SEQ ID NO: 61610 - DNA, 141 bp, Glycine max
  unsure (1)..(141): unsure at all n locations
cccccntccacccacgcgtccggatcacaaggcattgggtttaaagatataaagacaaggttagccatttccggttctacttccacgagaccttcaccggaagcaacgccaccacggtcttcgtggttccgccgctccccc

SEQ ID NO: 61611 - DNA, 92 bp, Glycine max
cccacgcgtccgcccacgcgtccgttcacgcgtccgggattgaagaagagaggggaattgaagagcttgagagagaggggatggggttgaag

SEQ ID NO: 61612 - DNA, 152 bp, Glycine max
cccacctccgtttcataaagggtagaatgaaagaagcaccgattgtctcgactgctttgaggaatacgatcaaatttggtacaattctcaatgatcctgacttgcctctttcatactttcctgaattcaagaactcaaaaagagttcctaat

SEQ ID NO: 61613 - DNA, 189 bp, Glycine max
cccacgcgtccgtccacgcgtccgttcaatctgagtttctagccattcagccaagcagttggccatcaactgctcttttacatggtgctcatgattttatttttattattttttttttattatttatttatttttttattttatttatttttattttattattgtttttttatttttttattattttta

SEQ ID NO: 61614 - DNA, 201 bp, Glycine max
cggacgcgtgggcggacgcgtgggcagatggtgctctctgggatattttttggagacaggatgtccctaagttgcaggaatatctgaagaagaatttcagagagtttaggatgattgacttttggatgtataggtctttgcgcctttatcttattctgcaatgactctgagagagaggaagaataaattggaatggaagtt

SEQ ID NO: 61615 - DNA, 267 bp, Glycine max
gttatatatgagtgtagaactacactttgcgatctaactagcaccatgacctcgagggtgagacttatacttcatggaggtgaaattccaaaaaactatggtatataggtactcgaaatacctgtataactgtacttacactgattcatatgtattatgttaatcaagaatgtctatgaatcactatatcactgtgcgtattatacttgatatgatctatttatatacatttaattggttaccttttacgtaggaaccaagttcaat

SEQ ID NO: 61616 - DNA, 320 bp, Glycine max
gccacgcgtccgatttgctttgaaagcatgatttacagattcgatatgcttatgagtggctgacaaatactttatgggggagagactatgacatatttggtattgatgaacaacttcatattgttgaaaatgccagcaagcgttatgcaaggaaacatatttcagaattggatttccctttactacaagcccccttttgatctataaatcattcttctaaaatcattacagctagtgacttccaatatatatttccagaatccaaaccattgctaattcagttgtattcatcatggagtgaacgttgtgctcaatttttc

SEQ ID NO: 61617 - DNA, 181 bp, Glycine max
gttcgcggagaccttggtttcatctttcatttgctctcctttctatgctaccttcgtgtcgtttccaaacgctgctgtcatctactccttacattgtacttattcgatgaacaatttcgatgcttccaagttctgtgtaattattgccaatttttggatgaaaatcctgttcacatatatc

SEQ ID NO: 61618 - DNA, 110 bp, Glycine max
aaaaaaaaaaaaaaaaaaaaaaaaaggtcagccgatctaaaggatcacagctgtggatgcacatacatgcaacatggtagactattatataatgtaacctaaattcaatt

SEQ ID NO: 61619 - DNA, 149 bp, Glycine max
gacccaagcgtccgaagaaaaaaaaaaataaaaaaaaaaattaaataaaaaaaaaaaaaaaaaaaaaaaaaagagaggaaaaaaaaaaaaatgggaaaaaaaaaaaaaaataaaaaaaaaaaaaaaaaaaaaaaaaaaagtgataaaat

SEQ ID NO: 61620 - DNA, 424 bp, Glycine max
gatttttatctattatctattactgaagaaattaaaatgcattgccagatgccttcgaaaaaaaatgcattgccagaattgctcaatagtgtcatatattaagtttaaaacacatgattaagtatattatttgtttttgacacatttatttttaaacagctattgtcctaatctcagtgtttctcatatattataaatgaaaatgtttcaggtcttaaacttaactgagcttgaattaaatcgggtggatgtgcgtgtgggattatcaggtgcattatattatatggatggttcttcacaagcagtgcggcagttgcgtggtcttgtttcacaggttgcttctcctctaaagtgcatattctgtttcaatttgagatggctttttttgcatttgtgtcttccgagctattttttcttccttttg

SEQ ID NO: 61621 - DNA, 330 bp, Glycine max
gttgtaatgtctctggtcaactcaactgtgatgcacctcttgagtgtttgatgtgttttggcgcaatgttatacttggagctcctttttctttcttctatagtggacaagatatctttcattaagaaattattcaaaataatgtatcgatttttcattattgattgtataagttggaatgttaatttactttcatgtctcttggacaattttgtacgcctgcagaattagttgacttcattcttctgggatattaatttcttctggaaactagaatgggctttaaattttggatattgtgcttgcttttactgtatccatcttctttcac

SEQ ID NO: 61622 - DNA, 280 bp, Glycine max
cacacgcgtacattgacgcatgtgtatcaataccataactataggataaataggcggacatatataattaccacggaatatccaataatatatacatatatatagttctatatggcaatcacaactgtggggctcgaatactacaacataccatcatagtctgcaacatcctctatacctactagatatcagcggatgacgactgtagcactacactggcacctaatgaaaattcaaagactctgagttcaagatggactctggctgacacgctgaaact

SEQ ID NO: 61623 - DNA, 156 bp, Glycine max
aaaaaaaaaaaaaataaaaaaattaattaaaaaaaaaaacaaacaatataaaagaatcgaaacttatatacacatgcatgcaacatacctacatcttctatactttccaccttttttcatctcctctatcccacattttacatcttctttacttta

SEQ ID NO: 61624 - DNA, 234 bp, Glycine max
ctcactcattcgctctgtcactctctctctacacgactggctatacaaaaggtgctggactagctaactcactggattactcgtcacaatatagcacatcatatacctctgccctactcgctactctttttactaaagtgactctccacatccataacaagctcgcacctattaactaaactctcccaattcagatcctaatccgctccggcaacttatgctggcctagaccca

SEQ ID NO: 61625 - DNA, 333 bp, Glycine max
gttttcccttcgaggatttaatacagttgcatatctgggattcgaacacgagaccagtaggtaagctaaaacaacccgtgctggttgatctatgtgctcggtggttgggtctactttatttgttcctgtgggctaggactgcatctcttatgcgtatctgtctctggattctgctggttgcaaaggaatttctttcactctggccgctataacaaagtcaaactattctcgcacctctaggatggtgtggggttactattatggagtgatttggctttgtgtttattatttatggggggggtcttatattgtagatttttttttgtatttttt

SEQ ID NO: 61626 - DNA, 368 bp, Glycine max
gccgttagggggagccatcttcctcagctcggacctgaggccgcgcgcttctgctcgtccgggccccctgcggctgccccgtcgccaaactcgaggcctctggtcccaaaaaggccaaacgccataagaggaccccacccagtgcgactcttaatggaggaggagatcatcgtagattgactgagatgttaccaccactagcatctcatttatattatactaatcatttactgaaaaactactgatcagaaccaatttttaaaataaaaatatcaatatggactaaacaattcgttgagtagatatttgcactatgaaataaatatatataaacaatacaaagatcaaacaaaaataaactgctataa

SEQ ID NO: 61627 - DNA, 222 bp, Glycine max
cacgcacttgcaacagtacctctgaggtcctttcacaacccttacttctccatataagggtgatcgagtctacctgccgctggaccttggaccgtatatccctccttcacttcaacgtccaagaaatgtcctcttgaatgctacactgattcttaatgtgcttattgactatacatcgctgccaatggcatctacaataaacctagcatcgaagactatatc

SEQ ID NO: 61628 - DNA, 426 bp, Glycine max
aaaaaaaaaaaaaaaaaaaaaaaaaaataaaaaaaaaaaaaaaaaaaaaaaaaaaaaaggaaaggaaaaaaaaaaaaaaaaaaaagaaaaaaaaaaaaaaaaaaaaaaaaaaaaaaaaaaaaaaaaaaaaaaataaaaaaagggaggaataaaaaaaaaaaaaaattataaaatgacaaaaaaaaaaaaataaaagagcatataggaaaaaataaaaaaaatatgaaaaacgaaaaaattaaaaaaaataaaaagtaaaaaaaaaattaaggaaataaaaataaaacaataatgaaaaaaaagcaataaaggagaaagttatataaacaaaaaaagaactaaaaaagaaaattagaaaaaaggtataaaacattaaaaatgaaaaaatgaaaactaaaatgtatataaaaaaaaaaaataaaaaga

SEQ ID NO: 61629 - DNA, 240 bp, Glycine max
tctcgatattgtatatgaagatggtatagcaagatgctgaatgctagcattgcatggaaagaaattgcagggtgcagtgcagaacaatttattcctaatttcctatgctaatgtagtagcagtgttctttgagattaggtctgatttctgttaccaagtaatacgagaaggctgtactttatcctctccgttgaagggaaatataatggaaagtttactatttgacatttcaaaaaaata

SEQ ID NO: 61630 - DNA, 149 bp, Glycine max
ccgacgcgtccagggttttcagttatttaaacttgtcataacttttataacaggtaggtttaattgaaagcatattagcaaatacaacatcgatataatgatattaaaaataaaaataataaattatacaatttaaaaaaatataataa

SEQ ID NO: 61631 - DNA, 359 bp, Glycine max
gtttgcttttgctacccgtgcgtaaaccgataaacctctggagctagctactggggggttgtcatcaaatcgaccatggaaagcattgaaatggaggaagccgcattcggcatagacgaatccaacgatgacttgtgcagttcgatcctctctcgcttcgctaactccaccgacgaaacccaccaacacctctgcgccgtcatcggcgccatgtcgcatgagctcaaagacaacaaccaaccttccacacccttcgcctacttctgtgccgcacgcgtctctctcgacaaattcacctccgaacccaatcccccgagccacgtcatcgatgcgcttctcaccattctctctctcgccct

SEQ ID NO: 61632 - DNA, 347 bp, Glycine max
tcacacttatacaaaattctccaattagggagcttgttgagagttgctgcttggaagaaaggctgtttaatggtcaagattgtgatgtctgggaatgcagcagtcaaaaggagtgattgggcctcattggtacaagtgtttttaacaaacagcaacagtacagagcattttgatgcatgtaagtggacaaaatcagaaccacattcctgggaattgatcttcccaatagaggtatgtggtcctaataatggttttgaaatgtggagttctgagtgggcaaatcaaacttcatggcatttgagtttccttattgacaatcccaaacagtctacagttttagatattct

SEQ ID NO: 61633 - DNA, 375 bp, Glycine max
tgttgaaatgctactaagcagcatatagaagggaagtggagtaatttagtactaaagaaaattatttcaagtgaaattcagccagtgaaataaacaaaggtactgcaacgtttctaaatacactgttcatgtatccctcacgagttgaaaaaaagcaacattgcttctcaaatttaagacatctcaatctttatggaacaaagttaaagagcacaaatcatcgtggttccaagctcgaaaaaagaagactagtatttacaacacgcgtgtctaatccgtgatttataggacaaccaattcttcgcaaggcaacacactgtttggattatagctctaattccagtccacatgcagcaaattgggtcattcagacaa

SEQ ID NO: 61634 - DNA, 281 bp, Glycine max
cacgctccggtatgcaatattttatagagtttaaagcgatacctgttagctgcgatagccattcataagaaactggcagacaaatacacttacatccatctaagaaccattaatctgttcagaaaggttaacctggcatacacaattatatacgcaaagacagataatgtaggaactctaccattcaaatgtaatattgataaaatcacacacatatgatactactcaagtcttggaactttaatctgacctagcgcatataaagaagactctgtcatcac

SEQ ID NO: 61635 - DNA, 109 bp, Glycine max
gctttgtggaaattttgtacaagttcttcatccaaatgtgatgatacaaaacctgtgcgtatttttggtggggatacagttcctattagaaccgttgcctaggctccat

SEQ ID NO: 61636 - DNA, 80 bp, Glycine max
ggcgtgcacaatcgacttccgctgtcttgacgaaggttttggcggcaagacctggggggtcaatagagagcaagaggggc

SEQ ID NO: 61637 - DNA, 90 bp, Glycine max
ggattctacccgccgctcgatgggaattgcgcttcaaggcgtctcgtagggctaatgggcctcacgagggtcaccaacggcacgtgcctt

SEQ ID NO: 61638 - DNA, 171 bp, Glycine max
aattgcattggcaagaagacaggggggatttctttgtggttcttgggcttgaattttcagcaatgttggttactggtggagtttgtgttacaagagtgttaactgatccacttgcaccttagtcatttggggcatgggtgcagaatgttgctaacaatgacactggtgcaa

SEQ ID NO: 61639 - DNA, 248 bp, Glycine max
gcaaggcaaagaaaatgacagtggacatcattctagattttacaaaatcaaaggagcgaccagacatggctgtcatgatctaagatacttcaacgtgattggatcgaacccaaacatatgactaggagaagctccaaggccactttgtcaagggtctctgcaatgcacctactggtgcatgatttactggaggttgtgcgcatgaatgtgccacacattggtatgggggttggagttgaagcaggtga

SEQ ID NO: 61640 - DNA, 157 bp, Glycine max
ggaattggaagggttagggttcgggtttgggcgagttcttcgtcggacgaagcggggagtgcgcagtcgagagggacggagagagtgttctgggacggcggtgttggaaatgcatttggggggcttgagggacgtattgtgattgggcggtacagcg

SEQ ID NO: 61641 - DNA, 253 bp, Glycine max
gtccgattcccgctcgaccaccgtccgggcctcttgttctccaactacacaaggccgacacgaaaaacgaagaaaagccgtgccagaaccacgacacgcaagttatggcaaaaatcgcgattctcctggcgggatcctccgccaccacaaccaaaactgctgtcgccggagatcttgtctcttcgacatcaccacgggtagagggggagggaggaaggaggggggagggaagaatagagaccgtatgagcgac

SEQ ID NO: 61642 - DNA, 164 bp, Glycine max
gggacgcgtgcgcccacgcggacgaataagaagaaagagaaaaaaaaaaaaaaggggggaaaaaagaaggaaggaagggggaagaaagaagaagggaaagaaaaaaaagaaggagagaaaaaaggaagaaggaagaaagaaaaaagacacagagagaagggggg

SEQ ID NO: 61643 - DNA, 131 bp, Glycine max
gagacacatacgaacaggcaatggtccacgcacacgcatacgcggaaaaacacataggagatgccaaacagactaacgcaaaaacatgtagcaaaccacaagaaaacgatcgagggcgtcgagaaaatgaa

SEQ ID NO: 61644 - DNA, 382 bp, Glycine max
gtgaaatccttttccaaccacaaatagaatgtgagccacagtgagcttcaaattggtgatattcttccctggccttttacaatacaattggttttaaggtaaaaaacaacaaaaaaaaagaacaacaaaaaaaaaaaaaaaaaaaactaaaaaaaaaaaaaaaaaaaaaaaaaaaaaaaacaaaaaaaaaaggggcggcctcttaagaggacccatccttacatcccctggcttgcaacgtaataccttttttatagggtcccctaattcaaataacggggccgtatgttaacaacgccgtactgggaaaacccttggcttcccccaattaaatgccctagaagaaaatccccttttcccaaagggggtaattcccaaaaag

SEQ ID NO: 61645 - DNA, 173 bp, Glycine max
gggagacagagaaagagaaggagaaggagagggaaagagaaagaagggagagggaacgggaacgggaagagagagagaggtctcggaggagcaggagtcgaggccagagagaaagagagagagaacgggattgagacaccatagatagcaggagattaatggacaaaggagag

SEQ ID NO: 61646 - DNA, 70 bp, Glycine max
cagccctatccccatcgcaacttttctgaggaagttgctattcttgatggctactttggcaagcattgct

SEQ ID NO: 61647 - DNA, 243 bp, Glycine max
agatcatagaatatctgatggaaatcataatgtggaaagagcttctcctgagcgagcgcaagatctggattcttccagcccacctgtggtcgcgacctgttagagagatcttgggagaaagtgtagtacctcttcgaataagtgaaccacccaaaacaaacagtggacaggctgctaatggctcagcactcacacagagaactgcatctaccagtagcttagcatcgagcaatgggacccctg

SEQ ID NO: 61648 - DNA, 140 bp, Glycine max
aaaaaaaaaaaaaaaaaaaaaaaaaaaaaaaaaaaaaaaaaaaaaaaaaaaaaaaaggggaaaaaaaaaaaaaaagaaggaaaaaaaaaaaaaagaaaaaagaaaaaaaaaaaagggggggaagggggaaaggaccaaag

SEQ ID NO: 61649 - DNA, 142 bp, Glycine max
atccattcattgtcttaatgttttcaatttcttcctctttctccatccatttctttcggctcctctcaataacccctttctcaaattgttgcttatcaccatctcaaactcccaccaccaaatctcacccctatattctttc

SEQ ID NO: 61650 - DNA, 398 bp, Glycine max
ggaatctcctacgacccaattgaagtcagaagattctgctcaaaataataatagtctggtgagatcacaaggattaccagcagcatcggtttcaatgcagtacagagggaatgaaagtgacttcaaccattacaacaaggtaggtggttctgattccatgttcctggatgttgaaaccgggaatgtacattctctgcaattgaatcatccaaacataacgactgagaaaagatggagtggtgttccagggtcaatcccatctgctatgttcggcatggcaccatccatgcaagcaatgtctccatttgctaaaatggatggcggtcggtctattgcccatacaaacgaaggaagaatgattcaacaagaccaggaatggagccggtaatgatgcaaca

SEQ ID NO: 61651 - DNA, 86 bp, Glycine max
aagaccgaataaataatgctttggttgtaataaagcattatatatccttatttaggggatttagcgaaggaataataatgataata

SEQ ID NO: 61652 - DNA, 233 bp, Glycine max
aagtatgtgtcaggaggaagctataaacacagtcgcttacatggcacgaagaagggtgtgaaaggttgcatcaaactctcatggtctgacatgtaccaatccgccaattgacatcgcacaggcatgtgcggattctcgtaatcgctacatagacatgcgtggaatatagccacgatttcatctgaagacgttcttgctcacagctaagagatcttcaatgtatgtgataatga

SEQ ID NO: 61653 - DNA, 54 bp, Glycine max
ctgaagtttgaatgttcatttgaaagtttgcccaagcccacttgaaagatcact

SEQ ID NO: 61654 - DNA, 168 bp, Glycine max
gtcgaccacctccgccacctccgctttgaccttcagaggagctggctcacttactcagggggtcctgtgtactggagtcatattgccaggagggggaccgatttcatctgttggattattattggttgcggctcatctgaagggctctgaaatcatgctacaaggatt

SEQ ID NO: 61655 - DNA, 139 bp, Glycine max
aaaaaaaaaaaaaaaaaaaaaaaaaaaaaaaaaaaaaaaaaaaaaaaaaaaaaaaggggggaaaaaaaagtaaattggggaaaaaaaaataaaagaaaaaaagaaaaaaataaaaaagaagaaagtaaaataaaaaaaa

SEQ ID NO: 61656 - DNA, 261 bp, Glycine max
  unsure (1)..(261): unsure at all n locations
gccgtcttaattaagatgtaaaacgaaaaaatgtgtcgcctagccatatccgagagtggaacaagaagggagttgctcgaaaaattggaggtgnttcaagatcgaaaggcgagggacagatgcatggccagcaagatccttcggcattatcagccaaanttcttcccagcacggttaggtgagtgttgaggtgtctggaaaaagtacctgggaggagaagggttttcgccgaagcctgatgggggaagaaggaaattcgca

SEQ ID NO: 61657 - DNA, 87 bp, Glycine max
gaaaggcaagacatgaccactttattctaaggatgtttgtttaacacaaaacagttgagttcatgatgctgaaatgaaagcacatca

SEQ ID NO: 61658 - DNA, 51 bp, Glycine max
gccaattacccattcctgcgattgcgcttgttgaagatgagaatgaatgtg

SEQ ID NO: 61659 - DNA, 148 bp, Glycine max
cccacgcgtccggcggaggcagatcggagatctgtgatagatatagatggagggagggggggcccggcttgggcgggcctcgacccgctacagaccgggcacagtgttcactggaccggtgcggaagtggaagaagaaatggatccac

SEQ ID NO: 61660 - DNA, 160 bp, Glycine max
ctctcactcactttctttctctgtacaactaggaagctttctctctctaaaagcggggaggtcctccagcaccgcgacctccaatctccctctttgacacagagagagatactgtgtgtgagaccagtattcagtttatggattccttttctcttctaca

SEQ ID NO: 61661 - DNA, 196 bp, Glycine max
ccgactcgtccgaatgaagtcccattaaaattctccccttcccaatgccatgcgggggggccatatttaatatagggaaggttgaagttgtgacataacattagattaccatgcaatgcattataatctatttgacataattgcacatccaggtgcaatgccaacatattgctacacataacccttagaccagcat

SEQ ID NO: 61662 - DNA, 234 bp, Glycine max
  unsure (1)..(234): unsure at all n locations
gngagtcgacaaatatctgatggtgttatagcacatagtgtttctcaaggtacacctggacgcaaaactaggctaacctctaataagacagctggaaaggaaacttctcgaaaaggaaataaaggaaaaacaccaggaagacagtctgaaagaggggatagatcaactagtgtgtctgtgagcccatcacctgatttccaggtccaatcgaatgagatgcagcagtttgggcac

SEQ ID NO: 61663 - DNA, 166 bp, Glycine max
cggacgcgtccgcccaatcatgcggggtattgaaagcacgattcccaatgccatgccgggggcccatattcaatatagggggggttgatgcaggaacataacatgacattaccatgcaaggcattataatcgctctgacataatagcacaatcaagctggaatgcc

SEQ ID NO: 61664 - DNA, 176 bp, Glycine max
cacgcgtccgcattttctgcgggtacacgcactttctctatctacgtattcaaatttgaagtctagcggggacaatcgtcggcctttaggattaattaccatgtcaggggcacgggaactttttctagccgatagggattagggtgaagtcaggacgaatatgagggatttggaga

SEQ ID NO: 61665 - DNA, 145 bp, Glycine max
gaaacgcatgttggattatgagttatcatcctctgataatcaatcgcctctttttggggtctcacatatcatactcaagactctcatcacaatacatgaatcaagctcatatcgagtttcatcagagtcactataatgacgcatt

SEQ ID NO: 61666 - DNA, 296 bp, Glycine max
tgcactaactgagtcaggtccatctccgtcgtcgttcatcacactgttgcagctgttagtttccttcagtgtggcggacacttacgttttggccacaccgaaacgcatccgttccgatgacctggactgcagcgacgcgattaaactgctgatgcaccatggctacgcaatctctgcagtcgcgctacctaccacacagtcacagaacacatggctacgcgatctgtgaaattccgtaatgtggcggataccctaatgaagtattgttacgcaatccgtgagtttctgtgacttct

SEQ ID NO: 61667 - DNA, 189 bp, Glycine max
agaaaagagacacagggcaccgttttgagtaaatgagattcagtggaacacccagcagcttatacgcaacgcaacattattatctacagtttatgattcgtcacgtaagacagaagaaggtgttagggtgtcacctgagaacaaaatgttggggatgcttctctcttctcaaataaaaaccctattctt

SEQ ID NO: 61668 - DNA, 225 bp, Glycine max
aaaaaaaaacatattgcaagcacactttaacaagatttttgaaaataaacaacagggcggtcaacatggaaggaataaatgccaaaaaatttcccacggacgtaattgctgcgcggcacgaacgctctaggacggttgcttggaagtatgctgatcgaatcctacatttgttgaaccaacgtgtgatcgccaatatcgtgcatagcgggtcttgccctgtgtttc

SEQ ID NO: 61669 - DNA, 351 bp, Glycine max
aacaaattaacaagaaagtgaaattgatttgggttacttgttttcttgagtcattcttggttagggtcgtgaatcacttaagatacttagtacttgaatgtttaatatcctcactttgagagtgattgttagcgtttgacttgcttctttttgaataaataaatctatatagacttttgctttgaaagctcgtctcttaaattttcacatccacttttaagggtgtggctgcaccaaagtggttaataagcatgctgcggcatctaactagttagaaatttgtcctactgcatagatatccctgctgattatgtctgtattaaaagtaaatcattcttttgccaatacatc

SEQ ID NO: 61670 - DNA, 277 bp, Glycine max
aaaaaaaaaaaaaaaaaataaaataaattaaaaaaaaaaaaaaaaattaaataataaaaagaaaaaaaaaaaaaataaaaaaaaaaaaattaaaaataaaatgggaggatcgttctaagtgttccagtgttagttacccttgaatggggcttctttttttttggatacaggtatttaaattcattgctattggcggttgttttttatattggggcctggaaaatccatggcgttgccgaactttttagctttgctagcacttgcaaatttttgtagt

SEQ ID NO: 61671 - DNA, 417 bp, Glycine max
aaaaaaaaaaaaaaaaaaaaaaaaaaattataaaaaaaaaaaaaaaaaaaaaaaaaaaaaaaaaaaaaaaaaaaaaaaaaaaaaaaaaaaaaaaaaaaaaaaaatttaaaaaaaaaaaaaaaaaagggccgccctttttaagggttcaagttttccttccccttctttccaactttttatttttttttttggtcccctaaatttaatttatttgccctttttttaaaaacttcttatttggaaaacccttgcttttcccaattttattccctttgaacaatttccctttttcccaatttgctttattaccaaaaggccccgccccattcccttttccaaaaatttccccaccttaattgccaattggacccccccttttaacggccttttaaccccgccggttttggtgtttccccc

SEQ ID NO: 61672 - DNA, 314 bp, Glycine max
tttgaaggatttgttgaggatgctgttgaatccaccacgggagaccattaaagatgatgcaatgattcagatagagatgtctgtgccatggagaggcaaaagtaaattacacagacgaaactccaattctttgccaggtgagaagctcgggtcaaaagggtgcggaaaaactggcaaggtccaaattttgtgaattactaccatttatatacatatctgtggtatacatggaaggaaataagggttctaaatgcaattcagtggggaaaaggcaaatttttagggagtaaaaaaaaataaaaattaaggaaaaa

SEQ ID NO: 61673 - DNA, 440 bp, Glycine max
gtgatttgttacatcttagtaaattgatagatccttcaatctgttcttgttattgtgggtaacatttagcttccttctatggctggatatagtaatgtcacacagatctgtacttttttttctgtttgctttcattcgttttcagttcaatttgtaactaaaatggatagatctgagcactgatgatacagaataggatcaatttttcaagtgggtgctgctgaacagtgtaagtttttcaacggacaattttaatttttccctggctttgatatctcacatttgatagctgaaaccctaaatttcctgcacaataaaccaaacaatgtacaagatgtttccttttgaactctttaagtttcgatgttaattaatctattagctagaagaaccaaaactctatcatttatagttacagttcttcaaggataacctattag

SEQ ID NO: 61674 - DNA, 435 bp, Glycine max
  unsure (1)..(435): unsure at all n locations
ctctgtctcagtgtgtctattcctttgttattccatgattaaaaagcttcgttttttgcattaatcttattccaactatatctcgactgacaaaataaaacattaatattgctttgaggtcgtggtgcacagctgtggtaattggtgaatcttgcataattggtaattattggtatccgagataatttcttaacattttagtggaaatgctacttcaacctccaatgttactgtaaattagaattatgagcacttatttttatagccaactggttctttagtcaattntagtggagttatccttggaaattttaatgattgtgatgtgatagatntcttggtactgactactgagttgtacatgacgaaaggtatgaagaaacccaatggattatcccacanattacagaatgagatgggaaatattaaagctaa

SEQ ID NO: 61675 - DNA, 364 bp, Glycine max
ctttttgattcctaaattctctaaaattcgaaattctaatttcgttaggggaaagagattgtttgtgtgtgagtggctatggtggctggcgtggtggctatggtggtgggcgtggtggctacggaggttggggtggtggctttggccctaacgaacataatgaggctgggattgatgctagccctcacaactaagaaggaaacttgctaaagcttatataggatttaagttatcgtaataaataaaacttcattggaagggtagttataatagatgtggagatctttcttcgctctggtcatataaaggaataatacttttctattaatttccttatctttgtatctctctgttcctttttgct

SEQ ID NO: 61676 - DNA, 269 bp, Glycine max
cttgagcttctccttctctctaacctaatttctgctccgacgacaacaccaacaccgaagccaatgacggcggcggcgacaccaccgcaacctgctttcattcccaccaaaggattgggaagtgtagtttgagttgatttcagcttctcctgagcaacaatgcgaaacattcagcctcatcgattttccactcttatcgaaccacccaacaaaaccccaacctcgaagccattcttccttgccatacctcaccgaaccattcccgagcc

SEQ ID NO: 61677 - DNA, 355 bp, Glycine max
cttgagcatttcctactctctaacctttttgctgattcgacgacaacaccaacagcggacctattgacggctgctgctacaccactgaaacctgctgtcattcacaccaaaagataggaaaatgtagttcgagatgattgcagctactggagcgcatcaatgcaaaacattaatcctaatcgacattccactcttattgaaccacccaacataatcacaacctcgaaaccattctacattgcaatacctgatcgagccattgctgatactcgaggccaggaccttaatttcatttgcgtcaaacaccagcacgacatcgactatgactggaacatgcttctcccttgatccacct

SEQ ID NO: 61678 - DNA, 159 bp, Glycine max
aaaaaaaaaaaaaaaaaaaaaaaaaaaataaaaaaaaaataaaaaaaaaaaaaaaaaaagaaaaaaaaagaaaaaaaaaaaaaaaaaaaaaaaaaaaaaaaaaagaaaaagaggaaggggggtctaagttttttaggtttgattgctagtgctggggac

SEQ ID NO: 61679 - DNA, 449 bp, Glycine max
cttaaactccttactacattctccttctcacatgaaatggatacatcctagttcttttttgggatcaataaggacaggctggaaggatccaaaaccaaccccactcaccattattattattattattatcagggcagaaacaaacacaacactaccctctccaataaagtgtatttctgtacacaaaactcttcagtcttaaccaaggtagtagctagcagcagaaaaattaaaattaaaaattaaaaaaattaaagagacttacaaaaagcaaaaaaaaggacgaggattgaattctttcttgccttttctttttccttgcagactctgctaagcatctttggttcctcacttttccattcttttatctgccttcccactccttcttcattcctcttcgaattttctcttcttttttttcaaccaaattatcttggtttgagcttctc

SEQ ID NO: 61680 - DNA, 280 bp, Glycine max
agcacaacatgacgtgtacgattctatgtccgacacgagcctatttcattcacagtaacttctaacgacgattagctactattcattgctatttccagattctgattcttgacgtcagactatggaatgggaacccatgtgatgtgacatcaagactgcttggtagatcgtattatggatcttacaactgtatcttcctgccgcacgagttccggcacttactgtaattattatgactacgactacgacagctaccatgttgtctcttgctggtggctct

SEQ ID NO: 61681 - DNA, 348 bp, Glycine max
aaaaaaaaaaaaaaaaaaaaaaaaaaaaaaaaaaaaaaaaaaaaaaaaaaaaaaaaaaaaaaaaaaaaaaaaaaaaaaaaaaaaaaaaaaaagaaaaaaaaaaaaaaaaaaaaaaaaaaaaaaggccaaaataaaaaaaaatgaaaagaaaaaaaaaaaagcaaaaaaaaaaaaaaaaattgccgaaagcaaaaaaaaagtactgacgtacaaaaagctgaatacaacacagatatagagaggacaacgaaccaggtactgagtgtacgtggtggcatgcacatattggtaaagacaattggcatttacaccataacgctagactaagaaagctattggatcagccat

SEQ ID NO: 61682 - DNA, 54 bp, Glycine max
ctttttttttgtcatcttttaaattttaatcagtgtgaattttgaattgactcc

SEQ ID NO: 61683 - DNA, 124 bp, Glycine max
cccacgcgttcgcccacgcgttcgcccacgcgtccggttgtaacattttatggcaaatgcagcagcagctttatgattatcccatttataattggaagcaaaccaatccaatccttgatccttc

SEQ ID NO: 61684 - DNA, 187 bp, Glycine max
aaaaaaaaaaaaaaaaaaaaaaaaaaaaaaaaaaaaaaaaaaaaaaaaaaaaaaaaaaaaaaaaaaaaaaaaaaaaaaaaaaaaaaaaaaaaaaaaaaaaaaaaaaaaataaagagaaaagtaaataaaaaaaagaagacgaaaagaaaacaaaaaaaaagcatataaaaaccaagacgaaaaacaa

SEQ ID NO: 61685 - DNA, 440 bp, Glycine max
cgaagttcaaggtgccggatttcgataagtacaaggacactacttgccccaagaatcacctgaagatgtacaacaggaaaatgggggcatactcaaaaaatgaaaaattgttgatgcatttcttccaagaaagtcttattggggcagtcgtcacctggtatactaatctggaaccttcccgagtccattcttggaaggacctaatgattgccttcattaggcggtatcagtagaattctgatatggctccgaatagaatgcagctaaagaacatgtgtaagagggagcatgaatctttcaaagaacaatgatagtagatgcgttaccagtgttctactatgagaagatggtggattacactccttcaagctttgccgatttagttttcgttggtgaaaggatcaaagtaggcctaaaaagaggcaaatttgattatgctg

SEQ ID NO: 61686 - DNA, 431 bp, Glycine max
tgaaaatcttctttttccgagtcacaatgtcttaaaatatatatttgcaggggtgcttcgctttgtttaggtggtcttcatccagatatgattgttgatcaggaacagcatcttaagactgagaggagagaataccactcacacatacataattatcacaatgatatgataggatttctatctaagttgaagaagagctggcaaagctgtaaagatccagaaaaggagattgcgcaaaagatatggaggtcaaaacatgtagagaaaagaatgccctcaaaagtgattgaatctagagtctatgatcatgatgggaatgttacagggacatctgattcatgctcctgggatgcagaggagaaagcatgtagtagcgacaaccaaatttcctcactgagaaaagacaatatacttcaaagaagggtgcttga

SEQ ID NO: 61687 - DNA, 243 bp, Glycine max
ctcacgcgttgctcaacactccctcccatgcgttctcctgcaatccgctgcaatggaaggtcaggcttccctcaaggctccctatccggccaccaccatactctcttacagacccagaacctctattcttccatcccaagccagctctcgcaaaataagctccacactatccttcactgtccatgcccaattcgaatctgatgatggctcatctagattatccacatcacatgaatctgtgac

SEQ ID NO: 61688 - DNA, 227 bp, Glycine max
gccacacattctttcaatcctccgaagaatgcacagaccataaggaacctagtttaaataacacctgaacaaattgaaactgtcaactgaagacttgcaaaaaaaggatacacatctgaaaataacattcatgatcatactgaagacatttatagatctatcgacatgccaacattactcagactattaccatttccttattcaggcatgctgtaatgtcatacatt

SEQ ID NO: 61689 - DNA, 233 bp, Glycine max
accgtccggaaggatggaagaacttacacggagggtccggatggaggacatgctggatcaacgcgcgaacttccctccgaagaaatgactacgaaaccaacatagggacaagatgcaaccacttagaacaaaccctagactattatacccgcttatgatcaataagcaatatcgcctgtgattctatgaacatagccgattctaatgccaatgctgcaacggctagggttctc

SEQ ID NO: 61690 - DNA, 433 bp, Glycine max
  unsure (1)..(433): unsure at all n locations
gtttttctcagtctgcactttatatgagaacatattttgatggtatagaacatatgaaaagacttaacaccatctgttaaaataatgactcaatgccgacttcgacttacgaggatagtttcagtgacaaaaaataagaagaaaaaaatatatcattgtttgtaatataatgttaacctcccaccattttctggcccccagtgtgcttttcaagtcaaacaagaaaaatgtatatattttatttgaagttttttgttgcttccatttgttctggagaataaagaaaacaagtagtccaacaaatagcacgaggtcaaacaagaatgcgctttgtgggggcgaccaanatctgaacttctattatttctagtttgctaattgtatgtcaagtactttcattcttttctctctgggtataagaatttaatacata

SEQ ID NO: 61691 - DNA, 234 bp, Glycine max
aaaaaaaaaaaaacaaaaaaaaaaaaaataaataaaacaaaaaaaaaaaaacaaaaaaaagaaaataaaaaacagatcaaaaacaaaaactattaaaatacttaaagaaaaaaaaaccaaaataataacagaaaatatatgcaatgaattaataaaaacctaaaacaaaaaaaacacaatgaaactaaaagacaataaaacaattagatgaataaacgaaagggaaccgtaagt

SEQ ID NO: 61692 - DNA, 403 bp, Glycine max
cccacgcgtccgaaaaaaaaaaaaaaaaaaaaaaaaaaaaaaaaaaaaaaaaaaaaaaaaaaaaaaaaaaaaaaaaaaaaaaaaaaaaaaaaaaaaaaaaaaaaaaaaaaaaaaaaaaaaaaaaaaaaaaaaaaaggggcggcctttaaaagaaccaaagttaacgtccccgtaaatgcaacgaaaaaccttttttaaagggaaactaaaataaaattaatgggccgaaatataaaaagttgggaaagggaaaaaccttggcataaccaaattaaatcgcttggaagaaaatcccctttaagccagttgcggaaaaaccaaaaagcccgaaacgaatcccatttccaaaaagtgcccaacctaaaagggaaaaggaaacccccctttaacgggacataaaacc

SEQ ID NO: 61693 - DNA, 146 bp, Glycine max
gcaagaagtgaaaaaataaaaaaaaattaaaaaaaaaaaaaaaaaaaaaaaaaaaaaaaggacaaaagatataaaagataacaaaattacttacgcttacttgaaactatatatcttgttatataatgtcaccgtaaattgaatta

SEQ ID NO: 61694 - DNA, 241 bp, Glycine max
cccatcgtgcgtcttttataaaattttgacacacactttagggtgataggggcttgatgctgacagaatatgatcaaggatataaacaagaatatgtatgatattgacaccaagtaagtgaacaccttaatcatgtgagtctttatgtagagatgctttagaatttgttgatgatttatattgctaatgactatggcatgcttgcaactaatactattactgagacatacatgtaatgtgc

SEQ ID NO: 61695 - DNA, 415 bp, Glycine max
atcacatctactgctctctgagaacaataccatacactcctaactctctctccgttgacttatcttctcacacctccatggcccacacttgcattacatacgcagatgccggcatggacgctgaccaacgccgactcatgttcgaagacaagttcactgctgtccttattcattcggtgatgaatatacttatttggtgcctgattcattatctgccattgtaattcgcgtcacctgcggttgtgaggattcatagatcgattgatcgatcgatctgcgagacgggtgtagagactggaaatgcggatctgcgtgataagttgggctgatcatttttcggtcaactaattcattgatgatcatcatatcaaaattgactgtcgtcggattgcaatggcatgtgaagcctcgattc

SEQ ID NO: 61696 - DNA, 411 bp, Glycine max
cccacgcgtccggttaaactaataaaataatcataaaggtggtggaggggtgtgtgcgctcacgcgcatgacagagcatacataacagggcataggaaatatcatatatactatatattatagtctagtttgcactattttaatggtggccgactaccttaattccacatgcttaaatttggcacctctttattatataaccgtttcattctgaatagcatgtcaaagggtgttctgagaaggaatcacacaagagaaattgtgcgtggatcttggcaatttacatttggtacaaaaatagtaggaaagaaacccatagttaatatagtaacaatgtcctggctaacgaaggggaaccaaagggggtcaggttagtttatgcggttcacggaaagtcatggcaaccgtggt

SEQ ID NO: 61697 - DNA, 402 bp, Glycine max
acggtgctcactccgttcactatctctctcctttgcgcttgctttctgaactgtcgatttgcgttgcattcagctcattttcggatatgagttcattgtcagattagctgatttagtttcctctggactaaagtgttgagaacatgcgtgaactttgcctgattttgatttacattgctactgtttatgcctttctgcatgtttcgatgcctacaactgaatctatactgtttcttttaacaggtttgcatgcatgtgttcgttttggactttatgttcgtttgcatgcatgtgttcaaaaacatttacctttgtgtctatctgttatgtgtattgttttggactcttcattgtccttcatgtttaaagctttgcctttgtagttggttttctatgagtata

SEQ ID NO: 61698 - DNA, 418 bp, Glycine max
tcgtccacgcgttcggccacgcgtccggccacgcgttcgaaaactggaaatgtgggtgaagggcatcaaaatagcaattggaatacaaccaaggcttctgaaggggagtcttctggttggaacaatatccaaaagtcaaatgaaacttcatcagctggatggggtggtggcaatgggtttaaaagtggatcagatgaaggaaacttgaattctacttggagtggctggaagtctggatcaagtggagtcaaacaagctgggaaccctgctggtacttcagatattgatgctaatcaggatgctgggtggaaaaacaaaccaaataaggatgggagtgagtcatctggttgggaaacaaaaaacaattggaatgctccagtctcttcatcaaatgataaagtggaaaaaggtaatgatc

SEQ ID NO: 61699 - DNA, 395 bp, Glycine max
ataaaagattaaataatcgtggagacgtagcatcaccgttggtggtagctgcacacagcgatattatattatgcagatagtacagtactaataataatgtataaaatactatgtgaagaagcaagcaccaacgacaatacactaattcagaggatgtcagttttcaggatgatgtctcatctccaacatgattaccattcacggagagtacagacccttactcaaaaccgtggaagatagtaaatctgaaacctgatgcattggattcatatacgaaagatggaaccatatggcctcaatcagcaatatgtaacgcgttatgtatcgtggaccagctgaggaaacgggttaggactgttcactgcaaaagcatccatcttgggttgatctgacat

SEQ ID NO: 61700 - DNA, 420 bp, Glycine max
cggacgcgtgggcggacgcgtgggcggtacgcgtgaccaacgtacgcgttccacacaaggatattatattattcagatggaacaatactaataataatgtataaaatactatttcaagacacaagcaccaacatcaatacatctaattcagagactttcagttttcacccatcatttctcatctccaacatcttcactcattaccgagatacagacccttactcaaaaccctttaacataataaatctgaaacctcatgcattggatttaaatacgtataatggaactatcttgcctcgattagcaatatgatacttgataactatcatggaccaactgaggaaactggttagtgctgttcactccacatatttccatcttgggttgatctgataatgccattgataaatattgaaaact

SEQ ID NO: 61701 - DNA, 52 bp, Glycine max
agtctgccccagtcattctccacacctctttccgatacgctaccccttgctg

SEQ ID NO: 61702 - DNA, 227 bp, Glycine max
gccacacgttcggctggccagatcaaagtacaatgtgacgcgttataaacagcttgtacatgtgctatagcttctaaccgatctgagatggctgaataggggatagagtgctatgctgtacttagtgaagaggatatgatgagctacataatcttgaaagttgcctgtgcttgatacaatgcaaggtgcaaggtcaatttgcacgtatactatcaggcgtatacatt

SEQ ID NO: 61703 - DNA, 224 bp, Glycine max
gattatttgaaaacagaaaaggtgggagtgattgaaggttgatgatggatgagaaagagtggcaggtaaagacaaagcagaatttaggttttagggttagtttatttccaattctcaatggatttgatgttaacattccctcagttatccgtggaaaggcgtagaaacccatagcttttacataccctctgtctgctatctgctatacagccacagattttatc

SEQ ID NO: 61704 - DNA, 444 bp, Glycine max
ctcacccgcacccgctacctccgatctcccgccgtcgccgccgcatcccgttcccgatcttccacctgtttcagtcgcgaaccgtcgcgccaacagcgctttttcgccgcgcattccagcaggtcaccaccgcgccacacaaccatacccactgcgccgcccatttccggagaagtatgaacagaagtctctctggtacacttggagcaaatcttgagagaagaggagctcttaactcttgagcccactttaacgccacagcacggacggtgatagggttttgtggaattttctgggaaaaaatttcctagaaaatggacgatggcatgcaattgcaaatctcccttgacaagctaccaatcaagcgcttggattctattgaagaaaatggaattgaacgattcccacttgacgtggattacgatgagaagcggctctccctaa

SEQ ID NO: 61705 - DNA, 420 bp, Glycine max
  unsure (1)..(420): unsure at all n locations
attcccccagccttgaagagcataacctatcttcatctgttcttgatttgagttaaccaggattcaggcctgaggctgaactaatgcgatttgagtatttgataagaatgacacatttatgacagtgcccaaaaaatatagtaaattaataactagtgttagtaattaataataaaacacaaaaattaagataatattagtctctaaacattgctcggcaagaagttgtgattgtttgtgtataagatggagtttaactgtcatgaaggagacttttaaagtttgtttcattgaatgggagttgatttaatgatagttaaacttagttatactgaaggtacacatctnctttttgtcttgttgatccatctttcaaggtgaaatgcanaacatcctcggcttccaattatacatgtaaaa

SEQ ID NO: 61706 - DNA, 410 bp, Glycine max
cacacgcactagatggactatattgcggttataaccttcttcatatatcgcttgttatgagaagctctagaaatgatcacaggcacctaaggttgacattgtgttctagatccttcactcaaatctgacactccgacaacgctgatagagctgctagcttcagatatcaccccaccaacactgacgctggtggtaacagagatcacatttacacgcggcaccatacctgcattgactacatcattgacactaatatacagatttctagtattatatacgacagtgacactactagacatcatgaggctacactgggttatcaaggagacacagagatacagcatgtgctctaccggtgtctatggtataggctcctaggagcggcaccatgaatcatccgaatgctaatc

SEQ ID NO: 61707 - DNA, 228 bp, Glycine max
cccacgcgtccgcccacgcgtccggatatagttagttttggtaggaataatatacggtgggagaaagctgggattagcttcactttgaaggctcttcaaactgaaccccttagaaaagaaaagaagccttcttggattggaaccagatcccaaatggcaaatgggttaagaatatttggggggcttcccctaaatgccatttcttaagccttgcatttaattaaccat

SEQ ID NO: 61708 - DNA, 361 bp, Glycine max
ccacgcgtccgcacggatttaattttgagtgacggccttggaccatccaaggtaatgtttcaatggaaatcttaatcttgaaccggaaggtttaaattttgtctcagtcgatggtgtttatttgggttttgtattacctcatcacatcagagagtggtggagtgacagaacaagtgatgtgcatgctttcaatttcgaactccactagggacagatgtgttgaggttttggataaagctatttcaggagtccttttggccactgctgagattgcattttttcaagggtggcttacttggcttttggttaagttgaacaaaatacatttcttgtacatggtaactgtgcttgcattcataag

SEQ ID NO: 61709 - DNA, 444 bp, Glycine max
cgcaaatcacgtgatcgggaacgagtttttagtggtcatagtcgggaaagagatctgagtccgcataggagacatgagcgttctcattcacattcacattctcgttctcgatcttgttcacgttctcgatccccgtctcattcccattcccggtctcaatctcgtggatatgatgaccatccaagatctaggtccccccgaggtcgaagccatggtcgaagttatagggaagatagctatactgacagtcgatatgacaaaagtgaaagacgtagggatcgtgatgataaacgtcagtgggagcattattctgtggccccatctgcaactgttgttgtgaaaggtctttcacagaagacaactgaagaagatctataccaaatccttgctgaatgtggtcccctccgtcatgttcgtgttataaaggagagaaattctggtgtc

SEQ ID NO: 61710 - DNA, 307 bp, Glycine max
aacaaatactatgaacaaacctttatacgagcaatatggtcgaagataacacatgatatgtgaatccaagttgataatgctaatagcggagctaataccttaaaggatgagagtgttatacatcatgattgattgattgtgtgctcaaggtcatattaattaatataaatagttgatatccaatgttgaagaacctgtgattaacttatctatctatttaagcgtagctgttgatgggctcattaaaagttgcttgatgagatagccgatgaacttaatgaacacatagtgaagattttgaaactga

SEQ ID NO: 61711 - DNA, 231 bp, Glycine max
cccacgcgtccgcccacgcgtccgacgtatagacatcgacttgaaatgacactatatatctcaagcatttcacacactagcagagccagtctgactatgggagaagagaggaatctacatgcggaggttagaggctgatacagagcctcatcattctcggtgaaccagtaccaatcttctattatcaggggccatgcctcaagacagtactaaccaggatgtcgcatgact

SEQ ID NO: 61712 - DNA, 413 bp, Glycine max
cccacgcgtccgcccacgcgtccgcccacgcgttcggctatacttgttccttttgaaggttagaagtgctacaatacaaacaatggcagctactcaggaagatgtgaagcttttgggtattgtgggaagcccatttgtgtgcagggtccagattgcccttaagttgaagggagttgaatacaaatttttggaagaaaatttgggcaacaagagtgatttgcttctcaaatacaaccctgttcacaagaaggttccagtgtttgttcacaatgagaagcccatagcagagtctcttgtgattgtggaatacattgatgagacatggaagaacaaccccatcttaccttgtgatccttaccaaagagtcttggctcgtttctggtccaatttcattgatgataatattgtgggtg

SEQ ID NO: 61713 - DNA, 384 bp, Glycine max
cccacgcgtccgcaaaaggagtgattgttcctcattggtacaagtgtttttaacaaacagcaacagtacagagcattttgatgcatgtaagtggacaaaatcggaaccacattcctgggaattgatcttcccaatagaggtatgtggtcctaataatggttttgaaatgtggagttctgagtgggcaaatcaaacttcatggcatttgagtttccttattgacaatcccaaacagtctacagtttttgatattctcttgggaatttctcaagattttgaaattgctgggaatactcttatgccagctttttctgttccacagggctatgccagatcttctgaaaatgcggaatcctttgcatgatctggaatttgtgctgtctt

SEQ ID NO: 61714 - DNA, 94 bp, Glycine max
aaaaaaaaaataaaattaaaaattaaatttaaaaaaaaaaaaaaaaaaaaaaaaagaaagaaaaaaaaaaaaaaaaaaaaaaaaaaaaaaatta

SEQ ID NO: 61715 - DNA, 138 bp, Glycine max
cacacgcgtggcgagtatatgatccggttctaaattatcataaaatataacttgttgaggatatgagcactcgtgaacgagcgaaactatatctcaaacatggatcgtcaccactactaattaactcgattaccataa

SEQ ID NO: 61716 - DNA, 265 bp, Glycine max
gtcttcttttcagaggacttcccgttctgatgggcttcctttggatgagttgcgtcgccggagaatcgacagatttggaggcagctgatcgtggttttcaggtcactgcaggatctggtaaataataccattggatatggccattgagatttagatttcacacatgttagctgttgaattataatgactttgcaatgaatgttttcatgctatgctagattgatttggcattttcttaaataaaatttggatacttttttctatt

SEQ ID NO: 61717 - DNA, 457 bp, Glycine max
  unsure (1)..(457): unsure at all n locations
attttcgctttggttttggttcagtacgcaaccatggggttttcaggccaatggtacgattttctaatattattgttgttttctaggaattcccttttctaatccttactcaacgttcaacatgtggtgcagagtggtaattggttagcagtgttagaaagagagttggaggaaaggctgcgtacacaacctcaacagacaccaaagatgaaagcgtatgcacctgcggctgattacgggtacgttcaccaccgacaacatgggaagtctgacaagttcatcaagcaatccttcttcaggaaagtggcgcacgtgcaagaccgtagctaccctaaccccattctcagagatgcctatgcttatacccctcgtgtcgatccctcgcacgtgtaactagacaattagtctagtttttgcttttgttacactggataaataaatnaaatagaacaacttc

SEQ ID NO: 61718 - DNA, 442 bp, Glycine max
acaaaaactgcaaaggttgaaatatgattgcggcggctcgcgcttccttctatggaccatttcgggtgtaaactgtgccgatgactgttcttctgagaaggagatcgtcatgcatctgtgtgcacttcgatttgcgttcatgatccggcacctgcttagacgatcctgtaactacttctgccgtcactgcacttgaccctaccgcaccacaattagggttatctatgtattgcatcaaagattgccttataatacaagtacccgattcttattgtatcgcatgccgacgagtcttctttctcttcgaatctttctggctggtacattctgaagcacttcatagttgcgtgggtcatactgatgcatatatcacctggatgatctggatggccaatcccacaatgccagagtataggtgtcaacccactgacgttgagctgat

SEQ ID NO: 61719 - DNA, 283 bp, Glycine max
gagcaaacagcaacagagttatgcggagactgcggcttcgaaaaggggaactttttcaccgagtatcgacctgatttgaaaaaaacgacggggaactccgacgaccatactggccctggacccctacatcaacagcaccattgtttgatttcctcgacatgttcgatctcggtcgctgcttcctcatttgtaaactctggaattgccatcgtgagttccagtcgaatcgaaaattctgtgacacgaagattcacaagtcttgtgctgaatttaccaaaaagcc

SEQ ID NO: 61720 - DNA, 334 bp, Glycine max
cacacacacacagacccacagacccacacttaacacatgcacctaaccacacttggttaatctcttcttcaaggcactatgtaataactggcatttctcgaatgttctgtatgtgattggatccattaaaaggttttttgagtctaaagttattatgtaagtggacaaaaaaaaaaaaaaaaaaaaaaaaaaaaaaaaaaaaaaaaaaaaaaaaaaaaaaaaaaaaaaaaaaaaaaaaaaaaaaaaaaaaaaaaaaaaaaaaaataaaatataaaaaaaaaaaaacaaaaaaagaaataacaaaaaaataatgtaccctaaaattaaattaaat

SEQ ID NO: 61721 - DNA, 202 bp, Glycine max
gaggaaaagcagtttggattatgactagcctctttttttcaaagctggccatgttgtttatttcatcaaactccgttgtatgggtctcagcagttctcttggtggctgattgttcttcattgcctctttacagggatagatccaaaacaacttctaagattaaaccatggcaagggtatgcacatgcctgtgtaattgactt

SEQ ID NO: 61722 - DNA, 185 bp, Glycine max
gtggatatggagctgcgcctatgcgaagcctcgattttcaagatgaggcactaggtgctcatgcttagaactgtgttgagactgatgcagatggatttttgagtggatattggccttagaaatccacaactaccgcgtgataatagacaacgataaagctttcatcgcggtgaaagaattttcat

SEQ ID NO: 61723 - DNA, 220 bp, Glycine max
gtgatgattcctataatatacaacatcatctataaagtagatgttgaatgaaataagtgagatacttaggattatgatgtatgctgtcaggatcaaaattgagatcaaagcgaatcatgattctaatgttgcatggcaaatgtgaactaatcgtggtccagatcatatcatggactgtaatgactggaatctttacattgatagaaatgtatgacatcaa

SEQ ID NO: 61724 - DNA, 374 bp, Glycine max
  unsure (1)..(374): unsure at all n locations
attctttctttcttntgtatttgaatctttttttttcttctctctgaattctcttttgttttctagtgctggtgtgtgatttgaaggaggaattttaaagtggcttgtgggtttagaattctgtgactaacgcgttctgggtcaccgtgccctcccttgggttccgctgctagtgttttttttgtgcaagtaaacagataaagttggtagctttattggaatatgatgaaacttggcactaccctttattgctcttgctaatttttaacctttgctggttctgggtcttcgagtatttcactggaaattttcaatttttggggggcttctgcttctggttttggtaaattctgagttgccttttgagggaactc

SEQ ID NO: 61725 - DNA, 334 bp, Glycine max
aaaaaaaataaaaataaaaattaaaaattataaaaaaaaaaaaaaaaaaaaaatgataaaaaagaaaaaaaataaaatataaaaaaataaattaataataaatgaatgaataatataatattataaatatattgaagtctttaatggtgtatgatgatattatcgactgttagaaattatataagaataatctggatatggtttacagatcatatacacatgtaactgagtgtcaatacttctgctagtacaagtaacaagggtttacggattagaagacatatttactatataaatggtacataaattattcaatttgtaagagaaacaatat

SEQ ID NO: 61726 - DNA, 411 bp, Glycine max
agcacgcattcgattacatgagctcagatgttgtcaccgttgacatctgtgtgtacgactaggagcttatggcatgatttcgttgaagtgtaaagtacggtgctggaatctgccatggagagtatgacttccactgtggatgcttacaatgaactgaaaagatcgatgacagaatctacttgacgatgtcatagctcgagaagaacatttatgaaacataccatggctgatgactctagaccaataggatcactgatgtgtacactgaacctctaaacatatatgccatgagtcatctctttcatagcgtacttgtcaagtgaatggcatacgattgtggaatctgactggtcatttggtcatgactaatattataatacaccaatcttataattaactatatattgcact

SEQ ID NO: 61727 - DNA, 421 bp, Glycine max
aagaaataaaagggaagaagggaagtgggaaaaacagaatagaaaggattggaagagatgagaaaaacagagagatcaaagaactccttccaaaaactacttacagaaagaggatccctatcacttattatctcaactcgtgctccatgaaatctgaagatctgattcatgcaatgttgagcaagtgttgctattggatatggattcgaaagagcaacaaaatgggcatacttgctcttataagatcattgatgacccaaatagtatctttgccatggcagtaaacaaaaattctgggctctatgttatcttctttttctgaaattaaagttttcaatgtttttgaagaaatcttgggggaaaaaggaatattcttggctatcccagctgctaacttctcttttgggctgggatctactac

SEQ ID NO: 61728 - DNA, 411 bp, Glycine max
cacacgcttactgttggacatcaataatttatgtgaatggagtattagttatttagtgtagatcaaatgatgtgcgtacaaagctataggactatgtacgttcaatggccatccatttggtagtccactttcaatgacgaataagtaacattttaataccagattattgtgagttttggttggaatcctgagaagtcttggtccttatagcgttagcataagttagttcgagcattaaacttgaatttaattcttacgtctgcaaatactctgaagcatcagaagacgaatggcatgagccatgcaaattttggccaacatcatatcaccccaggacttacaacattgatggcattactggatttagcgaggatgactcccaatcagttatgaagtttatgcaatcagctg

SEQ ID NO: 61729 - DNA, 446 bp, Glycine max
agcgatcgctgataagagagataccaacatgaaaagaaaaaaagaagagttgagattccctttgaagaaaagatggcatcccatatgcaaagctatgaagctggtcaaactaagggccgaactgaggtaacaatcaatcacagtcacatctattattcttttcatgcaaacctcaatgtttcattctttttttttttttcagccaaaaagagataatgaaactgaggtatgcatgataaatgttagaaaacatgttttatctttgaataaaagataataagacgattaatatgaagtgtatgagaaagttctaactgaaagcatgattaattagcccgtataataactatttgagaaaaatgactatatataaaatcatcaccattaaagtcttacgtttgttttttcaaattacataaagaaaatgagtaaccttccttatgttt

SEQ ID NO: 61730 - DNA, 368 bp, Glycine max
tcggtcacgcgttcggtgaacttgtatagattctcactgatggcattattggacttttattagattcttgtgatttcaattcttggttcattgaatgatgacatggtaatgactggacttgcattaaccaaatcctgtcatatttgcacaagtctttttccttaaggtgtagtcccttgttttttctgaatgattgaataagactgacatttttatgccatcagtggccttattctctgctgctcttatctctaaatgcgatgacgtcgtggtaagaattaagttcatgcctttctatctatagactgaaacttggttacttaaggctgtacattggtggattatctcggcaatggaatgccacatat

SEQ ID NO: 61731 - DNA, 95 bp, Glycine max
ctcacgcttcctatactattcaacatattctaacatttggcgttcaaggacattcgtgagatacttgcgatcacaatggatgcagaacagaacta

SEQ ID NO: 61732 - DNA, 89 bp, Glycine max
ctcacccattgtcttcgtagccttacactttgaaattctcagttatgtcgtggcaagcgtatgtggatgatcacctatggtgtgaaatc

SEQ ID NO: 61733 - DNA, 151 bp, Glycine max
acggcacgtgtagcggattactacgccgtcgatacacgctactgctgaacgacgacaccgctggaatgacacaccgctacttagtcgtgattcttatagttatagcctatacattgaccattacctctattcgacttataatggcgactgt

SEQ ID NO: 61734 - DNA, 290 bp, Glycine max
aaaaaacataaaaacacacattaaagattaccaaggagtagatgtatctagcataacgtgcggctgcatgcgaggtataaggtttactagcgcgtaagagcaaatgcatacattagacatgggattgccacagatgagttgataggacgagctggacaacattattatatggcaacgatcagaacaaccttatgtgatgtgccttgatcgcgtacaggtttaagccagataggcttttatagcaagagcatagaaccaatcgcgatttgtaacagttgcggagcttgaag

SEQ ID NO: 61735 - DNA, 171 bp, Glycine max
gtcgagcgatgcaagcacgtgtgccggatcgatcattggagatctcatacctgggcggcgttctcgcacccttagaggctatgcactctggctcaagctcagcgaacctcaacgtgtacgtactactcctctcagttaagatgcagaggatgcacctttacagagcgatca

SEQ ID NO: 61736 - DNA, 445 bp, Glycine max
  unsure (1)..(445): unsure at all n locations
ttttctctctctctctctctctctctctctctctctcatcattacttgcgcatatactagaacatgccattcctagaactgacatgagtatcttcatgtgtagctggatggtctttttaactcatggtgtgaatcttggaggaggaagatgtggttgaaaacatctgttggatcatatgagtgaatgtgtatgctcttacggtgttaaacatgtagatatagggtaagataaatacctgcattgtatgtatatttggaagggttatattagaggaaataaggctcgtttctgtgagtcttgctaactaatgtgttatgctgantattatgcaatcaattttataatctatttattatagtatcatgtataacattattttacgcagttatacttcaagttactcaacttaatataatagttaatatttggtatatatgtaattca

SEQ ID NO: 61737 - DNA, 398 bp, Glycine max
acggcacgtgcagcgcgatactcagccttcggaacacgctactgctgtatcacagttaccgattgaattacccacacgctactatgtcgacattgggcttcttctttcctggacattgactttgaccttgcttcgtcctacgatggccactgttctgcacccattatgattcagatgactagctgaagctaactagatcctcctccatctacagatccactatcaaatgcttgactcaatatcctctttattcactagttgacaactcccataactatctcgagagcttacacgaaggggaacgtcattcctctcttatgctgcatagtctacgatcacctcactcagatgcttgcgtaccgctccctgattaaggaggacgagagagatgctcccag

SEQ ID NO: 61738 - DNA, 244 bp, Glycine max
aaagaaagcactgtatgcaaatacttagcgagcgaaatcttctggtaacaagcttttgtgctacttttaatgacagcgtatcacagctatgatacaggaacatttcatcggaagatgctagctcattgtcgagtacaactgtgtcatacacaactacttatacgtggacactgaatcctacctcgcatcggaaacatgcacagcacagtcagacttaacgtcaggaatcccaacactgacacat

SEQ ID NO: 61739 - DNA, 108 bp, Glycine max
cccacgcgtccggaagctttaatatgctttgggctcactcatctatctattataaccaaacactctctttgatagacttaatccgattcttgttcttgatcgatctga

SEQ ID NO: 61740 - DNA, 66 bp, Glycine max
cccacgcgtccgaaaaaaaaaaaaacaatttggctttcaaaaaaataaaaaataaagaaaaaaaga

SEQ ID NO: 61741 - DNA, 112 bp, Glycine max
cacacgcgtggcgtgcatatgatcccgtacgttcttatgataaaatatacctcggcgacgatatataacccgtgaacgctcgggtctctatctcaaactcggattgtctcaa

SEQ ID NO: 61742 - DNA, 447 bp, Glycine max
gagcttttgtcaattttctattgaccttctcggtggaggaattttagtggacaaaactggagattggatcacacttatacaaaattctccaattagtaacttgttgagagttgctgcttggaagaaaggctgtttaatggtcaagattgtgatgtctgggaatgcagcagtcaaaaggagtgattgggcctcattggtacaagtgtttttaacaaacagcaacagtacagagcattttgatgcatgtaagtggacaaaatcagaaccacattcctgggaattgatcttcccaatagaggtatgtggtcctaataatggttttgaaatgtggagttctgagtgggcaaatcaaacttcatggcatttgagtttccttattgacaatcccaaacagtctacagtttttgatattctcttaggaatctctcaagatttgaaattgctggt

SEQ ID NO: 61743 - DNA, 83 bp, Glycine max
aaaaaaaaaaaaataaaaaaataaaaaattaaaaaaaaaaaaaaaaaaaaaaataaaaaaaaaaaaaaaataaaatatatgtg

SEQ ID NO: 61744 - DNA, 448 bp, Glycine max
  unsure (1)..(448): unsure at all n locations
cccacgcgttcgnccacgcgtnncgccacgcgtncggattatttggtgtctntgatgatgatgggatgcttttgctaacctaattttcttcttccggggttggaattggctaatagctccaatgggtcctatggtggaaccaattgccccttttcccagaatcctaggagaatggccagcctttaccaaggcattgggcacctgcctaatgaccttaccggtgtgtggtgggtcacactatataataatggtcttggcagatattggacctttcactatggatggcagtgtgctgaacgctttcaggccaggtgcctgatgtatttgcacaccatacttgttggtgaactgacaggttggcacacttcaagatatggcatggtgctggatctttattggtcgcaatttcattttcgtcagttttttgtggttgtttaccatgcaaact

SEQ ID NO: 61745 - DNA, 171 bp, Glycine max
cccacgcgtccgaattttcaaagccagacttacaaacatgttctagaatattgagtccaacacttcctcggtctacctcattatccgaaaggcatcgagtgctttgaccactgctatagatactggtgccgtgcctatactgattaaagcatttgagtgctgctctagtga

SEQ ID NO: 61746 - DNA, 322 bp, Glycine max
aaaaaaaaggggtaaaatattgggtacaaaaagaaaatgaaaaaaaaaatttggatttttatttggaggggaaaaaataattaaaaataaaaaaaaaaaaattttttataataatgtttttattttaaaaaaaataacataattggaaaaataactctttatttaaaaacttttatattaatgactaataaaatatttttgaagggagtttagggtaaaaattttttaatcaatttttggaaccctataaaaaattccatgtttggggacccaaacccgaaccttttcacattgaaaatcaagggtgacgatggattcttta

SEQ ID NO: 61747 - DNA, 205 bp, Glycine max
gccacgcgtgcggacctagattgcgagctgacagcccgttgcattgcatgctaaagaaagacagggatacagggagtaggcacgtgagatgatcagatcagatctacagagaagcttgaatggctgtacagaccatatgtaccagatgcactactctagtgtgtcaaaggctcaatgtagaactcggtgggttccatacctagga

SEQ ID NO: 61748 - DNA, 98 bp, Glycine max
tcgcccacacgtccggaattactccgacgctttttggtttcaaccgtatctcatatacgccatcactggcttcgacgacctcaatatgaccaagggtc

SEQ ID NO: 61749 - DNA, 403 bp, Glycine max
atatcccattctctctgtgtattccccttcctatcccttcaagatgcagatcttcgtcaagaccctcaccggcaagaccatcacccttgaggtggaaagctctgacaccatcgacaacgtcaaggccaagatccaggacaaggaaggaatcccctcggaccagcaacgtctcattttcgccggaaagcaacttgaggacggccgtacccttgctgactacaacattcagaaggagagtactcttcacctcgtcctacgtctccgtggtggcatgcagatcttcgttaagacactcaccggcaagaccataaccctagaggttgaaagctccgacaccatcgataacgtcaaggccaagatccaggactaggagggtatcccaccggaccagcaacgtctcatc

SEQ ID NO: 61750 - DNA, 55 bp, Glycine max
tcgaaaaaacataaaaaataaaagaatacaacttataagtttaaaaataaaataa

SEQ ID NO: 61751 - DNA, 294 bp, Glycine max
cccacgcgttcgcccacgcgtccgatatataaaaaaaataataaaaaataaaataaggggaaaaaaaaaaaaaaaaaaaaaaaaaaaataaaaaataaaaaataaaaaaaaataaataaaaaaaaatacggggtttttgttgtatcgtatcttagtttcaattccgttgattgctatggatttgtttttttttaaggtaggttaaattcattggactgccttttgttttgaactttgtggaatggcaatgccgttacctaacttatttgattggcgtaacatcccattttcttt

SEQ ID NO: 61752 - DNA, 294 bp, Glycine max
gccacgcgtacgaataaacaaatagctttaatttctctatgaaacccatgttcatcggtatgcaacgatccactagaacgaggtcacaatttctacatcttcacatttcgatagcacctgaaatccaaagttatcgacactttcgcgccacacgaaatattgagaaccaatcaaaatatctatcacttacgaaccattatatccaatacccgtgcttatagatgacttgaaaaatgatgacctccaactgctggtaaactcaattcgtatgccatcaacaattgcacatgctct

SEQ ID NO: 61753 - DNA, 416 bp, Glycine max
gttgcttctaatccagctaagatgcttgcaaaaaatttcttggctggcaatatcgttggcactttctgctgagcttagtatctggtaacgggctcataaacaacctgccagcattgctctgcatgtaaatagcccaggttaaatccagtcctagtctccaagactttccccatacatcgcttttgatcagactttttagatagttcataccacagtacctcactcattaaatctcttaattcaaaaaaaaaaaaaaaactggaaggaacagtttcacaaagttgctgttggggttcaatcttctttatgatcatgacataggcatgcacagatgctggtgaatggcagttttagagtgagcaaaagatttccatcgtctaagttagttttgatcaagtactagtataagataatgg

SEQ ID NO: 61754 - DNA, 409 bp, Glycine max
cccacgcgtccgtttcaattttttttaagtgcttagtttttatttatgggacatggtacgtttgttccttgccatacaataatttctccagatgaccatagcatattgctatggaaagacatcgatagttgtactctctttggctctacgtttgtccccttggttccttttttactttttgggaacataaggaaaccatacatgtgagagatgaaacttgattaaattaagaatgcttatcattaactcattgtgttctagcttgctgccaacttagttgcaatcaatagattcagattatgcagtttcctggtagaatgcaaattctcattctccgatccttttcagatctctttctgatttaaaatgaactctagcatgacaattttcttttctttcaaaaagctga

SEQ ID NO: 61755 - DNA, 410 bp, Glycine max
gacacgcgtgcgctcacagatgcactattattgatcgagatgaggagtgtgctgagtgtcgactaaaaattttaacatgtgtcaagcaatttcgcacgggccgtggctatacattagtaggccaaatggcacctttatatatctataccatgtggacatgccttccatgcagaatgcctgattggccatgtgactagctgtacagctgagacccatgctgagtatatactggatctgcagaagcaactttctttgatgggcagtgaagcaaggagagaatactatggtaccctttctgcataggagtccattcctagcatgaccactatacacaagcttagatcacaactggatgatgctatagctagtgaatgcccattttgtggtgacctgatgatccgtaagatttt

SEQ ID NO: 61756 - DNA, 337 bp, Glycine max
cggacgcgtgggcggacgcgtgggtttactcgtgggaaaaaaaaaaaaaaaaaaaagaagaaaaaaaaaaaaaaaaaaaaaaaaaaaaaaaaaaaaaaaaaaaaaaaaaaaaaaaaaaaaaaaaaaaaaaaaaaaaaaaaaaaaaaaaaaaaaaaaaaaaaaaaaaaggaggaaattaaataaaattaaagttaaaagaaaaaaaaatggaaaaaaaaagttttttttaagagaaattaaaattaaattaaattgggtatttaattaaaaaggaataaaatggaaaaaattatggattaatataatttattagtagtgaaaaaaattttatttttta

SEQ ID NO: 61757 - DNA, 388 bp, Glycine max
cccacgcgtccgcccacgcgtccgttcactcgtccggacgaagaaagagtatgaggagtagaataaaaagaagtaacaggagcaggaagaagagaagatatagcgattcagatgagagagaagacagcgagagcgatgactctgatagcagtggcagaaagaagaagaaacgatcttcttcctcaaagtctcgatccaagcgtatcagaaggagcagaaagagaacaaatagaagccctgaaacagaaggcgagggttctgatttggaggaggagaatggttctggttctggtgatgctaagagtaaaacaaccgttgatgaggtgatgaagacggagattaacgcggaggctataaagttgaaggaattggttgagtctcagaagaa

SEQ ID NO: 61758 - DNA, 280 bp, Glycine max
cccacgcgtccgcgaacgatttgattgtttggaatgcattaacaaagcaacgagtgttcggttcgaaaccagcagagagaaaaaaaaaaaaaaaaaaaaaaaaaaaaaaaaaaaaaaaaaaaaaaaaaaaaaaaaaaaaaaaaaaaaaacaaaaacaaaaaaaaaaaaaaaaaaaaaatataaataaaaaaataaaaaacaaagagaatcaaaaggaatagagtcagattaaatagaaggcttttaacagaaagtgaaggttacgattaagacgagcaga

SEQ ID NO: 61759 - DNA, 254 bp, Glycine max
atcacgcggacgattatcaggactcataccctatatcaatggtaacacatataccagcattgactatggacatagttacaataacagctcacaatcacaataacaattacagctcaaaatcaagattaaatgtacgtatcatcgaatcattgcagatctcgtagaactgagctgaaaacaatggcgaaaccaatgtactctcgtaagtcaccttgcaagtcaacgctgactttcactctgattctgactttgat

SEQ ID NO: 61760 - DNA, 75 bp, Glycine max
ttttaaaggatccaagtttacttacgcttgcttgcaacttcatagcttttttatagtgtaacttaaattcaatta

SEQ ID NO: 61761 - DNA, 408 bp, Glycine max
tcgcagaattaagccatcaacaccaacttgttttttaattcggaacaataaacggttaactttccaaatcctaattttggtttgggttgggttaaattttgtccgaaaacatggttttaaggccaatggtacggttttctaaattttcttcctttttcctccgggttttttcttttctaatccttactcgacgttcaacatgtggtgcaaagtggtaattggttagcactgttaagaaacagttatggaggtaaagccgcgtacgcaacctcaacagcaccaaagatgaaagcgtatgcagctgcggctgattacggacacaagcaacaacatgggaagtcggccaaacgggactttgtggcaatttacgtggcgattgggatgatagctctgtccacagggctgggt

SEQ ID NO: 61762 - DNA, 272 bp, Glycine max
gttatacatcgggagctagagctctttaggatgcaagctaacatacacgcgcatgcgaccttgtatgtgatgtatagtgtcacctatagtgaattcactggccaatcgactacaacgtggtgaatggcaaaaccattgcgatacccatgttaatagccatgtaactcatcttgctttagatagctgtcgtaatagctaacaggctagcaccgatggccgttccgaacagtcgtgcaaactgaatggcaaatggaacgcgcaatgtaacgcgc

SEQ ID NO: 61763 - DNA, 92 bp, Glycine max
gaatctgcgtaaggttgagaaagcagtcgaaatctgcatcaaaatcagaaacgatgggggctacaccggaccacctattgaacctccgcaac

SEQ ID NO: 61764 - DNA, 235 bp, Glycine max
ccggaacctctctgcactgggggtttaagcagccaatattgcatcctaccgttcattatggcaatgtgtggctcctgcagataggcaaaacacaattaatctctaagagtttgctcctatggagttaaagcggcttgtagattgttttcctctgggtctagagtttccttttgtaacttaattttgaaatccattatatagctttacacaataatcacaggttatcatggttctt

SEQ ID NO: 61765 - DNA, 380 bp, Glycine max
cttctctgctatcttatccctcctttgatgattatcatccctttcgtatctctatactgctgtcatcaccttcagcctgcatttctcactattccccctctacaccaactgttagctagtgtagtatatacttcgtttctatctactggaactataattcatatataaattactttaataagcctgttcatatataataatttgatgttcaccctgggtatttattacctagctagctagttctctcttctaattgcagattttaccattataccatacaaggtttttaaaaaactgctgggaatgcaatttcggccgcaaggtcatatggagtgtcagctactgcatcgcgattacaataggatccacaatttgttatc

SEQ ID NO: 61766 - DNA, 361 bp, Glycine max
  unsure (1)..(361): unsure at all n locations
ctacacaccacattttctttcatttcttctctctntagttgctctcttcgaacaacttaaactctttttttcacctaggagtctagctcagttgtgatttcctagttcttgagttcgattccttcgaatcaaaacataaacagtgccattgatctctatcattgttccattccttgatggctcccgtggactctgacactttggggcgccattctctgattccgagctacctctattcctctccctcgccgcagaagaagaagatggaggcttcgagtttcgccattcattctccgagagagaatcgaaatatagagatgttttcgccgtcgttctatgctgcttgcaccgttggtggaag

SEQ ID NO: 61767 - DNA, 281 bp, Glycine max
acctaccgttcagatcaatatgcaaaatattctatcatgtctctggagaaaatgtacaaaccgaaggtttttgtggaaccagaactaaggatacctttggaactggttgaacttaatggttataaatcttccaaggtcaaaacaacccttggttcaaaagatgaagaaatggtgccagaagattaaactgctacttctatttaaaaagatgggatttaaagaaaggataaggcttctggttaaggggtaacatgggttgtgaaaacacaatttatttgttc

SEQ ID NO: 61768 - DNA, 91 bp, Glycine max
aaaaaaaaaaaaatagaaaaaaaaatttttaaaaaaaaaaaaaaaaaaaaaaaaaagagggaaaaaaaaaaaaaaaagaggaaaaaaaaaa

SEQ ID NO: 61769 - DNA, 213 bp, Glycine max
accacgcgtccgcccacgcgtccgtccacgcgtcccgccacgcgtccggttgccttgggtgtgcgagtcccattcccgtcaccgctaccgtcaacaccaccgatcactctctcacccaccccaactgatacccgtaaccctatcacctttctcttcttccctaacctaatttaaaactaaaaaaaacacctaccaattaaacaaatgtcccct

SEQ ID NO: 61770 - DNA, 248 bp, Glycine max
gaaaagaagacaaaggaaatttctgagtctgaggctaaatatacaatcatgatagggaaggcttatgctgcggtgaatgatgaatctatacggaaggaagggtctgctcaagagcaacttgcgggtcatgcatgtgcaactgaatgactggttaatcttatgaagtatccacaatctagtagctcagaacttgtcattacaatcgggagcatgcatttatatgattaggcctatatgtagagtaagtg

SEQ ID NO: 61771 - DNA, 215 bp, Glycine max
aaattaaaaattaaaaagatctatttaaaaaaacaaaattttaaaaaattaaaattcaaataaaaaattatttaaaattaaaacataaattaaatttattaaacttatttttaaaaaaaaaccaatttaaaaaacattttattttcctaaataaaaatcctattaaaaaaaattatattatataaattagaattatataaaaaattcccttaaaa

SEQ ID NO: 61772 - DNA, 296 bp, Glycine max
gctgactcttgtacacatatacacattttctataattaagtgcatgctaagttcttcaagtaaggagcatgaatcacatattatagacaaatcaacattacaatgctgatgaagagagtgcaaatcttgacctcacttccactggacttacagagcactcacgctatcttcggatcaactatctgttaacctatacacagcacttatattacactcaaagtgctaaacctggtatcctgatcctgatatatataagacttggagtcatagtacgactatctttcctttcagtgatc

SEQ ID NO: 61773 - DNA, 225 bp, Glycine max
cattaatactagcattttcagctatctgtacataattgataatctagttcttagtcttgttagtttttgtttctggtttgaaatagaatgtaataatgcatttgtaggttctgatgtttgtatggtgcattttttgtcagtattgaattctgatgcatcatttatcatctatattattctgtaatgcttttaagctttttcactatacttcttttagagatattc

SEQ ID NO: 61774 - DNA, 424 bp, Glycine max
gagactgcaagactgatgtccgtcatgtgcactaatccgaacatgcatactctgtgatgaggcatggagcaatgtccattagtcatacagcttgcgcaaataaacctcgtaatcagaggtcaataatagacagcgaactacatcgctgtaagacaggagcggtaactggcgaccgaatccattcaatcacaccagcatattacgagcagtctccaatagcatacaagaaactggaccaaatatatctatggaagatcctgatccgcgccaagctcagatactccaacatgatcgtaacactaagctaactgatcgtcaatggcccgtacgaccttgtggaactacacggaatcgccgcaatgttgctatctacaggtgcagtagacaccattcacccgatcataatgctggatacatactacat

SEQ ID NO: 61775 - DNA, 188 bp, Glycine max
ttcgccacgcgttcgtctgatattggaaactcggaagattaaaggcggccagtccagaattgggaccctgaaaaataaagccattgattcctcctctaaattcactcattctctttaaaaaagagggaaaagggaaatttattatccggttccatcaatgtccctttgagattttagaaattccccgg

SEQ ID NO: 61776 - DNA, 331 bp, Glycine max
gatgaaaggcctttcattcgtgcatataaaggagagtttcaaccaacatatgggtgtgctaatgtcatatcaaatgtcattagggcaaaatttgatgaaccagctccaagttggttgaaggtgtcagttgaccttcgcgataggtggtttggagagtttaagaaagagtataggtggcacccacaagaagagcaagccattagagctgtttttgagacaaaaggttcacgtattttaaaaagtgcaatgaacaagatcagaaatggtcaagataaaggaaagtggataacaactaatgttcgagtagccttggacgaacattgggggtcta

SEQ ID NO: 61777 - DNA, 319 bp, Glycine max
tccacgcgtacgtattgcagatcagattcttaacttcatcatcaaatctcaggtgttgtctaccaatagtcagtagtaatatcaactaacaaagaatactcagttttgaatattatcttaaacaaagcattaacgacacttttggtcactgacctttctttattctttatgccaaaatggtttttaagcatatagtggagctgtctgtgtatactggatcagtggatgagaagaatgttattattattagcgatgagtcatttaactagcctaagacttgatcgattgttagatgatcttctgatggactcagtgcaca

SEQ ID NO: 61778 - DNA, 365 bp, Glycine max
aagcaaagataatccaagcccgatttcttctaggcttactatgtcactgcttctgatggtattgtggcatctgaccatccaaagatgagacacaagaagaaccaaagacacagccagatgcctggtgaagaggtggaagtgcggaagcatgattgaagctgccgacactgtaaagactggggacatggcagacgatgacactgccgaagacatggcaaaggatgacactatggacgtcatcaccgatgatgcagatgctgtggtcaaaagggctgcaaatgttgatgaagtttaaaccacaaatatatgaactgaacacactcatatacttgagtatactccatgtaatatctagcatatatcta

SEQ ID NO: 61779 - DNA, 279 bp, Glycine max
ggagatatatgctttaaataatatcttatagaagctagtgttttgtgctgataaaaaagaaatgggtaaaaaataagtaaagaaaaaaaaaaataataaaaaaaataaaaaaaaaaaaaaaaaacaaacaaaataaaaaaaaaaaaaatatgtaccttaacaaaataatccaaaattaattaatagttcattcaaaattaaatctaacggataattgcactaaaatcaattcataagacaatacattcaaatactagattctgtaaaaaaagatactta

SEQ ID NO: 61780 - DNA, 281 bp, Glycine max
cccacgcgtccgagagtacatgccaagtttaactggcagggtgatggatgaaagtggggctacattggagctgatggataggaacatttgcagtgctgctggtggtgttggatcttgcatccttctcacagaacggatagtccaattgtgtaatgtattgatatccaggtattatgatctgactgcaggtgattcgtacgatcggtagcggatcgggcagtcttttgactgttacctggatatggcacagggcacgcaatcattcatgccatgatctataa

SEQ ID NO: 61781 - DNA, 311 bp, Glycine max
acgcccacgcgtccgcccacgcgttcgcccacatcgtacgcacacgcgtacgagactgccgaccgttttgttttataggaaattaagatgaatgatatatcaatgttacagaaagtatatataactgttgaactaaaaatgactcgtatcattctatttgttaattaactataattaacaatagaatggagagaacacaatattctgtagatgttaatgaccgagataactttagtgcgttttattttctgactttaccacaaaataacactctatctatctagaaaatggctgattgcatattcatggtg

SEQ ID NO: 61782 - DNA, 313 bp, Glycine max
accacgcgttctgagatgcctcaactctcaattggagttccggaagcccctattcctggtagggtcttctttctatctatctaatcctggcgaccagagtgcgaaatcgctatgtgtgctgcagattagcaagttcaagatccagcttcaccatccgaagcatgcaatgcacccactcgtaagaagagcagtacctgccaaactccttcccacggatcacgacgccaacgcctaccggtccaacgtgctagccgaccgatagagttccgccgacgacttcgacgaagcacccgttatatccacgagaaatcgt

SEQ ID NO: 61783 - DNA, 102 bp, Glycine max
atttactgtttgattgttacagaaaatcctgataggttctgtctcccaatgtgccgagtgcattatcaaggggcaagggccaatcgatgataaattattatt

SEQ ID NO: 61784 - DNA, 340 bp, Glycine max
cccacgcgtccgcatatttcctattctcttaccacccatttactggctaggttgtgagccatttgtaatcagttccatcggtcccgcttctcattcatcactggattgtgtatcatctgattccacctatagcaagtcgactgaactatataattgatgtttttacatcaagacaagcttatccaattggttgatcttgatcattgttggaggcaatgtggcttagtaatgctaggatcttgtcacaacctatgtatatttggcaattctttttgctgtttatttctgtatacacagtgcaactgctgcaagttactattgagtttttgaccccttgact

SEQ ID NO: 61785 - DNA, 209 bp, Glycine max
gtctaaaaaaaaaaaaaaaaaaaaaaaataaaaaaaaaaaaaaaataaaaaaaaacaaacagactgacttctcctttctaacatacacattcatacaccttccttactattatataccatcacctaaattcaatttaaaatccaattactttacaacgctcttaactaaaaaaaccctgtcaaaacccatcttattcccattttaatac

SEQ ID NO: 61786 - DNA, 276 bp, Glycine max
gtccgaatcccggtcgcccaaccttccttgaggtatttcacttctgcttccaatatttccttcctgtgaaacgacacagttggcgtatatcggcgccttagatcctctcacgtgacataactagaatgtctccggcagttttatcgtcaataaaccctgactgtcattgacatggtaatcatctcatgagacgaccaactttgtatattcatccgtgtggatctaaacgatctttgctatcaaggccaacatcacaagttgagaattgtaaattat

SEQ ID NO: 61787 - DNA, 181 bp, Glycine max
ttacttcttccactaaattctcacatttattagtcataccaaatctaattatatcaaatactaattcttttcatactttcaacatttttttcactacatcttttaatcatatatattattctactacctctcttatctttcttctccttattcctcaacttcatctaccaacataacttat

SEQ ID NO: 61788 - DNA, 352 bp, Glycine max
atcatatcctcggatcaacatctaggtactactaacgcttatcgaattgaacctactgtggttcgagtctactgtgctagccggagtatggctgaccttgcaatgagccctaaagcgctaacggtacctgtagaacaccgtaatacaactttggccactggctatgctcatgtcactgaacggcatattccaaccattatgtctcgtgaatctgctcatcttgctactcaatgatgaaacattggctctgattaaaatacatttgcctaacaacatttccgatatgttaattacatgctatgtctctggcaataccggtcttaatgaaatatatatataggaatggctctat

SEQ ID NO: 61789 - DNA, 291 bp, Glycine max
tccctgtctacccactcgtcctgaataatcatgcttgggaatgacagaatgacaatatattagcatacgtgcatttgaaagataggttcaatcattcggtttgatagcattcccattctatcactaaaattaatttcacttcccttatcttaaaaacccctcttacttcctaaaacctattcttaacataacttaatctatttctattataaaacacttaacccatttaatctaatacacaatatccatatacatattatcttatcacatagattttcatcctaaatataa

SEQ ID NO: 61790 - DNA, 187 bp, Glycine max
tcggagcgagaggcatatcataacataagaccacatagctgtgttgcgcgttgaagagcgggtaggtagaagatgtcgggtatgggagatgggtacgttggcacacgccaagactcagttaggattcgacggttggggatgcatagagaagctgatcgtcgcagaatccaagagctgaaaaccaagt

SEQ ID NO: 61791 - DNA, 346 bp, Glycine max
atctgcttctgggagcaacttgtaggaggatttaatagatgttttcacttcaaattggtaatgcactcaggatgatgagtccttgacagttctttcctgcaaacatctgtaccatcctgagtgcattaacaattggttgaaaataaacaaggtttgcccagtttgtagtactgaggtatctgcttctgggagcaacttgtatgaggatttaatagatgttttcacttcatattgaagaagatctatgctaagtcgtcggctactatccctcgatctaatagcattctcacattagggagatagtctctgctattggttccagctctctgatttcaagtatcacatg

SEQ ID NO: 61792 - DNA, 87 bp, Glycine max
gtaccggtctcggaatttcggagctacgcctacgcataaaaagaaaaaaaaaaaaaaagcacaaaaattaaaaaaaaaagggccgcc

SEQ ID NO: 61793 - DNA, 329 bp, Glycine max
atactctcaaaacttcaaaactatgtagtacgtattatgctgcactcttgcgggccagctctattctaacgcccttactatcacatggtaatttcttgctactgtgcccgctcatgtgttctgtacttcctataggtgtgataccgtcatggaagcctcaagctcatacatatatacctatataagtatgctataatatgtctattatgattacatacagcttagtgaatctgacattatctcatattgctaactagtcttctgccacaggagatgatgacacagaatcaagatgttctagtaacaacaatgaaggatccctgtctggc

SEQ ID NO: 61794 - DNA, 97 bp, Glycine max
ccccgccccacctctccagcgggccgccagcatgcccgagatcaagatcaacaatccggcacatcttataagttaaaaaagctactgaattgacttc

SEQ ID NO: 61795 - DNA, 295 bp, Glycine max
tattcctacaatattgtatacttatctgaaattcaaaaccaatatctgtagtttctaaccaaacatgttatgagctactacatgcattattataatctgcatgtaaccattcacaatgtactatcataataaaccatggtacaatacctaactctaaatatgatatactgtatcctccagttcaacatttatgatttgaacctcatatacatatagtattcataacaacatacacaccatctcatcctttgacattatcatgcgtactaagtcacttgatcttggaatgaatcca

SEQ ID NO: 61796 - DNA, 315 bp, Glycine max
ccactcgtcctaaaaaaaaaaaaataaaaaaaaaaataatttaataaaatataaaataatataataaattagtaagttataatataaaaattaataaataataaaaaaaaaaaaaaaaaaaaaaaaaaataaaaaaaaaaaaaaaaaaaaaaaaataaataactttatcattttaaaaaacaatatttttcttattcattctattcttaaaaaaatcatataaattattattaataaaatatattacaattactactattaaaattttttaatttaaaaatattaattatatcaaatttaaattcccttatataa

SEQ ID NO: 61797 - DNA, 422 bp, Glycine max
  unsure (1)..(422): unsure at all n locations
cccacgcgtccgagatcagcaaacccatttcaaaatccatgccttggatcttggaaacggctgacttagtagacgaacaaacaacaacaacatccatacttttcaaatttgatgaaacaaacactagaccctctcaatcttccacttctgactcttcttcgattttctgaagcattacttccctgagctcctggaacccgaaacacagtttcccctcttcgaattcaactccaaatccaaaatattcaacctcgaaacccgaaacccgaaacccctaacattagttgagaaggaacctcaattgaatcggaaacccaaacctcacattctgagcacctatgtcttggtagcaaccaaaaaaccgagaatgtcgatctcaggtctgcgactaanaaatctcagagctagtcgatgttggctcc

SEQ ID NO: 61798 - DNA, 242 bp, Glycine max
cacaaacgtccaatcgaacgcaattaaagtagctaaaaagtcgaataccactgcgtagttttctattccaactattctaatccgataggtgactctaatctcaacgagaagtttgtctgtcgcacgaatattgagcgctatgatacacaaggtgtagtctatcgatacgtctgacatggaacacattcatggtatacgcatgccatataggatggcgtgaaattgaaacaatgtataaccga

SEQ ID NO: 61799 - DNA, 429 bp, Glycine max
gagcttttgtcaattttctattgaccttctcggtggaggaattttagtggacaaaacgtggagattggatcacacttatacaaaattctccaattagtaacttgttgagagttgctgcttggaagaaaggctgtttaatggtcaagattgtgatgtctgggaatgcagcagtcaaaaggagtgattgggcctcattggtacaagtgtttttaacaaacagcaacagtacagagcattttgatgcatgtaagtggacaaaatcagaaccacattcctgggaattgatcttcccaatagaggtatgtggtcctaataatggttttgaaatgtggagttctgagtgggcaaatcaaacttcatggcatttgagtttccttattgacaatcccaaacagtctacagtttttgatattctcttaggaatctctc

SEQ ID NO: 61800 - DNA, 326 bp, Glycine max
cccacgcgtccggatctaactcgtcacagacagatttccccacaatttcttcttaacgattgtaacctgattgcggggaaaaagattgccctttattgattttttttgtcaaataaaattgtgtataaaaccatctgtgatctgggttcttttgcgtattttagtttttaaagggaaattgaggattttggtactgattactgtggaacatggtggtttttcgatctgggttcttttaaaaatgggctctttcgcgcatttagtgactttttgcatggaaaattgacggtaccggtactgattactgtggatcatggtggttttag

SEQ ID NO: 61801 - DNA, 372 bp, Glycine max
ctccgcaatctagccaacacaacccgcaatttctgaggcttactccctctccgctgggcttccttgccttctcaaggatctaagacccaacatcatataccaacacctctcaaccacaccactaaccaacctaccttcattcccatacatctcacaatctcactcctgctcacatcacctctactgccctcgtccctattacttctcttatctctcttgctcatgacaacataccagcgtccagatacgttcaatgtcgctaacgccggttgtcaaaatttcttccggctattccgtgcaagtaagcctatttgtgcccactgaagacttcaacctcgcactgataactcttgatttggaatttgttaaaaa

SEQ ID NO: 61802 - DNA, 417 bp, Glycine max
cccacgcgtccgcccacgcgtccgcgggttcttccgatttatatttttttccccaaggcgggggacctccttcttcttctagcgtagtttttctcttccatcttcattcgtttcttttcccttaacttccaatcttttagtttcaaaatctctcttttaatttcgagaattatgagacccgcggttgaaggatccatggccgagaggtttgacgactgcgaaaaggagaagaagaagaagaagcgccgatccaatcgacgatccaagcaaaaccctccctcatcttcagcatctgaagtgaatgacgcccaggggttgtcaccagattcatggaaaattggaacacctactcatgcttctccatccttgggcaattcattgtaccaggtcaatgtgtgttcttctaatgagcaagga

SEQ ID NO: 61803 - DNA, 171 bp, Glycine max
cccacgcgtccgcccacgcgtccgaaaaaaaaaaaaaaaaaaaaaaaaaaaaaaaaaaagagagaaaaaaactaaaaataataacactatatataatctaaaattcaaaattccttacatatacattaaccaaccaatctattattatacctaatactccaatttcaattc

SEQ ID NO: 61804 - DNA, 261 bp, Glycine max
gaaaagggaacccaaaccaaaaccctaaccctaacggaaagatggcggaccacttgtcatgcatattcgggacggagaaggacagggtgaactgtccgctctactacaagatcgacacgctcattcacgtctaccagttctttctttaaaatcgatgcctacgactttcccaacatctgctcctatccactctttaaagtacaacaaccctgcatatctcacgtactcactaaacttatgtctctcatgtttttccatcta

SEQ ID NO: 61805 - DNA, 78 bp, Glycine max
tccctctctacccactcttcctcccactcatcctcccactcttactaattttaaacaactaaatcaaaataaataaac

SEQ ID NO: 61806 - DNA, 347 bp, Glycine max
atttgacaacgttacgtggtgccgttccatgatttatgaactatgacccttcttgtggtcgtaatcttgggttccaaaagaacgagaagatgaacgttgatctggaatcattggcagaggcaacttctgtatccataggatcactgatcagcaccactattctctacccacttgacacctgcatgaccaagtaccatgctgaggctcgttcctcaggtcgaataaaatacaggaatctcactgatctattatcggaggcaatatctaaccgtcaggcgctttcactttaccagggccttggaacataaaatctccaatcctttattttacaatcattctacttctat

SEQ ID NO: 61807 - DNA, 396 bp, Glycine max
cccacgcgtccgagcaaactcaaaaaaatcaaaaaccgtaacgaactcttccttccgagttcggagttccgagttgggcgactcagcaccgatggacgagtcgggttcagcctcctctccaacgcggccggtgacaatcgagggcggcgagtgcgacgcggcgttgtcgaagtcgcgggtgctgacgcgggaggaggtgctccggcggcggctccggcgagtgaggcagctggggcggtgctaccgggcccactactgggccctgatggaggagctgaggtcaaagtacagagactactgctggacctatggcaaaagccccttcaaggaggatcacgatgacaacaacaacaacagcgaccaaaacggcgtcgcttctggtggcgactatatcgt

SEQ ID NO: 61808 - DNA, 131 bp, Glycine max
ctttgtctttgtgcacacatgagttatgactacttgtttagtttatgcacaacgaaggaagcaaagacaaaaatcttgattgttgaaattttagatgataaaaaatcacttggacagttatgaataccatt

SEQ ID NO: 61809 - DNA, 431 bp, Glycine max
  unsure (1)..(431): unsure at all n locations
cccacgcgtccgcccacgcgtccgatttttgattagaggtggctaattgtctgaaatatgctcttattaagtgcaccacatcctgcttcagtgcttccttgggcctcatattttatgttttaatattgtagtaagaggtacaatatttggcgctttatatattattcttggaaagcgaatctggtttttccctaacatccttgccgaggaagcaacactgcgggagttgttcagattttggcctaagaaagatgaagaggaaaagcccaagtggacaacaagacttttctatgctggggtagctgtgctgntcatattattgctgaggcatcatgcacncgatgaagctgccagaacaaggcaggtcctaaatatagtggatggaatntatccatccattttcagcttaaattcctttctagttggatcta

SEQ ID NO: 61810 - DNA, 437 bp, Glycine max
  unsure (1)..(437): unsure at all n locations
tcgnccacgcgtncggtgcatctcagacatggatccagtgccctagaaaaacagattaaaggatgtgtgaaggaagttcaagtcgaattgtcaaagccaggttttaattcctttggtctgggagactgtaaagcccccaaagtccttggtgacattgttgaatctattgcaagtgccatttttcttgacagtgggagggacactactgttgtttggaaagtttttcagcctcttttgcatcctatggttaccccagagactctggccatgcatcctgtgcgtgagctgcaagagcgatgccagcagcaagctgaaagcttaaagtataaagccagtcgtattggccatttggccacttgtgaaatattcattgatggggtccaagtaggggctgctcaaaatccacagaaaaaaatggcgcagaaattaactgcaag

SEQ ID NO: 61811 - DNA, 392 bp, Glycine max
gaaagtcaaggcgaaagtagtgaccgaaaatatctcctaggtggtgaaatgtcaaagatgaggaaccatggaaaagaacttgcttatgaaaaagaactttgtcaattgtcttttgcaatatctcttagtttgcaaggtctggattgtgctaaagggaaagcttgggaggttaagagagttatgttgtttttataaatatgaataagggattattgggaggtttcgatgattatctgttatttattttttcattctgaaaaagtatcaatcgtgtaaaaaaaatgtgttttgtttcgtttgtcattattgtagtgtttttgaagagcacggcaaattgttcaagctatatctctattgatatcaatttattttaaatgaatgacatttgcaac

SEQ ID NO: 61812 - DNA, 408 bp, Glycine max
agtttcaatttgcacttaatggtaacaagttttatgacaagctgttcagtttcaaacttttaacctaaagcttgagagattataacttctttaagaaagaatagatttcaaataacttgtttcttttgtgtgtgttttgaccatcctatggaaagaccttccaaagaaaatacacattggaagttaaaattgtttaaattaatatgtgaccacaattttatttccatgttgagttgggttgcttctggtaaaaggttttgtttatcatttggcagagacaggttaaacattttgtactttaattttttttgtttttatatttcttttgagtttttggttgataatgcatgtttcactgatttgtttggactttggaatctattaatatacaggtacaaggcagagatc

SEQ ID NO: 61813 - DNA, 340 bp, Glycine max
aaaaaaactaaatcccaaaaaactaaaaaaacaacaaaaaaaaaaacctaaaaacggcagtactattaaaatatataactaacaacacctacctaaaaaaacaaaaaacaaaaaaaaaataactcctcctccctgacagacccccattcccctccccgagaaccttctgcataatcatgctccattctcccacttgtatcatcatcgtcccatctacccacaccacactttccaaggaatccctgaaatccccactgtaatcctgctttccgctgaacccgctattcccatcaatgtacttctcagtcagccccctcctgttctaccgttcacatctata

SEQ ID NO: 61814 - DNA, 433 bp, Glycine max
tgcttgcttactattactaaagtaggggatgactgtattgacttatgtaggccttggcaataatagtgttttttttgtcagtagaagactattgaaccatattagatactctttttcccataatagaagacttattcagcccaattggaacttcattatggtttgaaaattttattaaatcattaactgaaattggtcgcatttatattaataatttatatattacttattttaatgcataggatgatgagaaagggaaatcatagatggtgcttgaaattattggctgacaaaaaacaagtggttgcaacatgcctgagaatatacatgatgaaatgaggcctaatttattgatgcgacacatatggtggttgatctgttccatttccatgtacattttctaaaacttagttaaataatcttactataaact

SEQ ID NO: 61815 - DNA, 430 bp, Glycine max
gaaaaaataaaaatcaaagagcataatgtcagggatcattcacaagattggggagacccttcatgtgggagggcacaagaaggaggaggagcataagggtgagcaccatgctggagaatacaaaggggagcaccatggtgaacacagtagtgagtacaaaggagagcatcatggtgaacacaaagctggagagtaccatggtgagcacaagccagagcacaaagaggggttcctagacaaagtcaaggacaagatccatggtgagggcggcgccgccgagggcgagaagaagaagaaggagaagaagaagaaggagcatggccatgagcatggccatgacagcagcagcagcagtgacagtgattaaactgctgcatcacctatatatttaaaaggtttatgggaccatagtagcgagggctgtgcctta

SEQ ID NO: 61816 - DNA, 288 bp, Glycine max
ttaaatttcttgtcttcgtttatggtctggtttttattttccttttggcttgattttgttacccttttatttttcatcttcttccttaattcccattagaaaaagaaaaaggaaataaagcaggaaggtcagcagtggaagtgaaagaccaacctaatagttcaaagcagcagaaacccaaactctcaaaagctgaaagacgtgcactccaagaatctcaacgggctgcaaaggctgctgcaaaaggtgtacgacgtcaggcatctggaactgtggctacaatgaatg

SEQ ID NO: 61817 - DNA, 189 bp, Glycine max
ttcccggtcgacccctcgtccgcccactcgtccgcccactcgtccacccacgcgtccgcttccctcactaataaggggagtgattttccataatttcgctaaaaatctacttcatacgacttctaaatgtttaatcctatcatagaatacatattctgatcactctgaatacaatatttccttctcata

SEQ ID NO: 61818 - DNA, 414 bp, Glycine max
attaattatagcatcaatggccgacgcaaagaaaattttttacccaaaaaatcgaggcaggaaaggtactagttcctctcatacagaaactacccagaaacaagaacgcaagtttaccatgaaagatgtttgctattactcccaaccaagcaatattcctcctaaggattctgattcttcaagccagcaacagcaagcacgcacctttaccatgaaagacttttgctattataccaaaccaaacaatcctcccagtgtttccgatgcttcaacctctagggctggaacaccattacccactattaaaaagtcttttgctcgcaggacttggagctagtggatgaccacaccaaattattcctcatatctcatcatcaaccttcctagttcttagcaatattcaccacctactcg

SEQ ID NO: 61819 - DNA, 388 bp, Glycine max
cccacgcgtccgcccacgcgtccgcccacgcgtccgaaaaaaaaaaaaaaaaaaaaaggaaaaaaaaaaaaaaaaaaaaaaaaaaaaaaataaaaaaaaaaaaaaaaaaaaaaaaaaaaaaaaataaaaaaaaaaaaaaaaaaaaaaaaaaaaaataaaaaaaaaaaaaaaatgggcctccttttaaaaattccaatttttaatatcctttcttttaacattaaaatttttttttatggtccccaaaattaaaatatttgtcccattttttaaaaatcgtgattttgaaaaacttttgggttttccaaattatactcttttaaaaaaatccccttttttcaaattgggtatataccaaaaaggcctcatcaaatagctttttcaaaaa

SEQ ID NO: 61820 - DNA, 346 bp, Glycine max
gagcactccaagatccctagtatgcatctacatgctgtgcacattcttatgccacagatgaggattacccgtgaccgagataccagtcagcgcagtcgaagtctccgtcggagtgcttgacgtaccggtctccaacaacatacgatagcaaccatggatatttcacatgatgatactgatctccaccttctgacaattacctctagctgcacgttcagcatgatgaccccagaattactacctgctatcaaggctggtacattctgcttaatgataaagattgagcatactttgcgagaggattgttatagcagacttagaagagtatggccaggaaactatgtta

SEQ ID NO: 61821 - DNA, 246 bp, Glycine max
acgacagtgattgagcttattactctaattcgactgtactaagatggcatctctggtgcgtctttctactctcatggaaacgggtcactcttccttcgtgatccacaaactggagtctcctctacagccctagtcatgctatactgacgttacacattcatgcgcatgcgtcttggaccatacgacgagactaacctccaactattacagatattctcactgcctccgtagctgcctttgcatatg

SEQ ID NO: 61822 - DNA, 314 bp, Glycine max
gtcactttctggttccctattactcattcttgtcttttctaataattatatcatgtgggtcttacattttgaatatccttattaaaatagactctaattagtcatactgaactcagaatgtcacacattcgctcatgcttgacctgaggctacacagacagagactatgcatcttactaacattaccactctcacttcctaatattacaatatttttactgcatccaaaaatcctactgcatattatacctctaacgcctattgaaacgctgctatgtcaacatattcacatatagaaccagattcttaaccat

SEQ ID NO: 61823 - DNA, 343 bp, Glycine max
cccacgcgtccgaaaaaaaaaaaaaaaaaaaaaaaaaaaaaaaaaaaaaaaaaaaagaaaaaaaaaaaaaaaaaaaaaaaaaaaaaaaaaaaaaaaaaaaaaaaaaaaaaataaaaaaaaaaaaaaaaataaaaaaaaaagaaaaaataatacataaatctatctatttagaatattattatcaaccttattgacaattaatactatcacaaaaactcaaaattatcatcactgaattaatacctattatcaaggttgatacattttgctaaatgatatttattaatcatactttcattcagtattataatattagatttaaaagagaattgccattatatta

SEQ ID NO: 61824 - DNA, 88 bp, Glycine max
aaaaaaaaaaaaaaaaaaaaaaaaaaaaaaaaaaaaaaaaaaaaaaaaaaaaaaaaaaagagaaaaaaaaaaaaaaaaaaaaaaaaaa

SEQ ID NO: 61825 - DNA, 80 bp, Glycine max
aaacaataaaaaaaaaaaaaaaaaaaaaaaaaaaaaaaaaaaaaaaaaaaaaaaaaagagaaaaaaaaaaaaaaaaaaaa

SEQ ID NO: 61826 - DNA, 422 bp, Glycine max
  unsure (1)..(422): unsure at all n locations
agccttccgccaacccttccgcggagttaaaggaaaaattttgattgggaagaaggaagggttgggttgcaaaattgaaacccaggggaatcaagtgttttgcaccaagggtggtgatatggagttgtggtcggaggttgttatggggtctgggaacagtgggaggatcttcaagaagaacttgatggggagagtgagggatatgggtggngccaagattaccaatttggcctttggagggagcaccatgttcttgactaggaaggatcaacaatgtgttgaagtgtggcagagttcttctaaggagttttgatgagtttgntactttctttcttattttattccaaanaattgaagaatagttaccttgacaaagagggttggtttgcttgcatgcttgtaatgaacctttgctggcgtgt

SEQ ID NO: 61827 - DNA, 411 bp, Glycine max
agcgaatgatatactatgtaacgtggatgattattacatactatgaacacttgaacggtgactttaatgaacaagtctaaagcaattatcaaaaatatgcttcttaacttaccatagactcttatatatcatattgtcacatgaacatcccatatcataattccatacatcaacaaatctcgcttgaactttatcttatgaatcatctatgaaatattcattgcatttatgcatcatcttacactcgatatatccacgaaaacggtaagtataaatgagtcgattcagagtacatccatctactaacaatgctccaaataattcttctgcctctctcattcttacatcttcacaaagaccattcagtaatgcagtgtaagcgacgatatttaagttaactgcaacctactg

SEQ ID NO: 61828 - DNA, 305 bp, Glycine max
  unsure (1)..(305): unsure at all n locations
acgnccacgcgtacgaaaaaaaaaaaattttaataaaaaaaaaaaaaaaaaaaaaaaaggaagggaaaaataaaaaaaaaaaaaaaaaaaaaaaaataaaaaaaaaaaaaaaaaaaagtaatgcaagattaaaacatcacaaacttaagtaatcgaaattgcaaataaattaatattgtgtaacaactcaaaaattaaatcaattagccccaaaaatagatggtgctaaatggcaaaacctatacatggccgaacttaaaaggattaaaccaaaatcagtattaggaagctgccgtatttgaaaa

SEQ ID NO: 61829 - DNA, 408 bp, Glycine max
accaaacgtcgtggtatattctctacaatacttaatcaaaacggtagacacgaggtggagataactcaatcacagacacaactaatctgctgattctagcgctaaacatagcacgctgtacttacgttaagaaaggctacagatctacgattcagttgataactgattgaacgggagtaaaccatgaacatagtaacctgaataattactcaatagaggtgcaatctactagacgtatttgagtatccaatctctatgaactgtgagagaacagctatggacagactctcgaacacattcatgccagcgtcattgacttcccctgctatcactggcaccactaacactaccatatcaacactgaactctgagccatcatcctcttcatccaatcaggatcaacagcta

SEQ ID NO: 61830 - DNA, 341 bp, Glycine max
aaaaaacatacaaaaaaacaaaaaaaaaaaaaaaacaaaaacaaaccataaaaagggctaagatacactaaaattctatctctcattacattataatacaatcagattgacctcttcctttattgcctctatttaacattttagactaataaagacgcctctaaattcatactatatcattgcccaaaatttattcatctctccccattcttattatcttcaaatgtattaccctcctgacatacataccaacacggtgtatttagcacaacttatgtaatcattccatgctgtgaacatatcaactttcaataataaaacattaacatgaatatcgacaa

SEQ ID NO: 61831 - DNA, 286 bp, Glycine max
ggtacacacacttgtacagactttcttacggaacatattggcgctaccatgggcgggaactttcaagtcatggtcaagggaatgtacgataaatgcacaaaataccctgactactcacttgactcaaactttgagggaaatgtatcagattcttcatcacactatgcttgcaccattgacatcacattatacatcacatcatctaatggagcatgtcacagattattatccacatggtgaactgcatatgcaacttcataaacatcttactaaaccagcatcgagg

SEQ ID NO: 61832 - DNA, 295 bp, Glycine max
atttatgccataagacgaatctactttgatgttcatacactcgttggacccgtggataagatgaagtaaaagtactattacccttgtaataacacaatctgcacttagtggacactggatggatgctatctcattacataacacgacggctgcgaataagtagctataacccttttcacgaattgcacattgtgttattacaagggtactagctctatgccttcttgcatgtcctgattcacatgatgaatccctcgtcgtggattactggtccacatgctttactgaggcgcgt

SEQ ID NO: 61833 - DNA, 403 bp, Glycine max
  unsure (1)..(403): unsure at all n locations
gttgaaacctctgccaagagaatccaaccttaatttgaggaccaacaatctcaaagaacagagtccatagattgagggaatatggtagataataatcaatatctcttccagggcagttctgattaggtttacttggttaacagcccctagaactagaagtgtttgttgccaccacctgcaataatgttagtgttagtttgtattctatattgctcaagtgcgcctcgtatttctgtttttatagaaaaacttgtacatcttgattgttattgtggcttgaacgtatctatcttgacttgacataaatacttttctatttttttgacgtatatgtattgtttgattatttctgctgcaaccttttatttatttatttgttcatgtaaaaaaaaaaatnnaacat

SEQ ID NO: 61834 - DNA, 347 bp, Glycine max
gtgttgttccaactttgtggacggcagtgcgtgttaaaggatgttgattgtaacagcagattttaagatttttttttatgaatcaactaaaataaaaaaaaaaaaaaaaaaaaaaaaaaaaaaaaaaaaaaaaaaaaaaaaaaaaaaataaaaaataaataaaaaaaaaaaaaaaaaaaaaaaaataaaaaaaaaataaaaaaaaaacaaacataaaataaaaaaaaaaaaaaaggggaatcctataaagaagtccaaactttaaagcacttgatatatatgttataagtcattaatatgagaccatataaataatgaattacccttttaataaaaacatttgattg

SEQ ID NO: 61835 - DNA, 402 bp, Glycine max
  unsure (1)..(402): unsure at all n locations
tggacatatgaatgcaagaatgaacgggtttacatttcgagaccatcccggacccggcaacttaaaaaccctaaattgagggtgaatgtgtctgtgacttatgatttggatgataacattcctgatgctaaggtggaaaaggcaaaaacaagttccaaaaaaaccaaaaggaagcatcggaaggactctgattctggtagcgatagtgaggattctgtttttgagaccgatagtggcagtgggtcatcatctgttacggggtcggattattcttctgaaagtagttcaggttacagttcatcttctgattcagaggaggaacggagacggaggagaaagaagaagcagaagagaggaagacgcangaggtacagttcatcagaatcatctgattcagattct

SEQ ID NO: 61836 - DNA, 414 bp, Glycine max
ctttggcgctgcgcagaagagagagaacgaacgaacgaacgagcataacacgctttaataatctgtggcagtgagtagtgatatgcagcaaggtgatccaacggtcctaagcttgaggcctggtggtggtcgtggcggcggaagcaggcttttcggtcactcctcctcctctctctccgccgatctccctctctgccgccctcatgcctatttctctctcaaggaatggaatgggagttgagagtttgaaacttggaatgtcctgattcttggtgggggcacttggttatgtgttcttgctgtaatatggacagaaagcaacagcatgtgggctgtaggtgtgcttcgttgagttttagattgcccataaaggacccacacacattcctgctcgtttgcctttccaactagggt

SEQ ID NO: 61837 - DNA, 303 bp, Glycine max
cccaattccacctggacccacgcatcctctgactcataagctcacaaataaactatcatacatccaaagaccatcactgactcgtcatcttacaaaccctgaatctaaccataatatccatgaaccttacgaatctaatcataacattcctcatcctaaatacaaaactaaccctactacttccaaaacaaccatactgaatcatcccaaagcctcacaatctgctctccaaagcaaggattttctttatcataccaatagtgtcaaacattcatcatctactactacttccaataattcttc

SEQ ID NO: 61838 - DNA, 343 bp, Glycine max
gtttgccaatcaaaggtgatttgattgaggccaaagttgtgcatgatcaactttggtcaatggctgagagatctgacagtgagctgttgggtccaaacaatcaataccttccaaaaatagtttcagtgtttgctgaggttttatgtgctggtaaggaccttgcaacagaacagacagctggtcgtatggttaatttactcagacagctccagcaaactttaccaccctctacacttgcttctacttggtcatctttgcagccccagcaacagcttgcattgcaatctatcctttcttcatagttttaattgctttgctgcatatccatcattccttaatagca

SEQ ID NO: 61839 - DNA, 406 bp, Glycine max
accgttcgcattcccactcaacccacgcgtccatatcacaatcaaacctcattaaattgacaccaaacattttcatcatcaaccaggttgtattgctcagaaattatacaatccactctaaaacccaaacttacacatccctatcaataataatctcaacccatactcgactcttatgtactagttaataccttcaaacacatcatacacatttctatatacatcatttactcatacacttcatacaaaccataccaccctctactcacatttttactaggtcatcttatatgcccaaactacagcttgcattgaaatttatcatatctctcttgctctaatttctctgcttcatattcatcatttatcaataacttatgcctcaaacacagttatacaaatcttt

SEQ ID NO: 61840 - DNA, 329 bp, Glycine max
gtttcagatggacctaatagcaaaactacattacccatatattgtggagtacaaagatgcttgggtggagaaggatgactacatatgcattataactggctatggtgaaggaggagacatgtaagttgggtaatatctgttagtgacaccatggtttttagcttaaattaagtttgtgagtaatcaataattggggattaaagagattgccatggcctattaatatatgttagaaagtaaatgtgttgtgagagctatgtgtatgaactatattggtatagagtttaacactttgtgtgagatccagagtgtgatttacaaatctttaa

SEQ ID NO: 61841 - DNA, 270 bp, Glycine max
aaaaaaaaataaaaaaataaaataaaaaaaaaaaaaaaaaaaaaaaataaaaaaaagataaaaacaaaaaaaaaaaaaaaaaaaaaaataaaaaaataaaagaaaaaaaatttaaaaaaatttaaaaaaaataataataaaaagcaagaggaatgtttaccgataaaaattagattcttaataaattcagttaactagcccttagaattttaaaacacttgaagaacatgtttattgatgaaataaactcttatttttgggtgaatatca

SEQ ID NO: 61842 - DNA, 329 bp, Glycine max
catactcataccatacaaattacctcactgaatggacgcatacgaggcacttattgtcactacgcatactctgcacactgctcctaatctctctcgtggcgactgagccatacaaagatgctacacatgcggaagaaccaacgacacggacagatgcctgtacaactgccgtaagcaccttacatggcggctgtcgtagatatggcagaagctagggacacgcttcaagctatgcacatcctggacactggccacacgatcctgcacgttgtcatgaatgctcataccatcagccaaaggcttacataacctgctaactaataaaagca

SEQ ID NO: 61843 - DNA, 292 bp, Glycine max
catttacagaatacatattcacacacagtctctctggtgtaggtgcgttttgagaccggagttgtcacttgataggtatactgacccattatacaccttcgcttctgaatcgaatgaacctaagatggtaaatgatgcattcgatcagactcgtatcgctcacatgcatagtaactgtgtggaggatggaatgcagaccagtgacgcatgaatgatagtgatctaagagccctatcatgcgtgatctacttcatattgctattggatacacgttgtgcaaactagtaagcgg

SEQ ID NO: 61844 - DNA, 313 bp, Glycine max
ttcactcgttccaaatattgatagtctctaatcgatagatatttatattactaggaagggttagataatgctcattatgtttgcactaaatacattatctcataataaagttaatttatagaatattcttttgagtttgcatatcagaattcagtttcaccatattacctgcttttcaaactgacttttcattttctaacttcttttacagtgaattgcttaatctataacattatattattaattcaactcattatactcaaaatagacttttcttacttctgtttttactatctatccttatcttaatttc

SEQ ID NO: 61845 - DNA, 288 bp, Glycine max
  unsure (1)..(288): unsure at all n locations
agcgtncgccaaatactaatgttaaataccctgccaatactccatcatatcatgctggcgaattgaagttttgatggggttgagatcatgggctcatggctacctgctgagcatttatgaagaaaagtgatgaccgacagacgatatgtggatcctgagaaccgtgcgattgcttggaagtgttgaagctgtgtaatgagataggggcggcagagtggaataggctatcgcattcgcagaaattcagagtctggagacttaatcaaaagaatggggctttacatgatg

SEQ ID NO: 61846 - DNA, 402 bp, Glycine max
  unsure (1)..(402): unsure at all n locations
ttcaattcttccttggtattgttagtctctggtcgtttgttatttattttacttgtaatgttttgatgatgctcattttgtttgcactagattcattagctcagaataaggttaatttatagaatattcttttgagtttgcagatcagaattcagttgcaccataggacctgcttttcaaactggggtttcagtttctaagtgggtgtccagtggtttgcttaatctagaagattttattatgaattcagctcatttgacttaaaatagacttttctcagttctgttttgattttcttcccttatctaatctgcacaaacatgtngtcccacttttagctgtagttttgttaactaagcaagaatagttctgttgtgttcataaaaaaaggaaagaaaagaa

SEQ ID NO: 61847 - DNA, 407 bp, Glycine max
  unsure (1)..(407): unsure at all n locations
cttcttctcttgcggctagggttttagcgcagcttcttctagatttaaggaagatgggtaaggaaaaggttcacatcagtattgtggtcattggccatgtcgactctgggaaatccactaccactggtcacctgatttacaagcttggaggcattgacaagcgtgttattgagaggtttgagaaggaagctgctgagatgaacaagaggtctttcaagtatgcctgggtgctggacaaacttaaggctgagcgtgaaagaggaatcaccattgatattgctttgtggaagtttgaaacaacaaagtattattgcacagttattgatgcgcctggacataaggatttcattaagaatatgattactgggacatcccaagctgactgtgctgntcttatcattgattcg

SEQ ID NO: 61848 - DNA, 420 bp, Glycine max
atcgccagcaggcaaaccctgtcaggcgaaatgactatgagcaccctagatcacatacgtatgaatgaaatcactatcaatgccgtgactgtagttcaaggcatggatatcactcatcatgaaataatcacaacgctaggtccaatacttcacctggattataccacagccaaagcttcacaacctacagctcattagatttgaacttcacgaaacagctagagtcagcacaggcatcattatcagtgttcagccaatcaacattatgtgctagatagaagaggatacatgcatcaacttccaccacctgactacagctgcagatcaatccactctggtcacggaatatcctatcctacgaattgaaaactgtagtaccatatattggacttgcatgcatcctattaactctagtcgaga

SEQ ID NO: 61849 - DNA, 132 bp, Glycine max
cattcaatcacacactaatttctaacactttttatccaaaataatcattattctactaatagccatttccactatactttttaactctaattaaaattcaatccataattcataccatatttatctcataac

SEQ ID NO: 61850 - DNA, 438 bp, Glycine max
cgattgcaagcaatggactccttcaattccttcttcgattcaacaaaccgatggaatgacgagactctcaaaaacttccgtcaaatttctccggtcgttcagaatcacctcaagcaggttcgctcctaatttttacggttttatgattgattttgattccttcatcaattagcaaagaaattctaaagcgatggattttctaggttttgccatatcgcgttaacaataatgtctcctatttcgcacgtgtcaatttttgtgatcttagggtttacaacaattgaagttatagaatctttaatttgcaagttccttgatatctttaatttgtaattgtgattgattgcaggtttattttactctgtgtttcgccgtggttgctgcggctgttggggcttaccttcatgtcctcttgaacattgggggttttcttactac

SEQ ID NO: 61851 - DNA, 127 bp, Glycine max
aaaaaaaaaaaaaaaaaaaaaaaaaaaaaaaaaaaaaaaaaaaaaaaaaaaaaaaaaaaaaaaaaaatataaaataacaaaataaaaaaaaaataaataaaaaaataataaaaaatatataaattaa

SEQ ID NO: 61852 - DNA, 269 bp, Glycine max
gctaccagtaccaggagctccctatctacagtgtctctctctctctgcaaaagcaacgaagctgtgttctgatccttcaaattagattccactccaaaccacctttcctcatcaagatctattttttattctattctctcaggatcactctcttgcgcctgatgcttctggttgtttgttatttttggagacttaaatggatgctaagccgtggattaggtcaatttgatctcaactgaaactttttagcatttctgatggactcgaaa

SEQ ID NO: 61853 - DNA, 441 bp, Glycine max
  unsure (1)..(441): unsure at all n locations
gtttagtatttgggtccatgatgtcaaattcaaatattttttttttcaaatatatatagagtggtggcatgttagtttgaacctgtgacctcctgcccccagaaactaaccaaaccactcaccactaacccaagcacagtggcttagttcaaatggtttttaaatgcgagaattgtaaaacaatgactattcttaaatgtcttaatttccttctagtcttcctgctataattgatgttactcgaaagcagtctaatatataggtgacttggccgtanaatagctgaggaaaatttatttgatgttanttgaacttttctttggcttatttggcaatgaatctaactatcaatttgtcattaaagagattcatatattgtgtaagtgaaatagcttttaataggaaataaggttatggagtaagaaaatgtacattgtgcaa

SEQ ID NO: 61854 - DNA, 174 bp, Glycine max
cttagctagatcagacactctgatctgaaaaatgagatccaaagatagactaatgctaggtatgttcatagccactatgctaacgatctcctctgaggatgcacccgatgatgcataccacaattatcacaaatcaaatggctagcgtatgcaaatggtgtagatgaaagcaaa

SEQ ID NO: 61855 - DNA, 205 bp, Glycine max
ataaaagccctagttagaagagttggtcgaatgagggatagctcaataattaatgtagaggaaaactcttaagtgcctttgaagactattaaaaggattcgttttttacataaaaaaaaaaaaaaaaaaaaaaaaaaaaaaaaaaaaaaaaaaaaaaaaaaaaaaaataataaaaaaaaaaaaaagcaaaaagaatagcagccat

SEQ ID NO: 61856 - DNA, 218 bp, Glycine max
tattatacatacacaccttttaaaaaaaaaaaaacaataatctataaatatgcttactttgaaattctatcttacatacaccttcttacaacaacatatctcatatataatattacctaaattcatatcactcaccttctttttaaaacttcttatctataaaaaccctaactttacccaacttaattacctctcaatatattcccatttcaccattt

SEQ ID NO: 61857 - DNA, 448 bp, Glycine max
cccacgcgtccgcctaatataaaatcagctttgcgttccaaattaccaagctttcatgtcgtaaagcagctcaccatatcaaatattaaagaagagatggagaaaacattgcattggctggttctgattgctacaaacacggccaaagcacatcatggttttggttgggtaggggagtgggcaagcactggttctgagctaaataagaagaccatgaaggctgatgtgatgcggattgaaacgcttcaccatgccgataaagctaaagtagaaaattatattcttgaacttctcatatggcttcaccgcttggccatcaaaagtaaagatggcattgataccggagaaacgaggtctaccttaaagtctcatgttggcactgccattcaaactacaagtcaacaatcaacaaaagccttactgccattgttaacaactgacgagcaga

SEQ ID NO: 61858 - DNA, 330 bp, Glycine max
gttatgccagctggcttgcgaactcttgccaagccttacgagttggagcatgccatagatcctaggatgcatgacacacagccacataccgatattggactggggaatgcccatttacaagatccaaagcttgaccagtctgatccaaacactcattaaacttggccctgcacgtgagaatgacaagcaacatcttacatggcaacctaatgcttgcaaaggaatttcacaggtaagtccagcattcttgccaaataacgtgcctactggtgcacctacaggactaccagttgcagtagacacagaattggctatggccatcactgcatc

SEQ ID NO: 61859 - DNA, 265 bp, Glycine max
cttggagatgttcatggtttttgttttgcggaaatgacatacaacctagtggagacctgtagaagctcatacggaacccaagagaaagggaataaaagagggatagaaagaagtctcaagtttaaacttgtactctcgtattgcaaagtatgacactattccgaagatgtttcaatcgggagggatagaaagaataagtctcaagtttaaacttgtactatcttattgcaaagtatgaactattcctaaatgtttcaatcggact

SEQ ID NO: 61860 - DNA, 235 bp, Glycine max
aataaaaatataaataaaaaattaaaatataaaaaatacatatcaaactaaaaaaaacgtgataaaatctcatactcggtcttaaatatccatacttactttcacgttcataacaacatcttaactttaaactaatactaccaaatttcaatacattaccctatttctaacaacattcattctagaaaaaccctaacaattcctatctacaataaactttatactatttcatttt

SEQ ID NO: 61861 - DNA, 405 bp, Glycine max
cttgattctcccggcaatgaaagcttcggagagcattttttttccagccagaatgttgagtggatttagtgtttaactttgagatctgctgtgcaaaatctgttagccaaaatccaatattagaacagtaatttattataaatttggagtaagatgtctggtgaatcggctcccaaacccaaaccacgattagtgttatgtcctaaatgctggcaacttcttccagagtctccagattatgatgtgtacaagtgtggtggatgtggcaccactctttaagctaagaaacgaagaaatggggcttgtaactcagaatccaacacacatggaactgaatcatctcctagaaatgcattggacaaggtatccagtacacgtgaaactgatgcatctgctggtaatgca

SEQ ID NO: 61862 - DNA, 253 bp, Glycine max
  unsure (1)..(253): unsure at all n locations
ntaaatcataatgcataatagagggcatttcataaataaggtttcaacaagccatttatggattccaaaggccggttccattaaaattaatggtattaaaccaaccaggggaaaaaaggaaaagagattccaaatccggttttcacagagaccagaagagacacgccacttgataagtgtcacacaagatttcacaagagaaagggacatttcttttcaactatatactaaagtgactgatgagcatatgagg

SEQ ID NO: 61863 - DNA, 256 bp, Glycine max
ctacacctatcatgtctagagaatactgtcatattgcacaaaactttaacttctcctactctactcaaatctaattattagctaactcacatcaaaaatttacctcccaatgacaatagacattatatatattcaatgcaatcacaatcttctgttcaacatttacagaatcattatatctaacttaatcaacaccaattcatatactgcctctaatcatacatcatgttaccttctcaacttacatatgtctgat

SEQ ID NO: 61864 - DNA, 438 bp, Glycine max
  unsure (1)..(438): unsure at all n locations
cgaatatctcggtttgagacttcatattggtctccccaatttcttccactatcttgaattaggttaagagccttttcctctagtcattttaatcattctctttgtaaatgatagttgttagatgtggtagaagttgaacaatctcattctgaatttttgccaaacttttctgcaagagtccagcaagcgaaaatatcagtctgagacttcatattggtttccctattttcttccactatcttgaattgggtcatcacaatcgttcactttgtgaacggtagccgttaattgtggtagaagttgagcaatctcattttgaatttttgccaaacttttctgcaagagagtcctacaagtgaaaatattgatttgatacttcatattggtctccctaatttcttccactgtcttgaattgngtcaagagatttgccttttc

SEQ ID NO: 61865 - DNA, 218 bp, Glycine max
aatgactctcgatgcaatcttcgacagatgtcatattgtagccgagcatgatgggagtgaacctttatcaagctatgctcatacctatgatctgattcacgcgacaagcattgtatgacttataagggatcgcagctagtgtcagatgcagatgtagcctacgagatgtgcgtgatgaacttgatcgaatgatacgcccagaaggcactgaccacagt

SEQ ID NO: 61866 - DNA, 53 bp, Glycine max
acgtacacacctaacattatcacaagctatatagttgcaccatgtcattaatt

SEQ ID NO: 61867 - DNA, 432 bp, Glycine max
  unsure (1)..(432): unsure at all n locations
atcaaacttgtatattactccaggtgcactgatgctggaccatgagaataagaaggcggttgattccatgactacaagatggttggagcagcttaactcattacaagataagaatggtgaagatgtatcaaatatcaatgttcaagcagaaaaaagcctggttaaagattacttggtaaaattttctttgtggagttttttcatgattccttagttttatttatcttgtgaatttagactagacacatattgtaaagcttgatcttttctttatgaaaaggttgaccataatgcaagatctcagaatagaattataccagttcccagcccagcatccattgaggatatgagggcaacgatcatagagaactcattaaaattgatccanacagaaagcaaaatcacacgtctggcagcatctccaaatagaac

SEQ ID NO: 61868 - DNA, 282 bp, Glycine max
cccacgcgtccgaaaaaaaaaaaaaaaaaaaaaaaaaaaaaaaaaaaaagagaaaattataaaaattaaaaaaaaaaaaaaataaaaaataaaaaatcttccatctaattataatgttccatatttcctttcccttgcttgcatcttcataacttttttatagttaaaccttatttcattaacctgctccttaatttttactacgtcttccctgttaaaaccctgcctttatccattttatttcctcttcatttcttcctactttacccattttccttttta

SEQ ID NO: 61869 - DNA, 65 bp, Glycine max
gcctatttgaaaatttccacacctcttttaattgtcgtaatgatgtgtgaagtgtgtgttatttt

SEQ ID NO: 61870 - DNA, 193 bp, Glycine max
cccacgcgtccgcccacgcgtccgggaaaactccggaggtcaactcaagagaaagagagagtaatgagcattgcattgagtctcacacactctttgaacgcatgcttctaatgaagacgacgcatcagcctgaagcatcctaaggcgatccctgtgaaggtgactcaattctttttcttggtatttatgtggg

SEQ ID NO: 61871 - DNA, 95 bp, Glycine max
aaaaagaaaaaaaaaatactaaaatatattaaaaaaaaaaaaaatataaagggtaaatgaaaaacagggcggccgttctacaggatccagtctta

SEQ ID NO: 61872 - DNA, 371 bp, Glycine max
cggtgcttcataattataaattccaacaaaattgagtttcttcttcctattatatacttgcttcatacattctcttaattaacttaggttcctgctttctccttctcggtttggggctaaataattaagcttcgtagatttgcataaacctagttatgggttttatgagcgaagtaaggatggtagcttaaatttaataaacaacagagttggttatggtggggtcatacatgatgtgattgctgaatggatttctagttttatgggaatgttcccgttgttgacatccttcatgctgaattaatcgctttatattaaggttggttattgctgagtctatgaatgtttttcaactcatttgtaaaactgac

SEQ ID NO: 61873 - DNA, 375 bp, Glycine max
gttcaataaaaaaggaagaatcaaatgctaacatatgctattttgatgattcctgggagtttggatatcgagcaatatttttagttaacgtggatagttgaaatacggtgacttgtggtatgtattttctttttgcccacttttcatctgtagctttgattgaatgcaaaactgaatcacccctaatttgtaactcattttgccaggtcatttcatgtatcgaacaggtaagctcccctggctcaggtcatttcgatgcactgttgtgcaaaagcaaatgtggctaacatagatttttctaaatcaaattatgtagatttggatctggtattggatgatggatccagttgagaagtgttttttttccttgtcttg

SEQ ID NO: 61874 - DNA, 359 bp, Glycine max
cccacgcgtccggcgaaggggttgaagaagtgaggcttaggggccaatccttctgcagcatgttgattgatattgttattataattaggcttttagttttcattaaaaaaaacaaaagacaaccaaagaagagttcccccacaacctttgtatttttttggttgagggatacgtcttatgaaccagtgaaaaaaggctaaaggtgtaattaactaatatactgtagaaatttgtaaccgctgattagaattactttttactcttcctttattaatgtatgtttataaatcgttatagaagacatccatctatgaaggaattaatgactattttttttaatagtccatttttgtaatggt

SEQ ID NO: 61875 - DNA, 423 bp, Glycine max
cctaagtctttgggaatagtgctgcaatggcttcaagtcaggaggaggtgacccttttgggagctactggaagcccatttgtgtgcagggttcatattgccctcaagttgaagggagttcaatacaaatatgtcgaagaaaatttgaggaacaagagtgaactgcttctcaaatccaacccagttcacaagaaggttccagtgtttattcacaatgagaagcccatagcagagtctcttgtgattgttgaatacattgatgagacatggaagaacaaccccatcttgccttctgatccttaccaaagagccttggctcgtttctggtccaaattcattgatgataaggtttttggtgctgcatggaaatccgttttcacagctgatgagaaagagcgtgagaagaatgttgaggaagcaattg

SEQ ID NO: 61876 - DNA, 191 bp, Glycine max
cacgccctcaatcgtatgatggtattcatgcgttactctctcggccaatactgtaaacgggttacctatcttgctcgccatcatccatttgtggcatatatttggcttcagttgaggctgcatccttctgcattaatagaaccagattatgctggtgttgctcctggcaaatctgtgatggtggttgaaga

SEQ ID NO: 61877 - DNA, 82 bp, Glycine max
cacttgcaacgcaacaacgtaacgttgctaattgcttgcacttcccatggtcgcttctggtgtttcacattagctgcatctg

SEQ ID NO: 61878 - DNA, 96 bp, Glycine max
  unsure (1)..(96): unsure at all n locations
cctcaattcatcagttgccaataaaatcaagaaatgaggcgtgtcttccgaattaatcgtgtttcaaagctgcattccaaaaacacncctcaattc

SEQ ID NO: 61879 - DNA, 70 bp, Glycine max
aaaaaaaaaaaaaaaaaaaaaaaaaaaaaaaaaaaaaaaaaaaataaaaaaaaaaaaagaaaaaaaaaaa

SEQ ID NO: 61880 - DNA, 439 bp, Glycine max
caagtgtttttaacaaacagcaacagtacagagcattttgatgcatgtaagtggacaaaatcggaaccacattcctgggaattgatcttcccaatagaggtatgtggtcctaataatggttttgaaatgtggagttctgagtgggcaaatcaaacttcatggcatttgagtttccttattgacaatcccaaacagtctacagtttttgatattctcttgggaatttctcaagattttgaaattgctggtaatactcttatgccagctttttctgttccacaggctactgccagatcttctgaaaatgcggaatcctctgcatgatctggaatttgagtcttctttcgctagttcgtttgtttaattcaataaaggaaattaggcatgaccctctggttgagtatgctctgactatttgaaaatttccacacctatttta

SEQ ID NO: 61881 - DNA, 199 bp, Glycine max
atcatattcatacttatgttctgaataatccagatctctttctgccctattcttcgtaaggctctgggcaaccgaatctgtatggattcaatccatatctacacgccaatggtggttttagcctgttctttcatagatctatagctaggaatctcatatctacagttctaaggttcaacagagaatctatcacaagaac

SEQ ID NO: 61882 - DNA, 78 bp, Glycine max
aaaaaaaaaaaaaaaaaaaaaaaaaaaaaaaaaaaaaaaaaaaaaaaaaggaaaaaaagaaaaaaaaaaaaaaaaaaa

SEQ ID NO: 61883 - DNA, 378 bp, Glycine max
gtactgtgcataacggctgagttatgtacttatgttaagaataaaataaagtgctgttgttgcaaaaaaaaaaaaaaaaaaaaaaaaaaaaaaaaaaaaaaaaaaaaaaaaaaaccaaaaaaaaaaaaaaaaaaaaaaaaaaaaaaaaaaaaaaaaaaaaaaaaaaaaaaaaaaaaaaaaaaaaaagggccgcccttttaaaagaaccaaagttaactaacccttccttccaacttaaaacctttttaaaagggcccccaaatttaaattaattgcccgtattttaaaaactttgaaactggaaaaacctgggcttaaccaaattaaatcccttggaaaaaaatccccttttcgcaagtttgcataataccaaaaagc

SEQ ID NO: 61884 - DNA, 185 bp, Glycine max
cccacgcgtccgaaaaaaaaaaacataaaaaaaaataaaaaaaactaaaaaaaataaaggactgcgggtcttttatatacattccatcttaaattaagctgcaattaattatccaaattatattgttacctaaagtgaattcactttactgggcatctcatgacatcggcttaactgtcaaaaca

SEQ ID NO: 61885 - DNA, 302 bp, Glycine max
tgcatacacagggaaggaactcaattctttgagtcttgctcatactgttgctcaagttattccactgccttatactgattcaactgaacagcgtctgcatctaattatagacacaaaccaacacgcatacctatacccaagaactcctgaagctattggcattctgcaacgtgaattttcaaatgtgtactggtactcagttgatgctgataatggtgttatcagaggtcatgccttgaagagcaattgcattcacaaagtagtggatgaatactgctttgacttcagggattatggtctat

SEQ ID NO: 61886 - DNA, 264 bp, Glycine max
cctcatcaaatctcttccttctctgtggtgattttcaaagttcctaactttgctaacccgagatctggtaaagcgaactgaactagatgagggtgctgtacgcgctgatgctgcaactgcaaggcatgccgacggtatgaccgaaaagcgattgggtccacattcgcgacgggtggaacgactacctgaaacacgagtccgcgcggatataccaggtggttgacaactacccttacatcgacgtggacactgagctagcgggga

SEQ ID NO: 61887 - DNA, 156 bp, Glycine max
cccacgcgtccgaaaaaaaaaaaaaaaaataaaaaaaaaaaaaaaaaaaagaaaaaaaaggaaaaaaataggtaggcagatatattagttcacatgcttaagtacacttgcatgaaactgtataactctattattgtgtcacctaaatataattgt

SEQ ID NO: 61888 - DNA, 76 bp, Glycine max
tcgaagcaatccggttttgatggcttaatgggccaattaatgcacccagtggagaaccgggtggtcaaggtttaaa

SEQ ID NO: 61889 - DNA, 444 bp, Glycine max
cccacgcgtccgaaaccaactgtttgtgcacatatttgaaaatgtattcgttactaaaggaatgggctgtttggtgaaggatcatgaatgacttttatatctttaagcatctcttcatgcaacaaccctttgggcttaaagtttggacattgtacaagcccactctctagtctctaccttgtgctgaaattcagtttattttatttagaagagtgggagtgacaataattgaacccttgactaattttgcataaagactctgatacatgtcaactaccaattctcctaaaagcctaatgaatttagtaaacgctcattaattggttttaatatcttatctaatacaaattggaaacccaaaaaatatccagcaaaccatatttaagtagcaagaaaatgaaccaacttgaatgccaaccttgtgggtcttcacaagtttctttt

SEQ ID NO: 61890 - DNA, 144 bp, Glycine max
cttcgaaaaaaaaaaaaactaaataataaaaaaaaaaaaaacaaaaaaaatattaaaaaactaggtgtgcataaacaatatactaaaagaaattctataaaaatgaaagggctatatgtttaaaagaatccaggctaaataccc

SEQ ID NO: 61891 - DNA, 429 bp, Glycine max
acgcgttcgcactctaaggctgtattatatgacaaatgatacatgagcaggtgttcaaaaccaggtataaatctacatgctgatacaaaaacataaaaaatcacttaaataaaaaatcacatgaaccaaaaatatgaaaaatcacatgtttttcgattttcacatcttgttttaaaaatcaaatcagtatatcataattatattaatgtttatattgcgataattaataacgagtattaactaattcattactaagatttaatatataatcacgatgtatatggaattctcatgtacttatatagctaaaaacgaatgttacatatcatgggatacacgaattactattatattataaaataagttgataatattattatattgtaatactaaatagaagtgaagagtataattgttaattaaaatata

SEQ ID NO: 61892 - DNA, 115 bp, Glycine max
gggaaaggcctttgaagggttggaggaaaagaaggctgaacctggccaaggcaggcaccggggaatgggtttccaaggaaaaccttggtttcctaatggaacctttggctaaacc

SEQ ID NO: 61893 - DNA, 201 bp, Glycine max
agccttcggttttgttgaaggcccgaaccattcctgacttccaaatcgtcctctgaactgggtattagggccaaaggattattcaaaccgtttataacctggttccttccaaagtttccttaaggttacttgaaccccccggccaattttattcgggtaaagccattgtttaaaggcttgggggccccaaggccttgaact

SEQ ID NO: 61894 - DNA, 410 bp, Glycine max
cccacgcgtccggcttatcttatctacttgctttcttcagttttcttttcttcatttggggtagggttttcttttaaggtgttaaatgtttgaatgtttattctctctttaatgtttttgtaatttgtacagtaggattggtggtgggagtatttttcttatataaagtctttgtcttcatcatgtagcacttgttttatggtacgtacagcgctgttgctgttctgatcctgcaccggggaacagtgtaaacatcgtgagaaagttttttttattttattttatggggtaccattgacaaggagagtgacaggggtatgcaatgacaccatcgggtttggtattaaaagagagaaatgtgtacgtcgcttataatactatttatgaaaccagagaggacagaagcaacg

SEQ ID NO: 61895 - DNA, 337 bp, Glycine max
gtactgccctattacaccatactatgctcttaaaatttgatccatggcctaacttgctcgacttatcagcttgaccactataccttagatatggtatcatgttacacgatcagattcatacgacaaatcttacagattgactgagatgccatagaccagattgatcagatgatcgctcagcgtcacgctcatgactatccttatcggatatggacatggctaatgatgactgagtccttgctataccatgatgacaccgatgatatagtgacagtcgtaagggctatagcaactgtcaaatataatgtggcaacaaacttcgcgactattactccag

SEQ ID NO: 61896 - DNA, 139 bp, Glycine max
cttcggcgaccgcttgggaaaaaattacctttagaaaaggaaaattcctatgtgcttcgctgggtttctagattgtgccttaccctaaaacctacctttggccaccgctgatacttatttcaacataaatggtgatttc

SEQ ID NO: 61897 - DNA, 312 bp, Glycine max
cggacgcttccgcccacgcgtccgcccacgcgtccgggcgttcaaggtggtggtggacaaggacgccaccactaccacttcctgagcctattccaacgactgagccaccaacaccttttacaatttcactttcaccaccttcttcaaatccaatagatagtgccagagtgcattcgcaaactggatactgaggtatatgcatactaagaattctcgtttcaatagcaacaacagtatctacgcatataccctgatgaatttcttgaccaatctgatgcaatggagaaaggtgattatcagattgactatgtg

SEQ ID NO: 61898 - DNA, 445 bp, Glycine max
agaatggattcctgttaaacctaccccaaatgcatttattatcaatgtgggggatataggtcaggtatgttattagtacatgattttgttaacatcaactcttgaagtattaccctttctcctaaatggtccctaaagtcaaaaaaatacttaagtagtcaagtatttgaaatcattctaattagtcttccaaatgtaaaagaatccttttcaaattggttcttaaactttactcaaatatgtcaacttaaggactaaagtgatacatgttcaacgctttggagattacttaaaaatagtttattactttaggggacaacttagagaaaggattatactttgaagaccaaatttgtggtcaaatgtactaaatggattggttctttttcacaaaataatattctattaattagttcttaaaattagtccttcataagctgatgtg

SEQ ID NO: 61899 - DNA, 380 bp, Glycine max
cccacgcgtccgtgcagggtcagggtgtccgtcttactcctccgcccgctaacatgggacagcaagtccacggggctatagggtaggacagcaagcatcatagggactgataaacaactgcagtagaatgagtccgataaggacttaatgctttgtatggtagaggcatggatacttaaacaatacaccaaattacctgtacactatacctttgtaattgctacattttcaaattatgatgtggaagtatcgagatttcataagaaaaactagttacaagttaagatattaatataattagttacaagttagttattcttgtaaccaattatgcaacaacttattagtattagttatataagatacaatcattacaaaag

SEQ ID NO: 61900 - DNA, 343 bp, Glycine max
  unsure (1)..(343): unsure at all n locations
cccggtccgaccaagccttccggccaaaagttaccttttgaattttaacattgattgattgcgaactatttgctcagcttctgcatgtaatggaccaatggtattaatcttgtggcatgggtaaaaattgtaaatttcttataatatctaaatcacccgaaaagtaccaagaatttagtccattagcctttgctgctattatgcagatggatactgtttcaatgtttcacgtacaaaaacagaanaataaaaatggttaacagtgtctataacaaaaaaaaagcttnnactcaaaaataacatgcaaatctttgtcaagactttgactgacaagaccatcacc

SEQ ID NO: 61901 - DNA, 453 bp, Glycine max
aaaaaaaaaaaaaaaaaaaaaaaaaaaaaaaaaaaaaaaaaaaaaaaaaaaaaaaaaaaagaaaaaaaaaaaaatataaaataaaaaaaaaaaaaaaaaataaaaaataaaaaatataaaaaataaaaataaaaaatataaaaaaataaaaataatataaaaaaataaaagtggatgaatttttatgactttaattttaaatatgtttttttagataataattttttttttttgattaattctaatttaataattttggattttttttaaaaagatattatttttaaaaaactgttaatttttcaaattttatttattttaaaaaaatttcttttttcaatatttgatattttttataaatgctttaaactttctgtttttataaaatttttcaatattaatttgtaaatttgccccctctttttatcggtttttttaccctttgattttttt

SEQ ID NO: 61902 - DNA, 63 bp, Glycine max
aaaaaaaaaaaaaaaaaaaaaaaaaaaaaaaaaaaaaaaaaaaaaaaaaaaaaaaaaaaaagg

SEQ ID NO: 61903 - DNA, 441 bp, Glycine max
gcgattccggctccatgtaccgcaacacatttacctcaggtattttcttcttttttccttgtttggctttcacgacagcttcgtatctaatttttttttaaccttccttttctctgcgagtattttccgttatggctgaagaatttgtgaatggctttgttcatcaaaacgacatcgctgtcataacccacaatccccctaaaggcgatttcggctccatgcccacaagttgttgaagacgagtttttaccacaacacattcacctcaagtatttccctccttttttttctttcaacaccgcttcgtatctaaatttttttaacccttcctttcttttgcagtattttctggttttgcccaaaaatttggggatggctttggtcattaaaatggccttactggcataatccacaattcccccaaaagttattgggaagaaa

SEQ ID NO: 61904 - DNA, 410 bp, Glycine max
aatccgttggatgttgctagtggctgtcttgggggtaagagttaggatggtgtgccaaacttgtaaactctacatggtactggtttttaagttcaagttatttgcttggtgtgtttgagggagtgttgacaaaattgattttaaatgaaattggttttgcaaaattgattttggttcaaattgattttgaagtgacgtgatttatgtttaatagtaaaatttagtgaaaattattttgatccaatgcaaaatctatctaaagtaacttttactcgaaatcaatttttctcaacgtagaatcgaagatgtaaacatttatctaaaattcggttagttggtttttgaacgtgattctggataagtcaatgttaaaccaaacatgcactttgtctgtccctattatttatagt

SEQ ID NO: 61905 - DNA, 333 bp, Glycine max
tccactcgtgctccaagtcgtgcgacctatgtcccatgcatatgcagatgcaacaaacgcgacaggatctgaagaccactgcggcaccaatctggacctatactcattcttctactcctagttcctccggcgactacacctccgatgcaccatcgaatcaggtagctgaagcacctgacaagctcatacaagacgaacgaatcatcggagacatgctaatacggcgcctaccgcctcatcacagcgctctacgaccacgcagcgcatcctcaccaaggcaacacgtctctccaagtgttactcatgcagactcatgcatgcgatagtatctta

SEQ ID NO: 61906 - DNA, 175 bp, Glycine max
aaaaaaaaaaaaaaaaaacataaaaaaaaaaaacaatgacataatcagatgcaacaaacacggcagggatctttaagcaactacggcaccatatatggacctatactaatactggtactccttcttaatggggccaatctaactccgatgcactgccgaatcatacatctcaaac

SEQ ID NO: 61907 - DNA, 101 bp, Glycine max
tgaaccttggttaattccttaccctttaaggatggccagagccttaaattttaaggattttccatatcaaaccgtttaaaaaaaccggttcagtaaaattt

SEQ ID NO: 61908 - DNA, 258 bp, Glycine max
tatactcgtaatacaatacctaagttaccaactctcaaactgacatatagagtacggttatagaaatatatggaatgcataagatatctccatatatctatacttgtcattacactcaataacaagattattttacatcaaaaacatacaaatcctatataccacctacatcaactattgtctaaatttactgcaaatactatttgtacaaaatttattatcatactaacctagactataatgacaccaatgaataat

SEQ ID NO: 61909 - DNA, 245 bp, Glycine max
cccaggcgtccggtcttttaagttgcaaggcaaaccaaagctcaccacagaatggcgatgcttagtccaaaacagatgcatttctgaaactctgaaaggtatcttgtgaatgaatctttcgcgagtggcgatgagactgagtccatgatgcagatgatggatcagtttgtggatgatttcgacgcttcttgcaccgcctctattactttaccaagaaccatgataagttctctgatgattacttt

SEQ ID NO: 61910 - DNA, 423 bp, Glycine max
  unsure (1)..(423): unsure at all n locations
agccttcggatttttcaatattaatataaaaatcttaaattatgcattctcaaatggaggaaatggtatcttggaagtactttttttgtgtgtgagagatctcggaagtactttctatgtactccactacacatgcagcttattttagcatttaaacttatttatcctagtgacacagccaccatgaaagtcgaaatttcctggaaatttcctttggcaaaatctgatagtcagtctgacaaagacattaataatagatatcaactcaacagccatcacacaatgaagaaattaaaataagaaggaagttggtactatttactatataaaaaatatttaaaatacattcacatttctatttacattntatttttctttcctatttctctccatttattatcacatcatttgtcatatttctct

SEQ ID NO: 61911 - DNA, 347 bp, Glycine max
cccacgcgtccgcccacgcgtccgcccacgcgtccgcggacgcgtgggaaaaaaaggaaaaaaaaaaaaaaaaaaaaaaaaaaaaaaaaaaaaaaaaaaaaaaaaaaaaaaaaaaaaaaaaaaaaaaaaaaaaaaaaaaaaaaaaaaaaaaaaaaaaaaaaaaaaaaaaaaaaaaaaaaaaaaaaaaaaaaaaaaaaaaaaaaaaaaaaaaaaaggggaataaattataatgattcaaactttaaatgcatgtgcttaaaaattataatcttatatttaggagaactaaaaaaatagaaggggggctattgataaaagctatagagatggaaaaaactggagtttta

SEQ ID NO: 61912 - DNA, 408 bp, Glycine max
cccacgcgtccgctgatcactgcaccagttggtatgcataacttaccaaggttaatgttggtgaaaccaagacttcattgaagaaaggcacgaggagttgaaagctggcaaaaaaaaaaactgcattatcctctaatgctgtgtttggttgagggggaggagagaaatagaaaagttgtgagggttccatgtggatttctcgcttcctacaatatacttaaatttgaatatatcgcttatatttttatcctctattttcattctctggtccaaacacattgcttcaaaagatgaagggaaaagaataaaaaaaaaaaagatggaggcagaagaaacatttttttcctgttgtaaatagtgtgtaacttgaacaatgctgattacatgaaatattgatttgagctttgg

SEQ ID NO: 61913 - DNA, 373 bp, Glycine max
tcccaaatctggaagaatatcttgggaagcaggtcttagaggctgtttcattgattgaagttagaaggcacttcattgaagcattatccagtccgtttggaaggccagttgaagctgatgctgtcttttgcaggaaggcaacttttcttgctgcatctggtgttttcacgttcctgaagcagaagaaataccgtgtgacagaaatgttgggatccaattgcaagatatgggacttgagttccacattggaagtaatgagattctaatgtgggttttataagaccttgggctctctgactacaatgattagcttttgtggtatgattcactcaaagttcttatcaattggtattagagcttttcattatgtctc

SEQ ID NO: 61914 - DNA, 328 bp, Glycine max
cgcatactactacaacatccagtccacgtacctcggcttcattggcggcgtctacgacgcggactggaacgcttccttcgacttctcctaacatgacctttttatcgtacttgaccaagctttagctctcaagcgcaaataatatccttcccaaggccttctacaacccaatctccccaagctggaccaactaatcgacttctacgatcacaagctgtaaccgaaccagcttcgctacttggatgaaatcctacgcctccagggactcaccggtgacattcactgaatctcaaccgattctacggatgaattctattttgacaggtat

SEQ ID NO: 61915 - DNA, 307 bp, Glycine max
acaacgaccaatccacctacctcgccttcatattctacaattactactagaactgctactacaccttcgactacttctaacattaccttttaatcgaaatcatcaatacttatactctcataccccaaacattctattcctaaagcattctgcatccatatcttcacattctctacaaactctttctcttcgacttacacaacctttaacctaactaccttacataattctatctaatccatctcctccaattacttatctctgacattcacgcaatctcatccctttcatatggttaattctattt

SEQ ID NO: 61916 - DNA, 433 bp, Glycine max
  unsure (1)..(433): unsure at all n locations
tcgnccacgcgtncgnccacgcgtncgcaggggtcaaaatcgatcgtcatcgagtttggaccaacgtgcattcaatctgcaactctcggtagtactacagtgctatatagaagaaacgaaacgaaactctatggtgcttaatagtggtggttgagtttttaggttgagaaagaaagaaagacacggcgacgaagacggagaacagtggtggttcttcttcgcacgtgcgagcgtgctttaccatcgtctgtgcctgcaggtgtaggttcgtgtgggtttgtggttgaaaaaaaagaggtggttaagatcacggtttttgagtgaaggaacagtgagaatttttggtttttatttttttgaaaaatgcctcacagagcaacttactttttcccgaggcaagttcccggaagaggattggatgaatcttcgaagc

SEQ ID NO: 61917 - DNA, 353 bp, Glycine max
ctcactcgtccgcacatgcgtgctcccacgcatacgatcacgcggataagaggcagactactgatagtccacaatctcgcaagtaatagaacgatacgacggatccatccactagagctgatgccggtctcagaaaagttactgtatcagatcataccctatcacaaactcacttgataagtgatggatgccaatctcgattatattcacatacgataggtcatggattccatcgctgtttatcatactactgatgcaccatgcatgctcattaggcaattcgcattcgctgctagcgatatgcatgcgacagatcaagatatactacaacgtgcactgggacccatcaccat

SEQ ID NO: 61918 - DNA, 329 bp, Glycine max
acactaacacaaagacatggaactaagcaccatgttgtgcttgagtgcttgcggcgatcttcattgtgctcttcatggcactcatcaaaccttattagtgctacagacgccgtgacttgccactctcacatggctccatgggctggacttacatacgagaaacctttcaaatgtattctcaagatccaaatggcgtctttgccatcaacatacaacggtgcagatctttcactttcatgaacgacttcatgatggacaaacacacgaatctcacttacacacatcatgttcagttgcgccatctacgattggctctatgttcaagtccc

SEQ ID NO: 61919 - DNA, 358 bp, Glycine max
caagaatcttacattaatgcgacacaaatcttagtctgtttggttgctcgttactaacgctagatccatgtctgggctgaagccataatttataggttctgcatattatttgatgattgatacaataatttataggttctgcatattatttgatgatcgatacaaaaatttggcgcaaaacttgaagtcacaaacgtgtgtttgaaacacggtactaatgccaagacatacaacttcatggaaaactatattgcagatagataaaccaatattgtgatgctcatactagaagctattgatgaggctaacttgggatatagctatatcatatttggaaggagatggtttgccagacaca

SEQ ID NO: 61920 - DNA, 320 bp, Glycine max
acgcatgaatcttacattaatgctactcaaatattagtatcttcacatttccatgacgtcaaggcgatcacatgtatggcatggaccattacatatacttaacgactattatcctatgactgatccaataacctataggcaccgtctataatctgagcattcatccatatttgaagcacacgaatcgagacctaaaccggagagagctataacgctcttcaagcctgtcgtacattccccttgctcattctctctcactctcgattctgaccttatgaaaagaactaggtaacaatcaatatctgtggtccaaacaatgt

SEQ ID NO: 61921 - DNA, 269 bp, Glycine max
tccatagacgatggctaatttgaacttgctggacactctacagcaagtggtacatcatcattatccaagctaaaggttagagcgtgaatctgtagcatgtgggaaagggcttgagccatatcaaagatgcatatctgatgtgacagctactgatagagatgagcaatgtatacatcgtttcttgtagcttatacctcactggattcttgcttgaaaaagtgttcactttgagatgattagctgtaatggatgccttggttgctgctgga

SEQ ID NO: 61922 - DNA, 324 bp, Glycine max
ctcacaattcatttgttacaacttatatttatatatttactggtaaatattaatggacacgttacaaatttggtcattgagcctgtaaactgatcactatctacaatcttatgtcaacctatttacaaatttaattgaatcgactactgttctatcctttgaatctagacagaagcagtttaaatcttatctatgcaatcttgattacaaatatgctgaaatatcatcatgttaaggcctgatgactacacagatttattatttataactttaagtttctgaacaactatttcttcagctaacaattttaaaccatcgaacata

SEQ ID NO: 61923 - DNA, 234 bp, Glycine max
aaaaaaaaaaaaaaaaaaaaaaaaaaaaaaaaaaaaaaaaaaaaaaatataaaagatacgggctacaatactcctgcatcctacactaatatataatgtctcgtaacttcaaaattctgttatctggccaacaacttacaaccatggtaactgctattactaaggcaactctaatgctaattcacttcgtatccctttctcattttgccagctggcctaccaggtttaacccca

SEQ ID NO: 61924 - DNA, 409 bp, Glycine max
cccacgcgtccgcccacgcgtccgggctccaagagaggattttcctgcagaacaaggggaggtggatgttaatgcccgtaatttgctgcccatggataccacaggaaatgctaattttgaattggtgcaacttttgggagatttacaggcccttgctttaaatccttttcatggtattgaaagaaagatcccttcagctgttcagaagttctttctgcgattcaggtctcttgtttatcaaaaaagcttgtttgtatctccaccaactgagaatgaagctcctgatgttcgtgtcactaaacctccttccagtgtcgggatatctgacagtcctgatgagtatgtcaaagcttcaccggttgtaaaacctttgaaacatattgtttggcctgatgatcctacaaaagct

SEQ ID NO: 61925 - DNA, 374 bp, Glycine max
tcgagaagcttttcttcgagccttgaatgggatctggtttgctgggaagcacattaagcttggacctggtctttccaagattggaacctggattatgcaacaatcacagaaaggaaaagattaacctgattttggtcataggttgagggacaacctatacttaagggataataaagcaagaatgtcatctggaattaatgcatctggggtcagcttggaaaatggatataatcagggatttcggtctgaaacacagctacctggttttatggataactcactggttcatgtgaattctagcattcacaagaccacaagaggggcatttgctggaaaagtatctggtggttttgaagcctgtaatgctattgatg

SEQ ID NO: 61926 - DNA, 180 bp, Glycine max
cttccgaaaaacaatctggggcgaaagggggagtctcttattccttctagacgcttacattgatcggcgaggtctgatacatggcggagcatcacgaacacatacgaactgaagggtgagtccttgttggaaaaaataagggggaggatcttttaagactccctacttgtcttccccgga

SEQ ID NO: 61927 - DNA, 419 bp, Glycine max
ggcttgggtaactgattagatcgtagccttactctcttactgcccttggaaacagtgaatgcagtggatcctgaggcacccagtgttggtagtactgatgctggcaacagcaatgtaaataagagtgaagaggtcgctggaaattccaaaaataaaaagaagaataagaagaagagtggaagaactgctcaagaggaggaagatttggacaaacttcttgcagagcttggtgagacccctcctgtaccaaaaccctcaactccaccccaggatgataaagttcagcctactcctgaagttgtactggttgctgatgcttcgggggaaaaggagggtgaagaggagactgtagacacagctgctgcaaagaagaagaagaagaaaaaggaaaaggagaaggagaagaaagcagctgcggc

SEQ ID NO: 61928 - DNA, 334 bp, Glycine max
tcggaactaacgtgcaagttccaaggcggagtaaaccattatggccaccaaccaagagagggattttgagaaccagaagaatgaaggagaacctgagccttttgggtttgggaaaaatggcgccattgaaggcttaatggggggggccaaatctttccggtttcccaaagcaaaactcggaactttggaaatctgttgttggaaccgtggaaaacactgtaaccaccgttctgggtcccgtttaccacaaattcaacgctgttcccaaccacatcctcctttttgtcgacaacaaggtggatgaagctgctcacaaattcgatgagcatgcacc

SEQ ID NO: 61929 - DNA, 391 bp, Glycine max
gtagatcgtccagccgactgtttattctgagctcctaccctgtgaggcagctggtgaggcacctgactcacaatttgacgaattatatggcccatacaaagaaccacttataaaaacacttacagtcagtgtatcaagatcattacttggagatggcctgacagatgatctaactgtggccaatgattgccataatgaccaatctgatgtctaggccgatgcagtgaatgcttcagaacttgatactgagaatctcactgaaaaagttactgttactaccatcactgacaaatcttctaacgtgtctgatgatggcgaagatgcccaggagaatgaagagaagtctgatgtcattgctaatcagactgactctctaaatcatgtaactaaa

SEQ ID NO: 61930 - DNA, 235 bp, Glycine max
cccacacgtccggagatgcataaagcgcatacaggtcatgtattctcaaattctgaaagagcgatttatcagtccgcaagtgctaccaccactttctcagagataatggatgtgatgcccaaacacgacacaaatctatcacagcatgtgtctaccatacccgtgaaaccccgagctggagccccatttggagagactcttacattccaatcatacccatacctattagtcaatg

SEQ ID NO: 61931 - DNA, 336 bp, Glycine max
aagggctaaactaatttggcaaatttaacccattcaaaaataaaaatggtaaaaaaacaaatttgggagttttcaaaaagctaaattacaaatcctaacctttggaaaaactcaaaaaaaattttaaattttttttttcccggggggggttcaccacttaccatttgaaattggatatcctaaaataaccaggctaatttttaaacttttttttttcactggtgcaaaaatgaattggataaagggttatggaccaaacacccactttaaaatatttcaaaaaaatattggcatttttggatttaaaaaaaaaaattcccaattttaaaatttttt

SEQ ID NO: 61932 - DNA, 310 bp, Glycine max
cactgtcccaacgttaaccgatcaaaacccatctctgtctacctttatttgatccaaagttggctcacaaaacgtgaaaaatttcattcccgtgagattttcctccaccgatgcagattgaatttcaggaatcctgggtgtctgcgatacgtaatcaccctttccatgtttttattcattcgatctgtgatgatcataatgccactcatcggaaacttgttgatcgtgtgattttgttcttccttcccctgaatcccctggtttttttttccttttttccttttcctttaacctttttttttttccgggt

SEQ ID NO: 61933 - DNA, 253 bp, Glycine max
gtgttgatgaatttggctgtgtgatcatttatgtgtaagtagagtggtattgagaagctgttcgaggttggattggatgaaccaatattggcgaataggaacaatggattgatgaacgcattcttatatgaagttgttagtctcactagttcacactgcatagagcgaatgaaattcagtgcctgacatatgctgagggtctctaatgtctgcaaggatgtttacttgagacagatagatgtgatcatgcatg

SEQ ID NO: 61934 - DNA, 374 bp, Glycine max
  unsure (1)..(374): unsure at all n locations
nccacgcgtccggttaattntatcttcattgtggtttaatgtaattagactacaacatgcatatatacatataattacgttttattcttattgttatacaacaagattttgtcattttggaacttaagggtcttggcaatactcttgtaattagggtgctgagatagattttcgaacttgtcaacttctttctagttgcgttcgtagcaccaactggtattctctatttctctttgtggttgtgcatcttgcgcttatactaatctatttttcttataaaaaattatctataaaaaagaatcacaaaattattattaaatataactttctaatgtaaaattctaggttgcaatagaaaaaaaaaggtgaatttt

SEQ ID NO: 61935 - DNA, 440 bp, Glycine max
gaaaaataatcagcggcatcacacaccgtttccaccacgatctaattttcatggacgttgagattgatggctctgttactgtcgaaacagtaggaaatactgctataggtgaggttagtagcatagcggatgacaacagagaaggtggaagttctgttgaaccaaatgacaaccaagatcaacatgataatgggactcaagattcctctggagggatcactatcccatctgcaattcccacagtatcggttgtttcagttgaagagccctatgttggtcaggagtttgggtcagaagcagcagcacatgcattttataatgcttatgccacagaagttggatttatcgtacgtgtgagtaaactctcgcggtcaaggcgtgatggaactgctattggacgtactcttgttgcaacaaagagggattcaaaatggctgaca

SEQ ID NO: 61936 - DNA, 446 bp, Glycine max
cccacgcgtccggtgctacaatacaaacaatggcagctactcaggaagatgtgaagcttttgggtattgtgggaagcccatttgtgtgcagggtccagattgcccttaagttgaagggagttgaatacaaatttttggaagaaaatttgggcaacaagagtgatttgcttctcaaatacaaccctgttcacaagaaggttccagtgtttgttcacaatgagaagcccatagcagagtctcttgtgattgttgaatacattgatgagacatggaagaacaaccccatcttaccttctgatccttaccaaagagccttggctcgtttctggtccaaattcattgatgataagattgtgggtgctgtatggaaatctgttttcacggttgatgagaaagagcgtgagaagaatgttgaagaaacatatgaggctcttcagtttcttgag

SEQ ID NO: 61937 - DNA, 370 bp, Glycine max
atttattaataattagaactttcttttttcttaaaaaaaaaaaaagtaaataaaaagatttgatagaatcgtaatttcaattcgattatatagatacatagaaaaaaagaatatataataatagaagtaggaattattgatagaaattcattcaaaaatgaattcttaattaatagtaatagtaatataaaagattttatttagaagagaatatctattataatagattatatctatatagatataatctattatatacatttattttgaattacccctaatagaatatcaggccgatctctgtacaaataaaataacatatcaagtacattaaaaacgcggatatagtccaatggtaaaatttctcttt

SEQ ID NO: 61938 - DNA, 69 bp, Glycine max
aaaaaaaaaaaaaaaaaaaaaaaaaaaattaaaaaataaaaaaaaaaaaaaaaaaaaaaaaaaaaaagg

SEQ ID NO: 61939 - DNA, 280 bp, Glycine max
ttgggttttccttccttggaacctttaaccttcctttggaccactttttaaaaaccgttggctttttaaactagagccctttccgttgagggttcctccaggtgtggttggattaacagttcctgatgctgaagaattaaaaaagcttgaaggcttttgctcttctgggtgaaaaatgttggaaagtggtgcgaaattcccaggattaatagatctcaacaaaaattattaccaactactatgatttctctcaaggcttttaccataagcttggggaggg

SEQ ID NO: 61940 - DNA, 253 bp, Glycine max
  unsure (1)..(253): unsure at all n locations
gcctgccgtaccgtccgtnatcccggtcgcccacgcgtccgccactagnatctagtgcactcttgttatttcaggccactagaaatctagtgaatgtaagcctgctattgagatttgacaatctatttaaagttttgctgcattataagctgtgccccttcaactagcctctttaccacttcaccagcatgcttacattcactagatttctagaggcctgaattaacatgagtgccacttgatttttagtggc

SEQ ID NO: 61941 - DNA, 387 bp, Glycine max
  unsure (1)..(387): unsure at all n locations
nncgccacgcgtncgcccacgccgtccgtggacactggttccagccttttcaattagttgggaatatgcaaataaatattaatgtctgacaagtttaggccttggtgaaacaggagattgaagcttttcttactgctatttcttatgtttctttgatttgcattaatttattctctatgtatactcccagtgtttttgaatgttggtgatgatgagataattgatgatgatgattatcaatcatgtgctgaaggaactaaccttgaaaatagtggatggtcttccaggaccaggtttgtttgtgcaaaactctagtaactaacctttctctgcatagaaagtaattgaactattttttccctaattgtggtttgtaatcattaattt

SEQ ID NO: 61942 - DNA, 445 bp, Glycine max
aaaaaggataagaaggagaaagagaaggatcacaaaaaggaaaagaaggataaagaggagggtgagaaagaggatagcaaggttgaagtttctgttagggatattgatatagaagaaataaaaaaagaaggtgaaaaagaagataaaggaaaggatggtgggaaggaagtgaaagagaagaagaaaaaagaagacaaagacaagaaggagaagaagaaaaaagttactggaaaggacaagaccaaggatcttagcactctgaagcagaagcttgaaaaaattaacggaaaaatacaaccactccttgaaaagaaggataaagaggagggtgagaaagaggatagcaaggttgaagtttctgttaaggatattgatatagaagaaataaaaaaagaaggtgaaaaagaagattaaggaaaggatggtgggaaggaagtgaaagaga

SEQ ID NO: 61943 - DNA, 334 bp, Glycine max
aaaaaaaaaaaaaaaaaaaaaaaaaaaaaaaaaaaaaaaaaaaaaaaaaaaaaaaaaaaaagaaaaaaaaaaaaagaaaaaaaaaaaaaaaaaaaaaaaaaggaaagaagaaaaaaaaagggccaagcttacaaaagggatccaaaataatgaccgagttgaaaaaaaagacaaaaatggtaaaacgattgccaaaagaaaaaaaacgggacgacggtaaaaacacagtggactggaaaataaatgggataaaaaaacataaccgtttggaaataaagccaatttgacaaaagggctgaacaaacgaaaaggccaaaaaagtgggcatttaaaa

SEQ ID NO: 61944 - DNA, 296 bp, Glycine max
aaaaaaaaaaaaaaaaaaaaaaaaaaaattaaaaaaaaaaaaaaaaaaaaaaaaaaaaaagaaagaaaaaaaaaaaaaaaaaaaaaaaaaaaaaaaaaaaaaaaaaaaaaaaaaaaaaaaaaaaaaaaaaaaaaaaaaaaaaaaaaaaaaaaaaaaaaaaaaaaaaaaaaaaaaaaaaaaaaaaaaaaaaaaaaaaaggggattgattaaagatatattaatttaagaagagggaaaatataaaatggtttgtttttataggggtaaaaaaaaaaagataattgggagaatttttt

SEQ ID NO: 61945 - DNA, 358 bp, Glycine max
gggatactcacacggtaactgtgctcttgttggggatacagaggagtgtactgaattgaacactctgcctcatgaagttgatgaatatcgaattgctaaacaaattccgtgtggatttggtgggcctatctatccctcatgcaaaactatggcacttagtcacacatgaacatcaaacttactgtgaaatatagcatggttgattaaggacacgactgtagacaattctcacagagtgctgacagcttgacacactctcagatatcggcatttagtggactcgctggtatgcaatgatgcatctatcatcatgagaatcctattagcgactatgctgatgtagacagatagcatgaaa

SEQ ID NO: 61946 - DNA, 310 bp, Glycine max
ggatcgagtttcgctgtgtgacaaaaatgttgtaagaccaatcattgcgaaaccacatactgccgacgtgatcgagcagagctactacattattgacctgatactacgaaaactctaacggaatgcgtaactaccccgagactacacgcccatggcagcacctcaacttacagatccctcaaaaccacaattttattcgcgcacagctaccggatggccatcgctatgctgaattgagacctcttcctacagaacctcctcgggaccaccgagggcgtcaccctagtggaacgcctatgatctgctacat

SEQ ID NO: 61947 - DNA, 429 bp, Glycine max
  unsure (1)..(429): unsure at all n locations
cgccgatgccaaacgattccgatcgcgaaagttgcatccggcgccgccagatcgatattccgatcatgctccgncagccggtcagcgtttcgcgtcgcatcggaatccaaaccggttcgttctccgttccgtatcgcgtccaataagcctctctcgcagtcccaatccactctcaggttccccgtggaattgagttcgtgtgttgaatcgatgatgccgtaccacacggccactgcttctgcgctcatgaattccatgctttcaatttcaagccgcacgagcgcttggattcccgaaggtagctagcatctctaggattccttgatgttctttctacaattaattttcgggccaaaagcagactacttgaagatcaggaagcatagatgggattgcacggacattctatgatatgatgttcatcttgaa

SEQ ID NO: 61948 - DNA, 405 bp, Glycine max
ctcaatcctcagtcgcagaaaagggcgagacagagagcaaaggagtttcccatcttctgctggtcattaatttcacggccttttttcattcatggtcaattattgcagcacagaagacacaggtagttccacttagaagtgtactcatagtctatggaaatgcattcatcaattacatttgatttagcttaaatttttattctttcattattgtatatttggtaaaaaaattagtggcaattttgagtagaataatggctggtttttacgtgaatagtttctgtattataattgttgctgcgctactgctgttattttcagtagaaagcatagagctagtaaaatataaacattccgctggttaaaaaaaaaaaaaagatcaaaaaaaagataaagccaaagcca

SEQ ID NO: 61949 - DNA, 316 bp, Glycine max
gtcctattatactcccaatgtaccccgttcactcgatgattactgcaatcattgacaatggctatcaacacttcatgaatccctcattgctgctcaatacattgtaggaggtttgtaatgacccagatagcttggtgagctaatcaccataccagaaagcacacgctagatcactgggctgattatgctgatctgaagatatctgcgtctcgcaaggccgatatggacatgtcaatgagcagaccttgtagctgaacctaaggagtttattgaaccacatcaattgtcggatgcacagctacgagacatgacttat

SEQ ID NO: 61950 - DNA, 117 bp, Glycine max
cccacgcgtccgaaaaaaaaaaaaattttaaaaaaaaaaaaaaaaaataaaaaacaatggcaattatacaacaaaaacaatctcaaaaacaagaaataccactaaaaaggtcgacca

SEQ ID NO: 61951 - DNA, 385 bp, Glycine max
aaaaaaaaaaaaaaaaaaaaaataaaattaaaaaaaaaaaaaaaaaaaaaaaaaaaaaaaaaaaaaaaaaaaaaaaaaaaaaaaaaaaaaaaaaaaaaaaaaaaaaaaaaaaaaaaaaaaaaaaaaaaaaaaaaaaaaaaaaaaaggggaggagtttttaggggtctaaatttaactatatgtatattggaaagttatgattttttttagggtatcctaatttaaattatattgcacggtttttaaaatcttgatatttggaaaaatttgatgtttaccaatttattaagttttttaaaaaatcctcttttaatgatttggtttataagaaaatgggcattctctatagattttttcaaatatttgtagattttaatggatattt

SEQ ID NO: 61952 - DNA, 430 bp, Glycine max
  unsure (1)..(430): unsure at all n locations
gtgtccgccaataggtatagaaggtttattactcaagacttgccaaagtcctgcccattaaattgtagaaacaaggcatgtcactacttattttaagaaagtctcccataagggaaagggagaaaggatacaacgaaagcaactactttagttgttcagtacttctctatttcctgtggttccacgcactttctctatctacgttttcaaatttgaagtcaaacacgtccaatcgtcgtctttgtgattaattcccatattgtttccacggcagctttttctagcagtcgatggaaccatgaaagatggggtggatttgattccaatatcaagccgcaattcaaagcctccaggtgttgaattgtgggcagttcttgatgtccctgacattaggttggcgcttcttgganaaatttaagccattcactat

SEQ ID NO: 61953 - DNA, 301 bp, Glycine max
aacactcatacgacaacgcgtatcaactttgtaatcaacatgtacaggaagtgcgaagacctaatagagaaacgtcaagcgtactaggacatttctgacccacaccacttgtggtgtaactatatgattgctacactttgtctattagctgagtggaaactgtcaattgatttgatccggctcatgtttgctgtaaacgcactcatgtatcaattaaatctagtcactgtgacacacgctcgctagcatgtgcatgctgttgatcgatttgtaacgaacatgtatgcttatagtgctagga

SEQ ID NO: 61954 - DNA, 361 bp, Glycine max
gtctcatagctgagagtttaagatcggaattctggctccgttcttcttcatctgacctaccaccttaacctcgggattaaagaagtcatggctatatggggtggttgatggaagatattatcacaaacttggtatgcttctatgagccaaatctcgtgtttcacttctgcttcataatggtcttgaagggtctatgtgaaaagattgattcttcaaaatgctcttctaaaagctcaaccgagactgtagataatacacaagtgcccgtttattcaaaagcaggatctagtgactgtaagtttcccaaggcttacttatggtcaagcatctttacatctggtttttcagtggttgaaacata

SEQ ID NO: 61955 - DNA, 409 bp, Glycine max
tttggctaatttcttcagccacacacgaggttttgttacatgcatgcttgttgtgttttagaacgaaagttgtttcaatttggtcagctggaatattgtttcatttcctgcatgttgattgcttatggaagtttttctgtggtgttgtttattttcacaacgatagtgcctaaggtgaccctgctttgcccattcaagggtagcaacaataggattcatagggtggtgttgaagaataaaggtgtcatttttattttcacatatgttgccaccttgctcaattttaattgtatttattttttgtttaattaaagggatttatgaggcccttgaattgagagatggagcagtttcttgccattcacgacgtttcatgacgtttcttatctcaaccggagcagtttcctgc

SEQ ID NO: 61956 - DNA, 425 bp, Glycine max
cccacgcgtccgctttaggatggctaaccaacctacaaattttgaaaatgggaaggcaatgctctgacgtgttgttcgaccttaatgttggtgcaggagagttcccacagcttcaagtatttcagatgaggggaatgaaactcagaagctggagattggacaaaagtgcaatgccacatcttcaacatctgctcattgaaggctgtgaatacttgaatgatcttcctgaagaagtatggtccttgactaccttacgaaaagtgcatgttttgtggccttctgaaagattggcaaacagacttcaaaatgtgaaattaaagaatggctgtaagctcataatctctaatgctcctccaaatggtcaatcagatcagaatgcactgacacattctgtatcagttgatgcctgaaacaggatcattcac

SEQ ID NO: 61957 - DNA, 425 bp, Glycine max
  unsure (1)..(425): unsure at all n locations
cttctcggcatcgtcttggtttcaatggataaaggctccttatcgctctagtacatctgctccaggatccagcagtaggatagaaaatattgaagacccttttgcaattccatctgactatacttgggttactgctgaagcaaagaaaaagaagatgcaagagaagaacaagtcaaagaaaggaaaaagtcataactgactagcccacttcataagtaagctctacacttgggaagtactttggttatttagagaacttgggccatttgtctggaaattgaatttgaggctatatctttcatgtaggagtgagtgagtggtcctccaaggagttgtgcgttgacaatttggggcttgtggcataaggaaaagacacattgtgattcttgcaatagttgctggagttttcaactntacaccaaaga

SEQ ID NO: 61958 - DNA, 424 bp, Glycine max
ggaatgggcgttcacagcagttaggttttgggtgaagtggaggagattaaacagaggtttcatcaattctgattctctgaccgccagaacatggtgttttttctgttccctaatgcttcgttagaacccgaaatgaagatggtgatagattggtggacgagaattctattccgaggattctccaagtcttctcttcgcttgaacatctggtgttaattctgcagtctttgaacgagaatgagaatgagagtcagagtgaaggtgtccaagttgaaagtctttgcttctcgatcccctcattgaaatggttcgagctttgttccgatgaacaggagttcaatgttgttgtgaaggcagaaaatcttgtcaactttgtatgcgatcttgagggattgcacaaggttgcaacatgtgaaattacctc

SEQ ID NO: 61959 - DNA, 384 bp, Glycine max
attcatttgttcatggtcagctcctacattgtgggagcaggacgatggatcctggcagtttacgaaacagtcttggctactactctcatgtgggtttataacaaggttaacgttgacctcagagatttctgtgctgtatgatgatgcttatgcttaacattgtggcgacaacttgtggcacttcaaacgatgtgtcaagagctatattttgtcttagattctccattagcctgaacaagagacagtgcgagaatatctacatgtgaaaaaatttcgctagatgtttacatggtggaggcgtaaagcttttttagagcgcaatatgtgctgtgccaggagatatcttgcgttctactggggtagctgttattgtaacagctcaca

SEQ ID NO: 61960 - DNA, 420 bp, Glycine max
cccacgcgtccggttggcttaggatgcatagcaggagtaggagttcaccccagctggcaccatgatcgagttcgaatccttgcttctaaatctgaagaactaacactaaaaaggtggtggtcgtggtcgttgtttccttctgcttctgcacacgagactcatctgtgtcgaattagggcgaggcgtccgcgttgtgtgcctgataatagagaagctggggctggaaaggaagcggaagaagaacaacaactagagttagaatggaagctcctcaccagaaggattggcgattccggaataatatcttcatgcttggtcggtctcctcaccggcgtcgctgtcgtgctcttcaattatgctgttcatgaaattcgtgatttgttctgggatgggattcccaatcgaggcgcctcatggctg

SEQ ID NO: 61961 - DNA, 284 bp, Glycine max
gttcttctcttcgctgggaatgctaatgggcaccatgatgattgtacagactcatttgactgacgaacttcggggacatttagcttacactgcacgaatgtgaaccagatacagtggcatagccactgcggtacgatcatgaaaagcatcggcccaaactttcttgaatttcagaaaatgtaatcctcataggactaccattctaagtcactcatgaacgaattaactgaagtgttgcttaatataggctctataggagtgtgatagagatgatgcctgtgcac

SEQ ID NO: 61962 - DNA, 267 bp, Glycine max
aaaaaaaaaaaaaaaaaaaaaaaaaaaataaaaaaaaaaaaaaaaaaaaaaaaaaaaaaaaaaaaaaaaaaaaaaaaaaaaaaaaaaaaaaaaaaaaaaaaaaaaaaaaaaaaaaaaaaattaaaaaaaaaaaaaaaaataaaaaaaaataagaaaaaaaaatatatagataaaaaaaaaaaaaataaataacaaatataaattaatctaaaaataagcttatttccaatatcatctataacgacgaggtcaaatataacaaaggta

SEQ ID NO: 61963 - DNA, 431 bp, Glycine max
  unsure (1)..(431): unsure at all n locations
ggaaagtctttcttttttgggtcaactttgtgccttgcatatcaacagaatattagactcttctattttatattttaaaacagaatattagacttttttttagaatattagactttgagtttcatccgttcgacgacatggcctttgcttttagtttattcttaagtaggcttcaagtttttgtgagctaagacccaatctcattcaacgatcataattcacaatatactcctattatttattagggtccatgagagggaatggtgctcatattttcctagaattttaaaaaataaaaataatttagagcagtgagttatccttagacttatgatcaattttattagcttttatgctactaggtaatccttgtttgagtctattataagtgcaaaggatttatntaatgaaccaagctgtattcgactttt

SEQ ID NO: 61964 - DNA, 193 bp, Glycine max
cccacgcgtccgactttactagaatctctgtttaggattcttcctaaacttagtggcatatttgaaaggctcttgctgtactttgctgttttgctttattttagggctagggagatcccgggagggtggtggagggtttgggcagtggtttttagcaacagttggggctgctttagcagcaacatcattaata

SEQ ID NO: 61965 - DNA, 284 bp, Glycine max
cccacagcgttcgaaaaaaaaaataatttttaataaaaaaaaaggtgaattgatatcatggatccacagagacgaatggatgcattctacatcatagctctcatatagctatacgtactttcaatcatataggcaatcgttttactaacagcagtgactagcaaaactatgggatgaccaaacttaatgacttttgtaatattatgaattttgactgcttgactaagatcgtagagaaaagcattgtcgagcattacctgtatctgttcaagatgaacgatgta

SEQ ID NO: 61966 - DNA, 209 bp, Glycine max
acccagacgtacgcgtacgcttagccgttcgagaagtccttttagattttaacagatactcaacatgaagacgatctgggtcctatgataccatgaatgtgccctacagcatgagcatcattgtttacgcttatgttattgatgtatgaagccccctactgaaaacttctgcgatacttccaccattttaacttgtacttacaacttat

SEQ ID NO: 61967 - DNA, 294 bp, Glycine max
aaaaaaaaaaaaaaaaaaaaaaaaaaaaaaaaaaaaaaaaaaaaaaaaaaaaaaaaaaaaaaaaaaaaaaaaaaaaaaaaaaaaaaaaaaaaaaaaaaaaaaaaaaaaaaaaaaaaaaaaaaaaaaaaaaaaaaaaaaaaaaaaaaaaaaaaaaaaaaaaaaaaaaaaaaaaaaaaaataaaaaaaaaaaaaattaataaaaataaaaaaaaataaaaattttataaaaaataaaatattaagggaaatataataatattggaattgaaaaaaaaaaaattattaaaaggaaaa

SEQ ID NO: 61968 - DNA, 438 bp, Glycine max
cccacgcgtccgaaaaaaaaaaaaaaatttaaaatataaaaaaaaaaaaaaaaaaaaaaaagaaaaaaaaaaaaaaaaaaaaaaaaaaaaaaaaaaaaaaaaaaaaaaaaaaaaaaaaaaaaaaaaaaaaaaaaaaataaaaaaaaaaaaaaaaaaaaaaaaaggggggggcctttttaggggtcccagttttattttccctggtttgggttttcttgttttttttttggggtccctaaatttaatttatttggccgtgtttttaaacctttggttttggaaaacctttgggttttccaattttattccctttgaaataattccccttttcccaggttgggttattttaaaaagggcccgtccggttggcttttcataaagtttgccattcttgattggtattgggaacctcctttttttgggctttttaacgtgggg

SEQ ID NO: 61969 - DNA, 414 bp, Glycine max
cccacgcgtgcgtccacgcgtatgaaaataaaaagaataaaaaaaaaaaaaaaataaaagaaagaatgaaaaaaaaaaaataaaaaaataaaaaaaaaaaaaaaaaaaaaaataataaaaaaaaaaaaaaaaaattaaaaaaaaaaaaaaaaaaaaaaaaaaggtgaaaataatagatggctttacattaatcttcggtgttgtaataaagatctgtaactttttaaaagagatagatggatagactgaactctttctttaaaaacctaagatactggataaaatctgtgtttatctatttagatgattttgatatctatataaacttataatatttgtatatatcattaaatgatttgatcaaaaccatttagtaaagaatgttgaaactttataagtgtatgatgaatgtca

SEQ ID NO: 61970 - DNA, 318 bp, Glycine max
aaaaaaaaaaaaaaaaaaaaaaaaaaaaaaaaaaaaaaaaaaaaaaaaaaaaaaaaaaaaaaaaaaaaaaaaaaaaaaaaaaaaaaaaaaaaaaaaaaaaaaaaaaaaaaaaaaaaaaaaaaaaaaaaaaaaaaaaaaaaaaaaaaaaaaaaaaaaaaaaaaaaaaaataaaaaaaaaaaaaaaaattaaaaaataaaaaaataaataaaaatataaaaaaaaaaaaataataagattttagaatagtaatcgagaaaaaatacaatagaatatagttaaaaaaatttgtaatgttataattattgtaaaggggaata

SEQ ID NO: 61971 - DNA, 351 bp, Glycine max
cccacgcgtccggatcactccaagcgaaggaaactatgggcaaaacgttcctttttttctattctattgcttggagtgattaaggtttggggtttgttgatttcgtgtagtgattaagagaatggcagaagaaagcgagggaccgatagaggaaagggagatcatacctgtttggctctctggttcgttggtggtgactacccaatgaggactcgaggagacaaagtaaaagagaggagcaaggaatccataaattttctgttggttcttttctttcctcttttatatgttttcttttttaattatggatgttggggacgtgcatgtagccgatcgcaatacgtgcccatg

SEQ ID NO: 61972 - DNA, 203 bp, Glycine max
attaaaatgaagcgcactatattagatgaaaaccatctgtcacatactctcaatctaagacgacatttggataacatttctaatgtattacaagatatagtctcacttagaactacgaataatgaaatatgctagcctgattcatcgaacatttggaatcactgatggcattgaaaagtccacaaccatgatagactacttga

SEQ ID NO: 61973 - DNA, 150 bp, Glycine max
tcgcggacgcgttcggccacgcgttcggcaaccaccatgggttctctggggttgctccccaaaaaggttatcatcaccaggaccccactcttctactcgcacgtgcgccgcacgagccttcttcccgggaaacaaccaacaccgcattga

SEQ ID NO: 61974 - DNA, 358 bp, Glycine max
agagggacaaatctgaaaagtgaagaaacccaatacataagatgttggaagcgttattatggagttttttcatttccccactgaagattgtgtgggaatctctgagaattctagagagcaacaagctagtatttacttccatcctctgtttcacaacgctccctctctccttcctaaccttcaccctcgcaatctccaccttccccctccaatcccgcgtcctccacctcgagtccgtcgcgcgcgtcgccggcacgcgcgtcgaggcgcgccacgtctggcacgagtcccgcgacgacgccgtctcgcttcttgcgcacgcgcgccctcttcgccctcctctgcttccccctctccc

SEQ ID NO: 61975 - DNA, 402 bp, Glycine max
ctttctgatcatggacatccaagcttgcacttaactcatgttacattcagtcctgatggacacgaggttctcctcagctatagtggagagcacgtttacttgatgaatgtaaatcatgctggagtgaatgagatgcaatatacttcaggagatgattcaaagctgatgacatactctccaacaattaatgggacagagatgcagccttgtgtatctaatgtcttcccaaatggatttcctattaaaaagaacatcgctgcaaagcttgacaagtgcaggaaactaataaaatatgctaagaaatcattggacaatgggacaccctattatggaattgatgcatgtaatggaggttttgaatggctatagccatattattgggcctgcactgaaacatgaatg

SEQ ID NO: 61976 - DNA, 177 bp, Glycine max
gctaaactcaaaaaaaaaaaaaaaaaattaaaaaaaaaaaaaaaaaaaaaaaaaaaaaaagaaaaaaaaaaaaaaaaaaagggtagaagatataaaagatcaaaaaattaaataaaaataaatgaaaaataataagatattatatagggtcacctaaattcaattaattggccgaaa

SEQ ID NO: 61977 - DNA, 65 bp, Glycine max
aaaaaaaaaaaaaaaaaaaaaaaataaattaaaaaaaaaaaaaaaaaaaaaaaaaaaaaaaaaaa

SEQ ID NO: 61978 - DNA, 409 bp, Glycine max
ccattctctctgtgtatttccctacctctcccttcaagatgcagatcttcgtcaagaccctcaccggcaagaccatcacccttgaggtggaaagctctgacaccatcgacaacgtcaaggccaagatccaggacaaggaaggaatccccccggaccagcaacgtctcattttcgccggaaagcaacttgaggacggccgtacccttgctgactacaacattcagaaggagagtactcttcacctcgtcctccgtctccgtggtggcatgcagatcttcgttaagacactcaccggcaagaccataaccctagaggttgaaagctccgacaccatcgataacgtcaaggccaagatccaggacaaggagggtatccccccggaccagcaacgtctcatcttcgccggaaa

SEQ ID NO: 61979 - DNA, 437 bp, Glycine max
cccacgcgtccgaaagagtccttagggaaagagttacgggatatgcaatgttatgacccactttaagcaaacatggagcctttatttgttactaattaagtcttttcttcttaaaaggccaatcctcctgtttttggatggatttcagtcgtggcggctaacaatttatttattaataaatgctttaaaattaaaaataaagtcaaggaatgaactcaaacaagtcagtaatacagaagtatgtgggacttaaaatgtcgttttacgaaataaatgtacataacctagaaaatcaagaacgtgagtggtctagcaacatatgattgaatttattccactttattaatgattaaattttatggttatccgtgatattttcggttcagacttcagacatctagttataatattttaaaaacatatctgtctacactatc

SEQ ID NO: 61980 - DNA, 352 bp, Glycine max
tgtactagctagtgttgtataagttcacggtcagttctgaaaaatgggttccaaggttttgcttgttgtactcatgtccatagcggctatacttctgatctatgctgaggttgcacccaatgaatacgaacattttcactctaaagatgggaagcatgctccaaatgggttatatgatagccatatcagagagtgagagaatgagatggagagcgacagccactgcataaagtcggtgcacaaagagaaggagatgaagaagatgttggccctggatcacattgatcaacctcttgctgggaagaagctctgcatgcgaaccctaaaacttgatcgtagagctgccgaacac

SEQ ID NO: 61981 - DNA, 266 bp, Glycine max
cccacgcgttcgcccactcgttcgctctatttccattccacttaggattcaattcctaagcgattcccagcttgttagatggcccacaacgtttcaatttccagattcttttggaaaaaaaaaattatctttctttgcccaacaagtaaattggaaaaaaatggaccattacaagacttggtgccaaacttcttctgaaaggcctatattgcgcattaaccacagtggattttttggaaattcaaatatcatgaatatgtgttcta

SEQ ID NO: 61982 - DNA, 330 bp, Glycine max
gccacgcgttctgccaagcgttcgcacatcgttacagatccgtttcaagtttcactggggacttcatctgttgatgaaactgctgatttgaggtaataccataccagaaactatgcttattctaaccgctgctgattgtgctaacaacctctcactattcagccagaatgctgaacgttttcggttggttcttgctagtggattggtggttagggcaacgaaaggatccactaaccagatgtcgctgatcggaatgatgattgaaccgatccaataggcgaagaacgagctcgcattgaatcccacctcaaggtatgctagactcgtgcg

SEQ ID NO: 61983 - DNA, 355 bp, Glycine max
gcgtacggctatttactacatcagacaatttgagtatgtatatacacaatcgatcatactacattcgtaaaattgtacaggaatcttgagacttaaaaattattacacgctattgtagcaatgctgaccatatgaacaccagcaatactaaatgcagaagcatatatgagtagcatatgtcatgagcaagcaataacttggtaatatggcataggacataatgtctatgtagtatctggacatgcgtaacattatgtaccgtaagcgcaagccagaagatgttattgttcgaactgacagacatattatgctgtctgaatgcaagctcttactcctatatgctatgagtatgaac

SEQ ID NO: 61984 - DNA, 394 bp, Glycine max
cccacgcgtacggacacatatatcgctttactggttttgatgtacgcagcattttctctcttcctgctaaattctactatcacggcgcacgtcccagcgccaccatgtacttctacaattccatcctcaatgtctcctttggcaccttctacaccaccaccgtcccggactcttcctgctcctatcaacgtctcttacgccgccacttccatctacagattccgctcccactcctccaccacctattggatttggaggaggaggtggaagtggaattggaaaaggtggtggtggctcaagcgttggaacaggctcatgaagtgttagtggtggcgtacatggaagtataggacacagacctgatgcccatatatgtagtggcgttggcagcggt

SEQ ID NO: 61985 - DNA, 378 bp, Glycine max
cttaaccatcacttatgaaagctctctttaacgattttcaccaatgtcactcacacacgaatcagggttcacacccacattccaacgcattctgtctggattgcatcccaccatgtagcttaaagggcctcaaattaaggcacccattatggtccttaaaacggtccttgttctaaccagtgccacagcttatgacgtcaacgctatataatcacggaaactcgatgagaccactcaagggtctgacagaaaccgtgctgaagaaaagtgagacatcatgtgctgataccgcttatgaggcgtcacctgctactgatctacgagcagaggctccacaaccgactacgacagataatacacctgcatctcagtattgtc

SEQ ID NO: 61986 - DNA, 213 bp, Glycine max
gtgctggtataactacaactttttagtctatgctctagatctcacgacaagggatttgggcctgtcttagatggctacaactgttattgttggcagcgattagcctcttagaagatctgatggtaatgcaactaacttcaactttcgggataaatcatgggcaccaagttctaacttgtacttgaaggcaaacatctcaagtttaagaagtcg

SEQ ID NO: 61987 - DNA, 193 bp, Glycine max
aaaaaaaaaaaaaaaaaaaaataaaaaattaaaaaaaaaaaaaaaaaaaaaaaaaaaaaaagaaaaaaaaaaaaaaaaaaaagaaaaaaaaaaaaaaagaaaaaaaaaaaaaaaaaaaaaaaaagaaaaaaaaaaaaaaataatatagagaaaccaaaataaaataaaaatggaagaggtataaaaaaataaa

SEQ ID NO: 61988 - DNA, 401 bp, Glycine max
agctacccaaacaaaatccaaaccaccctttcggcctttaccttaccccaaacaacaagctatccccttcctgactgtgcctgaaattgtgaaatgcgaatctagccgacaccaaatcgcggaatcgattgagctgagacgcccaacgccacgctactacttgctggctgtgtgggtgctaccgctcgcttgcaaattctcttattcagaattgcagattgatgtcgcaactatttagttcacagttggctggtgcaagattggtgatgtagactgactgagccaagatgccattctgaacagagataagctggctcgctctttctgtagtcactgtatctatggcatctatcatcatgcatctatctttgacaaagttgtggactgttaacatagtgcag

SEQ ID NO: 61989 - DNA, 152 bp, Glycine max
cccacgcgtccgctcgattgtagattattaaaaaaaaaaaaaaaaaaaaaaaaaaaagaaaaaaaaaaaaaaagaaaaaaaaaaaaaaaaaaaaaaaataaaaaaaaaaaaaaaaaaaaaaaaaaaaaaataaattaaattcactgaccaga

SEQ ID NO: 61990 - DNA, 332 bp, Glycine max
caatttaccagctatacttgttcctttttataggttataagtgctacaatacaaacaatggcagctactcaggaagatgtgaagcttttgggtattgtgggaagcccatttgtgtgcagggtccagattgcccttaagttgaagggagttgaatacaaatgtttggaagaaaatttgtgcaacaagagtgatttgcttctcaaatacaaccctgttcacaagaaggttccagtgtttgttcacaatgagaagcccatagcagagtctcttgtgattgttgattacattgatgagacatggaataacaacctcttgttaccttttgatcctta

SEQ ID NO: 61991 - DNA, 346 bp, Glycine max
aaaaaaaataaaaaaataaaatttaaattaaaaaaaaaaaaaaaataataaaaaaaaaatgggcaaatggtattgaggatccacgtatatacacgaaggatatccagttctatgaaccgtatcatcaaactgtaaaattagtagaatgaatatgaatctgatgaattatcaactggcaaaatggtatccttagccatgaaaaacccacaggatatcaggagtcttaaagaaaattctagaatatttattgaatcatttagactgttttttacaaaaaggtacaaggacatagtcaatctaggctttgataaatgatgatcagtattatgtacaatttgttactgca

SEQ ID NO: 61992 - DNA, 241 bp, Glycine max
tcgatttcacctcatgatttgccttcttggccgctgtatattgtagtggagctgtgtctttgtaacatgaattatgtaggtgcgtcaattaaatgcaattttacaaaatcatttgttaaaaaaaaaaaaaagaagggaaacatgcttcaaaaggggatattaaaaagggcggcgtctgaggatcaagtacttctcttgatgcgaggtggacctcttctatagtggcacctaaattgaattt

SEQ ID NO: 61993 - DNA, 225 bp, Glycine max
ttcatccacgcgtacctcagtagatgaaccccaagtataataacaacaatcctatattatgcgaagcgggctcctaatgaggaggatatgatagcaaactgggatacagcggttgaagaagccctatgaatccggggtatggtggaccataatatagggagcgatggtgtggcccacattatggacttggattgcgcgggacccgtcatgaagatcacactcaca

SEQ ID NO: 61994 - DNA, 403 bp, Glycine max
agccttcggttgggtggcaactttggcaagtggatcaaaatcctggggaaaacctttttaggagaagggtaaccaccattactgggtcaaaaaggaattggggttataatgactggccagccagtcagccacctccaaaggaaagaagctctatatggggttgggatctcgaggcaaacaatgatactgaaactctggaggaatatcataaagagagtggcaaggaattaagctatggtaccttgaaggcggtcttcgcaataaaggcttcaagcgaccaccttatattaagaatacactggatgatgtttcatcttcattgggggacacttcagtccagaatgaaggatctttgcctacagcaaggacttcaattggttctgatgctcgtgttcaggacaag

SEQ ID NO: 61995 - DNA, 177 bp, Glycine max
ctggccatctcaggaacatcttagtaactggcgcttcaagtgcattacgtcatgatccgggaacactatcaaaactaggtatcaactataacacaatcacttgatcacctaagcacaatgactcaatacatggctagaaagccgaagatgttatacaatacacgactacacacggag

SEQ ID NO: 61996 - DNA, 429 bp, Glycine max
gccacgtcatatcccagatcttacataatctccacctgaatcacagaaatgcatgattccgatcacccaaataaaactttctaacaagggagtctgttttaaattctattagtaaccggtagatgaaaccaaaacattatgctcctttaaacgtttctgaaaatgagctaaacgggtttgcaactgcaggatgccagcagccttctgagaaagaatggcgtttagtcttgttatgtaatcatccagctgattccctggttgatctgcttcaaccaagaggttcatctcctctctaacaatgttcatggtctcctctacttgtgtccggtgagcatttacaaggtcctcttcttcctgtaggagggcatttaaatcatcctcagcatgtgtggtttgaggttcaacttttgggaggtccttccatttgat

SEQ ID NO: 61997 - DNA, 228 bp, Glycine max
tcggccacaccgagcgaaagatcgtgaaaaccaaacttaccgggttttttttgacatatccacatgcattaagggccattaccggattattgtaaacacctgttaaacccttcaaaaaagtgtgtttgaaaccttcaaccaaaggtttattgaaaggaccccgcccaaaggggttttgatttgaaccctgaattcttttggtcctttgaaaaagggttattaccggtg

SEQ ID NO: 61998 - DNA, 303 bp, Glycine max
aaaaaaaaaaaagaaaattccataattgagaacatacaaaaatggagggaaaacgggaaagataccaaagctaaacgcgctagagtagtagatacgaaagactaaaaattcggcacgcacttgcagtacacgggtggatgggggaacaagtgtgctctgccaaaacttggaggagtgtgaagtaaactgcgttgcgaagccagctgctatagccagcggactgggctatgaaacggactatactattcgacctgcctagcaggggaacggcctgattgagcaattgggacgcaccgtgtagcg

SEQ ID NO: 61999 - DNA, 121 bp, Glycine max
aattagacactacctagctctaacattctagaccttcggattactatttaccatatggcaaaatctagaatgagaccaacaagggcaacatcatcttggatcaagtcaacagctgtaatat

SEQ ID NO: 62000 - DNA, 252 bp, Glycine max
cccacgcgtccgttccattctctctgtgtatttccctacctctcccttcaagatgcagatcttcgtcaagaccctcaccggcaagaccatcacccttgaggtggaaagctctgacaccatcgacaacgtcaaggccaagatccaggacaaggaaggaatccccccggaccagcaacgtctcattttcgccggaaagcaacttgaggacggccgtacccttgctgactacaacattcagaaagagagtactct

SEQ ID NO: 62001 - DNA, 279 bp, Glycine max
cccacgcgtccgatgcagttgtgcagctccgaccaacattacaacatcttaattctggtggttcaaaacggaagaacgctgcctccactggagcaaatgctactgtcaaaattgagggctcaaatgaagagaagtctgttgctacatcaaagaagcagaataagcagacaggaccttctattattgagcaaaagagtgatggtgatgagtgctgggttcctctaaagtaccatagctgcaagagtgatatatcctctagatatttgcagcaaatggtga

SEQ ID NO: 62002 - DNA, 403 bp, Glycine max
gcacggaagattcgtggcatgaaagccatggtgaattttcctgaagcatcacgtacttcttctgtagaacgttacactgtacatacacaggaatgtcttacaactgttaagaccaatctgcttcacaagaccatagcatttacacttaacactgcaccagctacaacatagaaccttatgacgacgaatacatagatgaggaccattaaatacgatgaagacgacggctatcatgaaccgattcgtgtgatgacgcaatctgctacttccaagcagatgaaacaacgtttcaaggtggaaacgctattgagatgctagtcatgctagctggttccgatcctagtgcatgacatggtcatcaacgggaccaccaacacgaacgattgtgtgatagaagcggatc

SEQ ID NO: 62003 - DNA, 165 bp, Glycine max
tacaaaaataaattttccccccattccttgttccaaatgatgttttttcctccttttaagggggtttactaacagtacaaaaaagaaaagaaaaaaaaactatgaaaatagggggaaaatttatttttgtaaaaaatattaaatattaatattataaaagggcgg

SEQ ID NO: 62004 - DNA, 160 bp, Glycine max
tctttccccaaatagtcaaacaaatattttgacaactactaatattcagttttttaagattttttaaaaaattatatacccaaccacactcatattacctatcttaatcattcaatccactaatccaaaataaattctattacttccattttactaatac

SEQ ID NO: 62005 - DNA, 257 bp, Glycine max
cccactcttccaaaataaaaaaaaaaaataaaaaaaaaaaaaaaaaaaagaaaatttaaagaaaaataaaaaaaaaaaaaaaaaaaaaatataaaaaaaaaaaataaaaaaaaataataataatataaaaactaaaactacaaaatataaaacaacaattacattttataaattcaaattctatctactaaacatttcaaacatacataacttttctatacacataaacattatattatattacaatttttacatta

SEQ ID NO: 62006 - DNA, 173 bp, Glycine max
tcattgtcttaatgttatcaatgtcttcctctttctccatccatttcttgctccttctctgaatatcccttttctcagtttgatacttatcatcatcttaagcttccaccaccatatcacacccctatatcctttccattaataatgactcttcatcaaatttatactacact

SEQ ID NO: 62007 - DNA, 399 bp, Glycine max
tcggctcaatggctctatttttccatttcatgatttattgtggcaaattccgaggatgctgtggtatgtgtgaaacttttttgggttgttatatcatgtagtatatgtactgcttacattacaagtactacatatactgtcacttgacgccagtagaatctgttgattggatttaggctctccctttgctaggattctagtttctttgcagagttacttatgctatattgtagctgttacttgcctcacatgaccaaaacacattttttagaattaaacattgtttttaacaatttaaatattagcttcaagttcaaaagcaatatggtcagtgagtcaatcaatgctttgacttaatgtacaacttgtttactaaagtcttaacttgtcttcaatggt

SEQ ID NO: 62008 - DNA, 243 bp, Glycine max
aaaaaaaaaaaaaaaaaaaaaaaaaaaataaaaaaaaaaaaaaaaaaagaaaaaaaaaaagaaaaaaaaaaaaaaaaaaaaaaaaaaaaaaaaaaaaaaaaaaaaaaaaaaaaaaaaaaaaaaaaaaaaataaaaaaaaaaaaaaaaaaaaaaagggttttttctatattaaatatacatttttaaattattgccctaaatttaaattaattgcctttttttaaaaacctttaaatttataaa

SEQ ID NO: 62009 - DNA, 297 bp, Glycine max
aaaagaaaattaacatatgtgaagttgcagaaattcaagcttctcgaagttttactgtagcctagacatgcttctctgtgttcttacctgtgaagattccaattcagtttttttaccttcaatttttccgccattttgctctttgttcagttgttgtttttccttctgaggcttatttgtgtggcttagcagattctggctcattttgcatgtgctatttaccttcaaagttgttgatcagagactgtgcacatgaatcatatcttattgtttattccatgaatttcttttactatt

SEQ ID NO: 62010 - DNA, 316 bp, Glycine max
agtggtgagcatccaacgcaatactacaattactgatctcatcctttcatggcctacaaacaaaggcactactcttgtcagttttgctctatcataataaacaaatgaagaaaaatacatcttgtgtctgaagttctagttcagttgaaaatgtgcaagggtagatatttccgaaaaagaatccgtctgctgaatgtgtttgcttgaattggtagaaaggtgctgatccccttaaaatggaatgcagcagcaaaggtgaacttgcactgtcacattgagagtgtgcacttaaatggtttaacatcaaatgcaacat

SEQ ID NO: 62011 - DNA, 418 bp, Glycine max
cttctctcttctctgcattgtatgcagttgtcagattttcacatcttgcagtgagttgcaatctggtacaagacagtatgtaagtaggtacttccgtactgctgttgaggttttgtctggtgatcaagtatcttgttcctaccttggaggctgcaccatcccagcggaatgcatcaagttaagccattataggggttggaacagggattcttgatcaaccaacctgagtacagaattcttctggtgaatctgcagaaaataattactctgataaaaagaagcgcttgagttcatccgcaagttttgtcagtgcggtttgtttgatgtactcggcgcaagggaattaaattgttgcaggtcaattgagatttgaggggcagtcacaagatatttttttaaaccatttaagcttgggttg

SEQ ID NO: 62012 - DNA, 386 bp, Glycine max
gtagttataaatttaaatgtatttgtattagttgttaatatgtttgggaggtaatatgtagtcaatttttggatgtggttatatgataatttgaatgtacttgtgtatgatgcatatgcccttaagatgaacgaagatcaatggacgtatgactatatgatgtcacaagaagttcatatggattatgattatgataatgaataagaatgtggtgtgaatgaaccacatgttgattgttcaaatgcttttaatacgtctcaggtaattggtactcgagatgatgttttgcagtgggctcgaacagttgcccatgaaaatggatttgttgtagtgattatgaggtctgacacagattccggtagcagaggaagaagttcatttggctt

SEQ ID NO: 62013 - DNA, 173 bp, Glycine max
tcttcctaaaaaaaaaaaaaaaaaaaaaaaaaaaaaaaaaaaaaaaaaaaaaaaaaaaaaaaaaagaaaaaaaaaaaaaaaaaaaaaaaaaaaaaaaaaaaaaaaaaaaaaaaaaaaaaaaaaaaaaaaaaaaaaaaaaaaaaaaaaaaaaaaaaaaaaaaaaaaaataataa

SEQ ID NO: 62014 - DNA, 459 bp, Glycine max
gtactgttctattagttcatactaagttctgaaaatgagttccaaggttttgcttgggctacttatgttcttggccactatacttctgatctcctctgaggttgcacccgatgatgcatacgagaattttgacaaaatagatgggaagcctagtgcagatggggtagatgaaagcaagtattggcgtggctgctatggtggcggctatggtggtggttatggaggtgggcgtttaggcttttgatgtattcgtgtttgctattgttgtttacattatatttttggttttttcttaattatctattttattgttctttatatttactttctttatatattgtttcatttatgatttcttttttttttctctatttttctatttttgtttattttctttttttctaatattttatatttttttgattttttatttttatattttttttttttttttttttt

SEQ ID NO: 62015 - DNA, 304 bp, Glycine max
aaaaaaaaaaaaaaaaaaaaaaaaaaaaaaaaaaaaaaaaaaaaaaaaaaaaaaaaagggaaaaaaaaaaaaaaaaaaaaaaaaaaaaaaaaaaaaaaaaaaaaaaaaaaaaaaaaaaaaaaaaaaaaaaaaaaaaaaaaaaaaaaaaaaaaaaaaaacaacaaaaaaaaaaaaaaaaaccatgacataacaaaacaaaaatcaaaaaacaaaaaatccccttttcgaaagctgacaaaaaagctaagagaccctaacatatcgaccttacaaacagtagcgcaacccaaaaggcaaatggaac

SEQ ID NO: 62016 - DNA, 276 bp, Glycine max
taaaaaaaaaaaaaaaaaaaaaaaaaaaaaaaaaaaaaaaaaaaaaaaaaaaaaaaaaagaaaaaactaggactataataaatcctaaacttacttacacatccttccaacaacataacaaatctttaaattacacctaaattaaataaactaccacgccattttacaacttcataacttctaaaacctcgtcgtctctcaacttattatcctttctgcaaatcatcctttttccatcttccttaataacaaataagccccctcctattacccttc

SEQ ID NO: 62017 - DNA, 285 bp, Glycine max
taaaaaaaaaaaaaaaaaaaaaaaaaaaaaaaaaaaaaaaaaaaaaaaagaaaaaaaaggaaaaaataaaaaaaaaaaaaaaaaaaaaaaaaaaaaaaaaaaaaaaaaaaaaaaaaaacaaaaaaaaataaaataaaataaaacaattaaaataaattaaaaaaatctaaactaaaaaattaaaagaaacactaacataatataaatctaaatactaataataactttaaaacaacatacataaagaatattacataaaaataacacaaattatataaaaattaa

SEQ ID NO: 62018 - DNA, 417 bp, Glycine max
gcggtgtgccgtcccttgttctttccgttgccttccaaaattccatcgtttgaagatgagctcaggccagagtactacagcgtatcctccaccgtcatctgcacctgctcaaccacctattggttatcccaccaaagaatctccacagtaccctcagaaatcagtggtggaaaccaagtccaagggtgatgggttctggaaaggatgttgtgctgcattgtgttgctgctgtgtcttggatgcatgtttctaaaggctgagagattgcatatacagaatgttttccttcccctttctattttatattattgtttttcgaataaattatgtatcgtttgaatgaataaggcaatactttattacttatttttcagtgttattcattatattttaggtagatccgtaatgtaattatat

SEQ ID NO: 62019 - DNA, 126 bp, Glycine max
gcagatattacatacacgtgaatcactaattaagccatggagaagaaatcaatatctgtgttgttcttcctcttccttgttctctttgttgctcaagaagttgtggtgcaaactgatgcaaatact

SEQ ID NO: 62020 - DNA, 352 bp, Glycine max
caaagatcaattaccttgttcttttttttttttcctttttgctccatctcgactacgttatttatccataccggttctactttcaaaagcggcaatttcataacaatgaacacaaatgaaaaattcaaattgtgcgagacaaacatgcatgggttgagtgatttgatgagttgaagagcctatccaattgagatgttgaggacgatgatggcaaaggatgagcaagttccaaatgtatgcaacaatggtgagagttgaagactcgattagagtgtagagatgatcccaaagagaggcttaaatttggattaaataaactttactacttttgagagtgcttgtatttaattta

SEQ ID NO: 62021 - DNA, 226 bp, Glycine max
tcgcccactcgtccgctgactcgtgtattgcattgcatatcgtttgccagggcctttctgtgtacactgtgacttatattgagtctccacaagcaaaaaaaccaacaggaggaatagttgtaatgattctattgctggtggtggtcaaggcgttataagcatttgtttgaccatgatatgactaatgcgtaattccaatcttttatggataattttttgttcatat

SEQ ID NO: 62022 - DNA, 354 bp, Glycine max
cccacgcgtccgaaaaaaaaaaaaaaaaaaaaaaaaaaaaaaaaaaaaaaaaaaaggaaaaaaaaaaaaaaaaaaaaaaaaaaaaaaaaaaaaaaaaaaaaaaaaaaaaaaaaaaaaaaataaaagggggggcctttttaaaggatccaattttacttccccttgttttcaaatgtattagctttttttttgggtcacttaaattaatttaactggccgtggttttaaaaattcttgattggaaaaaccttggtgttaccaatttaaatccctttttagaaaattccctttttgccaattgggttaataccaaaaggccttccacaaattgcctttccaaaaatttggaaagct

SEQ ID NO: 62023 - DNA, 356 bp, Glycine max
gactcacgtgcgctctaaagagaacttagaagcgaatgtggcagcgactggggcagaatcaccatgccagctacgatgccgacaaccaactccagattcgactctgaggcgttgactcaggcgttgattccggagactgggtcacagactgtatcacaatatatctagattaatgcaaggctgaatacagtgctgcaaatagtcctgtgattcatactgtctatctggataactatggtgatgatgatggctataaggatggcgtataataccatgtagattaccatcttatcaagcaatgcatcagctgatgcatctgctgatattacatttcatatatgatctgatgtcagtta

SEQ ID NO: 62024 - DNA, 297 bp, Glycine max
gcagcctcgtattccttcctctgggttgatgcctgcaagtgatgttcttattcgtgcaaaggaggttagtctactttggtcccccctccctccaaatggttatggttgtttggcaatcaccatgtaatattgcctgactatttttcttgtcgtaaagttacattagaacactattcatgcggaagcttttatagtacttccaattagagttcaagagttttatatatccttttgactttcatattctaaatataatctctccatggaatttcttggttgcagattttgccccaaaca

SEQ ID NO: 62025 - DNA, 64 bp, Glycine max
cggaggcgcttatggcgtcgggtcggagttcgaagaactgagccttccatcactccattccaaa

SEQ ID NO: 62026 - DNA, 378 bp, Glycine max
ggatttaaagggctactattcaattgctatcaagacaacggatctttcaatctttgtaactgtctagtatgctttatctggttttgaatgtaagacagtaagagtgtcttcatgactgcagttccccgaaactccaaacttgtatgttaaattcatttttacttgatgtgtgttttgatcagcatcactgaactgtggacgtgtcacacttgaaggtctgttatttatgaaattttatgtgactctcgcagaaatgtgacatagacctctagacgtagaatcaatctgacccttagtcataaaggattggggatctgctttcagttagcattcatagctgaagtgaaatgcatgtctaaatttttcataactaaattt

SEQ ID NO: 62027 - DNA, 162 bp, Glycine max
gctttctatatttaatattttatatatctttttactaatgttaaaggaattttatttgttttataaattaaaaataataaaaaaacataaatttaaaaagattaaaattcatttaataaaatgatgtactaaaaatttaaaaaatatataagtatattagat

SEQ ID NO: 62028 - DNA, 154 bp, Glycine max
taatacataatatatcttttaacttatcctaaactaaatatatgcggtgtataaaataaatgaggtaactaaacatacatttaaaaacattaacaaacacttaataaaattatatacttaaaataccaaatatatataactatattatataaac

SEQ ID NO: 62029 - DNA, 283 bp, Glycine max
cccacgcgtccgatttatgtaatgttctacctgaaaaataataatataatctgttttagtattgttaaaaaaaaaaaaaaaaaaaaaaaaaaaaaaaaaaaaaaaaaaaaaaaaaaaaaaaaaaaataaaaacaaaaaaaaaacaaaaaaaaaaacaaaatcaaatagacacctaaaaacaaagaactggcacaaagcaataaaacgataacgaaatacaaaaccactgaagctaaccaacttaattgccttctacaacatacttgttttcgaaaatgtcaaa

SEQ ID NO: 62030 - DNA, 395 bp, Glycine max
gccctgtccgtggcattttcgtctttctctaatttcttcttctttctttctctcagttctcttttgaatcaatctcatctcatccctaacaaccacacatgcacgcaccaccatcagatgttgttctgagataatccagataccctttaaggttttttacttcatagctgcagaattccttgcactttgcttggtttttgtctctttccttgagggttatcggattcttcctttgccaaatcttgactgctatgttcttcagttgggatgaaacatgatgaagacttcggctcgattttacaataaagggatattggtattcagtgaagtgaagttaacatttgagatacagaacaagagaaaagcaaatttgatgtaactttttctgatttttt

SEQ ID NO: 62031 - DNA, 386 bp, Glycine max
ggaaggagcaacaaaattagcagaatcattgctcaaaggaactgaagagtttgtgaaacttgacctatcatattgtggtctaacatttaactttgttttaaacaccagtgttaattttttttgttctgtcatagagctgaacctggaaggaaatcctatcatgcctgaggtttgttgccttgactagatttctattgctaatattattgtaatgcatgcttcattggctggttttatttgagtgttactatgtattacttcaacactcaaaatagaatctggcttttcatactatttctttacccttaaaacactggcttgcagtttatagatttaggtatagctgtggcattttggtgataattttgagtttaaccagtttctta

SEQ ID NO: 62032 - DNA, 209 bp, Glycine max
gctttttctgttccacaggctactgccagatcttctgaaaatgcggaatcctctgcatgatctggaatttgtgttttctttcgcttgttcgtttgtttaattcaataaaggaaattaggcatgaccctcttgttgagtatgctctgcctatttgaaaatttccacacctcttttaattgtcgtaatgatgtgtgaagtgttgttatttt

SEQ ID NO: 62033 - DNA, 66 bp, Glycine max
aaaaaaaaaaaaaaaaaaaaaaaaaaaaaaaaaaaaaaaaaaaaaaaaaaaaaaaaaaaaaaaaaa

SEQ ID NO: 62034 - DNA, 411 bp, Glycine max
caatgaaggagcatcgttcatctagtccacaacctttaccacttccatcccctcagggaggttgtgcattgaaggctattggcagctttaagtctgtgacatcaggtggctcctcttactatgcttctggacctttgccactcccacctactgggtcacttcggaattttctgtacgaggaaattgctgctgcttgccaccatttctcttctgatagatgcatgtcagaatgtctttcatccaccatatataaggcttccttcggtgacgatgtttcaagttcgaagaagtttgaagctactgtcacacggcttcacccatcttctcagggcttgaaggaattcataaatgaagttaatactcttgcatctttgcaacatccaaacctttgtaaattgctaggaattcatg

SEQ ID NO: 62035 - DNA, 386 bp, Glycine max
gaaagagcataaagcctcaggaaaaggacattggacaattttaactttatgcacaatatattgtcctgtaaatatgttatgcagttcaaaggacatccttatgcgcgtggtggctcaaaatctttccccagagtcggctcttctggaaaaggtgatgactccaaatccagaatgtgcatctctagagacaacaattcttgatgcactgcatatgatgcataatgggaagttcttacatcttcccgtggtggacagagatggaaatgctattgcttgtttggatgttttgcagataactcatgctgcaatttctctggttgaaagtagtcctggagcatctaatgatgcggcaaacacagttatgcaaaaaatttgggactcagctt

SEQ ID NO: 62036 - DNA, 375 bp, Glycine max
  unsure (1)..(375): unsure at all n locations
aaaatctgtgcaaatttcaggttaaaagaggctaagtaatgcagtggtaaaagtggcagttgggctaagctcaccatttttgggctaagcgcagcttcagcgtgacagagaagctggcacaataccaatatcaaggccacacgctaagcgcgagatcagtgtgctaagcgcaggggttgtcattagccaggctcaatgcatgactagcgctatgctcaaatccacttactcgcgctaagcgcaatgtcgcggcttcagagcctatttaaagctggtttgtgcagaattatggtaacaatccaaagaatcaccatcacgcatagaagtcagagcacaccacagtgcctatttcgagaaaagaactctgtangcagc

SEQ ID NO: 62037 - DNA, 185 bp, Glycine max
taaaaaaaaaaaaaaaaaaaaaaaaaaataaaaaaaaaaaaaaaaaaataaaataaaaagaaattttaaaaaaataaaaatataaaaatattacttattaattacatactgcttttactttttctaatttctaattttccttactcttatttatttcttctttctttttttttattcacctttaa

SEQ ID NO: 62038 - DNA, 301 bp, Glycine max
ctcacttcctcttggtgaccaagcagagcactgtgattctttgttttcggacggtgtaatgagttttttttttatccttgagagctttggtatagaagggatatagaaaaagataggagcagggagagggaggaggatagggacaggagacaagaaaaggaaagagataggagctgggatacagtgatggagagggataggagaagggaaaaggaaagagatagaagtagggacagaataagaggtggcaagagagataaagacccagagaatgaaagggatgataagcatcgggcaagag

SEQ ID NO: 62039 - DNA, 221 bp, Glycine max
tatcatcagaatctgacactctacactttactatacaacctaaccttaaactgaacagaatataaccttagctggatactataatatcatatatattcataacatacttaacttaaaaatgaaattttacttaacttaactcatgtaatatctcatcaactatatcattacaattacagctcaactaatatactacacctcacattacatcaactcaaaaa

SEQ ID NO: 62040 - DNA, 279 bp, Glycine max
aagagagagaaagtagagagagagacacacacaactcccacaattgcggtgcctaaccttaatttcaggacacttcgaagctaccaggaccaattgttgttgttcttccctttttgtgctttttgattcagagatttttggttttcgtttttttttttcacaaggagaaagttcggtgtctttaagttgaataacttgttgggacatatttgatttggcgctttttcttttggtgcttgcctcatgggaaacagtgaggaagagaaatctgttaaaact

SEQ ID NO: 62041 - DNA, 357 bp, Glycine max
gcgttcgccacgcgttcggcacttaaagggttctcggcggactttcttcaaacaccgtacgccacggaaattcaaattaacaccaccgctctgtcagcacaaatcccttgccactctctcccacttcggaaccctaacctcccgccagaaagaccagattcatctatacgttgaaactcttctgcaatggaacaagcagttagagaggtgaatgaagggatggaaagacacgttgaagactccgctcggactgcggcgctttgtgcaataagctgagtctcgtcgatgtcggaactggcgctggccattccggaatagttttggccataacacgccctgagtgggatgtaacgctga

SEQ ID NO: 62042 - DNA, 378 bp, Glycine max
gttttattacacaaataaggaattgattctgagtgcacattttgatttgaagctacttttggataggataaaataaattatactgaattttactactgtttttggttttaaaataaaaaaatgttcaaacataaatcatgttgtttcaaaatcaattttaactcgaaatcgttttcattcaaaattggttttgcaaacattgatccaaaccgagtcttttgtgacgggttgtttattgattagggtattgaaagtaagaagtgggtgattggattttgaggacattatactagctggtcatggatctagttgattataattggatcttgctctggtgcttgtgttttgtttgattaaccttttaatctgtgggtttgt

SEQ ID NO: 62043 - DNA, 74 bp, Glycine max
gaaaagagtatttgggttacacctaatctgattttttctttcttttttaaatggagagtgcaattcacttgtgc

SEQ ID NO: 62044 - DNA, 213 bp, Glycine max
acggctatttctaggtcacactctactaccatatctactaaaaatgccttattcccttggttgacagaaatttgcgttgtctatctactgataatacgtacaatgcaataccaagaaaatacacatgaccctattgttcacaatgcacttcctattcgaaaaaatccaaacccattttaattgtcgtactgatttttaaagcgttgttatttt

SEQ ID NO: 62045 - DNA, 227 bp, Glycine max
attaatcctatgtctttttggtccaaaaaaaaaaaaaaaaaaaaaaaaaaaaaaaaaggaaaacaaacaatataataaaatccaaacttacatacacatgcatgcaactttataaaatattatataaagtaacctaaattaaatatgactgaccttttttatacaaccaacttactggaaaaaccttgccgttacctaacttaattttcttgcaatacatcttcatt

SEQ ID NO: 62046 - DNA, 402 bp, Glycine max
gccgccaccgttgttgcccccaaagtatatatatatttttaatttataattctaattttgtttttatattatataaaaatataaaaattagaggaattgaaagtttgtttttaatgtgctgcatttctaatggtatggaaagggtgagtagtagagtaagggcatgttttgatgaacttattcagaagcccttgtaggagaagaaaatgaaatgagtttcttcgtaagttgaaattagcttatgcatgagtaaaaaatcacctttttgtagaagctcacttgtataacttctctaaattagcttatgagaagttataattttttttcctcatttttttctgcgccaggtgcttcttcatcttgataagtttatccaaacatgccgtaaggttcttaattaag

SEQ ID NO: 62047 - DNA, 375 bp, Glycine max
ggaaacattgaacaaagagctggaatcaaatctggaaagtttggctcagaaagaacaagaggtaactgatatcaaaacaagaattgaagagatcagagagcatttaagcgagcttgagctgaagtcttctgatttggccaagaacatcttgtcaatcaagtccaaggttgataatttagacagcaaatccttgctagatgaactagtttaatgaaattgtttttgtctttgaatttcgtcctcagaattatggtaatgcttaaattgtagaatatggtactgaataaacgcatgagctatatttttaagctaaaaaaaaaatattataagagatagaaagaatacataaatgaagttaatactattgaatatttg

SEQ ID NO: 62048 - DNA, 160 bp, Glycine max
aaaaaaaaaaaaataaaaaaaaaaataaaaaaaaaaaaaaaaaaaaaaaaaaaaaagaaaggaaaaaaaagggcgaccgatctaaaggatccaaagcttacgtacgcatgcatgcaacgtcatagctcgttttatagcgccacctaaattcaataaactg

SEQ ID NO: 62049 - DNA, 284 bp, Glycine max
cccacgcgtccgaaaaatgattctcaaattcagagactaaaacaccaattaaatcgttacttttttacctttcaaaaaaaatttaaaaaaagaataaaaaaaaaaaaaaaaaaaaaaaaaaaaaaaaaaaaaaaaaaaaaggaaaaaaaaaaaaaaaaaaaacaaaaagtataaaaaaaagaaaaataaagtataagtacttaaaaaatgacaactaaaaaaaaaaaactgaaccggaggataccaaaataaatactaggaaaaaccaggtagtatacaacgaa

SEQ ID NO: 62050 - DNA, 422 bp, Glycine max
ttttgtttccagactagatatacaggctgttcatctaataccaactacgcatcaagaccctgtatgtcctgattcaaaatattcccaggctcggtacttctttggtaagaatctgcgtgcacaaaacttctcccgagaaattaaagaatgcacaatccacacgcttcctgaacgtggttttgtacttggttgattgtttattttgccaatctggcattatatatagagcattgtgctagccaaattttgtgagttgcattcaaagccttagaaattaattttaattacgaagatgagcaagttcgtggggttgcttttgctgcttttgatcactgtggccattgctgaatacgatcaccatcctgaacatgagaaacatgggccatgtgggaaagttcagcacacaaagaatgttgacacat

SEQ ID NO: 62051 - DNA, 383 bp, Glycine max
aatcaactcaaatattacctgtcaaaatcgagacaaattcagatccatatgaatggtgttgtcatgtctactttaaatgaccaacacacacacgtatgtcaatcttgcccatgatgcctcgatcaataattatgtgtggccaacaattacattaccattttgtgtgggagcaacagcctggtcgatgtagttggatcattattatttgattaatgacgatggtacatttgaaaatgattattgtatatttggaaaatgttcatttagcgtccactcggataaatagttaattacatacatacatatctaaatataattaattggttctaaaaaaatctaaatataattaattatatatagttcataagtggttaagagttttt

SEQ ID NO: 62052 - DNA, 388 bp, Glycine max
cttcatacaagattctattgagatgggtgctaggcatgttggtgctgcaccattggcaggttcacatatataccgaccccatagaggcagcacacatgagactactcttagacatcgaaatcttcctcccgtgacttttctccaagttgatcaggtttcattggaaaggtgatcgtggtgacgttgtgttgtggaggctgcaagaaatgccattgcggccaccttgcttgtcgtgcatcttgcgtcacagattgggtatggcagagcagtgaggtttcaaccatcatttgcaaagcagagtcaggatgttactttactggttgaccatcataatgatatgcgcttggacattgaggatatggcttatgagtcttgggagtggaaaaca

SEQ ID NO: 62053 - DNA, 129 bp, Glycine max
aaaaaaaaaaaaaaaaaaaaaaaaaaaaaaaaaaaaaaaaaaaaaaaaaaaggaaggaaaaaaaaggaaaaacgataataaaagatccaaactaaaaaaaacatacatacaaaagggtcggcctttttt

SEQ ID NO: 62054 - DNA, 182 bp, Glycine max
cccacgcgtccgaaaatcttaattttctataaaattgctcaacaaattttgcagcgaagatgaggctgtgcatgacttgtggatacactacaccctattaacagtgtctgtagttcttaaaaattcattcgctatgtaaacgttttgcccgagaggacaagatcctgaaatttgtgagattt

SEQ ID NO: 62055 - DNA, 278 bp, Glycine max
aaaaaaaaaaaaaaaaaaaaaaaaaaaaaaaaaaaaaaaaaaaaaaaaaaaaaaaaaggtaaaaaaaaaaaaaaaaaataaaaataaaataaaaaaaaaaatataaaaaaaaaaaaaaaaaaaaataaattatatagaatcactaaataatgggactagtgttaataatttaacaattttaataatgttaaaactataacaattacttttttttagggcatactattattaatttctttccccagttttatacacatttatatttggaaaatcgttgt

SEQ ID NO: 62056 - DNA, 285 bp, Glycine max
acacatactacaaaggttttgaaaatttcaaatggtggtgcttatctgggagccagtaaacaagttactgtggcaagtaagaagtctgctaaatccaagccactgaatttgtgtcctagatctgatggatgtgccaggacttctattgatggctgggaatggcataaatggtcccgaagtgccagtcctgcatataaagcacgtgttaggggtcttccatgtgtccagaacaagtgcatagattctgaaaataatttatctcagttgtcaaatggcaagggtctt

SEQ ID NO: 62057 - DNA, 304 bp, Glycine max
tccacgcgtacgcccacgcgtccgctcattgtgtgaccacagttattattacattgcgggatgaaccatgttaatgcagatgtgcgcttaccttacctttgcggagcgggttatcatgggcacatcggacttataccaattcgttctcgacacaaaccgtatacgcgtgacctgcgatgatcagtactacatccggccagacctaacgcgcacttgaaggcatcacacattgatcaacctgtacaggtccggacctgtgtacaactgactcgtaaacaccgactcgtcactcagctatactgtg

SEQ ID NO: 62058 - DNA, 228 bp, Glycine max
cgcacacttgccaacacgatctaagtctacgccattattgttccatactctctagtggcgcgcttactcgccgtactcatcgccagtaccgtcaataagatgctcctactcagctccacctacgacctacatggctaccttatgagcgaaatgagcatttaaattgtggtatacgaggacctagagaggttccgctgagatgccatcaagcttgtatacgctactcat

SEQ ID NO: 62059 - DNA, 262 bp, Glycine max
gcgaccactgcgtccgtccactcgtccgcacactcgtccgatcaaccgcaactgtgatctacgctcgttgcatgccataataataaacgatcaatatttaaatattgacatcataaatgtctagaataattgattctatatctgattggtaatgagaatcgagtctgtttcagatctgagaactttaggttatcattttcaatgctctataaactaggattgggtataaaatgtaacattctatggaacaatatatctcata

SEQ ID NO: 62060 - DNA, 370 bp, Glycine max
atggtgtgtgtcaggtctcggctttctgctagggttggtattcattctctttaattaggggcaagggtgctaagacattactggtttaattctgacatttttattatggcatgattgtcaagtgtcatggcactcgcttgtcgtcactaagaaaaagacttctgcactgagaccgaacagatcgacattaactgtcgttcataggatctgcatgcatcattcatttccctgggcattccattagcttgagcaaggaccctaatatgatgctactgtgaaatccgctcctttcagcctatgctaatttatgatgatgatcatgccactttgacactttacgggctaggtcaccactacatcaaattgacat

SEQ ID NO: 62061 - DNA, 304 bp, Glycine max
cacgatcagatgagaatgattgataacattaatgcacttatttctgagctgtcattggagaaagaagaattgattaaagccttgacatctgtattatctgagtgttacaggatgaaggatataaacaaggagttgtccacaaagctagaggtccaaacacaaagattagagcttacgactgctcaaagcatggactatgaaaatgtttatgctgagcaactagattgtaagtgctatgtatgagaacaccccatatgcagagtaaggtgattaggctctggaaagggtgctaggatggattatg

SEQ ID NO: 62062 - DNA, 413 bp, Glycine max
ttccgatcgaccagctccagcttcttccttctctgagctatatctagacggccctgtataaaagctataatgactaaggctctcatgctacataggatactatcaatagactccatctatatgctatctactaagcgttgagctacagcacttgaacactgaaaacagaatcactatttaacgaaatgatcgttcaatgcagactatcttgacagtcagctgattgaatactggagagagacaggcttatcaggctatagaactatgccgcattctgaattgcgatattgactcacactatagcttggcatcaagcatacctgttatggaggattcacaccacatgaccaatacgcttaaacacatgctagtgcaagctgatcaagctgaacgtcctggctttatggaaaggt

SEQ ID NO: 62063 - DNA, 423 bp, Glycine max
cccacgcgtccgcaaaaatgcatgatatttttcccccaaccaacattctgatgatttataaattgcggttatcatcaggcggatattgcctatgtttcatttcttgaaaggttccaaattgtcttctctgaaatttttaagcacgacatcacagcaggaagacccaaactagccacatggattcaggttcgtagttctgtgcaatccaagaacatagtaatttgaaattaattaagttcgcattcatctataagatgaaatggaatggtctatttgaataaggcccgaccatcctcctaattttgatttcgttagatttttcttttccaaaatatgtacatgattttgtcaattgttaatgcatgaagggaataagatcgatggttataagcagacacaagttgacagggaggaatatctgga

SEQ ID NO: 62064 - DNA, 295 bp, Glycine max
ctgaagtttcctattctataccaagaaggtgtgcaaatgtcctctttagctggcgtctgatacttagctggatgcttaatggatttattagtgccacaatgatattcttcttctgcacaaaagcgattgagccacaggcctttaatgaggagggaagaactgctggaagggatatgctggccgtgacgatgtacacttgtgtggtctgggttgtgaacttgcagatggcgcttgctatacgttacttcaattaatattgaaaaaaagaaagaaaaaaaaaattaactatagtagg

SEQ ID NO: 62065 - DNA, 265 bp, Glycine max
acgactcacatgtctttttccaatttctagtctctcacttactcattatcttacgctctataaacaaacttcatcatcatatacaaatggtatttttatgccatcattacactctatgatcctagatccttactcacttatacttcacaatactctcacactcaccctataataactacactcttactctctagcaaaataccttacatagttacaacatcttacacctatatcctaactatcttatactatcaatacccgacac

SEQ ID NO: 62066 - DNA, 369 bp, Glycine max
gaattgccgcatgcatccacgcatgcgtccacgcattcgtccacgcggttcatgaaaaggtgctattctgctttcccaggcctatgtgttacatcggataaaattaataccaatccataatcattgctattaacaccatgtttgaacatccaaaagagatccttatccagcacaccatttacagagacactcctacttctttcaactgacattactgctctcatactgctctcactaccgctagatcaaagccaaatctgtcaccatatgtgtatatgcttaatgccaatgatgcttctcatttgctttctttgaccttcactggattgaatttggcatacatatcactactgtactaaatgtcaaaat

SEQ ID NO: 62067 - DNA, 80 bp, Glycine max
cttgatctgacagtaatgaacagttcacttatagatgtcaagtcccatagataacttacgggacatcacttcaataatga

SEQ ID NO: 62068 - DNA, 357 bp, Glycine max
cgcacgcgtgcgtgcaactattcccggatcacgaatctccataccttagatatgtacgtggatgcggatatatactattataacgcatgtcgctcaggattataaataaatatatactgatatagctgcagagcgaggactcttattagattcttcatttgcactgattaacgatggatatatagagagagagaatcagatgctgattcagatgaagtcacttatcttatctatatacagtctctgacatactggtttgtcaaagacatacattcatttgaagctaaagctgcggcttagttatggatatggactgatgatcgatccgtatttcacacacgttggcgtcaacggatg

SEQ ID NO: 62069 - DNA, 405 bp, Glycine max
cagatcgtaagtgtgatcctgatatacgacatgtcgatattgacccagatgctgagctttcgatactagccagggatagtgtgtagaaggtaatggcaaaccaataggctaacacatatttcactaaagataaaagatccacaaaaggcatctaaacaactatttgtcgagtcattgaacagagatagttaggatgatattccaagcatcgtagttcctttcaagggatgaacaaggcaaaccaacgcaacacaactactccatacattttcttcgtatatataatatcaatatgcactcccatctgattggagatctcgtgaaatccattctctacaacataggtttagctcattactgtgtaaaactgatactcttcagattagactgtgccaatctaatatc

SEQ ID NO: 62070 - DNA, 345 bp, Glycine max
gagattctagctgttggtgatgttcggttattatgtgtatacactagctaatcctgagggacattccgctgggaatggatcgaatcacttgaacagcaccacaataatcgacaattctcaattctgctgaaggatattaacgaaatagagagaaagaactgaagttggcagaagttcatggaagggttcgcaagtgctcatcctatcagtagcatcaggtgatggtgatcgaacacggggagtacgcaaatggaagtatgcgggatgagcacagagaataaattgcaacataaagtagtatataacgtgagtggaatgcaagtgccaagctgcatatgttactac

SEQ ID NO: 62071 - DNA, 426 bp, Glycine max
cgagcaagtcttttgagaaaaaaataaaatcaaagagcatttctcattttccatgcaatttctatgtgactgcaggatttctttgagggaagaagaagtagatcaagttaaaagattgcagatatgcttatgtggcttgttttgatgtttacttagttatgagggaaaaacactattttcaagggaagagctgaacttgcggaaagagtggaacaaaatttgccgagagattttctttcctttgacttgacttgcaagtacaatacaaccaatttggttgtttgctacataggaaaacgaggggcttgtttggttttttcttccactgcatcattttcagtttttcactatttgtaatgctctcattctcataccttgttctgcctcattagctttgtgtgtgtgtgaaacccttggtagagacat

SEQ ID NO: 62072 - DNA, 352 bp, Glycine max
tcggccacgcatccgaccacgcgtcacgttgaatccataccacgttatcattgggacctatgaaacaaaccgatgatgtctcaactccttcagcttctgctactctacacagtcaccgcccgcacttttttctaatgcataatatttccctctatatctctacctccatatgttgctctttcatattcaccctcgtggttcctatttcgcatacatatataaatcaatataaccaccatgagcgttcctccaccgcctacggcggcgatgtggacgccgttcaacgcagcgcactggcactagctggatcaccaggccctcatcttcaagtacactcaaggcgggtctctcg

SEQ ID NO: 62073 - DNA, 246 bp, Glycine max
cccacgcgtccgcttgtccttgacagctgacatgaaaataattttttaattcattgatgccaatgttaaccgtgtgctttattggccatgtttataaacattttaattactatgaacatttcaattattatgaacattttaattattatgaacattgtacaaaaaaacagactatataatctatactctcacgaaaagctaaaagttgctattgatccagagaagtttataggcatgcattctgct

SEQ ID NO: 62074 - DNA, 318 bp, Glycine max
gccaccttcgtggactctgagctgagcttgaactgagcttactaaggctggggctcgttacgatgtgaagttgttcgatgagacagctagtgggaagtctaatgggtaattgtcagagttcaggtttattgacccttctgctggcactgcttgataagaacggatgaatgggcatgtttttaatgggacgccgagtgttgttgcgtccgcatcgccttttacagttaagaaaatgctggaggctcagatcaatagcaatcagcagatgaacccttctgctgttcctcagggaatgctgacgcctgctgatgcacgggc

SEQ ID NO: 62075 - DNA, 400 bp, Glycine max
gcgtgctatgatagttactggtggctcattcaagtctgaaataactcgttgcagattgaaagaggttatcaagggttctctttcaagtgttccgggtagcaaaagcgacaaccgtctggagactcgtaagcatattttatctcttctcaccaatccacagaatttccgagacaggtgtgagcctttggctgcattaagattccaatctcatcatgctgctgtagaaaatatattgcgtggacttcaaaaattgccatgtcaggccttgattgcaatgcgtagaaaacttaaaggagtgaaagcatcagtacctcagttacaacctcgcagacatggatggacacgggaccatctaatcaaggtagtgaagaaaatcagtatggaaatgctttcacaactt

SEQ ID NO: 62076 - DNA, 204 bp, Glycine max
cccacgcgtccgaaaaaaaaaaaaaaaaaactaataaaaaaaaaataaaacataaaatgggacatggtgaaattgaaaaatatgattgtgcatactttcgagctcaccctatcgtactccatctatcatggtagtacctttcatttcaatggccctgctttcaatacgatctacgcatttttacactgccgtatactgacaaaa

SEQ ID NO: 62077 - DNA, 415 bp, Glycine max
  unsure (1)..(415): unsure at all n locations
cccacgcgtccggagagatggaagcaactggaaaattcaaaatgcaaaggaagaaactgttccagttggtgggcaaggcaaattcaaatcttgctgatgtgattctaaagcttggactatttgagagatcagatattgcttggaaagatgccaaatatgctcagatatgggaatatctcatggatgaatttgaattaactcagagatttgctagtcttgatttcaagttgaaatttgtggagcataacatccgttttctacaagaaattcttcaaaataggaaatctgatttcctagagtggctcattattgcattgattggtgctgaaattcttctgtctctctatgacattgntcatcggtctgccatgaaattttagcagcattntttctggtggcatgtaaggttagcatg

SEQ ID NO: 62078 - DNA, 389 bp, Glycine max
acgcatgcgttcactcacgcatgagagctcatgctgatcatcatcctttcaacactactcgtgtccaggtcatttcatgactactcttccaacccttaaaaactacatatggaccatcttgtcacgatcctttcttaactgcatcaataacagcacccaaaaggggtcacaccatttgatctcatattcttcatctctcatggcgacgagcactgctaattccttcaactttgacaacacttctatgcgcgtgcaccgtcggacacgtgctccagcacgtgaggaacacgagcgtgctatactacgggaattcaacaatgatcaccgacatcggtgttaactactacgctctgagcttacccgagacgctgttagcattcgacagaatc

SEQ ID NO: 62079 - DNA, 406 bp, Glycine max
  unsure (1)..(406): unsure at all n locations
cccacgcgtccgcccacgcgttcgcccacgcgttcgtccacgcgtccgaagaaaacctaagcttagaattagaaacaaagaaaagaagaaaggaaagaattgatcgttgaaaatgcagggaggaaagaaagcgggagagtccattaaggaaacagctacaaacattggtgcttctgccaaggctggcatggagaagaccaaggccactgtccaagagaaggcagaaagaatgacagcacgtgatccggtgcaaaaggagttggcaacccaaaagaaagaggcaaagatgaaccaggcggagctggacaagcaggcggcgcgtcagcataacacggcggccaaacagtccgncaccacggctgggcacatgggacatggccaccacaccaccggaaccgggactgga

SEQ ID NO: 62080 - DNA, 286 bp, Glycine max
aaaaaaaaaaaaaaaaaaaaaaaaaaaaaaaaaaaaaaaaaaaaaaaaaaaaaaaaaaaagaaaaaaaaaaaaaaaaaaaaaaaaaaaaaaaaaaaaaaaaaataaaaaaaaaaaaaaaaaaaaataaaaaaaaaaaaagtgcacccttttttaggttttcatttttaattacccttttttccaaaattttattttttttttagtttcccttaattcaatttaattgtccctttttttacacattttaatttggaaaaccttttgctttcccaattttaatccttt

SEQ ID NO: 62081 - DNA, 324 bp, Glycine max
cccacgcgtgcggataggcaaacagacaacatttggagtgatcgaaacgctctgggagcattggtactcaacgcaaacatggcgagtacaagaaaatagactgattatgtgtatacgctgcatcactactagctcaggtttcgtaagagcgaacgacgcatatcgattgggcatactgaggctctggatcacaagcgaggacgtcggatcaaaccaatcaacgcactcatgtactctattatctgtcaagaccaatcccgtgatggcgcgcacttaatgtacactgacgtgatgcgataccgcttgaaaagtgtgcagaatatc

SEQ ID NO: 62082 - DNA, 355 bp, Glycine max
cgtacgcaaaccctcgaggcccgatcacagaggctccattgcccatcgctctctctatgggtgcacgcgcggtaataggagattcacgcgccaccatggcctatgcatcgagcctccctatatgctgccaatcaagcgcttccagcgacggcacctcgcaatcccagtctacgatcgcgacgccagcgttccagaccttcatctgacgcatcttctagtcgatccgccacgccttcacgcagcgccgcacgttgacagagctcatcgaccggagctccatgtaccgacacgacaccctagtcgaagcatactctcagatccgtaagaacttcgactacttacgcgtcaattacct

SEQ ID NO: 62083 - DNA, 305 bp, Glycine max
cccacgcatacgagcgtattcaaacatttcaatgacctcatatgagctttctcatggcgaaacatttaaaattggagctcacagatttaggataccacatgatcttttccaatccattcctggttcaaacaaattctggcatgtagagctttgcaagaacttgctcattcaattcttggactgccccaaatggggattgatagcattaataagtgtgacgtacacattctaagacagttgtttaatacgctactgcatgctggtggtacagcttcaatgcaacaactaaaggaacaccttgataa

SEQ ID NO: 62084 - DNA, 260 bp, Glycine max
tgctatctcatcttgaacattaagcatcatcatcatgcacgagtagagacggagcttgggtcgtattctctttgtgcatgaatcaactacctactgagatcctgtaagcaagccatcatatgtactgcttaaattagcgctatcaaatagctgatgtgatccatatacagatcatgggctgtctcttcaaatgcaccatgcttatgagctcgttctttcatcacaaaagctctggtatatcttacataattcgagttcac

SEQ ID NO: 62085 - DNA, 254 bp, Glycine max
agcgtccgaacaacaacggcaaaccacgacaaaaacggagagactgattccgagaatcgggacggggcactatcactgttatggacccaaggtcaacttcggccggacgatccaggcggtcgacattatcatatgcgagaattcaactgttgtcggcacatctatgaaaagatcacgcatgtgtccctggacgagcttaaccacaactagaatctccgaatacaacaaaatggccaaacctagtccgattctga

SEQ ID NO: 62086 - DNA, 395 bp, Glycine max
atgaaatgcagagtaagcaaaaggatttagagttggaggacaatgcattaatttttgtgggaggaaaagtttccgttgatatattactattgatgaagctgctaagctttgcggtgggtgttcttcctgatcatgttcccaaggtggagcccagatgcaattgtttttaattccaatcaggtttatgaaactcccagctatagggtgcagtttatgtttagagagtcaaatggagcaacatttttaaaatcacaacttcaaacgcctgaccctgattcagttgatgcatcagcaattctttggaaaaatctccaagataaaaaaacttacttaaaaataaaggggatccaatgaagatggcatcaatcaatattgaaaataagctttcttctggc

SEQ ID NO: 62087 - DNA, 321 bp, Glycine max
atcgactcagaaagacattggacaattaatagtggcttacttactaagtatgttacggtctataaacaaacttcagcatcatatacagagggtactcttatgccatgatgacactctatgatcttagatcctgactcagttgcgcttgagaggaatcgatcactcaccatagaataacttcatgcttactggcgagcaaagtacgagacagagttagaacatctcacagctatatgcaaactatgtgagactattcagacgcgacactgcgcggattcatagtattctcataactcacgtgctgtgactatggccagcata

SEQ ID NO: 62088 - DNA, 234 bp, Glycine max
  unsure (1)..(234): unsure at all n locations
gttggcaacaagttggatcatgaattactgtccaatgctccccatggctgctggcagagggtgnacggcgcctttggcactggcccaaccctacctgccggcactgctctggatgtacctggcgtactggcactcacagcatactctaggaagtcgatgaaagcaaggcttaccaatgcttaccatgtaatgtcaaccaataccttacgaacatgctgtacggaccactctcac

SEQ ID NO: 62089 - DNA, 68 bp, Glycine max
cacgaacgcgactaaaaaccgcaggcacagaccgaaaaccacgagggagaacacgcaaagaaaggggg

SEQ ID NO: 62090 - DNA, 208 bp, Glycine max
tccgggcctcaacaccaagagtgcctccactttgtttcggagcattaattcgaattgccggaggaacaagctctgtctctcctaccttctaaggcctgcacatctggtcaaggacagggtctaaccaatgctactccatttcacacacacaaatagtttcgtggttggacgaatagaaaagaatccttgattcttcaccaaccaagtg

SEQ ID NO: 62091 - DNA, 197 bp, Glycine max
attctatcctattgtaatcacctttgagtgagtgtagtaatgactagttctcgagggcgttcgatgaatgcggctaatcacttctaaggcgttcagatcagggctttgagagaccgttatggacactgcatcattgccattctagacttcccgattaaggttgactagtatacttgaactctcgactatgacattgc

SEQ ID NO: 62092 - DNA, 274 bp, Glycine max
attccaatatattccattctctctgtgtatttccctacctctcccttcaagatgcagagcttcgtgaagaccctcaccggcaagaccatcacccttgaggtggaaagctctgacaccatcgacaacgtcaaggccaagatccaggacaaggaaggaatccccccggaccagcaacgtctcattttcgccggaaagcaacttgaggacggccgtacccttgctgactacaacattcagaaggagagtactcttcacctcgtcctccgtctccgtg

SEQ ID NO: 62093 - DNA, 317 bp, Glycine max
ccaaataaaaagtgaatgcttggaaaagtggaggttgtggtacttattagccaagcggggaacatgcaaagtcaacatacagtgaaagaagaaaatcattaatgtccacctccatgatgtcaacctattcccgatcagtcaccattatcgacacatccattcggatgggctcatatggatcgctattcttgtcgtcgcctgctttcatattcacgatgtgccaaacatgtcatatgttcatgctgacaaactgtcaacattgtattataagctgatcaagttttgcaagttaaatttatcaattgtgcagtattgct

SEQ ID NO: 62094 - DNA, 342 bp, Glycine max
tgctgttctaacttctaaacaataataatagaaaagacaatacttgatattattggatgctttactaatctcctctgaaatatgcagaatgcaagatgtggtgcagagcatacccaaactgttactcgccaggctcctacaattactcatgttcctggcaaggagaagtcaccacaactcgacgatggtggaactggatttccgactcgtgatgatgatgatggtggcggtggaggaggtggatgcggaggcaactgggctggcggatactactgatatggctctctcgctatacttggcttcttagaggataaggaaactgaagacacatacatggatgac

SEQ ID NO: 62095 - DNA, 290 bp, Glycine max
aaaaaaaaaaaaaaaaaaaaaaaaaaaaaaaaaaaaaaaaaaaaaaaaaaaggaaaaaaggaaaaaaaaaaaaaaaaaaaaaaaaaaaacaaaaaaaaaaaaaaaaaaaaaaaaaaaaaaaaaaaaacaaaaaaaaaaaaaggaagcgaaaaaaaaaaaccacataccacaagccagatacagcaccaattaacacatgaaaaaggacatagcatgaaaagaacggagataatccctaaaaaaaacgaacccagaaaaaaccaagcaaccccaaacaactagcagtagag

SEQ ID NO: 62096 - DNA, 229 bp, Glycine max
cccacgcgtccgcccacgcgtgcggtttggttggagggttggaagttggtaagttcatgacgtgggggtacaaattgtatagagagaaaataaagacttatttctttctatgttttcctctaatgtactagtactactctggaaaaccaaaagtgtaaaacgcttatttaaatatgatggtgtacaagttgctcactatcttaatcaagacattgtttgttttggttgg

SEQ ID NO: 62097 - DNA, 72 bp, Glycine max
tgagaggaggaagcttacgtacgcgggcaagcgacggcatagctgcacctatagaggcaccgaaattcaatt

SEQ ID NO: 62098 - DNA, 335 bp, Glycine max
gtggaagtagcttgtcacttgtgttgggaataagcaacatgttttggatcggctgatcggatactatgtggatattgatacattgttttacataacatccatctactcaccatatgacctgtcgcggcactgtgactgtaatgtcactggaatagacggatgtgctgaaccggcatactcaatccaataggttataaggtcatcctcatgatcttgcttaactaggtctataatgccaatctgctgatgctaggacctaatgcaaaaactgtgagcggtcatggatgcggacagaactatggcaactctactaacagaggagtatcataattcag

SEQ ID NO: 62099 - DNA, 251 bp, Glycine max
ggcagtttcgtcctttcgatccaattctgtgccctagcaatccaacacgcgcgagtgagtcagtgttattatagcgcaaacaagcaaggaatcgggcccgcgcagtagaaactcgaaaggaatcagtgtttgtgtgtttcgcatattcttctccgttttagatttgagagagaagaagaaagagaaatcatgcctaattctaagataagctgatgattgatacattgataagctacataagcaccatagga

SEQ ID NO: 62100 - DNA, 233 bp, Glycine max
  unsure (1)..(233): unsure at all n locations
ctgggatgcgttttcctagggttgtgtcaaaccagataattaagatagaagcttagttgtgcatatatagaaatcattgtttgagatagccccttaaaaaaaaaaaanaataaaaaaaaaaaaaataaataaaaaataaaatataaaaaattaaaaattataataaaaaataaaaaataataataaaataaataaatattttataaaaaaaaaaagggaagaatttttaaaag

SEQ ID NO: 62101 - DNA, 388 bp, Glycine max
aaaaaaaaaaaaaaaaaaaaaaaaaaaaaaaaaaaaaaaaaaaaaaaaaaaaaaaaaaaaaaaaaaaaggaaaaaaaaaaaaaaaaaaaaaaaaaaaaaaaaaaaaaaaaaaaaaaaaaaaaaaaaaaaaaaaaaagggccgccctttttaaaggtccaaagtttacttccccttctttccaatttaaaactttttttaaagggccccctaattaaatttaattgccctatttttaaaaacgtggtacttggaaaaaccttggctttaccaatttaaatccttttaaacaatatccccttttccccatttgccttattaccaaaaagccccgaacaattcgcctttcaaaaaatttcccaaccctaaatggcaaatggaacccccctt

SEQ ID NO: 62102 - DNA, 304 bp, Glycine max
attggattaatggctatgggagaaacaagtgacactcctgctaatgctgtctcagtcgctgctggtcaacagccggtctacattattgttgccctcgttccggttgtcaatggcgcgtttggttataaagcatgtacctcccatcagagctctggtgatgtcgcttgtgctttacaggaatgatcgtcgcattctcttgatgatagccactctgatttcacagctctttgtgacggtgacttgctggctgccttctaccgtggtcccaatgacgccgatgatgcacatgccttatctgcatatc

SEQ ID NO: 62103 - DNA, 306 bp, Glycine max
atcggattaatggctatgggagaaacaagtgttcatggattgtgagcaaccctaatggggtcgggcccatcccaaccctattgaattgaattgggggaagaagaacattataacaagaataagaacaatcggcacaattgttgtaattgaacgatgtctgctgcggtgtgctgaagcaagagatctttgctctaagagcttcccccttctccgacagtattcaagaggctccgctgttactccttccctattcgcctctctcttcccttccctaatcgaccaccttcgctctctcttcccttatat

SEQ ID NO: 62104 - DNA, 285 bp, Glycine max
acccatcaatcaatcttccatactacatcttccaagcaatcatattatataaccaccttcgggcaactgataaactctctgataataaaagccattcttaacacctaccattcctacaaaatctcatcaaaccaatactacattaaccttattcaaactatttattcaccattacactttattatttcccacttatttagaccttttaatattccacatggttccaaccttttttaaaaaaactccaactttttcaatatacattcctcatttaaaaccatcctt

SEQ ID NO: 62105 - DNA, 216 bp, Glycine max
aaaaaaaaaaaaaaaaaaaaaaaaaaaaaaaaaaaaaaaaaaaaaaaaaaaaaaaaaaaaaaaaaaagaaaaaaaaaaaaaaaaaaaaaaaaaaaaaataaaaaaaaaaaaaaaaaaaaataaaaaaaattaaaaaaaacaacaaataaaaaaaaaaatagaataaaaaaaaattaaaaattaaaaaacttaataaactttaaacaaaattctaat

SEQ ID NO: 62106 - DNA, 224 bp, Glycine max
taaaaaaaaaaaaaaaaaattaaaaaataaaaaaaaaaaaaaaaaaaaaataaaaaaaaggaaaaaggagaaaataaaaaaaaaaaaaaaaaaaaaataaaaatgtaaaacatttttatggatccaagctttccttccctttcatacaatttctttctttttttcttgtgccacctaaattaaatttattttccatcgttttaaaatcttaataccttgaaaac

SEQ ID NO: 62107 - DNA, 393 bp, Glycine max
gattgttgtgactcgttcttcttcgtcgttatcttcttcttttgttgtttgtgtgtccgttctttctctcacctgaaaatgtcttgctgcggtggtaactgtggttgcggaagcgcctgcaagtgcggcaacggctgcggaggctgcaagatgtacccagacttgagctacaccgagtcaaccaccaccgagaccttggtcatgggagtggcaccagctaaagctcaattcgagagtgctgaaatgggtgttcccgctgagaacgatggctgcaaatgtggagctaactgcacctgcaacccctgcacttgcaagtgacgtgttcgagagctaaagcttcaagcagaaatggcccttagaaatcatgataaagactatatgtagtttcaaaac

SEQ ID NO: 62108 - DNA, 257 bp, Glycine max
aatacgacttgccaggcacctggtgtcaatgggtcatcaagctggtgtggcactatagctatggaactacccagagaggctgatagaactaggtccacaggatatatatagcgcaggtaggcctggtcatgtggatctagctgctatagacagtatagtaaactgtaatgtatcataatcttaaccactgtgaattagactatgtgcacaagggaccaagaagtcaggactaacagaatcatgtgatgtgggcggtt

SEQ ID NO: 62109 - DNA, 138 bp, Glycine max
gccacgcgtacgatcacgaagtgcacctagcaattccgctgctcacatacaactttggtctattccgttcgtattgactggaccatcgcatcaacacatcacgtgataaatcaaggaaactcataactaactaacaca

SEQ ID NO: 62110 - DNA, 267 bp, Glycine max
aaaaaacgtacggtctaacattgtcttttgtgcaaagaacccaacacataatctttaaggcgcaatacatacactgactaactaatacactcagcaacatacaacaacgctctaaaagggcagactcccattgaggatccaggttctcatacgcgcacattcgtcgtgaacgctttcttatggggacaccgagcttcaatgatcgggctttcgttaaacaacatcagcacggataatgcctggactataccagctttaataccttat

SEQ ID NO: 62111 - DNA, 376 bp, Glycine max
ctttttctttctctctcctattctcccctccttttcagatctgagatattttcccattcttctcctcatctcctcatccaaaccaattccatcacaaggtttttcatcaccgaagcttttgaatatgagtagccgccatcaaaatcggcatcactccattttagatttgtgttgcgagatgaagttgtggtggcttgagactgaacacggtggatgactatgaccccaccccaaacaacgacgacgtgtagggatcaactcagtggtgttgatttgtggttgttagtgacaagtttgttggagcataagatgaagagcgtcatggcatattcttttgatctcttttcttgcagtcgtggatgaagaagagggcatg

SEQ ID NO: 62112 - DNA, 375 bp, Glycine max
accacgcgtccgaccacgcgttcgcccacgcgtccgtccacgcgtccgggaaattaatactagatcggtaagcagtctgcagcacatatctaacttgagtgtggcctgcacttcacaatgagagcccctgtcgttcgacgcatttcagaatgcttcgataagccccagctccccaaccaagtttcagaccagatctgcagtctaacacattgggatattgctatgttgcctaccaactatatccagaagggtctactcttcaagaagcctgcagcaactctagttgatcaacaccatttcatggagaatctgtaggagaagctcaaacactctctatctctcaccctcttgcattgctatcctttggctgctcgc

SEQ ID NO: 62113 - DNA, 284 bp, Glycine max
cgtcgcttaagatacgactataacaacagcctatcgcattggactatatatatcatcggataggctctacgattcagaaacatacatatatattcacacaaatatccatttatatatacatatatatagtgctatatggcaatgaccacggtggtgcatgtcttgagcatgtatgcagtgatgaatgcaagtgcctctgatgccactcgcttattgctgcacaaaattgctacaggtaacgtgtacagagagaagattgatagatactcacttgagaatggact

SEQ ID NO: 62114 - DNA, 288 bp, Glycine max
ccgtcctattcccgtcgcccacctccgcaataattattatatggtgttgatatcatattatgtatgataaagagaaatggaagagatgcatgatatttattcttttcttctatatactcactatattcagctccactctatctttcgactctacacatccacgattccgtccgtctactctgacctccatcatcctatgccaacctacacgccctccgacctctctcatctttaagaccaatcccttacgtgcgcgcttcatttccactcaatcatatacttaccttt

SEQ ID NO: 62115 - DNA, 333 bp, Glycine max
ggaagccacaatcaagagcttgggcacagaataaacatgattgtgaaaagaggaaaagggatgctgataatgatgatactgatgatcgctaactagcacatgctattgctgatacaatgtgatgacagcaaagatagggtcatttgcttcagggagagcatagacttctaagcgaatcactgcttgtgatgtcttcttctgctgggtaaggatcaaacacatgagataattctgttaatgtgtggttaatactcatggtgatatttgtaagcaacctttgcttgttattgctataaatgggttaggatccatcaactacaagatgtgttaagg

SEQ ID NO: 62116 - DNA, 410 bp, Glycine max
  unsure (1)..(410): unsure at all n locations
caactcatctttatataacctaattgcaaagatgaataccaagcccgttttcttcttgtgcttcctctgtgcactgcttctcatctctgttgtggcaactgagccatccaaagatgagacacaagcagaagaaccaaagacacagccagatgcctggggaagaggtggaagtggggggcatgatggaaggaggacacggtggaggacatggcggaggatgcagatgctgcggtcgaaagggctgcaaatgttgctgaagtaaaaatcacaaatatatgaactgaacacactcatatacttgagtgtactccatgtaataactagtatatatatttctaaaaaaaaaaaannaaaaaaaaaaattaaaaaaaaaaaaaaaaaaaaaaaaaaaaaaagggccgcccgtttaa

SEQ ID NO: 62117 - DNA, 390 bp, Glycine max
attcctatgttgccaatcagatattcccaaattccaccctcgcaccctggaacggggagtccgattccgacaccaccgccaccaacgcccccgtggtggcgatggccgaggccgaggccgaggctgtggtggaacaagaagaggaacagaaaaaaatggaagaagtggaagagaaagatgatgatgaggaggatgagggggaggaggaggaggaggaggaggaagaggagaaggagaagagattgatgtggtggaaggttccttttgatgtgaactggtcacgctcgtatacttgagtgtactccatgtaatgactagtctatatatgtctaagccgtcgatgctcttctgagacttttattcctgggacggaggttgcacagaaagagg

SEQ ID NO: 62118 - DNA, 265 bp, Glycine max
cccacgcgttcgcccacgcgtccgaaaaaaaaaaaaaaaaaaaaaaaaaaaaaaaaaaagaaaaaagaaaaaaaaaaaaaataaaaaaaaaaaaaaaaaaaaaaaaaaaaaaaaaaaaaaaaaaaaaataaaaaaaaaaaaaaaaaaataaaaaaaaataaaaaaaaataaactttataaaaaaaaaataaaaaaataaaaataataaaaaaaaaaaaaaaaaaaaaaaaatgtgaattttttaaaaattaaaaaatttttaaaa

SEQ ID NO: 62119 - DNA, 267 bp, Glycine max
aaaaaaaaaaaaaaaaaaaaaaaaaaaaaaaaaaaaaaaaaaaaaaaaaaaaaaaaaaaggaaaaaaaaaaaaaaaaaaaaaaaaaaaaaaaaaaaaaaaaaaaaaaaaaaaaaaaaaaaaaaaaaaaaaaaaaaaaaaaaaaaaaaaaaaaaaaaaaaaaaaaaaaaaaaaaaaaaaaaaaaaaaaaaaaaaaaaaaaaaaaaaaaaaaaaaaaaaaaaaagaataaaaaataagtaaaaatagcaaaagaaccaaaaaacaaaaa

SEQ ID NO: 62120 - DNA, 241 bp, Glycine max
gaatactaacagtactgatcagggctacatcggaccattgttgtcagacggtgtacccttaataattactctgtacaaaggccatgcagctgtaaaggatcatgcatcaaataaactgatctgacaaaaacatgtttcatctgatcaatttgactgcgtattactagcagtgttgcatgcgggtcatacatctggtctctcatagcagttcatagttcagacatggatcattagacattac

SEQ ID NO: 62121 - DNA, 297 bp, Glycine max
cccacgcgtccgaaaaaaaaaaaaaaaaaaaaaaaaaaaaaaaaaaaaaaaaaaaaaaagaaaaaagaaaaaaaaaaaaaaaaaaaaaaaaaaaaaaaaaaaataaaaaaaaaaaaaaaaaaaaataaaaaaaaataaaaaaaaaaaaaaaaaataaaaaaaaaaaaaaaaaaaaaataaaaaaaaaataaaaaaaaaaaaaaaaaaataaaaaaaacaacacatactaaatatgaaaaaatgatgtaaatgataaaaaatgacaacaatactaccaataacaaaaataaagaataa

SEQ ID NO: 62122 - DNA, 371 bp, Glycine max
aaaaaaaaaaaaaaaaaaaaaaaaaaaaaaaaaaaaaaaaaaaaaaaaaaaaaaaaaaaggaaaaaaaaaaaaaaaaaaaaaaaaaaaaaaaaaaaaaaaaaaaaataaaaaaaaaaaaaaaaaaaaaaaaaaaaaaaacaataacaaaaaaacaaaaaaaaaaaaaaaaaatgaaaaaatgaataaaaacaaaaaacataaaaaaaagacaagaacaaaaaaaaatgatactgacaaaaaaaaagctaatttacatgtaggtggacaagtacaaagatgcaaattattaagcggatttaacaacagatgttcctgaagtataaaaacatagacatcatctggaaacacataaacatatgtgctccatgta

SEQ ID NO: 62123 - DNA, 300 bp, Glycine max
aaaaaaaaaaaaaaaaaaaaaaaaaaaaagaaaaaaataaaagataaaaaaaagaaaaaggacgacatcctacatcgtggttcctatattataaaatcaaatatgctaaatacgggcggccgttatacaacatcgtaaatactttcactgtcctgcgattaacaacgttaagcttgttgcacctcatccttttgtcaactgatgtcgtattacacgaggatgtcttgaaacatcctggttaacaacagttggaggccgaatgccgattgatattgactacgtgttgcgcagcatgaatgg

SEQ ID NO: 62124 - DNA, 72 bp, Glycine max
ccctcataggtctcttcctcgctgcggtggtcgccatcgccgtctccaccctccgcggccggaaattcaagc

SEQ ID NO: 62125 - DNA, 338 bp, Glycine max
tcggaccaagccttccgttcgatttcgttccttaccctcgggttgatctgtgagaggggattgatagccctctctgtctctggtgctgcaattcagatcgctggcaactatttgttatacagaccatctgtcttaacatggaagcattgcttgcttgacggacacctttgtctcaaaggagttggaattttcgggtctgtctgcggattggagatttacagagcgcccttgcactacctgtttgatctcatcaccatgagacatactgatactatagatcgagctacacaacctaagatcaggttcttaacctgaacgatacaaataggttctgcaca

SEQ ID NO: 62126 - DNA, 431 bp, Glycine max
tcggccacgcgtacgcttttctatcattaccttctctctctatatatactgccctttctttgtgcgtctttggtaatcgtccgttcctctctctttctctgccttgtcttctcctcttttgttccgcttaagggccttctttgatcgatttttttcgctttgattcttatattgctttggatagaaaaaaggtgtgaccttttggctattgtattccttgtcttgtctaatttttcgtggtgatttttgggacaagctaacggcggtgctgaaagtcacagcgctttgcccatgcaagggccttctttgctcgggtttttccctctttggttattatattgctttgtacgggaaaaaggtgtaacctttgtctgattccgacgaggttccacgcataaaaggctaacgacgatgctgaaggtcacaacgct

SEQ ID NO: 62127 - DNA, 433 bp, Glycine max
gaaagaaggaaggcgaagcccacaaagaaagaaaacaatagtttcagaagcagaaagaggttttccgttccgaaacgatgtcctccatggccatcaccaccagagacagagatcgagagcttctcatccccgtcgccgacacccccgccggcgatgccgccgtctccccttcccccaagccatcgtcgtcggcgtcgtccccgcatcattccggacgcgagactttttacaaagttgttagaagctgggcatcaaaaaagtttatgactggatggtacgctattctttcttctgtccaattatcttgttgtcaagtatggatatataatacctattgtgtattcatacacatgatcttgtttgtttcctgaatgaatttgccctttgtatgccttatattctttgaagtgttggtttattttcttaatttttt

SEQ ID NO: 62128 - DNA, 257 bp, Glycine max
aaaaaaaaaaaaaaaaaaaaaaaaaaaaaaaaaaaaaaaaaaaaaaaaaaaaaaaaaaagggaaaaaaaaaaaaaaaaaaaaaaaaaaaaaaaaaaaaaaaaaaaaaaaaaaaaaaaaaaaaaaaaaaaaaaaaaaaaataaaataaaaaaaaaaaaaaaaaaaaaagaaaaaaaaaaaaaaaaaaaaaaaataaaaaaaaaataaaataaaataaaaaaaaaaattatatttggaaaaaaataattaatagagaaa

SEQ ID NO: 62129 - DNA, 77 bp, Glycine max
aaaaaaaaaaaaaaaaaaaaaaaaaaaaaagacaaacaatataaaaaaaaacaagcaaacggacacatgcatacaaa

SEQ ID NO: 62130 - DNA, 287 bp, Glycine max
  unsure (1)..(287): unsure at all n locations
tgcctcactcttcctctctctccccaccattttccccttcgttcaacccaagaatatcccatcaaccacccttcaaccaaccaagctcaaagtcccaacccaagcctcatccctcacacacctttctctcttcaccaccactcctgctgcttccaaaacctgcttcaaatccaccgtcttcgccaacccccttcacgcccctctctgcctcgctccccaccgtccccgcgacccttccaacgccgtcgtccttcgncgcgccgtcgtcgtctggttccgcaacgacc

SEQ ID NO: 62131 - DNA, 364 bp, Glycine max
tcgcccactcgtccgatgactcgtgtgaacaaataaacctaaatttattgcattgcataatgccatgtcaatgaagatgtatgcttacctcaccctatacagagtggcttttcatggccacattatacaagagcccaataccttattgacacacatggttaacccgttgacaatgaagatgagtattacatcatgccagccataacctacaacggatggcccttcactttaatcaaccgaaacgggtaaaaccctgtctacccgatcttaaaaacaccgatacacaactcggttatccaatgagatttacccattaaggggtcaacgctcaagatgatgacataaaggtgaacagccactttgg

SEQ ID NO: 62132 - DNA, 417 bp, Glycine max
gtttaatattttcacagttcagtatgaaaaatcccctttttatttaatgttctatcttcagttgcctgatgctgctctatctttttctctcacctcctcctaactttctgccttccctcattctcggtctcacaaacttaaagtaatatccagaaaggaatgaagaaaacctgggctcttcttcttatgtgttttttcttgtttgaagatggtgtgctttaaactagaactaatgagatatatcctgtaaatgttgatcacactctattggtttaaactaattataataaccttctagaaattgctaatttgtttctatggttcttatctgtggaataagctcctcttctcaccctttttattcaacattgttgcagggaactctctcacattgttctcgtccattatcgacaagtg

SEQ ID NO: 62133 - DNA, 343 bp, Glycine max
tggtactttatctaatgcggatgagatgctagttattaccttcatactgtcgatgctgtgtacttctggtcagtcgtattcgcaactaatttagagtactgatatatggatattattagaaacatggtattaatgacactgttggacactgaccatccatctatactttatgccgaaatggttttaagcctatagtgccgctgaacgtgtataccggaggactggttaagctgactgtgagcattattaggctcattgatgtaactagacttacacttgatcgattgtcagttgatcattggatgaacttattgcacatacatatatgggtaaccaaatccta

SEQ ID NO: 62134 - DNA, 285 bp, Glycine max
aaaaataaaaaaaaaatgtgacctacaatataaaaaaaaaactatagaacaagaggcaggataatgatatgagaaacttgaaaagaatgaagagctgaaagtataaacagcaacaattgtattgaacgtttgacaaggtctactcacacatataaggctaatctcttgactttcaaggctaagcatggttacttgatttaccatagttcaagtaccaaaaggtggtcgtattaaaccatttccaaagggtattgtatatagtcagcctaccaaccaatgtgttac

SEQ ID NO: 62135 - DNA, 391 bp, Glycine max
ctttcaactaaataatatctgtgtcataagaaagcatgaagtttcgcacattcgagtggcgttgtataactcgtatatgattgactggagtgcgggtgctcaagaactgcgtggctaggcttatggagatccatcgtggtgactcatcgaaggcgaagctcgtgactaatatcgaaggtgcttgatcataccatgtgctgctcaggaataacctattatgcactgtttgagcgtaaactgtattcacttgagtgggaacgtctctatgactactgtgatcttctgcagttgcacaaactctcatccgcgcaccttattttcctatcaagagactattgcaagttcaagcccatgctcatgtatgacatagtggtgaaaaacatgtacgctt

SEQ ID NO: 62136 - DNA, 230 bp, Glycine max
aaaaaaaaaaaaaaaaaaaaaaaaaaaattaaaaaaaaaaaaaaaaaaaaaaaaaaaaaaaaaaaatttaaaaaaaaaaaaaaaaaaaaaaaaaaaaaaaaataaaaaacaaccattttaaaaaatccaaattttcatccccctccttcctacctcatacctctttttatattttcacctaaattcatttaattgcccttcattttacaccctttttacttgaaaaaccc

SEQ ID NO: 62137 - DNA, 198 bp, Glycine max
ttgactcgttcgtacacttacacgttgaacaccattttatcactaacggcttcgggaaggtttacttagccagtacagttcgctcaatttcactgacctttaaatgagtctaatgtagtctcaactcgtgctcattgatggaggcaatgaacatgaccgatgtgttctgactcgtggtactgcatgactgatgcattg

SEQ ID NO: 62138 - DNA, 299 bp, Glycine max
aaaaaacatacaaaaacaaaaaaaaaaaaaaaaaaaaaaaaacaaaaaataaaaaaaaaaagaaaacttaaaaaacctcaatcccatcttaatacatctaatatactttcacctaaattcaattacttaacatttttataacaacacctaatctatattaaacccttaatttaccacactttattaacttataaaacattctctttatctcacttaatttattttcaccatcataccactttcaccattcttcccaataactaacaaacctcaatccctcaatctaccctaactttacc

SEQ ID NO: 62139 - DNA, 328 bp, Glycine max
cccactcgtacgttcactcgttcgaacataaataatgggtgcccttagatcacattggggaatggtgaaggctaaggccagctaatggctacaccaaatccaacactggaactttacactgccttcatattgacagagatccaaccactgtagctcgataaattgcttgtacctatcctggtctcaatgcttttcatgttaatacatcgggggactctaccaatgattctctttcaagtggatcacacctcaatcatcttcaccctgagcatgctgcccctgacgattcgaatctgcatgctgatgatcctcacaatattcatatggg

SEQ ID NO: 62140 - DNA, 390 bp, Glycine max
ttctaacctaaccctaacataagtaacggattcagtgtctcgaacaagcagaggaaggggccttttctaaagactctacaaggtgcttatgctccggaactgcgtctacctcaaatcgatgatgggcgacgctttccttgtagagcgcgctgcgcattaccgacttctcaagatctggtagcacaatcacctacggaaacgctataactacattcatgcactacggcatactcattgagccgagcttacatgacgagtcatataatgtgctcagctctagcaacttgataactgctgtaagtgcgtaaaagcttgatctgaatgactattcggaaatctacagaatcgaattagtatacagttgatgattgaatgatatcatggaacatt

SEQ ID NO: 62141 - DNA, 62 bp, Glycine max
aaaaaaaaaacaaaaacaaaaaaaaaaaaaaaaaaaaaaaaaaaaaaaaaaaaaaaaaaagg

SEQ ID NO: 62142 - DNA, 299 bp, Glycine max
gtgacacgtacgagaactatgggtagggtatatttcttaaaacggcaagatctacaagggtgtatgtgttgccgtgaataatccttcacttgtggagtcttcaactgagcccaaatagtgttgtgatggatagttgtccgttctatcacggataggtgaatacggtttctggaatgtccattaatggatcgactacgacaataatgtcatggctgcctattctttcaaaactgacttggcaagggcactgaggatgaccggcatgaattgttaggagttgatgcttgaccatacacgga

SEQ ID NO: 62143 - DNA, 352 bp, Glycine max
tgtgaagcgtgcgatgacccagagcattgtctactttctaactggtaaggttcgggcagggttggcatcaacagaccggtacgcttctgatagctctgtcaacgcctacgcaaatgtgaaggatatggagatgaatattcgtaatcatgcagaataatctactcgtgcttatagcacgttctttctgagacatcaaggacattgaaatgtatagttgtgccttcaacacttactgatcgagatcattaatcatactctgctgaccaggattctattgcacctcaatctttaatagatgtaataagaactccagcaggttcttatgctgtggcatcaggtatcaatgggtccc

SEQ ID NO: 62144 - DNA, 242 bp, Glycine max
aaaaaaaaaaaaaaaaaaaaaaaaaaaaaaaaaaaaaaaaaaaaaaaaaaaaaaaaaggaaaaaaaaaaaaaaaaaaaaaaaaaaaaaaaaaaaaaaaaaaaaaaaaaaaaaaaaaaaaaaaaaaaaaaaaaaaaataaaaaaaatataaaaatataaaaaaaaatagaaaaaaataataataataaaatgaattcataaaaattaaaagaaaataaatattaacataataattatatgaaa

SEQ ID NO: 62145 - DNA, 168 bp, Glycine max
cccacgcgtccgaaaaaaaaaataatttaaaaaaaaaaaaaaaaaaaaaaaagaaggggtaataaaaagggaaaaaaataaataggaaaaatgggtgtgaggctatatgggttcaaggatttggttcctgatgttgggatgtaatttttttttgttggagttggttta

SEQ ID NO: 62146 - DNA, 304 bp, Glycine max
tcatctcgccatactacctaacaatgtcacatgctaagattcaagatttaaaaaatgaataagtaagttaatgattattctcctaggaacgaatttgacagtgaaaaatcttcagactatctgaaacattcggataactattaaagctatggaaaccccatgccctcatcccatcaagatgaaacagctgttaagaaaaagtattgatgtatgttaccaaagaagcctacactaatatcgaatgatcattaacgttcttacttagactctgctgactgcactttatcgaatcaatgatcacata

SEQ ID NO: 62147 - DNA, 308 bp, Glycine max
cggacgcgtgggaaaaaaaaataatttaaaaaaaaaaaaaaaaaaaaaaaaaaaaaaaaaaaaaaaaaaaaaaaaaaaaaaaaaaaaaaaaaaaaaaaaaaaaaaaaaaaaaaaaaaaaaaaaaaaaaataataaaaaaataataattaaaaaaataaattttaaaaaaaaataataaaattaaaaataaaaaataaaaaaaataaaaaaaaaaaaattaaaaaaaaattagaaatttagtaaaaatgatttggtttttaatatatttggttttttaaaatttttggttttttatagggggatttaat

SEQ ID NO: 62148 - DNA, 405 bp, Glycine max
cccacgcgtccgcccacgcgtccgtgataacttaattagtgttcatgaatatgtcaagccttactttagtggttctaaattgaaaagctttctagctggtcataatatcaccattactgatggtattgacaaaactagtgcaactttgcaatttagaaagttagcagattgtgattttctcaagagaaactttaagcagatgtctaatgttttgtgggtggctcctgaggacaaggcgagtttatggtcacaacttcattatgtttcgtgtaataatctggaaatgcaagaagcttatcttgtcaatctcgtaaatgtgttacgagaattgtatttgcacagtccagaggaagctcgccaattgagaagggaagctctctctcgtattgaatggctgcaaaaagc

SEQ ID NO: 62149 - DNA, 362 bp, Glycine max
ctcaatcacaacatccgatgctgcaaatacaaaccgggtcttggctctctgaaagacgggaggtcgtacggacaagcgtcatgctgaatctgacataggaattttttgacaccttgctcatggggtagcatgtgcaacacatggtggacatgggtacccacctgtggctgacccaccatcatctggggcatacccttcacaacaaggatatcctacagctgggtatgctgcacaacaagggtatgctgcagctgggtaccctgcacatgcaggctatccttctgatggctaccctgcaattggttatcctggatgatcacatgcaccaggatctcatgggcacggcagtattggagcaatgc

SEQ ID NO: 62150 - DNA, 272 bp, Glycine max
attatagacgcctaggagcggcactgattagaaggccgatataaaccgatccaacgtggatgatacacgagactatagactgagcgtttgattactactacagctcatatgcaagaataacgctagtgaatacttatacgctgggccagactacaacgagggaatcctgtagttcggaggttaggaccaaggggagcccggacgtgctaattcgatgcataatacagcactctatggacctgggcttcctccagattaatttggtccaatgg

SEQ ID NO: 62151 - DNA, 70 bp, Glycine max
aaaaaaaacaactaaaaacaaaaaagtttaaaaagacaaaaaaaaaaaaaaaaaaaagagaaaaaataaa

SEQ ID NO: 62152 - DNA, 276 bp, Glycine max
tcgcattcaccaaacttcttcactggggccattctctggttgatgagaactgaaggtcattcggaatgccactttttagggggaaaccctttttcttgggcgaaccttcctaggattttaaacccgattaacccggttacccaaatcgatttaccaaagaaatctttcaagaatttcaaggatattttaaaccattggaactataccccccgaagggtttgatgtgttaaagcacctggaaaaactggtttgcatattaaaaaggctttggggttt

SEQ ID NO: 62153 - DNA, 367 bp, Glycine max
gacgataccccctttgtgcagggaatagaaaaagaaggccctctaatcgaaaaaggaggagagaaccacctgaatcttcgtctaaggtccaccttactactatgcatgaaccctccaggttggatcaaacaccgtcatctacttcttacgtcaaatcacctgggacgatgtcattaacatggctgaacaagtctcaaattaagaatatgggatggagatagctcggcaacaaatggtggcaaaaccaaaactgattggagctatgcaccattcacagcaagtttacaaggctcagatgtgactggtagccaagctacaacctcaagtattaaccaaaattgcaattctgataagtactggtggaata

SEQ ID NO: 62154 - DNA, 128 bp, Glycine max
atacataattcatgaacaattttacattagaatatttttataaattaaaactcaagaaattatatgtttactaaattctaaacttacaacatcaagtcttgtacataaaaaaaattcagatgctgggg

SEQ ID NO: 62155 - DNA, 55 bp, Glycine max
gcagtttattctatcatatccttggtcaaataattttctttttaattaccatacc

SEQ ID NO: 62156 - DNA, 412 bp, Glycine max
agccttccatttcttacattttaattacatttgaccaaaaattcctcaatggttgaatgcctgggggttaataccattggtggggggaaatggcctgaaggaaccaaacagatccattggccttactgtggcaaggggtccatccaaaatggggtcccaatggtagtgccagtcaaacttttggttcattaataactgctgtgtatctgttggtccttttctatctacatgcgtatttgagctaattctaaaattggcaaattcaatatcttatttatcaagtcttctagacaaggaagacccgcctgtgcgtattgctgctggcgaaacactggctgtaatttttgagattggaattatagagaaattttctgctgattctaaaggtgcaagtgatatgagtcaagaaaag

SEQ ID NO: 62157 - DNA, 267 bp, Glycine max
ttttttttttttttttttttttggtttatatttttttttttttttttattatttttttttttttttttttttttttttatttttttattaatttttatatttattatattattttattttttattttattatttaaaataaaaaaaaaaaaaaaaaaaaaataaaaaaaaaaaaaaaaaaaaaaaaaaaaaaaaaaaaaaaaaaaaatataccaaaaaaccctaaaaaaaaaaaataaaaaaaaaaaaaaaaaaccacataatatat

SEQ ID NO: 62158 - DNA, 174 bp, Glycine max
aaaaaaaaaaaaaaaaataaaatctgtttcgttttacaacaaacacgacaacacatcggaagggtcagccgccttaaaggactcaagctaacgaacgcgtgcatccaaagcatcacctcagtaatatagctcctacgtagcattccaacgcccgaactagaacaagccggaact

SEQ ID NO: 62159 - DNA, 280 bp, Glycine max
aggacacatgcgttgatatcatttgcttttctcataatcttaataaatctgggtgtggttaaattaaaaggacctaagtatttcactataatacactcaatcacgcttactctatctatcaatcacttcatacttcaaataattcattatacatgcttaaaaaccttgtacctaacacatatgcccattactttccttaaaatatagaatctcatattacatacttatattattttactatttactaaacactaatctcatctaatgaatcaattaatta

SEQ ID NO: 62160 - DNA, 277 bp, Glycine max
cccacgcgtccgaaaaaaaaaaaaaaataaataaaaaaaaaaaaaaaaaaaaaaggccggctggtataaaaaaaggcaaggctgatctagaggatcaagccatacatacgctatcatgtaacgtcatatcaattcaatggactgacctaaattaaatatcgtggcgagtgataaacaccttacggaacggaaaaaccttgccttgcaccacattaatctcttgtcagctgataccatattggccaggtcccataatatcgaacaggccaacaccaat

SEQ ID NO: 62161 - DNA, 235 bp, Glycine max
atatataaatatatagataaactgtgatcgatgaaggcaagactctgctaacaggcggcgtccagattgcggggggcgtgtttcaaattccgatagtctagatggaatgcgcgttgtggtggagccgagcgacaggcacgacattcaggcgttaaggagaatggaggcgaagaagatgacagagttaaacagggagcgcgtgagggaaccgtccgagcccgatttgatacggaat

SEQ ID NO: 62162 - DNA, 327 bp, Glycine max
  unsure (1)..(327): unsure at all n locations
gccagcgtccgccacgcgtncgccagccttccggcgtctgtaattgtaattgctgatcctgaagctgacctcaaaccctaactgccgcttggctgaaccgcatccgttagtatctcggtatgaataagtgagaatcccaaggaatccgatcgaatcatctcgacgaggaagcaaacaccggctatagttatgtacaaagagcgaggaggcgtcagatccaaatcggaggtaactttcgttgatcgggaagcgaatcaatggccgtcctcgataaacagctcgaacgatccctggcgtccacattcagagccgccggcgccattaacg

SEQ ID NO: 62163 - DNA, 281 bp, Glycine max
cccacgcgtccgaaaaaaaaaaaaattaaaaaaaaaaaaaaaaaaaaaaaaaaaaaaggaaaaaaaaaaaaaaaaaaaaaaaaaaaaaaaaaaaaaaaaaaaaaaaaaaaaaaaaaaaaaaaaaaaaaaaaaaaaaaaaaaaaaaaaaaaaaaaaaaaaaagggggagctttttaaaaaattcaattttaactaactttttattgattgataattgttttaataatggagcatctaaatcattttaattggacgttttttaaaatttttgaaattggaaaa

SEQ ID NO: 62164 - DNA, 418 bp, Glycine max
  unsure (1)..(418): unsure at all n locations
gtttagtcatatggggaacaacctctcctgtttttttgaaaatgttgggtgaattggcaaatatgattaataagctggatgaattatgtcagggagtttggcaaatctcggggttggcagctttaggttatgattgctgaacatttctgatccaatatggctatcttatataacaatttgacatgatataatttaccagttacctgaattatggaatgaaatttagttatctgtatatattatgactttcttatttgttggtcgtcctgttgaagctgagggagtacgttgatgacacagaggattacatcaacatcatgctggatgacaaacagaaccatctnctccaaatgggagtcatgttgaccacagcaactctggtagtgagtgccttttgtggtgtggcccgtatttttgg

SEQ ID NO: 62165 - DNA, 412 bp, Glycine max
  unsure (1)..(412): unsure at all n locations
cccacgcgtccgtaacagtcaaccacttaatccaacctgtttcaatttactaagcgagaatcaacttagggttgtcaatacgtgattaggcaccacatacaccagttagcccttcgtccattaagcatgaacgcaagttaggctcagaggcaattaatcgaacacgaagcgtgcactgattaatattcacgaaattgggataactggtgaagggaaaactgccaggaacccacattacaagcgaaacctcaaagagagttgggcttcgtcatcaaaaggaaacaacaccagaaaatctagccttccatggattcaaacagaaaacgcanatgaaacatganacagaaacatagatgaacaggaacctaaatgaacagaaacgtaaatgaaagtagaagaagaagcacaaatg

SEQ ID NO: 62166 - DNA, 331 bp, Glycine max
ggcacgcgtacgggtataatataaatttcacccttctctgtgactcactctgtgacgtgcagcgcacactgagagacacacagtgtgcagcagcagcagcaggagcagcagctggagatgaagatggctctgacactgtgggagacattgaaggaggacatagttgtctacacggggatcttcttgaccatcttgttcatgattctagccctgttcctagccctatactacgtcgttcctgggctctaccactgttacgaccacggctacagcaacttgtagcgcgacttggagcctctgatagagcctgtgcaaatcggcgatgagatcg

SEQ ID NO: 62167 - DNA, 378 bp, Glycine max
tgtgactcgttcttcttcgtcgttatcttcttcttttgttgtttgtgtgtctgtttggtctgtcacctgaaaatgtcttgctgcggtggtaactgtggttgcggaagcgcctgcaagtgcggcaacggctgcggaggctgcaagatgtacccagacttgagctacaccgagtcaaccaccaccgagaccttggtcatgggagtggcaccagttaaggctcaattcgagagtgctgaaatgggtgttcccgctgagaacgatggctgcaaatgtggagctaactgcacctgcaacctctgcacttgcaagtgaggtgttggagagctaaagcttcaagcagagatggcccttagaaataatgataaaaactatatgtag

SEQ ID NO: 62168 - DNA, 197 bp, Glycine max
cttcatgaccataatcgactactgtttaaatctgaaaaaaaaaaaaaaaaagaaaagggaaaaaaaaaaaaaaaaaaaaaaaaaaaaaagaaaaaaaaaaaaaaaaaaaaaaaaaaaaaaaaataaagcatgctgtggattaatttttacgtactctcgcttatagctaattcactgtccgttggtgtacagcaaat

SEQ ID NO: 62169 - DNA, 462 bp, Glycine max
ccggattcccggcccgcgtccgcctatttcttcttccttccaacaagttccaactcgaaacactcactcactcctctctgtgctctcaactccacactctcactctgatcggtttcaatggcttcaccggcgtggttgccgcaggagtcgcagccaccagtgtctggtgaaacgcctcttcccatggcttcttccgctcatacaactccttctactgctcatgcaaaattatttaacgcaaccgcgtttgtagctccggcaccggcaccgccattcgcttacggcatgcttcagaatgttaacgcttccggaagttctcaacagtcatcgacgcatcctgagatgaaatccaattctgcagtgaatcccatgggtgttcaacctccaggtgtctctttacatgctgctccttcattttcatataatattccccaaagtggtgccattttttctagcaaccca

SEQ ID NO: 62170 - DNA, 424 bp, Glycine max
ctaatttgtgtggctaacagtgggtttataacttcttgggctgtttgactagcttcgttcctatcatccctcttcccgtctgcaaacaccttgccctcttcttgggctgttggatgatgggctagtcaggctgcccaataagctgaacatgctgaggctaatgttgacaatcaagtcctggatcagatcaaatgcctcagaatggagtcaaatgaaataggttcaaaccttaatggatgaaggattatgaatatgaagtactttagcctgttttagtggtgaatttggaataaaagatatggtctgcgaggagttgttggagtgagtcctgaaaggagtttgttagggtggttattttgtattgttgtattgtgttgtttgcttgcctgtaagttgtatttatcattagaggggttattcttat

SEQ ID NO: 62171 - DNA, 270 bp, Glycine max
gctgctcataccacaaccatgctttatgttattcacacccacctcacacggtcacatcatgtttggagcactcaaaacaacgcttgtgctcctctctcccttctctaccaccacaacagaaacacaaggtgcaccaccttcttcttcgcttcaactcggaccctcaacctatggtttcgcatgtctggtactcgcgttcagaagaacctcacgagtacctcgtactctcgagagcccctaggcattcaattcggctaacttctgacggct

SEQ ID NO: 62172 - DNA, 429 bp, Glycine max
ggatattccattttcccctttctgcttacgcttcacttcccagatctcgtaagtcggatcggtgaatctaccacaccatgcaccgaaccactgcataaccgcaccagatccatcccaacctcgacatggtctttggcaagaacaacaaccaccaccttcgaatctcctcctccctccaagatctctcctactatcgccatgacctcgaacatggccatggccccactcccgacaacaacatcaacaacaccaacttcacctcctccagtttctccaaaaccaaaccggttcaactgcccaatccggttcgccgcaaacacctcttcctcttcctcttcctgatcctcatcctctaccttttcctgctacttctctgtttgctctacactctatactgctaaccactgcctcccccaaatcctacgtcgg

SEQ ID NO: 62173 - DNA, 80 bp, Glycine max
cccggcacgacccacgcgtccggcgaaagggatcgttgaaatcaatgtttcggtcgtagcgcgaaaagaaaagaaagtga

SEQ ID NO: 62174 - DNA, 94 bp, Glycine max
tcgggaacattgataatattttataataatttgtgagacagatagatcttatgggttagtacatatgaggtaatgaggatcattcactctatta

SEQ ID NO: 62175 - DNA, 124 bp, Glycine max
cgcacgcgtccggttatttgataaggtgccatatgttccggctatactgtaggcggagagttaaattgaaaggatgccaaccatatcttggccatggatcccacaagtgcacattccagagaaa

SEQ ID NO: 62176 - DNA, 130 bp, Glycine max
ggcactcttccgctcacgcttccgcataacctcactcatcctctactttcgtcttgttccatttcaagatcgccggacaaatcttgcggtagaacacatattccatgcaccgctcttctgcgccaacaat

SEQ ID NO: 62177 - DNA, 208 bp, Glycine max
  unsure (1)..(208): unsure at all n locations
cgcacgcgtccgcttactgttacngtttggatgagtatccgaaggtgtacgaggagtgtaggttgaagtgccagaattgtccgatggggtttcatgcgatggttgtacgttctccgccaaaagatggttcttttggctcgttttgcagatggggttattttacctgtgggtttttcttgggattttaaggacattaactagtcttttt

SEQ ID NO: 62178 - DNA, 240 bp, Glycine max
tcacccaccgtccgaagactatgctttatcattgctttggattatatgccgagacgggatatggagaatgtgtttaatgatactttctcttcccaagatttatccccccatctgtatgtactttgacccttccacaaatatctgaaaccatcaactttaaatagtctatttaaactgcaatttttatttatttgccttttttctgtaaatattttttatttaatcaatcacaagctattt

SEQ ID NO: 62179 - DNA, 179 bp, Glycine max
  unsure (1)..(179): unsure at all n locations
aacactcactcgcactgtcttgnacttcatcaacacgagtgagtaaagggggaccgtccaaaacgaaacaaaccaaaccagcacaataaaaccaacaaaaatacatacaagacactcataacaacccataaaacaaacatacaaatagaaacaaccccaacaaaaaaaatagatgacac

SEQ ID NO: 62180 - DNA, 203 bp, Glycine max
ccggctcgaccccgcgtccgagttttggtttttttttaaaaaaaatcgattatcaaaccgggaaaaagaaaaaggaatggttaaaattatggaagccgggccaattacatggcagagacatgacccggcatggaaacatgttcagatgtttaagaatggggacaaggagcagctgaagtgcatatattggctgaagatagttt

SEQ ID NO: 62181 - DNA, 217 bp, Glycine max
gttggtgacaccattaagtaagggatagcactgcgttctccagtcctggttgatggaggtgctataagtgtggttatcctgaccttagaagctgtatattgttgtctacatcataatgtgtgctctttgttctgtagctaccaaagataaaaccattcaaaaagcatcttccattgaaatccatcatatgaatattcaacattcttctacatgtaac

SEQ ID NO: 62182 - DNA, 68 bp, Glycine max
cccggcattagcttccatcaaatgtcacactctcattctaactgccaatgccatccattccatggcca

SEQ ID NO: 62183 - DNA, 142 bp, Glycine max
gagacacgcacggctcagctcgcgcatgaactaccaacccaacaagcgatcaacaggaccggacaacacgcatctaggcggaccaaacaccctcagccagccaccagaaaaaaagctcccagtaaggctcaaaccacccaca

SEQ ID NO: 62184 - DNA, 180 bp, Glycine max
gggcgatgcaagctcacacggacaggtcggctcccggccccccagaaagcaccaggactggggcaaagcgcacccagcgcggccgatcggagcgcacacgcccgctcgggaagacagacagcaacagcgcgaggccgctgacctggaacccaaggacagcgagagggcccgcgccccaac

SEQ ID NO: 62185 - DNA, 69 bp, Glycine max
cggacgcgtgggcttacgcgtggggttaacttacttaatcaagtagttgtggaatggcagggttaaagg

SEQ ID NO: 62186 - DNA, 127 bp, Glycine max
gcatcttcatcttcttcctctgcgccaactcctaaccctaattcccaacttggtatctgaatccctataccgtcaacccttccctactcttaccccctcacccatcaacctaccttacagatctcta

SEQ ID NO: 62187 - DNA, 413 bp, Glycine max
cccacgcgtgcgaatacgcatagaaagtgtccaagatagacttcccgctatagatcctgtcaagggcctttataagggtctctatgaatgcctatatagttcataatatatttgatgacgtagtatgagacttaatattgcgaagaataatggcttcgatgaaggcctctatgattgcctcactgcttctgtatatatagatgaatgatagactcagaatatgtggggaaaattgactacggtgtggactacttattgagctagatatcgagctatatcggctgtgattacgaattgagcttaataagatgcatataaggttgtatccatgaaaattcccatttgaaacctaacttggcctttgccattgactaattctaatggcttcctatctatcctccaatctatttctc

SEQ ID NO: 62188 - DNA, 199 bp, Glycine max
tccattttatactcaccatatttttaaaagggtatatatattctatcacttctacatcatatttcactactaattattatactctacaaacatacagaatactataactgattatttttataattacatcattgtcatcctaaacgactatatatatactccctatatatattaattctaactaatgtgtcatacactt

SEQ ID NO: 62189 - DNA, 212 bp, Glycine max
cttacgcttgcgtcatggctgctaccatatcgaacctttccgatctgaattaggttagggttagactctagggtttacaacatcagcataatccatcgtcacttcaatctactataattgagaagatagctgaacactttacagccatggttactgctcgtctataccgatgacaatatcattccatttgatgccacatctcactaatggaa

SEQ ID NO: 62190 - DNA, 208 bp, Glycine max
gtcacacgttcgctgagaagtccgaggacacgctgctctatgccatccattggagtggggagacagtctgtgcatgagattagtggatgcaggcgtgagatttgctgaatcgacagggtgctggtactctgggacctttaatttacaacaactggatgctgttgtacaagtatacggcgtaaagccaatgatttgaggtatttaaacg

SEQ ID NO: 62191 - DNA, 317 bp, Glycine max
accaagtcaagttctcactttgaagagaaaataacatcgtaaagatgtctgcatcaggaggcagaaggaagccaagaggaagagaataaccttcttgacaaagggccccttttaatcttaaagtcaagggccaaaatttaactcaaatggtttcctggttgattgaaagagacttccagctgaacagacccctgatgagcttgagatggacgaaggggattagatatgatgcgcatgctggaccaaaacggaggtggacacaagtttctttaaatgtatgatgatcatattcattaaaatgcttgataaaacgcatg

SEQ ID NO: 62192 - DNA, 222 bp, Glycine max
accacgcttccggtaattatgcatccatttcgctgcatgactgggtctagagcgaggaggataaaatgtcgggcttgcttcgaagcgcttgcaacactgatcaggtcacagctacaacatcctactttctaaaccttgcgcctgcacactataactgctgctacagactatgatgaactattcctaggactagatatccttaactatatcttttcgaatatg

SEQ ID NO: 62193 - DNA, 286 bp, Glycine max
cccacgcgttcgcccacgcgtccgcacacgcgtgcggtgaactgaatggtcggtgttgggattgattatgagcatgaatactttcctagcatgcatgcgtgcttctgattctacattataccaatactctgccaccttgacactaacacaactctattatcttttagatctaatgcaattacaaagcgtctgacatagcattggtagcatattgctccatctagccatgcagcagatgaatgacaccaaaccatacttgtcaactaaaccgctcattctcatgtca

SEQ ID NO: 62194 - DNA, 55 bp, Glycine max
gacactcgtccatggtgtatgcatcaatatcgttaatcagatctactaattctga

SEQ ID NO: 62195 - DNA, 162 bp, Glycine max
tatactcgtaccagctctcatcatcacattcgtgatttactgcaccctttccgggtattggattcttattgaggctacacgatgtgtagttaaatgcgtcaaatacctatagagaaacgaaatgccgttagtcacagtcatgaattgatattaatcccatga

SEQ ID NO: 62196 - DNA, 241 bp, Glycine max
ctctgcaatagcttcaccatcaacaacccctgcattctttgctaaaccccattacccaagcctaggtcctctgctcaacttaagcactctctattggatcatcacacattcaatgtcattatattcaaaaatgacacttcagaagcttttatagttgccaaaaaacactcttacagagacttttgaaccatttgtcaccaacagatttcaaacgctttcgtgccaaatttgtaagctgctc

SEQ ID NO: 62197 - DNA, 320 bp, Glycine max
accggtcacggcgtccgcgtacacgtccgacgacgcatacggtcacagttgttgatgcagatgctgatgctgacatggatggctaacagatgcaactacatgtgctccaactggctcaggctgcagaagacgctaaggctcttgactaacccgatgaggcatcgggaaaaggatgaggacagatgatgaactatgatagctcttagttcgatggctttcaatgtatcctagaggatcccgatctatttgtacccgacgagaaaggccataagccatatgtacgcaattgatcaggaccatacgcagtctatcaggggcaa

SEQ ID NO: 62198 - DNA, 132 bp, Glycine max
ctagtatgtagtatattattcacttaaataaagcgcattactatgtgcaatgagtgtgtgtaaatattaacaaaaaaaaaagaacaaaagcagatcatagcaaaaaacataaaacagggcctccgttctaaa

SEQ ID NO: 62199 - DNA, 100 bp, Glycine max
cccacgcgtcctaaataaaaaaaaaaaaataaaatttaaaacaattttcaaacttaaaaagaaaaggctataaattaaatttttccaaagaaaaaccaaa

SEQ ID NO: 62200 - DNA, 354 bp, Glycine max
  unsure (1)..(354): unsure at all n locations
ccacgcgtccgccgtgaccgaccgcggtgacggttagngttacatgaaccgccgcttccccgaggggcaagtctccttctacagaggctggaggcctcgaccgcgtcggcgacccacagtactggaccaccatcagcgcctgcctccgcgacggccacgcctgcgccggcatgaggcgcctcgcgcgggaccccaacactggcatgctcgtgccggagacgcccaccatgtcctacggccgcaacctctcccctgatccagcctggatgctgcaagccaccgacgtcttgtgcgatcagatacatgaacgatacttactggacacaaatcctcaacgtaccgacggagaccaac

SEQ ID NO: 62201 - DNA, 72 bp, Glycine max
cccactcgttcggttggaaacacgtcgatatcgttttagataacgtgctcccgtccgtcccgtgggccatgt

SEQ ID NO: 62202 - DNA, 139 bp, Glycine max
tgagaatgagagggatgatgattacctcttggctctcggcttcactggcccctccggctactccgggaagggttccattgaaaaattcacagacggcatctacgccggcggcctcaccgccatcatcactggggcgtcc

SEQ ID NO: 62203 - DNA, 163 bp, Glycine max
gggttctgaatgatgattcaattcaaactatgattgtgtccttgaataatttttatcatgcaattgtaatttgtattgagctaatcataaacatgaagttacatgttcaaaaaaaaaaaaattaataaataaaaaaaataaaaaaaaaaaaaaaaaaaatgaa

SEQ ID NO: 62204 - DNA, 230 bp, Glycine max
tcgcccacgcgtccgtccacgcgtccgactggctgttctttttggcgttaagaatgaaattgggaggtctaacgccactaaccctatgctgacgcgacttcttgagaactgtaagagtctcaaatatatggttgatgagtgtccttttgcatttgtgaactagtgtgtaatattttattcacttaaataaagcgcattactatgtgcaatgagtgtgtttaaatataaaa

SEQ ID NO: 62205 - DNA, 138 bp, Glycine max
aaaaaaaaaaaaaaaaaagggcggtcgatctaaaagatccaagcttaaaagggcgggcgtgctaaaggatccaagcttactttccccttccttccaacgtataacttttctaatatggcaaccaaattcaatttaatt

SEQ ID NO: 62206 - DNA, 234 bp, Glycine max
aaaaaaaaaaacgtttgacagaagctcccatataatgggctgaagctgtacagatttcggggctcgttacccgtgccatcgtgaggcacacatctgatgatagagatctataagatgcatagacatggacgccgtccaacaccattatgacaggtaataccatgactatgcggaacttaacaagatgaccatacaaactgccttaattatgtagagtgcttgcacaagtacttc

SEQ ID NO: 62207 - DNA, 367 bp, Glycine max
tcggtcaaaaggagtgattgggcctcattggtacaagtgtttttaacaaacagcaacagtacagagcattttgatgcatgtaagtggacaaaatcggaaccacattcctgggaattgatcttcccaatataggtatgtggtcctaataatggttttgaaatgtggagttctgagtgggcaaatcaaacttcatggcatttgagtttccttattgacaatcccaaacagtctacagtttttgacattctcttgggaatttctcaagattttgaaattgctggtaatactcttatgccagctttttctgttccacaggctactgccagatcttctgaaaatgcggaatcctctgcatgatctggaattt

SEQ ID NO: 62208 - DNA, 346 bp, Glycine max
gtcttatgaatttcttcgacgtaaatcgattcttcaacaattattatcatagaaggcgagtcatgttctgatcctgcgcattctcttatggctaatcacgacaataagctgcactgataacagacgatatagtagcctgatcaaacgccggatataggctagattgctcagagcctttatgacgttcaatcttggtgacatgtctcattatgacgtcgactcccagactaccatcatccttgatcgaatctacaacaacgtcttaagcacacgctagtatgagtactattaactacaactagatgatgtgaaatcgcatggtgaagtactcttggtggaatcatgt

SEQ ID NO: 62209 - DNA, 278 bp, Glycine max
  unsure (1)..(278): unsure at all n locations
cggggcntctaagcggcagaaactgccaattcatgcggaggaagtacatagattacgcaggggaagaaaggctgataagcgcttactggatctgcacagaaggcctaaagaacgtagtgaagaagtgatagagacacagatgtactgatgaaagaatttatgatacctgaacgagcagatgcgggagttgaaatacagaaggaggcttattcaattgtgagatgcgaagccatgatatgccctcactgtttcatggctttaagaatacaaatgggagg

SEQ ID NO: 62210 - DNA, 261 bp, Glycine max
  unsure (1)..(261): unsure at all n locations
ggagaagcgacggaaagagcaagaggagaggggnnncaaacaggangangagaacaaggagancaagaggaagaacgagaacgagccggaccaaacccaagacgcacacagaggaagagaagacagaggagaaacagagggggaccaaaagcgggaagaggaacaggagaggggagnacgngacaaagagaggaagaagagactgcgcgagaaaaacaaaggaagccccaaacgagaaggaacggaaggaaaaaacggcga

SEQ ID NO: 62211 - DNA, 251 bp, Glycine max
aaaaaaaaaaaaaacaaacaaaaaaaaaaaatgaaccacaacaaaaaacatcaaaagaaaataaacaaaaacaaaaacaaaaaaaacccaaaaaaataaaaaaaaataaaaaaaaaaataaaacaaacacaaaaataacataaaaaaaaaaaaaaaaaaaaccaacaaaaacaaaaaaaaaaacaaaaacaaaaaaaaaaaaaaagaataaacaaaaaaaaaaaaaacaaaaaaaaacaaaaaaacaaaaa

SEQ ID NO: 62212 - DNA, 276 bp, Glycine max
taagccatacccaaaaacacactcaatgtaaatttcaaaattagagaataacctcaatcacattgcctcatatcgtggtcaacataaaattctgccactaaaacacacatcaattcatctacgacaacctctacttatgctacgcaatcaatcctgtcaaacaccatgatccgaaattacagcgtgtctacgctaaaccaattctgcagaactgcatagcacatgaaaatgaatgccttccccagagtcagtaccatgactaaagaagaacaacca

SEQ ID NO: 62213 - DNA, 237 bp, Glycine max
  unsure (1)..(237): unsure at all n locations
acgaaaaaaagaaaagaaaaggaaaacagcacacaggaaaagaggcaagccaaagaaggnacgaggcaaggccaaaaaagcagggagaaaaacacccgcaacaggaaaggaaacgaacccaacaaagacaaagcagcacaaaaaccacaaaagacagagaaggaaaaaaaacaaaaaagaaaaacaagcagaaaccacaacacaaagaaagcaacagacccaacagaaaaaaaaaga

SEQ ID NO: 62214 - DNA, 325 bp, Glycine max
  unsure (1)..(325): unsure at all n locations
cacgcgtacgtaagctcggaattcggctcgatgtatgaagatttgaggngacgagtgaagcgtgaaaggatgaccaattacaacggactaaggtcgcacacgaggctgccactgccagtgtcggatgacgtatcggccactgccactatcactactatagcaagagcagtactaaagaagcgggattagagagttaagggtcctcggcgcatgctagtgacccttgtcttgaccttcttgactatagatcctatcaaaatcctcattgcctagactaggataacgaatgcaccctatgaggataagaaacggaagaatgacaaat

SEQ ID NO: 62215 - DNA, 352 bp, Glycine max
  unsure (1)..(352): unsure at all n locations
accggttccagacatcacccgcgctgcacgcgatacgtaacgctcgcaattcggctcgaggttgaaagattcgtnggcgacgagtgaagtgnggaaggaggaccaattacaacggactaaggtcgcacacaaggctgccacagccagcgacggatgacataacggccactgccactaccactactatagcaagagcagtacaaaagaagcagaattagagagttaaggaacctacgccaatgctattactccttctcgtgaccttcttgactatagatccgatcaaaatcctcatcgcctagactaggataacgactccacccaatgaggataaaaaacgaaaaaatgacaa

SEQ ID NO: 62216 - DNA, 394 bp, Glycine max
ctgacatctccatatgggttaaagaatgatagacagaaagaaagaaaacggtcaagggcactttcaacaagtgtgaacaccaaactgcggcattcacagcaaacagagtctcgaaacactagtaccctattccttccatgtcctccgaagacatcactctgatacccgaccagaggatcgagaacagtctcaattccactctcgtcttccaagacgaccctctccgcttcaattgccccaccccgcaccagcgtcaggtcggggactcgccaccgaagaccctcgacacgccccacgcccactatgggagcgccacagacgatgacgaacagtctgaccacgacgactaagatgacgacgacgaagaagcggatgacaccgaattaatgagact

SEQ ID NO: 62217 - DNA, 388 bp, Glycine max
ccggctgcacccacgcgtaccggggacttcggcttgagcttccgattacgatacacgcaagacccgcggggccgggtacactttaaaggatccggaccccaagatcgtaaggcaggctctagaactcaccgaaaccgcaaccactgatatacctgctaccaaaaacgccatcctgaccgcagcaagaaacacaaaagcaaaaacccaagataacgacaacaaccataaaaagcacacagacagggacaaaaaccaggacaagcagcataacaaccacaagcacagacaacgacatcaaagcaaaaacaatggaaacgagacaaatccatacatacacacgcctcatgactctagaactcgacctttaacgaaacacaatgacaaacaa

SEQ ID NO: 62218 - DNA, 358 bp, Glycine max
gcacgcgtacgtaagctcggaattcggctcgagtcttctgactgacgatacacctcagacccgcgggtctacgaaccctatacaggactcgcacctcaagatcgtacagcaggctctagaactcacggaaaccgcacccactgatctgcctgctacccaaaactcaattctgaccgcagcacgaaactcaaaagctaaaacccaagataacgacaagaaccataaaaaacacacagacatggacaaaaaccatgacctgcagcataataagcacaatcatagacaacaagactgaagcaaaaacatggaaaacgagacaaagacagacagatacacgcatcgtgactctagagctgat

SEQ ID NO: 62219 - DNA, 289 bp, Glycine max
tacagaaagagagagtaggggcatttgaaaaattgctaattcccatcatcaaatctttcaaagccaataaaatacctgcaaactttaaagatgacaacgcgaaagaatggcaagcggacaaccagcatcttgaacagaatgattgttcatatcggagttctatcaactaatacatgaattgaaatataatacttgaataaacacaatgctcatactaaccaatacttacattgatggttcaagtacaaccactgattaataactatagcataattttaaacctattaaa

SEQ ID NO: 62220 - DNA, 315 bp, Glycine max
caacaacgcccgcacgcctacccaagcagagcactcccgctcaaggtcaacgcttaaccctcaagaacgcacgaggcgcaaaggacacatatgaaccgaaacgacacgccaccataccaggcccaccctgaagccaaagcaaaccagaccggaaaaccacgctggaaccgagctccaaaaccccatagtgaaccctaaaaaaagcctaatcatccaacagctggcacctgagcaaaatcacaatacgcccaacacgacacacaacaacccacccataagcagaaaaagaacagccgaagctaccaacgcagccaa

SEQ ID NO: 62221 - DNA, 187 bp, Glycine max
aggaacatgcgctttaaaaagcccttctctatcgccaacactccaagacaattcgggacagccaaacttatagcaattagtgtagaagatgaatacattggatgcaactagggctgaacttggactacttgtactatatttgggcaaggctgaagcaagggacacaatattcaaggcaatacaaaaa

SEQ ID NO: 62222 - DNA, 177 bp, Glycine max
  unsure (1)..(177): unsure at all n locations
ggctcgattatggcataggtaccaancgnccacccaagganaagagcacactataagaggccggaaaaggaaggggagaaaaggagggaagnagggaagcaccagacggaaaaggaacaanggnccaaagnnagaaggaagcagcaaaggancnngaagcncaaggcagcncaacaa

SEQ ID NO: 62223 - DNA, 51 bp, Glycine max
cgtgggggaattgtttaatcaacgtacaaaaccacgcaactaattgacatg

SEQ ID NO: 62224 - DNA, 195 bp, Glycine max
agatttccttttgcttcttaccaataacaaacctccctggaagcttctctctgtgggcttccataggaaagatctccgccctgtatatgatggaacttgctcctctttccttttctgattaatataattatttatatttaactggagagagagagacatataaagagagtcatccttcttcatacatttaatacc

SEQ ID NO: 62225 - DNA, 211 bp, Glycine max
ctgtaacataaaattacaaaactggatttctatatcattattattattattatggagggtattattgctattattatcacatgaactagaaatgacttctcttcaattccaccgaggcaacccaacaaccgatacatccaccgccatcgcaaacggtataaactgttcgaagccaccgtcaacgctccgtttattggcgaaagtaggcctt

SEQ ID NO: 62226 - DNA, 52 bp, Glycine max
tgtcaatcgcccatttcaccatcagctgaactatcattacaattattattat

SEQ ID NO: 62227 - DNA, 133 bp, Glycine max
  unsure (1)..(133): unsure at all n locations
gatcgcgtcctcatttcccaccgcccgtcngatcccagcggtcaagggattgntcctgcacttcaacatccaagatcacgaccctaattagggggtctattcattgatggcccactacaacagaacaactggt

SEQ ID NO: 62228 - DNA, 67 bp, Glycine max
cacccacgcgtccgagtgcgggaaaattttcaccagcgccattaactcccccacgacccccatacct

SEQ ID NO: 62229 - DNA, 248 bp, Glycine max
  unsure (1)..(248): unsure at all n locations
gcgcgaaagcaaccacatcaagcacagtaaatacatcctatcacaccctattacanagtcacttttcacaaacacttaaaatggctctataagctcgttcaatcacccaaaactgccactccatcgtttaatccctttgaagaaaccaacctcagttacttgaatacaccgtggaccaaatgaaatcgttctaagcatagcctattaagatcaatataactattacacaatatatgcaccgataaata

SEQ ID NO: 62230 - DNA, 212 bp, Glycine max
cgcacgcgtcctcctacgcgtccgtcaatctcatcctctagctagcattgagaagcaatatcttcgaattgaggagagcgcttttaatggcggtggagtaccattgttgtgaaactcattttttcatacgcttattgataattttgctgcttgtgttgttttctggatttatgtcttgtctcactttatgactcatatactttattcttttt

SEQ ID NO: 62231 - DNA, 132 bp, Glycine max
cgacccacgcgtgcggagagactagagcgtagatagcaatcacatcaccctcatgtcaatggcaacgcgaggtcttttaagaacctggagcgccccattcttacggggggcccaacaagcctttaactggac

SEQ ID NO: 62232 - DNA, 294 bp, Glycine max
aaaaacaaaaacaaaacaacaaaaacaaaaaaaaaaccacaaaaccaaacaaaaaaaaacaaaaaaacaaacaaaaaaaaaacacaaaaacaccaaacacaaaaaaacaaaaaaaaaaaaaaaaaaaaaaaaaacaaacaaaaacaaaaaaaaaaaaaaaaaaacaaacaaacaaaaacaaaaaaaaccaaaaaacaaaaacaaaaacaaaaaaaaacacaaacaaaaaaaaaacaaaaaaacaaaaaccacgaaaaaaacaaacacaccaaacaaacaaaaacaaaaaaaaaa

SEQ ID NO: 62233 - DNA, 53 bp, Glycine max
tgcaaatctggattctgactaatattacgtaacccctgaaaagtatgagggga

SEQ ID NO: 62234 - DNA, 136 bp, Glycine max
cgctatctctctctttctcctaagcttaatatccgaatttagggaatagagaaacgctaataaaaacatatcccaaacccatcaaaacactgagaacctgataaaccatatcatgaaatagaaattcactacctaa

SEQ ID NO: 62235 - DNA, 312 bp, Glycine max
agagaacacaattctcttattgatgttatgcttacagtttcagattgatgactctgaggaggtgtcatgaaagatgatcccattggtattttctcaggataaatccatctatgaagcagtggagagcgctttccatacaatatatatcaggaaaagtccaattgaaactgccaataatcttttgagtcttgccactgattccaatataggagatctagcatctcttgagttatagtaggtgccctggactctaagggtgaaatatattgcagcatgatatctcattatgggattccttattgctttaatgta

SEQ ID NO: 62236 - DNA, 157 bp, Glycine max
cgctcgaaaactcaattgcaatagaatccaacccgaaacttctgtagtgcggtgaaactaattataactccaagagggactgagccatcaaagatgagacacaagcataataccaaagatcaaccagagcctggggaagaggtggaatggggggcat

SEQ ID NO: 62237 - DNA, 51 bp, Glycine max
gacccacgcggccgcagaatcaaagcaagccaattggctttcaaaacacca

SEQ ID NO: 62238 - DNA, 112 bp, Glycine max
cagaacccataaattctctcaccaagattaccttaccttattgcattgcataataccaggtcaattaaaatgtatgctgacctcacccttactgtgtggcaatacatggcca

SEQ ID NO: 62239 - DNA, 205 bp, Glycine max
ccgacgcgtccgaattttttatgttactaaaaaaattatattctcatttttaacgttagtttacagactttcacttaaacaaagcatgaccaggattgatgaacgagggagagaagtaactgaagtagtctgggatggggaggagacagaatataagaaacctgataaggctacaatcaataagtctgactgtagcgcatattcg

SEQ ID NO: 62240 - DNA, 164 bp, Glycine max
agagatttgagaggtctcctcctccaatagatactccccatctaagtgaccgtgaagggcgggctttatattatgattctctgtctctctctaaacgttcttatgctgctattgatgaagttcctccactatatgcttatactgttgcttttcttatctagatc

SEQ ID NO: 62241 - DNA, 211 bp, Glycine max
gacccactcgtccgacaatttcatttcattacaactctctttcaatctctcagcaacagaaacacaataccgggggcttttaatgccaaaggacctgcactatattcagaccaaatgcatagtcaaacgctaaagcataaaaaccgttgaaaattaaacactaagttataacaaatttaaaagaaaaaaacaaaatacaaaatatttcaac

SEQ ID NO: 62242 - DNA, 188 bp, Glycine max
cccacgcgtcctaaataaaggaaattaataaaaaaacaaaaaaaaaaaaaaaaaagaaagaattgactacaaccctaaagaatccatccttacgtacgcttccatgcaacttcttatctcttctataattttacctaaatttaataaattgaccataattttaaaactattagactgtaaaaaccaat

SEQ ID NO: 62243 - DNA, 163 bp, Glycine max
gtttgtacatcttttggtttggtcgattgtacagccttttcagatttgcatgggttgcttcatagaacaacgtgatttgcggattgctgtaaagggcattattaggccataatctaatggacaagggggtgccttctaacctctactacaatgatggttcatt

SEQ ID NO: 62244 - DNA, 125 bp, Glycine max
cctacgcgtccgcctacgcgtcttgaataattcttcgttatactaactctatgtgatggactcttaataataattgcccttgttattttacatgtcatttgtttgtaatattaaccagtagccta

SEQ ID NO: 62245 - DNA, 68 bp, Glycine max
cccactcgtccgtagagatttggcatattacattgatgcatagctaaacaacaacactgcaatgtctg

SEQ ID NO: 62246 - DNA, 145 bp, Glycine max
ccgacgcgtccggtttttgtgtgtaacatggattggctgttagaatggagggtcggaggaatgatataaaaaatgtgatggcagggatttagggcaaacgaagggagaatgtggtggaaaagtctgcatcatcaatagaaggaac

SEQ ID NO: 62247 - DNA, 160 bp, Glycine max
  unsure (1)..(160): unsure at all n locations
cccactcgtccggccttcttaccgaactatgacttgagcattcctgngcagaagaacacgcccgcaaagcgccagttttatacgctatccttcagttcctttataccaacaggctctacccttccatttacactgctatagattccaccccacgatacat

SEQ ID NO: 62248 - DNA, 134 bp, Glycine max
cccacgcgtccgccctacgcgtcctagattatttgacacctggatcagagacctggtcggttacattgaaaggaatgcggacctaccacttgcccgaaatcaacaaagcttttgcaaagcgagttgcagatatt

SEQ ID NO: 62249 - DNA, 55 bp, Glycine max
  unsure (1)..(55): unsure at all n locations
ccgacgcgtccgccataaacaaacagaactaccaacacaggtattgnggctcttc

SEQ ID NO: 62250 - DNA, 154 bp, Glycine max
tggaaccttacaatgtactcaaatctgattgctatcgaaagggatgagtaaagatgtagcacgctttaaaagaaaaatgcaccgtcccgttaaagggtggatatgagaccaaggctgctcctgtatagctgcaaccattgtctattccagatct

SEQ ID NO: 62251 - DNA, 52 bp, Glycine max
cgacgaccgcgacgtcggaacccacattacttgcccggaatgccgccaaatc

SEQ ID NO: 62252 - DNA, 305 bp, Glycine max
gtctttgtctgatacccaaaccgtaactactctttcccaagatgggagttcaacggcgtgatgctttatctgaagacaacgagcctgctgaaaatgcttgtgctaatagttcctcgtaccaacgtgctcttgccagtatagtctgccaacatcgatccatgtgtaaatactgaaagtcggaaatttaatgaacctggttacaaatcttatggcaacatttctacaccgcatatctattgacaagatgtcttgaaaaataatatcattggcatgattggtatagtaacaaatgttgctggtgaatt

SEQ ID NO: 62253 - DNA, 63 bp, Glycine max
gcgtccggtgaccctggacggatgtgaaacgtgtcaagtatgcacactggactgaccggagaa

SEQ ID NO: 62254 - DNA, 52 bp, Glycine max
cggacgcgtccgcccacgcgtctcgaatgaccaacagaaggccaagacaacc

SEQ ID NO: 62255 - DNA, 128 bp, Glycine max
  unsure (1)..(128): unsure at all n locations
gacccactcgtccggagaaaagaaaaaataaaaaacacacgctacatacccgtcaaaaccanctcaaactctggaaggtttaaacgcaaccataacatccaccaacacacgccaaacatcacgactaa

SEQ ID NO: 62256 - DNA, 216 bp, Glycine max
aagaacagcggctgttacggctttggctgctctaacgcaatcagcaaaagcagctacgtttactttacaagcacacggaccacaccatacccatgtacaaactgtgaccgacagtgccataccatccgcgatgaaagcattgcacaaggaacccgccacagatatctggactcgcatattcaagtacttaaaagaacgctaacttacctatgatat

SEQ ID NO: 62257 - DNA, 410 bp, Glycine max
cccacgcgtccgcccggtcagccttggtctgtccccgtaaggaaatggccggggagtttcaggaaacccaggcgccgttgcctcagcggagcccgggctgacgaggcagggcagcgggttaaaccggagcagttccgcgcggggtggggaggccatggcgtccggcagtaactggctgtctggcgtgaatgtcgtgctggtgatggcctacgggagcctggacttaaaagaggagatagatatccgactgtccaaggttcaggatatcaagtatgaacctcagcttctcgcagatgatgatgcaagactgctacagctggaaacccagggaaatcaaaattgctacaactacctatacaggatgaaagctctggatgctatccgtgcctctgagatcccatttcatgctg

SEQ ID NO: 62258 - DNA, 291 bp, Glycine max
cccacgcgtccgcccacgcgtccgaaaaaaaaaaaaaaaaaaaaaaaaaaaaaaaaagaaaaaaaaaaaaaaaaaaaaaaaaaaaaaaaaaaaaaaaaaaaaaaaaaaaaaaaaaaaaaaaaaaaaaaaaaaaaaaaaaaaaaaaaaaaaaaaaaaaaaaaaaaaaaaaataaaaaaaaaaaaaaaaaaaaaaaaaaaaaaaaaacgaaagagaaaaaaaactaaaacaaatgtaaaaattatttaaaacccaaaataaatgtaaataaaaagattttaaaaaaattaaaa

SEQ ID NO: 62259 - DNA, 168 bp, Glycine max
aaaaaaaaaaaaaaaaaaaaaaaaaaataaaaaaaaaaaaaaaaaaaaaaaaaaaaagagaggataaaaaaaaaaaaaaaaaaaaaaaaaaaaaaaaaaaaaaaaaaaaaaaaaaaaaaaaaaaaaaaaaaaaagtaattacttaattatattattcataaaaaataa

SEQ ID NO: 62260 - DNA, 157 bp, Glycine max
atctgaagagaagcctctgctgtgccctggttgagccctgggggcctttatgggtgcttcttcaggccttccttaccccgtcattttactttatgccttaacgctgaaaaatgttctaggggctaataataaagctctcatttctcctgcaaacaat

SEQ ID NO: 62261 - DNA, 134 bp, Glycine max
aaaaaaaaaaaaaaaaaaaaataattaaaataaaataaaaaaaaataaaaaaaagattttttaaaaaaaaaataacaaaaaaaaaaataaaataaaaaaaactaaaaataaaaaaaaaatacaaactatataat

SEQ ID NO: 62262 - DNA, 175 bp, Glycine max
gcggccacgcgtacgcccacgcgttcggtttttttctttgttatactaactctatgtcgtgaaccctcaattgtaattgcccttgtgattctacatgtcatctgtttgcaatattaaccagtagcctacgtcgtctattctaacgttctgatacatagctacataccgctgacat

SEQ ID NO: 62263 - DNA, 425 bp, Glycine max
tcccactcgtccgaaaaaaaaaaaaattaaaaaaaaaaaaaaaaaaaaaaaaaaaaaagaaaaattaaaaaaattaaaaaataaaaaaaaaaaaaaaaaataaattcaaaattttatattttttaaaaatttaaattaatttaattatacttacactaatttttaaaaatttttatattgttaaatccttcttttttatccattttaattattatttcatcttataccctttttcttaatcttttttatttacttttattcatactactttttctctttttaacattttttcaatttttatttattattttactttctttataattttcacatttatttattatttttttttaattaccttttttttccctataattttttaatttctattttttatttttttttttttttttttttaatttttt

SEQ ID NO: 62264 - DNA, 411 bp, Glycine max
gtggaggcttgtcttggctgtttcttcgtctccatggtgttcggaggtgggcggctttgacggagaagcaactgcagctcaggcgtggacgggatgtttcgtcttaactcactttctgcgttggcagagctggcagtgggctctcgatggtaccatggaggatcacagcccacccagatcaggcgacggctaatgatggtggcttttcttggagcatctgcagtaactgcaagtactggtctgttgtggaaaagggcccttgcagaatctccaccatctgcaaacaacatcaagagtgaacttggagataaagggaagagtaaagaggaaggggaagattgtaatgctgaaaaaaaggctgcaggtgtttgacttgagccgtatccagaagagaaaaagaagaaacgttct

SEQ ID NO: 62265 - DNA, 174 bp, Glycine max
ttcccgactgctacccactcctccgcccacacatcccttaaaaacttcttattcttattttttatcgaaaaatacaaagtatcctattttaacaattttcaaaccaataattttaattatttaaactttatagaataaaaatttaatcccattaaataacctaacatctttatc

SEQ ID NO: 62266 - DNA, 285 bp, Glycine max
ccacctcctattcaaatcagttctttcaacaaatcattctactactaggctgtacttcttacccatactctaatcctcccttctctatcccctcaccatcttcttcttcttcttccacttatccctcatttaaaacaacatataatctcatttctcaacaaccaaacactactacataatataccattcaaaaccttcttttcacttccctctatcctattcttcatcttatataaatcgattccatctttcaccttgcttctcactacctcaccatatctaccc

SEQ ID NO: 62267 - DNA, 211 bp, Glycine max
aaaaaaaaaaaaaaaaaaaaaaaaaaattaaaaaaaaaaaaaaaaaaaaaaaaaaaaaggaggattaattaaaaatataccaaaacaaaaaaaaacaaacatacaaaaaaaaaagcccccccatttataaacttcaatcttaataacccccttcatcctaacaaatacttttcttaaaatcccccaaatttaaataacatacccgtctttt

SEQ ID NO: 62268 - DNA, 66 bp, Glycine max
ttctggaggatccaagctaccgtacccgggattccaacttaaaacccctttaatggggcccctaaa

SEQ ID NO: 62269 - DNA, 277 bp, Glycine max
tttgctgaaacacccaccgcgttagtcaataacatgtttgctcgtccggttcaattcgcgggttctctcttcttcttcctcttctgctcgaccctcatatctcttttcgccggaatcctctgctcttctctcgcatctaaaccttccaactcttctacgacgtcgtcttgttcttaccctctgctgctgcttcttcatcttcttctccttcttctccgtttcggcttcgccttcccaagccttccaccgtgttctctgcttcttcttctgcttcgtc

SEQ ID NO: 62270 - DNA, 385 bp, Glycine max
  unsure (1)..(385): unsure at all n locations
actttttataatacctcattttaaaaaaaatccagtgaatccggtatttcctgtggcaaatacgtctncctcatttcacgcctttcctgctccccaccacactagtgccctctccacccgccccgcccctgccctctngttcttcatcagtatttgaaagtgaatgatttgtaaccaagactctntntcttaggatcacatttacaatttacagattcgttttcttgggaacaaatattttttgtatgacctgtctaaaacccctcgcctgagttttgtggtaaaagtattgtttgtggttgtgatcttattaaattgataacaaactaagctatttgacagcagtgggaaagcagattgtcttgggcaaggagaaaaatccccc

SEQ ID NO: 62271 - DNA, 364 bp, Glycine max
aagaacagcgtctgattcggcaaaagctgctggaatgcattcagctttggcagatgctgatactgaagttgttgacggactacatgatgtccatctacaaactgtggccgatagtgctatagtgtacgcggtggatgcattggagtgggaagccgatacatagatctgggctcgcatgttcatgtaattaaacgaacgctaattgacctattatgtgctgatggactgaatgcctgaccacatacatcatcctatagcgattatacaggtgatcaggattatattaagtatggaacgtgagatcacggatcataatcacactaccaatgatgcctgtctagaggagatcgtattattggacgaa

SEQ ID NO: 62272 - DNA, 291 bp, Glycine max
tcgaaacacgccgcgaacaagaaaaagaaacaaccttagccggttcaacctgaacttatgggtgttcaattccatgcaaccgttcacacccaaatcttcttcgacaattcccaacggcactttcttgaacggtgatcaccattactaccgttcattaacaggcggcatgtcattaaccccggaccttggacatggaccgaagtcccgtgccccaccaaacccaatttccaagcctggaacccgaacccgaacttgccgacctagccaccgcttttgcttccaaacgtttct

SEQ ID NO: 62273 - DNA, 354 bp, Glycine max
actgccatccttcaagtattagcaaatcagtacgcgtagagtacagcgcagaaagaggcctgattattcttgatgacacggagtgtacagtgcatacattcccaacgaggagattgacatggacgcagacgcatagcaactggatgagcaacttgttccctatcacacatacttggaactggaggacttgaataagatgctgtaggtgatctatgatgaagcttgctcccttaatgaaatgcacgccatggtcaagacagagatgttcatctgctaagatttgaacagctgtcatacatcttacgttgatacccttgaagttaatgatcaggcccaacagatcgaccatgaagt

SEQ ID NO: 62274 - DNA, 224 bp, Glycine max
aacagcgtgcggaacataaaaggtagctgccaatttgacgtactcagtctccgaatggaaacctcattacgcaatccgtaagtttctagtgacccttgtcattatcatcctcctcgtcgtcgaccgctgtttgccctaataggctctcatgttgcggctgcatgatgattgatcgattgattgggatatataacgctgccgtcgaccatgatcaaccattcata

SEQ ID NO: 62275 - DNA, 183 bp, Glycine max
aaagatccatctaaacccagatcagcttaactaaagtgtctgaattgttctgagttaggttctactacagcagatactgacactcttcacgaatgtgatatagtgtatatgatcaattctcgactattcttttaatcctattcactatcgacagcataacttgattgtctcaacttggttaaa

SEQ ID NO: 62276 - DNA, 392 bp, Glycine max
accgcccacgcgtgcgggaaactccggctgccaccggcgcatagaatatgctcctcggggaggacatgttcagactgatttcagactcatgcgaccctgtaccaaacgtgactactcgaatactcatgcaataatctgaacaaattgcatgcatgatgcctggatgcctaacgagttattcacgccaatgagtcagatgcaatgatagaacatcatggcttttattgtaaagctgtgtatacaggacgtaatcaagcagaatgtcccgatgcatgagactatttaaacaactaatgatcacgagacagcacttgtacttgcgatgccttgcacttgacaatcgacgatttttatgcgtgcatggatacttattatacttctgttcacaaaga

SEQ ID NO: 62277 - DNA, 251 bp, Glycine max
aaaaaaaaaacataaaaaaaaacaaaaaaatatctacataaaaaaaaaaaaccaaaaagaggaagggctaacatacaactatataactctgatttaagatctcctaaattctattaacttgaacgcataatgactatcacattaactggtaaaaccttcgtgttacaacactaaatcacctagcaactcatactcatttcgccagttcctattatatctaaaattcccctaccaatcagctttatcaacaa

SEQ ID NO: 62278 - DNA, 430 bp, Glycine max
caaaaatgtaaaaaaaaattcattattttttaccccatttttaaagaactaaaaaaactaaacaattttaatttttcactttttggggctctttgacggtagaaaaagaaaaaaaggaaactaaaaaaaaataaaagaatatagaatataataatgaatagaaatcaaatagaaaaaagagataagataaaaaaataagatattactattatatttatattttaaattttctattttatcatttttattttattcgtttgttttctcgattgtagttttttttttcattgtatttattccattacagtggtgatcataaatgaatgttttacctctttgtgattcacctacaggtcttgccattcggttctgttccactaaaaacctatcttcctgatggagatgttgacttgacaactctcattcatga

SEQ ID NO: 62279 - DNA, 402 bp, Glycine max
gtttccaacctatccacctaaggccaaacctttctcacaaatggaaaaaccgcaacgaaagaaagaagaaactaataaaagcaaaaaaaaaaaaaagagagaaaacatctaaataccaaaatccccctctcaattcattttctttaacttttgttcagcaaccacaacaacttcttcccttcttctctttctctctctaaaaccctttttctctctagattatttccttcatcattagcttaattgatcaagctttagtcctttcgtttgcttcaccccatggatctaacattcgcaccttaaaagagatccttcaaagttcagttcaatttcggatcaaagtggtggcgttccgacactgataaattaaaattgagaggagagagagaaaaaaaaatgaaa

SEQ ID NO: 62280 - DNA, 281 bp, Glycine max
cctatacatccgaaaaaaaaaaaataaaaaaaaaaaaaaaaaaaaaaaaaaaaaagaaaagaaaaaaaaaaaaaaaaaaaaaaaaaaaaaaaaaaaaaaaaaaaaaaaaaaaaaaaaaaaaaaaaaaaaaaaaaataaaaaaaaaaaaaaaaaataaaaaaaacaaggccattaatttaggggcaagtcttaaagcttctgcctaatttacaccttaaaatttcccgagactccttttatgactgcatgtatacagtgacatgaattgacttttaaaacca

SEQ ID NO: 62281 - DNA, 234 bp, Glycine max
catatagaccctaagcactttcaatctagctctgaaagaccccaatgaactcctttcggcccatgctacctaagacttgacatgtattaccaagcccagtattgcgcctgctactgacgctgccattaatgcagttacctgctgacttatcagcgattcctacgaagaatgcctcgccagaccctacagctgctgaacatgcttgatccacagcagaccgaaatgctacttgaa

SEQ ID NO: 62282 - DNA, 106 bp, Glycine max
attaatataataaaccaactagagttggccttgtaaaatgttttagattcaaaatctggtgttgtcattgcataaaaaaaagttaatataatcatcttttatatgc

SEQ ID NO: 62283 - DNA, 281 bp, Glycine max
gagcgtatttaagttgtggagtagttctctacaggcccctatggtgggtcgtgtattctgtaagtaacactatgagtaactcaagagcaggtttgcattacatcctgtagaattcgatgtggaactctataatcaactgttgaaaagtcacctcaggctcggagattgtattctgatgatatattatatatcaagtggccaactattatctaatttaacagtccggtacacgcactaggtctataccagcgggacatttggagattagatagcatcaagtc

SEQ ID NO: 62284 - DNA, 195 bp, Glycine max
tctaaaaaaaaaaaaaaaattaaaaataagattttacataaaatttattaaaaaaaaggtccatgtaatattataaatttaagtttaattatcaaaaatttacaagaattaaaaattaatattaaatatatataaaattatttaaaaaaattttaattttaaaaaaacttcaattaaaaaaaaccaaattttaaa

SEQ ID NO: 62285 - DNA, 438 bp, Glycine max
  unsure (1)..(438): unsure at all n locations
ttcagatttaaacatgaacaaacatgcagactcagctcttttggacctgctcaaggtgagtgaattgtgacatgcagtctgtcaactttccatgttgagtaactgtgatttaagatttcttaaggaattacattttttatttttcactgtgatactgttccattgtcatgaacagatctctttcgccagatccaacacttctgtggcgtttccctatgtttctacatcagaggatgtgcttttggaaaactcattgatttcaggatttgctgaagcctgtggagatatgggaattggcaatgttgctttccatggatcttgctccatggatggggcaaatcatgaagaaatcacaactttgcactcagttcaagactatntgatcaagangatggaagagagtcacagaaggaaaacagaattgggtgtgttctgcaa

SEQ ID NO: 62286 - DNA, 310 bp, Glycine max
ctcactcgatcgggataaccctaatacttctatcatcatctattgatactggcccttacgatccttgcggctcttcaagcggtccacgatgtgctgagaagctcgcgcatccatgctcatataggcctgatcaacctactagcgactatccctttaatacagggaactagccatccaaggtcggtagcgcgaatatcatcatccatcagactacaatgcgccgatcgcagacgcatccactattgcccctgatgttgcattgcaaccgatggcgccagctcacagtcattactctatacgagcccatagg

SEQ ID NO: 62287 - DNA, 318 bp, Glycine max
ggcgaaggagatagtgaaagagcttcttcctctaattcgagtgtacaaggatggcagcgtggagcgtgttctaagctctgaaaacgtggcagcctcccctgaagatccccaaactggagtctcatccaaagacatagtcatcgcagacaacccctacgtctccgctcgcattttccttcccaaatcccaccacactaacaacaaactccccatcttcctctacttccacatacgttggaaacaataaaggggacgtgaaaacagaagatacaggtgtgctgtaccatgaaatggtgcacgtttggcagtggaatggga

SEQ ID NO: 62288 - DNA, 431 bp, Glycine max
gtcagagggaccctatgccttggggaggtcacggtattctgtcaggcagcctcgagtacgtcctcctccttcactaggttctgttcacagaacttacaaaaatgaaaatgaacaccctggcccttctgctttcctagaaaatgagatgcattataatcaggcaaccagaagtgactctacccttccaactggttatgacaatgggaaccgtggacaacctgaagtagtggatgcccggcaagagactactgagaatgaggaccataaagtggaatccacaccgaagtgtgattctcagtcttcactctctgtttcaagccccccaagttctccaacacatctttctcatgatgacttggatgactctggagattcccctacgatattgacttctgaaggaagcaaaaatgaccccctcacagctccagata

SEQ ID NO: 62289 - DNA, 61 bp, Glycine max
  unsure (1)..(61): unsure at all n locations
ntacgccacgcctccgctatcgtagcaaaaaaagaaagaaagaaaaccctaacttaacttt

SEQ ID NO: 62290 - DNA, 453 bp, Glycine max
cccacgcgtgcgcaaattagttcattctctttgcgcagttccctacctctcctttcaagaggcagatcttcgtcaagaccctcaccggaaagaccatcacccttgaggtggaaagctctgacaccatcgacaacgtcaaggccaagatccaggacaaggaaggaattcccccggatcagcaacgtctcatcttcgccggaaagcagctcgaggacggccgtaccctcgccgactacaacatccagaaggagtcaacccttcaccttgtccttcgtctccgtggtggcatgcagatcttcgtcaagactctcactggcaaaaccataaccctagaggtcgaaagctctgacaccattgacaacgtcaaggccaagatccaggacaaggagggaatccccccagaccagcaacgtctcatcttcgccggaaagcaacttgaggacgggcgcaccc

SEQ ID NO: 62291 - DNA, 412 bp, Glycine max
aacacgcgtccgcacagacatagaggaagactctatcgccacgaagcggttggagcttacgaaacgacccaaagagggagcttaactcatccagagcagctcacttttatcgagtcctgcagcgtgattgtctgatatgtgccaagaatgatctgaagctgggctgaagacaagcatcacgaagagacccacacggtcaaaagctatggcaagcatgacaaagcgatccacatgatcatgactatgatcatgcatccgaagaaaaatcatttgaacagatccgtaagacggcgtagaaaaagcatttttaacaagaaacttgtaggactgtcttacagatagatacgctgcagatgatgattgaagcaccatgacatggtaaaagagtgacatgtatgtcgcagcataacat

SEQ ID NO: 62292 - DNA, 397 bp, Glycine max
aacacacgtccgcacggacaatgaggaagactctctccccacggaactatgtaagcttggttaacgacccatcgagagagccaaactcatccaaagaatctcacttttggtgagtcctgcagcgtgattgtctgatatgtgccaataatgatctcaaactaagctgaagacaagcaacacgaagatacccacacggtcaaaagttatggcaagcatgaaaagctattctatatgatcataactatgatcatgatggaaagaataaacatttgaacagatccttaatacggcgaagaaaaagcacttttaacaagaagcttgtaggactgttttggagatggatacgctgcagatgatgattcaagtatcttgacattgtattatgagtgacatgtat

SEQ ID NO: 62293 - DNA, 339 bp, Glycine max
tcttgtacctttttctaaagaacacgagatttctacttcttcgggttagttttcaaatttgaatctttcatcaggttctctgaaatgtatatagatttcatggctctcaactcaaaataacctcttgctgtggtcaatgacgacattcacctttattgcttcaaacactcttgcttcacataggatcgaattgcacaatggccattctccaacaaagtatcttcccttccacatttgatatctttcaatgcttctcatgatgatatgactaacaatattacatctgatcccttaacatctgcattgtatatgtctatcttaattcattaagcatttgac

SEQ ID NO: 62294 - DNA, 249 bp, Glycine max
accacacgtccgactatacaatctatgcttatttctatagacggacttatttcctacggggtatgcactataagttgctccccaatatgtcactctcttatctatacgcatgatgctcatcaatgtccaacgatccctcaagcctttcaacatcttcaactagaatccttattacctaaacaacatttgtccaacacgaatgagcctcttctaacattcaatcctcttctcggaataattacatctcct

SEQ ID NO: 62295 - DNA, 181 bp, Glycine max
tcctaattcccggacagaagaacaaacaaaacaacaaaaaaaaaaataaaaaaaaggattaaaaaaaaaaaaaaaaaaaacaaacaagaaaaatttaaaaaagctattctttcaaaaaatccaacttacatacacatacatccaacaataaatctattatataaaacttcccaaaaactaa

SEQ ID NO: 62296 - DNA, 420 bp, Glycine max
cacatgactgtctcttcaataccttccatgtcttaatcatagaactaattgaacgatgagggcaataactaagtgtgcactcactgtcttaccttaccagtaaagcagagcctagcttctaaggctgacacacgatcactctatgcctttacaactgcacagactgctaatacgcttcttctactcacatgattacaaaatgctttacctactttatcagctataccgataccacatacagatcccaagatacaggctttgcttgttcatctaccaaatcctgcttatgcgatcgacctctatatagcactgtaccctgagaggccttttcggcaattgatcctgagagttcagactagacctgcttttaaggcgccaaacgctttaataaccaatgcttctattaaactatgaaggtct

SEQ ID NO: 62297 - DNA, 448 bp, Glycine max
gtttgttgttgtaactcgttcttcttcttttgttgttctgtgtttgtgtttgttttttcgctcacctgaaaatgggttgctgcggtggtaactgtggttgcggaagctcctgcaagtgcggcaacggctgcggaggctgcaagatgtacccagacttgagctacactgagtcaaccaccaccgagaccttggtcatgggagtggcacctgttaaggctcaatttgagggtgctgaaatgggtgtgcccgctgagaacgatggctgcaaatgtggaccaaactgctcctgcaacccctgcacttgcaagtgaggtgttgggagagcaagcttcaagcagagatagcccttaattaggaataatgataaactattaatgtgtagctaaaaacttatgtattatgtctgtgatggttttcgtgcactctggtgttttgtgttaaacaaaca

SEQ ID NO: 62298 - DNA, 238 bp, Glycine max
actcccactcgtcctaaaaaaaaaaaaaaaaagaattaaaaaaaaaaaaaaaaaataaaaaaaaaaaaaaaaattaaaaaaaaaaaaaaaaaaaaaaaaaaaaaaaaaaaacaaacatataaaaaaaatccatacttaaattcacatacatacaacaaaaaaaaatattctattatattacctaatttaaattaattacccctctttttacaactttactactttaaaaacctttttt

SEQ ID NO: 62299 - DNA, 220 bp, Glycine max
atctaatcggatcttaaagaactcatggatcttcaaacgatcctgctacctaatgcaacgccgctattttgctttgtgattttagtttttatgcaagtactctatacgatccatgattctctatcgcttaatgatcgtgtattatgatttgtgaattctgacaattttttagccgtacgtagattatactttcgtttatggttacagattcatctaagca

SEQ ID NO: 62300 - DNA, 428 bp, Glycine max
tcccactcttcctataaaaaaaaaaaaaaattaaaaaaaaaaaagaaaaataaaaataaaggaaaaatataaaaaaaaaaaaaaaaaaataaaaaaaaataaaaaaaaatatataattattttaatttattttaattaattttatttttattaatattttaattttttaaaatttatttaactttctttcttattcttatttttgtttatttcaatatttcttttttttatttctttttttttttcccaaattcttttctttttttctattttttctttatcttgattttaattatcaattttctctctaatttttttccttttcttacatttttctattttattttcttttttatctctacttttttcttttccttttttttttttactttttttttcttccttaactttattttttcatttttctt

SEQ ID NO: 62301 - DNA, 354 bp, Glycine max
gcaacgtggtcacacccactagcagtattattacaaccatccataactttattcatacggggtatatgaacattcggggatgaaaccacctcatgaggtattgctgctaccatgaacctaactctatttacagaagcctgcctcttattgccgacagctgtcgaaaccttgatgcatgactggaacctagaggcgaacatattgcatctaaccatcagaaacatcactttcaggattgactgatatagcttctcagggatgcacacaatataatccgctgatcaggcactactttctatacaatgaatagcttaaacaatgcaggagaggttgccagactcagacgaagaagat

SEQ ID NO: 62302 - DNA, 230 bp, Glycine max
gcccactcttcctatttagcatctatacttcttcctttttaatgttataatgtctacgttacaaacaatggtagctacttattaatattttaaactttttatcatcttattaaccccatttttattcactgtccacatatcccttaattttaatataatttaatacaaatttttataataaaattttgtcaacaatattcatttacttctcaaatacaacctctttcaca

SEQ ID NO: 62303 - DNA, 116 bp, Glycine max
gtaaataccatgcttaagatcataaccttttatgactataccctaagctttttggacccggctactttttaaccctgtcgtacataacttaaatatctatttggcccattttgcat

SEQ ID NO: 62304 - DNA, 435 bp, Glycine max
gtaaataccatgcttaagatcttaccttcttatgactatacgggatgctttttgaccggagctacatcttaagctcaccgcacagcacgtatatatctatgtgtctcattgtgcattgctactgtaaacatgaacctcacccaatattactgactcaaatgcaatctcataaattctcactttaaggacagaaatagagagcgctaacagctctcggttacgttcatacatacgctttgttacctaatagatatgtgaaagactcacaaatatatcgtgacgctattggctcatccctcgtagaatctcatatgcttcttctaccagatgatacttgaatgtctcatacctgtaaataaaaactgcattagttttaacaaaactattgtagaccataatagttgaaccacacatccgactaatgtaaataccact

SEQ ID NO: 62305 - DNA, 448 bp, Glycine max
gtcacgcgtacgtccacgcgttcgcccacgcgtaccaatttgatctagttgtatctcagaggcatatcgatatacagactcgcatattctaactacgctctcataaactggtatatgacgattgttagcactttgacaaagctcgttcttgacatcaatgtatatacactactgagttgtgttgcaacacaaaaatttgactattttcgtacatattatctgcctacatttttgcacttaactaagttatggaaaaataatttgctgatgagatatacttggacagatggatgaaattacaccaactttttataaaaaggagaagagtgcattttaatataatgtgctgaaccctgcagaaaagctggtcagaaaaatcactgacttaaatgcacttctatagatttgggatatttcatcagacaaaaatgttgagcttgtggacatt

SEQ ID NO: 62306 - DNA, 290 bp, Glycine max
gtaaaacgcatgttaaagcgttgtacaataccaagcaatcggagttgattgcatgcctggcccgtacggtactactagctatgatcacaatacgacgatcacaactcaccatatatgccaattgcgaacgcatatactatgatcactaatgtcactgtaggccatacattaccgacacctgatggctgataaccctgagcctacataactgcatacgctacaattacatgggtcttgtgaacaaagatacgacaacactatatccagtgcaaattacccatttcgacgtc

SEQ ID NO: 62307 - DNA, 150 bp, Glycine max
gccagacgtgcgagcgcaccagggagcactgacactcaaacgggggcaatgtatacctggggcgggatctgctcgacgcatgccgctaatttgaccacacagattcggacgctccaaattcaccatacatcggtgccaatctatgaaact

SEQ ID NO: 62308 - DNA, 277 bp, Glycine max
gtgttactgcgcatccttacggttctaccaccgactctgagcaaggaaagaatgaatgaacgggtgaacatcaatatcaggccaacacccattctttgtctgctgatgcaaggatgaattcgttcttcatcactcataaaaagacgccgatccacaagcatagactagaggaggaagcttataagaagagagcagaagatgagactgctcacctgtatgctgagtttgtacagacatttcaaggagatactactcctgggtcaaatacttttgttct

SEQ ID NO: 62309 - DNA, 125 bp, Glycine max
gcgagctgctgcagctactgctgctggtgaatttaaagatgaaattgtcccatttaccacgggaattgttaccccaaaacccgttaaggaaaattttgtccccttttttgtgaataatggatttc

SEQ ID NO: 62310 - DNA, 437 bp, Glycine max
agccattatggctctttgcatcgcacactaacggtatctatcggattcgctctgtctcgggggccgcataagagttgagtgcattataggtgatgatataactcgcctgcgtggtatgacacgcgcaggaggaggaggaggaggagtgtagcacttctacgtcgtataaaatcggtaggagctgccacgtgtgatgtgaaacatcactgtaggagggctaaagcgaggtggaaagtgcctaccatggaccttggcatgccctgggaactatggacgacgttctaaccataaggagaggcatcttgaactctgatcatgggttgactaaggcagtcacaatgcctgactgatgcattgtctcatgcatcagtgagggacctagcaaagcctgagaatgcatacaccaacaagcgcatgaacttgacggcattgaacca

SEQ ID NO: 62311 - DNA, 336 bp, Glycine max
  unsure (1)..(336): unsure at all n locations
cgtnnccgattcttggcttggaggggagctagatgcttctctcccaaacaaagggtgattgacaacagtaagggcaaggagaagttctgagcctgngtcgtagattacttanttatccgacnncggtcccaaacaaccctccatgttgatgggcnngtgggccgtgttgttggtttggaagtggcttatgttcttcatagcaaaggtcattccannaccacacttgcccttcttaagtgttnngcggtggtgggaagggggtttccgtggcccttagctagtcacaattcannaactagttaaacctcttaaaaaaaggggtcaaattaagggttt

SEQ ID NO: 62312 - DNA, 313 bp, Glycine max
ttggaacacgcgtgcggccttgcgtccgcaaacacctgttggagtcattcactgttccgagaatccaaactcatgtgttcataatgcccttgtactaagaattgcatctcacaacaaacttttggatcagcttagtcatgatgctctatatctaccaatttatcaattcacaccattgtgccgcattctttacaaggcaccttcttgtgtccaatggggagaacatgcactgccactatctccatttcatctgttcttgaatgtaacttgaaccccaatactgacgaactgagtgatatcaaatatgtgaacc

SEQ ID NO: 62313 - DNA, 177 bp, Glycine max
ctcacacatcccaatctatatacctgtttatcatgcctccctatatgtattactttggcttgtctacgagcgggaggacacatctgcaacttcatctatttccaaggatgagttatttgctggactaactcatccatactgtctattatgactcctgatatcgcttgtgagtcatgg

SEQ ID NO: 62314 - DNA, 72 bp, Glycine max
ttttaagatccaaacttacctacccgtgcattctacgccataactattttatagtgctacctaaattcaatt

SEQ ID NO: 62315 - DNA, 376 bp, Glycine max
  unsure (1)..(376): unsure at all n locations
gngaatcaaacaagcctntaatgtttgttcttagtctgagtgatatggggaaaattggtcttctacagattgttatgggaaggccaatcaaggtggatcggcgtctgcgatttgttcaacaacctggggacgggagtgcaaagtctgaagatacaccttctgatttgagtgtgaatggngcagaagctcaacaacctgcagagggcagtgcanagtctgaagatactccttctgagttgagcgtgaatggggaagaagctgacaaagttgattgatatcagtttttccctgatgcatatcaatattatttatgctggggttttcacctttatttaccagaagctcgtgagatacaaggagttgataggtgtaagcc

SEQ ID NO: 62316 - DNA, 281 bp, Glycine max
  unsure (1)..(281): unsure at all n locations
cccacgcgtccgnccacgcgatcgggaaaagcttttgaagaggaaagaaagctgcggtgataaataaaaagtaaagaaaagaccgcatgaaatggtgtgggtatatctgttggtgcatctgcctgacacccaatcagcgaagaaactgagtactattactgccagctcaaatttctcatttataacaagccagcctcaggaggaaaatcacatcaaggagtactcatggaggagggaattctgatacagttttggggctcaaggagaaaaagaacactctc

SEQ ID NO: 62317 - DNA, 260 bp, Glycine max
aaaaaaaaaaaagctttcaaacatggttctactacaaaataaatctggaaacttatgcgggctttataaaatatccaatcttacacaccccttaattcaacctcacacctcttaaatcaaaacacttaaatcaaattccacaaccaccgatttacaaccctttaactgcgaaaacccacaccttcctctcataaatcacaaactactacattacccattcatcgacttcttcaaaaaacatgaggccttatctctatctc

SEQ ID NO: 62318 - DNA, 314 bp, Glycine max
cgggtggaggcacgcgtgcgcgcactccttctgacattctttgtgaccttttttccgaaaacacttcctaaaacaatggttaaaaaacggaggacagaacagaggtccaccaacaaaagtagaaccaaacttggctcgaagcttgacctgtacccaaacctggctgaaccgagagctgattcgacacacacaatcggcgacaccatctgcgacggcacctccgacctcacccgcgtactcggagctgtaccaagaggtcaaccaatactataacagttactataacacttccatagctactgtcatgggtcctg

SEQ ID NO: 62319 - DNA, 216 bp, Glycine max
ttttcttatccaaaaacatgataaattatgtaatttcactagttatgcccaatgtggcacacgccttgcagaataacattatatacctaataaaatttttattactgtaacatgtagcttatgtttctgcttctggtttgatttctttcacttggatcattattagattatgattttctgctggtgtaaaaaaaaagacacacaaagtaggtttta

SEQ ID NO: 62320 - DNA, 119 bp, Glycine max
  unsure (1)..(119): unsure at all n locations
gttttgtttttntgctctaattcacaattcccttcatgcttaatggcgtaattatgggtactagaatgacttgcgagattcactttattaataaacatgcttaacatagtatgtttata

SEQ ID NO: 62321 - DNA, 234 bp, Glycine max
ctctctttgcacttgctccacaccctgcaaacaaaacacttgcatctccaacccaccaagcccaaagcctgtttccttatagacaccttcattttaaaacaaactttcactaccactacgaccttcaaaaaacatggccctattctctcttacttggctcatccaaccgtgtgctcacaccagaatgttcagctcttctcaaacccgagcaacttcttaacacaagtcaaacct

SEQ ID NO: 62322 - DNA, 208 bp, Glycine max
ctcaaataatcaatcactcctcatcggtctcccaaataacaaagccataaccctgcgggtcctttacaacatcacatatcctccatccactgtaaaatattcttctactttaaaccaaaccaacacatcattcttgtgcaactagctacgtcccagcaataaacccaagacgggcttatatatcttcataccacttcctcaaaacttc

SEQ ID NO: 62323 - DNA, 195 bp, Glycine max
gagttaaccaaaattctcatactcacaaacccactcaaaaatacataaagattgacactgaagacaactttgcttactagtttatgggcgcattaaaatatcataaaactttcaaatatcttgaacatgcacattctcaagcatagtagatatacttgagtagcacaattcaccattcatactttgcgattcatg

SEQ ID NO: 62324 - DNA, 189 bp, Glycine max
  unsure (1)..(189): unsure at all n locations
acattcacntaaatcactaattcaggcattttgggtaatttataactgagattgaacctaccaaaacctattctcttttgtccttcatccattagctaccactcttattaaaaacttctagaacaaacaaaatcaaaaactttctacaaacctacttataaatacaatggttcattcttaacacacatt

SEQ ID NO: 62325 - DNA, 389 bp, Glycine max
gcgctgagttctgagtgttccattccaattccaagttacaacttggctgtgtctatggatcgcgctcaactggtgttgctgggtgtacccctctttctcttctgctctgacctcttctcccttttcactcaccaccaccattctcacccggcggaccaccaccaccacccaccggaccaccattaccacccaccccaccaccaccatcattacccgccccaccaccattaccagccggtgacaatagatttccctcccgagaaacccaccaacaatattgcaactccgggtctcggcaacactgtccacatcaatttctgctcttcctgctcttacaagggaacagcagtgacgatgaaaaatatgttggagattgcatttcctggaac

SEQ ID NO: 62326 - DNA, 317 bp, Glycine max
ctatcatatgtgtagagaatctctactttttgcgcgctctggaatccaccgtcactctcccttctcaacgcaaggccatcttcagcgaccttctctcaagagacgttgctcttttcttagaacgatacgggtccaaactctcgtgcagtgagcttaacgaattctattcgatgaaagacggttatgaagttaattggcacgcgaagcggttaaagagcataattagtccgacttctgaagaactgaagatgcggccagtgactgtgaaaaatcggaggcgcgcctgcttggacaaactgctgtgccaagggcattac

SEQ ID NO: 62327 - DNA, 392 bp, Glycine max
gccgcccggcgttcccggcgccaccgtggcagttccgccgccgcagatgcaggctatgatgtcgtaccaggttcagcccggtaacccggccatgcggcccttcgctccgatccctaacggctacgccgcagctccgaacgtaactcccgcgggtgggtcattcattcaatcgttcgttgttcctttgtgaatttgcattgaatttgatttaatttagtttaattcaacgctccttcgttggttgcttcaatttttatttatgactttggaattatagctattatcaatgtggtttcttactgcgctgtgaaatgtgtgaagactgtttattgtggtgactgtagaagacagtcatagcgctgattgatagcttaacaggtatggttttatta

SEQ ID NO: 62328 - DNA, 201 bp, Glycine max
ttcactcgtccagacactcttacggcttaccatctacacacatctaactcagcataggggtatagtgcaatatccgtagaagctcgatctccattgcatgtccgaatgttcaacgatgtcttgaatatactataacataatcagcaacttcggcagactatcatgatgatgcacgaactcctaattgagacgattatagca

SEQ ID NO: 62329 - DNA, 243 bp, Glycine max
tctttctcccactctttctaaaaaaaaaaaaaaataaaaaaaaaaaaaaaaaaaaaaaaaaaaaatgtaaaaaataaaaaaattaaataaacatacatacaccttcatataatcttatatactataatacttataacatttaactaaccattatttttcttctttttatactctaaaatcctttgatttacccaacttattcaactttttatcccatccaaatttttccattttcctttttat

SEQ ID NO: 62330 - DNA, 350 bp, Glycine max
  unsure (1)..(350): unsure at all n locations
atgactcttccagacgcacttatgactgacgatatagacacacataatacggcctacgggtatactgcaatctctgtagaatctccacgtgctttgcatgaccgagggttcaacggtgtctcgcagttactagaatagaatgaccagcttcggcagatgatgaagatggtgcttgaactcctaaatgaacctcttatcgcgacattacatatgactgtcacagtgatcgactatcacaagaactttgtcctgataaggattgagattaccgaatcactatcagaatagacggacgtggtttcaccaagtgtacccatgggacgaactcctnctcagattgcacttcatga

SEQ ID NO: 62331 - DNA, 371 bp, Glycine max
aaaaaaaaaaaaaaaaaaaaataaaaaaaaaaaaaaaaaaaaaaaaaaaaaagggaaaggaaaaaaaaaaaaaaaaaaaaaataaaaaaaaaaaaaaaaaaaaaaaaaaaaaaaaaaaaagggcgtatctttttaaagtacccaattttacttccccttgaatccaaagctttaccttttttataagccctcctaatttcaatttattggccatttttttaaaaattctttactggaaaaaccctttttttaccaaatttaatagctttgaaaaacatcaccttttgcccagcttgattatttaataaaaggcccgaaacatcggccctttcaaacatttgcacaccctgaatgccaaatggaactcacct

SEQ ID NO: 62332 - DNA, 383 bp, Glycine max
cccgtaaccatgtctcaggtgcaattttgctttttatttttctcttgtttttccctcggtttctgattcggtgttctggacttcatagctagcaatttctgaattgttatatctgcaattatttattggaatcatttgtttgacttttcaaaaaattaggaattcctgtgtttggttgggaacccttaaaactagagcaaggattataacacgattgggcgaaaattaaatgcatttgattttcattaaccatcggtttctctgtcaactattgcagaatttcttacttgttcagctaccattgttttttttttttttttttttttgtataacgcgcatgctagatctctgttttcaacactttattcctgattatatgctct

SEQ ID NO: 62333 - DNA, 170 bp, Glycine max
aaaaaaaaaaaaaaaaaaaaaaaagattaaaaaaaaaaaaaaaaaaaaaaaaaaaaaagaaaaaataaaaaaaaacaaaataagggctcccgttcttcaggatcctaaccttccatacgcatgcattcaacattcatacctcttcttttgtgtcacctaactgcatttct

SEQ ID NO: 62334 - DNA, 402 bp, Glycine max
tttggtggtccggggttggggttggttttttctgtaacgtgaaaaatgtcttgctgcggtggtaactgtggttgcggaagctcctgcaagtgcggcaacggctgcggaggctgcaagatgtacccagacttgagctacactgagtcaaccaccaccgagaccttggtcatgggagtggcacctgttaaggctcaatttgagggtgctgaaatgggtgtgcccgctgagaacgatggctgcaaatgtggaccaaactgctcctgcaacccctgcacttgcaagtgaggtgttgggagagcaagcttcaagcagagatagcccttaattaggaataatgataaactattaatgtgtagctaaaaacttatgtattatgtctgtgatggttttcgtgcactctgg

SEQ ID NO: 62335 - DNA, 233 bp, Glycine max
aaaaaaaaaaaaaataaaaaaaaaaaaaaaaaaaaaaaaagaaaggaaaaaaaaaaaaaaaaaaaaaaaaaaaaaaaaaaaaaaaaaaaaaaaaaaaaaaagggaaaaaattttagaggtttcaatattaccaaggcttacttacaaattattgcaatttatatattgtaatataaattaaattaaatgcaattaatttgcacaacgttttaaactggaaaaacctgtaaaaa

SEQ ID NO: 62336 - DNA, 98 bp, Glycine max
aaaaaaaaaaaaaaaaaaaaaaaaggttagtttttgaaaaaaacaaaataaaagggaaggggtaaaaaaaaaagaaggttaggaaaaaaaaaataaaa

SEQ ID NO: 62337 - DNA, 293 bp, Glycine max
aaaaaacaaacatataaaaacaaagttctaaaaataaaaaaaatcaaaaaaaaacacagggatattttaactataaaaatgaccaacagaacctctaaagacaccattttcacaaacatacccttccctaaatcttgctaatttaaagaatcacatcaataaaatttactgtatacactacaacaacttactcacttaaaaatctttcacgatccctcttcaaattaacttccaacctatttcacacttgcaaaaccattgacaattcaaaactcacactcctaacacatttc

SEQ ID NO: 62338 - DNA, 186 bp, Glycine max
aaaaataataagaaagttgatttagttatctatgtcgccatagctaaagggatcatagtgtcggctgtttgtgagacgtaggtattggagacggatactacggcaactatgtccacctacatatgaaccaatatagtatgtataaggatgaaacacagattgcgtaaatttacatccaacaattta

SEQ ID NO: 62339 - DNA, 133 bp, Glycine max
cccactcgtccgaaaaaaaaaaaagaattaaaatttaaaaaaaaaaaaaaaaaaaaaaagaaaaggtaaaatattaaataaacctaaaaatatccatactacattaaccattcaatctacttatttatatttt

SEQ ID NO: 62340 - DNA, 191 bp, Glycine max
  unsure (1)..(191): unsure at all n locations
caatccacagcattattcataatttttatatccacattccatgatgaaaccaagtcccttttaacagctggtagcctttacaaaactctanttacatattcctacaactacatcccaaatgctatcaaaaccttcaagagtgttgaaaacctctatatgaacaagacccctcgaaccatcaagaacatcac

SEQ ID NO: 62341 - DNA, 253 bp, Glycine max
aagttatatataatcgttcttcatctctttcacggattaaaaaaaaaaaaaaaaaaaagaaaaaaaaaaaaaaaaaaaaaaaaaaaaaaaaaaaaaaaaaaaaaaaaaaaaaaaaaaaaaaaaaaaaaaaatacaaaaaaaaaaaaaaaaaaaaaaaaacaaaaaacaaaaaaaataacaaaaacaaaaaatctaaactcaaaaaccataactaaaattaaacagaactccaaaaaaactacatttaacaaaa

SEQ ID NO: 62342 - DNA, 434 bp, Glycine max
  unsure (1)..(434): unsure at all n locations
cccacgcgttcgcccacgcgtccgaagagagtgatagcaggccaaaaaactaccagtgcagtgtggacaagtattcacatgacaaatatgacaggtctgatcatagaagcaaagaaaaacgtagagatacatactcggagcatcagaaatataaagatatggattcttcatatgaaaaatctgcatctagcaagaggcatgcactgtatgatgaagtggagagggaggggcattcaagggactgggatggtcaaaatgaaagaagagattcccgccgaagttcaggggactacagaagtgaccaaagagatgagtcaagtccacaaagagacagtggtaaatttagtttaaaagaagcttataagagtgaacagaaggagtcaaatgatcaaaaccttncatgggaagaaaaaagaaaacatgatgacactgag

SEQ ID NO: 62343 - DNA, 428 bp, Glycine max
  unsure (1)..(428): unsure at all n locations
gagcgtccgcntatattccattctctctgtgtatttccctacctctcccttcaagatgcagatcttcgtgaagaccctcaccggcaagaccatcacccttgaggtggaaagctctgacaccatcgacaacgtcaaggccaagatccaggacaaggaaggaatccccccggaccagcaacgtctcattttcgccggaaagcaacttgaggacggccgtacccttgctgactacaacattcagaaggagagtactcttcacctcgtcctccgtctccgtggtggcatgcagatcttcgttaagacactcaccggcaagaccataaccctagaggttgaaagctccgacaccatcgataacgtcaaggccaagatccaggacaaggagggtatccccccggaccagcaacgtctcatcttcgccggaaagc

SEQ ID NO: 62344 - DNA, 231 bp, Glycine max
atatacccaaaaagtactagtctctcttgtgatcatgtgctgttcaaaggttttgtggcctgggcacatacaacttgcacattcttcatatgcacctaatgcactttctcctcacggtatggttactacactaataacctgggtccaaatgctattcactaaaagattatgaacagtgcaatcattgctgagatacaggaccttcccgattggaggacctttgatttaaac

SEQ ID NO: 62345 - DNA, 306 bp, Glycine max
aaaaaaaaaaaaaaaaaaaaaaaaaaaaaaaaaaaaaaaaaaaaaaaaaaaaaagggaaaagggtataaataaaaaaaagataaaaaaaacataaatacaaaaaaaataaaataaaatatggtctcaccttttataaattcaatgttcagttcctttacaatgccatgacttagattacctttagggtacccaaatttaaatcaattgtaccacattttaacaatatccagattggaaaaaccctaacattccctaacttattgacttttcaaaaaattcccctttctcaatgtggaatattaccc

SEQ ID NO: 62346 - DNA, 177 bp, Glycine max
atactacaatctcaaactcttctactctcctttaacaatctctatcattacttacctttatattttcaaaatttatcctcttaatattccaatcatccttatattcttcaacttcacccatcataccctttctatttaactaatattaaatacattcccccatttttaataaaaatt

SEQ ID NO: 62347 - DNA, 298 bp, Glycine max
cagaggcgaatctcgtggtgaaccgatgatacggatgcacgaggaaggtcggactcagagtacttcatggccgatgcggacagatcttattaggggagctccattactccgaccgacactactgaagatactactacgcacgcggcaggagagaagtgatggtgagggagaatccggagactagagccgaaactaacgctaacggctgtcataatacttggcataaggaagatacctgaacggatcagaatctcgaaacgacgtggtgaacggtcgagctttcgagggatcggtgtca

SEQ ID NO: 62348 - DNA, 69 bp, Glycine max
tcgccactcgttcgtccatcgttcgaaaaaaaaaaaaaaaaaaaaaaaaaaaaaaaaaaaagggaaaaa

SEQ ID NO: 62349 - DNA, 148 bp, Glycine max
aaaaaaaaaaaaaaaaaaaaaaaaaaagaattaaaaaataaaaaaaaaaaaaaaaaaaaaagggaactggggatactaaaaaatccaagattacaaacacatccatacaacatacataactattatatagtgtcacctaaattcaatt

SEQ ID NO: 62350 - DNA, 438 bp, Glycine max
accacgcgtccgggttgttcatctctcaaggaattttcagtgacatcagaggaagatgacggatttggacttatctcagactgctatacgtgcattattgacgtcaatgttatttctcctgaagcttacatattcggatttaagtggctgcagagagattgaaagccttagtgttcatataaaatctctacgggtactgacactcatcggtggcccatatctcaaggaattatccgtgacatcagagaaatcgacagtattggagttacctgacactgctatatttgcattgccaacatcaattgggcacttattatctttaaaagagaaattggtgtctctgcatgagcttccaccattcctgagcgagctttatttaaatgattgttgtaaactcgtgtctatgccggagcttccaccatcgggtaaagaggagac

SEQ ID NO: 62351 - DNA, 444 bp, Glycine max
gtctctttcttcatagcatttggaaatttggctgatgacaccattaattttgaggcttttgcccacaagctggtacagtttggagagattcaggaaaaagttgtattgaaattttcacaagaggaatttcttacagcttggtcaactcaggtgcgtcctgcaacaactctgttggctgatgggtgtccatatttgtatgctatggtgcatgatagttcagtgtctacaataccaggtgattttgtcattggtgttaagttgacaaccataaacaatatgtgtgcatatgggcttaatcctggtatttcaggttctcgtcttttgggtaccattcctcagtctatttcacagcaaactgtttggaatcaaatggcaacagtgagaacaccattgaattttgattctagcaagcagagcttttgtcaattttctattgaccttctc

SEQ ID NO: 62352 - DNA, 406 bp, Glycine max
  unsure (1)..(406): unsure at all n locations
aatggcannngcaatgctttgtgaattgggattatcnnngttgtttaagaagggggatggtnctcaaaagtgtcaatctcatttnaatggtagaatgtcatagcatctgctcaagtaatgtatttttctctgagtatgtccagaagtaagaaaaatggatnnntcgaagtcaatcttcnnaagtttacccagcagcacgtagtcaaggggaagttgaaatgggaaaatgaatgnnngtgttggaaagactcgtgtggattctctggtgggaaggaatcgtgtcagnntggggtcttcaagaatcactgtggcnttgcaatcannaaatgtcattattnnncaattctgaccaagtnnatggcggtcaagacctgggaagtnnattgcaagagaagggatgaatcaa

SEQ ID NO: 62353 - DNA, 248 bp, Glycine max
cccacgcgtccgcccacgcgtccgaaaaaaaaaaaaaaaagtaaaaaaaaaaaaaacaaaggcaccaagctaaaacaaccaaaggactcccactctcgcaggccccagcttacgtcctcgatcatgcaacccaaaaacattttcaatggcgtgacctaaacaacgttcactcgtcgatatcctccaacgctcccactcgaaaaaccctgacgttccccaccttattcccctttcgcatcatacccctt

SEQ ID NO: 62354 - DNA, 243 bp, Glycine max
tcgaaaaaaaaaaaaaaaaaaaaaaaaaaagaaataaaaaaaaaaaaaaaaaaaaaaagataaaggggacaccttcctataatacggttacctaccttaccaactcttgcatgctaacactactctcttgtatatcctcacctaaattaattcaactgcccgtctctatacaacttctggacagtcaattcccttaccttacccaacttattcccctttcatgacatcctccttttcccagct

SEQ ID NO: 62355 - DNA, 117 bp, Glycine max
cccacgcgtccgaaaaaaaataaaaaaatttaaataaataaaaaaaaaaaaaaaaaaataggaaaaaaatgaaaaaaaataataaaaaatataaaaaaatataaagaaatcaaattt

SEQ ID NO: 62356 - DNA, 449 bp, Glycine max
gggaaatggaggatcatggtacaatgactttgattttcatgattacgatgatacccctgctcatcccaaaaatggcaaaagtggtaagggtagtaacaatgtcaaagaaggccagatgggcccgggcccaataatgggtaataatcttccaatgcgtcatcagatggagaatattcaagcagtacaaggacttccggcgatgaatggtgatggtggctattatcaaggggtgcaaatgcaacatgctccatacaataaccttcagcagcactacatgggtatgatgatgaaccagcatcaacatcagcaagcaaatatgaacaacaacatgtacccaacacccatgatgtatggtaggccgcatccatctatgaactacatgccaccaccttctatgccatctcacccaattgccgatcctattactcataccttcagtgatgagaatg

SEQ ID NO: 62357 - DNA, 392 bp, Glycine max
acccacgcgtggacgcacgcgtccgaccgaatactttacttcacaaaaattagatccatgaaaacgtgttctgtgatgctatgcctgtaaacgtatcgaagtcttactggggccacagcataacaatgtggcacacactcttgtggagcgtaatgcccaaatatatcatgttccagcaaatttgggctgtgatatgacacacatatctactgactagaaagttgccatatccaatagctgatcgcaacaccctaaacatctacttcaacaacacctaaatctggtggagatattagcatactcattatcttttttctctacagatcaaatgctttaataccgatacgattgcccgtagtctagtcatggattctacagatatgatgcttaca

SEQ ID NO: 62358 - DNA, 397 bp, Glycine max
agcagagggatgatggttcagtgcaacaacactaataacaacgtgtgcagctgcaagcgctctccctcggccaccttagaccttctaatcctcctcctggtcctcttctccggcgccttcctactctactcctacctctgctacatcttcaactccctctccctcctcctcccctgcctccccctctcctacctcctccccttcctcctattcttctccctctccctcgccgccttcttctgcggctcccgatcccgccgctgccagcgccagggatgcacgggcctcaagaaggccatggagttcgatttgcagattcaacgcttcggcttcttctacgacgaaatcgattaacttccctggaaaggccgcactgaggccaaccccgattacgact

SEQ ID NO: 62359 - DNA, 427 bp, Glycine max
gaaagtcttctctgcattatgtgagttcagatcccctcctaactgcaggaggcacaaatgggtcagagtctccaccagatcatgacaaggaattgtcttctgaagcagatccacttgatgaggtgaaggatatgaaggacttcagttgtaataaatataaggatccgttcaagagatctaggagtgcttctcttgtgggaatccaaacttataagggaggatctccaaggtcagagttccacactgctgaatctgagaaacatggtgaaggatttcgaggaaagagtagttctgacatggttgttagaagagaggcacatgttgttcccaagcttcggtgccgggtgttgggagcatattttgagaaactaggatccacttcttttgctgtctattcaattgcagtgactgatggtcaagagaaaac

SEQ ID NO: 62360 - DNA, 354 bp, Glycine max
aaaaaaccttatcttactaaccaaaaaaacaccaaaacttataactatagaatacaaaacaggcaaaaaagcctaaatcaaagacggaccgcattgaactgcatctcaaaactcatgattccttaacagcgtattctgcaactacctgcaccatgccttcaatgccacttaacaaacttctccatatcccaaacccaattctccaaaccctattctactaaacccaattagggcttcacaatcacttcaacactaaatatcacacaaacttttcaatatctccttacgcatgacgcatatgattatacaacaaagctagtctgttacgattacaccaattgagaaaacgctatt

SEQ ID NO: 62361 - DNA, 107 bp, Glycine max
cccacgcgtccggttgtaaaccgccagcgtacactatacaagatccaaggggacttacgggtacatgctacgtcatagatattgtatactgtcacctaaatacaatt

SEQ ID NO: 62362 - DNA, 352 bp, Glycine max
gcgacacaccctcaagcaaccgtagtggtacctgtgatcatgccatttgtcaagacctggggattaagggccctattgaccgccctgctgtccacatggcctttcacatttactatgatcattatcacgatcataaactcgatgtatacacccctgatcatacccgttttcatgattgttttaacgattctatggtagatgtatacattgatatctctcatcatcgctatgaccatagatgggtacacagattggtgccactgtccgttccaattgactttgcacctgatagtttgattgaaccatattcttatcctactgcttatggtccataccaagttaaattactgat

SEQ ID NO: 62363 - DNA, 323 bp, Glycine max
cccacgcgtccgaaaaaaaaaaaaaggataaaaaaaaaaaaaaaaaaaaaaaaaaaaaaaggaaaaaaggaaaaaaaaaagggcggacgttctataggttccataagctttccttctcatgcatgcaactgttatttcttttttttattgtcaccttaattgaattcacttgccctactttttcaactgtaataactgtaaaaacccttgcgtttcccaacttatttgccttgtctcatattcccctttctccagtttgcgtaatatccaaaagtccctgaccttattgccctttccaacagtttgtcaatcttaatggcgaa

SEQ ID NO: 62364 - DNA, 101 bp, Glycine max
aagtaatatccataacttttgtttttctttagaatttaaaagtttaagtagtcctctaagtaacacatatgttcttttatttttgggctcttaatagagtt

SEQ ID NO: 62365 - DNA, 159 bp, Glycine max
aaaacacatacaaaaaacaaaaaaagttataaaaaaaaaaaaaaaaaaaaaaaaacctggcaatttgagacatccaaacttacttacaccttccataaaatctcttactccagcaaacactttacctaaactcaatacaatgccacatccctttacaac

SEQ ID NO: 62366 - DNA, 369 bp, Glycine max
gcgcgcacgcgtccggtcaaattgacttgatggactcttaaaattttccaatctaaaaactgggcattgtatgagttaccccttcctgaagagcaaaccggtattttttctcttaaaaaaaaaatgactggatatgatagcacatagcagtctatgaacggtagcagtacatgtctattaatgcatgagttgcaccgaccaatcaaatatctatgcatagtgacaataattcacctaacattagcccaattatcataatacatgaacttctgcacgttagcatcactgcttacaaaataatgcaagtctatctctgcaataatcatatgaatgtcgagacccactaattaggaaaaccgtatgatacat

SEQ ID NO: 62367 - DNA, 104 bp, Glycine max
gccgggtattatttaacatatattcaaaaataaaccattcaagggttacagccttattttgatggttaatgtaggtactacttttgggaaaaaaaagaaactat

SEQ ID NO: 62368 - DNA, 183 bp, Glycine max
cccacgcgtccgaaaaaaaattaaaattttaaaaaaaaaataaaaaaaaaacaataaaatgggaaaaaaaaaaaaaaaataaacataaaataaaaaacaagggctggctttataaaggatccatgcttacttcctcctacattcaacttcataactctttcattctgcatcttaaattcaata

SEQ ID NO: 62369 - DNA, 279 bp, Glycine max
gccacgcgtccgaccactcgtccgcccactcgtccgaaaaaaaaaaaaaaaaaaaaaaagaggaaaaaaaagagaaaaaaaaaaaaaaaaaaataaaaaaataaaaaaaaaaaaaaaaaaaacaaaaaaaaaaaaagtcaatgaggttcaaactactcatattccctaacccatcattaacaattcatttagcgctgatcagtctcacagcttatagattgaataaaggcataatgattaacctaaaaaaaagggaaactcactataattagacaactt

SEQ ID NO: 62370 - DNA, 385 bp, Glycine max
cccttgtatcatttcttctccttcttcataacgctgctgcttcacttctggcgctttaggtttcgaaccaattgggatttcgggatgtgtatcgtccagtgaattgaggagaatgacatttttgggttctgttgattgtgttgtagatggggggtttggctgttagattgttgtttgttgagtacaatcttatgttcagtgaagatgatttcgtgatgtggttgagagagtggtttttgtagaggaaggcttgttatttttgttgttgatgtggtagtttattttgtttaagagtaggaacatagtcggcagacgagaagaattaagctttgttggatgggtaataaacttgggaagaagagacaagttttagatgataaatata

SEQ ID NO: 62371 - DNA, 220 bp, Glycine max
cgcctgctgtcacgcttcgggggacgcgtccgtaaacacgatgatagtaacgtatatactattgccatatgactcttgactctttgaggttgatcctttatacgtttatcagacagctttaacttgacaatcacttcttgtaacaaaaaattcctttaatgaagggttaacgggatcaacggtcaacaacgtatatatagaagcagcagtgatagctact

SEQ ID NO: 62372 - DNA, 431 bp, Glycine max
ccgacgcgtacgctgcagtatattcgatcatatacttgttcaaataattgggtttccaggtacaataccccaaatccagatgctcatgctcatgaccatactcacggtccctataacacttacttgaagacaatttagagtcgaccttacagtctacttacacctatgcaaacacactcgatcctgaattctccttagagatgaccttacctagctacaatactggtaacaatcatactctcgggcatcagaactatcttcattctttctttgcacctgactttgcaggggataagcgaggttttagcgaaattatatgcgtaagtatgtgctaaagagctaggtcatcatagacttcatctcacacactctcctttatactacctattatattctagatttaacgctggataactcgtgattaacggagt

SEQ ID NO: 62373 - DNA, 282 bp, Glycine max
caaagacactcatggttaatactcaagggtagataaggggaaactcggggcttactcatcattaatgccttatatgacacaactactttcataaggcttaacatttgcttactatagtctcacttagaataaatttactcgattatcaacatgagcaatacctagaacacatgactaccataatcataactcttaaaaccttcatcatttacctccacaggtatataatcctatctatcgcttcagaatggattgactagcatgaatgcttgaactaaaact

SEQ ID NO: 62374 - DNA, 318 bp, Glycine max
accgagaataccgttgctttcatataggtcgtatatcctcaatacatatatcgatggctcaggggatacgtgtacctaatgcgggttagaaaactaatccttacggattaggactttatggtctcatattcgatagcgtaatctgttatatccgaagactgtattcatgttcacaaacataactaaaatgacatcatgccttgcagtgatgaccaactattgcgcatgatcttgattaactgtgtctagtataactctatgtacatgactcttgtacacactcatacgcaggtcggtcattctataagattcaagctt

SEQ ID NO: 62375 - DNA, 395 bp, Glycine max
agcctacattacttgagaagcgcaaaggataggctctccttgaatggaagagtgctagaggagacgaagggtcagactatcatatacagattggggagcagtatcttgccaatgttgtgaaggaatcggtgagatgtcttaatgcttgacatgctgggaaagtttactatgtccaagattggcaggagacaatggacacagagttggatactcataagctggaacatgggcccaagaaaagaaagatcccatactgcaacaataatgaagatgatgatgatgtggaagatataaatgcgtgagaggatgacatgacagatgatgaattagatgatgattctggtaggatgatcgatgatacagctaagactgaagcatgtaatgccagcacagat

SEQ ID NO: 62376 - DNA, 345 bp, Glycine max
cccacgcgtccgaaaaaaaaaaaaaagagatataaaaaaataaaaaaaaagaaaaaaaaagagaaataataaaaaagaaactagaaaaaaaaaaactaaaaaaacaataaataataaacaagtgttccatcgttttaatggtcccaagtttccttatacttccttattactttttaattttttttttgtgtcacctttttaaaattcattgcctttccttttaaaacatcattcctgtaaatacctttgattctccaaacttattcacctttcaaaccatccccttttttcaaatttccttattacctaaattgccctgcccaatagactttcccaacattttcc

SEQ ID NO: 62377 - DNA, 370 bp, Glycine max
attaatccaactgaagctccggagttccgcttcatagctaatactactgcggatttttcagtgcggactcatggaaaatcatcgagatacttatgaatatgcagctgcaaccttcattcttgctttggatatctttccagggattcatctacagtttctaaacctacgtatgcgctactcatataagcaacactattccaaagaccttacccactgaatggtcactacttaaacctcagacgcatcggagaacgccgtatgcattggatattcgacatcgaaaaaatctcacaggctaccatgttcacgttgcaacggcccttaggcccccagatatccattatcggctatcacgccaccgttgtgcaca

SEQ ID NO: 62378 - DNA, 308 bp, Glycine max
gctcgaacgactcctgcaaaaccgcgcccagtcatgtaactgtcatgcacttgcacgcatgacacggccttttcaaggggaagttcttcagaagagttgtcctcatgttactttgcttgctactgtgacctgttttatgatgaacgtcttgcagctgactctgttaggtgaactatgtatacggaggtacagccaaatagggatattgttgaacatacactggtacctttccttaagactctctctctatctatctatctcttagaatatgtctctcatttacttctatatctctgtcacacagtcac

SEQ ID NO: 62379 - DNA, 340 bp, Glycine max
cccacgcgtccgcccacgcgtccgcccactcgtccgaaaaaaaaaaaaggaaaaaaaaagagaaaaaaaaaaaggaaaaaaaaaaaaaaaaaaaaaaaaaaaaaaaaaaaaaaaaaaaaaaaaaaaaaaaaaaaaaaaaaaaaaaaaaaaaaagaaaaaaaaaaaaaaaaaaaaaaaaaaaaaaaggggaccctttataggagacaaaaccttactaccaaggaattaaaaataataaacatttacaataagagtaacaaaaattaaataaagtggcagaagttaaaaaaccgataagcctgaaaaaaccgggggatacccagattaattaatttgaaac

SEQ ID NO: 62380 - DNA, 383 bp, Glycine max
agaaagaaaaaaaaaaaaaaaaaaaaaagagtaaaaaaaaagagataaaaaaaaaaggactggggatatatcaagagggactcttaaatactctggcttgcgacatcttacttctaatctagggtggattcaattaaattgactgtcactggttatacaacgtctacactggaactaccctgtctttaccaagataaattgccttgcaaaaaattccccttacaacccataatggaaaatctttcacttccacaccaatctttcacactaaaagtctgactatcctacttgtagaacggaagcctacttgtatatgtcatttaggaccttattaagcagtggatccgcacaccgtttaaaattcccaggtcattgttccaata

SEQ ID NO: 62381 - DNA, 167 bp, Glycine max
tatctttaaaaaaaaaaaaataaaaaaagtttaaaaaaaaaaaaaaaaaaaaataaatgggaaaaaaaaaaaagcaaatgtcatcctttcttaaggatccaaacttatcgtctcttccatgcaacgacctatcttttctctaatgtcacctactttcaattcactct

SEQ ID NO: 62382 - DNA, 316 bp, Glycine max
cgatagtgtcttgcaaatatatactcgaggctatagtaaacaactactggttattcaagggggtggatctggaggggacactactgctgctgtggtactagctgatatcgtagatattcaagacttatttcctagaagggaaattctcgtgagccatcctaactatagaatgtagaaagtgcatctgctaaaggatttgacctggatagaatctgatgcccgtatctctctggtagtgcaattgtaaagattgaatacacattgctcaggaggaaggatataacatgagccttgatagaatacgttcattttgact

SEQ ID NO: 62383 - DNA, 435 bp, Glycine max
agaggaggaaaaggatgacaaaattgatgtatagaaggtcaaggtgaaagaagatgatggggaagatgaagggaggaaggagaagaagaaaaaggaaaagaaggacaaagatgaagaaacagacacattaaagggaaaggaaaaaaatggtgatggtgaagagaagaaggaaaagaaagagaatgagaagaaaaaggaaaagaaggacaaagatgaagaaacagacacattaaaggaaaagggaaaaaatgacgaaggcgaggatgctgaagagaagaaagaaaagaagaaaaaggaaaagaatgacaaggatgacaaaactgatgtatagaaggtcaaggggaaagaagacaaagagaaaaaacaaaagataaagaaggaaaaagatgacaaaattgatgtagagaaggtcaaggggaaagaagatgatgggga

SEQ ID NO: 62384 - DNA, 388 bp, Glycine max
ggggagaagccgcacaacattttcgtcggagacgacggagactgcttcggcggtgtctgtggcttccaaacgacgcgacgattcgatgatgcagccacaggatggtattaaaggcgccattttacactgcaggagatccttcaatccatgcagacctgagtgtaagtcatcacaactgccgtgatctgagagccatccatgggacgagataggcatacatgaagccaatgacatgctcctttcaacatagccagcttccttgcagcggtgtcagagtgtaccaagggaaatgtatgtgattactattagactatatgatacactccaatgagatcaagaacaagatgatatgcatagtaagagtagagtcttggtccagcatgatatg

SEQ ID NO: 62385 - DNA, 132 bp, Glycine max
cccacgcgtccggtgaggccggttcaacactctgtcctccgggggaattcgaccgttgccggaaattcagctccgccccaccgctgcttgcggaaatccaactttcgtgagaccttttcgcagatgctgcac

SEQ ID NO: 62386 - DNA, 307 bp, Glycine max
attggaactgagccagctatgcttatgatagacgatgtggctcagaaccctggaatgctggtgcacctttgctctaactgtactggacaatttgaagttaactcaagccgaagacgcaccaatgaataaatttcacataggcacacacctagatgcatttgtcgaagatatcagataacaatgccatgagccgaatgacatgaaccagaatgctatagccgccatcagaggtgacaacgctgatgccatgaagcaggacagcatgcacacgttcacagtgacatgcgcatttatgatgaacacacta

SEQ ID NO: 62387 - DNA, 374 bp, Glycine max
cccacgcgttcgctttaattttctttgtattttattctatagtcttaattctattcctgttgggtgaatactgtcggatgcctgggttcttggtctccatttgaaaattgctacctaaaccagcctatcaaaatctgcatattttcctaaactgaatttctctgtccttttttggtaacctatcaattaggccgtatttctgctaaaaaataaaaccaattccccggggtttattatcatattgtgccaagttagattcgaagagggtgtgctcttgttcgagaatgcatattgagggcggtaacggataacaatgtcgaatctggtaccgggggtgcttctcaagcttctgcatcacatgaacacctatctta

SEQ ID NO: 62388 - DNA, 227 bp, Glycine max
actgatggaaactcagcctctcgtcaacatcctgtaccccacctatgccacgggtgcaaaggtacagttcaacgctgcgctgcagtgcttgcaaaggaatgtaccaatcctatcggcatgaattcactctccgattaagcttgctacaattagcacacggtatacgaccagtctaaccatattgcgaactacacatggcatgaccgatatgtcattacgagattgca

SEQ ID NO: 62389 - DNA, 287 bp, Glycine max
tcgaccacgcattcaaacaggactacccttgtattaatccaatgggcctatgggagatacctggggggatccaataataatacgatctgggaaacttatatcagccactgtggtttactacgctttttgtacttttaatacttatcactctagggcatgctattatctacaaataagggaagtgacattgaccccagtgatagctactagcgagatctgattgtatcttgaagaataaaacctatgggcattcgatatgatgatgattatatgaatgtagaacctat

SEQ ID NO: 62390 - DNA, 399 bp, Glycine max
aaaaaaaaaaaaaaaaaaaaaaaaaaaaaaaataaaaaaaaaaaaaaaaaaaaataaaaaaaagaaaaaataaaaaaaaatgaaatcaaaaaacaaaaatattatattatattacaataaacttaattaactgtccttatcttcaaattttacttactgtaattcccctacccttacctaatttaatcccctttaaaaacatctaacttttaccaaatcacgttttatccaattggtccactcctatcgaatttcccttcacttaaatatactgaatttcaaattggaccctccctttaacgattcattaaacttgttgtgtattgttttttaactcaacttaaccttttcacttgccatagccctaacgtccacttcttttatttcacttatttcctt

SEQ ID NO: 62391 - DNA, 278 bp, Glycine max
acgcccacgcgtccgcccacgcgtccgaaaaaaaaaaaaaaaaaaaaaaaaaaaaaaaaaaaaaagaaaaaaaaaaaaaaaaaaaaaaaaaaaaaaaaaaaaaaaaaaaaaaaaaaaaaaaaaaaaaaaaaaaaaaaaaaaaaaaaaaaaaaaaaaaaaggggcttaagtttaatagaatctaaatttaaatacacttgatttaaatgtaaaaacctttttataaatcacctaaattgaattaaatggcacgtcttttaaaacgttttaattgaaaaa

SEQ ID NO: 62392 - DNA, 60 bp, Glycine max
aaaaaaaaaaaaaaaaaaaaaaaaaaaaaaatataaaaaaaaacaagcttacatacacat

SEQ ID NO: 62393 - DNA, 361 bp, Glycine max
gctacgtctacttcatacttctaaatacatctctccttactctctcgatgcaaaaagcttaggacagagagactttccgaatcgagcatgaccttcatctgaagctattgctgctgccttcttcacctctgctatcccttccattgtagcatcatgcttagtaaccaagtcatcgtatctatcttgtatatcagcatagcgctctaccattctatcatgttccataacaactctctttagggcatcatccatctacaacctttttgtacgatagccgtaagacttaaaaacaggcttaaacttaataataaacatagatccactcactttcatttctgtacatctctggctttcattctct

SEQ ID NO: 62394 - DNA, 333 bp, Glycine max
tcctgaattcccttatcgacccacgcttccaaccaatcctcaatacacgattcacctacattttttaatcatccaaactaaacttccccaacaaagatcttttcacacctaatctgtcatactaacaaattaaccacaccccatatctcacctatgaactatctatcaccatacatcatttaaaacctatttactactagataaactaattacactatataactaaatataattaaaaccactcaatcttataacattctacattatacaataccatttcattaatacatcaacaaaacttactctattaatcttacacataatccaaccaca

SEQ ID NO: 62395 - DNA, 179 bp, Glycine max
gtgtgcttgcattgcactaacaggttacgacttagtagctacctatgtaccgttaataaggggggataccatgatcattgctaggatgaatcatgtctagatcatccagaatatagcaatgatgatcacacttgttcttctgaactaaaatcatcgtcatctatctttgcagcacgcac

SEQ ID NO: 62396 - DNA, 252 bp, Glycine max
aaaaaaaaaaaaaaaaaaaaaaaaaaaaaaaaaaaaaaaaaaaaaaaaaaaaaaaaaaaaaaaagaaaaaaaaaaaaaaaaaaaaaaaaaaaaaaaaaaaaaaaaaaaaaaaaaaaaaaaaaaaaaaaaaaaaataaaaaaaatagacactcttatataaacttattaacttaactataactaaaaatgctatcaattaaattggaagagaccatactaaataaactaattgtagttaataccgatatatca

SEQ ID NO: 62397 - DNA, 114 bp, Glycine max
aaaaaaaaaaaaaaaaaaaaaaaaaaaaaaattaaaataaaaaaaaaaaaaaacaaccaatatgtagggatccaaaataacgtacgcatacatacaacataatcaaaaattcta

SEQ ID NO: 62398 - DNA, 352 bp, Glycine max
agggtgcccattccccccggcaaggtcacgtcatcataggtaagtatgcatatcgctcgactgatttctgatttcatctattgtttgcaaggatcgcgcctgcaagacacccaatggacccgaagaagtccaacaaggtcttggagttgtcaagctctaattacaattctctgtcaagtctaccgaatgtctggcaacttcaacaaagggcttaaggcccttaactaatcaacctttaataaaaaagtcctgcttcccaagccagccccaggttgaaccaccccagaaccttgggaatggccaacagcggccaacaaaaaaacggccttaacttttaaagttaacttaagtt

SEQ ID NO: 62399 - DNA, 146 bp, Glycine max
tcccaacaactcaatggccaaacctcatacacaaacaatactcaccctcaccatttagaatacacatcttaaacatactactcttctatatgaccaaccagtttacgtacctaaaataacccattactatcaaaataccaaaatat

SEQ ID NO: 62400 - DNA, 181 bp, Glycine max
cgtacgaaacaaagtgagagttcagcggatattgctgacttgaaagaaatgtacagagaccaagtaaccttggtggttattaatacccagggcattggtttccttcattggttaccgcctagtttggccgaaaaaagtgctcccttggggaacggaatgttcactgttcattaactatttg

SEQ ID NO: 62401 - DNA, 155 bp, Glycine max
cgaaaccctaactcgcgatggcgatcttgctgggcgaaattctttaatagcttgagctgtgggtgaagcttatcaagaacccgcagactcatgcctacgtgaaccctaatctggaccccgttttgctggtgccccatagtatgaagctccatgct

SEQ ID NO: 62402 - DNA, 388 bp, Glycine max
cggacgcgtgggcggacgcgtgggcacggacacccgaaaagcctttacgctgcgatcgaaatcgcagctggggactgtttttattatagagattgtgattggaaattgcaattgatgtgtccacaattgtagtcgaaattgcggccacaactgcgatcgcaatgcgatcgaaatcccagttgtggattgttttttgaaaccaaggtaatgagtaggttttatttttggttgatttaaaccgtatattggtggttgttatcttctaaactaaggatttggtgagtgagggtattgtgtggctaatgtctaacaactttgactcttaactttactaaaaagtgggatggcctacagaatctttttggaaaatggttggggattttgttgc

SEQ ID NO: 62403 - DNA, 330 bp, Glycine max
cccacgcgtccgcttcctctacttctttgttccacaatttcacggttttctccaaatttcagggtcaaattcaataggctaggctacggcgacactaagttgcaggcctcaaaggtcacgtcgccgaagcttatcttcaaagacccgcgctgagctttctcatcttctttggtctactaccatttcatggcttatttcaaatttcaatttccaaaattggagccttcggcttaattgcttccatacccattagaatgccaggtgcctggggtggactatctttaggtccaagattccttaggttccaggggtttaaatgggacccaacca

SEQ ID NO: 62404 - DNA, 394 bp, Glycine max
cccacgcgttcgctgaaaatgagttccaaggttttgcttgttctacttatgttcttggccactagacttctgatctcctctgaggttgcacccgatgatgcatacgagaattttgacaaaatagatgggaagcctagtgcagatggggtagatgaaagcaagtattggcgtggcggctatggcggcggtcgtggtggcaggcgtggtggctatggtcctaatgaacataacgaggctggggttgatgctaaccctcacaactaagaaggcaactttctaaagcttatatatgggtttaagttatcgcaataaataaaacttcatgagaaagttagttgtaatagaagtggaaaactttgtaaaggaataatacctttcatgaatttgcttatct

SEQ ID NO: 62405 - DNA, 289 bp, Glycine max
tcccacgcgtcctcccactcgtccgtccactcgttctaaaaaaaaaaaaaaataaaaaaagaaagaataaataaaaaaaaaagaaaaaaataaaaaaaaaaaataaaaaaaattaaaatataaaaaaaaaaaaataataatctaaataataatatttatacatttacacatcttacagtttatttatatacttatatattcaacatatctctctttatctaatataaactgcattttaccaattcttcattataaatcctctgatgtactaatctattctctacttata

SEQ ID NO: 62406 - DNA, 264 bp, Glycine max
tactattcacactctaattaatatcctctatatccatccaaacatatttcattaccctacactatctcaacctcacaacaatacattacacattttcttaaatataactctatcttaatctatataacactaaccatatcttacatatacttcactataccactacttacatatatcacctattaatataacacatcatcttaaactattcattaacaactattaaatcattaccacattttttataactctttcttaactttc

SEQ ID NO: 62407 - DNA, 338 bp, Glycine max
cttagagcgtactataatgcaatgtgccaatgtctcaatcctatactcctatgaaggggggggatgattgtacctagtgatatgagtcacaactaagattaagcctagacataatctggctacccatatttaaggaggatgaactttcctgtaggatatcaaagttacgcacgcaatctatataatgttcattctcaatcatactgaattgaaccatcaaacgattcagcagatactacatataacgggtgactctcacgataagcgtccctagcagagagtaacgtctctcaatcacattacacaagctactcaatcacacccattgtacaagactt

SEQ ID NO: 62408 - DNA, 302 bp, Glycine max
acgcttaatattcttgcatatacattaaaaactatattgacttaactgataagttcacattcaagggcgacttctccaactctgtaactgctgctacatctttacagatgcttagcttcatataccaacatcattatcccactggctataacttgctttacaattgttataaacgtaatgggaaatgttggacctagaacaatcaagaatataacatgaagagaggactcataaactaagtttgtactacacagtatataaccatcagcttaagcaaactagaattttatctacagcataca

SEQ ID NO: 62409 - DNA, 433 bp, Glycine max
cccactcgtccgaacactcgtacgaccactcgtacgaccactcgtacgctttttcttttcaaagggaggaatcataaactgagcaggctggctggctagcctttggtcaaccaatcaatgaacaaagacaactttcacagaactgcctctattacttccatcttcttctttgatatacttgagagagagagaaagaagcataagaaaattaacatatgtaaaccttcagaaatctcaagcttatcgaacgtttactgtatcctagacatgcttctctgcgttcttacctgttgatcagagactgtgcacatgaatcatagctgatcgttcatgcaatgaagtgcttctactatttcatagacacatctaggagcacttttcaaaggtcaacacctgaactgacagatccagataaactcgagttatcacggcc

SEQ ID NO: 62410 - DNA, 432 bp, Glycine max
tctaaaaaaaaaaaaaaaaaaaaaaaaaaaaaaaaaataacaataaaaaaaaaaactaacttaaacacgaaagcgtaaaaaataaaaaaattttctataaataaatactatataaaaataactatcaaacataaatacaacttcataacaaactaaaacccttcctttacccaaatttatagcctttcactacattcacctatcttcagcttaagatacctcatattgccccgcacttatacccctttcctacatttaaacctactaaatatacttttgaacacctcatttctcatcccattatacccgaatgcatttattcactaactcacttttaacaatccaattaccagcgtctatatcctccgatctcattcctttcttccctttctttttcaacacgttactcgtcttttcccgtaaatccctaat

SEQ ID NO: 62411 - DNA, 290 bp, Glycine max
attactactagttttacacatgagttttagtggctccttgcctttgatagggtttagcccatacgattgaatagggttagttcttgcgattgtattttatagctacctcaaatgaatgggttaaattaaaaaaaaaaaaaataagaattaaacactacaaagtaaaaaaaaaaaaacttttaactacaaaaaaaagatataaaagcaaatataccaaaaaatagaaaagttctaaaaaaataattattacattggaatgttaaaaaaaaaactcttggacgaactaattg

SEQ ID NO: 62412 - DNA, 329 bp, Glycine max
tcaaacaatcatatccattacaatatccatcataaccctcactataactaactcaaataaaacatatacctacccatcactaacataaaccccatcataaacaatccactacctactaatcataaaatcatcaatgactccaaataaactattcattaatccttatccccatcctataacatcatcctatcatactcatatatacatattcattaattacattcacctcatccaataatacatcattttatctaccaaaaaatttttcacaatccctcattttatcccatcttatcacatctcttttaaattctataaactaatttaaa

SEQ ID NO: 62413 - DNA, 341 bp, Glycine max
gacacacaaaggaaaaaacagagaaaccatgtcttctccaagcacgcggcaagagatggactggatgggactgttaatccaccacttcttctgtcttccttttaccttctatttacattaaagttatactcttattatatctaattgggtgtctaaatttgactattgattctgattctgatattagctacacatctaattaataggatgatgagtaactacaatgtgcatataattaatgatataatgcacaagttttatgtacatatgaattgacccaatgcgagatcttattaaccacgattgttaaaagtgacggttgaactgccatatgcttatcc

SEQ ID NO: 62414 - DNA, 150 bp, Glycine max
atgcagtatactcatcttcttttaaactttcaactcaaaaatacttttcattaactttacttcaaacaaaaacaatccctcttcctttcataaccatttacaagactcctattaaaattgaaaatcattaatatcctcattacttacata

SEQ ID NO: 62415 - DNA, 399 bp, Glycine max
acggctatgcttctcatagatcatcctaactcaattttcgtagtcgtacctcattcggatgaaggggaagatgacaacgatgcgtaaaactccgtatgtgacttagatgaataggacgctgacgaacatctagaggatccgccaccataaaccctaaaggatcaacatgatcctctgaccctgtcggctgctatccactctctagtgaactgtgataatcaacagtacaaccaagaatatgatgacgttgatctcactctctaggaacatcccgtagtgcagcttatagaaccgttcacttatgagcatcttgactctctcgataaacatgcactggatatgtatcctgaattcgtatattgcatgcgccaacttgctgacatgtaccctgctcacagg

SEQ ID NO: 62416 - DNA, 430 bp, Glycine max
cctcttcttaacatgtcttgcattaactaaatgttttaggtcataaatcatatgcttgaatgtatccatattatctgcacgatcaaactttcacttcattgacagtcataccaagtcttttagcatgcatcttaatatgcacaatgatcatcaaatgataacttgcgagtcaagagccaaatccatgtacaaaatgcatgttctcttcgttttatctgatttgatttcttttttgttcttctttatgcatagatgcacagaaacttgaattattcctgatacccattttgtggatgccaattaacctgccaatttgtcacaagtcttttctgcaacatctgtggttcaagtgcatgaatgaaagagctctgaagcatgacttaatccatagtatcttctatcattgaattgttgttaactttcaaaaagt

SEQ ID NO: 62417 - DNA, 244 bp, Glycine max
cccacgcgtacgcccacacgtacgttcaaaatttactctacaaaaaatacataaatacatacagaacgtaaaaaaaaaaattctcagctaacaaaattaatattaaccatacattaaacaaaaataaaacataaatgaaacctaatacaagccccttttatcataaaatgcttactttcaatgctatcaatgtatcaaatagactaactatgttaatactattacactatctattacacttcaa

SEQ ID NO: 62418 - DNA, 235 bp, Glycine max
caacaggatccgatcttacgctccattgttctctgctcgagatgcttccatgcatagagagcgtggtacgtaactactcagctgtcgcatattctgagccatcaataggactacatagacaccaaccaaacctaataatagcctctttgaatgtacaacgcttacttctaatgcactcagcaaatgaactcgataaactctgctactactatgcgactatataatacactgcaat

SEQ ID NO: 62419 - DNA, 384 bp, Glycine max
  unsure (1)..(384): unsure at all n locations
ctgacgttggcattctaccttttcttgattgttccatagaagatgatgacacattgggtgggaatgaaaacaacagcattgaggtgagacttgtttggtttactatggaaagagaagtgagaaataaaattaaaaccatattttatccctaacaataacactcaacacaaacacacataataaaaattccaactaagaaaattgattatcaccgatgaaaatcaatttcctagtatgatgcaaaaattgtttataaaactatacaattgattatataagattacaaaatcgattggaagactacaaaaattgattntttttcagttttttatgtaatagatgaaagagatagatataacattccaaactattttttttatcaca

SEQ ID NO: 62420 - DNA, 139 bp, Glycine max
  unsure (1)..(139): unsure at all n locations
caacgcaacacaaaacccaaggagaggggaacgcagnagggcaaccagcaaaangcngcgcaccagacaaggaaagacaaagcagaagggcagaaaangggagcaccaaagncaagagcaaggcnncagacaccccaga

SEQ ID NO: 62421 - DNA, 368 bp, Glycine max
cttgtactgttctattagctcatactaagttctgaaaatgagttccaaggttttgcttgatctactgatgtccttggccactatacttctgatctcctctgaggctgcacccgatgatgcatacgataattttgacaaactacatgggaagcctagtgcatatggcgtagatgaaagcaagtcttggcgtcgcagctattgcggcggctatagcgttggatatggaagccttctaggaggctacataatgtccctgttactctagatactgaagaacgggggatatctgctaggactgacgaggtagagatgtctaacgtggacactatagcagaaactacatactgcgacgtagaggctacagggat

SEQ ID NO: 62422 - DNA, 234 bp, Glycine max
  unsure (1)..(234): unsure at all n locations
aaaaaangacagacacggcgcnnaggggagnggaggaangaaggccnacacggcatgcagcgcggcannnaaagcgancgatccaagcagagcggggcaggggataaagggnagactgcaaaanggaggcanngaaagcatgcgangggganggaaccgcagacncagagnccgaagcggcccaggcaaagccaaccncggcgcccncagcaggagncacacccgngccaccac

SEQ ID NO: 62423 - DNA, 81 bp, Glycine max
tcgcaacactattcttttaacgattcttggttatgtagagcctacaacttttaagatcaactagatcactaaagggattat

SEQ ID NO: 62424 - DNA, 177 bp, Glycine max
  unsure (1)..(177): unsure at all n locations
gagggagagaccnccgacgcaaagaaccaagaccagaagccggggggaggcccagaacccgaaacggggcccanaagcaangaagccgagaacccggacaaaaggataggggagccccgncagaaaagcagcgaagccgngagggagagggcacggcaacggaggagaaggcgccaa

SEQ ID NO: 62425 - DNA, 311 bp, Glycine max
aaatatatgtgctcctaggacctgctgtctggactcttagttagtgagttcttgaattatgctgcttcaaatatggcatcttggagcctctctggcgttcatataagcattattgctggctactcagagtgtcatatcattcacgtgtcgctgatttgatctgagaccgatagctaccttcaaatatgatgcgatatttagactgcttatcgggtcatacatgtgattgctaagatgatctttgtgaataaccctgtgttactgatctgttcgtctcacgattgtctgtaccatatctactggatctgtga

SEQ ID NO: 62426 - DNA, 111 bp, Glycine max
ccacacaaggaagaggacaaaaggaagcagcggccaccccagaaaacgcttcaagaggaagaggagaagaagagagggagcagagaacccaaaaggggaaagcaggagggg

SEQ ID NO: 62427 - DNA, 345 bp, Glycine max
cacttgcgctgttctaataggccatactctgtactgcaaatgaataccaagggggtgctggacctacttatgtccttggccactatacggctgatcttctctgaggcctgacccaagcatgcatacgacaatcttgactgcatatatggaaagactagtgcgaatagcatcaatgactacatgtatgaatctactagctattgcggctgatactagcatggtgcaatgaggaaccaagttactgtatgccataaacgccgatgcttcctcccatacacgataaccttaggcagcatatctaactatatctgtaacgacgcaaccgagagataatgactcacagat

SEQ ID NO: 62428 - DNA, 190 bp, Glycine max
aaaaaaaaaaaaaaaaaaaaaaaaaaaaaaataaaaaaaaaaaaaaaaaaaaaaaattataagaaaaattaggaaaaaaaaaaaagaaaaaaaaaaaaaaaaaattggtgtggcctttttaaaggatccaagcttacttacccttccatgcaacgtaatagcttttttatattgtcacctaaattaaatt

SEQ ID NO: 62429 - DNA, 388 bp, Glycine max
  unsure (1)..(388): unsure at all n locations
cccacgcgnccgcgaggcncnccagaacccacgncaccgccgcaccagagagaggagggggcnggaganccagaagggagggaanaangccgaacagcngcatacngaggagcaacaagaccccncnaccgagcgccaacaggcagcacaccggggagcacaacacgacaacaagcaaacaagggancaagagaanggcgaaganggccagggaagnaaaanncnggccaggaagnnaccagaaagcaagnacccngnagnncgagganccgaaagacccgcgaagcagnnggaaaacgagaaagcggagcagaaaaaaanggggaaaagacccaggccnaanaaaaacagnnngaaagangccaacggagangggaggaaaggaaac

SEQ ID NO: 62430 - DNA, 215 bp, Glycine max
gacgaccgtaaccagacgcctacgcaaaaacagactgcattcagtggacagaattcagagtatggagctgcaagccaaggagcagaaattgactagtatatatgagtgcttctatgttagaactgacgcgacaactcattaaagcagctacccatacaggcatattgatactgtgcctgtccctgttattcgcccagactgcaatgcagatgatt

SEQ ID NO: 62431 - DNA, 337 bp, Glycine max
  unsure (1)..(337): unsure at all n locations
cccacgcgtccgcgcactcgtgcacagcatccttcgctttaaactgtttgtgtgtctatgggctatctgcgaaccgaacatgtcatcgacaaagggttctacaagctcaacgagaactccagcatacattcactaagcttgtcaacctgctattctcgtattangctatgcgaataatcactggtggtcttcatcatggtgggataccacctatattatcgagctcaaactatagagatcgatacgacattgcctaccattgaataatctgttagactgggaatacaataacataagattactgattgacattaagctggtcaatactgaacatgct

SEQ ID NO: 62432 - DNA, 390 bp, Glycine max
ctccacgcgtccgtccatgcgtaccttatcttatgagcagagaagatactccggcaatggggcatgatgaagaccgtgattatggttcctacagtgttgagaatgtcgatttagaatctcatgctccaattactctccacaaggatcatggcttgtgaacctgtcgtgtgcgccaacgtaccgaatctgatgaatctgcagatgccgcactataatttttgggcatcattccaggttcagaaatgtcgtcaaccactgcggaagggggatctgatggtcgtggcgatagaattcccgaaaatacatctcttgacagaaataatgagaaaaatgctggtatggcggaatttgtaagccctactggggacgctttcatttatgtaaaccgat

SEQ ID NO: 62433 - DNA, 169 bp, Glycine max
accacgcatccgacggcacagttcaagaactctaactaaattaaggaacatacaactccttgggagatctggaaaaccattaacgtccaactctccctaactctaactaatctttccatactctgctcctctacttctatcttcccttaccaattatccataccctaat

SEQ ID NO: 62434 - DNA, 179 bp, Glycine max
cctccttgtactactatttgtttttatttaataataataataatttcatctgggaaaaatgaaaaaaaataaaaaaaataaaaaaaaaaaatttagggcggccgttctacaggatcacatgcacacgtccgcttccatgctacttcatatcctttttatagtgcctcctaaattcaatt

SEQ ID NO: 62435 - DNA, 202 bp, Glycine max
acgaataaacatacaattaacaaactaaaacacttttaaatatctatacaaataatataaatataaagaaaagtaaaaaacttaaagatgaggttaaacaactaaataaataaactaaaacatttctcacatacttatattttctaccactatatttccaactcttacttctatcattatttcaccaaatttcaatacaatt

SEQ ID NO: 62436 - DNA, 287 bp, Glycine max
gaacaatgcatggaggatgccgcgggccattccgacaagcaccttttaatgctactttcatggattccgcctatcaattgccagcttcttattcaataattggggtttcaccgtttgtcccttcggccagtcacacctacttcgcttcctttggcatgcccgtaatgaatcaagccacatcaagatcaacccttgaacaagtgaaccaatttgcttcacaagggtcttaatggcaaaaatggcattcatctgtataaggagcccatttttacccttattattaccca

SEQ ID NO: 62437 - DNA, 300 bp, Glycine max
gacctacacgtacgcccacccgtcctaatttctcccttttttgcttttctgcatatgtctcaataccaaggaatggatgaaacttatcttgtgcttgattcgtgaaataataactgaaagcatgaagctctccttctccgtcccatcatccaaaccccactcgaagcccatagccttcttcaacacctttgacgacaatttcacctcccaaaacgacaccggcttaaccaaatacctaattaccgaattcaacccttccaaaccccttccaacttccttccccaaaaccctatttccccc

SEQ ID NO: 62438 - DNA, 261 bp, Glycine max
ttcactccaaaagcgagatgatctacatctttcaactctccttgcatagagtgcaagggcggggatcgcaattgaggagctggaatgctcatttgtatcgaaatccaatacgaagtatatactgataaatggtaaatatatgtaatcacttatgtttttgtcaaacaatggtcaagtaatgcaaacaactgatgatgatatgctccagtatgtcacaccaccaaattcgtgattagttactagttagacaaaacatgtaca

SEQ ID NO: 62439 - DNA, 246 bp, Glycine max
aacaaacacgacatacgtattactcacaatcatatgactcttaataatcatcgcccaacattcacattaccggtaatttttaaatcatcggtcgaacaacacaactaatcatacctatcaaaatcacttaatatcacaaaaacatatacatccacactacaaatctcaataccacataaacaacacaatcaactcatacttccaaatcatccaatctaccctttataccaacaataccaaatgcaa

SEQ ID NO: 62440 - DNA, 103 bp, Glycine max
gctacgcgtccgctatgagtcgcgctacttcttgatggaccaggtcccacaggaacacaggggggcaaatggattcgtggtgttgaattacagcataacggtg

SEQ ID NO: 62441 - DNA, 137 bp, Glycine max
attacatcatgccataggaaaaatatattgttcgaacaaaacagcaattggatcagtatacgtgactgtttcacacctcttgagtaacgagttaccaaattttctggttgatttatctgggctagtaaaaaaacaga

SEQ ID NO: 62442 - DNA, 176 bp, Glycine max
ttaatatacctcttaattcaacacgcacatgttacacatatttacggcaagataacaaaacctaatcacctctacttcctttcactttaatttcttatatatcgttccttgtcaaatattttcatcaatcttaacattcattatcaatatacataaaccctaatccaacttatatt

SEQ ID NO: 62443 - DNA, 244 bp, Glycine max
atcacatcttatgcaatctattacattaatatttatatatatactattaaaattgggagaggttacaaatactggtggaggtgtttaaacaatattataattaatatttatattaacaaatatttacaaatgtattaaatactaatgacgaattattaattctactatataatattatatttaatatataatattttaaaaaataatatgcttcaatataatatttataaaacattaaattaat

SEQ ID NO: 62444 - DNA, 330 bp, Glycine max
acgcatgatagttctcatcatataaaagttcctcttgacaagagttctcaaatgctaggcagcaccgctgagaatcttgggggaaggcacgcattgaagcatataaatctactggactatttaagaattcataatccaaacttaaatgactgctcttgacacaaaacaaatgtctaagcgatatctaccatattaaaatcacttacccacattatacaaatccctacatatgcatatactccagacttaaacatgatgagtggataaaccacactcaacctgaacttcacactatgacactggcacaacatcttcagacattcaccaatc

SEQ ID NO: 62445 - DNA, 438 bp, Glycine max
aacagccgcaactttcaactaacacaatatagcatcatctccgatgtaacaccttccgtggaggttacaactcacatttgaacttcaaaaatatctcaaccacttcactttgcaagacgtacgtgcagcatcatcgatcagaatgaacctctggatatactactggttctcactcgatttcaatccattcacaacgcatacgatcatgaacactagctcatgcatacggatatcaccctcatcaacttggaccacccatatacagagagcttattgcaactcattgtcatgccatcatgcctgatccaatcgacagtcagagccttattagccaatcacgctctcagcatactcttcaggtccatcgcgatgaaactcaacctcaccactggtatcattacttcactcaaaatctctgctcgccttgtcgatatcttc

SEQ ID NO: 62446 - DNA, 68 bp, Glycine max
aattccgttcgacccacgcgtacgtttaatcacaacatgacatattgtgtctggtattatctctctct

SEQ ID NO: 62447 - DNA, 82 bp, Glycine max
aatttcctttcgagcaggcgtacctttaatcacaacatgacatattatatctgatattatctatctcttgataattaacaac

SEQ ID NO: 62448 - DNA, 298 bp, Glycine max
aaaaaaaaaaaaatacaagttattaaatgatgttattaaataagactataaataaagctaaatgtacggaaattacattctaatgtgaaagcctaatgacatacatttctatcactggcttattcagacaataaccttataacgttgaatcttaatattgaccccaatacttttgtgtttctttctaaatgcttgcatataatatcaaatcatatatcttcttcttcttcatataatgcaaatttaaacaaaaattcaattttaccaagaattaccataaattctaaaacatatattt

SEQ ID NO: 62449 - DNA, 211 bp, Glycine max
acgtctgtttaatatacaaaattctagctttatttctgacactcaatactacatactgacgctggtttaaaatcaaggtgagcttccaaactagccccaacattacaccgttcaatagactacgctcacatcaaatacttctataaactatacaacatccagaactcttcattatatcaactcctatatattactatcagacttaccaaat

SEQ ID NO: 62450 - DNA, 434 bp, Glycine max
gttagttcacacactaagttctgaaaaatgagttccaaagtttttcttattctacttgtgttcgtggccactatacttttgatctcctctgaggttgcacccgatgatgcataccagaattttgacaaaacagatgggaagcgtagtgcaaatggggtagatgaaagcaaatattggcgtggtggctatggtggctggcgtggtggctatggtggtgggcgtggtggctacggaagttggggtggtggctttggccctaacgaacataatgaggctgggattgatgctagccctcacaactaagaaggaaacttgctaaagcttatataggatttaagttatcgtaataaataaaacttcattgtaagggtagttataatagatgtggagatctttcttcgctctggtcatataaaggagtaatacttttctat

SEQ ID NO: 62451 - DNA, 209 bp, Glycine max
gagatgcgaactcaatgttttatggacactacgggaaccatacataccactccctcacggccaggctactcactcagcacaccagtaatccccaaatccaattgcatcctacatgttacccacatgccactgatagcaaatcttataccaccttggcacatgtgtaacttcacattcgcctacatccaaccaattgattgtagcatctt

SEQ ID NO: 62452 - DNA, 310 bp, Glycine max
cccgggcgtgcgactacgcgtccgattttttgactttcttgggcagatcacagactcgggcaggagatactctaaactgcgaaaaaaccactgcgatcaatggcaacgatcaagggcgacaaagctcggcagatcttcgacagccgaggaaatccaaccgtggacgttgacggtactctcatcgatggaagtcttacacagagacagcagtgcgctagcggagcgttaacaggtgtgatatgaggcttcggaattaatggatcgacgctcatactacgctcggaaaggtgctctcaatgctgaggagaat

SEQ ID NO: 62453 - DNA, 410 bp, Glycine max
cattctctctgtgtatttccctacctctcccttcaagatgcagatcttcgtcaggacccgcaccggcaagaccatcacccttgaggtggaaagctctgacaccatcgacaacgtcaaggccaagatccaggacaaggaaggaatccccccggaccagcaacgtctcattttcgccggaaagcaacttgaggacggccgtacccttgctgactacaacattcagaaggagagtactcttcacctcgtcctccgtctccgtggtggcatgcagatcttcgttaagacactcaccggcaagaccataaccctagaggttgaaagctccgacaccatcgataacgtcaaggccaagatccaggacaaggagggtatccccccggaccagcaacgtctcatcttcggcggaaagc

SEQ ID NO: 62454 - DNA, 245 bp, Glycine max
aaaaaaaaaaaaaaaaaaaaacttaaaaaattataaaaaaaaaaaaaaaaaaaaacgcaaaaattgcaaaaataataactcacatatcctaacacctaaatacaatcaatctcaactaataaatacaacttcaaatccttacaaaaccctctctctacccaacttaatctccttccatcacattctcctttcttcttctaaccctcatatctataaaccccacacctatcacccttcctcccatt

SEQ ID NO: 62455 - DNA, 146 bp, Glycine max
acgcggactcgtgggctgacgcttgggcttacgctttggcggacacgtgggaaaaaaaagaaaaagtaaaaaaaaaaggaaaaaaaaaaaaaaaaatataaaaaaaataaaaaaaaaaaaataaaaaaaaaaaataaaaaaaataa

SEQ ID NO: 62456 - DNA, 137 bp, Glycine max
ctttaataattttcaaattcaaacttacaatataaaatacttccaaaacaccattttctatctctttaaaatacaatctaattaaacatcttcttcattcttaattactattaaatccttcatgctaatatattctt

SEQ ID NO: 62457 - DNA, 392 bp, Glycine max
cccgcgcgtgcgctccaaggtattataatggaagatgccatgacagccacatggataagggtagatcgctgaatcactgtaggacatgtgtgtacggtattgagatgggatgaatgaatgtaagaatagagatatcttctacattgcatggggaggactggagctagggttacacttgcatatggtggtatacaacctgcatgattacgatgatgcatcttatgtgtcatctactattatataggctgctactctttctagaggataaattgatgctaggcacatgatgtctgagaataatcaacaactctaatgcataggctaggacatatgaatccgtcttggagaatcaactaggagtcatgatgaatgtcacgcggctatatacatga

SEQ ID NO: 62458 - DNA, 148 bp, Glycine max
accactcgtccggttgatcttcacaagcccaatttttactatcttatgcctatattattgcatatttctaaagtcagggaccactatactactgtcattacctatcttatttgcttatattgtctcaaacaactaccatactttcctt

SEQ ID NO: 62459 - DNA, 219 bp, Glycine max
gattatcatcaaatcaagttaaccaattatacatacctccttcatctacccttttcgaccctcttcattacccttcactaactcctacctttttctcattatacatcacattcccaatataagaaggttcactacacaacacaacccttcaatgacatacattttccctatttatccccaaacctactttatctaacactttctatccaaaccttccat

SEQ ID NO: 62460 - DNA, 384 bp, Glycine max
cctgaattccgaggggcgacttcacgcgtcctgctgtgcaactgtttgaaacccggtttttgtgccacacgttcctacactgtcttatgtgcttggaccttcttcgcggagctggcgctacattttgccgtttactacgtcgtcacgggtctatttggctcctccgacgatcaccatcaccgccaccgtcacgactaggatgacgaggacatgccgtctatgcgccccccggttacagtcgacgagatcacagcatatgagctcaaggcctacgacggcaccgatcccaacaagcccttgctcatggccatcaaggcccagatctatgaagtctcccagagcaggatgttttatggacctggtggaccttatgccctatttgct

SEQ ID NO: 62461 - DNA, 438 bp, Glycine max
gttgcattaaaaaaattcattatctttcatcgatttcatggatttcgaattgatcaagggttctttggctgtgttcccttttgttttttgattttgaaaaatgattttaaaacaatgcttttatatttgttataataaaagtacttttgttcaatcggttaaatttatctataatttctattaaaaaatagtctttcacccatatcaaattttacgagccttgaaagagtttttttgctaaatttttttggatggcttagaagattaccctaacacgatttgttggttaaatctttacttccgaataagccattttttgttgctagtgctatttgtttcttgtgtttctggattcatttgggtttgcttaattaatttttctgttgattgtgttgacgcaagactgaatgacctaatggagtctaaaggtgggaaaaa

SEQ ID NO: 62462 - DNA, 214 bp, Glycine max
acggatttgtcgtacaggatggtcttaatgtcgtatctttattccttgtctataaaattggatatgtattcaaaaaaaaaaaaaaaaaaaaaaaaaaaaaaaaaaaaaaaaaaaaaaaaaaaaaaaaaaaaaaaaaaaaaaaaaaaaaaaaaaaaaaaaaaaaaaaaaaaaaatatatagacaaataacaaaaaagacaaaaataaattaaaaa

SEQ ID NO: 62463 - DNA, 184 bp, Glycine max
tatgatctttcataatattcgttggatcttctgcatattcatattcaatatgagtacctgaggaggggacaccgctatgtgtgccatatcgttgcttattggaatattatcttccactggcgtagaatatacagcggcacaatctgatggtgtgagttagggatgaaatggcatcactctacct

SEQ ID NO: 62464 - DNA, 348 bp, Glycine max
cccacgcgtccgctggcgtcctgtacatctcacgatgataaagagcaccaccgggctcgggatctccatcttggtcctctcgcttgcctcccagttctcatggtgtgcagaagcagctgagggaagcgccggaatttccacagagcctgatctccaggtgcaagaacaagtgcacggcgatatgaaaaaccggctggaaatgcagggtcgcaaccggaagcttggccatgaggtgaccacagtggagtcgaagcatcacatgaggattaccagtgggcacaatggtggcagcgcggatggaggcgccggcgccggtgccgagggcgcaggcacgggtgggcataacgt

SEQ ID NO: 62465 - DNA, 246 bp, Glycine max
tcgcccacgcgtccgagcaaacacttcttccttcctacctggctgatggatgattgtgaaccactaaactcataggccacctattcacccgcaccgactcgatccgagttccaactcctgagctctaagctgagcacaacctcagtggtaggcctatacgcgtaatggaaacccgttcgaaagtatttccccagggttgcattgctacaaatcagatactataactcaaattcgttcatactatac

SEQ ID NO: 62466 - DNA, 350 bp, Glycine max
attcaagcatcatgaccttgtttcctttataaaactcacaaccctaactctggtcataggattcattggaacaggagcttattcacattctctttatcactggctgcgcctggcttgcacccatctcgacaaagttaatttcaccttcgacagatgccaacagatctatagataggaacacagatcctacaagtaccacacgtgcctaaaatacgaccacaacagcagaaaggacgatgattgcgaagcatgttgcatgtccatcgagacccccgggcatgtggaacaagacgtggaggcaatctttcacaagcacctgagagcctggtattgtgacacctaccaagaat

SEQ ID NO: 62467 - DNA, 150 bp, Glycine max
tcttccacacatccgctcactcattcgacattttctcacactccaatagtcacctactcgtcctacttcaaactaactgaggcctttccatccccattatatctcataacattatccaactctgattacaacctccaccacacacacctt

SEQ ID NO: 62468 - DNA, 211 bp, Glycine max
attcacgcgttcgattcttgcataattgatatggagacatgataatggatgactcaaatgcgagtgtggcacattgtccacaggtaattgtgtaaaaaatcgttaatatattgatgaatgccaagagaatatggcttgtcagtgcccttaatgttgcttcaataatacctttagcttctacgactgcacatctaatctacatcttcacctt

SEQ ID NO: 62469 - DNA, 189 bp, Glycine max
cacactcatacgcccacgcgttctatcctatgctgcgcaggtctactaacagcgggctctggatcacacgaacaggctagtcatcgatcttgctggtggacttaccatacattacaaccattccaattctcgtgactccactatttttgattggtaccgtcataagccttctgctgaattctattgata

SEQ ID NO: 62470 - DNA, 281 bp, Glycine max
ccctttatctttttcttgtttcttattcaacaaaacttgtcaactatgaggaattttttccaacctatcatgacaatatattaatttcaatcataaattcactgaattttaagaaccactactcaaaatacactgttcgatttccccattttactcttcatatataggcatctaacgttcttccaaatctttttatcatatatacaatgaatattacacttatttttacattttggaagatttgctttttcttcattctaacattcccaccaaatacttcc

SEQ ID NO: 62471 - DNA, 254 bp, Glycine max
ataatcactttttactagatatcattttcctcaacaagtcaaacattcatacctaaatcatcatccatcaatcactaccgattctaaattcaatcctataccaacataattaatccacatttacaattaacacgataacacttcctactttcaacttacaaaaaaattgactaccttatcaaaaatcacactctttacaacattcactttatattctttcttaattacacaatactcatatctatctttttcaa

SEQ ID NO: 62472 - DNA, 179 bp, Glycine max
tccactcgttctctcacaccttctctaatgacgaaaatgcacagacacgaatcaaccatgttggctcggatgcttagataggtactcaagtgagctctttccgacatagcaggtaacagggacgaagcatgtacgctagagttcgcatggtcgaagaagaccataggtgtcgagaaaca

SEQ ID NO: 62473 - DNA, 243 bp, Glycine max
attactcttctattctctttcactttcatatttctattttccatcaacttatcagtcatgtaggatggggtagccatttagtattggctgggttgatatgaacgaacacatatcctttgtagtgtaagccatgtctgttgacactattctcgctgctgctaaatctctcattttcttcttcattcttactggatctttgctgactgacatcaataattcattggccccaaaattgaccccaat

SEQ ID NO: 62474 - DNA, 253 bp, Glycine max
gcggacttatgtgtggcaccgtctgcgaagtaggaaagggcgtcgtgggctgcatctacgggcactgtgaacaggagtcggaggacaatcgctgctttttcagggatacctaaaaggaaaacgtttggtcaagatattgcagcagggatggggatgacgaaggttggcttgattttcacgcagactatgactcaagataagaaggatcacactcagacgatcagcgaggcgacttaagctggggagtaccatg

SEQ ID NO: 62475 - DNA, 300 bp, Glycine max
aacacaaatgataacatactctctccgctgccttcaacaaccctggctcatggcactgtcaccgtgggctctatctatcacctgcgctgctcctagctgctaaatccatcttcgcacacctaccacgctcttcattcgcttgacctcaacattcaccagcacctctactaccccgaaaaagagactctcatcattcatgcatcaccctaccaaggcactatacaatactataaagcctatagccacacagaccaaatattccagcgcctgatgactagccgtcggttaccactcccctat

SEQ ID NO: 62476 - DNA, 159 bp, Glycine max
atctaatccgtacggtcacaactgggacagtttcatgatgaggctaagctaccaggacatggcgtgaagagctgccaactacctacggtcctgcgacaacgtacgcagctgcacagcgcatctgtcgaatcatggactggtcatcagcatatataacac

SEQ ID NO: 62477 - DNA, 66 bp, Glycine max
cccacgcgtccgaccacgcgttcgaaaaaaaataaaaaaaaaaaaaaaaaaaaaaaagggaagagt

SEQ ID NO: 62478 - DNA, 195 bp, Glycine max
gcgactcgttcgaaaaaacatacaaaatattaaaggaaaactctttcaaattaccacaaatcttcatacgactaaagagcggggtccgttcttgaggatgcaaactgaaactccccacccttctaagaggatcttttttcttaaggagacctaacttcaattgactgcacggcgttttacaacatcttgaaaaat

SEQ ID NO: 62479 - DNA, 208 bp, Glycine max
gcaaagatgaataccaagccctttttctacttgtgcttactctgcgcactgcttctcatctagattgtggcaactgatccatccaaagatgcgacacatgaagaaccaaagacacggtcagatgcctggagaagcggtggaagtggaagacatggtggaagtgggggacatggtggaagcgggggacacggtggaagctggggacatg

SEQ ID NO: 62480 - DNA, 330 bp, Glycine max
tcacgactactcaaaccctatctatactttcgcttatctttccaatgcttatatcagggaagagtcctgatccattgaagcatgccatacaactatcaccaaagacaccgacagatacctacataaatcatgatactaaaataccttctacacctgctctacataatccaatcaagaaacacaatgaagagctctgacatgacctaagctagagccatgacattgaacatcatcataaatgcaaactctatatcccaaaggacatcctatgcttctcccataaaactttctcaaacattaacttaacacatacttaagcttgtactcaca

SEQ ID NO: 62481 - DNA, 243 bp, Glycine max
tcccactcttccgaaaaaaaattaaatctatattatattaaataaaaaaaaaataaaaaaaaaagaaagaataaaacaaaacagataaaaaataaatataataaaaaccccaataccatatatttatctttctcctcttttctttcatcatcacataacattccttcatattacatctgtctattttttctttcatccttttcacatattcatctcttatcatactttatatacctcttactt

SEQ ID NO: 62482 - DNA, 52 bp, Glycine max
aaaaaaaaaaaaataaaaataaaaaaaaaatattaactaaaaccttaatcat

SEQ ID NO: 62483 - DNA, 401 bp, Glycine max
cccactcgtacagtctgatggatgtcctatccactcccattcatactctccttgttgctggggggtggtgccatctacctggctaaggaagctgattgctcatttgattgcacaatcgaacagtggccttctccaaataaagtgtcattcccacctattatccttgtgagatccctagaggaaacttaaaataccacccaaggatcaggagggctacaatggctgctgaattcctagaagaaacaggagggctagcagttcagcatcaaggatcagactcatgggtttggaagcatgactcaaatggaattcattcgaccagatctgcatataagtttctgctgggggaagtaacgtgggaatcagaggatgggaagttctcgcttctgtggaaacttaaa

SEQ ID NO: 62484 - DNA, 333 bp, Glycine max
cccactcgtacggtctaacgtatccacaaatcacggctattgattctattactgctgatccggggaagtgcaatctacctgtctatacttgcttagtgcttatagaaattgacaatataccagtgctaaaatccatattaagtgatactatatcctattatgagtgagagatccctaatcgaaactcaacttacctgccaaggatcatctatggctacaaatgatggtgaattcctacaagaaacgatagggatacctgctcaacattaaggatcagactcataggttgagaaacatgactcagatggctcttattataccagatctgcttat

SEQ ID NO: 62485 - DNA, 201 bp, Glycine max
tcccactctttctgccacacgtacgcccactcttcctttataaatactataaataaaaaataagtgaaggttcaatctacctgaggtcaagaaaactatctcatactttcattttacaatactacagtataacttctcctaataaaatttcattaccacctattattacttgttatatccctatactaaacttataatacc

SEQ ID NO: 62486 - DNA, 281 bp, Glycine max
aacacaatctctcccttccaaatgccaattttctctgtcctccatcaggttctgaatggagggcctaaactcactgctgacgaggactcttcacctaacttgcgattctgagagcagtgtttcactgtagtgacacaccagacatctatcgtctaaaacgccagacctccttcataccaacatcggtctcatactggcagagcactggttcaaaccaagtgttctggcaactgtgcacatcgtatgatccttcgtgatggccctgaagcgtcaacattcct

SEQ ID NO: 62487 - DNA, 275 bp, Glycine max
  unsure (1)..(275): unsure at all n locations
gtcgtgtccatttcaagtgtttgcgagagaatggagttcctggacgaggactcaaggcctaggttcgggttccactccggttcagcttccacgagcactgagccaccgtacccgatccacatacctaccaagccatttctcttcgtcaccgatttcctctgctcactacttgctactctctacctcttcttactctaagcgtagcccttcaaatcgctcctcttctggctcgcactctctatnctcgatggcccctttcccacctactccatcac

SEQ ID NO: 62488 - DNA, 197 bp, Glycine max
ttcaaaccgcttgggggatttaatcatttccaaataatcaaccttactataaataccggccatgtgcataagtcaaatgaacctttggcaacttttagaacctacaggaggttaaaagttgtccaacttgtttttaacaatatttcacttatttatttgatctattttaatgctattaaatattctaatataaatat

SEQ ID NO: 62489 - DNA, 63 bp, Glycine max
ccaaccctcccgtccgtccgaattcaacagactcaactgtgctttcacactctacaccaacca

SEQ ID NO: 62490 - DNA, 184 bp, Glycine max
tccgacgcgtaccggtctggagtctaatcctacatcagttactatatctatacttgctttttcagtctcatcctctgtctcgtaaacaagggagtgccgtctcatattaccttgatcacactttcactcttcatacgtgacctggcatctcgtatcagtatctcgaacacacaatacatacaca

SEQ ID NO: 62491 - DNA, 62 bp, Glycine max
acggaaagcattccgaatcatcctgctaattcctttcaattttcaatacttgctagagacca

SEQ ID NO: 62492 - DNA, 253 bp, Glycine max
atttcctgtcgacccactcttcggcaagggattcaactatacccaattaactttcattttatatctccttgttgacttcgggctcggtatccctaggttggttctacattcacctattatttaccaattaagataacacattatcctttcaccattccacctactcttccataatcagttactctaacttttctctacacttttttcaccgtttttttaccctcacttcaaaaacatactgtcacatcttttc

SEQ ID NO: 62493 - DNA, 323 bp, Glycine max
acgttacggttcattcgacattgaccaattctatttccttttctcaaaacccaatttgcttctggtgcagtttatcactatccttcatcatccccaaatactcttgacctcttctccttcacactccttcttcatattcctcttcatctgtcataactcctacgcctccacttactttcttcaaaaccacccaacactctcactcacctaaccttcttcgacttcacgttttttcccttcctaaccccgacgcctattaacccaccaacaacttccctttaacatctcatcctcatcaaaacttaagccattcttaaacttat

SEQ ID NO: 62494 - DNA, 250 bp, Glycine max
cccacgcttacgcccactcgtccgaccacgcttacttatcgcactcttatatcttcatacaggacaggccaaaaaccaaaccacccccgattcccgaaaccctaaccctacctccttgcccctatgcccatggcttacaaacgaaagcttcgaacctccaacccataacctaccaaacccgtcgagccacaacaacataaccatgagactgttgaactcgaccaacatcaacccatcccctaaccaaccc

SEQ ID NO: 62495 - DNA, 283 bp, Glycine max
ctatcgctagaggtactataagtctgtgtgttgaaagaggaatggtggacgaaggtggggtggactacgttgatcgagctcatgttactctctcattcgggaagctatcacaacctgatacccctctagaacccatccacaatgcagacacatgcatgctattccaataccaaatcagacaacgaccttccttctgtctcctcctatttcacggatctgctcaattgcctacgacctctttaatcctctactactcctacttttttatcgacgacagatcacg

SEQ ID NO: 62496 - DNA, 143 bp, Glycine max
gaaaaacttgctttccatcgccctggaagtttataaatttcgtgctgaacatgctaatactagatacagaaatactaaagctggtatgtacatctataacactaaccccttattctacaaaatatgctcatctataagaatct

SEQ ID NO: 62497 - DNA, 146 bp, Glycine max
ctgttccatcgtcaaccctacctatccatcttcgtatgaccttcatgtttgaagacctaaggacggatactatatttctgacagcgtaatcatgtcctgcttcgtatggctaacggttacttatcacactccgtcttcttggtttc

SEQ ID NO: 62498 - DNA, 169 bp, Glycine max
aaaaaaaaaaaaaaacaaaaataaaaaaaataaaaaataaaaaaaaagataataaaaaaggggggtcgctattaacgttcccggcttacgtacacaatcatgcgacattatatggtattctatattgacacccaagccaataagtggcacgtttttaacaagcgtacac

SEQ ID NO: 62499 - DNA, 239 bp, Glycine max
aaaaaacaaaaaaagcacctaataataaaataaataaaaaataacaaaactaatcaagggccgggcatacgtactcactcatacaataacataagcatacctatagtgtcacataagataggttgactgaccttccatttacaacaaaggtcactggaaatacattgtgcacttacacaacttattcgcaatacaccacatacatttttacacactttcacttttacatagacggctca

SEQ ID NO: 62500 - DNA, 216 bp, Glycine max
ctcaagcgtacttactcaccaactacgctattctcaaagacgctgcttcattcaactgtcacgtatcggtgctccattcaccagatggcagtgccagacttaaattctcaacatcttaacactcatcacttccaatcactcccaacacaccaactattctcatcactatccctgcatactctcataatctgagatactttcacaccttttaatcca

SEQ ID NO: 62501 - DNA, 342 bp, Glycine max
  unsure (1)..(342): unsure at all n locations
cgtctcgtggtttcttgctgcatatggttgcctcataccacataatcaacatcctatctaaagaattaatgccttcttaatgtagctgatgctnacttaaggagaatctgaaataaangntatttttcaattcnttaggtgatgtattcatgtatttgtatccaaaanntattttggtaccgtaaagtnncttttaaaaaggtttgcatttctctctctttgtgttttcccttaagttctgataagttattctcctaatgaagacctaatcatatgtacctgtactgtagtgtgaatgatattagtatttgtattgctgtcagaatattgtattgtctaata

SEQ ID NO: 62502 - DNA, 422 bp, Glycine max
gttttgtgctagtgagttttttcttaaaaaaaatttagtttttgtttttttggaattgcagaattgcctggagttcggtgggtgcttcctgattcttacttgaatgttaaggaaaaggattatggaggtgagccctttattaacgggcaagctgctccctatgatcccaagtatcacgaagagtgggttagaaacaatgctcgtgccaatgagagaaacaggcgcaatgacaggcctcgtaatgctgacaggtcaagaaactttgagaggaggaaggaaaatgtggtaaacagagacatgcagggcaggccttcttcgccaaatcctggccctaatgtgggcggtccttcttcaagcaatgcagctgggtacccttcaagcaatgcagctgggtacccttctagcaatgcaggatatgcccc

SEQ ID NO: 62503 - DNA, 281 bp, Glycine max
cgcgtccgaatggttactatgaagctgatattgatgcttaggagatattcaggaacttcttctttggaggaatggcccctgcagccaattggggaggatccagttattgaccagctaggttcaatgattacaatggtcataggcatgctgatgaacatggttctacttatgataaggaaaaccatttagttctttttctccaaaccctatttgcttattacatgatacactttgattgcacccttttggaatcctttcccccctaaatttactaccagctt

SEQ ID NO: 62504 - DNA, 65 bp, Glycine max
cgtacgccacgcgttctgaactatatgttcaaacacttatgttctcatgccagaacaagtttacc

SEQ ID NO: 62505 - DNA, 61 bp, Glycine max
cgtccgcaaagcacgacttatcttaagaaataagctttactttactaacccacatccaaac

SEQ ID NO: 62506 - DNA, 94 bp, Glycine max
caacaccaaatctggatggtggaccagatattccttcttctggcggctcatgcatggacaagaattgcttgaagaaactgagggaagcatcatc

SEQ ID NO: 62507 - DNA, 313 bp, Glycine max
accgcccacgcgtcaccccactcgttctctcacgcttccacccactcgtccttccacgcattcgtgcactcatcctaaatattgcatggtatatatcgcctgaagacccttctctacttgcgtcgagtcaagtagagcatgtatagtggcacacacaagactctgacagaaccacttagaccccttacggacaccacaacagtctccttggctaatgtcaacagtgattacaaggaatcggacattgctatagttagagcctcatatcatcgttaacgtccagctaatgaaaaacatataagatctatatttt

SEQ ID NO: 62508 - DNA, 338 bp, Glycine max
caaagacagagaaaaaatccaaagagtaaatggaacagaagagaaagcttgaagctagggtgaacaccattgaaaggagtgaagagaccaaggtgatgaaagttgatgtagaaacgttcaatctgtttacttcatgcagagctctcgacttcatcttggactacatgtatttcatgtcactacaatacctttagttcattatttattgtattttgttcttgattcttgtccttaatttatcataaaaactcttttcattcatagttttagaattcatatcaagttgtttatattttctgagaaatgaatatggttcttttctattactttgaatttat

SEQ ID NO: 62509 - DNA, 419 bp, Glycine max
  unsure (1)..(419): unsure at all n locations
cacgcgtccgacaaaaactactatttttgtttcctatacagcagggaagaggaaccagttattttcggtgagaagtacaccggaaagtttttgcctaaagaaatcatggagggaatgcgagacacaaagtcacagcttgaaatccaagaccaagagggtactaatattgggtcctctttgtcaaagctcatattagcaagtggcagtggcacaaacacccttgactcaattttctccaattgcccacaaacaacaaatggcagcactagtagcaactccgtgttagatgatttagaaccctttaagtcttcggggtgtgagtctttaggctctttcgtgtaccttcgccaaaaggacatcctncaaaaattctaccaagaaagccgaagaaatgggaacaataacgggtcttataatat

SEQ ID NO: 62510 - DNA, 399 bp, Glycine max
cacttacgtcctctcaaacgtcctctacttcttacattacaaactcctgatcttaataaaacagccacgtttaaaatcctggtatagcaaatcaccttcccaaagtcatcaaataattcaaacccaatataactcttaaaccatctaccccaaatcctgttcaatcaaaataaaatcaacctgtcaatatgaattatattaaaaataattcacttaacaatacttctactccttcaacacattatacttcttaatttactaaataaatgtcttttaaaattccttaaatttctactttaaacatacttttaaatttcttcttccatatataatacaataactcttttattaatataatttattttttttttcctttatcaatatttatttcttcatttt

SEQ ID NO: 62511 - DNA, 142 bp, Glycine max
cccggtcgctgcttcaaccttgtagttattctctttcttcttttttagctatctctctcttgaaaaatctagatcttgatcttgcttgatctaacattacgcttggagtgaccgtatctgtatggatctgaaccagaatcta

SEQ ID NO: 62512 - DNA, 252 bp, Glycine max
atttactagctagtgatctataagaccacggtcagttctgaaaaatgggttccaaggctttgcttggtgtaactatgttcatagcggctatacttctgatctctgctgaggatgcaccccatgaatacgataatttcaacaaacacgacgggaagcatgctccaaatggaggatatgatagcaaatggcgttccagagcttggagtagaccttgctactgcggctgtggtggcccttactatggatgcagct

SEQ ID NO: 62513 - DNA, 145 bp, Glycine max
cgcgtccggtggtggtggaggaggagggaatgaatagggttggtggaaatggtgttggaaacagtgggggctgactagggagctggagagtgaggctgtgtgtggtctgcggtcggtgctatatgtgggtgttgatggggctact

SEQ ID NO: 62514 - DNA, 284 bp, Glycine max
ctcacacttcctccctaatccaactgttttttttccttaaaagggattctccaatgtaacggtcctttattcaaccaaggttttcccttttcatgatctgtagattaagtaacttcattccactagaaatgctagtaatcggactaaacaaatactacttatagtacacctaatctgattatatattattctttttaaatgcaatttccattcacatgttcaatcttgactcacaacttttatgcaacttaattcatttttctaatacatataccattcacata

SEQ ID NO: 62515 - DNA, 304 bp, Glycine max
atcacacgttaccactaatacaactttgttttttccttacaaagaacttctccaaggtacggttttttattcaaccagcgtttttccttttcatgatgtctagactaaaaaactccattccaatataaatgttagagaattgacgaaaaaaatattactttaggtacacctaatctgaatattttttattcctttttaaaatgaatttccattcacattttcaatttttattcacaattttaattcaacttaatttatttttcttaaacaaaatcctcttatatacctttaaaacaaaaggctt

SEQ ID NO: 62516 - DNA, 51 bp, Glycine max
ctccacgcatactaaaaataaatattctacattttaatagctggaacttaa

SEQ ID NO: 62517 - DNA, 423 bp, Glycine max
gttaagatccttgttattattccttttcttttgagactatgttcttgtttggtgtcaaacgggtagaggattttcttctagtaatgatataaaattgttgatgaataagatggtgggtggatgtggatcaatcagtccatcgttgctcatttaatgggtctctgtctattcttccagatctgattcaattccgaattttccgccctattgatatttccaaatccacttgtctttatgtgaagcttttcaaatttgcgcaagtatctgtatttacccctgcactcactatctctatctgtcaacttccagtgctggaaaattcctttcaattctggctctgctttgttccaatttccaaacccaaacctacccacactttcgatcattgtcacactctgttgaactgaaaacataattgctact

SEQ ID NO: 62518 - DNA, 399 bp, Glycine max
aatttccggtcgaccacgcgtgcgctgtgactgtacatgatgatacaacccatattatgatttaccaatatggtctctatatgagggctgagactatatcttacatgcgatatgcttgtcctcctatggatacattggcaatacgccacagtcttcatactgaatctcaagctcccgaacctgtatctgttagtcaatactctataagtgtacagtgctattatctctcatacaagcactacaatgatcaatgacaaaacaataatctattgaacttgcatccaattctacaggactacatactaatggtcaatcatctaatgacctatatgcgtcaactacctggatttgatgataacatcccaccctttgcaaacactaacagttcaaacacactta

SEQ ID NO: 62519 - DNA, 246 bp, Glycine max
gcctatctttcgcacacccttgcgctaaattctaactgatcatcgttaaggtagcacttgagcgcgaggagcatgcttagacagatcctgatgttcggtatatgacttccgtatctaaatcagtcttgcatcatggcttcggtccctcagattttgaagtttaccagcacatgatcattcatatcatgctcgttcttgtcgctagtacttccatttctgactggaattcgatggaaccatctatgc

SEQ ID NO: 62520 - DNA, 116 bp, Glycine max
catacttaatactcaacatataaaactaaaccttccaatccttccaacctccactattatatccattcctcatactatttaactaataatatttctcctttaattcataactaaca

SEQ ID NO: 62521 - DNA, 328 bp, Glycine max
tattcccggtcgacgcacctccgctaaaaaataaagaatcatctcatataatatacaactatcttaatcctaggaacgtattcataaacacgagggacaaatcttagaattccatttcatgccattttcacttctactgaaacccaattataatccttccatcttattacttcttgctacaacatgttacacactctcactgtctttaacttcttccctttcttcatttcttatcataatttatttctgcaatgctttctctgttgttgcatgaaccataaatttcaagtctttcaacttaaagcctttattttttgaattaatttaa

SEQ ID NO: 62522 - DNA, 191 bp, Glycine max
atccgttacaattgcggtggtggactggatctgtgtgctggaaaatctgcttccttgaatggcctcattggacatccggctttgccaactggtgagaatggtgctaccagggctcccattagcattgaatcgaatagagacacctctttaagcagcaagtcaatcatcctgcatattgacaattcaactca

SEQ ID NO: 62523 - DNA, 257 bp, Glycine max
aaacatttgctatcaattaaaattgccttacgagcgaagatctaaaaatccttgccgcggtacattactaacacaggccgacattcaaataagacacaagcacagaacaacctacatatacatcgactggaatcaatctaccaccaaatcccttgtcacagctatggaacaacatgaatgatcatgattaatatgaagattaatagtaataacataaacttcctcacagcgcatctctaaaaccaccaaataatatt

SEQ ID NO: 62524 - DNA, 112 bp, Glycine max
cctagttcttgctgcatccaataggcctttctactgggatgtagctattattaggcgattggttagatggatgatgaggatgtcttccatctgtggagaacagggaaaagat

SEQ ID NO: 62525 - DNA, 189 bp, Glycine max
gggggggggggggggggggggggggggggggggggggggggggggggggggggggggggggggggggggggggggggggaggggggggggggggggggggggggggggggggggggggggggggggggggggggggggggggggggggggggggggggggggggggggggggggggggggagggggggg

SEQ ID NO: 62526 - DNA, 253 bp, Glycine max
cttatttaaggatccatgctgacacatctcgtatcttgtcaagtacttgctgcaagcatgtcgtgtaaaacgatactagctatacatagatccgagcccataccacccaaaatggctaacgctctagatgttactagcttacgtacgcttgcactctacttcgttcctaataatatagcgacaccgaatctctatgcacttgcctgaagactacatcatctggactgggagaaccctgacccgacccaactta

SEQ ID NO: 62527 - DNA, 165 bp, Glycine max
cactcttatccttttgcaggagcttcaaagttaaagtgcgccttggggttgtttgggtagctggaatctccattacgtggatgaatcttctctgtgggggcacggaacagcaaaacaactaggaggaatatttggcaatgagttaattttattcatgtatacatt

SEQ ID NO: 62528 - DNA, 315 bp, Glycine max
agccctaactcatttacaaccaaagtcttaaatttcacaaacttatacaactattactgtcatgacatattacaaaatatctaaactaacataatactaaatattaataactattaacatcataacaacccatccttcactaactcaatcatttataccaacacctattcatatcataataccttaacaactattgaacctaatcccatctgatccctagttctcctacataatctctcccatcatctaaaacattccatatactaatatactctttattcttacctaaaaaatctttaaatatactcctataac

SEQ ID NO: 62529 - DNA, 321 bp, Glycine max
tcgccacaatgtattttattttatttattcttatcagtcacgaaaagcaattgccattgaatttagccaccattttttttaattctggtttatcaaccctaatttttaattatttttgcattttcattcaaagattcctttcctttccctctttgaaattcaagtgtttttaagaacaggccaattcagttgatttgcgtttcatattattcggctcggtatcaatcgagaagaaaaaaagcttctttttttttttttcggtttaatcggtaaatttgtcaagtttagggttttgtgcaattttgatttatgtgcgttctc

SEQ ID NO: 62530 - DNA, 102 bp, Glycine max
gccagctggccttcgctggccccgttccggctttaccgtcgagcgtgaccccgtgtttgatagcaccgaggagattttgtgagcaatgtagtgctaatgatc

SEQ ID NO: 62531 - DNA, 145 bp, Glycine max
aaaaaaaaaaacatagaaaaaaaaaaattcaaattgaaaggccggtcgctctaattcgaggctacgtgacctacgcttgcatgcgacgactttgctcttgtatagtgtgacctaaattcaattgactggcacactcttcacatct

SEQ ID NO: 62532 - DNA, 55 bp, Glycine max
acgcccacgcgtccgaaaacacagaagaataagaacttctcttcttgtaattacg

SEQ ID NO: 62533 - DNA, 387 bp, Glycine max
cccacgcgtccgcccacgcgtccgctttgatttctgttatgtgaattcaagtgatgctgactcgatcaattttttttatggttgcgtttgcagcaaaacctattgccctttctgcgtcgatgtgaagaagctcttcggtgacctcggtgccaattacaaggccatcgaactcgacactgaatgtgcgtcccttttcaattcttttctctttttctttcgctaaacccttttatttaaaaaaatcgtgaagctgttcgccaccgaattgttgtctgataagacatgtgagtcagcctgttttcgaatcgtttcgcggcatgcttttttttattattattattgaaaaatggctgtagttctatgttaaaacatctttagtgaaagaac

SEQ ID NO: 62534 - DNA, 305 bp, Glycine max
tcgatccgttgctagaacataacgtgcatacgatttccaaatatgatccatgtctgagacctaaaggttacccattactgaccattcaaaggatgcactgatcagatgtctatcatcatctatggatataatcataatctaatctgatgcgtatgatccacacaatgttctggtacatcaactacctcttcaaatttttcggataatatcctatccaagtcttatgattggatcactctctagttcaacgagctctgttaacgattatgcatatggtctggtactattcagactatagtaattac

SEQ ID NO: 62535 - DNA, 152 bp, Glycine max
aattagcatccctattatggcgagggcatagtactccgcattgtttgtgacatgatggtacctgggcacgtgtatctacaactgctctgcaatcttatgatctgacgccctatgctatatatagcgttacagatagagccccataacaaagg

SEQ ID NO: 62536 - DNA, 172 bp, Glycine max
aaaataaataaataggtttaattgaaattcaatgtggtttcggctctggcactcaatgcaccagggctagcgtccccatgcatggagcgactgattgtcctatcgaggcgccataaatcaactacctggactgacgtatacacctgacgtacgtgtgaaaacggctgactcg

SEQ ID NO: 62537 - DNA, 238 bp, Glycine max
gccacgcgttcgtacgcctaccggttcacgaattccatacttacggcaaaccatcagcgacttcgagtcacgctgcagcaactgggacatctgcatctggtagactaatgctacagtccgaaccacataattgttccagtagaagactgatatgaagaggtccacaaccagatcatgacatgtatttactgactgtggagaccttatgatgaacaatccatttacaactattaatgat

SEQ ID NO: 62538 - DNA, 201 bp, Glycine max
ctcagtctgggattattgttgcccttgcaaacatcaaaacgaaattgaaatctctgtcccttgtgaagtgcatggcagtcaaagatatcgatatggaagtgccgctactttcatctagtgagtcttttcgatcataaatcattccaaagttaacctgtttttgtacctacttgcttgcccttgattggaaaatgctttccc

SEQ ID NO: 62539 - DNA, 294 bp, Glycine max
cagtttttattccaaaaattataagcgagctttggattcacagaaacaaacattgttacatcctcgggttgataacaatattctctctatatccatctaaatgatggcatgctactctcaagtctaaaccaaattacatgctacaacaaaaggacttacccaccccatggctactacagcatgccttgtctagttattatgatcaacaaccctttttcttcactacatgatactaatactaggtgagttacaacaaacctgccccctctctctctgcctgactccaacaatatg

SEQ ID NO: 62540 - DNA, 363 bp, Glycine max
acgcttaaacaataatcataatgggactgagtaagtatttgaatatcttcttctaaacaaaggtattctaaaaaaatatattagaaaattaattatttataataaatccatatttataaatatatcattataaatgaaagaaatcaacatattagattatactataaatcatgaaataaatatctgtataaatctcaccatggaataaatatcttgaaatatgtagtataattgataaactattatttttcctcttacggagcaagttgatccgtgagaggaacaataagcctgggcacttttgccatgtctgtagaaagctgggtgcacctagcgacagtctccaaacaaagcaatgatgac

SEQ ID NO: 62541 - DNA, 203 bp, Glycine max
cgtacattctagtggtaatgcgactgttgctgtcaaaatatagcctgatgtagacatgagtacgccaaatttgtagactggaacttcacttaaataatatgattttatatcaactaatctaccaaaatccattagatctatgcctgtataggatcacccttacactgtcagactacaggacttggatattaccttatcattta

SEQ ID NO: 62542 - DNA, 86 bp, Glycine max
taaaagaaccaggcttacctacctcgaggatccaacgttatagcccctttatagcgacacctaaattcaattaaatggccacctaa

SEQ ID NO: 62543 - DNA, 76 bp, Glycine max
aataactccattttccctctgtcttccccccttcctctacacaaaaatatattattagcatgggggaaggtgaatt

SEQ ID NO: 62544 - DNA, 373 bp, Glycine max
gctatgcatatgcacttttgtcttctgggtttgtggatcttgttgttgagtctggtctgaagccatacgattttcttgcattgattcctgttattgaaggcgctggaagtgtcataactgattggaaaggagataaactggtttgggaagcttcttcactttcaatcggcacaagttttaatggtgtggctgctggtgacaaacagattcatcaacaagctctagattcattgcagtggaagtgatagcttgaattaatcttcagtgcaaataatcttctctgcaaatggtcttgattcacatgttcctaacgacatgtattaccgtaccattttctggcatttaagttgaaaaccatgtactcagaatcttg

SEQ ID NO: 62545 - DNA, 174 bp, Glycine max
cccacgcgtccgcccacgcgtccgggcgaaattgacagggttttagattccacaagagactcaaatgcatcaaaggaggagacaaatggtatgccttctctgacaaaagaagaaacaaatggtagtccttcaaaagctgatgcaattctagataaaccagtagaagcagatctc

SEQ ID NO: 62546 - DNA, 216 bp, Glycine max
gttttattgtgccaatttctagagatgatataattatattatgatcgcgcgtgctggtaatgcgtgggttaaaaaaaaaaaaaaaaaaaaaaaaaaaaaaaaaaaaaaaaaaaaaaaaaaaaaaaaaaaaaaaaaaaaaaaaaaaaaaaaaaaaaaaaaaaaaaaaaaaaaaaaaaaaaaaaaaacaaaaaaaaaaaaaaaataaacggacaaaaa

SEQ ID NO: 62547 - DNA, 245 bp, Glycine max
cccacgcgtccggtttctctgattttgttgagatactagatcatggattggtactatgggaacggcattaatgattatctggttcccagagatcaggatttattggacaggcatccttcaccagactattggtcaaactggggaataagtgcaactgaagatcattctagcagttcaagtgtatgtgggggattgcctgagcaatcttttcaacagacagcattttaatgcgatcagcttaatta

SEQ ID NO: 62548 - DNA, 281 bp, Glycine max
gatagtccgccgcatgcaaccacagttatattacgattccacttactgtgaccctaaggatgagttgtactagctgtgctgacatctataactttccaaatccattctcattcaatgcattagatcgaacttccaactgcgagagtttctctactgtgacatagccatggctatattcatcaacggatttgaacgtttggacacactgtcgcaaatacccccatgactgcttccactagatgataaccctaacatacattgattataggccttgacctata

SEQ ID NO: 62549 - DNA, 356 bp, Glycine max
cggactcgtacgcccacgcgtactgttacgcttccgaaaaaaaaaaaaaaaaaaaaatggaaaggttaaaaaaactaatatgaaaatgaatatattaaaaaatcaaattatttttaaattaattaattttatacattataattgaatatcataataatctaaaattttatacatgtcaatattgatcaacaaatattaaacgtattgacacactgtattaattacaactactatttattccactatatcatattgttaaaatgtattaattattgacatttagctatattaaaaaccaaacttatcatagaacaaatggtttaatgtttttttcaatgttttaacactattgacac

SEQ ID NO: 62550 - DNA, 207 bp, Glycine max
atctaacctacttgcacacatgcataacaatcccgttttctcttgaactgccccaggggaactggtccgaaacccgattaaggcacctaaccattggaagattgggccctagaagtacctaaggcacccatctgttgcctaaggtcaaggtcgaaaaccctgacacaatactaactctcgacacatttaaaaccctgagcacacacc

SEQ ID NO: 62551 - DNA, 54 bp, Glycine max
tttcattctcattgccgtcacaaacatttactttaaacaatcacctttaaccct

SEQ ID NO: 62552 - DNA, 70 bp, Glycine max
ccttgggtgccatttatggaccaagacccttcaaccttttgtaccccccccccccccaaagaaccgcccc

SEQ ID NO: 62553 - DNA, 297 bp, Glycine max
gcggagaagaaggacaggcttctgtcttcgattatgcggcatgaggaagaggaatatgagtagggagaacccatgtggtggctgtcgaagtcgaacagtgataatcccgttcatgataaggcttgacatatggatccttctgagccaaggaagatgattttgtctgttaaaatgtgacttgctatgacccttatttcctatcttaattggtctacagaaccatcctttaaagatatgagccgctactactgctactacattctaactgtcatcggtgacttttgattcaccataggg

SEQ ID NO: 62554 - DNA, 333 bp, Glycine max
aaaaaaaaaaaaaaaaaaaaagaaaaaaaaaaatttaaaaaaaaacagagaaaacaaaaaaaaatgaagatacaggaaaaattaaataaggacaaaaaaaaaaaaaataaaaataaaaggggttgccgcaacaaaggtccaaattttacgtacccgattatgcaactctttatctattcataagggtccctaaatttcaataaactggcctacttttaacaacgtcacaactggaaaacccctgtatgctcccaactaaatatccttgcagaacatcacctttttccaaactgtcttaaaatccaataggcccgtaccgatcgccattcctaa

SEQ ID NO: 62555 - DNA, 228 bp, Glycine max
tccgaaggtggcagcccctacgacctactctgctacgcttgcggtggctcttcccattaacatggtaatgtggtattagccattagcattacatcctacaccttcaaaaggtctatttattatctggttccagtgacttatgtatccctctatagctgtattcctgctaagtttggcttatgatatctggatcctttggtcgatttttatcgggttaagacaatgatt

SEQ ID NO: 62556 - DNA, 283 bp, Glycine max
ccatcgccttctaaaggacgagaatcaggagaggcatatagcactgctggaacgactttctaagcgcactaagatccgtgcacagagtgactagtcttggttcatactcatacgcttctagcatctaaaagcctgcatagagtgactaactaagtccaatgaacaatacattttctgagaccctttcaagctaagactggacattaagcaaagctacgaatctatctgcgaattagaagaactagtctcagaaaactgctactccctacgactggtacgacgt

SEQ ID NO: 62557 - DNA, 159 bp, Glycine max
cccacactaccttcaaaccctaatttacatctttttaaatctcaataaacctagggggcgattcggtctcatttaaaaggtgcatagatatgacttatctacaaagcctgtcaatatactaatattaaattctatcatcaacaattactcaactacaac

SEQ ID NO: 62558 - DNA, 59 bp, Glycine max
taacaatctcataaataaataatcagaacgatttagaagaataattgaattccaaaaat

SEQ ID NO: 62559 - DNA, 274 bp, Glycine max
gacagacacatagacacgcgtccgagtacaacaagatcacgacacagcgagagtaatatagtgaggtgaaacaccatgagctgcaacctgtgagataaacagctgaagtcgtgtagcatacattgcacgtgctatcatgactacgttgacgtgcgttacggtttgactgcagacacagagactgttgaattgcctgttatggctgtgcagtcacaaattggggatgctaactactgtgaagcgtgatgaatcggaagcattgactgcgcatgat

SEQ ID NO: 62560 - DNA, 391 bp, Glycine max
cgaagactaatagggtttgtaaggcttatacggttagtagggattgttatttgtttagctggggttttacttctgatgatgatggtgagggtgaggaagatggtggtgagggtttggaaccttcctcgccggggacgccagagagggatgtggaagagaattttgagcttagtgagaatgatggtgtgaagaaaatgaagaaaattagtgagaatgatggtgtgaagaaaagaaagaaaattgatattgaggatggtgatgagggttacttgagtagagggaagtgggagttattgaggaaggatgggtttatgcagggatgggcgaaggtgacggcgtgtgattatcatagagggctggatatggtggttgttgaattttctaatggtgt

SEQ ID NO: 62561 - DNA, 345 bp, Glycine max
acgaacagatcttgctatatactccatttgccgtatctgaaacttcaaacgcagaactgggactcgggcaaataataatttctcagagactcatgtgtatactatgtttacactaacgtacacacttccgtttatcaaatccaatctactgaattcaagagactactagctacttacaactagcatattctggatcatgctgacgcgactctatactctaagctcttgaatggagttggaatctatgctctcactacgaggactatactcagatattgtctgccaaagcgactacaaatctagatctcttgtcaatggcgagaacgccccgcatcatttccttga

SEQ ID NO: 62562 - DNA, 84 bp, Glycine max
  unsure (1)..(84): unsure at all n locations
tggtgggtttatctatctattattctatctactattgggtcgntccatctcacaaaaaccagagagaaaaaaaaaaggaaaaag

SEQ ID NO: 62563 - DNA, 125 bp, Glycine max
cccactcgtccgtccactcgtccgaaaaaaaaatataaaaataaaaaaaaaaaaaaagtaaaatgtaaaaatttttaaacacaaattaaaacaataaacaaaaactattataaataatctttttt

SEQ ID NO: 62564 - DNA, 280 bp, Glycine max
cccacgcgtccgaaaaaaaaaaaaaaaaaaaataaaaaaaaaaaaaaaaaaaaaaaaaaaaaaaaggaaaaaaaaaaaaaaaaaaaaaaaaaaaaaaaaaaaaaaaaaaaaaaaaaaaaaaaaaaaaaaaaaaaaattaaactaaaataaaaaaaaataataaaaaaaaaaaaaaaaataaaaaatgtaagggtggatgataaaatgaattaactaatatttttataaaaagaatcttataaacattaaacttttgatgtacgaagaatcataatatact

SEQ ID NO: 62565 - DNA, 276 bp, Glycine max
tccacgctttatctatctattattctatctattataatgactatccatctaacaactacaataggatatttctgaaaatttttactagaatctaacaccaaaactctacaatcttataataataacaaaaataacattaatgacttaaattttttatttcatttcatcaatcacattatatctattgaattcttaaacatttatactgactttactatatacacacatcaatttatactttatttttcaatttcttaaaatttttttcatattaaa

SEQ ID NO: 62566 - DNA, 407 bp, Glycine max
aatgtttctactttcctagtacacgctggtatcttgaagaaggatcatatcaagagtgatggcgtgtgagcgacactagtctcaagagctatgcctagtgtctctgactatgtcttaggcataatagatacataaactaacaacgatctgtaaactgggaaattcagatctgttctaatggtgaactatgtcatgtggcattacgtgtaagacaccatctaacggataaacgatcaaaaccttcacctccgtaacatcactgtttacgtaactcaatcccgtactggctgccgccgactacgcggtccacgtcagcgtttatcagctgaaccctgttattgctcatggtgtacacggccaccttaccaaaaaacctgcagatattgcgctggtgaccagcgttacat

SEQ ID NO: 62567 - DNA, 162 bp, Glycine max
acgaaaaaaaaaaaaaaaaaaaaaaaaataaaaaattaaaaaaaaaaaaaaaaaaaaaaaagaaaaaagaaaaaaaaaaaaaagggaaaaagaaaaaaaaaaaaaaaaaaaaaaaaaaaaaaaaaataaaaaaaatataaaatttataaaaaatattatgat

SEQ ID NO: 62568 - DNA, 93 bp, Glycine max
agttcatcgaaaaaatatttttttattctgttatcaaaactatattctcaattcggcctctggggatcactaggcagagtatatgaaactacc

SEQ ID NO: 62569 - DNA, 91 bp, Glycine max
aaaaaaaaaaaaaaaaaaaaaaaaaaaaaaaacttaaaaaaataaaaaaaaaaaaaaaaaaaaaaaggacaaaatggaaaaaaaaaaaaag

SEQ ID NO: 62570 - DNA, 233 bp, Glycine max
gaagatcggtagagggatgaatggaaatttacaactctaagatatagtcctgaagaggaggaacaccttgggcataaaaaaccgatcatcgagcttaacttctgatcaccagatacagaaaccaggctgtcataatgaaaacctattgagtcatctattgtaatcatgatagattgtcactattatacttctgctatcctacaagactctgcaggtttggttaatatctatat

SEQ ID NO: 62571 - DNA, 342 bp, Glycine max
attctctctgtgtatttccctacctctcccttcaagatgcagatcttcgtcaagaccctcaccggcaagaccatcacccttgagggggaaagctctgacaccatcgacaacgtcaaggccaagatccaggacaaggaaggaatcctcccggaccagcaacgtctcattttcgccggaaagcaacttgaggacggccgtacccttgctgactacaacattcagaaggagagtactcttcacctcgtcctccgtctacgtggtggcatgcagatcttcgttaagacactcaccggcaagaccataaccctagaggttgaaagctccgacaccatcgataacgtc

SEQ ID NO: 62572 - DNA, 170 bp, Glycine max
tcccgttctacccactcgtcctaaaaaaaaaaaaaaaaaaaaaaaaaaaaaaatttaaaaaataaaaaaaaaaaaaaaaaaaaaaagaaaaaattaaaaaaaaaaaaaataaaaaaaatataaaaataaaaaaaaataatttaaaataaaaaaaattaaatttttaatat

SEQ ID NO: 62573 - DNA, 261 bp, Glycine max
acgcttaattgatcaagaagtcgtggatttaactgatgctaatacttacgtgaaccttggtgatacgtgcaggtgtacatgcggtaacactagtagaagctatgatcactgcttgaacatagagcattcgctaataggcagatgcaggtactatcatcgatgttattgcacatatatacattgattcaatacattcagtataattagaatcaaatacatgcagagatgtttgataaaaaatgtgtctactgtatactatat

SEQ ID NO: 62574 - DNA, 171 bp, Glycine max
gacgcgtacgctctgacatgtctgcatcttaagctttcatttgctgtgatgaggaaatgttgacagggcatgatgaatctgaaactttggcagcgcaagataatggatttgtaaaatctcttgaacgtatctatgaacgatcgcaagcaattgattcatctactgcacaaa

SEQ ID NO: 62575 - DNA, 252 bp, Glycine max
tccaacgacaccttcttcttagtctttcaccattcaaatttacaacctcaccacttttccctaggtaagttcctttaccccaccctgctctccaccaacctctttcatatccatcacaccatcttccccatcttctgcaaatacccccccaacatccaatgaacacattacattatcttctacatcttacaaccctatgataacaatgccgtcaatatcttctacttttagtgcttaaaaacattacatcat

SEQ ID NO: 62576 - DNA, 343 bp, Glycine max
acttaaagtacatataaaaaaaaaaaagataaaattataaacatagtaaggacatataagggggggataaatatcatctatcacgccagaaaactgtaattgtatcaaaatcccatggctgtcttgtacaaaaattgtaaaaattacggcttacgtcaaagcctcaagcttctctttgtatttcacattcccttaatcaacattgaaaaatgtcgtctgctgctgtcaccactcttagccctgttccaagggaactattgttgtccacagatggatactataccccattgcacttgtcattggatcaagagtttatccccatatatctgtcctattatggatc

SEQ ID NO: 62577 - DNA, 60 bp, Glycine max
tcttcctataacacttcataagacatttcagcttattcataaactaattaaaacaacttt

SEQ ID NO: 62578 - DNA, 355 bp, Glycine max
taccacgcattcgcacaaatattcgttcctctaaatgatcatctatacatcatatcataggtagagctattaacccactcgtcagatcacactgctattcatataatgccataaaggattatacaaaacctactaatcttcccttaaattcctcccaaaccaaaatgtacgttatgacctcctactcttatcaacttccaactcacatatactactctaatgtcacatcatattcggtaacatcacacttcaaaccattctacatgattcttcctatcacaaggctacttatatcactattcgtgagacttgagaatctacttatctaccgtatatacaagattgtataattccc

SEQ ID NO: 62579 - DNA, 238 bp, Glycine max
gaagaccatcctccaccatcgaaattcctcacgaacgctaccgacataacgaccgtcgcacccgtgaccccgatgtctccgacgactatcgccgccgccgcagccctagctacgactcatatgaccgccacccggagcgccgccgccgccgttcggtatcgcccgagcacagaaaccctaggcacaccaacggaactcacaacgacaacgctctggcaaagaaatttggccggcgaaa

SEQ ID NO: 62580 - DNA, 354 bp, Glycine max
aaaaaaataactaaataaacaaaaaaaacaaattaaattataaccaaataaactaaaaaccaaggtaatatttcaaacgttcgtgactatcaccacactataattactcaaaaccattcatccatattccctccttaacccacaatgcatacattacaaccattcatctatcaaattttacctcctaacttaatcaaatattgtagaccttctctaataacagaatcttggatacaaattatcaaccttctatatcaacatccaccaactgcagtaaattctacacactctagccagctacaacaacacctcccactgtgcaccctacctcaatatctcccatttccattactc

SEQ ID NO: 62581 - DNA, 347 bp, Glycine max
gttcactgtttggagatcatttgttgcagaatccaaactatatgtgcattatttggaccagaagtctgtttgaggaagggatgggcttatgttagaactctatgaagggagattaatgtagaatgaaaactgttagcttcgttctcaaacgtacaagtttgaggctcaattacacattgattcattatataaatgttttaagaacctgagttagtaattcaacttgtatttataacatctaactttcagtgaaacaaaatccatggtatgataaactatgcagacctgtgacagaccttattcctcttataacaaaaaaaagggcgacccttctataggatccaagc

SEQ ID NO: 62582 - DNA, 224 bp, Glycine max
tcgatttaccattgccaacagtactagttgtaattgtttctctcttcttccttcaatccaggcaagattataaggcccgtcgccatataatttccctatctttgaaagccttaattaattcatacatataatgttgtacataatatacatacatccctgataaaattgtatgaaaaggttccttccaaattagtccttccaatttaagttatatttccaaattg

SEQ ID NO: 62583 - DNA, 280 bp, Glycine max
aaaaaaaaaaaaaaaaaaaaaaaaaaaaaaaaaaaaaaaaaaaaaaaaaaaaaaaaaaaaaaaagaaaaaaaaaaaaaaaaaaaaaaaaaaaaaaaaaaaaaaaaaaaaaaaaaaaaaaaaaaaaaaaaaaaaaaaaaaaaaaaaaaaaaaaaaaaaaaaaaaaaaaaaaaaaaaaacaaattaaagaaccaaaaaaaatctaaaatgaaaaacataacaaaaataaaaaaaagagataataacataataaaccaagaaaaaaacacacttaccaaaaat

SEQ ID NO: 62584 - DNA, 332 bp, Glycine max
tcttcctcttactcttaggaaaaaaaaaaataaaaactattactatataaaaaaataactataatatatacgtataagtcataaattaaactacagaaacataacataataaaaaaaatcaataatatcataaataatgcctcatacaaaacacaatcaaaccttccatataaaatatcaatatattaaacatattcaatccatacttaatattaatcatattctcttcatatactatgacaaacctattcaagaattgtaacataaatcatcatatcaatataaacacactcagattatacccattctaaataattcatcttaccttcccc

SEQ ID NO: 62585 - DNA, 291 bp, Glycine max
aaaaaaaaaaaaaaaaaaaaaaaaaaaaaaaaaaaaaaaaaaaaaaaaaaaaaaaaaaaaggaaagaaaaaaaaaaaaaaaaaaaaaaaaaaaaaaaaaaaaaaaaaaaaaaaaaaaaaaaaaaaaaaaaaagaataaaaataaaaaaaaaataagcactaattacataaaattgaaaatcataaattattacaaaataaacatataattaaaattaattacagtaaattaaaaaactttaataaaaaaaaaaccctgaagtacaaaaataaattactttgagacaaatta

SEQ ID NO: 62586 - DNA, 214 bp, Glycine max
ctttctctttttttctttttccaaacttggcaacacagtttttaattatttaattaataaatggtgggggcgatgacgtcgtcgatggcggccaagttcgccttcttcccccccaatccagcgtcgtaccgtgtcggcttggatgacgtcacggggaagctgaagatgaccggggttgccaccaaggaaaacgtcgacgtattgaagcttttca

SEQ ID NO: 62587 - DNA, 256 bp, Glycine max
ggttcttctacgaagctccaaagttcacagagaatgaccctaactacctaatcctcagtcggcgctcattctacagcttcacttaacggtctcaaataactgaccatttatcgaagggatttgccatcagtggagtgctgtgttgaaagtgaaattaaacattaatgtgttgggatgctatgagaccgtattgtcaagctagtggtgcgccttaattactgcgttgcgcagatatacattgccatctaattacttt

SEQ ID NO: 62588 - DNA, 234 bp, Glycine max
cacttactcctaaattacattttaaaccatcaataatacttttgcgtctgggtttttctccagcgtgggtactcccatatcaaccataaccactcaaactcactagctaccaactattttataaacatctctgattgctccctatcccaacctatcatctcacaaccacactacactgattatataactccttattcgcctcttcaatattatctatctacataaatcaatcac

SEQ ID NO: 62589 - DNA, 372 bp, Glycine max
acaaaattgaactttactataaggaaatcctctatccggagtatacagactccaatgtgctgtgcttcaatgcatgcgactgtctgcctactcttcacacaacaaaatctatcataacaaaacacgtgctacaagcccttcatgagagctaggtgcacagcaatcgaaagatgcaaggcaacaccataatttgtcctataattacatggttgccactatcgcgaataatcagatctcttcggtacaggatatctacatgtacctctacataaccttctgaaatcaacactcacatacactgcactacatctgttctttgctatgtgtgtgcatgattcatttttgacttgccttctacatcatatgaaatca

SEQ ID NO: 62590 - DNA, 329 bp, Glycine max
cacaagaccaaactcacgctaagccttataagttttgattgatcttccaagtaccactacaaagaagggtttcatctcactttatagaggtgcatttaccatcccgcataattgctgattggacaagtgacgcatgagcaatccttgtgaatggtgcattctaatcacctctcgctaaagtatgctctatgatacatacacaatatagccttttttaagtcctaatttatctaacacaatgcccagtgtacaattacacagctgctgcactgcctctatactctattatccatcatcagtaatatactcctgtacttctgttgagcatt

SEQ ID NO: 62591 - DNA, 325 bp, Glycine max
tcttactataccgtttttccctaacaaacttaccactctctaacttctatccaaaacactacattgttccgttttatttacataactctaccctaccattaatatacacatacacaataacaatctaccaatctacacttcaaaatatattccacacttaccataacacactatattattcttaacataataatttcatcatctaccaataacattaacacaacaccataaacaacgaacaccacatcacactcaacatcaatcactacatctttatccgcaactcaaacaacattctcccattaccaaaccacaaatccatatc

SEQ ID NO: 62592 - DNA, 199 bp, Glycine max
ttcctctttctacccactcttcctaaaaaaaaaaaaaaaaaaaaaaaaaaaaaaaaatttaaataaaaaaaaaaaaaaaaaatattttaagaattggttatatttcataacacttgcattccatcttaatttcttttatataatttcacctaatttcattttcttttccttcattttccaaatttttatacttttaaca

SEQ ID NO: 62593 - DNA, 400 bp, Glycine max
tctccgtttttttttgtttgatgatattaatgttttgtttctaaaagttagcatttagtctggaaacgttatagtctcaaacaggtttcacgtctaaaaacgtttgatgattgtaaattgtagtaggatgttgtctaactgtattgtgcacgttaaattgtcagcgattatggctgaaggtctattgacccttatctgaccattgatgtattgactgattatgttaagagatatttgaagctcaaactggaacgtatactagttcagaagatgttggaggagacactaggtggagatcaacctatagccataaaaatttctggcatgaagttgcaataaagagagactgtaaattgatagagcaaatttcatgatagacaggaaagaatgttcttatttg

SEQ ID NO: 62594 - DNA, 324 bp, Glycine max
ctcactcgtactaagatgatataaatgataaagtttcagaaaaaaataatcaataatacgtgtagggtcattatgatgaattgatagcaagtattacagtatcatagaacgggtgatgttgtagataaatctggtcttacatgatgtttcatgcagaacttatggttgctcacatttacaattgatcttgcttctttcagagctgtggggcactctaggaccattatctgcacccactttgatatgtttaacttattcatgttatatgagatatgtgtaagctataaactgcaacgtatactagtgcattaatatgttatatga

SEQ ID NO: 62595 - DNA, 306 bp, Glycine max
gatatcgtctcttgatatattattgctgttaagagatgaccttacctgcggtgccaagacaggaataaaatttcgtctatggttcccggggaaaaaaaaaaaaaaaaaaaaaaaaaaaaaaaaaaaaaaaaaaaaaaaaaaaaaaaaaaaaaaaaaaaaaaaaaaaaaaaaaaaacaataaaaatagaaaacactaaaaaatatgatgaaatcaactgatcattaagggcacctaccaagcatatggataacttataaatggtaaatcaactgtgggaaagacatggtatgaaagatatactgctg

SEQ ID NO: 62596 - DNA, 227 bp, Glycine max
tgatacgctcactagatatattattgctgttaatatatgaccatacctacttttccaatgcaagaattaaatttactctatggttaacctaaaaaacattaacaaacacaaaaaaaaaaatatcaaaaaaaaaattacataattctcaaacactaaataaaatcttacaaaacttacaactaaaaaacaattctctctaacatatacttcatccaaacataagtaaa

SEQ ID NO: 62597 - DNA, 443 bp, Glycine max
cactgtcttccttctctagggtttttagctcctccaaattcttcgcccacccacgcgtgcgctggagagaatccgtttatattaaaaaataattatttatatatcaaatcaattattttttttattcaaacaaattgaagacacgttatgagctagaccttgacatttttttatcatttatatacacatgcaactctcacacacacattcctacataatgttattgatttcctaaggataaataccaattcggatctttttatcctcattccatatacttgttaacttgaatataacacactacacataataacaatgaactaagtctagatattgtattgcttcattgcccgaaataaactaaatttgtaataaactcaataatttaatttttttcaatcaatacttaatgattgtgtccaattcctagtggaaaattactt

SEQ ID NO: 62598 - DNA, 296 bp, Glycine max
acccacgcatgcggtggacgagcgagcgagcagttacaaagagaggatctgggacttcaaaggcaagggatggcgcggtagtaatcacagacgtcttgcgatccttgcagagtcataagtgtgacaatacaacttcgtcatagacacactctcacttactcacagctgaactcgagtagtgcttcacacgtcttgaaagcgcattcgcagaagaataaaaggcttccttagaaacgaccaagttcgcgctgcgctggttcaagaacttaggacatctaacattggctagcaacgat

SEQ ID NO: 62599 - DNA, 131 bp, Glycine max
gcgaaagaaaaaaatgcgcaccgccacaaatataacataaaaaaaaaggggcggccactttagagggtccaagcttccgtccccttgcatgcgacatcatacctcttctatagtgacacctaaattcaatt

SEQ ID NO: 62600 - DNA, 221 bp, Glycine max
attccctgctctacccactcttcctaaaaaaaaaaataaaaaaaaaaaaaaattaaaatttaaaaaaaaaaaaaaaaaaaaacaagcaaaatgttaaataaaaaaaaacaaaaaacaaaacaaaaacaaaacaaaaacaactaatacaaaaacaaaaatcccttcatatccccacacttcaacacctcctaaacccataattcaaccttttcttcatccac

SEQ ID NO: 62601 - DNA, 364 bp, Glycine max
gccagagcagggtcgctcctcaatggggctcttcattggtttgtcttctcggagagcagggaggatcatgtgattatcgcctttgatctcgtggaaaggactctatcggagattcctcttcctctcgctgatcgttctactgtgcacaaagatgcagcttatggtctgagaataatgggagggtgtctcagtgtgtgttgctccagctgtggaatgactgagatatgggtgacgaaggcatatacagtgcggtcatctcggactatgacctttcttatgcatacttctaatcggatttccccatatgcacaatcaaagatggtgagattataagatcaaattgcgcaggaactggaagatacag

SEQ ID NO: 62602 - DNA, 269 bp, Glycine max
aaaaaaaaaacaaacaaaaaaaaaaaaataaataaaaaaaaaaaaaaaacaaacaatagagaggaatccaaactaaaaaactcaaacatacaacataataacaaataacaaaaaaattacctaaatacaattaactaaacccaaaaattgcccccccttttttgggaacccaattttacttacccatctttaaaacctttcacttcttctttatttcccccaatatcaatctacctgccaaccatttaaaaaattgatctttggaaaac

SEQ ID NO: 62603 - DNA, 174 bp, Glycine max
taaatttcgactcaattcacttacatcttcttccaaaacacttattaatcatttaactcacttctattcaaaccatatactatcaattaacaatcaaaaatatattaacataattcttccaatatataatttacacacttaatatataattattaaataattcttccttttttt

SEQ ID NO: 62604 - DNA, 114 bp, Glycine max
taaaaaaaaaaaaaaaaaaaaaaaaaaaataaaaaaaaaaaaaaaaaaaaaaaaaaaaaacgcatatatataaaaatataaaaaaaccattaattaataatacacaaatattaa

SEQ ID NO: 62605 - DNA, 214 bp, Glycine max
  unsure (1)..(214): unsure at all n locations
gaattaagggttacgattcacggagaagggagccatgagaaatcggctatccacattccataggaaggcatgcaggtcgcgtcaaattactccaatctctgacatcggggaggtcagtgacaatanaataatcaatactcgggcttcatgtgagtcatgcgtacattgtaatgaagtacatatcttaaatcccttaactgagtgatccattgga

SEQ ID NO: 62606 - DNA, 432 bp, Glycine max
ggatccttctcttctttttccctctttctccttttcttcttcttctcttcttcagactgaaaggtgttttgaaaagccggttttggagttctccccttccggtgtttcttcagtatgggagcggtgtacgacatcgtgaagagcggcgtcggggttgcgtcgatgggtcacgcctgagctggattgattttgtgcttgattcaagaggagcgtgaatttgacgagttgagtagcctagacagaataagccactccagaagcaccccaaacccccaccctccaacccccattgtccacaagcacactaaatccatgataaagagatcagatttcgagaaagatggctctgtctcttgcaacaagtgtagaccacactcctgcgacaaaatcttcatccttcccttggatcccataattatggctagtggtatt

SEQ ID NO: 62607 - DNA, 269 bp, Glycine max
atcattgtcattgtacgactctctgattagtttttcggagttcaattgagcgcaacgggatgatttacgtatcatgttgttggacatattagtcttatggggtgttgcgtataccctataataatgccttcggtgtctgctgatctccgtctagtttcttctatcaccacgatccattaggaaacttattttaatcgcctgaaaaatctcgaaaaatgagatcgtcgtagtaatcctatttaacactacgtcttgtcatactctttcac

SEQ ID NO: 62608 - DNA, 371 bp, Glycine max
gccactcatccgctccttcatacttttcctcccttaagattctactctatcactcgcatcacacacactcgtacactctcatactctctctctctctctctctactacctatcaacaccaagccatcctaccctaatctctcaatgctaaaactcgcaacctcctccatcctcaccatcacctccctccaccttctctcctccaacatgccacactacccattccatgacattcctccttctctaacacacttgactaaactcatctccaacatctaccccccgaatactccacttacacacattaatcctatatcacccactccctcaactctccctttcattctcacaacccactacattcacccctac

SEQ ID NO: 62609 - DNA, 272 bp, Glycine max
cccacgcgttcgcccacgcgttcgtcttatctctgcctgttgtacgtcttacatgagcggctgcttaaagtactaacacatcaccacgattcgtgatcttctcatgtacccgacttgtggtcaccactgtgacccatatctgtatcttctggcgaagcactatccgcactttctgacggatcaccgttatcactgttcgacttcttattgctatctgcttaaacgatcagattattcatgggtgaaaagctcatttgctcacttgtataggt

SEQ ID NO: 62610 - DNA, 276 bp, Glycine max
ttcttcttaacattttctctaatacgtttttttttcattttgttctaacacaataaagtccagttaaaatttctttcatcccttgataataatatcacacatcttatcacatcatcttttatcacctttatatacacatttttctcacatctttattattttttactttattaatactatacttataatcacaaaacatataacttcatcccaatgatattcattccatactctctaatcacacaaatttcactatcaattcctatccctttaatt

SEQ ID NO: 62611 - DNA, 194 bp, Glycine max
cccacgcgtccgcccacgcgtccgcccacgcgtccgcccacgcgtccgataagttctcggtgagttctgaaaaatgggttccaaggttttgcttgttctagttatgttcatggccactatacttctgatttccgctgcacccaatgaataccagaattttgacaaaaaagatgggaagcctgctccaaatgggg

SEQ ID NO: 62612 - DNA, 335 bp, Glycine max
gcgttttagccgcgacgcacttcataagctgagagcctatggcgagggccgagtactgccaagaggcagcgacaacaacgtgctcaggaaggagtatatacaggagcttagcaacgataatatacgtggggataacatggatacgactttactgaagacttgacataaggtgaattgaagaccgaaaacgggtacggatacggatgatagctctacagctgaagctgggctcgcactgctgtcgtactgaggcactcagacgaagcaactggcttagaccacaatgacgacacagactatgtcagagatctgacatcaccgggtcaagactggac

SEQ ID NO: 62613 - DNA, 366 bp, Glycine max
tatgcgctcaatcaactaatgggtcgtctcggtggccatcacacattctacttcgtttgatgtatatgtgtcgggggaaggccctcatcatcatttggaacattgaccatgtctactcttatacacccactaccactggttacacccttttacaatctctttggcatacccttaccttttaactataaataagctatccatgttcataaatgttacatgctgcatgtgcagtatccctggttccaagtctaactctacgatgaactttactgattaaccaccatctatattgaacgcttctatatgacatcttctcccattcatgattcagcaaatgcagcatgcctacattgaattttaatttac

SEQ ID NO: 62614 - DNA, 177 bp, Glycine max
gagaagatgacatagtgtgtatggattctactggtgcatgtgacttatgcagggatgtctatgcaaagtatgcaagagggatcgactaccagtccatgaaagctgcgttatacgtacaaatactctcaactgtggaccagctattttgggacttaccgtagactgacgataggaact

SEQ ID NO: 62615 - DNA, 323 bp, Glycine max
cgacccacgcatgcgtccgcatcaagacacacatcattagcataggtattaatacgagggctgagtactcgcaggtggacgagacacgaacgctcgcacgaacgctcatctactggaccttagccttctcattatacatggccatatgctatatatggcctttccgaatgaatcacgtaacagacgctgaacatataaaccgcgcatagcttggaatgcctgctacaaagctgtggcttgcctgttactgtgtacatactcaaacaattcgacggaaccttcgactcagacgaccgttcaaatccagactctatcgccgatat

SEQ ID NO: 62616 - DNA, 241 bp, Glycine max
attacactagaacttgtgcttgatttatttgcatgtcgatagcagaaggatggaagagctgggagtgtgccacagttagcacttgtaattaggtaaactaatgctgacatttgcctggagtgagtttaggaccatgtgaattgtcctgctactttttggatcattgtttcccttaatatctgaactcttcatagcttgagttaaggatcataaagacctatcatgtttagcatgagttttg

SEQ ID NO: 62617 - DNA, 131 bp, Glycine max
ctttatgcaatttatgccataggtatggacttccagcccttgaaacctgcggtcgaagaacaaggactttcaactgaggacctgccattttggcacttatcggagacgtacgataggaactccttttccca

SEQ ID NO: 62618 - DNA, 224 bp, Glycine max
tccaataaaaaaaaaacttaaaaaaaaaaatataaaaaaaaaaaaaaaaaaaaaaaagggaagaaaaaataaaaaaaaaacaaaaatgactaccatattttaatgcccacatcttacctgggctgacattaaaaccctttccatttttacattcccccctaagcaatatttactcccctttattgtacaccttatagcctgggaaaaccccatttttacccaat

SEQ ID NO: 62619 - DNA, 342 bp, Glycine max
tacaaaccctctcaccaaacctacatcgatctatctgtcactttataaaatatagtcgggggactatgtcgtctctgtcagtatcaatccatagtccttacaggtagtgagtatgttcctccttacttaatctattgtgtgaccaaagtcattattattaaattacgataatgagataaccatgtcgatgaaactgctattaacttccctatacatttcagtgagtcttttcatagcaacattatgcgtagatcaatccaacaaccgctacgtcttttactcacatggcgaccctcttgatactgactatgaatattacatgaagccggccataacagacaa

SEQ ID NO: 62620 - DNA, 169 bp, Glycine max
acgctgaaactacttcttacgaaacgggactacatctggctcctgagcgtacgtactgtgcgccatagtctaaggtctgtggagatgctcatgcacgcactgaaccggatctattgggtcggcctcaaagacgcttgactggtggtttggcaacacgccgttatactga

SEQ ID NO: 62621 - DNA, 463 bp, Glycine max
  unsure (1)..(463): unsure at all n locations
tcgattttaattactcttttaattcttactatataaaaatattagtctacaaattagttatgaaggtatcaattacttcttttattacgaaattattttatngataaacttagtgtatgaattattctgttaatatatttcatagtctaattataatctgataatactgactcatatttntgatgccaaaagagcttaaattaacattacaaatataaagggatagaaacttaaaaatatcaatgttcaatactatanggagattaaaaaaaaatanaaatacattagactaaagaaaactgacttttacaaattataagaagattaaaaaacaattgaaaatataacattatgcgaaattaacaaaaggtaaaaatgggagaaacctattgtggaagtaatttatactttagacaagttaaattcttattttattacatgtaacggatatttgatgcttgtg

SEQ ID NO: 62622 - DNA, 184 bp, Glycine max
atcaagcatgtggcggtttaacgcagattctaggagacgcatgaacttcattcaccacagggcgagcgattccgatgtcagactgaccccgaagacaagatatgccgagtatcagctcgaggagaacacatccagtgctgatggttctgctactacgtgctcatagtagaccctagacgtgaat

SEQ ID NO: 62623 - DNA, 73 bp, Glycine max
ccgaaattcggcgtttccgaacccctttgcctttaggctcagccccgacctgttggggcgccgttttgcaggt

SEQ ID NO: 62624 - DNA, 372 bp, Glycine max
ctgattcatggctagtctatagtctattgtgtcgtggctgacttctctctcgactcagcgtcacgtctggtttggcagtgctcttacctgcaacttttgtattcttcttttccttttctattctttctctgttcattcttgctacttccactccttgcgtactagtaatcccccttcaataccatccatcagcattcatattttcacaattgttctttcaattcccataagcataaactgaattaaaaattgaaaatcagagcaataagaacacgcattctttacttccaattcccaattcttcttctgccctagattgtaccccctttattattgcactacagcaccactgtgcatcgatcgatcgctggt

SEQ ID NO: 62625 - DNA, 373 bp, Glycine max
  unsure (1)..(373): unsure at all n locations
cccacgcgtccggccaagcgaagccgagtcaagtgaagccgagctgtatgacagataaggcgggtccactttgatgaccgtttctttctttcaccttcccaacctgaacgaacgtgtacgtgtgcatcttctttctttgtatataaagaatttcaccaccatcattcttcaacccaatcactcttctcaattctcatattccaatgtcaaatcctcaaacaaacaataaccgtcaccagcccagccgcctgcagcgccgcgccccctcctccctgcaaataaaccgcgccgtcgagtggaacgtcgccatccccctcctctccccgctcgcatcctctccgncgccgatggagctaaaaccgccgcaagagcc

SEQ ID NO: 62626 - DNA, 110 bp, Glycine max
tcacacccttttaatctcgttatcacaatttagtgaaccatagtgcatctatcttacttgatctttatatctttttagttttctttatatattgttttacttaataaaaa

SEQ ID NO: 62627 - DNA, 253 bp, Glycine max
catcaaaactcaatggaattttgcttcggttttttggaaaaacttacaaacatgatccccaaaagagaaacccagaaatgtaaaccaaagaaagggggcctataaatgggggggtattcaaacactaccagcttttgtctccatgattcacccaattttgaatttaaccaaggaaaaacatggggggatgtctgaaacctcccggtaaaaactttaacaccagtttgtgtcaccaaaagagcccgttaaaatt

SEQ ID NO: 62628 - DNA, 372 bp, Glycine max
cccacgcgtccggttgtatcttttggagggtacaatggacgttacaacaatgagaaaggcaaaggtgatattgtatcagtcttgaaggctgagaaagaagagttggaatcatcactgatcaaggagaagcatcatgctcttcaactaaagcaagatctggcagaagctgagtcttgtaactctgacctttacaaggtagtgatcaccatggcatctcccagttaaagcagcacctatgtcaccatttttcaaaccaaagatctgctacttcttagggatagaggtgaagacataggtaagaagacataggtcatacttgagttgtgagatatttggatgcaaattgggcaggttctcccactgataggagat

SEQ ID NO: 62629 - DNA, 402 bp, Glycine max
  unsure (1)..(402): unsure at all n locations
tcgcccacgcgttcgcccacgcgttcggaataaacccatgaatcaaaatattttgttgtaagcgcaggatttaccaattgctatgacatgcattcatgagttttctagttatatttgaatgccatacaaactccaacttaatattcatgcgccatagaattgagagaactattaatgctaaaaattaataaatgacattattacacatacgaacatttttttctcgcatatgatcctgaatcgcaaaagtagcggtttttttatatctgttaatatggaattagctcaattcccattcacctagatatttttttcactggctaattcttgctttatgagaagaatagcaaaaataattttgatctcacatagttaggagtatgacccgnatcgtagataact

SEQ ID NO: 62630 - DNA, 481 bp, Glycine max
  unsure (1)..(481): unsure at all n locations
tactcggtctcggaattctccgggtgcgactccacgtcgtctcgtcccacgtcgtctcgtcagtaaagtaaaagtaccattcaaagtgttcactttcagctcttatctcgtgtttgagggnntttcggttttgtgactccaacgtctttgatctgtatcgaaatctcttaanngtttcggatcccaggtctgagcnnaatctgnngttggtagaatctctttggnntcttagagtagtcaagttttactgtctgaattagtacgatcanaattcctatctgccttcgatcctttttgcntgatgcataatgtctgatgacttcgggtgtctgggtcaaaaggaagtatgtgcatattcgcgtaccagcagcgaaatggaaaggaaatagcctgacatactcgttcagggattgaaaaaagtaattcagctataacatagatacttaaaagatgttaagaaagagttctgttgcaatggaac

SEQ ID NO: 62631 - DNA, 307 bp, Glycine max
ctgactcgtactctgactccttttcgactctgctttctaagtagacgatacacacttgcaggcaggttgcattatctcatctttatgtgtatctcagacctatcattcatcttacctatccgatcctaatattcccaatgctcctcacggacaacctatatatacaactaccgtttgcctcaccacatgccactataattctacgatcccctgatccagtctcacgcattgcttaatacggattcagatgttacagatagcatgatcataaacgccatcgacactcaagctgctgacatgacttata

SEQ ID NO: 62632 - DNA, 381 bp, Glycine max
gatctttaaccgatagtaaatatcacttcttaggagcaattttccatggggatatggtatttgttctacctgcgtaagtatgcactgtggctttgaaaccaaagcagtcccttgtcatgaacaaaaggttcaatgagttgttgtaagccaaaacgacactaaattaggggggaaagaaagatggtgtagagaagagtgaaagcaaaggaaaaaaaatggttggtaccagctgatgtatcaagaagagctagaggtagaaactatgcataaacaaccatactgactgccttgtggctctaagaatttttctctaacttataaatgtttgtgtggacattctatattataagcactatgcaatttgcttttaagaatttatct

SEQ ID NO: 62633 - DNA, 193 bp, Glycine max
accacgcgtgctccaactcctacgaacactcttcctcatcatacatatcatacataccgcgacagttatatctataaagcagggtagggtccacacttacagatatgtcatcctctattaatactatcatctcccagacatcacactgtatatatacacttagcctattatacacctaattttgacgcatttt

SEQ ID NO: 62634 - DNA, 276 bp, Glycine max
acggaagcagaaaccaatcacatactgaatcactaaaatgtcaaatttgccccaatcactggtcagggggcacagactgtcgggccgtgtagcagctccaacgccttcttacactggcttcccacgagcaaactgctctatagcgtcacctaatctcaattaactggccgtcgatcaacaacgtgctcgacctgaaaaaccctgaacttacccaaatcaatctccttgaactatataccaatatggacatatttcaaaatatcgataaggccctat

SEQ ID NO: 62635 - DNA, 68 bp, Glycine max
agtgatctctctatctatctttctgtctgtctttctgaacacgttgatggattccacctctgggccct

SEQ ID NO: 62636 - DNA, 234 bp, Glycine max
ttcgacccactcttgtcgaacgcgatggttgacgttgactttggaacctctttctcgcctaatcgccacatccacaacgggtttatctgaacaatctcggcgatcttgtctctgttaaaaaatctcaaatcttcaattatatctatcaaatataattaatttaataattcgtctcggcctaataagcttcttagcaacataatcatcatatcgcttttcgtgcacaataataat

SEQ ID NO: 62637 - DNA, 222 bp, Glycine max
  unsure (1)..(222): unsure at all n locations
atcgcatctggagtttgcgacctcgtcttgtgatttccatggagggtgctgggatggaagagatgtatatcattaatgatgatgattataattacatgtcttangctctttggaactttgtcgctggttgtgtggattgtggaattcatgacacttgtgataatgcttgcagtatatgccttgaagctttctgtgatagtgatccttccacggtgactagct

SEQ ID NO: 62638 - DNA, 93 bp, Glycine max
tcgaaaaagaacaaacataaatacaaatctaatatatataaaaaatatatacaaaaaataaaaaatagggaaaattggaaaaaataaaaattc

SEQ ID NO: 62639 - DNA, 307 bp, Glycine max
aacatcatctggatccacaagaatcaggtaacttgaactagtagcagctcatcgggctttgggagaatgctaaacacaaatgctgctttcactagttaccaactgttggactatcatagatatgctgactggtttactacactaacatttaccacatgttacacatgatagacttacttatcatcttgaatatcagctgactagatacaaactatccgaaacttgtaatccgttctgacaactacgcttgtacatgaatgctgattaggaaccagaagaacatgaaacgcctcagaatactacctga

SEQ ID NO: 62640 - DNA, 148 bp, Glycine max
gtcaaaacttgcttgcttcccatatatctcataagtcttttatagaagttaatgaagaatgcggttaaggtgcaactttcaacgctgcaactatacaatatgtgtgtgccatatttccaactgaaatagactttttatcttgccaccc

SEQ ID NO: 62641 - DNA, 122 bp, Glycine max
ggctaaccaaccctgacactccttcttctccgcttcctcttcgatcatcgctggagaatgcggccgaagttcgacccctcccagatcgtcgacgtcttcgtacgcgtcaccggcggtgaggt

SEQ ID NO: 62642 - DNA, 178 bp, Glycine max
acgccgaccgcaacgtccgaatagaacaaagaagtttccaagcctgaacacacaatatattctccacaaaatggggtcaaacgagatatcacatcaaaacaacacacaatactaattccttactgataatcaaggtccacaaactactatcacattcacacgatgcgattaaatagca

SEQ ID NO: 62643 - DNA, 103 bp, Glycine max
aaaaaaaaaaataaaaaaaataaaaaaataattttaaaaaaaaaataaaaaaaaaaaaaaaaaagtaaaaattgaaaaaaaaagaaaaaatttataataataa

SEQ ID NO: 62644 - DNA, 114 bp, Glycine max
acgaagaatataagatagaatattttagttagattttgatcttacacaataaactatcaccaagagccacccagtgccacctgcaatgggctccttcttctacctatccttctc

SEQ ID NO: 62645 - DNA, 134 bp, Glycine max
acgatacgccacgcgtactgcctggttctctctcataacattacgcaccagacagatatcggggatcgttgaaactatgtccaagacacatacaccataataaaacctttataccatctgaatctaacatctat

SEQ ID NO: 62646 - DNA, 343 bp, Glycine max
tagaaaaaaaaaaaaaaaaaaaaaaaaaaaaaatataaaaaaaaaaaaaaaaaaaaaaaaaaaaaggaaaaataaaaaaattataaaaaataaaaaatttaaataaaaataattacataatttttatttttttttatattatattaaatttaattaacttttattatttttttttaactttatttattttttaaattttttttttttcctttttaatcgcctttatttttattctcttttctttacctttcttatattcttttattcccatacccttttcccttattaactttttctcatatttaatttttatttttaccttccctttatcttttcattaatt

SEQ ID NO: 62647 - DNA, 52 bp, Glycine max
accaccttccacgcgttctccacgcttccgcccagctttcgaccaacgtccg

SEQ ID NO: 62648 - DNA, 260 bp, Glycine max
cacgcgtccgataagttcacagtcaattcttaaaaatgggttccaaggttttgcttgtttgggttatttgcatagctgctatacttgtgatctctactgatttgtcacccaatgaatactaaaattttaacttaaaagattggaagcatgctccaaatgggttatatgatatcatattgtgttactgttgttgtggtgtgccttggtatggcttcttttgtgtcccttattattgtggctgctttggtggcccttattat

SEQ ID NO: 62649 - DNA, 136 bp, Glycine max
gacgaagaatgctttccgtgtcttctgatcatgacacacaggggatttcgatgttgggaactgaaggagggtagggtcaacctattgtgggttgcactgatccatgtaatccataagctgtagcagaccttagtca

SEQ ID NO: 62650 - DNA, 196 bp, Glycine max
cgctattcaaatcatgcacccatgctgagacataacagatatacactgctcgtacgactccggagtccctacggctcgccgaatcctattcacaattacatcgcctcttcacacgcacaaccttgcgtccaatacgccagctattacttcaaagatcgctaaatctgactatagtatcccggagttcataccctct

SEQ ID NO: 62651 - DNA, 324 bp, Glycine max
ctttgcatctctctctacaataatccatccttttcctctcaagtaaattattgtaccttaacgagcttcttggggagatctaatatcaatgaaaaattttaagacagaactcgcattcacagggaaatctaatcgcatagaaacagtaaagacaacacctttttatctctacacaagtgattatcgccgctgctgtgaatagctcgtgccataaatgattctcccagccaatatatagtattcatattatcatcctccgactcgagcgaggattatataatataaacctgattctaacccatcaactaccagcttattcttaat

SEQ ID NO: 62652 - DNA, 275 bp, Glycine max
tcccggtcgaccagctccgattttgcagcctgggtcaccttagcttaaccggttttttagccttggtaacctgtgccaatggtctctaacctaaatctaaaaccggttagttactcaaattacctatttggcatgaatcctgccaatatcaaattatgcaataaattaaagttggggttggatattgtctttttggaaaatctggtgcactctgttctggtgggtggcaccttggagtcctatcatggaaaaaaaaacccattttatgcgggttc

SEQ ID NO: 62653 - DNA, 459 bp, Glycine max
gaggatatccccctccccttagctttttcccttttaatttttgcaaattcattctgacttaagacttgctaagaccataattgtaactcaaattttgaaccttaattttccttaaaacaagtgtattagaagcagtaataagagaaattagatagtatcaacgcataggaactcatgctttttcctaaaagtaattagtcaatcatcaatcatataatacattttggcctaattagttgatatatcgatatagaatattggtgggaaagagaaaggaagaggggaagagagaatagtaacaggagagagagagagagagagataaagagagatcaaagagttgtgcactgcacttgttattgtttcagtctgtctaaaatgtacaacaccaatgcttatttataggcagaacccaacagcttctagttatgaaatcttaactaacaatagctgcctaac

SEQ ID NO: 62654 - DNA, 435 bp, Glycine max
accagacgttcgagcacgcaccataatcagcattgcatatagactaccatcaggggtggacggacatacaatgatggaagcaaatgcactgcggctcatgctactcgatacaccgccctacttgctgaagcggccatctttatccgaaacgctattgcatgagtctgcagtccggaacacgggcctataaaagagggccatgcatccatctatatcatcaattcacacgatgacagagaacccaacttaggcctagccatattagaaagcattgatcatgcaagcgccacatgcaacgacaacggcattgtacttgctagaggggcagacaccatccagaatatcagatgctagtacaagtgaagagcgagcacacatggagaatcggctgtctaactacactgtggcttacgaagctctaggatacgctcaacc

SEQ ID NO: 62655 - DNA, 86 bp, Glycine max
ttttgattctttatgtaagaggcttggacatgccatcaactatgtcgctatgaggttataatgtggtcttgcagatcttgcttgct

SEQ ID NO: 62656 - DNA, 267 bp, Glycine max
acaaaatcaccacctccaaagtcttctctatttagaatcatctaatctaactgagtattctggtccttttcgagcagaatgccgactaacaatacacaattactaaagaaccacattctcattatgaactacgctgactaccagaaccggcatcttctgttcaaggaactacacatcttattactcacaaaatactcctgatgcttatctactaccttttctaggcaatattcatcgactgcaccaaatacctatcacacatccaag

SEQ ID NO: 62657 - DNA, 164 bp, Glycine max
cacgattacaaataagcttcgtttggctgtgtctttctctttaaccaagcccctttcgcctgtctctatcggttctagctgtagagattactatttttccaaccctctctctttctctaatcatcccccttttccttctttttcttcttcttcttcttcctcct

SEQ ID NO: 62658 - DNA, 289 bp, Glycine max
aaaaaaaaaaaaaaaaaaaaaaaaaaaaaaaaataaaaaaaaaaaaaaaaaaaaaaaaaaaaaggaaaaaaataaaaagaaatcctatataaaaaaatacaaagcttaattacacttacatacctcaacataaactcattctataatataacctaatttaaattatctaatcctcatttaaaaacattttaactatcaaaacatagacataacagagctaaatgccatcgcaataaattatcgttatgtcagttatcctaatactcaacaggcccatacgcaatattct

SEQ ID NO: 62659 - DNA, 389 bp, Glycine max
gtttagtgtgattgagttaaagttgctgaagacaatgagttggacaataatgcaattggaacaatctggaaatccttctatagatattcactgctatgttgatgatgccaataaaattccttaatttacaacaaaaaaaaaaaaaaaaaaaaaaaaaaaaaaaaaaaaaaaaaaaaaaaaaaaaaaaaaaaaaaaaaaaaagggggaacaatttaaaggaagccaaaatttaaaaaacaaagaatacaaaaaaataaaacttaaaataaaagagggcgggccctttttgagggcccccgttttttaaccattcctggcggggaaaaacctttttttacccgccccaaaaacccatttcacggagccgcctttaacaagctggggtttgg

SEQ ID NO: 62660 - DNA, 328 bp, Glycine max
ccgaaacatgcctcttcgaacgcattccttttgagctcgttaacaatcgcagatgctctggcttactatgccaatgatgctgcgcttgatactggtctgaagagtgccactatgatgtgcacgcttatggttatgacccttgcaatgacctttggcatggatatatgtgcaattagactgacacatatactcactcacatcagcactggcttcttaaacatcaaggttgaccacaaggcatgcccggaacctaacattgaaccttgcgagataccttttgagcattaccctgagcatcacacttacaagcaggctgaaagtgctttgc

SEQ ID NO: 62661 - DNA, 55 bp, Glycine max
taaaaaaaaaacaaaaaaatatataaaaaaattaaaaaaacaaaaataattaaaa

SEQ ID NO: 62662 - DNA, 308 bp, Glycine max
cccactcgtccgaaaaaaaaaaaataaaaaaaaaaaaaaaaaaaaaaaaaaaaaagagaaaagaaaaaaaaaaaaaaaaagaaaaaaaaaaaaaaaaaaaaaaaaataaaaaaaaaaaaatataaaaaaaaaaaaaaaaaaaaaaaaaaaaaaaaaaaaaggaatcttttaatatgaatcaaattttactataacctttaataaaaatttaaattttttaaaaattttaactaaaataaaataaattgatctttttttaaaaaatttaatatttgaaaaaactttaacttaacaaaataaaatttttt

SEQ ID NO: 62663 - DNA, 169 bp, Glycine max
cccacacgttctataaaaatatactatcttattctctgttctaccttcaccatccaggtcaggtcttataatttgtctacctttcttaacatactacaaccttatacaatccctacttactttcaaaaaccctatctttttatacatcccagcttatactccctaactt

SEQ ID NO: 62664 - DNA, 305 bp, Glycine max
cagggactacgatttgtacaagggtccttcagttgatgtagacaccactgagtggtcagggcgatcattgcatgcgaggagcagtgtaacaactgatccaattgaatctggacttacggtgagtcctgatcatccagtcaaccacaataggcttccttacagtggcatcacctatacatctggcacaatattcttaaatatgcctgatataggggaacatacctttataatagatgactcaaatgggccacattggaagatgactagaactaatggtttgatcaacattagacctgctaataata

SEQ ID NO: 62665 - DNA, 324 bp, Glycine max
gtacaacgctcgctgcaaccattaacatttccattaccttgtgggtactaaactctatggtgaacttttttcatgacgatcttcttgccgaactcattccataaacatgcccctgtaactccctattctaccatgcattatttatttcatgtcttatttgaccaatgcttatacctaattctcaatgaaactacaaagcaatctactggtcattccattgatgttcacttggacccacaattggacccctatttcacaaagtatttcccaaacaatcatcgattccactaatgaacctactaattctattggcagcaactttaa

SEQ ID NO: 62666 - DNA, 342 bp, Glycine max
cccacacgtgcagcatgatatggaatatgcaagtgatgagacataaaatgagctctaaatatacctctgtatgggcatgagtcttaaaattatgctaaagtggctgatagatcatgagattaaccttaaagctaaatggaaagctctatcctaatatacctactaatattcaagcatagcatagactctatactaagaactaggcaaataatcatgctggatctaatttctgagcatgaggagccaatgatgataccacagatgaactatctgacgcttaatatgaccctgctagcagaatagcatacagtgaaacatagaagatgaaatatagtatgacag

SEQ ID NO: 62667 - DNA, 93 bp, Glycine max
aaaaaaaaaaaaaaaaaaaaaaaaaaaaattaaaaaaaaaaaaaaaaaaaaaaaaaaaaagaaaaggtaaaaaaaaaaaaaaaagaaaaaaat

SEQ ID NO: 62668 - DNA, 374 bp, Glycine max
aattcccagctgcgacgcactcatactcaaaacttgctattgtattgcatcttatcttattgtatcgtattatatctcatgtcatgcgaattaaattcgtcgagtcgatctaaatctcacccgccctaactcgttctctttcttactttcaccctttgttcttatctttcctcactcaccctttatatttcattcctatcttatccaaactctttcctccacctccattctcttctcaatatcaatatttcctctcacttgctcccattcctatatctcttttctcctctccaattacccttattattattctttcttacttttctatctcctcacatttcaatattacctccaccttatcatctcgttcttct

SEQ ID NO: 62669 - DNA, 309 bp, Glycine max
cccacgcgtccgcccacgcgtccgaatttgtctaggttcgtgttttgtccttgttttgtgatttgcgtttttgtttacatcttgtttcgttcttgtttgcgtcttgtgttctgttatttgcgttcttgttcttgtttcttgtgtctttcacactttgtgtaaaaaaacataaggttgcagaaatttttaaaataataaatataaaaactgatttactataaataatcatacataattaaaaataatagggcgacctttttataggattcccatcttactttccctttcattctactttatatatttttt

SEQ ID NO: 62670 - DNA, 391 bp, Glycine max
  unsure (1)..(391): unsure at all n locations
cccacgccgtccgggcagtccaaagccatcatttggatgatatatgttattagtatcatgggaagtggtagctggcaatctcatcgtgtttgcttagggctttctaagcattctttcaagggtcgatagttagatagggacccanatattctaccgtttcctgtacgtctgtgcacttgatagcataaggtggtaccttagtatgaattgcacgaaataacgctagcacttctcttaatttggataacctagctttaccatatgtggaaacctcacatggctttacacacatagttgtcgagaccattcnnntccgtctaaatagcttttctgcttnntcttggaatgaattnnatgacttttcttgaaatttctgtgattnnngctggat

SEQ ID NO: 62671 - DNA, 144 bp, Glycine max
ggaatagcttcttttacgccgcctgcgtcccaaccgttatgaacttatagtgtggatcagtgctagacttgcgctctccacgtacgttgctccctcaaacgattaccagcagtctgccatgttatcatcgaatgcaaatatcac

SEQ ID NO: 62672 - DNA, 459 bp, Glycine max
cccacgcgtccggttgtgtttatgcattggtgattactgattagctagcagtagcatcgtccccttctccaaagatcatattcatatgccctccaaatccaatccatcttcatctccatttccgctactttggtatcttattgtctgggtcagttctgttgaattccttggtccaagactttgcagctgaaccaacagcatggcgggtcagtcctccaatgaaggctccagtactggaaacatttcagcagaatgttcagattcaactgttcagctcaatatcaagactctagattcccgcatctacagttttcaagtggacaaaaatatgcccgtctcgttgttcaaagagaaaattgcaaatgaaattggtgttccagttaatcagcaacggctgatatttagaggaaaagtcttaaaggatgagcacgctctttctgagtattatgttgagaatgg

SEQ ID NO: 62673 - DNA, 284 bp, Glycine max
atcttatatactataccattcataatattactacttcatacaacttactattcctctgagaatgcatacaacctgactgggacatgctttatataagatccaatcttacttactcttgtatattaattatttattaatctacctgatcttctatcaacaattatatattcgcttcatgacaacataagaactttgaaatcccagacattacacccattaatagactatcatgctataactctttcaacagctagcatgttctatatatatgtacatacactata

SEQ ID NO: 62674 - DNA, 179 bp, Glycine max
cccacacgtactatttcagcatgattatataattaatatttaaataatcactaaagtgggacgtacattaattatggatgaacaattagaatataatattcatagtaactaactctaacgtacaaattttatattaatcattattgaaaggtaaaaaatatatattgactaatatttaa

SEQ ID NO: 62675 - DNA, 64 bp, Glycine max
gccttatatactgcgtgagttttgatatgagactccgaattaaaatatcattttccttggcttg

SEQ ID NO: 62676 - DNA, 394 bp, Glycine max
  unsure (1)..(394): unsure at all n locations
ccgtccgtcccacgcccgtccggctcactttcgcagaaagtttggtggaatggggagtgtcaatggatcccaactctcagggctgaggtggcttcaactgtggagtttttaaataagcgccagcggatgagtaaaacagacatggtggtaaccccaagagtcacgcaggaaagactcgtccactgatacctcatatgcaaacactgcgtgtagaagcatggcaataactcaaactaaacaaatgggttttgctgcatagcaaaacctcttcttgccgaatcatagcatagcacatggttgctcctgtgaaaaagcctgaacagtaagaacaattgtttgtgtaactaagtgtcacagtnattcttctcttaagatatagaagctgtagaagtca

SEQ ID NO: 62677 - DNA, 379 bp, Glycine max
gtcaaaattacatttaccattattttcaaatattaattttctaattaatcattattcttaattcatacaattcttccaatcccttacattaaaaaaacatataaattcaaatccaatattatatatctttcttctttccttttaaacctataattctaatacattcttaatttactttcctaccctttactttttaactttttataaaataatacattttattctttatattaattaactcatactctctaacaataactaactaacttattaatatttatatttatttttaatattttcaacttaacattattttatatcactttttactaaacctctaatttcatatatatttattttttataatactttattctaa

SEQ ID NO: 62678 - DNA, 205 bp, Glycine max
aaaaaaaaaaaaaaaaaaaaaaaaaaaaaaaaaaaaaaaaaaaaaaaaaaaaacaggaagggaacaataaaaagaaaaaggggcaaacatttttacaatttccaagcttacttcccctttcttacaaattcataacttttatatatatacacctaaatacaattaactttcccactttttactaactatttaacaggataaacct

SEQ ID NO: 62679 - DNA, 193 bp, Glycine max
aagcttctttacaggtttacgttttcgcaataaataaaacttcatgagaagtgtagttgcaataaaagtggaagtctctcttctgttgtgatataaaggaataatagttttatataacaaaaaaaaaccaaaaaaatcaccaaaaaacaaaaaaaaaaatctaaaacataaatatatacaaatacaacactac

SEQ ID NO: 62680 - DNA, 363 bp, Glycine max
cccacgcgtccgcccacgcgtccgaaaaaaaaaaaaaaaaaaaaaaaaaaaaaaaaaaaaaaggaaaaaaaaaaaaaaaaaaaaaaaaaaaaaaaaaaaaaaaaaaaaaaaaaaaaaaaaaaaaaaaaaaaaaaaaaaaaaaaaaaaaaaaataaataaaaaggaaagaatataaaaaacaaaaaagagggaaaaaaaaagaaatataacaaatgaaaataaaatgaaaaacaaaagtcgtataacgaaaaaggagataatagaaaaaacccgggcaaagatcactttatacaatttgggcacactaaatatggaaaaggagacgcacagtgtaagggggcttaaagcgaagggattgcagaa

SEQ ID NO: 62681 - DNA, 141 bp, Glycine max
gtactttcaaaagatagtcaaagagtgcttttaatagtctttagagaagccgttttattctagttatttggatattctctatacttttgaactcctcttataattcacccaattattcataccataattttgacaaaacat

SEQ ID NO: 62682 - DNA, 331 bp, Glycine max
aaattagccatcattagaccttttctaaaaaaaaaaaaaaaaaaaaaaaaaaaaaaaaaaaaggaaaaaaaaaaaaaaaaaaaaaaaaaaaaaaaaaaaaaaaaaaaaaaaaaaaaaaaaaaaaaaaaaaaaaaaaaaaaaaaaacaaaaaaaaaaaagaaaaaaaaaaaaaaaaaaaataggggaagtggatatagaagaataaggtgtacgtcgcggaggtgaaaaccatagagtttattaaaggattacgcaatgtatataaagggggccgaggttaaaaaagtagctaactagtaaaacctatgggatccccatagtaaaatactga

SEQ ID NO: 62683 - DNA, 377 bp, Glycine max
aaaaaaaaaaaaaaaaaaaaaaaaaaaaaaaaaaaaaaaaaaaaaaaaaaaaaaaaaaaaaaagaaaaaaaaaaaaaaaaaaaaaaaaaaaaaaaaaaaaaaaaaaaaaaaaaaaaaaaaaaaaaaaaaaaaaaaaaaaaaaaaaaaacaaaaaaaaaaaaaaaaaaaaaaaaaaaaaaaaaaaaaaaaaaaaaaaaaccccaaaaattaaattaaatgaaccaaacttaaaaaacaaaacccctggaaaaacccattttttccccaaccaaaaaacctataaaaaaacacccttttaaaaaactaacataataccaaaaaagcccgatccaaaagcctttccaaaaatattcccaaactaaatggccaatgaaacc

SEQ ID NO: 62684 - DNA, 324 bp, Glycine max
tcgaccaagcttacgaccatgcgtacggattcggtaaaaccgatcctatccgtttacacgtgacaggtacacatttgaggttaatacaccagctctgtgggctcaatagagacagtgccaatttgtatatagcacatgacaatcttaagccacgtcagattgtactgtctctaagcctttagcggagaaaacctcacattggctagaattattccctcactctctatatacaatacaaccactaatttcggttcggctatgatctactacaacgatttaactgtgagaaccagggtttactcaatggttcgtcgaaaagtccag

SEQ ID NO: 62685 - DNA, 326 bp, Glycine max
acccactcgtccgaccactcattccctccaatcctttgatgctatcttcaactcactacaagacctctttataaagcttatacggtcccttacatcatcctaatccttcacacattaccaaatccttccacacaatagaagagctatactccatgctcaaccccaacctttaacccaatcccattccataattgaaaaaccccacttatcagataatcaacactatcatacttacccatccattccctagcaacaagtcttaataaaacatgttcatagttcacgacaagctctacagacacaaagcagacaacgagctcaccttc

SEQ ID NO: 62686 - DNA, 274 bp, Glycine max
tcgcacgtgcattagcccacgctatcggttggatcatacagcaatggccaacaggtttaattctaaggcccttgttaacaagtatcatccggtagacattcttcactcgtgatgccgctctcggttatcatgactacctcaacaccgacgacgtgcactacaatgacagccgatcctacgaccacagctccgtcattgatcgccacttctaacgctgtatacctataactgcactccgggacgatctattctcatatcgcgtggatccacatgc

SEQ ID NO: 62687 - DNA, 448 bp, Glycine max
actaccaattcaaaccttgttgtcgccccaagccttttcaatcgagttatgcgtgaccgcaaccggagcccctactcgctgcttccatttcaacaccatgaaaccttgccttctgggcctgtgccactcttcccagcccaatctttcaatctccgccctaaggaaccgcatcaacatccactgctgccgctgcatcctaaattccgaccacacatttcttacctgggattggaaccgatggctccgacatttctgccaaatcgaacacgcctgaaacttcgcctctgttctcaaggttcaactcgatgatgctatcgataatgacgattacgaagaagcggctaatgttgatagacggctctaatggaaacaacgtccacggacactgatgctgaagttacggatcagttgaagagtgctatgtacgatgaacgatatcatgatgcat

SEQ ID NO: 62688 - DNA, 475 bp, Glycine max
cgtctttgaagtttctaagatgacttctccctacattaaatgtacagtctctttcttcatagcatttggaaatttggctgatgacaccatcaattttgaggcttttccccacaagctggtgcaatttggagagattcaggaaaaagttgtattgaagttttcacaagaggaatttcttacagcttggtcaactcaggtgcgtcctgcaacaactctgttggctgatgggtgtccatatttgtatgctatggtgcatgatagttcagtgtctacaataccaggtgattttgtcattggtgttaagttgacaaccataaacaatatgtgtgcatatgggctcaatcctggtatttcaggttctcgtcttttgggcaccattcctcagtccatttcacagcaaactgtttggaatcaaatggcaacagtgagaacaccattgaattttgattctagcaagcagagcttttgtcaattc

SEQ ID NO: 62689 - DNA, 428 bp, Glycine max
cccactcgtctcgctcgttgtctcgaatacaagttcatagaatcctattgcaattttacccgttgttacacttctttgcacatacgtaaacctttcaataactaacacttacacatgatcaatgccaatacatactatctcatataaacagtatctattatttaatctttgtttcttctctatctctcatttaacatttttcattactccaccaatattttttcataaaagcttgaatttttctcctaccctttacaatgatctcttcgcttaaacagcctgttatatggatcattgtttctgatcttcttttgaagcaaatacattcaactccaattaatgcaatattctttttaccctctttgtcaatataaaaagttcaaagatctcttgtttaatttaaaaaccactccacatttattcttctc

SEQ ID NO: 62690 - DNA, 141 bp, Glycine max
aggctacctaggcacctttagactaggaaggtcgtcataggcgacaaattgcttcggggagtggaaattgggcgttaatccgggaattcccgttttaggtcaactctttaaactgctgctaaatccactaacaggctgaaa

SEQ ID NO: 62691 - DNA, 393 bp, Glycine max
tccacgcgttcttatcgagtatgctaccacacacagaagccatacccttccctgggtgattgacgtcttcagtgtccacagttgtgtccaaagacacgcagtactaccggtcctaaacctactatgaggctgacagatccacagtaggattcaaaggtttgatcaatacgggaatcagaaccattaaacctttcttcgtacacgcggacgaagacctagtggacattacactccgtaccataacccagatctgtgcaagagatacccatcaacgcgtgttgcagaatgtccacttgactgttagcacagcggggataatgcaaatggacaaccacagcattagggtggaacttgtccttcggacactgttagaggtgaatgtatttaacgatc

SEQ ID NO: 62692 - DNA, 442 bp, Glycine max
cccacgcgtccgcggacgcgtgggctcgccgcaaccttgctcttgttggcatcttcggcatcgctattcccgtcctcgtctacaagggcatcgtccgtgaattcgtaagtagtcattttccaattcccaattagggcttttcattctacctatgcattcgattctttttcttccttctttatgttatacttggattttcactttcttttaacaactatatctctccttctgctgaaacatgttttattttcaaaaacaatcaatttctgattcagaatctattcagttttgaaatttgtttctacaacaaacacaccctaattctgtgtgcttaattggctgcaagtttgagatggatcatgggtgacaactaaaccgtgtacagatattgtcatcagtagccgctaattgatatttttttttggccctacatgaattatca

SEQ ID NO: 62693 - DNA, 395 bp, Glycine max
aagtcttccatagccccccaaaaatgaagagcaccatcttctttgctctctttctcttttgtgccttcaccacctcatacctaccttcagccatcgctgatttcgtgctcgataatgaaggtaaccctcttgaaaatggtggcacatattatatcttgtcagacataacagcatttggtggaataagagcagccccaacgggaaatgaaagatgccctctcactgtggtgcaatctcgcaatgagctcgacaaagggattggaacaatcatctcgtccccatatcgaatccgttttatcgccgaaggccatcctttgagccttaagttcgattcatttgcagttataatgctgtgtgttggaattcctaccgagtggtctggtgtggaggatcta

SEQ ID NO: 62694 - DNA, 138 bp, Glycine max
gcagccccaatcgggcggtaaattccgtccaaggctaaatactggcgagagaccgatagggaacaagtaccgcgaaaaaagaaaaaaaaaaagagaaaaaaaaaaataaaaaaaaaaaaaaaaaaaaaaagaagaaaa

SEQ ID NO: 62695 - DNA, 154 bp, Glycine max
  unsure (1)..(154): unsure at all n locations
tttgaatacttacattttcttcttggtatactacattatggtttccttatacttgattaatggaatatgagntagtttgctgaaaaaaaaaaaaaattatatagaaataagaaaaaattaaaaaaaaaaattaaaaaaaatatattataaaaat

SEQ ID NO: 62696 - DNA, 262 bp, Glycine max
tattattcaatttgattgccctacaatgatcgctccgtaaacctattatatcgctagctattacaaaacgacataccaaaagtcaatagagctcttcctaactctttattctcaaatgacgcttctcccggcttataagatatttaatcagttcaacacatctagtcatatttgttaatatgatattatatacaacgtctcttcctttagtgatccattctctcaagcataatacttagtgatagaaaaatataatttcact

SEQ ID NO: 62697 - DNA, 299 bp, Glycine max
accactcttgacagaatcattgatacacttcatgaacaaacaaatgagcattgttaaagctgattcagcgggtactgttctatcatcacataataaccctgaaaatcgctgttttaccattcataatcggaattgataacaccctgttcatatttctgactcccaaactgaagtatacaatgatatatctgatatttcaactattgatctactaactgtttataaactggcactctatcatggtatatcactttataatacgaagcctacgaaatgaaaacactttatgatcaatgcca

SEQ ID NO: 62698 - DNA, 187 bp, Glycine max
acgaaaaaaaaaaaaaaaaaaaaaaaaaaaaaaaaaaaaaaaaaaaaaaaaaaaagggaaaaagaaaaaaaaaaaaaaaaagaaagaaaaaaaaaaaaaaaaaaaaaaaagaaaaaaaaaaaaaaaaaaaaaaaaagaaaaaaaaaaaaaaggggagtgggataaaacatggcaaaaccaaaaacaa

SEQ ID NO: 62699 - DNA, 182 bp, Glycine max
aaaaaaaaaaaaaaaaaaaaaaaaaataaaaaaaaaaaaaaaaaaaaaaaaagggaaagggaaaaaaaaaaaaaaaaaaaaaaaaaaaaaaatgggcggacgttttaaaggatccaggcttacttacccgtgcttgcaacgtcatatttcttctatggggactcctaaatccagttcattgc

SEQ ID NO: 62700 - DNA, 285 bp, Glycine max
cccacacctccgcccacgcgtcctcccactcgtccaaaaaaaaaaacaaaacggtcgagatataataaaaaactagtatacaaatataacatatcattcactactcccaagttctacaacatactattttaactatcttaattatgctatttccctctatagatcaaatatacttttacacattcacatctttattcacaataaattctttatctccgcccgatatatcatcctgcttcgactcctctattaccactactacaagtcttacatcatcctctaata

SEQ ID NO: 62701 - DNA, 255 bp, Glycine max
aaaatttaaaaacttataataaattttactggtggcttaaatccatcaatattcataagtaaaaaaaaaaaaaaaaaaaaaaaaaaaaaaaaaaaaaaaaaaaaaaaaaaaaaaaaaaaaaaaaaaaaaaaaaaaaaaaaaaaaaaaaaaaaaaaaaaaaaacaaataaaaaaatccaatcattaaatcaaaatgcaacaaaaaaaaaaacaaataaaaaaactaagggaaatgaaactaacaggccaacgttta

SEQ ID NO: 62702 - DNA, 211 bp, Glycine max
cttatttactactctaaaatcttctacttattcattaccaatttaaaccttcagcacgatcgactacatcgtggctacaaatcatcctacaatataaacaaccacatattaacacatactcatcatctactactatcacttttcctcctaacacaccttatctatatacaccatacaatcacaactaacaatactcttgattttatttata

SEQ ID NO: 62703 - DNA, 547 bp, Glycine max
  unsure (1)..(547): unsure at all n locations
attcccgggtgcgacaccatcgcgtctcgtcccacgtcgttcccgttcgtattaggaaccacaataaaatggtcatatatttccttcgggtgggaagctgtgggaagccaagtgccnnntggaggttnnntccaagttagtgaattnntggttgtattttgggccttaagnntggagtgtaccatactgatcctttgttcnnccgaagaagggttggcattttctcttttgatnncaaacacgcatttcnnaccaaaggggtcactttnntctttgattctgcagaatttttaaatggagcatcgtgccaattgaagtnntttggtcggaaagtgcttctcagtggacttttcctttcgagaatcaatttcagaattggccacannaagtttgggaattgtcatataatggaaaatggtaatggtgaatagtgaacccggttcccctgaatttatgttcggtccttgtttgcgagggggtagccttcaaacgccttggggtgtcagctacatttgaatctctatntattcagcaccgtgtttgacac

SEQ ID NO: 62704 - DNA, 247 bp, Glycine max
gaaagaccggaacataaggcgggcaagagagtttgtttcttctctcttcaatggaaggcggggaccaggtcttcctttcggcaacaaccgtggccgccgccggttttccaaacttttttcttcttcggttggttattccggccgtgctttccaacttggttcttgttgctttgaccacctttgttccggacccggaatttacaccctggtttcagaccaagagcgccatcaccatcaccatcaccag

SEQ ID NO: 62705 - DNA, 252 bp, Glycine max
  unsure (1)..(252): unsure at all n locations
cattgacggagtatactatgatagaactggtgaaataattcaaaattgatagtaccgaagtattgatgtattgggtcctttagataatgagcagttcttcactggatcatagcacatttacgtgacaatcattaatgaggatgaccttacagttcaactntctatctatgcgaacaggctcgcaacgctattaatgaaagagctgaacgtacctagctttaataatggcatcaacactactgatgggcatat

SEQ ID NO: 62706 - DNA, 334 bp, Glycine max
aacgtgctcacgatgatacagctgttcagacttttgcttatggccacttgaaatatcatgtcgctctatgttcctactctgccaggaagaagatgccgataattgacctttccaccgagccgaaagcatcttacgatcttcccaccaattatgctgctcacgatgccatcaatctgggctccagcccctaagatgctgattatgattcatctactgaacattctgtagaacaagccataactgttgcacttacgcagggtctaatttcttccatagatctactttctattactaccactgcttctcacaatgatgacgatgcgcatactatgct

SEQ ID NO: 62707 - DNA, 270 bp, Glycine max
tcccacgcgtcctacaaaaacaaaaaataatatttaaaaaataatattaaatataggaaaaaatggtaaaattataaaataaaaataaaaaaaataaaaaataaattaataaaaaaaataataataaataaagggctcccttttttttgtatccatttttttattctctttctttctatttatcttttctttttttttatatcctaacttcaattctttttctatttttctaaaatttctcaatctgtaaatccttttctttcccctttt

SEQ ID NO: 62708 - DNA, 202 bp, Glycine max
gtgacagttccgttctcatcatcttacgcgtctaattacatcatctccacactggtccaacaaggcttataatgccatcacattctcaccttatagtgatcaccattacttagatcgacttaacaggttatataaacctgcattttatatacttgaatacacaaatactattacacactcatatggaatatagtcttaataa

SEQ ID NO: 62709 - DNA, 353 bp, Glycine max
cacgtgctcacgattagacatgtgttgaaactgatggatatggacaactgaaagaacatcgggcctccggaccaaaacttccaggacgaagaatacgacggatactgcttccaatgactgtcaaacgaatctacaagactcaccccaacacgctctgacaccaacaatgggcccgatctgggcacacgcacccaaaatgtgctggaggatacatatactgctgatgtgatacagcgtctcatgaaagtcgcttttacgcagatcaatatgcctattcaacaaacagatgctgctgtaagagctgatggtcaagacgctgctggccggagtgcaatgcttgctgctgcacataa

SEQ ID NO: 62710 - DNA, 169 bp, Glycine max
gcgctctctctctctctctctctctctctctacaatggcctcagccggaagccccaaaacctttgggtttcttcgactcaacaacccgggcttcttcttcttcggcaacttcggcttccccttgggccttgcagttttcttcttccttcggttggggccggttgggccc

SEQ ID NO: 62711 - DNA, 320 bp, Glycine max
accacacgtacgtccactcgtccggcagaggatacgaaataagagaaaggaaaggagtctctgtctctcgagataagactgagaggcctcaaacgcatatatctgtccctttcccacctctatctactaccacccactactcttaaggcaaagatggtgaatacaaataagacgatgatggtacagccaccgacttgtttctcaacagacacatacaccatcagttgcatatccattatattctgattactcctatggctacccatctgatctcatttactataaattttatttggcccaccctcatattgaagactccc

SEQ ID NO: 62712 - DNA, 392 bp, Glycine max
cccacgcgtccgctttctataaaggtagagagaagagaggacccttctcttgcatagttcaagtgagtgagagtgccaaaaaatgggaaggcctccttagtgttccaaagtggggttgaccaaaggtccatggactcctaaagaaaatgcattgttaacaagtatattccaacctattgaaaaaggccattgaaattaattccccaaaaagccagttatttaaggtttaaatacctaaattttccaatataattcttaaattgaaggcccaatgtcctggtttagatcacaattttttatgtgaaacttatataatagttatataaatatggatatatgagagattgacagtatataattatatgggtataatcataaaatgcataatataa

SEQ ID NO: 62713 - DNA, 454 bp, Glycine max
tacggcctctcgatatatatacacgatagcagttatcatactcatactcaaacttactacgagatattgggccttacaaaaacggcaaattacaaatactttacattaattcactcttaatcatccgttcaactccatctacgtagacatcaatgatcaaccactgattactaacacatacctaaccttgagcagtattaacaccgatgatacgcctctaagaataccacaactactacactgaaacactgcatttctagaaacgatgaagacttcttcttcttcagacaggaacaagatcaacatacttgtcagtgctcagaaagtcgatgtcgatatccgaatctacctgcgattctactaccgcatcgctgacaacattctacgacaggctgatatcttttctgcagagaagaatattattgacctatatgtcatgcttttaagattttct

SEQ ID NO: 62714 - DNA, 67 bp, Glycine max
gcggcttaatcgaactattcagattctaaaaaatgagttcttggtcggctggaacaatctttgctgg

SEQ ID NO: 62715 - DNA, 71 bp, Glycine max
aaaaacatacaaataaacataaaaaaaaaaaataaaaaaaaaataaaaataaaaaaaaaaaaaggggaaaa

SEQ ID NO: 62716 - DNA, 159 bp, Glycine max
gcgacaatacttccgataaccacgaacgttacgcttttctcatacttacctttattcgatttttttagcaaatggtggctactatgatcagattctttccacagacaagctttctccccatattgcatcactgttctatctgccctaaatctctatata

SEQ ID NO: 62717 - DNA, 208 bp, Glycine max
gcactccatcttccagcgatttcgctactagtaatatattctttttactaagtgaccctcttatggtcatagctaagttttccactatgctttcgtacatccttattgttcaaacattatgattctttcctacttaaactattactattacattacttacattgtactttgccgtatgacagactgcattatattcaacatcaacatt

SEQ ID NO: 62718 - DNA, 267 bp, Glycine max
aacaaaaaacaaaataaaaaaaaaaacaacaaataaaaaaaaaaaaaacaaaaaaaacaactaggaaaaaagaaatacttacactaatcaacaaaacaaacaaccaatacttaaacaaccataaaaaataccattcaactctttatacattatatctcaaactcataaactcaaaccttacaaattcctctatcacacaaatacactccattacctacaatttcaactacaaaaatacacactcttacccacctcaactaattacct

SEQ ID NO: 62719 - DNA, 68 bp, Glycine max
aaaaaaaaaaaaaaaaaaataaattaaaaaaaaaaaaaaacaaaaaaaaaaaaaaggaaaaaaagaaa

SEQ ID NO: 62720 - DNA, 431 bp, Glycine max
gtgctgcaatggcttcaagtcaggaggaggtgacccttttgggagctactggaagcccatttgtgtgcagggttcatattgccctcaagttgaagggagttcaatacaaatatgtcgaagaaaatttgaggaacaagagtgaactgcttctcaaatccaacccagttcacaagaaggttccagtgtttattcacaatgagaagcccatagcagagtctcttgtgattgttgaatacattgatgagacatggaagaacaaccccatcttgccttctgatccttaccaaagagccttggctcgtttctggtccaaattcattgatgataaggtttttggtgctgcatggaaatccgttttcacagctgatgagaaagagcgtgagaagaatgttgaggaagcaattgaggctctgcagtttcttgagaatgag

SEQ ID NO: 62721 - DNA, 376 bp, Glycine max
ctcacgcattctgaaacaaatggacagcacattataaaccattgcaagaaatgtgccacctgggtgacattgttcgcatggacaatgaacaaaaaaataaggaagtgcaacaggagcaagtatttccatcactaatgttaatgtcctcaaacatcttggtctgggaaaactggcaaaaacatttgcacaaccattaattgctatgtcattggctgatcaacgactcatgtctatgtaccttcttatactgaaagagtttattcctaatgcggcttctgaggttgctactgactttattgctcataaagtttgacataccgaagaataaaatgatgaggtcgacctctacaccgttaaaaatgaaatggatataaac

SEQ ID NO: 62722 - DNA, 141 bp, Glycine max
attctattttattctttttccagtggtaaatttatggggacaatacgtaaaaattacatacttaagttcatgatcctccttcaagtcccaattgcatgaacttggagactcttttgagttgaccttactacactgttccac

SEQ ID NO: 62723 - DNA, 53 bp, Glycine max
aaaaaaataaaaaaaaaaaaaatttaaaaaaaatacaaaaaaaaaaaaaaaaa

SEQ ID NO: 62724 - DNA, 435 bp, Glycine max
acgctcgcattattatgtgtgcagtcatactcgctaatgtcgactgcccccgcgccgacttcgccgtccgcgaataacgggaccgcgcctccgccgacagctcctgccactgccatcgtaccgtctatggtcacaccttccgtgcctgcacctgactgcgtcactactccgtcggcgactccgtcgtctgctccggcggcgacaccttcctcgccaccttcggctactcctacgtctgctcctgcggcgactacgtcttctgctacaccgtccactgcttctagttgtacttcaccggtcactccgaccacgccatcgacttctccgccgtcgtcggcgtcgacatcggcaccgtcgccacccagtggcggcagcactccgagtccaccgtctcggagctcgccctctactacgttcggatcgagcccgaccact

SEQ ID NO: 62725 - DNA, 425 bp, Glycine max
acggacattactaacggaggtctttatagatttaataaattaataaccagataactatatatagtgtggcacaaggcttttacttatatatctttagtttgaatgttataattctactccgctactaatgctttcctccagaaattttttggcggaaaaaaaaatttgcccaatttaagaagtgacgttgaataattaatatgttcattgatgccaccaagtacctttttacggattaaaccacctcctggaatatatgattccataattacctaaaaatttaatcatttttaattatatataaatattactctaaaatccaggcatggtattatgggtgaaaaatataaatatttttatagagataaataatatttaagcgagagttatatatatttgtaaataaaagagcacgagattttttc

SEQ ID NO: 62726 - DNA, 366 bp, Glycine max
cggacgcgtccgcccacgcgtccggttcactgtaaaatattcttccttccctggtccagtcggaggttggcaaatgggtgttccccatggcatgggtatctcaatgcaatacaataatgtggtgcctgtgccaagttttccacagccatcaaagtcaaatataaaaaattaaaaaaaaaaaaacaaaaataaaaaaaaaaaaaaaaaaaaaaaaaaaaaatacaggacaaacgatctactggattagatgtatacatgacctgactgcaaatttaaagattgactattatataatcaaatctaactagactgtccgcatagtacaacggaaggactgtgaaaaccctggcgaatcgcaacttaatc

SEQ ID NO: 62727 - DNA, 400 bp, Glycine max
ctcgaatctagtaaaaaatcagagaactggtgaaataatcaaaattgctattacagatacctcagtgccagggacttatgttcatgagcatacttaacggcccaagcacattcacttgacgacaagaatgagatgaccttacagtctatttccacctatagcgaaacaccctagatcctctattctgagacgagtggaccgtacctagctgcaatactggcaacactcatactctagggcatctgaactatctgcattcacaaagtcccccgtgatctgcagtggatttgccaggtttcaaagaaatgaaatgctgttgtatgagctaaagagctaggtgattatagaatgcatctgacacatacttctttgtactacactgcatcttttaagatcatat

SEQ ID NO: 62728 - DNA, 393 bp, Glycine max
gaatcgacggacccaccgacgcgtacgcacgcacgaacaccgcccaagcagctggcctttctggaagctcaatgacaggagggcttagggcaacagatgagagaagctgggatatgcatattgatgaaaagattagctatttggatatattcaaagatgtggagctaacatgtgagaagcatcaaaatgaattgttatcctctacttaccttgatgaaatcattcactatgacctgtgggcgcgagaattagctgctagtttgcaagactctttcagcttcactcctattcttgcatgaagatatgattaaactcgggatgtggctgctggcgcttcccaattgcctgctttcaccataatgtcttcaggcaattgaacaatttagaatgatg

SEQ ID NO: 62729 - DNA, 458 bp, Glycine max
gcgcgcatgccttgggcttgtcgtccattcctcttgtttccggtcgatgacacatatataccttcgtcccccggtgggaatgatgcgcatgctgtaacttttgccgttcattgcattcaattgtcatcttggcggagctattttgatccacggaaaataaccctagctgactagaaatagatcatgctttcatagtgctgttccgagcctgaaatcgttcatttggtgaactaatactatatagcctgaaagctctattatctagatgcgacagaggatcacggatcatcaacctgacaccttggatagtatctagacaggtcactgttaaggttttatggaatctgaatacattggacggactatggatcgtacattgctaggatcttatgatgaattgtatatagagctgtcaggcatgattggcatataaaaatctgtggtgctaagtctcatgc

SEQ ID NO: 62730 - DNA, 262 bp, Glycine max
ccggctcgacccacacgttccgaaaacctttaccactgacgaattcccaggatcttcacctatattaatactgtgcaacacgcggcaagttaatcagtactccctctaccagacctggctatgttcactacctatacataaccctatgccaccgtcaatttattcacacttcactgacttcttgacacatagcttctgagtcatcgtcgtgatctaagaagaccggttgcttatacattggacgctttatgagatgctcagc

SEQ ID NO: 62731 - DNA, 447 bp, Glycine max
atttcatacacctagtatcctccatggcccacttattagtctctactattattgtttaaaaggaaaacagagattggcccaagtttcccctttttgagaatgttaatgagtaaactattgaattatacgtgtttgtgcaggtgtagatggaacttgaagcaagtaatcaacccaagcaagagcgttcaaggacaagatggacagcatcccttgacaagatatttgcagacttggttgtcaagcagattcaactggggaacagaccaaacaatgtttttgacaagaaaacatggaatcacattcgtgatgagtttaataggcaaacagaccttaatttcaacaataatcaattgaggaagcatctagatgttcttcggactcgcttctataattggaaatctgcttatgatcaaaataatgactttgaaatggatgattcctgttgca

SEQ ID NO: 62732 - DNA, 150 bp, Glycine max
cccacgcgtccgcccactcgtccgaaaaaactttaacactaataaaaaacaaaaatcacaaattggacacaaagcaaaaaacataaattattgcctttccacttttcagtttctcatctttcaaacgcttcattatatgttactcatact

SEQ ID NO: 62733 - DNA, 313 bp, Glycine max
caattcctgaatcgacccacccgtccacacaacatggaatccacaccatcatgtagtaaccctgtctcactatacagtctacattcccgggcgaatgcactaccaacaatagggctttaaattcatgactgcatcaactctacacactatctcactacctctcatcccttataactcttctttccacccatatgccctttactctctctctccaaaacccacttatttcaaccctcatcctatcttccatcacaccatgcacgcctcgcacatccaagattccgatggacggacactagacctcgtacaatcg

SEQ ID NO: 62734 - DNA, 349 bp, Glycine max
ttcttcttctctcccaataattttctctcattttccttcactttctatccattcgacatcttgcaccagatcaccatcaccgtacatatcatacgttggtaattgattgattctaaattcaattccgaaaagatctagggttctgcctgaatccgtacctcccaatccaaatatctccaccgcatctgttccctacctggtacagtatcttgcttattataggttccgattcgcccgtggcattgaaattcaacttgctccaatggctttttctaatggagaaaggatacatgaaattgacgattcgtgttgatcttcgtgcttagtgatttggtctgtgaatgataga

SEQ ID NO: 62735 - DNA, 383 bp, Glycine max
ctctctagcttgcgtgcgtaacataatcgattaagaagctgctatagtgattcgaggtcagggggttgcgaagatggagcgcagcagtcactccaatctccaaatatggatcgtatagtcatttgaatttcgtgaacgacatctcgcgccaaacctacgcctgagtcgcagcccactccaacgtatagaggacaaacctcaccggcccgtggacaacctagatgacatgtatgggtctataccctgctcgttgtcctggccccaagactaacgcctcaaacttgaagaacctgatgatcaactcatcaagcgtataatgctcaaactcatgctggattatagtaagcatagcaagtcaattcgtgtggctaatgttgtgtacc

SEQ ID NO: 62736 - DNA, 246 bp, Glycine max
cccacgcgtcctcccacgcatccgtaaaaaaattaaaaatacataaaataatatagaaaaaagtgtaaaaaaataaaaaagataataccaaaataaaatataactaactactaccctttacaaatcaactaattacaaataccataccacatcatccctaatgttgtctaagccttcacgagtgttgaaaaccttgaaagtaactgtacccctacaaccatcactaacatcactttcctttaacat

SEQ ID NO: 62737 - DNA, 249 bp, Glycine max
gcactcgttcgggcgatttacagcctcctcgctcaactatcgcttctacttctatgaacatctcttggactttgagtcatccttcactggtatccagccctcacagtctatactctaaaagatatcatatgacttcgaactagacttcccaatatagctgtctaaacttcacatctacccttgcaaactcatagatactgccattcactctattatcgacaacttcaacaacattgacttctacaagat

SEQ ID NO: 62738 - DNA, 114 bp, Glycine max
aaaaagtaaaaaaaataacaaaaattaaagcttatgataactacgacataaataatggacctggtataaataccccttgtctctttcatatgatcaaccttaatacataccctc

SEQ ID NO: 62739 - DNA, 409 bp, Glycine max
gcgggttttcgtaaaatcactgatcttgccatgaaccaagatactcctggagataatctcgtttgcgaaaaaatggagatgtgagatgccatcttatgaatgttccatctacgcagggttttcaggtataaatgaagccatgtcaatgtcacctggttgtttgaagaaaaatggtggctttgtggaattttcttcataattttcatgatagatggtaacaaacatatcttgtaaaagaaaaaaaaagtcaattcacagctatagcaggcagttgttggtcagcctactgtgcttgaactctccacttattttttagtgtacaatagtcagcacttcatacatactaccaactcaattggactctccacttatatatgcggctttgaagcatgaatgattcgcttaacga

SEQ ID NO: 62740 - DNA, 416 bp, Glycine max
cttgtgtttacatttaagatatgaggtgcagttctcataacattgtattaatgcattgaacgtgggagatctgtctgcatatgaattcctcaaggtcatagtatagtgatgcttatgcatcataataatatagtctattctaggacttatcttctatgaagaacattggctcgtcatcttccacagattgcaagctcgtttatactagcagatgaacgtattaactatcattgatcagctacattactatcctgatgaactaccgccgctcttgtaacatgcaatctgatatctactccgtaacataatgtcgaattatgtcaattctcaaaagattctatacatttaacacatacatatgtacctaccttatctgcattgtttatgtactcgtcactgcaatgtacatacttatg

SEQ ID NO: 62741 - DNA, 298 bp, Glycine max
ctcaggaaaacgcaaaacccgcgcggcaccatttcatctcattgcccgctcaatatggcagagaacaaattacgccagcgcatggacttcgcactctacgagctacaactcaagaacaagttgaaaccagactcatcagtcatggaatccctaaagcagttctccaactgacttttgctcctactacgactgacaaaccctatccctacactaccattacaatccattacgataccaagaagtaccacacttctaccagttcttcatgcatgcaacatcgagtacttcatccacagga

SEQ ID NO: 62742 - DNA, 228 bp, Glycine max
tcgactacggcaagatcattcttacagtcaaaattatcatccttatggtcatggcggatatactctagaactactatgaggttgcacccgatgatgcataccacaattttgacaaaacagatggtaagcgtactgcaaatgggctagatgaaagcaaaatattggcctcatagctattgctactatggacggtgacgacatggacgatgaccaagtggctatggatgc

SEQ ID NO: 62743 - DNA, 288 bp, Glycine max
aaaatgaaaacaaaaaaaacacaactaaaccaataaacaccaaaagaaaaaaaaacggtataaaatgaaaacttatatcagcaaaaaacccaaaaatactttacaagaataataccatctccactatcaatcaatatactcatgatgtaaatcacaaacaaatataccccttatcttctatcgctacaacgctagttgacaatatataccttgactaataacctatatacgctaatgacttgactctctcatattccaagcaacccctcctacctgacatcttatatc

SEQ ID NO: 62744 - DNA, 446 bp, Glycine max
gcgaattgctaaatcttactgagtacaatgttcatatggccaaacttattgatggaggaaggaacagtatgtccaaagaagatatcttttatggttttacctttttctatattattataattatagttataattataatgaagcaacttctctggatgaatgtgcagaggctgcaatggaattttccatttcccttcttcaaactctggttgttgaggaacctaaagttatttcagaacttcacaatcttgttgatgctttggcaaagcttgctacaaagcctggatgccctgagtcattaccacagcttcttgaaatgatcaagaatcctggtgctatatcctctagtaatgctggaaaggaagataaggcaagacaatcaagagacattaaggtgcctggtctgttacctgcaaatagggaagagttcaacagcattgattcta

SEQ ID NO: 62745 - DNA, 176 bp, Glycine max
attcccgttcgacccacgcatcctcatctaaataaaaacactaacattcaaatttcctactataacaactccaaccagatacagatacttttaatcgttcacatacttcatctataactctctatttacttaatcaaaattttattcgactaactctttacttactaaattatttc

SEQ ID NO: 62746 - DNA, 324 bp, Glycine max
cccacgcgtccgcccacgcgtccgaggctgggttggtttcttctacccttagaggtcgtggaagaggcggtgctccccgtggtcgagttggtcgaggtaggggagtagtacgccgaccacctccaccacctggcagtgatcaatgaacaacgagttcaccgtctgtgattgatggttaatgaaatgatttgacttggtattgtaaacttctcccttcgtctgaacgatggcattgtagaccagttagtaggcgtaaattggcgaccagttttcgtcaatgtaaatacaattttgcttttcactcatttctccccttacctatct

SEQ ID NO: 62747 - DNA, 143 bp, Glycine max
aaaaaatcgtatttgtaggcgccacactcaactctactccaatcaatcagatcctagcgatgggggggaagctaaaggtaccaccgaaatctcttgtatccgccaagcccacgtttaagcatcaccaactaaaaccttaaaat

SEQ ID NO: 62748 - DNA, 265 bp, Glycine max
gcgagatattgtgtgcttgcttagagaggttttggttccgcagaagattctgaattctcgtgctctagtgcgattccatgggagaggtggtcatcatgagtggagagaagaagtcagttagagtggagggggtggagaaggaagatagtggtggaagtgggagcgaggctggtcaatgtggagtgtgagatgccgagggagagggtcttagacagtagagtacagtgggggctggatacttgccaggagtgttggacatgacgat

SEQ ID NO: 62749 - DNA, 76 bp, Glycine max
cttatgggaatattgtatctgattaccatcgatattgtgcatccaatattgaataaaaatgcgttatttctgtgat

SEQ ID NO: 62750 - DNA, 449 bp, Glycine max
aactgcttctagagtaggttaaccgctttcctttgtttttggataaaatggttttgatagctattggcattccaacaatattatattgtggaacagtctgtgatgtcattgctgacttggcaactagctttccaagtttcaaataggtgaggttgattgtttgcaatcatgtttggaaattgaaagtatgagccgagcaatatgtataatatttaagtttacttttaatgtttgtcctccatagtaaaactcacatatgtggtataagaggttgatgattccattatttttgtggttcttattgatgtgtattgatatatgatttttctcaatgtttaatgcactgatgtgtgggattttgtgttgtgaatgtatgattcagctggaaaaggcatatgacaaactcatgatggctcaattgtctaatcggaaaaagggtgtgacttttt

SEQ ID NO: 62751 - DNA, 354 bp, Glycine max
aaaaaataataaaaaaaagcaaaaaaaaattttaaattaaaaaataaaaaaaatataaatggggatagttaaaaacaacaatattatattccgtgaacaatctgaaatatcataacatctcttgtcaacatcactttccaagtgtcacctaggtcaaagtcattgtctcgcaatcatataacggaaattgaaagtattactcctagccttatctataataatttaagttcacttttttagctttttctccagtggacatcttacatatgtcgtataataggtttatcaattcataatttttcccgttcttactttatttttttgctttaccaactttatcactttttaatgcac

SEQ ID NO: 62752 - DNA, 125 bp, Glycine max
ataactttatatttactattcatgtcattgtaataaagacaaatcacatgcacccctgtggcaatgttatctctgaatcggttgattttttttttaaaagagaatggttaataaatagtagattg

SEQ ID NO: 62753 - DNA, 295 bp, Glycine max
aacttctgctactcactactttaacttttcattcttctcctcattcctcatgggcaagttcactatctgcatcagctgatcactaacaattttccgattgatattcataatatctacttatatctacgattcaacactctttttccctaactactctattacatccaccttacacatcatctacttttcaaataacaacgatcatccttatttacctgcttctttcacaattatccacttattaccaaaacaatttctttctacaacacaagtcattcactaatatttcacaaac

SEQ ID NO: 62754 - DNA, 364 bp, Glycine max
accacgcgtccgcccacgcgtccgtccacgcgtccgaaatttcatttcttttcatggtatggtcattacgtcatagtcattgcaacttatatctcctagtccggggttattacaacttaacaattgtggttttgagtttgagtaccggatatgtagtagaattcaatatttaggatatatttgttgctcacaataattatatttgactagagcatgaatacctgacccatgagaaattatatgtggctgtaataatcttatacaacgaatggagcgacaaggtgattgaggtcaaaagaatcgtttgaaataacgtgattgatgttataaaacatacattatttaagagttcactctgaatttt

SEQ ID NO: 62755 - DNA, 76 bp, Glycine max
aaagaaaaaaaaaaaaaaaaaaaaaaaaaattaaaaaaaaaaaaaaaaaaaaaaaaaaaaaagaaaaataaaaaaa

SEQ ID NO: 62756 - DNA, 301 bp, Glycine max
acgcacttttcagcttcagtattcctctgatggatccaagtctggtgtacaacaacagggtgaaagatgaaacaacaagcctttgccagcagcagctacagcacctgttgcattctcacagggtactgaagcatccaaattgatcttcatacagcataagcttcaaggtatgactttgatgctagaagaagcatcaggtggaggcaaatctgctgatatgatggcaaagttagagagcgagatgaaggctcttttggaggatgctaacaaaatcggtgaagctactgtgttttagataaag

SEQ ID NO: 62757 - DNA, 451 bp, Glycine max
  unsure (1)..(451): unsure at all n locations
caccgttctctttctctctccaaaaattatacggtgggtttgaacttcgaactatgaagggcgaaatcatgcacagtaccatgcagttacagggtttttgaaaatctcaatggacactaccgctgcacgtgattgagtagaattagcctcctgctccaacttgcattgctgtttcaaatcttcaattttccttttttattttttactttcatgtaatgggtagtgttgaaatccccaattggctgaaagggttgcccctggctccggaatttcgccctacagacactgaatttgccgacccaattgcttatatttcgaagattgagaaggaagctgccaactttgggatttgtaagattatcccaccgtttcccaaaccttcaaaaaaatacgtnttttccaatttgaataggtcactcttgaagtgccctgattttggtccagataatag

SEQ ID NO: 62758 - DNA, 410 bp, Glycine max
cccacgcgtccgatttttcttgacgatggcctcagcatgcacttcttcatctgttgcgttacatctgattaaacatcgtaataatgttatgagaaacagttactgacaaagatggctcaatacgcactcccaacacctgttgcataacatcatgcatttatttcatcagtaacaattgtatgaagccatgaaataatgctatgacaggcagacgaggacaaggatggccgtcttactttgactgagatgattgagaacccatatgtattttatagtgctattttcaacgatgatgaagatgatgacgacgattaccatgatgagttccggtaaattcatgttaggatacccagaaaaagttggcacaattctagtgacacggaatcagtatttgaggataatgacacgac

SEQ ID NO: 62759 - DNA, 404 bp, Glycine max
gaaacttaatcgatcatcacttcacttcactaatacgtcatggcagacgagacccagaacaagtatgagagctctgaggttgaggtccaggatcgtggtgtttttgactttctcggtaagaaaaaggatgaagaagacaagcctcatcctcaggaggaggtcatcgccaccgagtttcaaaaagtcactgtctcagaccaaggagagaacaagcacagcctcttagaaaagcttcaccgatctgacagcagctctagctcttcaagtgaggaggaaggagaagatggagagaaaaggaagaagaagaagaaggaaaagaaagggctgaaagagaagatcgaggagaaaatagagggtgatcatcatcatcacaaggatgaggacacaagtgtccctgttgagaa

SEQ ID NO: 62760 - DNA, 155 bp, Glycine max
aaaaaaaaaaaaaaaaaaaaaaaaaaaaatttaaaaaaaaaaaaaaaaaaaaaaaaagaaagaaaaaaaaggacgaccgttttaggggttccaagttttcttccgcttgcttgcaactgtattagcttttcttttagtgtctcctaaatttattt

SEQ ID NO: 62761 - DNA, 455 bp, Glycine max
aatacccgtcccgaccgcactcgtccgcccacgcgttcgcacataattatcattattttacttgaacaaagttttagtgtatggtttggtccttatagaaacagaacatatcctgttctttctttctctgtttgcatttttgttcacttctttctttctttctttctttcttattatctagttaatcatgacaacatttatggacatgtacaacactactagtagcatcatgacaccggatttcttataccattgtattgatcaacatctgattaaatcacttgatccttttatgaaaagtgattcatctatcactacttcctcatcaataacatcatacccttcattctcttctttctcttcttcttccaactttttcttaacaacatttatcacctaattttgctcctcattctaccaccaaaatggttcaacttcatctcattctattttct

SEQ ID NO: 62762 - DNA, 258 bp, Glycine max
ctagatcgccttacaatcaaatgtatgctattagctccaatgctcatccaggtgattagctgcatttgacgcagggacaattaatattacaatcctgtgcctattcactcaaagatgctattgcaggactcttcttccgactccctttactagccgaaatgcaccttcaatctctatcacttcgacctcgtcatcaccaacaagctcatctgcttctaactcttactctcaataaacaagcggctcattgtaaacatc

SEQ ID NO: 62763 - DNA, 434 bp, Glycine max
ctccttcgacttttactctttcctatatctctctctatctctctctacactcgagtgctggggcgacgcgtgtccctatctctctctagtcgacttctacgatcacctccatggggcattgctgcagcaaaaacatcgccgtcaacaacgagacgctccccgccgatcacgcccccaagccgccgcattacgcggcggcggtggcggcttctccgctgccgccgtcggggagctcggtctccgccgcaactcccgggaggaacacgccggcgcaatcgttttccatgagcccgttcccgagtcccctcccggcgggcatggcgccgtcgccggcgaggacgcctggaaggaagttccggtggccgctgccgccgccatcgccggcgaagccgatcatggcggcgttgcttcggcggcaggggaaggcgaagccg

SEQ ID NO: 62764 - DNA, 208 bp, Glycine max
ctgcgcgtgggaaaaaaaaaaaataaaaataaaaaaaaaaaaaaaaaaaataaaaagaacaataataaataaaacaaacatacaacttaaaaaaatcttttatacataaaaataacttcttttcaatttccgtcaatttacaacttctttaatcaaaactccatctcattacccaaatctttatgattgcattacatacctttttttt

SEQ ID NO: 62765 - DNA, 411 bp, Glycine max
gacgcacgcgttctgcagcctcaatattgaacccttttgcattttacagattgatcaggaatccaaggtctaggaatgctgtgacattgttggcattatcagatttcttgtccttgacaaaaaatcagacttctatatcaggtgtcgctatcattgctgaggtgtgtgcttccatgcctattcattctttatcgtattcattctaccggctgctatttgaacatataattatttgtgatgaattagtacaaatttttgagacaatggcttatggtcgctcaagttatttaataattcctatcattgataccaccttgtaacaatatgtgaaatagttataataaatacctacactattattcattatttctatcaaattgttacaagacctgtcctatcacttgtttttct

SEQ ID NO: 62766 - DNA, 102 bp, Glycine max
aaaaaaaaaaaaaaaaaaaaaaaaaaaaataaaaaaaaaaaaaaaaaaaaaaaaaaaaaaaggaaaaaaaaaaaaaaaaaaaaaaaaaaaaaaaaaaaataa

SEQ ID NO: 62767 - DNA, 401 bp, Glycine max
ttacaaggccaactctagtcggcggatgacattaatattttgacatctattaaaccatattccccataaaacaacatttgactggctaccatactgtgaacaattgcactgcactattgcacaggacaacgtactagaactccatcgaactaatataaacgtttgctcaattcatggtatgcgccatgaagaacaacaaacaatatggctgtccaatgcagagtcctatagttaccacatatatagctttatcgacccctgatacgatgaacgatcttcgtgacaagggaacatatcttaatcacaacgaattcatagctgcaatgcttataaaaattactgatcacatccttgaacatgccatcgctggcactggtttatatgtgcttattcttgatgat

SEQ ID NO: 62768 - DNA, 281 bp, Glycine max
gagaatcagatccctactctatatttatgtatattaatggatcacgtgatttttgtgcagagactaatttgctaccaagcttaagatcttttatgcctagtgccctatcttaaacttcatcaactgtatcttctcctttactgatgtggggtaaatcggattttgctgcatttcctataatgctataaattttctgatcgtatcgcttatccagcctcaacagaagaatgactacttgccatgcaacgaggacgacaataattcatctttgagaaccactt

SEQ ID NO: 62769 - DNA, 251 bp, Glycine max
cacacacacccacccaatctagtttaaatttttaccattccaacacatcattaagtgagacatcatttttcataaaacattccctaacaacaccaccaccccaatcacacatactaacctacactaagctcttataacagataccatcttcctcttacaacaatctgcacatcccttctcacatacttataatctttcatttaacgataccccttacaccatccagactatcactatcattgacaaacgaa

SEQ ID NO: 62770 - DNA, 432 bp, Glycine max
ttccttttgaaggttagaagtgctacaatacaaacaatggcagctactcaggaagatgtgaagcttttgggtattgtgggaagcccatttgtgtgcagggtccagattgcccttaagttgaagggagttgaatacaaatttttggaagaaaatttgggcaacaagagtgatttgcttctcaaatacaaccctgttcacaagaaggttccagtgtttgttcacaatgagcagcccatagcagagtctcttgtgattgttgaatacattgatgagacatggaagaacaaccccatcttaccttctgatccttaccaaagagccttggctcgtttctggtccaaattcattgatgataagattgtgggtgctgtatcgaaatctgttttcacggttgatgagaaagagcgtgagaagaatgttgaagaaacatat

SEQ ID NO: 62771 - DNA, 413 bp, Glycine max
aaccgctccacaccgcaccggatcatattctaatcctatcactcttacgctttaggtctggcgaccttgcaaattctctctttcttctaacctaaccctacatatcatgcccaattaacacaaatcgaatttaccccaaattgctaaccctaccgtagatcgatcatttatttcttcctgaattctggcatagggtggctgccatgcatcgcactcagtatggaccctacgtgcagattagggctgattatgtcgtgtctgcttgtagggctccaacgccgggagttgtgaatggaacctcagcgtcgacaataagtgtcacctgggtaagatgatcacacgcggctacttagcggagatctattgaggcactaatattcccacgaatgaagacgtcgcaaataaccttgaca

SEQ ID NO: 62772 - DNA, 359 bp, Glycine max
cttcgtttaccattatgtcatttttctgtttctcaacctcgatttttccattcgcgcatgtgctaactctattcacgatcttatctacatataatctcaaaattcttaatttcccaattcattgttcgtaacagttatctatcgacctccccaatcgtacctacatctattctcttacacatttggatactgacttctgtacattgaccatttctttgcccttctcaccgagccacactatcaacattctgcacaattcctatgactagggcattgaaaatgatcgttccacgcattacaattcgaatcctattctctacaatggcgcccaggctaaacctcgattttctttcttgccg

SEQ ID NO: 62773 - DNA, 409 bp, Glycine max
gaaagagtctcgcctagccactactcctacttcatatcatatcattcacattcatctctcttcgtccatccatcatcgaagtaataacaacattcgcgcgctcttcgtattttccttcttcaatccgcgcgacaccaaaaccctagatccggcgcaatcatcgcgaggattttgaagacggtaattgttgttggaattggaggagagggtcccagaaggtggtggtaatgggtttcatggtggatataactgaatctgtttgtgcatatattacagggagagagaaagtttttgactttgagacaatattgctagagagaggaccggtggtgggcttggcaagaaatggatcctggtcgctatgctctgcatcaaggctgggataataacagcgctcttgagggataca

SEQ ID NO: 62774 - DNA, 286 bp, Glycine max
cccacgcgtgcgcccacacatactttcacttttcatatcttacttcactatttcgtcaaggttcattttatcctaaatcaacattacacactattacattaacgtcaagaatagttgtgtttttaactttttgcgtaatcaaaaatgactaatgaacacaacccatatccttatgtaagacgccatatcacacccacttttaataagtcacttgtctagaccaaagataaaactagctcaaccttttacaaaagctttacctatctgacagaaaatttatctctta

SEQ ID NO: 62775 - DNA, 190 bp, Glycine max
atgacacacaatcagactcacacgtatatgacagctccaatgttgcactacagggaataggatgcatggatcacgctagcgcgtgctacaaccctgctcaagaacgagatgctatattggtagtcacctatgcgtacaccaaagccatctcccaatcggatgctgctcatgatgcatggatctgctgcta

SEQ ID NO: 62776 - DNA, 145 bp, Glycine max
acccacgcgtacggatgaaattgaacttcttgttgtctttgaacttgttctatgctctttgctaaaatattaagcttgttcataataaaaaaaagcccaccaaaaaaaaaaaaaaaaataaaaaaaataaaaaaaaaaaaataaa

SEQ ID NO: 62777 - DNA, 337 bp, Glycine max
gctaactaacatagtattaaaagctcaatacattggtacaaacaccgttgattaatattgaacgcaaaaaaaaaagggctaaacaaaacaacaatgacgtacaaaaaacaaaaaaaaacgaaacaaaaacaacaaaaaaaaaaaaaaaacagggaactcgatcaagacaacccagaattactacaccgacatgccagtgatgcagctgatcaacaccaacaccatcatcaataaaatcaacaccaacgtacagctatctgactcatgaaacccgcggatcaccaaacctactagaactccaaaacatccgcctttggccagatcgactcttctcaaa

SEQ ID NO: 62778 - DNA, 450 bp, Glycine max
accacgcgtccgctgagatagagctccagcacctttatcattcatctgcggtacgtgcctaggggatcctcgatacctatatcacatagaagacacatcaccccagaacccaaggattctgaataatacaactgcaattatgcttatcggctcagtccaaaacacgctacgagaaatgagttcgattcattagttaaacactctggctgttccggttcgtgctgtgtctgatcaggcgatatctgcgcaatgccattctcctctccgtgattacttcgacgttccaaaacggcgtcgttagtctgactactatcggttccgtctagcttgaagtccaaccgggaatacaggctcgcgtgcgaatggaccttacacggtaactgatatcacgacaaagcatcaagatttgcatgaggtcaagaccacgaccaccgttgaaaaagcttctgt

SEQ ID NO: 62779 - DNA, 255 bp, Glycine max
tcctccgacgcgtacgcccacgcgttcgtacaaaaggatttcgcatgagagcagagctgagagacaaggggtaaatagtactccaatgtcgatcgctatacattcacaaacgagctgaggcagctgctaaagctgatgacaaagaactgggacaagtgacagagcacctagagaccgacaattccgtgctactgctgatcatcaactatcatcgttctcaggaagatcaacatgaccgtcgagttacaacgtcca

SEQ ID NO: 62780 - DNA, 364 bp, Glycine max
gatgaaattgaacttcttgttgtctttgaacttgtgctatgctctttgctaaaatattgaacttgggcataataaaaaaaaaagaaaaaaaaaaaaaaaaaaaaaaaaaaaaaaaaaaaaaaaaaaaaaaaaaaaaaaaaaaaaaaaaaaaaaaaaaaaaaaaaaaaaaaaaaataaaaaaaaaaaaaaaaaaaaaaaggggcacctaatttaaattaactaactctactttttacaacatttcaaaatgtaaaaaccttgatggtacccaaaaaaaacaattttgtggcacatttttaaaaaaccagtaaacgtaaaaaccaataagttcccaaaaaaaaaccttttaaaaaaaaacccaatt

SEQ ID NO: 62781 - DNA, 413 bp, Glycine max
tttgtatttgacattagttggtatgagtggtgatatttggacacccatgagttacaaacacggcgaccaatacctatcatttctctctatctctctcttcacatcacatcaccaatcttatctgtcacttatctctctcaaagcgcctacatgaccacaccctagggtgtcaaaatcttctacttgtcgtatatactcgtatgttctggttaagacacttctgactattcatggttaaataataatatgaatataccttccataatttaaccaatgaaaaaaaaattcaaattatggctaatccggtttaccctaactatccatgggggattttgagcccaccggtatgtgccgctattcaggatttaaaacattgggtttgaatattttacaattgcctgactatttgggat

SEQ ID NO: 62782 - DNA, 250 bp, Glycine max
ctcacacactccagatcatactcacattactttgattctttcctgttactccacatgcgagtgcaatttccaaacttaatgagccacctatccatcctacctctttaataactaaacatttacttattttccccaatcacccctttcttttccatttataaaatcattctatcacttcatttaaacccttctctgtataaaccttacctttattactataactccatcttcttatttcccaaaaatgcta

SEQ ID NO: 62783 - DNA, 363 bp, Glycine max
cgcctggctcgacccactcgtacagtcgtagattcaaagcgcagataccagtgcaggtgctaacccttataaggagccactcgtcctggtgcaattgaacaatcatggagtgacgcagttactcaaactattcgcactgcaaccatagtcaactatatggcacatgcataagcacctgttgctggtgcaaatagagattggcgtgaagctaatccaccaccactaccatccctgatattgctattgaattgactctgtccaaacaactggctgggaataaactcacgattttcgatgctatgatcttgcactgtgcttaaactgaattgtcctgcctagaagtaaactatggctcagagtttt

SEQ ID NO: 62784 - DNA, 239 bp, Glycine max
ttacccctcattcactatatttctaaactcacttctaccttctccatctcgctatttttacatattcggtctctcaacctacctaactcccttctcccaacttcaacccttactcattctcccaaatcaccctaccatctccctcttcatcacaaattacttcacaccaaacatcacattcccaaccatacccctacttcataatacaacaaccactaatatcataaatcttcaccaac

SEQ ID NO: 62785 - DNA, 251 bp, Glycine max
ccgatacatactcctggccaaggctatgcgattttgcgtatacgtatgttccgttattaaggggggatgcttctggggcagtttaacaaatactgtgccgacctcctctgaacaacgaagcctgaacaactaaggtcacagacacatcggaaccattattaaaacgtccattgactatatgatcttagatgtactattcgacaatatccaatactatatggatgcgactaccaccgaatgatgaggcacca

SEQ ID NO: 62786 - DNA, 278 bp, Glycine max
cgcattttgtaatttaatttagctaaatctaattaattattaggcgaagagttgtttttaaagatgaagctccttggttgttgaatccttatggtaattttgatttattattttatgtacttttattctattgtctcaatgatattaaggaaaagtcataaaataaaaataaaaaaaaaaaaaaaaaaaaaaaaaaaaaaaaaaaaaaacaacaataaaaaaatagtcataaaaatatatcacgtcaaaaaaccaaagataaagtctaaatgaaatca

SEQ ID NO: 62787 - DNA, 278 bp, Glycine max
agatgataagccttctgacaaggtgcaacgatattgtgaataacctgacgagtttattaggggacgtgccctatcatccactttgataaatatggcaccgtactcaactgtagaccgaatccaatacaagaaaaaatgcgggctagttggattgtgaatgacttgctcgaggaaatgcatgaacctagaaatataatccttcaatagccgtttattttgagatttttgtatcttcacaatgtaaatgtactaccatattgatagtggcgtctcattta

SEQ ID NO: 62788 - DNA, 187 bp, Glycine max
cccacgcgtccgaaaaaaaaaaaacaaaagatctataaaaaaaataaaagggaaaaaccaacgagaaccgatcaaaaacacgcaaagaccaacccccaaaaaacaacccaagacggaacaacagaaagaaccagacacagagcaaccaactagaagaaggccgggtcacatgcgagacgaccagaac

SEQ ID NO: 62789 - DNA, 219 bp, Glycine max
tcctgtactcaacgaaacggttctttaatatattggggatgccaaccctcacaacgatcatcccacaactctccatggtcaacccgaacacaatccacacctcatttaccctgacaatattgttccccttcatgctacatatccaccttatcctcatatccccattgatcctcctttcaaacatctaaaccattcttaaactgatccttcttgtccttt

SEQ ID NO: 62790 - DNA, 376 bp, Glycine max
cgggccgaccgacgcgtacggacccacggacaccgaactcaacgcacaggcttgcgcaataaataacacggcgatgatcgcgggactgatcaataaaaagcacgctcgtctgcatcacaaacacccaaataggatcaactgatataactgacacatcggaaccactaaaacaaggccttcttacatatggatcattgcctcttctatgctaccttatccaatactacatatctgctgatgcgagtcgatacgtcggaacgcgaatacgtgcccaatttggacactactcagcatgttacaatgatcacagttacctagaccgcgaacgaattggacacataatcctctgaataactacatgctctggcagttgaac

SEQ ID NO: 62791 - DNA, 306 bp, Glycine max
attcccggactcgacccactcatacactacttctagatctccaactaccacccttttttttttttcttcactttctattattaaatgaacttttctatatactggggctactctttacaattccctatttacatattcccacaacattattccaaacgctcttaaattcttcaacaatattttatacattcaattaaaatcatacccaacaaccatcaacaacatcactattctttaagatttacaaaccacaatttttctttacaaaatataaaacattcattataccaactttatatacaacta

SEQ ID NO: 62792 - DNA, 422 bp, Glycine max
acggctggtgcgccttggcttgccctatattggaccgcctgccgtggatggtgctcagtacttacggctgactgtcgcaatagatatgtcaggagcgttaatcggggatcaaccgtcggggacacgatgctaacctggacctactatcaatagcagagacagactactgggaagctgcacaccatacccaactggtaagcattccaaatgacacacttaggggagggccttaagaatgagcacatgttcacattatccacctgtgtgatccaagtgcttgcttagatctgattcatgaatctaagagtcatgagcgacagcatacgtgtagcgacttgggattaatacttagctttcacgtctgtggagataccgaatgacgatactcggtataagtgttccccacccattcgcgatgcata

SEQ ID NO: 62793 - DNA, 433 bp, Glycine max
cgtacgacccgtacctctctctctctctgactctccctcaccgaaccctagtactaacctgagagagcgctttagggaccgatacgccgctcctgtactcgctccccttcttcttcaagcattctgtcaggcgctacctagatcaatgtcccacaccagatctagatcactggtagagcgcagaacacattaataatggcacaagctgcccttagagctgctacgccaggcgataccagataacgtcaacagaagctacagagaattctatacggctttaatatagcccacacagcatgctgaacaggcagcatccgaagcccatatctcagctgtattcaaagctatcacctttacaagaccctcagctgaacccgaacactgtattcactctcttgacaggctaataccatattcaccgaactcggcacta

SEQ ID NO: 62794 - DNA, 405 bp, Glycine max
acgggttctggaagacggcagagctgccgccattttgcgggaagaggaggctctgtacctgcggtgctgcttttcttgcggagactctaggaactatccgagctccactccccacaacatactcaaaggaacggagagaaccgggacccccctgcggggacccggaactgatctgacaggatggcatctgatgactttgacatagtgattgaagccatgctggaaacctcctattaaaaagaagaagattaaccaccaaagaaaaaagttaaaaaggattatcctagcaataccaccagcagcaccagcaacagtggcaatgagaccagtggaagcagcaccatcggggagacaagcaagaagaagaggagtcggagccataataaaagcaaggatagaaagccc

SEQ ID NO: 62795 - DNA, 320 bp, Glycine max
acgggctgctgcaagaaaaggtatggctagtgttgtcaacaagaccaaaacgcgtgactgacaacgggcctctgatcaccagctgatacacagacatacactaacaagggctaacacgaatcgcgccacgatacacatcatgcagctactgcgcatgactatcaaaccttacttccaagtgaacaagcccatcatagtgcatttacactgtgcccattccgaaactgcactgcgctaggtatccactattaatgatatcgactcaactgctgcactcactctcaaagacaagaccgccgataaaaccaagaagtaaggcc

SEQ ID NO: 62796 - DNA, 365 bp, Glycine max
caatagtgtcgttcccatatgaatgttccggtatgtatccttcttgcatttcggtgcctagggggaactgatttagagatatatgggtactcaatattacccaacactcgatgggtattcagaaaaaagccgcgtttcctgtttaacagaaggttgtaaacatcgaatagaagacaagtgtcatgttaaaccggagttggcgattgcgaatacaatgatgggtggatggctaatttagtcttgctctgcattggaaactcaattgtctttgtggctaatctttagcgaaataacgagacatagtcaacgagagtgcagtttgcaagtctggcttaaagctagaatgtcaggccttacttcgtaaa

SEQ ID NO: 62797 - DNA, 394 bp, Glycine max
gatggttgagatttctggggtcatactgtatagtattgaaagattgcttgcctgatgtgacaatcagtttgtaaatgttgctaaatgataatgtttagcattgccaaaaaaaaaaaaaaaaaaaaaaaaaaaaaaaaaaaaaaaataaaaacatatatacaaaaagagagaaacactataataaaagaaacaaactacaagaaaatcatgaagcatgagatctgaaccaaacatgtacatttgcagatatacaaactcatgagcatgctaagtgctttcattcgggttgtgcagaaagagtataaatacttcttacgagctactcatcactagcggaacctattcataaatgacatcttaagcaaaaaactttttggccttgatcttatttgga

SEQ ID NO: 62798 - DNA, 424 bp, Glycine max
aaaaaaaaaaaaaaaaaatataaaaaaaaaaaatttaaaaaaaaaaaaaacaagaaaaaaaaaaaggaaacactaaaaatactgattttcactgatatattatgcaaggctccgatttaaaagctttctgttatatgcataatactttacttatttgtacgactcacaaatgctttgcattttttccccttctcagcatatctggctcgaagttattgttaaataacttgtacatcaatgacactcatgcatctagaagttctctgcgttcttaatttctgcttgccaatacactcctaatcaactttttgcacacccccttgacctatgcattaagcccttgaactttgcttaatactctccccatttcttgttcgctctcaaactccctatttcacttgcctttccctctttacccttcctt

SEQ ID NO: 62799 - DNA, 234 bp, Glycine max
cccacgcgtgcgctgacgcgtccggccacacgtccgatcacgcattcgggtcgatatgccctgccgtcaccagcaagatcgcgtattcgagatggactacgaaaacccttgtctctgaaatcgacagccgaatagtgaagtgtactaagcgaagccattgcaggcttgagaacgggcatgaaagccgaagggacaaggaatggttagaaggcatggacggctgacattatctcc

SEQ ID NO: 62800 - DNA, 318 bp, Glycine max
acgcagggactgtgatatacccacatccccggatctaggtgatcgcggtgcatgaacgaggtgtgccttcgcgggatccatgcgttgaggcccatgaacgccccgccgccagcatgccgtgggacgcgcggcggcctgggggtggcgcggacggcgggcccgaggcctcgggcgcggcgcgctcgcgagcgcagaagcagtgccgcaagtcgtcgttcgccttctaccaggcggtgcgcgacctgctacccgtgtggctgctggaggatatgcgcgccagcgaggccttccactgggacgagcgcgggcgcgcccgcg

SEQ ID NO: 62801 - DNA, 188 bp, Glycine max
cccacgcgtccgagttattctactaaaacctgagcattagacatataagtcggctgtgtggattttcaggggaaaaatgccggattgcatagacagcgttctgatttgagtgtacgacaagacccccctatatcatttgggttaatattacataattatgactttgctaaacaaataaataaacaaat

SEQ ID NO: 62802 - DNA, 341 bp, Glycine max
acacgacacactactctaaactttacctactgcactttttatcacgcatcctgttcctaataacgaattggttcttaattacagtccagatatcgattcttccaagttgcctgaaccacctgatgcgtatctgcttctggatttgtatattccttcatatacactacgcctctgagggcccatgattcaggtgctttaattcaacatattcaagggttcctccgtgggcatgcatttcgcgtgcaatcactttcaggaatggatttagatcaatgtgtatctataaagcacgcaattcaggcggaatagattgtatggaaggttcaatcttgcatcatgcg

SEQ ID NO: 62803 - DNA, 131 bp, Glycine max
acccagagcgaccctaacagtgtgtagatgacttaatgtgatggtacagctgagctgactgatacctgtcaatgagcgagtgctccctacgaggacgtacttcgtactattctacaagacatttgtgccat

SEQ ID NO: 62804 - DNA, 257 bp, Glycine max
cccacgcgtccgctccgaaggattcaagttcagatggattcaatgtgccctccccaaaaggacatgactatgttaatgatacactcttttttagtattttttaattcttttgcgacgaagcgtaagttagctttttatattccgtcatccacaggacaaatttcgatgtattagtatattgatactatacttatacgataagcgtggtaaattccaatttaccagcgaacataatatttctagcaaatgatataaat

SEQ ID NO: 62805 - DNA, 101 bp, Glycine max
acgctatgttcgcgaggtcgtatgatcaaactcccaaagactttgactggactgtccatcacctcgtatgctgcaagatctgatactacctataacgctaa

SEQ ID NO: 62806 - DNA, 165 bp, Glycine max
ggcagtcgtaccaagaagtccacattacgatatttcatcgtcgtgcaagtccactggcggcgaggatttaacacttcgggcaattctaacacatgtcttctcgacttctgactctactgtatcttctgaatctgcatccactaccagctgtcatattgtaagccc

SEQ ID NO: 62807 - DNA, 350 bp, Glycine max
gcggaagcacgactagaatcgaatataataggttagttagggtaccgtcacaattacgaagagggttgtactaagcctcgaaatttcggttgcagagttggtatcggattgtttcaagtgttgcaccgaagactccaatgatgccactaccaagattacgtactctggagctttgctggaagtctgcatgaggaaacttgttttctatcctgaagttgttggctctattgaagatgaaaaagatcaatttccatcagtaaagggttcaatatgtttttaactcttcaccaaagctaattatgctggatgaggtgggtcagcaaaaggaaacaatcagaattgataatggg

SEQ ID NO: 62808 - DNA, 268 bp, Glycine max
tcggagttctccccggcgggatacagtcccgttttcccttctttatcctgttttcctaaaagggtgatgttcctaatcgaacgggccttgagctctgacccctacgttctggaactcgtctaaaccctagacgactccttcccattctatccctccaccccactccctctccagaaccttcgcctctcctccttccaatcccttctcttcactccatggcccttcctactcgacgagcccttccgcttcacctacctatgcttcattc

SEQ ID NO: 62809 - DNA, 274 bp, Glycine max
ctcattcatgcttgtctataacacataccttgcaaagcactgaggcgaaaccaatccagagccagctcaacctatcatacacacaaaccttccttcaaaaccaagcacttcattcccaataatactgtctaaaaccctcggcttcgatgagccaccccaaaccaccgatttccacaccctcttcctcatgcacctctacttaaaccagcactcctgttgcttcaccgacgacaccgacctcggcttccgtatctataactgcgaccccttactc

SEQ ID NO: 62810 - DNA, 205 bp, Glycine max
acggtcggccttaacgtacttccgtctttgaatgtatcttatcatgactgatcaatccacaggggtggatactatacaatagtctcccacagcattacttacacagcatgtatataaaacaacttataaaacatactcatcatcatcacaagatgatgatgaatactattaaccctagaactctaaaatccaataacattttcca

SEQ ID NO: 62811 - DNA, 255 bp, Glycine max
cccacgcgtccggcgataatgcgctggcgaagggatccaaggaggaagtgctgcggtggtgatggtgtgggtggtgtcagagaaagaagggtgatcggagaccagtgcgagaagctcggaggagagagaaaaaagaaaaataatctcatattttttattttatctgatgtaaaaaatttcatcatatcttaatcaattttgaccgtttgattttctaattttaaaattgaacggatgcgatgcattttaaaattc

SEQ ID NO: 62812 - DNA, 333 bp, Glycine max
gcatgcaaacactaccatttcctgatttcgttataacagctacacctctaagagtaatcttggtgcttaaggatactattggaagaccttttataattagagtgacatctctgaacttattaatctgatacatctacaccatgaaatgacacgacgatcatgagtttaattttacctgcaaactctgctatagtgtgttactcctcttgctgaacagtatatcgtgccatagcctatatagaggtctacatcagcttgggtccacataactccagctaagtttaagagctttctaataacaaaaccgatgagcactaatactaccctgatcga

SEQ ID NO: 62813 - DNA, 303 bp, Glycine max
ctcacgcgtacacacacgctttctgtaaggttcactttatatatatgacaatagcgatgatggataatagtggaacatatatgaaaaggtcaccgtcatgtctgtactgactcaaggacttgctgatgctgattcaatcacttgcattgcatgggttatcttctacctcaatccaaagttagagcttgtatctcttgcttaacgagcaatcgtcctgggacgtgaactatataaagctctacatgaccttgagacgtcagaggatttgttatgagtatgagcttcatatccagctaacttatt

SEQ ID NO: 62814 - DNA, 360 bp, Glycine max
aagacacttattttgcattcccctaagttggtgcattagaagtaaccagtccctagtagagcctagtcgtgtcccagacgggccagagtcagtttccaacaccaacacatcagctaccctcaaacgccacctagggttagggtttctgcaattccccaatctctatcttccaaaaattagggttttttcaagccatggcggacggctactggaaccggctacatgcgtttctgcctcactccggcatgctcaaactgtcgcgttccgactacgatatgcctgcttacggtctgtctttcaggtaatgagatgcataatcatattgctcgtgatgatgaccgtactggtcaccgaatgcta

SEQ ID NO: 62815 - DNA, 142 bp, Glycine max
acgcccacgcgtccccccacacgtccgcttttttttttttattcttttttattattaacttatttgttgtttattacattgggtttttttttaccactaacctttttttacaaacccatctaattttatcttcaatcaatca

SEQ ID NO: 62816 - DNA, 261 bp, Glycine max
cgatcttctgcaccaatgtgcaatccatacaataacactggtcctgcagcaatgcaatggtgtccgacaccaatggttgcaattcctggcatgtgcccaccaagcattcctttgcaatttgtaccaccatcatactggagtggcacacaactttggaatgctggaaccgggacagtgtcaataggatccaatgcttgcctttaaaaaaaagaaaaaaacaaaaaaacaacaactaaaaaaaacacaaaataacaccaaatc

SEQ ID NO: 62817 - DNA, 146 bp, Glycine max
agttaatctagtgatgttaaatttgtcactaatctgaatatttttttataattaatcttgaacttattgataccatattctctttttcataaacaaaaaaaaaaaagaaaaaaaaaaaaaaaaaaaaaaaaaaaaaaaaaaataat

SEQ ID NO: 62818 - DNA, 432 bp, Glycine max
gagaagaagagggagaagaaagagaagaatatggaaaagaaagagaagaaaaaggagaaggaggaaaagaaagagagaaggaaaagaaagagaagagggagaagaagagggagaagaaagagaagaaaatggaaaagaaagagaagaaaaaggagaagaaggaaaagaaagagagaaggaaagaggagaaaaaaaataaattataaagaaacgaaacacgggcaagaaaggggagtagagaccactcaataaatgaaatagctactaaaggctttgttctctttttagttatttgataattatccaatttgagttatggagttataaatatgaggagttttttttcaaaaagaaaaaagcataaataaaacaataataaaaataaaaaaaaaaaaaataataataatataataataaaaaaaagggtggccg

SEQ ID NO: 62819 - DNA, 298 bp, Glycine max
aatagggagaagaaagagaagaatttggaaaagaaagagaaaaagggggataatgatgaatttaaaaagagagaggagaataaagagaaaagggagaagaagagggagaagaaagagaagaaaatggaaaagaaagagaagaaaaatgagaagaatgaaaagaaatagagaatgaaagaggagaaaaaaaataaattataaagaaacaaatcacgatcaataaaggggagtagataccactcaataaatgaaaatatctactaaaggctatgttctcattttattaattagataaata

SEQ ID NO: 62820 - DNA, 379 bp, Glycine max
cccacgcgtccgcccacgcgtccggagaaaagaaggaaccgattctagagagagaaaaagcggtggatttctagggagagagcggagggcgcgagcgcgatggttcagatcgcgaggaggaagaagggacggtcgtcgaaggcggatctggcgcgccgctccggcgagtcttcagccgccgcgtcgcagtccgatccccggcggagccttcggcgtcggagcgtgaggtacaacatcatcgactacgacggcgattacctcgacgacgactaggaggactagaggaggcgcatgaagaagaagctcaagctcatggcgaagctgaaccaggacggtgaagaagaagaagaagaagagcgagaagaagaagaagaaatcg

SEQ ID NO: 62821 - DNA, 405 bp, Glycine max
gagaaacatggcttccttaagctccttagtgctgctccttgcagctctaattctatcccctcaagttcttgcaaactatgagaatcccccagtgtacaagcctcccactgagaaaccaccagtttataagcccccagttgagaagcctcctgtttacaaacctccagttgaaaaccccccaatttataagcctccagtagagaagccaccagtgtacaagcccccagttgagaaacccccagtgtacaagcccccagttgaaaaaccaccagtgtacaagcccccagttgagaaaccaccagtgtacaagcccccagttgaaaaacccccagtttacaagcccccagttgaaaaacccccagtgtacaagcccccaggtgaaaaaccaccagtgtacaagccccc

SEQ ID NO: 62822 - DNA, 397 bp, Glycine max
gtttgtacacattcgaaaacaaatccttctttcacttaacaccatttcactgactcacgcgctcttcggatctaatcgtagagaaactatcatttctcttcaaccaccgtcgccgatggcgctatcggcttccgacgttgcagccatgtactcgctgctttcgaattccatgagtaccgatcaccgtctccgcggtccggcggaggacgcgctcgcccaatcggagtccaggcctggcttctgctcctgccttctcgaagtgattaccgcgaaggatttggggtcgcagacggatgtgcgcatgatggccaccgtgtatttcaagaacagcgtcaaccgctactggcgccaccgtcgcaattcctctggaattagcaattaagagaaaatgcacctg

SEQ ID NO: 62823 - DNA, 239 bp, Glycine max
gggttaaaagaaccttagaaaaataggggcgcctatgattattttgataaaaaaaaattggccaccaaggaaaccccacatgctcgttgggcatggaactttgaactaaaacatttaccatgcaaacacaactgggggcccattccaaaaacacacttaacttgccagcagtagtacacaatttacaacgcatacgagggccaccaaacttgggtttttcatcatcctcactagcattt

SEQ ID NO: 62824 - DNA, 174 bp, Glycine max
ctgcttatctaatatgctcttaagtatatttaataatctctcatttaattaggtatctactgaaatcttgccaaatttcttatgaataatcagatattattaaaccccatatctaataacccattgaaacactcttacaagactttttaacattaatcataaacacgatacact

SEQ ID NO: 62825 - DNA, 199 bp, Glycine max
gtgggttaaatagcaccttagaaaaaataatggcccccatattattattttcgtaaaaaacaaaattcccatccttaggaaaccccacatgttacttgcccatgaaacttttacctaaaacatttaccttgcaaacacaattgtggtcacattccaaaaacactctcaacttaccaactattttacccattttacaacc

SEQ ID NO: 62826 - DNA, 281 bp, Glycine max
ttgcacgcgtgggttgccggtgagaagctctggggggaagtggagagcggcggactgatgagctatgcgaaaattaatgtcgaaaacgggtcggattcgtgtacgaatatggcgtcagtcggcgggactgacttacctgacaaacgggtgtatgtgcttgcctgtgggctgtctctctagtactatatgacacatgtggctacgcctcagagtgccgacaccaaaagtgaccatgacatagctagtgccttagacaagtgccatgctggatatgatgtcac

SEQ ID NO: 62827 - DNA, 394 bp, Glycine max
tccacgcgtccggatagatctaatgaagatcactaggtacaaactacctagcgactattggaaacttcctaaacctaaccatctaccatatcttgctcatgctcaaaattatatcactcaatccgattactcatacttctaacccatgatgatagcagaacctgtagtcaatgcgacgagatctctatgaaccatcaacttgagtaagtcagtaattcaatgaaagacgctaacgactcataatcgttgctcactgtagaacccgattgtatatgatacaccgataaacaagatagttgctacaacctgtaccgagagccgagctcttatatacaacaccagccaatgtgtaccatggacacacgtaatctgcaatacattcacatcgcgctct

SEQ ID NO: 62828 - DNA, 286 bp, Glycine max
aaaaaaaaaacaaaaaaaaaaaaaaaaaatttaaaaaaatcaaaaaaaaaaaaaaaaaaaagaaaaatttgaaaaaataaacaggcggccactttaaaagactccctcttacttccacctactttcaacttcctacctctcctttatattctcctaaattcatttcactctccttctttttacaaccccttcacttgcaaaacctttcctttccctaccttaacctcctcccaccaaatccccttttctccaactctctttataccaaatagccccataccgatca

SEQ ID NO: 62829 - DNA, 259 bp, Glycine max
acggtgacagttgtgactcgttctttaccgacattatcttctttttctgtctgatgagtgtcggttttctgggtaacctgcgaaggtcgaactgcagctgtaacatgttagttgatgacgcgcctgtccgtgcggcaacggatcaaggagctgctagatggacgctgactagagctacaccgaatcaacacttcaccgagacactggtcatgggaatgtgtccacgataaggctcaattccatagagctgacataagtg

SEQ ID NO: 62830 - DNA, 140 bp, Glycine max
acacgtgcgctcaacttaaataggtctatacagatcctatgatctagctagccactccggggaatggggaactcctagactgccattttcaaatagctgtacttgccatccgaaatgaaccggatattcatgtaccgtac

SEQ ID NO: 62831 - DNA, 193 bp, Glycine max
tcgaccacgcgtacgacacgcgtgctcaggctttgaatgagctagtaaaataccaacgatgagctgaaaagtgctgcggaataggatccatggactgacatgtccaaatagctgtacttgccatccgaaatgctccggatgctcatgtaccgtgcacacttgcgcactgacctagacccatcaatgggaggct

SEQ ID NO: 62832 - DNA, 193 bp, Glycine max
accggtctggaatgacccactcgaccgaccacacctccgcatgcttcattataactataaaatactaacactgagatcaacattaaggtgaaagagtaatacataaactcagctatccaaaataatgacacatgaccacctaaacgctatatcaatccatatcctctacagactaactaaaagattccttaac

SEQ ID NO: 62833 - DNA, 300 bp, Glycine max
accactcctacgactagtcggtctagactctggaggagccttatacagatccgcatgagcgctcatacgcaaatcggggatttatctggcatttactataaccctattcaaataaccctaacctcaccgataagtcccaattgcaataattgaatgctaaatatcaagcgcatcataactatgactaccacttacgctttctcacagatactctgatactacgtactcttatacctatagggatgcagaactttatgctctaggcgttagagtgtgtaagtcagacactgatgacagttt

SEQ ID NO: 62834 - DNA, 395 bp, Glycine max
aacacgcgtacgcatccaatgtgttgcctggtgagaggacttcgtctatggaacgacagcgcaggactggtaatatcaaccaatgtcaatgcactagcgagttatctagatatatattgaacacacaggccatataagaagcgtgcaaaattttcaccgaagggttgctagccccacgatagtgctgctccaaagataggtttgggtgaagaatctcaagagacggactccacatgatgtctacgtggcgatactcatgttcataacatctgcaccattctagctaacattgtcacgctgatatgcactaatggcagaatatatgagttcacttataagctaacttgtacatatcatctttcatacatgctctaaactggagcaactaactataa

SEQ ID NO: 62835 - DNA, 437 bp, Glycine max
cttgttccttttgaaggttagaagtgctacaatacaaacaatggcagctactcaggaaggtgtgaagcttttgggtattgtgggaagcccatttgtgtgcagggtccagattgcccttaagttgaagggagttgaatacaaatttttggaagaaaatttgggcaacaagagtgatttgcttctcaaatacaaccctgttcacaagaaggttccagtgtttgttcacaatgagcagcccatagcagagtctcttgtgattgttgaatacattgatgagacatggaagaacaaccccatcttaccttctgatccttaccaaagagccttggctcgtttctggtccaaattcattgatgataagattgtgggtgctgtatcgaaatctgttttcacggttgatgagaaagagcgtgagaagaatgttgaagaaacatatg

SEQ ID NO: 62836 - DNA, 361 bp, Glycine max
caaggacacacatatcactttcccggcctctatcatgctgtctaccggtcgtgaacatggtcaacgtcccaacgacagttactgatgcacaaatatgagcctaccttgcatccaacttccacatacgctcacgagcaatactttatcgtaactgatccattccctgctcgaaacgctcttgctctctggcatcttgtcgagatccttgcgaattatcccactcatccagagggcactacagctgatcttgagaattcaaccgctcttccatgtgctcaagcgctaggtgctgatacaagtcacatgactcatactgatgggtaatatctatcagcgcctagatcaaagaatgtaattataa

SEQ ID NO: 62837 - DNA, 417 bp, Glycine max
gattatcctaagtctttgggaatagtgctgcaatggcttcaagtcaggaggaggtgacgcttttgggagctactggaagcccatttgtgtgcagggttcatattgccctcaagttgaagggagttcaatacaaatatgtcgaagaaaatttgaggaacaagagtgaactgcttctcaaatccaacccagttcacaagaaggttccagtgtttattcacaatgagaagcccatagcagagtctcttgtgattgttgaatacattgatgagacatggaagaacaaccccatcttgccttctgatccttaccaaagagccttggctcgtttctggtccaaattcattgatgataaggtttttggtgctgcatggaaatccgttttcacagctgatgagaaagagcgtgagaagaatgttg

SEQ ID NO: 62838 - DNA, 227 bp, Glycine max
tcgaccacgcgttcgaaatatattatcttggtaaaaaaaaaaaaaaaaaaaaaaagaaaaaaaaaaaaaaaaaaaaaaaaaaaaaaaaaaaaaaaaaataataaaaaaaaaaaaaaaaaaaaaataaaaaaataaaaaaaaaaggacaaaattatagaaggtgactagtatttataaatagaacaaacaaaggataaattaccttaaaaggaccattaaagtaaaaa

SEQ ID NO: 62839 - DNA, 453 bp, Glycine max
cccacgcgtccgcccacgcgttcgcccacgcgtccgcccacgcgtccgcccacgcgtccgagatattgcagttttgtattggcaaaaagctgctagttatggccagactagaatatttgaaattttgcagtacgttgctgcacaatcaacaccttcaccacgccctgctcagcaacaaccagctgtgagggtgcgtcaacccgcatctagtaatagccaaccagcagctgcaacagaaccacaagctgagaatccatcttctcctacttctagctcatccagtcagcaccagaaggaagtagcagagaagttgggttcttcacaggtgcctaaagcaccctacactgttgcaggtttaagtagccagaagtctaatcctatacctgcagaggatgagccaatgcagattgaagcagcaccaccttcatcctcttctgcaaatgaaaatgagaa

SEQ ID NO: 62840 - DNA, 92 bp, Glycine max
gagatgtccaaaggagagcattgacggtgcgcactaaaagatcgaataatgcggactgagatgcatatgccaccgaactgtctgaattgcca

SEQ ID NO: 62841 - DNA, 218 bp, Glycine max
tttcgttcattcccaggttgttatgacaccaggaatccgatttatttaccggttattaccacctcatctaatgatctacgcggaacctcgcatcctgacattatttatacatgcactaattcagctataataataactttttttacaaaaagaaaactatgattcccgtcatggcattaaacatattttacccttctgcaactagcccacataacatg

SEQ ID NO: 62842 - DNA, 212 bp, Glycine max
ctcacacatcatgggtttcataaataaactttgaaatccattacagttatgagcacatgcaaaaagtttggaggagcttgaagtttactttactcaatatctcttagtgttatacagtgattatgtagataaaccgtgacaattcaacgaacaagttccaaataaaatatactaaataataattaattattatataaatatttataactaat

SEQ ID NO: 62843 - DNA, 427 bp, Glycine max
cccacgcgtccgtcttgcttgatggttccctggtttatggaggcagtggcgcaaacagggcggttagtatgtggccagttccagctgatgaagttgatggtgttgaagaaccattcttaagagcacttgtttcctttctgtctgctttgttcaaagagaaaatatggaggccggagaaggcattgaatctgatagaacttcttgtgaataaactctttcttggtgaagctgttaatactaattgtcttaagattctacctttgcttataaatgtacttttagaaccattgtatgggtatgcagagcctggtacaggtgttcatcattgttctttagaagaaagatttgtgcaaaatactatgatagactggctggagagggccggaagtcttacacctttggtcacatggaaaacaggagaagacat

SEQ ID NO: 62844 - DNA, 413 bp, Glycine max
cccacgcgtccggacagaggctgagaattcgccgtcctagaaaaatcttgcgaatcaaagaaggcggcaagaaacgctttttcctttctctctttctctcactacttactctctctacaacctccgatgtcccctcccttctccattgcctccttccccgtcctctctctccggttgtggtagttggaaaacgaagggtaattttggcagctatggagggtgaactcaaccagctgaagcgtgccgccattgatgcctctgctagagctatctccagtggcatatccaggacagtgacgtcacctctcgatgttcataagattaggttccaggttcaactagagcccacatcttcatggactttactacgcaaggatttgtctacaccttcatagtatactggcatgcttcaa

SEQ ID NO: 62845 - DNA, 470 bp, Glycine max
aaaaaaatcaaattgaatatgggagaaggaattaagaaccaggtatttaaggagaaaaaaccatcaagggaaacttttgtttgtggagcatgtggtaaggctgggcacatgcgaacgaataagaactgtccaaaatatggtgaagatctagaaactcaacttgaatctgcagacatggaaaaatcatctggaaaatctagctttgtggatccctctagtctctcccagcataaagctccctccaaaaagtcaatgtctaaaagcgcaacaaaagttgctcctgttgacaattcaacaaaaattccattgaaattcaaatgcagctccacagagaaatcttctgataaacctgcagtagaaaccctgcatagttctgacaagccagtcacttctgactcagaaactgcaaagtctgctaaggttaataagataattatttccaagaaagtgataccagatgatacgctggc

SEQ ID NO: 62846 - DNA, 336 bp, Glycine max
caatcaccgtgctctttatatagctgcttcgtactacaaacactgactagggtgatggagaccattttaagtatcactggttaacacacatcttcacagtaactcatatgataccactgaaactctgaaggatcgaacatgaatttgaaactgcgactcatgattcaagatatataacctatcaactttctatggtactatagactgcctaccatgctgttatacggttcgaagacaaattactgattctaatgatgagagacatcctgactaacacctaccacatacaatgcacgcaccaagtgctcagattacacaatactgacacgaggatgc

SEQ ID NO: 62847 - DNA, 262 bp, Glycine max
aaaaaaaaaaaaaaaaaaaaaaaaaaaaatataaaaatataaaaaaaaaaaaaaaaaaaaaggaaaagggaaaaaaaaaaaaaaaaaggagaataaaaaaaaaaaaataataaaaaaaaaataaaaaaaaaataaaaaaaaagggggctttttattaaggtccaaatttatatttctctattatattactaaaatatttttattttgtggccccaaaattaatttatttggccttatttataaaactttataaatgtaaaaa

SEQ ID NO: 62848 - DNA, 165 bp, Glycine max
caagatggttctgctagagaatctctggtatgactgattggctgaccctaaaggtgagggagatcttcgcaagctgagaatactcaccattctcaaagctattgatgaaggacacatgtatcaagttgcacaagacgttgtcgataccgtctacacccacaaccc

SEQ ID NO: 62849 - DNA, 268 bp, Glycine max
tcgtgctatggtacctatcttcaaccacagaatcaatctctatctaccacccattgtctcatgtctcactacgtatcccatcatccatttctcacattcttaatcttactatcaccaccattattatcattatcatctccaacctctatgctctcgtaaacccttaaaaccttgctctcaagccacatgaaatgaccctcatgtgagaacatgatttcccccttaatacaatgtcaactgctacttcttattcacaaccaacctcaca

SEQ ID NO: 62850 - DNA, 289 bp, Glycine max
acccacgcgtcctaacaaaccaactccaacctttcactctctctgtttctgcaatcacaaatttgtataatataaatgttaacgtgtcctgaaaacctaatcactctctctacttaaaccgcatcaattactctaacaaataatctctctcctccatcactgtacacctacttaatatatataacaccaaacccattcactatctcaagttaaaaatcttatcccactatcttcattccaaggaacttcccatcacaataatccaaccctaccatctatgtttcattaa

SEQ ID NO: 62851 - DNA, 217 bp, Glycine max
cccacgcgtccgcccacgcgtccgcttgatcagggtgatttcttagtacattttatgggtgttgcaccaaattgaccggcttaaaaggcctgttaaagcttaagttgaaaacctgcagcttcttttaaaccttgctttgcgtcctacagcagttgcagcaaatccttttattgaaggcttaccctgggtgggggaagaacctcttttgttaaaaagg

SEQ ID NO: 62852 - DNA, 330 bp, Glycine max
gactctctgtgagtcaaacaccgatctgaatacacaattgagcagcaagtacggatccatggtgagggaaatagtggtgatgacagtaacgataatgtgaattagatgaacgaacacgttcaagttgacgctaacggagagattgaggaggatcagagtaaagtgcatgccagcctggagcgggtgcaccggattgttacagcgttagggatcaacctggactaactggtgagctcagaggattattggagcgttttcaccacgataggagtagtggtgaacttgctgaacgctgccatggacgactgttcggagtgctacatgtactag

SEQ ID NO: 62853 - DNA, 405 bp, Glycine max
cgttaattcatttcagctttgcacattcataaacagaagaattcctcttcaataatttcaaatttcactacttgcttccttagaaagaggaactacaattgatagctagcctccacccaaacatattttacgtgaaactcaccaagaaaactaagggaaggtaccaaaacacttactaatgatatatatggctttgatgtcatatttcttgaattgctttactccatccacatcatgtcaagtctctgactatgccgaaggatcatctcaactgaaatctccttcttcagagaaacaaaaatcaagaggagctccacttgttgtttcctatttccccatcaaccattatccctcgcgcttatagtgctatacaaggcttcttggtgcagcctttttacccttttc

SEQ ID NO: 62854 - DNA, 422 bp, Glycine max
aagacactggggatactctctgcatttggtaaaacatggttgcaatgtcacgtgttgtgcacactaatttcagccgaaaaccaacaaagacttctggtgctgactacctccagcattcacaagtaaagttggtgactctcgctgatggtttggaggctgaagatgacagaagtgatgtgacaaaacttctttcgtctataaaaagcaacatgcctgctttacttccaaagctcatataagatatcaatgccttggatgctgacaataagatcacctgtgttattgttacatttaatatggcttggacattgcaagctgtccacaaactatgaatcaaacgagctctattctgtccagcatttgcaacttccatggatactgatgctcgcataccacagatgatttatgattgcattattgat

SEQ ID NO: 62855 - DNA, 431 bp, Glycine max
aaaaaactgtttttagtttttacactaaaaaaaatccctttcttctattgagtccatgtccaagaatcacgttggaattgcggatcggagctccggtggattttgtggccgttgaagccagcaagggtggtgccgacacggtggttgccgttgtgcttccaattttttccggcaagggcacttgttagttccttcctcagattaaaaggtcaccggttcaggactcgccctcaactcggacaccaactcaaccaccttgtcctaatgtctgtggagagcgaaactgggtcgtttcgggactctgaaactcggaacaatcttcgaagaattcttgagtcatgctctaaattggcggaagctggagattttcatgaatctgaaaacacagcagtttcagagcttgtcgagttccttgattctttgttggatgc

SEQ ID NO: 62856 - DNA, 431 bp, Glycine max
cggacgcgtgggcggacgcgtggggccgatggaaatcgccgcctgcctggcttacgcgctctccgtgtggcttgccgcgcgcaacaatgtgcatacgtggtggacgggcattatcggctgcgtgctctacggctgggtcttctactccgttcagctttacgcggatgtcaccctgcaactcttctttatcgtcagcagcattgccgggtggatcaactggctgaagggcaatcacggtcagcaactggcggtgcgcaaaacgccgctgcaacatatagctttcctgctggtgggcgcgctgattgtcgcgggcggatatgcctggctactgcaccgttttaccaacgcctggtcgccgtggctggactcggcgattatggtcttcagcattctcgcgcagtttatgctgatggggcggcggctagagagct

SEQ ID NO: 62857 - DNA, 101 bp, Glycine max
tacttcatgactgtttttttaggtctgcaccattcggggggcataaggctgctcgcaagatgtcaagaaacatacgttcccttccataaactctcggtcca

SEQ ID NO: 62858 - DNA, 457 bp, Glycine max
  unsure (1)..(457): unsure at all n locations
cggtctaaaatattcctatctgaaatctattaaaaataaagaaattgtcttgctcataggggggaggtgtataacctggcggcattgaaaataacaattaatataaattgattgaccataagagtatcggtcagtgacaaatcaaaagcgtggagtgggtcttgcgttgtgtaggaatcccaaattcatttcttgttctcattctcaattcttcttttattctcattctgatttgccacacacgcataaaggtttaaaatattgggacttgattcactggaggtggataaagattgctaaaaacgtcatttgctttgtgcttgatatagcaactcaatgatattgcttcattgggttcaaacatgggcaattcaacataggacttgtngtgatattaattaatattgacccttgtgcaagccaaagatgcttttgatgattctcaaaaaaactcttt

SEQ ID NO: 62859 - DNA, 305 bp, Glycine max
ccgggcgacccagcgtcggaaaagaacagctgatctgctttggtttataccaggctcttcattgatgacctattattatcacaactttccaaaaaaaaaaaaggtggagatgcacggcattgacgatcacaaaattcaacaggatgaacccgttggttcacttgctccaaggtatgaatctgatacgattcagcatatacggaatccatggagcactggactatttgactgtcatgagaatcagacaaatgctggtatgacagcattttttccctgtgtaacatttgcgcagatagcaaaagtac

SEQ ID NO: 62860 - DNA, 181 bp, Glycine max
acccggggggacccaccgtccgaagggtttatggttcacggtctgttttgaaaaatgggttccaaggtttggcttgtggtaattatgttcataacggctatacttctgatccctgctgaggtggcacccaatgaataccaaaattttaacaaaaaagatgggaagcatgctccaaatgggt

SEQ ID NO: 62861 - DNA, 414 bp, Glycine max
attaccactctcaccccacatcccagttagtacacacttccacacaacacacggaattgttatgttttttaaataaaaaccaccccacttcttttatcaacaacacacgcacgctataatcctaactttccaaagaacttactatttttttttcaggtggtggggcagtgaagcagcttaaccgggaagagaaacaaaatgggtcaacggtggtgccggtgaacagagtggtggtggaggagaagaggttcggcgggccggggtcgtcgacgccgtcgtgcagatccaagtgcggatggtgcagtccttgttttacggttcacgttccggtccaaccgggtttgattattcgcctcgagtactacccagaagcgtggcgttgcaagtgcgggaacaaagcttttatgccatgac

SEQ ID NO: 62862 - DNA, 407 bp, Glycine max
  unsure (1)..(407): unsure at all n locations
aaaacatttcatccggagaattcaaagagattgtcttcctactagagctcgagtagttcaaaaaggtgtaatttgcccttcaactttcacttattgtatgtctgaatttgaaaacgcatgacacctgtttgtgaattgtccaaaagctcgagaaatatggcaccaaacctacctttgggagctagtatctgagagattcgcaaaggttgatggaataagggagttggtgtttgaattacttgcagcacaaaattcttgaatagccatgatccttttgcagcatctggatttgtcgaaatgagaaggcatgggatgacaccgagaagcctacaactttatcactgaccaacacaagtcaattcttncaagaatggctgcatgcttgttcaacaaatgctccaacaccg

SEQ ID NO: 62863 - DNA, 216 bp, Glycine max
gcagaagtggaaacatgatttgtatcaagaggttaacaacgatcctattcctaacaaggaggattaccagattgaatagttagaagcactattggcttcataatatcaaacaaaaacaagtatttgctaagcctttttatttattttaaaaaaatcaactcgtggcttgtcggacaatttccagagatgatttttgcttaatttaccaattgtgtg

SEQ ID NO: 62864 - DNA, 360 bp, Glycine max
acgcgaagatcttcgatttacggttttcaatttcgtattcagcaaggtcagtgagcgcctgattcgctgaatttctttcaattcttaatcatttttttgttttctgttacagtagaataccaacccccaaaagctgtttttcatttggtagtagtactagtatatgatgatgatgatgatgatgatgatgatgacgatatttgtgtgtgagaaagaagtgtgcttgttgtgtgcaggcggcgagtgtgagatttttagagagagagaggtgaggacgctgagtgctctgctgagagattccataaccccaagaggaacatgaggaggagaacgtggatagattttttttccttttttttt

SEQ ID NO: 62865 - DNA, 291 bp, Glycine max
aaattatacatttaattccagtgcaatgcctgatcctgttattaagatcgtaacctagccatattacgaccaccttatgaagaactaaagcaaaacatcatgcagaagcatcaacattctcaagcatgtgacgatcgagaattattatttatcagcaaaggaagaagcaaaaccactagcgagaagcctctcaacatactagccgagaatatacacctcaagattcactttttgtccgacattcttcagaggaatcaccactttcttgtgagtgtaagcgaccaacatgaa

SEQ ID NO: 62866 - DNA, 343 bp, Glycine max
tgcaacattagcccacctgatcccaacattttcatcggtgaagtacattggaatgcaactgctgaccctgaacttattctagacgtggaaacagaattagcacaggtccccaatgaggaactaaggaagaacgatcatgacattgtgatgatcggaggcgctctcttcttgaacgagcacaagctcacatgtactggatgggacgatgactatgctgccgaaggaccaaaggcttttgatccaaattctgctgtccaaggctggggggaaaatctgcaagtacacaatggagtagaatctggtaaactgaagcatgcttctgctgaacatgcaagtgaacatg

SEQ ID NO: 62867 - DNA, 236 bp, Glycine max
ccaacgcggacgtcaaattcgacgtcagaaatcatggaccatcttagattcattcatcgaggagagactatcacatatggccatgggcacttttaagactctctgaaagcactcaatttactagacgtgcagactccgactacgataacgaagagaagacagagctctacgcaaactcgaagaccacgcactccaacgagataaaagacgttgacacaaaactaaaagccttagaa

SEQ ID NO: 62868 - DNA, 189 bp, Glycine max
cccacgcgtccgatcacgcgtacgcccactcttccgaaaaaaaaaaaaaaaaataaggatttgttttttaaaaaaggtagaaaaaaaaaaatataaaaaatttaaatatttattaaaaaaatttaaaaattttatatattataaaaaaaaggccgccccttttaaaaaatttaaatttatttacccttt

SEQ ID NO: 62869 - DNA, 185 bp, Glycine max
atcgaacttcaatttccctacgggcttaatatctccccgcatttgtccctatcctcagtggtatcatagtagatagtcattccccttatctatctctcttctctctccccgcccaaaccctaactccctaccctattccgctttctctcatccatcatgaaacgaggaaagtccaagacccaatc

SEQ ID NO: 62870 - DNA, 433 bp, Glycine max
  unsure (1)..(433): unsure at all n locations
gaaaaaccgggccgaccgcacgcgtacggctgtgaaacccaacctgctctacgactttttgtgcaagccgaatgatatccacgcgctgtatactactccgtgggaggagcgcgtgaaaaaccacnataaccacacggtgcacgccacgcaccatatcgcttaatcttgtattcacgcgtcgcggaagtgtttttttttttacttttctcatataaaatttaataccattatatctatctcatctttttattaatatctttattatttaatcttatcattcattataaaattatattaaattattttttattgttttcttataattttctttatttactttaactatattttatttattttttttttaatattattttactttcactattatttcatttatattttattctatttaattattttctttttattt

SEQ ID NO: 62871 - DNA, 378 bp, Glycine max
gatcaactagcttcactctctctcaatgacaatcttgtgtcttagattcctttagtggtgggactgtaatctgcgtgtgcagttattcctattccgtatgcttccccccagtttatttgcaggtgtcttagatgttttgttttagtcagagtactaaggaagtttatgttcttggtacttttggtttcactttttttcctatctgaattgctgtccgatggattagcataacttgttggatctattatagcaatgctggtctcaccggcctcaagatcatcatcaacacctatggaagattgggtgcacatagaggtattgccttctctagtgaagatcctaccaacgttgataagaattgtgcctacattgtgaatg

SEQ ID NO: 62872 - DNA, 273 bp, Glycine max
cccacgcgtccgaaaaaaaaaaaaaaaaattatataaaaaaaaaaaaaaaaaaaaaaaaaaaaggaatatttaaaaaagagtggaaaaataaaaaataaaaaaaacataaatacaaaataataaattaatatataataaaaaataaaataatttacctcgttctaaattttaaaatttttttatacttaaaaaaccaaaaacgtttcccatcttaatttcttttcaaaatatattcttttccccagtttttataaatatctaatattgttaaa

SEQ ID NO: 62873 - DNA, 414 bp, Glycine max
gagggattctcgtgggaggaggagcagggagagggagtatagagagagggacggtggcggacggaggaggcatgggagtccggccagggaagggagcgaggagcgccgtgcgaggatcgagcagtggaatcgggagagggaagagaaacaatgatttcgcaatgattctgtgttcatttgcttgcgaagaatgaataaaccatcaattaagtcctcaaactattattaccctgtgtctctccttagtagtccttaaagtaatgaatgaaattagtgtttaaggaatgtatggagggctgaatgtccgtcactgtactctaatttagaaggttatgttaatatttggaagattacttggcatgctttattggacttttaggactacttaaatagtttagttttttttattagttt

SEQ ID NO: 62874 - DNA, 311 bp, Glycine max
ctcatccctatgatatcactaactgtcagacttaacatttcaatttttaagtaaaaagtggattaatttgatttggaaagcaaggattaatactatgccatattatcaccaaacaacgcacaaatattttactgaacacacacacacacacacacacattaaccattatacattatttacattacaaagagtaattgattttatacaactatgatatttacatctccaaatcaaaagaattaatgaaccacactacagagaagttgatcacaaaacataactctatcccaaaataatctaaacgctattat

SEQ ID NO: 62875 - DNA, 277 bp, Glycine max
aaaactttccaattttggcttggccaatttttgtcctgaaggagatgacacacacgtttgtactatattcatgggcacacaatgctattctgccccataatacatcattacatgtaaataatttcacatcatgaattaaaaaacaatgacaggttgacttgaatttataatttttaactcattgctaactcaaatctcacacttgtacatttttttcttctttcctatatgacacttttacatcaattaattaatttttacattttttctaatcttc

SEQ ID NO: 62876 - DNA, 225 bp, Glycine max
aaaaaaaaaaaaaaaaaaaaaaaaaaaataataaaaaaaaaaaaaaaaaataaaaaaatgtgggaatataaaaaaaggaaggggggggcctccccttttaaagaatccaatcttacatacccttgcattcaacatcataacttttttatattgtcacataaattcaattcactgccctcttttttacaacttccttactggaaaaaccatctctttacccaatta

SEQ ID NO: 62877 - DNA, 352 bp, Glycine max
acgctcatctttatataacctaattgcaaagattaataccaagcccgttttcttcttgttcgtcctctgtacactgcgggctgatgtctgttgtggcaactgagccatccaaagatgagacacaagcagaagaaccaaagacacagccagatgcctggggaagaggtttaagtggggggcatgattgaagctggcgacacagaagaaactgggggcatggcctaagacgacacaaagaacgacattgcggatgaggacactgttgatgacatacgcgatgatgcatattctacggacaaaagggctgcaaatggatctgaaataaaaatcacaaatatatgaactgaacaca

SEQ ID NO: 62878 - DNA, 285 bp, Glycine max
aaaaaaaaaaaaaaaaaaaaaaaaaaaaaaaaaaaaaaagggcgaaaaatataaaaagattggtgattaatataaaggtggatgggacaatataaaattttatataatgttaaaataaaattaaatttaattcacttcattttacaacgtttttaaataaaaaaacacttaaaataatttaacttaaattaattgaataacattttcatttatccaactttaataatattcgaatattatcgaacagatcaactttacaaacattttcgcaaaattaataatgaa

SEQ ID NO: 62879 - DNA, 136 bp, Glycine max
ccaataaatactatcctaccctaacactttttttctcatcggagcttccaacaaccgggtgttttcttaaaaaagactatcttcaactccccttgtctctacctaccatctacattacttattacaaccataagtt

SEQ ID NO: 62880 - DNA, 273 bp, Glycine max
ctaaagacaaacctcattgaccataatcacatctcctaatgcagaaaccgacatacgaaaggagcgttctcacatgagatgacagacgaccgggtgcatgctatcccaaagctaggtatgtatgcggccaccgatcactggacctttgacgccatccacaggggacccctccgtagagtcgacctcgactccggaacgaactgctgggccttcgatatcggcgacctatgaatcctgagctcccacagatgttgcaccaaacgccagaaatga

SEQ ID NO: 62881 - DNA, 393 bp, Glycine max
cccacgcattcagacacacgtacgctctccaacgctacagggtctgacgcgaaaacccaggtggaatacatatcgaagagcgtcgaacagcacacactctgtactgttgggcgtctctatctcaactgtaattacggatcaatctcttacaattggtctccacccagaatgaaaactaaccgagacatcatttacaccaggctagctacacaggcttgtactctgaaaacaatcatccagagctgcactagtataatattatgatcataaagcacgaaccaacgctataatcgctattttggacactgagttcaacgcatccaaagtaccatgataaattctttatctataccgcgggatcctagtactagctactaatacctgatatgatta

SEQ ID NO: 62882 - DNA, 234 bp, Glycine max
gtaggacagctcctcatagtagctctttctttgcaacaaaactttgtctcacttttaagggaacgttcaccatcgtaccatggttactccaagacccatttatattcatactcacctctatttctggctttatatatatacatatatatattaatatacccattgtcaatcaataaaaccgaaatctactacgaaacaaacagcatatacatcacataactgctaccaataaaa

SEQ ID NO: 62883 - DNA, 215 bp, Glycine max
atatacttggtcttctctagaagtatatttatcagactttcgataccgcccggatatgatcggtcttgccttctcttgcactctgaacatagtgcgatcggttgcctattgcagattaagatctgcatattgacattggctgaacggagttagttcctagaatgctaacaccgatcccttatcattgggtattggttacagaggccagctcctaa

SEQ ID NO: 62884 - DNA, 63 bp, Glycine max
aaaaaaaaaaaaaaaaaaaaaaaaaaaaatttaaaaaaaaaaaaaaaaaaaaaaaaaaaaggg

SEQ ID NO: 62885 - DNA, 308 bp, Glycine max
aaaaaaaaaaaaaaaaaaaaaaaaaaaaaaaaaaaaaaaaaaaaaaaaaaaaaaaaaaaaaaagagaaaaaaaaaaaaaaaaaagaaaaaaaaaaaataaaaaaaaaaaaatacaaaaaaaaaaaataaaaaaaaaaaaaaaaaaaaaaaattactataatcaaaaattaatcaattaaaaaaacttaaaaaataaaaaaagactcttcaaatcaattcatcaataatcaaataactatttatccaaaacaacctcctatagaaaaaattaaaccacaaatttcacaaattgaacaaataaaactaac

SEQ ID NO: 62886 - DNA, 433 bp, Glycine max
cccacgcgtccgctcacgctttctgtctttgtttattcggctcgcacctactttcatgctgcgcagagctacagtctcaccgatcttgcgattatttttctaatatgttatatgtgctagagagagagacccactcttggggacactcctgttaagacccgcgaacgaaatattgctagtccagtgaccccttctgcattgtaggataccctggatcatatttagtcggatcagggtcgtgatctaggtcttgatagctcgaatgttgaatcttaataccttaacctatgaagatgctgggactcctagattgaggatgcttataatggcggtcgtacacaagcttgtactacgaatgatgatgagggggacggttagccatactatatgattgagtgcgagcttaatcgtgtaggccacttaccatctgtca

SEQ ID NO: 62887 - DNA, 400 bp, Glycine max
cccacgcgtccgcccacgcgtacgctccgtgcgtggctatgatatagcacacatacagggcctattccttactaagggtgtgaaatctggagggagaatgctaggctctgaatacaattatgcgacactacccatttacaatggcgaacagcccctattggggccaccttcttacgccatcgctcatgctgagccgtcagaactcaatcatgcagcggaagaagagacactctatgaggagcttcagagcacgttggatatgaaggatgtggatgaaagtgatgagaaagtttcggactttaacgatggtggaggagtttgtgatgaagaaactggggacggtgattgaaaaagtcacggttgggagacccatacttgcaatgaggaagcgggtgtttat

SEQ ID NO: 62888 - DNA, 429 bp, Glycine max
tcgtctttgcgcagttccctacctctcctttcaagatgcagatcttcgtcaagaccctcaccggaaagaccatcacccttgaggtggaaagctctgacaccatcgacaacgtcaaggccaagatccaggacaaggaaggaattcccccggatcagcaacgtctcatattctccggaaagcagctcgaggacggccgtaccctcgccgactacaacatccagaaagagtcaacccttcaccttgtccttcgtctccgtggcggcatgcatatcttcgtcaagactctcactggcaaaaccataaccctagaggtcgaaagctctgacaccattgacaacgtcaaggccaagatccaggacaaggagggaatccccccagaccagcaacgtctcatcttcgccggaaagcaacttgaggacgggcgcaccc

SEQ ID NO: 62889 - DNA, 124 bp, Glycine max
gcgtcctattccttcccagcctgtatttttgtatcaacatcaacttgttcctggtatgatgccaggtgcagctccctttccaaatttgtgtgtgccaatggttcaacaaggacaacactgacag

SEQ ID NO: 62890 - DNA, 330 bp, Glycine max
cacggacacacgttaagtttggagaacattttttgcatgcatcttacaagggttccgatggggatatggtggtagtagaggactctggtagctagaagcagagttcgactacaggacagggacaagctagtgatttgagtaaacaatcgccacaaggtagaagacttaaagcagtttctgcttctgggaatcgctagttaacattacgctgagacattgaatatagattatatgtacaaattgacacatccatattgtcaatttagcagtgtcaaatacaacatgatcaaaatatataatttaatgatttagcataggttgtgtcaaaaa

SEQ ID NO: 62891 - DNA, 258 bp, Glycine max
aaaaaacaaaaaaaaaaaaaaaaaaaatttttaacaaaaaaaaacaaaaaacaaactaaggggcacattcatacaaacgtgcacattcttctataatatcaccatatactatattcactgccccttcattttacaacttccatgacttgttaataaccctttcactacctaactaaatcgctcttacaatacatatcctctttctccagatgcccttatatcaaccagtcccattcatatcacacttcaaaaccttta

SEQ ID NO: 62892 - DNA, 180 bp, Glycine max
gtttttaattctaagacttttactactatcttcactattgttgtattacagcttcttctgcgaaggttctttagttcaacggatatcccaaaatcccaataacaataacttcaagacaaatataacctaaacttacaacctaataatccctatacaaacacacataatccattattcttt

SEQ ID NO: 62893 - DNA, 411 bp, Glycine max
tctacacgttcgactatatgttataccatataaaccactattctaatggacgaacgcggtggtagcaacacgttgtaacggccgaatcggtttcagactcggaattggtgtacaagagcgcgacgatgacacgggttcgaggcaggatcctaagtacggtccacaaggaacatgataaatgggtcccactgaccatactgagctggatagcgaaggacggaagaattcttagccttgatcagatctacctacactagctcccgatcaaggagcaccatgatcatcgacacgctagtatgttccaccatgcaagactatgtgatgaagatcacgccagtccctaaacatacctggaccatactaatgaccccgatcaggtactatctagaagttggatacgagttcggccac

SEQ ID NO: 62894 - DNA, 373 bp, Glycine max
cccacgcgtccggaaacaaataaaaaactatcaaaaaaaaaaaaaaaaaatataaataatgggtgactctattatacaaggatcatagctaccaaatgtcagaatatacctttggatcagcgatattccaagtttcatgacataaaaaagcctggcattaaggtaacgacacgttactgtagtatttatcgttctacacgcaattactttgcaaatgacagacttacatcaattgaaaataatcttagctaatgtgctttacttcagttcacatgatatcatgaagctcgtgatgagaaaatcatccaaatagacttgggaactctgataagaacactacttacactttacactcccattattaccaactttc

SEQ ID NO: 62895 - DNA, 133 bp, Glycine max
aaaaaaaaaaaaaaaaaaaataaaaaaaaaaataaaaagcaaccgctctcgatgttccaatcggacgtactcgtacatgcgacggcgtaactctactatagcgatacctaaacccaattcactggcactggcc

SEQ ID NO: 62896 - DNA, 440 bp, Glycine max
caagaaaggaggtggtagtttgttcagtgcatctgcttttgatgatggtgaggaggaggaggatgagacagtgattaggttttctggcaagaagaagtcctctagaggttcgaagaactctgcctcggcttttgatgctattgatgatgatgcggatggtaaggtggtggatgataagaatgacgatgttgatgatgatgatgagcctgttatttctttcactgggaagaagaagtcttccaaagggggtaagaagggtggttctgtgttttcggctgctgttctcggtgagattgatgacgatgaggagaataaggatgatggtggtggtgatgatgatgatgatattggaccgatcactttctctggtaagaaaaggaaatcttccaaaaaggctgctaattccgttagcaaaggtgcttctgttgaggaaggtgatg

SEQ ID NO: 62897 - DNA, 410 bp, Glycine max
aaaaaagaaagagatttgaaagctaaaggggacgatggtgaagagaaaaaggagaaggatgggaaggagaagaagaactgagacaacacagacaagggtgacaaaactgatgtagagaacgtcaaggggaaagaaaatgatggggaggatgatgaagagaagaaggcaaagaagaaaaaggagaagaaagacaaggatggcaaaactgatgcagagaagatcaagaagaaagaagatgatgggaaggatgatgaagagaagaacgataagaagaacaagtgtgacaaaattgatgcagagaaagtcaacgggaaagaagatgatgggaaagatgaagggaataatgaaaagaatgacacagaaaaaggagacggtgatggtgaagagaatacggaaaagaaagataaaga

SEQ ID NO: 62898 - DNA, 362 bp, Glycine max
gcgtgctggtgtttgtgctcttggtgctgtcatagctaggcataatggtgatgaaagggtacttgactattaccagaggcgttttgttttattcattttgtatccttgtgataattccaatttacacatgaaatccacttgtttaaccgcgtttcatattattgcctttgcttataacacattgtgatacctcatgatttgccctatgagctattgtatggcagagcaagttacttatgggcttgttcattcttaaactagcatattggtaacaacaaattacatactacccacattgttataaggcctatgtgctttatgatgtgtctcatggcatatttactgtgcaattcattttaaca

SEQ ID NO: 62899 - DNA, 298 bp, Glycine max
atcggtcttcgttatctcactaccctagttgtagcgcaagctcttcctgagataccatatggggtcctttatgaacgtggaggataaccttatctaatcttagcacgttgaatataatattcggactcttaacaacaacaactttcatatgtcatagtccctagcgatagtgaagaaacagcgaatcctcgatcaagctacctatctatagctccttgctgatgtacgcaagtacaacgttaacaatgcttgctctctcactcatcatgaactgatcaacagctaactcgtaaggaat

SEQ ID NO: 62900 - DNA, 215 bp, Glycine max
gcgctctgacgttcgcaccagcggacattcgttgttatacatgtggaaacccacacatgtttaggggcattccttaaacaaggggtctatgcagataatcaaactacgctctcattcgcacttgcccgatcccttaatcatccacactgatctcaactgctgcactgtgtttctcaatcctaatactgccccagttaccatagttgactattgtc

SEQ ID NO: 62901 - DNA, 370 bp, Glycine max
  unsure (1)..(370): unsure at all n locations
ctgccttcatgtangagggctcgtgcgttcatgctgcttgagctgctgatggccgcctgcttcaccttctgcctcagtcatcagaacctgaaggagtttgccctgaccaacccagagaagagcaacaccaaagaaacggatagaaaagataccaaagccgatgaggagctggatgccgaagtcctggaggtgttgcacccgacgcatgagtggcatgccctttaaccagagcaggcatgcccttgcagatcccacgtacagctgaatcttcagacttgggaaagagaggcaaaacttcaatatgaggacaagttccgaaataatttgaaaggcaaaaaggcttgatattaacaaccacacctaaacattt

SEQ ID NO: 62902 - DNA, 425 bp, Glycine max
  unsure (1)..(425): unsure at all n locations
aattctgccatcaataatgatgaaagttttccgaganagttggcatcctgcacaggagctttgcagacgtcagttagtcaacacatggcaaaggaagaggagcagtattcctgtgaatatgatggccgaatttctaccatggctttcaacatctatatcacctgatgaatctcaggatatgcaaaattgcttaatcaagatagtgccacaggaaaaactccttcagaaggtcgttttctcctggatggaaggaagaagtagcattaacacaattgaaacttgtgtaaatcattctcaagttcaatgtagttctaggtcattaacccatcaggttgagaaagtaaactgtgcttgtgaatccacaacaacgggaaaaaggaaacattctgaatctatgatagatggttctgataccacttgaacac

SEQ ID NO: 62903 - DNA, 422 bp, Glycine max
cgaccgccacgcgtccgataaaacgatgaggaaataaaaaaaaaaaaaaaaaaaaaaaaaaaaaagaaaaaaaaaaaaaaaaaaaaggaaaaaaaaaaaaaaaaagaaaaaaaaaaaaaaaaaaaaaaaaaaaaacaaaaaaaaaaaaaaaaaaaaaaaaaaaataaaaataaaaaaaaaaagaaaacaaaaacaaaaaaaaaagacaaacaaaaaaaagaaaaacaaaaagaagaaaaaaataaaaaacaaataaaagaaaataaaaaaaagtaaaaaaaagaaaaaaaaaaaaaaacataaagaaagaacatacataaaaacaaaaaaaaaaaatgggcaaaaaaaaaaaaacataaaagaaaaaaaaataaaaaaaaaaaaaaaaaaaaaataaacaaaaaagctaacaaagatataag

SEQ ID NO: 62904 - DNA, 310 bp, Glycine max
ataaaaaaaaaaaaaaaaaaaaaaaaaaaattaaaaatatataaaataagaataaaattaaaaaaaaaaaaaaaaataaaaaaaaaataatataagataaaataaataaaaaataataaaaaaaaaaaaaataaaaaaaaaaaaaaaaaaaaaaaaaaaaaaaaaaaaaaaaaaaaaaaaaaaaaaaaaaaaagaaaaaaaaaaaaaaaaaaataaataaaaaaaaaaaaaaaaaaaaaatataatatataataataaaaaataaaaaaataataatataaaaatagaaatataaaaataaaaataaaaa

SEQ ID NO: 62905 - DNA, 218 bp, Glycine max
aaaaaccaagaaaaaaaaaaaaagggaaaggaaaaaaaaaaaaagaagaaaggaaaaaaaaaaaaaaaaaaaaaaaaaaaaaaaaaaacaaacaaaaaaaaaaaaataaaaaaaaaagaatgaaacaaaaaagaaaaaaataaaaaaaaacaaaaaaataaaaaaataaattaaagaaaacaaagaacaaaaacaacaaaaaaaaaataaaaacaaaa

SEQ ID NO: 62906 - DNA, 510 bp, Glycine max
gcgtccgaaaaaaaaaaaaaaaaataaaaaaaaaaatttaaaaaaaaaaaaaaaaaaaaaaaaaaaaggaaaagggtaaaaaaaaaaaaaaaaaaaaaaaaaaaaaaaaaaaaaaaaaaaaaaaaaaaaaaaaaaaaaaaaataaaaaaaatataaaaaaaaaaaaaaaaaataaaaaaaaaaaaaaaaaaaatatatataataataaaaaaaaaataaaaaaaaagataaaaattaagaaaaatataatataataaaaaaaaaaataaataaaaaataaaaaaaaaaaaaaaaagaaaaaaaaaataaaaaaaaaaaaaataaatatataaaaaaaaataataataataaaaaaaataaaaataaaaataataaaaataaaaaaaataataaaaaaaaaatataataaataaataatataaaaaataataaaataaaaaatataaataatatataaaattaaaaataaattaaaatatagataataaaaaaataataaagagaaataaa

SEQ ID NO: 62907 - DNA, 398 bp, Glycine max
  unsure (1)..(398): unsure at all n locations
gcgtccgcccttgcgtccggacagttgcagctggccttctagcatggntaggagtttttcttgcaagggttggtttggtgatgttttacaggtgtagcagcaaggatcctggttatatcaggatgaatatgcatgacaatcaggatacaaaagatgacgagcctctcttgaagattgagataaataatcctgctttgctagctggaaattggtcccagctttgtgcaacatgcaaggttctttgctttcttttgattgtctgacttcttgctgtaaagctgatcaatgtcttgcatacacagattgcagatgccggtctttcctttgctttgaattgttttgcacacaattttatgttggcttttcttcagattgtcaagccttttcgagcaaaacac

SEQ ID NO: 62908 - DNA, 205 bp, Glycine max
cattctttcttcttcataatggtgtggttttcaattccactttttcctttcgtttttggttgaattttaaagctgctgatggcttccattttcattctattttttgcgattttggtttgggttctatttctttaaatggtctgattttatgaggttatattttttgaacaagttacatttacaacgactgctttggcaaagaatt

SEQ ID NO: 62909 - DNA, 150 bp, Glycine max
gaaattaaaaaaaaaaattaaaatttaaaattaaaaaatagggaaaaaaaaaaaaaaaaaaagaaaaaggggaaaataagaatgggaggatataagattaatatagtgtaaattaaataaaatttaatggataaaaagtaaaaaaaatta

SEQ ID NO: 62910 - DNA, 248 bp, Glycine max
  unsure (1)..(248): unsure at all n locations
ttcgatctttctnttactctataatctctatgtttttaactccccgatctataaatcgttctcttactctgtaatctctctctctcgctctctctatctgtctatctctctcactcttacaaagcactgtctggcaattgtatgcatggaatgaaacttcgtcagtacttcttcttaagaactgagaaacatgtactcttatgaagaagcgcttgtttattcaaaatacaagttgttcatatgaaaac

SEQ ID NO: 62911 - DNA, 430 bp, Glycine max
  unsure (1)..(430): unsure at all n locations
acccacgcgtccganctcgagcggcnnnttttnnncnngggtttcaactacatgcatggttggcggaaaacagtcaacctatgccagcccaagcacggatagagtccatgcttttatttcttatttcttacatatatactagttattacatggagtacactcaagtatatgagtgtgttcagttcatatatttgtgatttttacttcagcaacatttgcagccctttcgaccgcagcatctgcatcctccgccatgtccaccaccctgactcctcctgtctgtgctttcaattagctcgattgtgtacaaaaaccgttcactagtctgccggcctatgtggatgtgctcatttgaattctatcgatgaatccatatttgtaagtcaatgtaattagtgagagaacatgaaaactccttcgtttagcattt

SEQ ID NO: 62912 - DNA, 267 bp, Glycine max
  unsure (1)..(267): unsure at all n locations
aacnatttgcatatatgtataccattccctttttctcctagtgcttaggctacggactgcttctcatctgtgttgtggcaactgagccatccaaagatgcgacacaagcataagaaccaaagacactgtcagatgcctggagaagttgtggaagtggatgacatggtataagttatttacatggatcaagctgtagacacagtatatgctgtagacatataatatgctttttacattgcattttacattatttaatgattcaaaatc

SEQ ID NO: 62913 - DNA, 124 bp, Glycine max
  unsure (1)..(124): unsure at all n locations
atgaatatgaaaattttaacaaaaaagatgggaagnatgatttaaatgggttatatgatagnaaatggggttacggtggttggggtggtaattggtatggttgntggggtggtttttattatgg

SEQ ID NO: 62914 - DNA, 407 bp, Glycine max
aaaattaaaacataaataaaaaaccaaaaaaaaaaaaaaagaaaaaagttaaaataaaaaaaaaaaaaggaaaaaaaaaaaaaaaaaaaaaaaaaaaaaaagaaaaaaaaaaaaaaaaaaaaaaaaaaaaaaaaataaaaagaaaaaaaaaaaaaaaataaaaaaaaaaaataataataaaaaaaataaaaggaaaaaaaaaaaaagaaaaaaaaattaataaagaaaaaaattaaataaaatataaaaaaaaaaataagaataaaaaataaataaaaaaaaaataaaataataaaaaaaaaaaaataagataagaaaaaataaataaaaaataaaaaaaaatataaaaaataatataaaatgaaaaataaaaaaaaataaaaaaaaaaataaataaaaaaaataaa

SEQ ID NO: 62915 - DNA, 220 bp, Glycine max
tcgtccgctttttctttttttttttatgatttctgttttagctacacaaagtgtttattccgaattcgcactggtttaatctcgatttagataaaaatttggaacggtgtatcgttgatattcaagctcagactcaattctataatccactgatgcaaagtggacaatcaaattaattacacatgaactttaaccccattctttgtcataccaataaaca

SEQ ID NO: 62916 - DNA, 299 bp, Glycine max
ggaaatttatagtgtatgttataactatttgaaaatagatggttcacctgtgaaaggtgtattactgacctggaagtcgaagtccatctttctgatttgtagtttctcaagaattattattgttatccctgttcctagttcctacacctagttgattatcttgaataatatcttaaatatattacttatatttataatgtttattttaatatattaactatttttttctatcatttgacattcttaaatttttttttagatactataccttatgtttttatttataaatatatatattt

SEQ ID NO: 62917 - DNA, 206 bp, Glycine max
ccacgcgggcgaaattaacaattgagtttggcttctacttacaataccgagattatcatacatggttcaggattcattctgagcgcaggaacaaaacataatcagtgaatagtgaagagtgtggaattggatcagatccgttatagagagatgtcacgggggagatctgattctggagggtggttgaggggctgtttggtggtgtt

SEQ ID NO: 62918 - DNA, 273 bp, Glycine max
cgacccacgcgtcggataataacctaatgcaaagagaataccaagcccgcttctactggtgcggacaaagtgcctgctgctcagcacaggtgaggcaacagagccatccaaagatgagacacaggcagaagaaccaaagacacagccagaagcctgcggaagaggcggaagcggggggcatgaaggaagctggggacacggtggagactgagggcatggcggatgaggacacggtggaggacacggccgaagaggatacagcggaggacatgg

SEQ ID NO: 62919 - DNA, 397 bp, Glycine max
ccacgcgggcgaaataaaaaaaaaaaaataaaaacaaaggtttaaaaaacaaaaaaaaaaaaaaaaggaaaaaaaaaaaaaaaaaaaaaaaaaaaaaaaaaaaaaaaaaaaaaaaaaaaaaaaaaaaggggcggccccgaaaaaggacccaaccaaacacacccgcgcagccaacgcaaaaacccaacaaaagggcaaccaaaagaaaaacaacgggccgacgaaaaaaaaacgcagaacgggaaaaacccgggcgaacccaaacaaaaaccccaggcaaaaaaacccccaggcgccagcgggcgaaaaagcaaaaagccccgaaccaaacgcccacccaaaaaaaggccaaacccaaagggcaaaggggaccccccaagaaacggcccaaaaaccc

SEQ ID NO: 62920 - DNA, 174 bp, Glycine max
  unsure (1)..(174): unsure at all n locations
cccacgcgatcgacnctttgaatttgagattggccttgaggttgatacgcacgacgacgacaaggtggaggggcatacttcgacggagagcggaaccgattcttctcagacgatggcaaacgatcagataaagatgacagacgcagctcctgcgcaggcaccaacgcagaacaa

SEQ ID NO: 62921 - DNA, 357 bp, Glycine max
acccacgcgttcgcgcacgcgtgttcaaactcagactcatgctttacagataagaagaagtcgtagggctaagttccatttagaacggataattaatcaaaaacacatcaccatttctgctctgcttggaaggcacatagacaaatccataatgtctgattctgagcgaatccaataaccctgattagcattccttcacactacccttgaagcaaacgccggaaccaagaaaagctatactattactcattactgcaactctaacaataactaaaacgatcatattaaaatcgatcacaaactttcttaaatcatcacgccccctgtctctccaacaacactgtcaatccactcaac

SEQ ID NO: 62922 - DNA, 111 bp, Glycine max
ctttcaaagtgattccaactcatactcaatgagtcaattcttaatattgactatggagttaatgctttacaagcaactgctgtttacaatgtctcatacattgcttataaa

SEQ ID NO: 62923 - DNA, 86 bp, Glycine max
  unsure (1)..(86): unsure at all n locations
gctgctttcttggctcnnccttctcntgnntcccctggtgggtgggcttgtgctccttntggtccttntgcgtgggggttttgttt

SEQ ID NO: 62924 - DNA, 365 bp, Glycine max
tttgctgttagggttttagctcagcttcttctagatttaaggaggatgggtaaggaaaaggttcacatcagtattgtggtcattggccatgtcgactctgggaaatccactaccactggtcacctgatttacaagcttggaggcattgacaagcgtgttattgagaggtttgagaaggaagctgctgagatgaacaagaggtctttcaagtatgcctgggtgctggacaaacttaaggctgagcgtgaaagaggaatcaccattgatattgctttgtggaagtttgaaacaacaaagtattattgcacagttattgatgcgcctggacataaggatttcattaagaatatgattactgggacatc

SEQ ID NO: 62925 - DNA, 107 bp, Glycine max
gaatttgaaattggatttttcactttcattcgatcaatcaggataagtggaatctccaattccggctccaaattcgcaacccctaataatactccttctaataaatt

SEQ ID NO: 62926 - DNA, 251 bp, Glycine max
  unsure (1)..(251): unsure at all n locations
tgtgtatgttaggagcaaaggttgtaattattgatgtacgtgcagttaagagttttatntagactggttngatttatnttgatgttaggtaaagtattttttaattttagaggttatgaagttactaatataantatggtgtgtttgatttataggagagaaatagagtgaagagaaataaagttgagtttaatgaagtgtgagtaatattgttaatggtataaaggatattatttataatatgttatttt

SEQ ID NO: 62927 - DNA, 268 bp, Glycine max
gtccgtgatttaagggctgcggtttcaaacctgtatactagctgcaagggaatgttggatttggatgctgattggatcgattcagactcattttgactgacatatgttagagaggtggaagaattgggacagaggaaagtggatgagctctgccctggtggaaaaaaccttgtagttaatagtgagaacagggacaagaatgttgatccttttatacaggagcgttttataacattcatatttgagtaggtatcacaatatgtcaaag

SEQ ID NO: 62928 - DNA, 345 bp, Glycine max
tcctatcaacactaacctcattaactaaaatcacaatctcccaaatcaaaaacccacataccacataagcaatttcacaagatatgacgagactaccccctgcattctatcccaaacctatctatgcctccttccaccgaccactggacctttgacgccatccacaacggacccctccacagactcaacctcgactccgacaccaactgcttgaccttccatacctacgacctcttaatccttcactcccacaattatttcaccaaacaccataaatcacccaacgacgactaccacctattcccctccagcatagactagctcaaatcccaatccaaactctac

SEQ ID NO: 62929 - DNA, 343 bp, Glycine max
acccactcgtccgtttacgcataaactgttacacaagcgttctctatcacgcacgccctaacaaaaacaacgctaatttatagtacactcaagctcactacgttaagagtagcacgctagcaccaaccaacaatagcgtctctgacatcctaatgtttcttaatcaccacattgatcaccggcgcagacgcaccaccacccccttaaacggtgcgacctagacacctcaatcattgaccatacacacctttcccaaaagactcttattcatcacgaccacacctatataccaacttcaacgaatggcccacataaacctaatgtactccaaacttactgaact

SEQ ID NO: 62930 - DNA, 108 bp, Glycine max
aaaaacaaaaacaaatttttaaaacactcaagggcactacactaacaataccacactaacaccaaccaacaataacaacccacactactacatcaatcactaacacca

SEQ ID NO: 62931 - DNA, 259 bp, Glycine max
aagttctgctatatcccatttgaaaagtaatgtgtcaccttaaagtttctttcatgtttgatcatgctactatccattttgtagcaactgatctgcttggatagtatttttcttctactacaaaaaattacataccctcatcccatagagttagctgtatgcattgctagacatatcagaaattcattcatttttcttgttgccgttgtccaccttccattatactttatggaaattcttcaaaggcacaagctacctt

SEQ ID NO: 62932 - DNA, 348 bp, Glycine max
acccactcatacgctcacactatcacatgtttacctgcaatttttaacccccagaacaaattaccaatactagaaattttttaaaatttacagggcacctatacataaccttatctctcatacaaacgaataaatcaaacgacaaataaaactaactaacccacaaattacacttaaatttttacaccaattgaaaacaagcaaatcatattgaaatacatctttatacaaactctattccaaaaactacataaaacttacaatctctatgcactgtctaaaacacaactcataaaaaacacaaacctctccattacaaagggaactcaatccatacaactattccta

SEQ ID NO: 62933 - DNA, 312 bp, Glycine max
tcttactcccactctttctattctctttttctctcccaatacctacatacattctcgtcgcttctctaaaatcgttggactctataccattattctaataatcatacctgatacatacattatttatcatttagtcaatatgctcaccaatttccatacccaaactcatatagacaatgtactaatactccacatcataataccctcaatcctctcaagtcttaacaatcacataatccaactataagattaccaaatagttactctcattaacatatcccattatcatcatactccttccacaagtatcca

SEQ ID NO: 62934 - DNA, 240 bp, Glycine max
cccactcgtccgcattctcaccctaccttttttccatatttttacatcacatcaaatttacaataaattatcgctattttccaaactaggtaggactcaaaacactcatttaccactgcaatgtaaacccttatgtacgtgttaatatatcaatattcaatgatcataagaatccaacactaacaattactaaagtgcaactataaatcacatcaattattacaaatccttatccttata

SEQ ID NO: 62935 - DNA, 378 bp, Glycine max
ttttcacctatatttttcaaccagtttctacacaccctatatttcccttttatattcgatctatttataaacaatttgaccaatataattaccttcttctccctcaactactcacctctatattcaaatcaaacccacaacattcatttaatatcaaaatccatcataacatcacttcttcaattccaaatattaatctccaatattacatagcttaactattattatctcattttatattgcataaatcatcttattcctctcaacttcatcaacttatttcattataacttgtctctataactgactattttaaattattacttacacttattacaaatacaatttaacctaacataccatactactcaaatactt

SEQ ID NO: 62936 - DNA, 221 bp, Glycine max
acccactcgtccgcactttttaactccctctttaccactcttttcaacccccaaatctaaaacatataataaactgactttaataatcatcgtgcaccatccaattcctcatcaaaaatatatactccaaaaaatcacacatacacacacataaatcatacatcaatcaatcaaactctatcattcctactatacttacataacaacaaccaaccaccaat

SEQ ID NO: 62937 - DNA, 152 bp, Glycine max
aacaaccaaacacaaatatttaatcaagggcattttcataacctcatgtgctccacacatatctcactctatctcttcactacaaccctatcccattctcactaaaacaccactattcaagacatctccagaaactttaaactccaatacaa

SEQ ID NO: 62938 - DNA, 388 bp, Glycine max
acccactcgtccggccttttttagaaatttttcagataccctttttcatggacataatcactgacctctccatgttcattactccaatatggatggccattatcgacagctaaaatcctagactagatcgtgaaatcccaaattggcctaccacccaaaatactctacaatcaagtttcactctcctcgacctaccaatccccaaaactacacctcttttacctactcccacaccaaatcctccgcacatgaaaaagactcgagtggcattactgtattgacgaaacaccatttaatgcatctgtaaaaatatcatcaagaaaaacacggaaacccgtcatagattcagatgatagaccgttataccccaaccatcacctatcaaacc

SEQ ID NO: 62939 - DNA, 192 bp, Glycine max
ttaagtccactgacaactctcaaaaataggttcctttctactgcttggaggacctatcttcatagcggctatacttcctatccctgctaacgctgcacccaattaataccaaaattctcacaaaaaagatggcaatcatgctccaaatggaatatatgataccacatcgggttaccctacttgggctcctcc

SEQ ID NO: 62940 - DNA, 330 bp, Glycine max
catcacttattttttcccctatgcacaacgtatatttatccgtcttttctttaaagttgttgggccattctatcctctttctagaataatctattcatatattccattccaaattccatcgctttattttattcatcttgctttttaattataatgttaaatattctattattgcctttatttaattgttaaacctaaatgtactatttattcgtactctttaatatattcttactatcactattaattctcatcattacaattaaaaactacaatcactaaaatacaacatcaattttctccctataaacctttaaaacattccaactt

SEQ ID NO: 62941 - DNA, 317 bp, Glycine max
cctacataataaaatgatttgaaatctaaaggtgtctatggtcaatagataaaggagaaggatgagaaggttattaataagtgagacgacaattacaatgatgacaaaactgatgtatagaacgtcaacgtgaaagaaaattattgataggatgatcaatattatattgcaaatttcaaatagtataataaagacaacgatatcaaaacttatacatattagatcaatatcaaagaatatgatttgaacgatgatgaatataataacgataagaacaacaagtttcacaaaatttattcatagaaagtcaacgtgta

SEQ ID NO: 62942 - DNA, 154 bp, Glycine max
tttcaatgcataataactattacccattcaagaacctttttaaattcggggtcaacgctacctaaaaatatttcatcatctcataactcaaccccatcttctcatcctattaacattcttcccttcacaaaacttttcacaatattacttacca

SEQ ID NO: 62943 - DNA, 163 bp, Glycine max
ctgggaaatccaactccagagttaccaaacatacatttaaattacaaccccttttaaaatccctgaaaggatgattacatctataaaaataataacaacttgcttaaaacagacataattagcatacctatcccttttaaaataaaaacaattcaaatgaact

SEQ ID NO: 62944 - DNA, 220 bp, Glycine max
actaatggggaccctcacaacttataacaaaactttcttaaacttctttactaatttaagatttttcaataaaaaaaacttcattataaatatacttttaataaacaaccaactctctattatattgtgatataaaacaataatacttttatatatatattatcttatccttaaaaaacaaaaaaatatgcattccctataaaagatccaagcttactta

SEQ ID NO: 62945 - DNA, 266 bp, Glycine max
cacataacttttacacacagtttatcaacccgaaacatctacactcctttacgaactttttaaactccaagaggagaatcacaatttatcacaaaagctaacacaagcataggaaaaactccaaaaaatccaagcaaaaactatccgaacctgataaacaactcactcctctcggacaacgaataaccatctaatctaaactgctaaccaccaatgaaacctctctgcaccaaacacagactaatcccaacgctgctcaacaaaca

SEQ ID NO: 62946 - DNA, 144 bp, Glycine max
tttccaaaaggagggcgcccataacacactctccacctacaaagccgctcaacacattcctaataccgaattgcctccaactcaccctaccacgctcaatctagctctgaactattaacacaattactatcaaaatcttaaccc

SEQ ID NO: 62947 - DNA, 452 bp, Glycine max
tcccacgcgtccgtacctttcttattttaaatttcttttctttcataatacttctgcatttgttctatattttcggtggtcatcaacattccactatagcaaactttcatacctacatgctttaacattattatttgtgactttccattcttatattcttctgttttttcttttcttcctttttgaaatctctatttcttttagtctagctacattgcaaatctatacattttatatttaaataccctcttccttactacctactgtcttctgtaattatgacaattattcataaacacaatagaatcctaaataaaatctggtgattatttctgaagattcttacattggctctctgtatctcaatgaatcatttaaattcctaatgacatctctcaactatggttttcctctttctatatctgttatgacctctaatctataatgttcat

SEQ ID NO: 62948 - DNA, 177 bp, Glycine max
cctttatcatccacccacccaacatactcatcctccctccattcttcaacatctccatccttaaaaatcgcagcttatccaaccttttccacatccagctaccaaaatacgatcccaactccatatacgactcctcattacacacctaacaccaatattcacaaacactctactcct

SEQ ID NO: 62949 - DNA, 291 bp, Glycine max
aatctcgattattctatgggttttctttcctgtactacttaagtaacacttgaatggtttctttagagtgtggggcagcctaacattgcattaccctccacacaaaccagtactggctcaaagagacacccagagacattcatgggcaatcccaaactatttttctaatccgccgatacaccataaccacccaaagctgtaaaactagagggcacatctcaagggaacaacatcaaattctgagcatgaaacacccataacaccagatcctaacacactcataactccttc

SEQ ID NO: 62950 - DNA, 337 bp, Glycine max
tcgtactccctttcgtccgcaccgtaaatcccgggttttaattcccgatcttatgtactcgctagtggatcggttttatatggacgaggatcatctccctttaaaactcttcacatatacaaataaactgtgaggcatctttaaaatgccttcacagcaagggatttccttgctattttcaaattaatgataaatctatagaacgctttacacaacttaacaatgatcctgtttctcatcctgcacaagatcttactgaccctaactttcacttaagcaatcagtaccaaaagccttacaattaatttcacaccaaacctacttatcaccaaaatta

SEQ ID NO: 62951 - DNA, 353 bp, Glycine max
ctcgtcctccctttcgttcggcccttgttgatgagatttatatgtccgagtattcataatgatgtatcgaaaggtcttcaaagagaatatgatgtttattttgtccctcgccgcactgttgtttgtgagaaaattcttgaagaaaaaaaattacataacatggttacaataggttttatatcccttgtataatgtacccattgattaggaattattatcatttgaacttgatctttcttacaaagaatgccaagttgattgttatacaagctcacttttgcacattgcttaagccattcaacaacttgagttttctcttggaatgataccaaattttaggtctaaatgtaaag

SEQ ID NO: 62952 - DNA, 214 bp, Glycine max
gtgcttaatcttaaagtttggttttctagcgaactcagccctacaaaatcgacttcatgtctaccactgtatgcaccagggcacccttgaaagctgtgatcatcaatacccaatacctagtatcctattccactagcttcaaatacgttctgcataatcttacaagtaaacattctgacatacacatatgctaaggttcagagcaacaggcatg

SEQ ID NO: 62953 - DNA, 173 bp, Glycine max
accccgttagcacctcctctgcttaatcccaaggagagccttacgcctagatatttcatccacttgaaatccattaaaatctactaatatacagtccctttaaacaccacttttttgaccataaacagcaaacgcttttcttgaaccaagataagatccgcaaacacctacac

SEQ ID NO: 62954 - DNA, 278 bp, Glycine max
agccatgaccaatactaacgtcttcgtcaacactctacaccgcactcaatctcaaatctaagttactcctctcgacaccgatcatcaactcaacaccgatctagaacactctcacgaaccagatgactaacctgccacacatcaccatctacacaaccaatgcaaaaatcttaagaagtcacttaccttctacaagaaccaactagttctaaatactaatacagctattatcctctacaagactaacatcaccatcgctaaactactctactacttca

SEQ ID NO: 62955 - DNA, 95 bp, Glycine max
cactatacttctgatctcctctgagttgcacccatatcatactagaattttgacaaaatgatggaagcctatgctatttttatataaagcaagta

SEQ ID NO: 62956 - DNA, 258 bp, Glycine max
gagattcttctacatatggacacagctccactcgtcgtgatagaagagccatgacgaatgataaatcgcataacagttcatacctaacctatagcgaaaaactaaattcggttatagcatccactataagctccatctatccgagtgaaaaatctcataacagtccatactgaacctttagctaaatactaaattcacttttaaaaaccacaataagctccatccattcaattgaaaaacccaattcacacaaacata

SEQ ID NO: 62957 - DNA, 241 bp, Glycine max
ctaaaaaaaaaacataagaaaaaaaaacaaaaaaaaaaaaaaaaaaaaaaggataaaataaaaaagggaacaaagaaaaaaaaaaaaacacaaaaaaaaaaaaaaaaaaaaaaaaaaaaaaaaagaaaaaaaaaaaaacaaaaaacaacaaaggattcaaataacaaaaacaacgaaacaaaataaactaccaagcaattagaagatagaaaaacacatgatcattacaacatacaaaagg

SEQ ID NO: 62958 - DNA, 446 bp, Glycine max
gtacgcaaattgctagtaatgctttacaagtggtttaagaagcccttgatgctatcgatgcccaggatcgtgttgctgcgggagatgaattcacccttgaccttgttgaacaatcttcatttcagaagcaaagggtaatgcatcttgtgatggcttctcggtaaggctgctgtaaatttttcttttctgctaaaagcatatacaatttatgtttctcatttctagacttgaaatgtttaacaggatggattataatgcctttgcttttggtctgtcgcatctagagattttgctttgatacttgatccactttaacgattcataagcagcagatttttgctattgaactaagaaaggcataatttttagttttttcatgttgcttcttttttatttttttaagaggtacacaatttattagatgtacattttatttactttttcaa

SEQ ID NO: 62959 - DNA, 325 bp, Glycine max
gtccgaaatcatacatttatactttaaacaatgaatttaaaacacaaaaaaaaaaaaaaaggacaggaataatttgaaaaggaacaaggcctgtcaaatctagaagacacaagcgtcattacaccctcatacgacagaaaactatagaacatactggtaccaaaactcaatgttaatttccgtcaaatacaacatgaggcacttcaaaacgcccttaccacccacaataatggctttaacgcgaataatgcttctgtcaacgatcttaatagcgaatatgccgactccaacttcaatgatgaacatttcaacaatgttgatagct

SEQ ID NO: 62960 - DNA, 322 bp, Glycine max
  unsure (1)..(322): unsure at all n locations
actcgtccggattttacgagcaatattatggctctggtttttcaactcagacgatctnnnggggaactgacgaattttaatgaggttggggctgcacattctttcaataagctttgatcaatctagtcgaacctttctgccagaaccatcatctacatgcagggctaccaccaccactaccaccacgagaatgggttttcaaatagggtttttgttgaatcgtttctttgggttctgattctggaatttgaaaattgaagggaaaatgatcgaaaaaagagaggaagaagtaggagagcgtatgtagttgatttgggggaca

SEQ ID NO: 62961 - DNA, 351 bp, Glycine max
gacccactcgtcctaaaaaacatactttaaaaaaaattttaaaaaacataataaaaaaaaaaaaaaatgtaacgtttaaaaacaaaaagatcatattcaaattctcctctatttacatttccaatcttctttcccttcctttctacctcataccactattttttttctaacttcttttaaaccaattccccatcttaaacaaccttataattttaaaatcccttcagttcccctactttatccttttgggacttaatccttttttccctaatccctttaaactttttaaaccccctcctttttccttttttaatatatttttctaccctaattttaattttcaccctccct

SEQ ID NO: 62962 - DNA, 225 bp, Glycine max
ttttatttttcttttttcttttttttttttttttttttttttttttttttttttttttgttttttttttttcttttttttttttttttttttttgcttttttttttttttttttcgttgctttttcttttttcttttttttcttttttttttttttttttttcttttttttttttttttttgttttttttttttttttttttcttttctttttttttcttttttt

SEQ ID NO: 62963 - DNA, 387 bp, Glycine max
aaaaaaagtacatatactaataactagaaataacaaaaacaaccaacgtgcacataatgagtgaggatatatataaaaacaaaaagatacatgaggccatgcttgttagaggagccaagcttctttacgcagtgcatggaactgtttaatttttaacatgggtcacttaacttgaatttactgcccgatgttctacaacgccttgactggtaaaaccttggtggtgctcaatttattcacgttgcataacatgcaccttttgccagatgtcatattgcctaaaaggccctatcacgatgacctattcccaacatttgtgcaaattaaatgatcaatgggactcaccatgaatagtggacttaacctgcacaggtgattcggttacac

SEQ ID NO: 62964 - DNA, 361 bp, Glycine max
aaaaactgaacataaactaataaaatgaaatgatattaacaaccaacaagcactaaaaaggttgggctatatataaaaacaaaaagataaatgaagccatgctcgttctgatggctcaatacttcattcacttattgacgacgtcaatttttaacattattgccccaaattgtcttttcacttagcatatgctttaaacacctttattcttgaaaaatgccttgtgctcataacttacacgtggtacagactgatccctttatcccagcttacgttgtttgaaaaaggctatcacaagatatactattgtcttaccttccaatgcaaagatcgaaagggttcacgctctgtactggacatt

SEQ ID NO: 62965 - DNA, 337 bp, Glycine max
aaaccctagcagcgcgcaaacaacatgccactcgaaatcttgaaatctgtgatctctaaaaaacttcagtttttggagattaggatgtagcgacttggattctttgctgcaaatgctttgggcaagtggctgtgtgcttctgctttgtgtgctattatttattatgtggtgcctattgtcagagaggaattctacaattctcaaggacagttacttgcattgacatctgatattatcacattaagtggttacttaatctcctcatggttccctgtgtaatgattacttcaaacgagtgactatcgtgtatatgcacagagtatggagattggggacc

SEQ ID NO: 62966 - DNA, 320 bp, Glycine max
  unsure (1)..(320): unsure at all n locations
cccacgcgtccgcccacgcgtccggcgcccgtggcccgagacacccgacgccaccaccgcggggggttggttgcttctctcctcgaggcaccctgtcaaccatgtacggcggcgacagcgacaacagcgacggcggcagcgatgacctgcgccgcggcgacacgctggacttncggaacctgaaggtggtttccgccgtggggcgcggcgcgaagggagtggtgtttctggcgcggcagtccggcgcagcggcgggtggcggggagtgggtggcgttgaaggtggtgtcaaaggcgcttcttagaaaaaggaacaaaaac

SEQ ID NO: 62967 - DNA, 455 bp, Glycine max
ctaaactgtacatttactcatcactgaaatcacaattacaaccaacgtgcactcatggcttcctctatatttaaaaacaaaggatacatgaagccatgcttgtcggttttgttcagtacttcatttagttattgaagtagtaaatttttaacataattttgtcaacttgtcttttcctcagtatatgctttttcacctttatttttgaaatatgccttgtgctcattttttacaggtggaattgtctgatcctgaagccgagcttaggttgcttgaagttttctatcacaagatatacaaggtcttccctcccaatgaaaagatcgaaagcattaatgatcaatactggacattacgtgcagaggagataccagaagaagagaaaaatctgggtcctcatgatcgtctaatccatgtgtatcattttactaaagacacagctcagaatcaaatgc

SEQ ID NO: 62968 - DNA, 225 bp, Glycine max
cccacgcgtccgcccacgcgtccgcccacgcgtccgaaaaaaaaaaaaaaaaaaaaaaaagaagaaaaaaaaaaaaaaaaaaaaaaaaaaaaaaaaaaaaaaaaaaaaaaaaaaaaaaaaaaaaaaaaaaaaaaaaaaaaaaaaaataaataaaaaaaaaaaaaatataaaaaaaaaaaaaaaaaataaaaaaaacatatacgatataaaacaatatatactatt

SEQ ID NO: 62969 - DNA, 202 bp, Glycine max
acaaagtaaggcaaaagatttcagaacatatggacttgtggttatctgaatgcgtcgacgcaggcagaagttttatatgattatttacataagatgtgaatgatgtacttttttttctaagttgttaatgatgtactataactccgcaaaaaaaaaattatattaataaaaaaaaaataattaataaattttgtattttatt

SEQ ID NO: 62970 - DNA, 326 bp, Glycine max
gtggctactatggctatggctatgagaactcagatggttagaacgaactgagcggagggccataggccaaaggtgagtaagaccaaaaaggtagtgcaccgactatactggcagtcaaatggcagactttcgactgcaactttaggcacagatgaagatagagacaagactagtaccattctggaatgtaatcaatataacaaagatgattatccagaagaatatactggtgcctaaatacttgtcatcaagtcttacaacgaaggatgatatccataccagtattaagcatgatgtgtgggctagtacacaaaatggcaacaaga

SEQ ID NO: 62971 - DNA, 392 bp, Glycine max
ttgttgttgtaactcgttcttcttcttttgttgttctgtgtttgtgtttgtgttttctgtcacctgaaaatgtcttgctgcggtggtaactgtggttgcggaagctcctgcaagtgcggcaacggctgcggaggctgcaagatgtacccagacttgagctacactgagtcaaccaccaccgagaccttggtcatgggagtggcacctgttaaggctcaatttgatggtgctgaaatgggtgtgcccgctgagaacgatggctgcaaatgtggaccaaactgctcctgcaacccctgcacttgcaagtgaggtgttgggagagcaagcttcaagcagagatagcccttgattaggaataatgataaactattaatgggtagctgaaaacttat

SEQ ID NO: 62972 - DNA, 200 bp, Glycine max
aaaaaaaaaaaaaaaaaaaaaaaaaaaaaaaaaaaaaaaaaaaaaaaaaaaaaaaaaaagggaaaagaaaaaaaaaaaaaaaaaagaaaaaaaaaaaaaaagaaaaagaaaaaaaaaaaaaaaaaaaaaaaaaaaaaaaaaaaaaaaaaaaaaaaaaaaaaaaaaaagaaagggaaaaaaaaaaagaaaaagagagggac

SEQ ID NO: 62973 - DNA, 175 bp, Glycine max
aaaaaaaaaaaaaaaaaaaaaaaaaaaataaaaaaaaaaaaaaaaaaaaaaaaaaaaaaagaaaaagaaaaaaaaataaaaaaaaaaaaaaaaaaaacaaaaaaaaaaaaaaaaaaaaaaaaaaaaataacaaaaaaataaaaaaaataacaaaaaaaaaatgaaataaaaaaat

SEQ ID NO: 62974 - DNA, 177 bp, Glycine max
gagaaacgtgtgattatgacacgagatgcaaaggggcttatacatgattatgtgacaaggaaccaattgtatagagtgaagactcttctaagaaatgaacagctactcaagggtattgaagctttatagatggaaatcaatgatgatcagctaaggtcaaggtgcacatattgcagt

SEQ ID NO: 62975 - DNA, 314 bp, Glycine max
gctagtccacacactatgttctgaaaaatgtggtccaaagattctcttattctacttaggtgcgtggacactatacgttggaactaatttgacggtggatcctgttacgcataccaaagtcctgactacacatatgggcagcgtaatgcaaatggctcaggtgaacgtaaatattggcgtaaacgctgtggtaaatggcggtccgggtaccatagttaagatcactggctttggccctagcgaacactcatgaggctctgatcgatgctcaccctctcagactaagacggatacttgttcaagctcatatagga

SEQ ID NO: 62976 - DNA, 418 bp, Glycine max
gggagctctacacccttctcttcttttctctcataataatttaaatttgttatagacggtaaactttaaatgttttttttttaagtttttccatttttctcttttgccatgatcccgttcttgctgtggagtaaccttgtccgaggtatgtgcatgattagatccatacttaatttgtgtgcatcacgaaggtgaggttgaaatgaactttgcttttttgaccttttaggaaagttcttttgttgcagtaatcaattttaattagttttaattgacactattacttttattgtcatctttgttagttttattgttgaattgagtgcatatttcctaggaaattctcttacctaacattttttatacagatctatgctcttggctcttgcccttattcttggccttgtgttggttattt

SEQ ID NO: 62977 - DNA, 310 bp, Glycine max
aaaaaaaataaaaacaataaaaataaaaaaaattaaaaaaaaaaaaaacaaaaaaaaaagggagaaaaaataaaaaaaaataaaaaaaataaatctaaaatacataaaaaaaaaaaaaaaaaaataaaaaaaaatggtgaagccattttaataaaaataacttaacatacattttattccaactgaaatattttattatctgatcccataatttaatttcattgacctcatttaaaaaactcacatattggaaaacccaagcctttcccaaatttaattacttcaaagaaaatacatttttgcccaacta

SEQ ID NO: 62978 - DNA, 339 bp, Glycine max
ctgacatctatggaagtaggatcacagttacctctcaattgtatgcccagtagcatatgggagttgcaggcttgggctgctgttttgggtttctgtagaaatcaagggatggtgacagaaagcagtttattgaatcatgatctgaatgttatgggtgctgatactaggaacatgggggagatatatgtgatgtcaactgttttagatgaggcagatgaagctaatcatttttcacctgacacagatggaatttctaaactcccagaaatcagtgatgaattctgggaactgtttttaaggccaagcccagttacagaaggcacagaagaaactaaatgt

SEQ ID NO: 62979 - DNA, 320 bp, Glycine max
acgctgatcttctcatacttcataatggtcaaattgtgtatctgaatttatctatcagtgtccgtcttagattatacgagcttgcaaaaataatcatagatccacaatcttgatgcataactaacaactctatattcttcttctcaattgtcattattactatatttcattctccatataatttaagaacgactaacttttcaactcaaatccatgtttcactcctcaaacacaaaattgatttactaaacactcgcctaacacctgcatttcataaacaaacattatactaagacaacataaataaaattgttgaattt

SEQ ID NO: 62980 - DNA, 332 bp, Glycine max
acggggacacctatggtgacctcatttgacgaccttgaccaactccttgaccgtgctttctaggatggttaggactataaggagaatgctaaccttataagtgcagcagcaagtgcgaacactaggaaggacagtacttctgtgacgtcttagttgcaatgattgggcctgggattacccgtttcgagaaccaacaataaagcgaaacacaatggtgctcacaaagacagtcacatggtctacgcgctctacaagctcatggaccagaccatcgaggctgccaaagggcttgagaatatgttcacacctactgtcgatgacattgggaagga

SEQ ID NO: 62981 - DNA, 258 bp, Glycine max
aaaaaaaaaaaaaaaaaaaaaaaaaaaaaataaaaaaaaaaaaaaaaaaaaaaaaaaaaacggacaaattaaaaaatacgggcaaacaaaaaaatactacaataatatctcatatataacaacacactcaacctctttttttacatacatctttaatcaacaacaccctccctttacttccctttacttccccatcacaacatcctccttactccaactaacttcaccttcaacaatcccacccctatctcccttccc

SEQ ID NO: 62982 - DNA, 446 bp, Glycine max
tcttactaaaaaaaaaaaaaaaaaaaaaaataaaaaattaaattaaaaaaaaaaaaaaaaaataataagtgaaaagtataattaaaaaacaagtatataaaaaataaatattttatataacctcttcttatattttctattctttcctctttttttttcatacttttatttttataatacttttttttcacttcatttttttttcttattatttataatttttttatatattattatccttttaattactccttcttttattatcttttcttttaaaaactttttttaatttcttattttatatttttacattctttttttatctttcttttttccctacttttttttcttttttaaactcaattttaacctcttcttttttaccttccttttatcctcttttttttgttttttcttcttttttttactctttattttctcttttt

SEQ ID NO: 62983 - DNA, 407 bp, Glycine max
tatgctaggcgtaaccattaatccgtgcatgtatagagatgaactagttcagactgaccatctgtggatggctcattatatcagacattgagagagcgatagtgtatactactggggttaccgagaatattctagaacttataccatcaacaaacgcgaactcttctaaggtatgcacacattatattaaatgtcaacacatgctttgtctgctgtttcgatcattcatgatcactcatgcgatcacactgactacgttccatgaactcattactacaatacttgctgtatgaactttcgactgtctgatagtagactaccatactatacacaattgacctgaaactgagacctgatagctgatcatgatccatagaactctctatcacattgctcgtatgctacat

SEQ ID NO: 62984 - DNA, 435 bp, Glycine max
gctgaaagttctgcggccggataaagttctgaatcatggtctctttatccttaacgaccgcaaacaccgatcctctggggggtccgatgaatggaccttgtctgagcaggctgcagatgctgctatggatcgtcaatgtctcgacgctgccatggactgttcaaaggttctttaaatgacatccccagcgagtaaaagagttggatggctacacgcaatgttgcttgaagcaaaccgatcctgggacttggctgactaggcttacacaggccttccagaggtcattcctattgatcaacccattcatgctaggatggaggatctgctaatggctcacagctatatacgagtgtctatagatcggctcaataaatatctggcaacatacatggaacatcatgatgcatgcagagcattgactggatgctacatctt

SEQ ID NO: 62985 - DNA, 306 bp, Glycine max
tgcattcgtatttctaactaattattgagttaattatggttacggcattgttccgcagagggatgagctaactcttgagttggttggtacgaactagggatatccgtccgtcgaaccttgcatcgatgcttccaacgattccactatcaatgttactttgcttgatcactttgctaagaatccacttgatagcactgagtatctgtgctaatttcgcagtgatcatcgtagatgtgcactatcagctaccataagttcacgcaaactatgtcctaaactttgccctaacgttactgatgatgattg

SEQ ID NO: 62986 - DNA, 339 bp, Glycine max
acgaccacgcatacaatcatatccaaacttataaccatagataccattcatcaccaaatcgatgagtatattacttagtcgcttcgcaataactactattaaccgtccttttatcctatcatcgattctctcaccaaatcatctatctaagagtatttataaatatcaatttatgaagaccccactgtatatctattaatatcgcattaaatttcgcattaatcttattaataatgcattttatactacatcactttctcccaaactatctcctaaatttatacataccctatcatattatcattgcactaaacttataaatactcctactcctactta

SEQ ID NO: 62987 - DNA, 444 bp, Glycine max
tcggttttttttttaatagttccagttggtgtttttctaattttgggttcataagtttggtcgggtacttttaattccggtgagggtgtgttttttaaattttagttctttaagattctaatttttttatttattaaatttgcacttgtagggcccaaatttaaaaaatgcgaacttaccagatttaaaattagccaaatatcttacaggacccaacttggaaaaccacaaatttgcccggacttaaattagaaaaaagtgcttacttggcccaaaaccttttttagcttttaagaaaattgttattccttgtaccggtttattattggtcaaaccttgtttaatttggcaattaaaaaggtggtatttttttaattttgggttccgaaggtttttttggttaactttaagttccggtaaggtggggtttttttttttaggtcc

SEQ ID NO: 62988 - DNA, 249 bp, Glycine max
tctgactcttgggcttactcttggtaaaaaaaatataaaaataaataaataaaaaaatgaaggaaaaaaaaaaaaaaataataaataataatataaataataaataacataaaaaattataacttatattattattttaatataccatctattcatacttcttttttaaattttatttctttcatttacctttatttattttaatattatcttttctaatattacaacttttctacctaattaactctc

SEQ ID NO: 62989 - DNA, 444 bp, Glycine max
cccacgcgtccgtccacacgtacgaccacgcgtccgaaaacaaagacaaaaagattgaggagaaaaaaactaagtttatgaaaagaaaaaaggaaaggaaagaaaaaacattatacagaagaaaaaatagatcaaactgagaaaaaagaagaagaaagaaatgagaaatagaagagaaagaaaaaataaagaatatgttgaggaaactgagtagcatctcatggatggctgaaactggtacagctggagtagaatgtgttaaagatgcatcaacttcactcctggaggagacagcttgtggttcttttggaagaacattctgtaagtgttgggcatgcaatcctagtcatagagccctattgatgactgtagtgaggtctgtggtgcctatgttgtgtcatttggccaatgtgccaatgggtatgcagctgttgcttccctact

SEQ ID NO: 62990 - DNA, 223 bp, Glycine max
ctcacgcctccgaccacgcgtcctactagacacatccattctttacttctcattgggtgggcctaatctttacggtggtgctgctataattttccattgcctgcaataaattctcaacctttattcgcaagatcaaacatctaaccttaagttaagtgatcatgtctggtactcctatcatctacgacttcataccgtcttatacccccatctttacgctact

SEQ ID NO: 62991 - DNA, 259 bp, Glycine max
cccacgcgtccgcttcattggaagggtagttataatagatgtggagatctttcttcgctctggtcatataaaggaataatacttttctattaatttccttatctttgtatctctctgttcctttttgctaaactcaaataaataaaactatataaatgtgtaatttgtttcatcaaaaaaaaaaaaaaaaaaaaaaaaaaaaaaaaaaaaaaaaaaaaaaaaaaaaaaaaaaaaaaaaaaaaaaaaataaaaaataaat

SEQ ID NO: 62992 - DNA, 300 bp, Glycine max
gtctagtttacaagaacggagcacagacatcaacggaaatattataaggaaaacgcatcggtgagctcatgaatacaaagtgggacatacaatgcacttgcgctcttcaaggagaagggctatatgagaactgggaccggatgtccacagctgtgaaggatatactatatactagatcccactcaatacagactaagaactctattcttgtaacttacaagagagtactgattgcaatggacgaatagtgatgaacataaggccagttctaagatgatgtgatcgataatgacaatgctg

SEQ ID NO: 62993 - DNA, 368 bp, Glycine max
cacaatctttctaatttgcttatcttagatactaacacatagtataacaaatagacggaaggttaacaactcgctgacctgatgacaaaaacatcactagaaagatgaaacaccaaccatggttctgcattactacaacatctttcatgttgataatagcgccaaagactatgacttgaatatatcttatactaaacttcctattatatggcactctgatttgatccccatcaacaagatctaagctgacactcattttcaacaaatttccgaatcatatcatgtacttactagatcctcataatatagctatctatgatcattatgtgcaacatttgttaaacgttcaatttactgcttctgattct

SEQ ID NO: 62994 - DNA, 342 bp, Glycine max
gcttcattctctatagcatctcagtttaattccatcgacagactcacaccgatacagatgggctctaaaccgagggctggcaaactccgtccacaaatcacaagatcagcccaccacctccgacgtcagcttcaatcccctgctaacgctgcagcaccagaacacgacaggaacaactacaactttcagggaatgacattgaagggccttcgaataccccgaagaccactttacccatacgtgcagacaacatcatcggagtacccctgcatacttaacacgatgctacctttatacatctatcccttcaggaaccctgactatggcacccacttcaacggc

SEQ ID NO: 62995 - DNA, 137 bp, Glycine max
acgcactctctaccatacccattcaccattcaactttaacaaactgatccatcctcctgtgccgtattttttcccataccagctctttcataagtccacatactatcacttctacaacattccaactatcctacaac

SEQ ID NO: 62996 - DNA, 379 bp, Glycine max
gtttcttcctaggtatgaatctgctacaatttctctgattctgaaataacaataactcatgggagtacccccaaacaacagaatgggagataacaaacgtaagagaggacgcaaagccaaaacccccgcctccgaaaccctagaccaccccgcccccgtcaccaccaccgctccaaattccacctccaccgccatggacgatgtcttctccgtcggcaacgtcgagctcatcgacaccacggactcttcgcaccaccgccgcctacgcgcccgtcccaaccactccgagaagccccacgctctgcccacggggcgccgtcacgctccgcccctcgacaacggaagcggtgacttctcggtccccagcgacgtcgtcggg

SEQ ID NO: 62997 - DNA, 346 bp, Glycine max
cggacgcgtgggaaaaaaaaaaaaaaaaatttaaaaaaaaaaaaaaaaaaaaaaaaaaaagaggaaaaattaaaaatcgaaaccgtccttctatagaatccatacttacatacacatcctataaaaattaatacctttcatttaaatatcccctaaattaatttaattgcccttctttttacacctttgtttctgtcaaacccctttcttttcccattttaatccccttctttaacatccccttttccccaattgccttattatctataagtcccctccctttcccccttcccaccattttctcatcctgattgttaaataaaacccccctttttactgcccttta

SEQ ID NO: 62998 - DNA, 331 bp, Glycine max
acgcggacgcgtgggcagacacgtgggcggactcgtgggctcgctgttgatatgccgtaattgatgcggtatgacataggaggccgggatcaacatgagtatgaggaaacgcagcagacaaagtactctgtcgagttctgggctgagaagttagaaactgaccacttactccatgtatcttctgagattgaagaggacccgcagagagagacagttgaggctggccatgctgcctaagacatgtctgtggataggcgaactggagcttgacggtgcaactggtgggaaagcgtgcagttctgatatgactgaacaggtttctgcaatggtg

SEQ ID NO: 62999 - DNA, 171 bp, Glycine max
tcatacgataaaaaaaaaataaaaaaaaaaattttattcaaaataaaacaaaaaaatataatggtaagatataataaaaaaggggtgaggaaataccatatatctttctctattttttaaatttatatctattatactttttatttaatttccctctattctaaattattt

SEQ ID NO: 63000 - DNA, 98 bp, Glycine max
tgattctagaaaaaaaaaaaaaaaaaattaaaaaaaaaaaaaaaaaaaaaaaaataatggaaaaaataaatcaaacaaaataaaaaaaaaaaatacaa

SEQ ID NO: 63001 - DNA, 349 bp, Glycine max
gctggctacagtatgtctgaatgacaactttgttcattaaggccaatatccggtagctaaggagttacaacacaatcttatcatcgtactctaactcgaagacattgctatgatctgatgaaaatggtatgcacatcacttatttctatgtttcaatcactccacctattttgcatgttattccctttatacaagcaagatatttgccaattaatccagcaccatgcaattcatttcaattggaatagaatattatactatacaattcacaaagaggggttgttgttgatctgttggttaacgccttaattgtcatagacataccactactagttctgtcagtagcttt

SEQ ID NO: 63002 - DNA, 139 bp, Glycine max
tcgtcgcgtaagatatcgaactatagctaatctgatatctatacaaatgaaagactgattcatagcctgttgagaagagtaagaatcgaaacacacgactactatccggatgaaagagtgtaaagtaataacgagaaat

SEQ ID NO: 63003 - DNA, 297 bp, Glycine max
gagcgaacccactaccgttcagcaaaatgatcgctcactctagcaacatcgacattcgatgactactctagctctagcctgtagccctagctagtagctaagccactcggtcgtgtagtcatcaaccttctgatcgtcacccatggccactgccgaggtccagaccccgaccgacgtggcgaccgaggaagcgccggtggtggagaccccggctccgcccgccgtcgtgcccgaggaggctgcccccgccaccgaggccaaggtggaagagccagctgccccggcggagaccgatcc

SEQ ID NO: 63004 - DNA, 145 bp, Glycine max
aaaaaaaaaaaaaaaaaaaaaaaaaaaaaaaaaaaaaaaaaaaaaaaaaaaaaaaaagaaagagcaaacgatctaacaggatccaagcttacatacacatgcatccgacgtcatagctgttctatagtgtcatcttattcaaatt

SEQ ID NO: 63005 - DNA, 212 bp, Glycine max
ttttcgttctctacaatgtctcgaaactcaatttgactaatgaccggttttgcaatgggacagtttaccagaagaggagcagcaagaattccaactggatcttaatgcatttgaccggtaaaaccttaaccctcaaatgacccattcctttctttaaggcaggtaccattaaggatggccttttcaaattaattggaatccaggtcaacaac

SEQ ID NO: 63006 - DNA, 115 bp, Glycine max
aaaaaactttccatctactcattctctgttacaacatataataattaattactattcatgaagatctaaatatagaaacttcacaaaacaaaaaaatatacaaattaaacactaa

SEQ ID NO: 63007 - DNA, 456 bp, Glycine max
cacagtaacaatcaatcaaggttttctttttcaaggcatgaggaatccataatccatagtgttttattcacatgcatgttatggtgtcagcctttaactaccatatctaacagtcttcctcaattgtgcataaagagacttgtatattgatttgtatgtcatttcatatttattttataccattgtcttttaggatgcgttatataaatttagtgttctcaacatgttactttttctgaattttttcgttcattttatttgtttctttttttaactttcttgtttttttttttatgtttattttttttacctttatttattattcttattatagataatctcttttttctttttttttttatattacttatttttcttataattttttatattttatttattttatttttttcatttttacttatttttttttcactttttatctatttctttttt

SEQ ID NO: 63008 - DNA, 344 bp, Glycine max
taaaaaaaaaaaaaaaaaaaaatttaaattaaaaaaaaaaaaaaaaaaataaaaagaagggataaaaaaaaaaaaaaaaaaaaaaaaaaaaaaaaaaaaaacaaaaataaaaaaaaaaaaggggttgtcattttaaaggtccaaattttacttactattgcttgtcaataaataaattttttttaggttcatctaaatctaattaatggacctaattttaaaaacagtttaaattgttaaaaaccttggtcttaccaaatttaatagttttaaagaaaatcctttttttacaagttgggataaattcaaaaagcccattactaatcgccttttcaaaaattttt

SEQ ID NO: 63009 - DNA, 54 bp, Glycine max
gaatttcgacaacatatacgacaattttatttcaaataatgaacattaaatcaa

SEQ ID NO: 63010 - DNA, 167 bp, Glycine max
  unsure (1)..(167): unsure at all n locations
tccacgcgtccgnccacgcgtccgcttaatgattgttcgaaaaaatgcttatttttgggcccgactttattccctctgctggcctttaaccttaatggttagaaaaacctccaaaaaatggcctttttgggtggcctttaggccatggtggaaccacctgtaatggt

SEQ ID NO: 63011 - DNA, 326 bp, Glycine max
atcaagtgcaatttcaatccccagaatctttttaatcgtcatctttcaagcaactgccgggtctcctttccaactaccaacccatatgctatcattcccattgcctcagacgagcccactgacactgatgaacacattccactacctaccaccgccaagccttctctcaaacacaaggatgagcacactcctgacgccaaggctaatactaccaacgaaccagtacctaacacggtctccataccacctcatccgcttgcactcattcttcctacgaacacactattcacgacactactacctaactgtatgttacatcagcttcg

SEQ ID NO: 63012 - DNA, 182 bp, Glycine max
cccactcatcctatctaattcatcttcattatatataatattcttactcaacattattcaatcaacactaggatttcttatttaaactaacactccatcttttatcatcactattatcaactacaacactcattacacttattaacaaattctactacacaatatatcctttcattctttca

SEQ ID NO: 63013 - DNA, 356 bp, Glycine max
aaaaaaaaaaacaaaaaaaataaaaatttaaaaaaaaaaataaaaaaaaaaaaaaacgggaaaggaaaataaaaaaaaataatgaaaaaacaaaaaataaaaaaaaaaaaaaaataaaaagggggacccttttaaagaacccaaactaccgcaccctcgcttacaacaaaaaacttttttattaggtacacttaaattaaattaattggcccaattttaaaaaccacaaaatgggaaaaacctcggagaaacccattttaatgcttctaggccaaatacccttttatccattgggcataatttcaaaaaggcccaacccttttacatttccaaacatttgcccagcctaaatgcaa

SEQ ID NO: 63014 - DNA, 292 bp, Glycine max
cccacgcgtccggaaagcctccctcttctccaatcttccctgttagatcgattggaagattgaagcaatggctgatttaagagttaagaaaggaagcaacatgaagcatggatctgtgtctgtcaccaccatcaaatctctttcgaaggagttgcaagtggagattgttgccaaggtggtcactcgctccatatttgaccactgcatgataaaactatgttgcaaagaattttttcacgccttcgaagatgattacgtgtaccgtcacgcctccatggagaattttgcgttg

SEQ ID NO: 63015 - DNA, 354 bp, Glycine max
gtcaaacatccgtacatgaactactcgtagaattatacttgaatgcatgacggggggggaaccattgtcggcttagagtacttccactgaaactgctagatctatgttacacaccgcctagtacaaatgcacgctcaactataacaacctgctctcgctcccttaaacactgatcaaaaccttgacggaaaaggtatcccactacctatcactaatatgaatctacttgaagattgcgagtccatgcaagctcagcctagactacatacccttgataaggccaactcactatacatttacagaagcgcttcaagctcatcaatatggcgaaccgaagcagaatctgacatgaca

SEQ ID NO: 63016 - DNA, 313 bp, Glycine max
ctcacgcgtccgtttaagacggggattcgtacaacgatacatgcaatgctaacagggcgggattatctgccacatatgatgctagaggtaagcccactgtcatgccatggccacaaatgaccttgactttgactgggaatgattacccatttgtcgacgataattatattcaacttgagtgctgagctgcttcaacactcccctgttcacaacaaggtttcatcgctatttcacaatgagcagaccatatcagagccttctgcgattgtttaatacttttattagacatggtagaacaaccagtcttattacc

SEQ ID NO: 63017 - DNA, 381 bp, Glycine max
cccactcgttcggcacgtggcttctgcagactttcctgatcattttgctaccaactgggagggcgctttcttcattggagtaatttgctcaccaatttgctatctttgcttccatactttcttgttcattttagtgtcctcttcactttcagttttttgttgagttttagggcgagtgataaagctgatgatggctctcatctttactatattgtttacgattttggtttggatcttttattcttcctaatatcttatcaactaatctatcaccgctgttctgcgtactgggggcagtgtgacgttaattggtacatatgtctttacaagtgtccatccgagaaccatctggaaaatttgctgctttagcttcaaaattca

SEQ ID NO: 63018 - DNA, 337 bp, Glycine max
cccacgcgtccggagaaacatggcttccttaagctccttagtgctgctccttgcggcgctaattctatcccctcaagttcttgcaaactatgagaatcccccaatgtacaagcctcccactgagaaaccaccagtttataagcccccagttgagaagcctcctgtatacaaacctacagttgaaaaccccccaatttataagcctccagtagagaagccaccagtgtacaagccctcacttgagaaaccctcagtttataagcccccagtttagaaaccaccagtgtacaagccctcagttgaaaaaccaccaatgtacaagcccccaatttaaaaa

SEQ ID NO: 63019 - DNA, 293 bp, Glycine max
aagccacgcgtgcacacaaaactctcagagaactggttttgcatactaacctccttaataaaccaacggaacgttcacacacctagctcgatcatctaattcactcaaccatcattccatcaaacttggtagactaggctagcgactctctcttaacggactgtcaactaaccatcctacagaataattgcaaactgttcatagatcaaacataaaaacacatattctcacataactaatcaatgcatacatactcttcatatcgcctttattaatatgcaacttcttacact

SEQ ID NO: 63020 - DNA, 334 bp, Glycine max
atgcgtcctcagatgttgataggcacagattaaagactttaccgagtccttacacggtgggtgtgttatcctcgtaaggaacacatcactagtgacaatccgatatcaactgtgaccgcactgataaagctcctgactatgccatagcatctagactctatacagatgatccagtggatcagcaccatgagtctcaagctaaaactattcttccagtctccacacaatctgccctacaagctagtgtatgacgcttctctcaaggaccactacgagcacacatgatccctcaatcgcattctctgctacctacacaacaccctcaagctcaact

SEQ ID NO: 63021 - DNA, 175 bp, Glycine max
cccacgcgtccgcccacgcgtccgcttacacttgcgtttacgcttggacggactcagagtggatcacttcaactgctgctaatacccatccataattaataaatatacaaaacaattacctcacgattatacttcacatattcacatatctaaacccttatcgattctactatat

SEQ ID NO: 63022 - DNA, 242 bp, Glycine max
  unsure (1)..(242): unsure at all n locations
gcgccctttttctataatgtatatttttgcacctaattcctatgtatacaaaacaatccagaganttgggtcaaaaggtatatgggggcactcctcatactttcatttattttcattcatctcttccaaacacaatgtataaaacgatattggatacatgaaactcaattaatgcgtattcagttgaatgcttcaaaaaaaaaaaacaatggcgaccactctagatgatccaagcttactta

SEQ ID NO: 63023 - DNA, 270 bp, Glycine max
gcgttcgccacgcgttttaccaacggatcagaaaaaattctctgcagcaaccttgggggctggggtatactgtcggggcatcgaaaacgtgtaggtgaacggagcctgccttgattcatgttctagcatgatagggaagggaagagtgctagaaataagaggcactgaacgaacagtgacaatgtcaacatcgcagctgatgatcatactgatcattgcaaatctaaaccaggtggtttcaaagacactcttgctgatgatctactggct

SEQ ID NO: 63024 - DNA, 164 bp, Glycine max
cccaacaaaagcccaaacataatttataaaaattacattcttattcacaaaaatatctcgattcatcttgttctcatatttgccccctttttactactgctctccctaatcataaaccctaatcattgtttgggatttcacaggaaagaaatttaaacacaaca

SEQ ID NO: 63025 - DNA, 258 bp, Glycine max
tcactaatgaatacacattaccatcatccgatgcaaaatgagacgtctaatatgctaaatgacacaaatataacctacgcataacttgacaaccaatatctgcatcaccataacaccttgctaaacagactttacactctatcacacaaatctcccaacattacccacaaacataaacttgcacaactcattaaccaaacaatctacagtccatcttaccaatggcatgtagtactcacaccctattcgaaccatcat

SEQ ID NO: 63026 - DNA, 53 bp, Glycine max
tcggaccctcctattgcgtctgggggatctggaaaggactttggcaattctgt

SEQ ID NO: 63027 - DNA, 464 bp, Glycine max
ggtccgaccgacgcgtgcgacctcacatcctatatatttcaacaaataattaatcttatatattacatcaaatcattaagataaggcacaataaaccggagtgtaatctaagaatatatatactgataacataatgatacattcagagtaaactaaatttggacctacttaaatttatctattaatactcatacataatattattaattgaattgaatttatgttaatatttgcacctacatataaacaaaatctacctattcacaaataacgttactctaattcaataattcattgctatgcttatacagataatcctactattcaaaataatatttattaatattactattacctacatattctatatattcacattgcccatttacttactaatatatgcacatactaaatatactccattatatctacataccatacttgtactaatcaataaatgaata

SEQ ID NO: 63028 - DNA, 395 bp, Glycine max
gcgttccttaacacacactctgcctctatatgtctttctctttgggtcataatccttgaccatggattgtattcctctgcggggcggccaatcaaccaaccatcacactatacatattatgcaaatgtcgtatagttgtagtgttatgcatatgacatctacatccttatccttcacacccaactacattgactccaaccaacacctacccacatactatcctctattccacttttcccatagagacctctatcatctcatatcaactcataacgccctacatcttatccctcttctcaatcttctctgcgactacatactctggttcttctctgctaccacttctatacccaacaaccactcttcataaataaatcaagattacatggactatt

SEQ ID NO: 63029 - DNA, 385 bp, Glycine max
gcactcgtgcgaaaaaaaagaaacctaatcgccgatcgcgtcaaaagttcggtgttgctctgtgaaattgccgtttgggttttttgcggtcggggataatcctgtgaataataacaataattgggtatgttttctgttttaggtaacctagctgtagctccttttttttttataattgatttgccgttcgaagatagtcgttccaggtactgctactctttgtgttttctggcgttttaattctgcgcaattatttaattctacatgtcagattgttgattattggtcgtatgattcgttagaactctatgactcctgagctctggagttgaaatgttgacttactaggctaaaagccgtagcttttgtggtacgtatcctaaca

SEQ ID NO: 63030 - DNA, 357 bp, Glycine max
tctacttactaatttatcctatatatttcagcttcacatccacaagattaatctgagtcatcgtgtacaagaactcgggagcgatcaacctaatggaatactctttgctcaacatacactatatcatatacaacaacaacttcctgtccatataaatacccttatcacattaacctgcaattttcaacttataatatgctacatggctagaatcaaaccaccgcataatgtgtaagctaatatctgcattgcaataacacatttctgataacgaactaatacttttcatttacaaatctatcacactttatcaccaacttatacacctaaacaacttaatatcccaaacatatttac

SEQ ID NO: 63031 - DNA, 422 bp, Glycine max
gcgttcatattcctcagttcaacacatcgatctgcaagactcagactagtaacagagagaaagcatttcaaagaaggaacggagcgatgtcgtttatgcgaggggattttctttctcgaacgaggaagctcgtgaagggtttggccaaggcgcaacccgcgtggctcaaagccatggaacagttaatctctctaatttctgattcattctcttcaatctttgtcttttgcattctgattttgcatttttcctttgccatttgagaatcccccttctgggtttttatcacttttgaaaaaatggcacctttttcggtttcatgatttcactttttaaaaattcatttttttatttatgtgtgctgactccaattaagggttatgggtgtgatattcatttttcaggtattggtctagatttca

SEQ ID NO: 63032 - DNA, 429 bp, Glycine max
atcatgtgggaggatgacatcgtaggggtgaagagaagagatggtgaaaggcacaggcgcgggacataaatgacttgagggcgacctccgacttcttcacagctctaacgccgttggaagatctacaggatagactgctcagatcacccgaacagagactctctaatacaatcatatatgggtgcacgtggacactacttaaacctatggcatatattctcctacattatgcataatcatatcatcgtacttgttaacactgtatctggatctgcgccgatcatatctgctctgtctgtagctctctcagggatatcaaagtcatgggacgacttggaccctgattatcttaggctagatgcgtactgtgaagacactactcctgctgattgtacaggtacaacagatccagctgatctgaagtgactt

SEQ ID NO: 63033 - DNA, 374 bp, Glycine max
gccactcgtgccttaatgtatcttcactgggaggagagagagagaaagaaagacagaagaggtgacagactggcagatctgacgacgaccctataggagctagatcttaaagaaacagagacacatctgattgagctaccataagacgctctcgacgcagaggcaactcccaagaaacatttcgaacacaaggaagagcttgattcggaagatatgatgactatctacatcaacacatcgctgccacatgtctgtcagtgatgtacttgaacgcacttgataaactggcttccggataatagataaacgaatggctatatgtagacaccactgacttgaagaagcacatgagataccctgttggatactcttac

SEQ ID NO: 63034 - DNA, 459 bp, Glycine max
gtcttctaaattctatatataaggtccagcctttgtagaggagccaatctcactcctcgtctgcgtgaccacgcacctagaaactcctatcaaagcccctatcccatcagggagactgacaagaacatatcaccaaacacgcacacttcacaaaccacctagcctcgactctcattccgattccagttcgactagcatttcggaaacaatcatattgactactatagagcaggacgtcactgacaaaacttctgcacatgataacgttgccaatgcttaagttgatcaatactaccatatgttcgcatgaaagccctgagctggtgcatacgtctcaccaagacctctacacactcgagcgtcctgagcacaatggcataatgggtattacataccacaatgctcgatatcaacaagaaaacactatcatcgctatatggggaactcactgcagagatc

SEQ ID NO: 63035 - DNA, 365 bp, Glycine max
acaataccccgggcccagttacaaggcacatggccatcctcaaactcccaataacattctcttgaagacaatttttatattaccttacaccctacttccacctatacaaacaccctttatccttcaaaccctctcataactccaatactgtcaacaataatactcttacacatctaaactatctccatccattaaatcccccattcttaacactgtatttactacgaattaaacacaataaacccaaccttatatgctaaagaactacgtaattatataattcatctcacacatacttctttatactacctatcatctcttatattttattcctgaaatattagctgtttaactcgattaattta

SEQ ID NO: 63036 - DNA, 135 bp, Glycine max
gcgcccacgcgtccgaaaaaaaaaaaaaaaaaaaaaaaaaaaaaaaaaaaaaaaaaaaaaaaaaagaaaaaggaaaaaagaaaaaagaaaaaaaaaaaaaaaaaaaaaaaaaaaaaaaaaaaaaaaaaaaaatga

SEQ ID NO: 63037 - DNA, 439 bp, Glycine max
gaaaggtacttagaggctaatgcttccgctaacatggtaggaatatagtgctaaggtgagaggtatctgatagtgtacgatgacactgcatccgaacaatactacgatcactgatgttattgcataaataatctaaactagtagattcgaacagctagagtttgaacggcggcggagagaagccttgcgcggagttggaagacatgggaaaggatttcgaagctggtgtagtctggaaggagacgctgagagtgaggagaattatcgaggaccacttcgatctgaacagtgcttcaagaatcagggattagccatcagatcagatctgtagtcatggatttggtcttagaaagactgatgatgcttgcttagggaatgaaatgtacaaggccttaactgctgcagcactgaatataatgctaaaccggtccttgatcat

SEQ ID NO: 63038 - DNA, 319 bp, Glycine max
  unsure (1)..(319): unsure at all n locations
ctcctcccattttttccatggcttatatctccacgatcaagaaccacacccatgtnccttttttcatagattggggggcaccattcagaccacgacaatagcttctctataagcatatatatattcaaagtattcacattcatacctacttaaacggactttattgataatatcacatcctaaatcataccactggctttgactgctacttccatttacatgattgcactattgatctataatatctcacatctaattttaaataaagaataacctactaattcatgattcacaagggtttacctacacaaacctacct

SEQ ID NO: 63039 - DNA, 391 bp, Glycine max
ttcaggcgattttacggtcgatttgaattacgtcgaatcgacctactatactgattaggctcaatttatagggcaaacaaaaccctaactccacatcacaaccatgacgaccaaacaagatgtaaacgctaaacctataaaaaaacccaagaccgataagataaattaccacgaaatacatatgactaacattcagaagaaatagaaataagagaagacactaaagaaattgaaatccaatactcatcaaaaggtaatcattttaatccacacgactaaagacaaaattaaataaatgactctctctttatcatgataatattcatacaataatgagccctctaattacaagttataccatcataacttccactaataattatgcctacaa

SEQ ID NO: 63040 - DNA, 81 bp, Glycine max
accgactcgtccgcccacgcgtccggcttagcatatctatgattgtcttttcttgtaaaaaaaaaaagggaaaagaaaaat

SEQ ID NO: 63041 - DNA, 300 bp, Glycine max
accacgcgtacgaacagacgaccgacacatacatatagtggtagctacaatcagagataggggatgtcacctatgagtacacatctacttggctactaacatacagcctgatctttgttgaaaacctaccctcctccatggatcaggagccgtatcctgacacatggtcggcacagccactatctgaatcatccttgttagcctctctgacagctacaccgcctggaattcaatcataacatttatctaacacgacactatcgatatcaactttgccggcactcaacacatcttgtacat

SEQ ID NO: 63042 - DNA, 324 bp, Glycine max
cccacgcgtccggggaaactaacaagtgtgacagaaaagtgaagaacataccaagtaccagctgggtgtttcaacaactgttctgtaatatgtatatataatttcaagactagaaggtaaagtttacctccgtactcgttgggttttgatcgttgaatctgatagcggtttatgtagagataagatatatatagcatgtattgtctaataacctagtaactgcaatatgctatagcattattacgtccatgctagattcagagctgttgaatttatggattgtccataactacttgtacataatccttatagggttagtagctt

SEQ ID NO: 63043 - DNA, 77 bp, Glycine max
cccacgcgtccgaaaaaaaaaaaaaaagttaaaaaaaaaagaaaaaaaaaaaaaaaaaaaggaaaaaaaaaccaaag

SEQ ID NO: 63044 - DNA, 349 bp, Glycine max
cgaaaatcataaagtttaatcttgacaatatttaattttacatttaatttaaccaaatcagaggggttaacaccctataggtgattacacatatttcatacaatttattaaccaaaattcatatacacaatcatatcaacattctgacaaaaatttacaacaactatcacatctatatactcctatcctataattcactcatctaatattaatccacaataacccagatacctatatcgatcatatgttaaacatttcatactcatcaaccactatacaaaatgcacaaatattactagccttttacaattttacatctagaaaattcatatgtatatatataattcac

SEQ ID NO: 63045 - DNA, 310 bp, Glycine max
cccacgcgtccgcccacgcgtcctaaaaaaaaaacattaaaaaaaacaaaaaaaatagagaagaaaaacaaaaaagagaaataaaaaatgtcaaccattctaaatgatccaaattatctatcccatccatgcaacttttctgactctacacttgggccacctataatcaatttatactcctgtcttatactacacttatcctagcaaaacccttacataacccacctaattacatttgcaatatattcaacttttctcatcttgaaccactacaaaaatggcttcacttttagccctttcaaacatcttc

SEQ ID NO: 63046 - DNA, 227 bp, Glycine max
caatggaagcaaacgagaaatgtgatgtgtatagttttgggatcttggcactggaaatagtgtttggagagcaccctggtggtgatgttacatcttcttgtgctgcgacctcaacacttgatcatatggcattgatggataggttggaccaacgtcttcctcatccaacaagccctactgttgttgagctgatatcaattgtgaagatagcagtttcctgtttgacc

SEQ ID NO: 63047 - DNA, 438 bp, Glycine max
cttatatgctaagaactcgacacacacaattgctgttcgcacctaaccagaaagaaaccagtgtgtttgaattcgatggttgctgcttcagtctcagtgtggtaattcatctatgaatactacgccgtttatggacaagcacattatggatctcactcacagtcacggatcttcttcttcttccactactcagactcagagcatggacttcatcgaccttatgaaagaacctatacaacatcatcaccatcatcatctcgaatattattacatctattaattataaaatgcccgttgcaattgtatcagttttgtctacatcgtttttagttactattttctaccctatctaccttttttacagtttcaattttttctaattctccccattctttatgtacatgttactttcgattacaacttcctttactttttttt

SEQ ID NO: 63048 - DNA, 296 bp, Glycine max
acctaaccctaaataatctctatgaaactgggtttgaattttataatctgctccatcatttcggcattgtttataactcatgtcgattatgcaaccaattatatatcttattaaagcttttgaattaaccttcccttcaattaaaacttttatacaaacttgtctaacaccaataaattcttcgttggtgacaatctcattttcatcatagacagactccattatcttataattataacctaggctacttattatgacaattgcaacaccagcttattaactggtttcacgttcat

SEQ ID NO: 63049 - DNA, 346 bp, Glycine max
gcgtagtgttgcgtcgacgtcgtgcgctgatactctgactctcgactttgtgaccatacggtaccctagctacggattgcaaccatgttgaccaagcacggtggaaaagctaagcctttgaagaaacccaagtctgataagaaggattacgactagattgatagggctaacattcagaagaaaaaggatgaggagaaggcgctaaaggagttgatagccaaagagcaacagaagggaagctttggatgctctgggctcatgataagtggatagaactaacggctctatatcatgattgcctgcattcaatattgagccctgcaatacagttgctaccatgataact

SEQ ID NO: 63050 - DNA, 431 bp, Glycine max
attccctgctcgaccgcactcgtcctacctttccttccttcatgtcttccactgtttctttatcactcaactataaatccatagggtaccttatctcctggtgtcatctcatatctaccaatcaattaccatatactattactttcaataaaccaaagtttatcattaattattacgactcatattgatcactactaacattcataataataattctaattttattcctctaatacactttatatctcaaacacaccataatgtaaactcttcatgctctaaactcaatataattgtaaattactaacttctctttatcataattacattcatacaatattcatccctgctactacaattctaccatgataacttctcttatcattctcacctactttattcctaatgtgtactgaactaatctatttcat

SEQ ID NO: 63051 - DNA, 308 bp, Glycine max
cccacacttccactcactcttccactgacatattctctatcatacttctatatcatataagcattgtcattaacgcatgacaggatacacacactaccctatcttttattctttttgaaatatccttatccaatatatcatctaataactatagtatttatatacaaatttttgcaatctttcaagctataaactcatccttatcatacactctctaaaatcttattcctaaaatcaaaatcactacctcacacttttcttcgattactttatctttaaaatcactttattaaatctacatttacata

SEQ ID NO: 63052 - DNA, 233 bp, Glycine max
cacacaacaaagatgcattatgatactagaaatatctcattgattaatatctaatctaatagtgtgtgtttctcaagtcggtgggtcgtacacattatacacacgcttatagctattggcaattgcaattgtcttatctcgattctcatatctcgatattctagtcttgataacttattagtaattgtccaatcgccgtccttaactggactcatcttctccgtagtcatttc

SEQ ID NO: 63053 - DNA, 429 bp, Glycine max
ctttgatgaagatggtgtcaatttggggttcttgatttctgaagatgactttttaattagttcttcatattagggtatagtatacttccctctcttgatagatatttacctctaagagatgaaatgtgctatacttttgtccattttaatatttttttattagtattgtccagtttaatataaatgaatcttttactagttgcaaacatttatagatgggcatttcctttttctataactttcaatgtcaccaactactaattttaacgccttattattgagttttggattctagatgtaatgaagttttagacatgactgttatcagctttggaacctttttttttttttacctataatcttcatttcatcttctgaacttcccaagttgatagtagggttcagaactgattacagatgatgctggat

SEQ ID NO: 63054 - DNA, 374 bp, Glycine max
taaaaatataatgtcccataaggaagctgtgaatgtcatagggctctccatcaaggcagtggatgtcataataggtggggctgaatccacagactatatctgtgtcaaactcacttgatctatcgttccctccactaataactctcatacttacttcactagcaccaacagattttataaccttgacattcttatattcatcattagcgtacagactaacaaccgattcattatagatcttactcatattcaaacttgtaacaccatcttattaactgtcagcaacatcatagtcatcaatataattaacaaccacataccacatacaatgaggtgctcaactaactctgactatattgtcttcttcggtgaca

SEQ ID NO: 63055 - DNA, 346 bp, Glycine max
cccacgcgtccgcccacgcgtccgaccagttcctggcaatgaaatgagtttgacttggggccacttcatgtctgactatagatcaaattataccattgattgtcatatttcataaagcaatatctagaaatgttgatgtttcagcaaatgtgtaattatttcacttgagaaaggattttccttcgaagagtaaaaaaacaaaaaaaaaaaatacaaaaaaaaaagaaaaaaaaaaaaaaaaaaaataaaaaaaaaataaaatgaaaataaaaaaagtatgcctgcaccaaaggacaaagaattatcaaatgcggcaagaacgaaaaaaaaaaaagggggcgccttt

SEQ ID NO: 63056 - DNA, 235 bp, Glycine max
acgaaaaaaaaaaaaaaaaaaaaaaaaaaaagattagattaaaatgaaagtgttaataataatgcgaagtgtaaaaatagtatagagagtaaggccaattataaaaaaaaaggtccacatttatattattccataataaaaatattattaaaacaaaatcataataacaaaaataacttacacttaatttaacaaaattacttattgttatactcaacttgtttttaaataacaa

SEQ ID NO: 63057 - DNA, 237 bp, Glycine max
cccacgcgtccgcggacgcgtgggaaaaaaaaaaaaaaaaaaaaaaaaaaaaaaaaaaaaagaaagaaaaaaaaaaaaaaaaaaaaaaaaaaaaaaaaaaaaaaaaaaaaaaaaaaaaaaaaaaaaaaaaaaaataaaaaaatataaaaaaaaaaaaaaatttaaaaaaaaatattaaactaaaaataaataatataaaaaatttataaaagtataaaaatataataaaaaaaataa

SEQ ID NO: 63058 - DNA, 370 bp, Glycine max
aaaaaaaaaaaaaaaaaaaaaaaaaaaaaaaaaaaaaaaaaaaaaaaaaaaaaaaaaaaaaggaaagtgaaaaaaaaaaaggaaaaaaaaaaaaaataaaaaaaaaaaataaaaaaaaaaaaaaaaattaaaatttaaatggatccaaattttaaaaaccaaatttttgaaaattataaattttttaattaaacgttatttaaatttaaatccattaaatcttttttaaaaacagtctttttaaaaaaaaatcttttttaaaaaaatttttttaccttaaataaaaccacttttttaaaaaattcttttattacctaaaagtataaattaaaaggcctttaaaaatttctttcacaataaattgccaatt

SEQ ID NO: 63059 - DNA, 348 bp, Glycine max
cccacgcgtccgggcagagtcacattcaccgggctttctttcctcctcttattttgggtatctatgctgtttaattaggaaggtggttctttatccttcggagcctctactatgttgaagttatctttgtatttccacacgttgattattcggtgatcatatgattgtattttcttttcactttttttcttctttagagacctctgattcaattgagtaaaaagtttatttaaacgaaaaaaaaaaaaaaaaaaaaaaaaacaaaaaaaaaaaaaaaaaaaaaaaaaaaaaaaacaaaaaaaaaaaaaaaaaaaaacaaaccaataaaaataaatcgggataagaaat

SEQ ID NO: 63060 - DNA, 345 bp, Glycine max
gcttaatttctactctctacttctagctaacagagttaagtaaactgtcgcttcagtactggatgtgtatataatggcggtggctgtgacgattctggtgacccttctctcggtactcactactgcatcgcgtgtttgagtggtagacacatatccctgaatattgaaccaacaaccatgtgcaagatcactttccttgcgcattgagctactatattcgtgctgcacagcttataacgcacagctgatgctaacttgcgattcaactgctgcgctgttgagggttctgtattgcatttcacagttttggattatcacattaagctccaaattgagacctgttcc

SEQ ID NO: 63061 - DNA, 271 bp, Glycine max
gaattttataggaaaaaaaaaaaaaaagatttaaaaaaaaaaaaaaaaaaaaaaaagaagtgaaaaaaaaaaaaggaaaaaaaaataaaaaagtcaaactttttatggttttaaaggttccatccttttatagtgccacattcttaactacattatattgcaacgtaattgcttttctttggccgactgtaaataactttaaatgtgggaaattttaaaaagtttgcactttaaaaactttgtcgtttttcactttaaccccatttggcca

SEQ ID NO: 63062 - DNA, 432 bp, Glycine max
ttttgcatgtgtcattgttcatctggctgagtgcagttgtctcttcattcttctattttgagaaggtgagcgtgattgccactacagttaccagctctcttggaagaagaaaattgtttgcccagataaatagcttcattgctgattttattcttgttggacaactgtccttgacgtacagggacgcattcttactgttgctggggtgactacagctatatgctcagcacctttcgttggcctcttaaatttagtcgctctagctgtttggccaaaatgggtggtggttgccatttgtgagacgctgagaaaggttattatgacttgcaaatattggttcctttaatagatttcagtaattaacaacatatctagaaatctgtattgtgaaagtagatttagaatatgtataggttcattgtatgatataat

SEQ ID NO: 63063 - DNA, 352 bp, Glycine max
agctatgcactactgaggccatctaggtgacccacattgacagaatcctgattaactggggtcactatataacggcctatgagactgctctgatcagtggctcctgctcatgataagttgtcgctttgaactgtgggatatgaatgctgttgctattcatgattcggtataaaacacttacctactaattactatctgatatgactcccatggtattaatgtaactaatatccatccattggttagattgagcattctacttcattctatggactctgttatagtctctcacgttatccgtatggagattgagagccatcatctagttcacgatatgagcggtcttatcctc

SEQ ID NO: 63064 - DNA, 55 bp, Glycine max
aaaaaaaaaaaaataataaaaaaaataagtaaaaaaataaaaaaaaataaaaaac

SEQ ID NO: 63065 - DNA, 337 bp, Glycine max
aaaaaaaaaaaaaaaaaaaaaataaaaataataaaaataaaaaaattaaaaaaaaaaaagagttaaaatacaaaaagaaaaaaaatacacatacaaaaaaaaaggtacaccaatctattgggtccagctttacatccacatccttactcctgtttagatttcttctcatgtagcttaaatgcaatctgctgatcctatgctttaaagcttcttaactggcaaatccctttcattactcatctaatcctcctatttgaatatcccactttataaagcttgcttaactctcataatgcccttacaaatatcctttctaaacttttgcatatcttgactg

SEQ ID NO: 63066 - DNA, 230 bp, Glycine max
aaaaaaaaaaaaaaaaaaataaaaaaaaaaaaaaaaaaaaaaaataaaaaaaaaaaataaaagttaattaccaaccggtcttaattttccaaattaacttaaccttacttgctacataatcacaaatactataaagtttctataaattaatttcaatgaactgcgttttacaatctctttactgtgaaaaccttgtttttaaataccttaataaactttcattgcatccc

SEQ ID NO: 63067 - DNA, 151 bp, Glycine max
actcttcatcttatctctctctttatttttcaaattctaaatcaattttacaatctggtaatatctatacggtaacctataacttcctctttccccattacccttcatcatctccctattcaaaacctattcctatatatccttaaatcat

SEQ ID NO: 63068 - DNA, 307 bp, Glycine max
acggaaaattataaaccgtaatcttgccaacattgaataatacattgaattttaccacctcagggggtggagcaccctttggtgtcttaatgatcttaattatctgattaaccaaaatcatttacacaagctagactattattctgataaaacacttgaaagctactagtgagatgctcgatactcatgtgcccaccatgtgacttatctaaaccttatagcctaatataccttgcaaaatttacattcgtcatatcttcaacaattctaatcactgaaccactagaggtattgtaccacttttagg

SEQ ID NO: 63069 - DNA, 72 bp, Glycine max
cccacgcgtccgaaaaaaaaaaaaaaaggttagaaaaaaaagaaaaaaaaaaaaaaaaagagaaaggagaaa

SEQ ID NO: 63070 - DNA, 206 bp, Glycine max
aggaaattaggcatgaccctctttgagtatgctctgcctatttgaaaatttccacacctgttttaattgtcgtaatgatgtgtgaagtgtgtgttattttaaaaaaaaaaaaaaaaaaaaaaaaaaaaaaaaaaaaaaaaaaaaaaaaaaaaaaaaaaaaaaaaaaaaaaaaaaaaataaaaaaaaaaaaaaaatttaaaaaataa

SEQ ID NO: 63071 - DNA, 426 bp, Glycine max
gctacactatagtttatcgataactatatgatcctatcatgtgtttatcaaatctatgctgatagctatgaagaactacggatgagttccaatcgtacgaaactgtctctctaactgattcgtattctgcaatcgtaattatgcgcctgatgattgcgactgcagcactgacttctgcatcagaaggaacaacatttcgtctgatgattcctgcaagatataagacatcgacggattgaagtacaaaaggtcttaaatggtattggggatacctgcaacgatgtagtggaagatttacccgtccgataaggaatctctagggtctatagacgtatatcctagttctacacatagcgtatcatatgctgcatctgcagctatcactaagagatagtgaaatcagatgatccttatgctaagaaacgc

SEQ ID NO: 63072 - DNA, 442 bp, Glycine max
  unsure (1)..(442): unsure at all n locations
aacaaactgaaattatagctcctctctcgcgttctcgttctctcacaccacaccacatcggagtcttcacccgcacaaacaacaaaaccctattttttctatttccacactctctctgtctgtctctctccatcaacgccattccgtttttctccaaaatcacactcccctatttgcccctaaactcttcgtcttccgttttctctctgctccgcattcgcacaattgcctataccgctgctacgttgaggcggttattgaaacggttgcgtctcggtatcctcgtcaatcacttgccaataccgcttctagggttagtttcttcccctctctttctttcgctttctaattccccgaaaatttcccctctatctgtaaccctagcttcgggaggattttttcccctcacgtgcgtgtctttntagggcttcttttctctcga

SEQ ID NO: 63073 - DNA, 462 bp, Glycine max
ctcgcaccttgcaaacattgaatcatcatcttacagtacacaatatctccataagtgctaccgtactataccttattctgtcgttacaatgaataccctaaataatctctatccctattgatcattcctgaattaccagccccctgtcctctctctatccattcccatgtattccgaagacaatctgcactactccaacgatgtagagtccctccatcacgatttctacagtagcgacaccgacgaccctcccattgattactacattgactacgacgacaactccgacgattacttctacgacgccgacgattctgaccggattgagtctagccgacccgagcaaaactttaccatattgacggaactcgatatccggcaaatgcaggaagactacatagctagagtagcggcagttctttccatacctcaagtttctgcgagcatcctacttcgtcacta

SEQ ID NO: 63074 - DNA, 464 bp, Glycine max
cacaaagcgggttactgtctgttcaagctaccatctctctctctctttcttagtgcctgcttgccagaagttaaaatggcccaagaaactttcctattcacatctgaatcagtgaacgaggggcaccctgacaagctctgtgaccagatctccgatgctgtgctcgatgcatgcttggagcaggaccctgacagcaaggttgcctgtgaaacctgcaccaagaccaacatggtgatggttttcggagagatcacaaccaaggccaacgtggactatgagaagattgtgcgtgacacatgcaggaacattggttttgtctctgatgatgttggtcttgatgctgacaactgcaaggtcctcgtcaacattgagcaacagagtcctgatattgctcaaggtgtgcacggccacctcacaaagaggcctgaggagattggtgctggtgaccaaggtcatatgttcgg

SEQ ID NO: 63075 - DNA, 272 bp, Glycine max
tcccactcgtcctaaaaaaaaataaaaaaattttatatcataaaaataaaaaaataaaaaataagttaatcataaaaaaaaaagaaattacaacctaaaaatataccaatttaaattatcatattatcaaccccaaatctattttaattttaattaatataattttaataaactctatctaaaaaaaatctttttaatataataaccatctctattttccactcctaacataacttattttaatctaatctcccaatcttattaaattcttc

SEQ ID NO: 63076 - DNA, 276 bp, Glycine max
aaaaaataaattaatataaaaaaaaaaattaaaaaaaaacatatataaaaaaaaactaacgacctgcaaaaacaaaactgtatacctataattaactatatctttcaatcaaatctataaacaaaaaaaaaaattcaaaccactataataataaaaactctgtgctccacttataccactaacccttattcacatcatgattacttctacagaataattatatcactccaaatttttaattctattcccagatttttcccaactgcaatctctaaa

SEQ ID NO: 63077 - DNA, 238 bp, Glycine max
taccaaacaaacaaacataaataacttactttaaacttaaataaatataataatgggctggttcattactaagcgatattatctcactatctttatcctataaatacctatattttacttatactatcttattatttctactcttaaattatcccttcatcctcttatattatcatccaatcatttaactaattctttatatatctcacctttcatttcatccaattatttcataaaa

SEQ ID NO: 63078 - DNA, 453 bp, Glycine max
cccacgcgtccggtgatgtctgggaatgcagcagtcaaaaggagtgattgggcctcatgggtacaagtgtttttaacaaacagcaacagtacagagcattttgatgcatgtaagtggacaaaatcggaaccacattcctgggaattgatcttcccaatagaggtatgtggtcctaataatggttttgaaatgtggagttctgagtgggcaaatcaaacttcatggcatttgagtttccttattgacaatcccaaacagtctacagtttttgatattctcttgggaatttctcaagattttgaaattgctggtaatactcttatgccagctttttctgttccacaggctactgccagatcttctgaaaatgcggaatcctctgcatgatctggaatttgtgttttctttcgcttgttcgtttgtttaattcaataaaggaaattaggcatgacc

SEQ ID NO: 63079 - DNA, 357 bp, Glycine max
tccactcgtactttcacctttacttgctttttactttcatcgattcccacatgggtcggatacaaagtccggggaacataacaacattgtgcatcatttcatagaacactattttggattcaaacatgacttcattgcaatttgtgctgctgtggatgctatcatagccgctgcctttgcattaatctttggtgctgcaatcaagacctttaacttccaaaagagatatatggatacatagaactctttctccaacgtcaaagattctttatattttctccctctttctcttattattctagattctgtgttccctctaagcttataatatattgatctatgctttaaacatttgtg

SEQ ID NO: 63080 - DNA, 169 bp, Glycine max
cccacgcgtccgaaaaaaataaaatcaaataaaaaaaaaaaaaacataaaaaaaggtaaaggtaaaaaaaaaaagaaaactaaaaaaaaaagctaattcctatctttattccatcctttctttctcttccttacttcgctattgattttttttttattgctcttcattc

SEQ ID NO: 63081 - DNA, 269 bp, Glycine max
atgagatttctaccgagcgttctcctttattgcttgcttatacggacatctttatcctgcgggcgttatgtttgggaatcgcttgcggctgaaacaacgatcaaatatactgatcccaaatcaccggacatattcggctcttaagacgcctagctctctcgttatattgcgcttgacagatacgatcacgctgaccacagactcgatatccacctctacttccactgatgaccacttgtcacgtcgaatgagccttatactaccactcc

SEQ ID NO: 63082 - DNA, 298 bp, Glycine max
aaaaaaaaaaaccaaaatactataaacaaaatgacaataccaagaaaactaacaaaataagggctgggctcaaaaacaaatgaagcacaaaagaattacaaaaagatctagagaagagacaagaatcaaggctatgactttacctaatatgccatgtggtctcaaatgtctcacattccatcaaatactgtttcggaatcaagaataggttctactatactgcgcaactgcttccagcatgaaacaatgcgagatgctcaactgctaaatctctaaacggagaggaccatttaccttg

SEQ ID NO: 63083 - DNA, 146 bp, Glycine max
aaaaaacaaaaaaaaaaaaaaaataaaaataaaaaaaaaaaataaaaaaaaaagggaaagggaaaaaaaaaaacgagttcactacaataaaaaccaatcattaaaaatatactctattataatacatatatttatctcaaattcaa

SEQ ID NO: 63084 - DNA, 276 bp, Glycine max
aaacccacagaaactctgatgaaaagtctcgttgctttctgcttggcttcgaagactaacaggggcccatctggtttcacaaatgctctcttcacaaaggctttcatcatcacttttgcgctttttacaatcttttttttgatccaaggccgtttcatcactctggggatgtcgtatcaatatatttttggaaagcttctccctttgaagtatatcatttccatatttttcttttcttaaaacacccaattttttgtttgcattgtatcttctata

SEQ ID NO: 63085 - DNA, 437 bp, Glycine max
gtcgactgcatcacggttgagtctcttctcactcaccttgtttgttttcaattttcttacatgtatcattcttggagatgttcatacacttaccttaatattttacaaaaatttttttttcctttctcttttccgaaccatcatccatgtcacaaattcttcacaagaatcatcaatgtttaaaggaataatatgcacgattgtttataagattccaaatctgtttcaatactcttataatcatgctcttttaatatcagacacatttaaagatgcttcactatcattataacaatttaaacattatttttaaaattttacatataatcacaaagtttatgcctaacaatgaacatcatatgtcatcaacaaactttttttgctatagaacatatcttctatccccaatatatatttaaaagattcattaacttttc

SEQ ID NO: 63086 - DNA, 131 bp, Glycine max
cgccgatcttcaatctctgagccaatcgctttccgatccatcttaccatgatttgctccgggggattcaatctgcgtgtgggagggaccttgccgaaaccttggaaaaggctgcactctgttcgtgcgctc

SEQ ID NO: 63087 - DNA, 465 bp, Glycine max
  unsure (1)..(465): unsure at all n locations
cgtctcggcanagagatgatattnaccatagcccgtnntttcttcttggtgcccttcctctgggtgcatctgcttctcatcgtgctgtgtgtggcaacctgagcgcatgccannaagatgagacacnaagcagatagaaccataagacacatgccagatgtncctggggaagaggggtggaagtggggggncatgaatggaagctggggacactggtggagaactgggggcatnggcggaagaggacancggtggaggacattggcggaggaggacactggtggaggacatgtgcggaggatgcagatgctgcggtcgaaagggctgcaaatgttgctgaagtaaaaatcacaaatatatgaactgaacacactcatatacttgagtgtactccatgtaataactagtatatatgtaagaaataagaaataaaagcatggactctatccgtgcttgggctggcat

SEQ ID NO: 63088 - DNA, 348 bp, Glycine max
gacagtcattatctggatcgcaactagctctttactgcaggtggtgctcatcccacattggtcaacacctttggcttcatgctgaaacattcattcttctctgatctgatcatcatttgtttgctcgacatatcacttgtcagttaacaactaactccgatcactatcacattttctatctggtatgctacacaatttaccttcttaggtctagttatactctacaaaactgatagtggcttgtctacgtgtaaatgtttcaatacagtgatcagtgaatcatgaatcgtacttaatgattagtatatataagcatacgatctttggataaattggtaaactcgtgtt

SEQ ID NO: 63089 - DNA, 314 bp, Glycine max
ttcatatgcatcgtatatattccacaagggtttattccattataagagatacatcaaaattggaagatcaatctttaaaatctgagagacaaatatatgacggaacttctattaaaccagaagcaaagtctgaatatgcctctcctgtaaaaaaggcttaatcataaacattaatttcaatgggaaagacaaattgtgaaaaatcatttactgcacccaaaacccttgaagtttctcctgataatgaatttgagaagcgaataatgcccgaagtaatactatcaaatgatattgatgtcacattctctgatatt

SEQ ID NO: 63090 - DNA, 420 bp, Glycine max
ataagttccaaatcacgaattcgaagttgcagagttgtcctgaaattgatcagtggatggtgtttcctttcgaggaatgatatcaaggagttggttatggaattgggagaaggggagttttttagaataccttcaagccttttcaattgtgggaagttgacccggttggacctatcgcggtgcgagttcgatccgccacatagttttaaggggtttgtgtgcttaaggagcctcaacctccatcaagttttgatatcccctgatgcaattgagagcctcatttctagatgtcctctcttggagagtttgtcactttcttactttgataatttggctcttactatctgtgccccgaatcttaagtacttgtatcttgaaggtgaattcaaggatatatgtcttgaagataccccacttttg

SEQ ID NO: 63091 - DNA, 412 bp, Glycine max
cccacgcgtccgtgcagctcgagacatcagagagtcagataagggaagcagagttgaagggagcagagtttcaaactcagttagctcttgcaaaaaaatcaaatcaagaagcatgtgaagaactgaaagcaacaaaagcaaagaaggagatagttgagtctacactcaaacatactgaaactgaggttgaagaactgatttcaaaaattcgttctttggaggaagagattcataaggagcgagctttgtccactgagaattcaatcaaatgcggaaatttggaggttgagctttcaaaaatgaagcacaaagttcaagttcagcaagacactgagataaaacatacggaaagtgttaatctcgatttgaagttaaaacaggatctagcactggctgctagtagaattgctga

SEQ ID NO: 63092 - DNA, 349 bp, Glycine max
tcttcctaaaaaaaaaaaaaaaaaaaaaaaaaaaaaattataaaaaaaaaaaaaaaaaaaaaaaaaaagaaaaaaaaaaaaaaaaaaaaaaaaaaaaaaaacaaacaaaaaaaaaaaaaaaaaaaacaccaccctaactaaaaaactcctacattacaaaccactccatccaatcttaaaaccctattatctttcccccaaaataaaatccactaatccccttttatacaaccctcaaaatcaaaaaaaccctgcctttccccaacttaaaccctttgaaacaactccccttttcccaactttttcatatcacaaaaaacccccttccaaacacccttcccaacatttt

SEQ ID NO: 63093 - DNA, 445 bp, Glycine max
  unsure (1)..(445): unsure at all n locations
cccacgcgtccgttccaatatattccattctctctgtgtatttccctacctctcccttcgagatgcagatcttcgtcaagaccctcaccggcaagaccatcacccttgaggtggaaagctctgacaccatcgacaacgtcaaggccaagatccaggacaaggaaggaatccccccggaccagcaacgtctcattttcgccggaaagcaacttgaggacggccgtacccttgctgactacaacattcagaaggagagctctgacaccattgacaatgtgaaggccaagattcaggacaaggaaggcatcccaccggaccagcagaggctgatttttgctggcaagcagctcgaggatggaaggaccctcgctgactacaacatccagaaggaatcaacccttcaccttgtcctncgtctccgtggggggttttaagctcgttgtgt

SEQ ID NO: 63094 - DNA, 420 bp, Glycine max
cccacgcgtccgctcttcattctctctctctctctctctctaacactttccaccgcctgcgggactaaattagcttcttcttaagcttattattaaaataacacttccacaaactcacgctgcctccacggtccctccaggggtcaaaatcgatcgtcatcgagtttggaccaacgttcattcaatctgcaactctcggtagtactacagtgctatatagaagaaacgaaacgaaactctatggtgcttaatagtgttgtttgagtttttaggttgagaaagaaagaaagacacggcgacaaagacacggccagatgcctggagaagtggtggaagtggaggacatggtggaagtgggggacatggtggaagcggtggacacggtggaggctggggacatggtggaggctggggacatgg

SEQ ID NO: 63095 - DNA, 376 bp, Glycine max
gttccctacctctcctttcaagatgcagatcttcgtcaagaccctcaccggaaagaccatcacccttgaggtggaaagctctgacaccatcgacaacgtcaaggccaagatccaggacaaggaaggaattcccccggatcagcaacgtctcatcttcgccggaaagcagctcgaggacggccgtaccctcgccgactacaacatccagaaggagtcaaccccttcaccttgtccttcgtctccgtggtggcatgcagatcttcgtcaagactctcactggcaaaaccataaccctagaggtcgaaagctctgacaccattgacaacgtcaaggccaagatccaggacaaggagggaatccccccagaccagcaacg

SEQ ID NO: 63096 - DNA, 91 bp, Glycine max
aaagaaaaaaaaaaaaaaaaaaaaaaaaaataaaaaaaaaaaaaaaaaaaaaaaaaaggaagaaaaaaaaaaaaaaaaaaaaaaaaaaaaa

SEQ ID NO: 63097 - DNA, 218 bp, Glycine max
aattcccggtcgacgacgcgttcgccacgcgttcgaactcttaagaaaatattccaaactcttaagaaaggaaaagtggaattctaagtttcagaaatttcagtttccatttcaattttcggttttctcaaaacccattttcaattttttccaattaatcttattttccacgccaattaaacctaaagaaaacctcggcatttcccaattttccattt

SEQ ID NO: 63098 - DNA, 379 bp, Glycine max
aatttctcttcttatcttatcaataacgacaatactctttcgttttttcttctccgtgggctactgttaccactcaagtttctgctttatgatttttcttcttctttaacgatagcgctgttgcgttgtgaatttgtcatatcctgattccatcttaggccactaaactatccaataattttgttgctcctttcactttagtttggtttcttaaccaagttattgattaaggactcgactataatgcagaccctcgtgcgtaattggccggtggatattaataatatcatgttgttgttgcgataaaagatattcctcactctcagcgaaacccttgaagcgtgttgcaaatatttcaattaaattatcttctcaaaga

SEQ ID NO: 63099 - DNA, 307 bp, Glycine max
  unsure (1)..(307): unsure at all n locations
tctttcttccactctttctaaaaaaaaaaaaaaaattttataaaaaaaaaaaaaaaaaaaaaaaaaaaaagaaaaaataaaaaaaaaaaaaagaaaaaaaaaaaaaaagaaaaaaatttttaaaagtttcaatttttatttcaattactttcaaaattataaggttttntatttttttaacctcaattgtttttcatttcccgtttttttaaaaattcttttcttttaaaaccctttaattaaccaactttttctcttttttacaaatttcctttttttaaaatctcgtttatcccaaaatttcccc

SEQ ID NO: 63100 - DNA, 375 bp, Glycine max
cccacgcgtccgaaaaaaaaaaataaaaataataaataataactcctttaaatatacatgagaaacgtttcatctgcctatcgatgtctagaaaaccgtcgttcactccccaactttcgagaatggcatgtcaatgttccagcctcagcttacgatgtccacagtcatttttaatcacgccattgattagaaaaagactggtgttaacccacagtctccactaaaaactgatactgatcctcatagctgacctacaatagatcctgccctaactcatactccttaatggctatgctgcatgcaaaacccttatggcgaatcataccataacaatggaatctactgcgaaaagcctttacataacaaccatgttta

SEQ ID NO: 63101 - DNA, 257 bp, Glycine max
cggactcgcgacgcagcacatgacgtgagcgaaagactggcacgaccatgaacatgcggattcggacccgataacacgtctgtagggctcggcgtgtgacagctacaccctctcttaattacttacaccggatctactaactatgaattggctaaaaaaggaattgatgctccaactgtaacaggcgcgtctgaatacatgaactcttagacgcttgtaatctggcagctgaactactatatcgcacagagaagcac

SEQ ID NO: 63102 - DNA, 345 bp, Glycine max
tatgttattaatggtctggagtgtcagatagctggcagttcatctaaggtctcatatgtgctggataccgaagactttctgattccgataagaaggagaagaagatccttgcgtgtgaagagttcaagtgctcacgaacaggcacagtcttgaaacatttgttcaagcagagtacaacgattccgcagtttgttctccattacatgaaagtgtccattttgagctgggcatgtaacatgagtcaaatgtggacattggtagatgcgcctgacgaagacaccatcctatacagtaagatgaggatcaatgcatggcgatctgagatcattcatgcacattttcttt

SEQ ID NO: 63103 - DNA, 342 bp, Glycine max
gagctctgacaaggttttgggttaaatatgctgatgatgacatgttttctgcacttattgcattctttcttaccactgatgacgaatactcgacataatacatagataagaactgcaccatctcatgctagtcaagaatcatatccttgatgatccaaagactttccctgatacaaaccttactcacatcaaagacattatgcttcaattgccctattctacattctactcattcccctatatctctctgacacaaagactcaccaagattacctatacattcgaatgcattcttagaaacttgaaatgctggctattgcatttactaaagataacctccca

SEQ ID NO: 63104 - DNA, 404 bp, Glycine max
accgctcgtacgctcaaccacacagtttgcgcatcagtgggtacggctatcaatctgtggggatggctctgaatccaattatccgctcacgatcttattcaccatcctagtaaccgacctgacatagtctatcctcaacagttgcttgagacattgcgtgcatattgtagcaataagtgtgttaaatgctatggatcgcctacactgagtagctactgcagatgcactcatctaagtgcgtagaccgcactatggaacccactgacgtaaccagcatcatgatatgaagttcacaccgctatcgcccatgatatggacatcagcgctggctaatcactgggaatcctaatttatagccatctaacattccgtgctgtggctcttcatgctggctcattcaatat

SEQ ID NO: 63105 - DNA, 393 bp, Glycine max
ctcaaacatacgtattctttacctaatactttcaacattctttttaccctacctaatatattcatttatggtagtatttatcaacacggtctcctccccttacttaaataattcatcataactcctcctaacacacttccttttttccttccacacatcattcaaatttcttccctatcaactttccatcataatatatattcctaccatatttattacaaatcacctataattactcttccatttccaatattcaaccttaaaaacttttaccacatccaatcaaatcatcaaactctcaaattacccaatccttacacctatctactaattacaataaattacaataccatactcatataaacctattataaaaatcacaacaatttaaat

SEQ ID NO: 63106 - DNA, 391 bp, Glycine max
ctaggatcatggatcgtgagtactgcttttttttctctgtttcagatcatgcctactaaggcaaattgtacatagcggtctggaaactactccaaaaaagacaggcatacactggacatactcattagttatgattctcccaaatcctagactcctgaacgctaaaagcttatcaatgagatactcgagtacattcttttctcagcactaactgttactcaaactagtgccacagacgcttctgatcagaaccccataaatgaataagcccagacacatgtcaattcaccaaatcccgagtccttacctgcattacagagtattacaaatcaagaaattaatggaattataaaaaaacaccaaatcatccttgaaaaccatgcttgaattg

SEQ ID NO: 63107 - DNA, 452 bp, Glycine max
ggatcctaacatagttgacactgcaatgacttcaagaaaacgtaaaagagaagagtgtaggaagataatcttattagctgctgcttgtgttgttcatatgatcattggtgtagtgacatgatatcataataattattttgttaaggaaccaacccgtaattgggaactagaacgtcacaacttccttaatcgtctttatagaggaacaaataaagattgcattgaacaattgaggcttagtaaaaatgcattttttaacctttgtagaattttacaagaaaagggtggattagtaagaacaagaaatgttccaacaactgaagcagtagcaatgtttttacatatccttgctcacaacctaaagtatagggtagtgcaatttagttattgtagatctaaagaaaccataagtaggaaattcaatgatgtcttgagagcggtaatgaaagtga

SEQ ID NO: 63108 - DNA, 71 bp, Glycine max
cccacgcgtccgaaaaaaaaaaaaaaaaaaaataaaaaaaaaaaaaaaaaaaaaaaaaaagaagagaaaaa

SEQ ID NO: 63109 - DNA, 149 bp, Glycine max
cacacactgaataaaagatgttattcacttttttcccagttgaaagcaatcaccatccaagaataatttctatgactgcggatatttctcatatcaccttgcatacccatgcatccgacgcaacatctaatccatatactcatctaaat

SEQ ID NO: 63110 - DNA, 245 bp, Glycine max
ccactcgtccgcccactcgttcggcacatcgttgaaaaaattaaatatcagtctataaatggagaggatgggtcgggtcccaaagctggaggtgacaatgatgcatatgctgatgatgaggacattgaaaatgtttcttaaactagtgaagatgtctcacgcaatgaatatgctagtcataaatgcttactcgaagatcatgattaagatgaaaatatataacatgacaacttttatggtaaagc

SEQ ID NO: 63111 - DNA, 216 bp, Glycine max
  unsure (1)..(216): unsure at all n locations
cctcaaacttcaacaaccaaacctctgcacctatacaatttgaccctctcaacagtaacagttanataagcagtgtctccaaatatcctaaccatattattctttactaacaacctatctaaacaacgcgttttccttccttcacaactatacctatcatatccattacacctacacctacttatcagcgctactaatgtgccgatctatacttaa

SEQ ID NO: 63112 - DNA, 319 bp, Glycine max
tcggccacgcgttcggttgaaatggctcttgtcttaatcaccaccgcaaatttctcgaaggggattgtcttacgcactgtttgttggtctcacgctttcttctttttttttcaacggcaatttcaaccactcttctttttcttcggcggggttcggcggctttcccgggggcacgccggcttccccgggtccccacttccacctttcgaaaacgaattcagcaggcaccttaaaggtttggggcttttagaactctggtgcacaacaacaacaacaacgccttattccactaggtgggcttttaagacctttgtgcacc

SEQ ID NO: 63113 - DNA, 341 bp, Glycine max
tcggccacgcgttcggccacgcgttcgggacaacttggctattcttggtgaccgaagagaagcaaaaatttgcccccaaaagggttccaactttttggacattggcgcttttatttggaccggccgggcccatggggtggccctggtttacaattattaacacccttttaaatacaccgagcctacctattaacgctttattggtcggaacggttttattggccccggttatgccgtggaggcaatcctggcacttggtctaacccaagggtcaatctattttaaatcaatccggggaatctatgaagcctggggtaattataaattcctatcgctatgtc

SEQ ID NO: 63114 - DNA, 173 bp, Glycine max
acccgaaaaactaactaacataatatggggtgaaagaggtgagaatgtttatcatattggggcatattcaaagggaagtgaagatgttaacaacataaaataatgggatcaaaaagctgctgggacttaactcacccaacttcaaaagccaaaagcttaaacttatttttatt

SEQ ID NO: 63115 - DNA, 186 bp, Glycine max
cactaagttctgaaaaatgagttccaaagtttttcttattctacttatgttcatggcggctatacttttgatctggtgtgaggttgcacccgatgatgcataccataatattgacaaaacaaattggaagcgtattgcaaatggggtaaatgaaagcatatattggcgtgcgtgctatcgcgacta

SEQ ID NO: 63116 - DNA, 285 bp, Glycine max
gccacccgtacatactgaacctgacattgtcagtcgcattttataagcttgttctatggcaatggctccatttgcatgacagtctgttcattcaaactcaacttgggaagactttacaggacctcaatgcccttgactgtctgaaacatcatatagaatctatttatggtagctatacagatacacaccgctaacttgtatttccatggtgcaccaatcgtagatctacgcttagatactactctccctggttatactaaatacaccttgcacccactacaaccc

SEQ ID NO: 63117 - DNA, 201 bp, Glycine max
  unsure (1)..(201): unsure at all n locations
cccgacncttncaatttactaactagctttctatatcaacacgcgcagctctaaaaaaggggcaagaatgattagcgcgtggtaattataaccatagcttctctacttctgatctcttcttaaagtgcacccaatgaatactaaaattttaacaaaaaagatgcgaaccatgctccaaatgggctatatgatagcaaatgg

SEQ ID NO: 63118 - DNA, 285 bp, Glycine max
agaaaatactttctttttataaacccataattcaatggcgcgctttctgagcggggtaccttcaacaccgtatctgcatccatctccaccaccatcaccacctttctctctcttttacaaaacccatcaatacctaaaacttagaactatcgagtgatctacttaacaatcacatcctatatcttcattattgagactcaataacagcgaaatgattattcactcctaaactcattaagtataccactgccgccacaacatgcctcagaactacaactgcaatcg

SEQ ID NO: 63119 - DNA, 255 bp, Glycine max
aaaaaaatcagatcatgttactttggtcatttcacactctgctaagcaccagggcagaggaccatatatatggacacatactaaaaattggaccatcactcttgaatctcctcaaagacgatccaaccccatgattcctaaaagattgcaatcttctcactacaagattcctaacaaaactgtttcctaacacaatattacaaattaaggtcgatacatatccaaatatacaaatcattccgctctattcataaa

SEQ ID NO: 63120 - DNA, 112 bp, Glycine max
ccccaccccttcccccaccccttccggggacttaaggcccaggttattaattgggcttggtccaccttttccaaggttatttcttcccccgcttccaagaaaatcccccaaa

SEQ ID NO: 63121 - DNA, 317 bp, Glycine max
gcacaaaccggcacgacacatacggcaactaacctgcacgcgccgttctttctcgctaggagcccggccccaaaatccctgctattaccctaccattgacccattcaacttcgatctcatcatcgtcagcaccgccctatctgaatccgtcatcgccgctggcgactcctgcgaatgcaaaaccatcctccacctcgaccccaactccttatacggcagccactgctcttctctctccctccacgaactcacttgctacctgtgtatcccgcactccctccccttcgccgccaacacaaccactgactgcgacgacg

SEQ ID NO: 63122 - DNA, 345 bp, Glycine max
gcacaaacctgcacgacacatacggttactaacctgcacgcaccgtccacttcactaggacccagccccaatatcccttctcttaccctcccattgacccagtcaacttcgatctcatcatcgtccacaccgccctatcagaatccatcatcaccgttgacagctccaacgataacaaaaccatactacaacttgacccacactacttatactgcagccacttcaattctctatatctccacgacatcacttactacctttcttacccgcactacctacccttcgacgacgccacaaccactgactactacgaccgtcttatcatcgacttacatcaacaacccc

SEQ ID NO: 63123 - DNA, 203 bp, Glycine max
accgattccgaattcccgcccgcgccacgcgtccggtttgcttcaatggaagtgatttccgcttcgagcttgaatcccaacactccggagtgggtgcctctcgcctatcctacggttcaggatttctccgaccaatggtgggacctcgttcactccttcccctggatacgcgactactggcttcgcgagagctttcaagatcc

SEQ ID NO: 63124 - DNA, 124 bp, Glycine max
cggacgcgtgggcttttatgctttctttcttcttctgtttatcccaatcccgtttcggtggtcgctcaacacacagtgtgcgttgtctcagctggcttgccttttcacttttcttcatcttttt

SEQ ID NO: 63125 - DNA, 224 bp, Glycine max
cgtgaagtgtctcatctctaggctcaacctcttcatcaccaccaactgcatcgacaaggcgtaacaacgagggaggcattcatacgacgttgggactttggtgggctcaagtattgtaggttcgatgatgttgaaactggcaaatggtgaatagggagatgatcactcccaagatgatcatgacccacaggatcatttgaactatgactaagatcatatgctat

SEQ ID NO: 63126 - DNA, 172 bp, Glycine max
tggctaacattggaaaatggggatcgaataaacaaccggggtcgggcgttctacatgctccacccttacgtacacatccatcccaacgactttctctcctattacgccacctaaattcaattgactagaccaccgttatacaaccaatgatacacaagaaaatcacaccaat

SEQ ID NO: 63127 - DNA, 230 bp, Glycine max
  unsure (1)..(230): unsure at all n locations
cgaatcccgctcgagccacgcgtccgcccaacgtccnnccacgcttccgtattcattgtccactttccattaatttgaccagagctatgtatggtgctgccacaattttccatctagtcgaacaaagcctcaacctttattcgaaagagccacgatctgacttgaatcgagctaacatgtatggacttgcgataatctcctacttcataccggcagctcccgtctattac

SEQ ID NO: 63128 - DNA, 104 bp, Glycine max
agatacccatccaaagaaccccaagctaccaagtgatctcctccttacttaaacaaacgtgcgatcaaagtcccattgaacaaagaaatggatcgaactccatg

SEQ ID NO: 63129 - DNA, 376 bp, Glycine max
cttgcggctagggttttagcgcagcttcttctagatttaaggaagatgggtaaggagaaggttcacatcagtattgtggtcattggccatgtcgactctgggaaatccactaccactggtcacctgatttacaagcttggaggcattgacaagcgtgttattgagaggtttgagaaggaagctgctgagatgaacaagaggtctttcaagtatgcctgggtgctggacaaacttaaggctgagcgtgaaagaggaatcaccattgatattgctttgtggaagtttgaaacaacaaagtattattgcacagttattgatgcgcctggacatagggatttcattaagaatatgattactgggacatcccaagctgact

SEQ ID NO: 63130 - DNA, 115 bp, Glycine max
  unsure (1)..(115): unsure at all n locations
ccacgcgtncggaatttattcacaaaaaccttctctgttctcaattgggtgggcatggtgtgatttgatttcattgccatggcttccaaaagatcccaagcnagtagctgatgct

SEQ ID NO: 63131 - DNA, 394 bp, Glycine max
ccggaatgcccgggcgggccccgccgtccgaaacaaccaccctaaataattcctggggctttttcattaccaaaaaaaccgtgttcgcgattgaatttgaaaaatccacttattcctccacacaaattttcccaaaccttggggggaaacttgggttcaatcctctgctttgttgcccacattcaaaactcttaaacacttaattaagggttactctttagggtcttggttctggcagcaggtgatctacaactgggaattggtgacaaggatcactttctcctacaagatttaactagattccttggactttcattttcataagaaattacattcatctattgatgggcttagctgggatgcctcacaactgtggggtactattcagcaacca

SEQ ID NO: 63132 - DNA, 342 bp, Glycine max
  unsure (1)..(342): unsure at all n locations
acgaattccnaattcgagccgcgcgcccggctatccaaacacacacttacaaataactactagttctataagactgaccaaaaaagctgtctccgggtataatttggaaaaagcagcccatgctacaacacgacaatgcacaaccttagctgaacatcatatagacaatcctctcatctgttattccattggacaactctataaactataactgcatgatatccttattgtggaattgctatttctgcagcatacctacatatgaaaaatgttgacacagagtccattgccctacaggactcaaatgaatctcaagtacactcatcttcataaagaagtgca

SEQ ID NO: 63133 - DNA, 242 bp, Glycine max
  unsure (1)..(242): unsure at all n locations
ntccgccaaacttacggccttagacatcacctcaacctacgaattcaccactcccggcagcggttttaaagatggattgaagctagccctcacaccttataaggaaacttgctaaggcttatataagagggccggcctcgctataaataaaactttattgaaagggtacatataacaaaaattgggatcaaactgggctcaaggcatataacgcgagtggtactttcctattaatcaccttt

SEQ ID NO: 63134 - DNA, 51 bp, Glycine max
tcgcccacgcgtccggcaattcgtaattgctatctgtcttctatcatcact

SEQ ID NO: 63135 - DNA, 377 bp, Glycine max
gtgggctgtattcggtctctcctaatgggatgcacactgtaattgtcttgattgctatctgtgtagcttcaatacacataggactgaacttcatatataacacattgatatttgctgtgcaacataaaaaatgatagcactgcgaacgatctatactttaacatgggctggctataatgaatactgtgacatttcaactcaactgtggagctcaaattacactaacgagctcaattggtacaaatgagccaatgtgaaccaatttagctactggacagttcattttgatcagattgacctaatcaacgatggtcacatacattcatacactaatgacactgcacagcaatatcactatcactgggatccaccattat

SEQ ID NO: 63136 - DNA, 92 bp, Glycine max
tccatcgccgtccgtggatcacttcccaagtggctcactcttttttagtttcttggctgaagctgggtccgtctgttgaaggacgtgggttt

SEQ ID NO: 63137 - DNA, 202 bp, Glycine max
attataattaaattttattataatacatgaagtaagtaaatttttataatttaaaattagcttatgtaaaaattaaaatcaactatttaaagaattcattaatatcattaaacttctataaaaaactgatgcataaaataattttatgtttatggaataacaatatttcatctaaaaaaaaaatagtgaatcaacctattta

SEQ ID NO: 63138 - DNA, 70 bp, Glycine max
aacaaatccacttgtcaagcaggcctatcgttgtttagccagcatccctgctgctcctgcgcaggctatg

SEQ ID NO: 63139 - DNA, 239 bp, Glycine max
gaagtttgaaaggtccttgccaggatccaggagttttttggccaaattcccaatggtttggggggaaggctttgaaggccgtggttccaatgggatttgggggaagctttttaggtccactgttgtgcacacactgcatcttaaacagaccccgaacctgttgaatctgcaaggggtcgagagctgcgcttttttgcatatgtagatcctatagacgtgtctagaaatctcacgagatt

SEQ ID NO: 63140 - DNA, 365 bp, Glycine max
atttgcttaattattaaataaaaagattttgaagtttttattctgatctttcctagtgaaaataggtcatcctcagactcaaacttcttgatttcacatgaaattcggttttaacttttcctttgtctttaatagtagtatacttattttatatacgctgtggattttcattaaattacaaaatttcagtttatgaactagtaggagaccggacctgagaagatgtaccatagttaagcaaaagaccactaatcgactaagaaaaaatctaacggactaaactctataggttcactttagtgtttgattgttatttttctttcaatttattcgttcaatttggggtatataggttaaaaaggtga

SEQ ID NO: 63141 - DNA, 99 bp, Glycine max
aaaaaaaaaaaaaaaaaaaaaaaaatataattaaaaaaaaacaaaaatataataaaaagaaaggaaaaaaaaaaactacaattaaacataatataaaaa

SEQ ID NO: 63142 - DNA, 267 bp, Glycine max
gtccgccacgcctccgccacgcgtccgaagaatttgaatgaggcggccctggagggtcaccagggtgggaaatatgttaatggcatgcttttgatgtccggtgaaaataaatttggagaaagaaagcaaggttttgatctctttggttccttgaaagcgttgaccacttctcttattagatgcataaaaagggttaaatctttagcccaaaatatctgggtcaataataaccctgcatttaaagatcacaagtcataatctttatgt

SEQ ID NO: 63143 - DNA, 398 bp, Glycine max
cggcccagagcgacccgtccgctcatctattctggtcgctccctatctctctctcttcacgagataattgactcgtgatgtggcggtgatgatgacactatcagggtgaagaagttccatattctgacgtctattacaaagcttagagctcaaaaagcgcgttctggatacctcgctggtcactgatttttgggttatcataggaactcaatctcatactccattagataacaagtatcttatgaccgctactgaagacgaattacggacgcataacgcaatacatgattgatttccatgtacttgttcaaggactgcaaaatggcggtcctctgccttgcacaatgtcactgacatggtagctgctggtgccattagattcccatatgccatgtctg

SEQ ID NO: 63144 - DNA, 323 bp, Glycine max
gtttaacactaagttgcaaggcagcggacttcgttccagggcttgatatcggcctcactgttgcggcggtgttggatttatcaaggctcggtacacaccaccagccctagaacatgcgctgatgtgtcttacctgtcctacactatatatcactcgtaagcatatgctgatcaagaacttgacatggttgtgaacgttaggcatgacctaatgacgaaatctagagagattgcattccattgtgctcatgctgccactgtcatgtacgcttaattcatgcatagtgatcggaatctgtggtgaatatggtgacagtttgggca

SEQ ID NO: 63145 - DNA, 319 bp, Glycine max
ggaaacaaaatcctaggattctttgttccttggggatttcctaatttcccaggtttctaaattaccttttgtttcaaattgacctgaaattcaaaccacaatttttcaatgagcgacaagttgttcacacaatcatttttaaacaatttattttgaagccaaaaggctttcattaagggatttgaaaaaagcaaaaagtggttctttatgaggaaagaccttttttacaaccaggtgggttgacaaacttttggttccttttaaaagcttttgaaattttttactgggggaatatttgcacccttgttattttttgaaa

SEQ ID NO: 63146 - DNA, 238 bp, Glycine max
atgccttcaattttcttctggagatatttataaggatttgattcttctgcctgttttgttgtgttggcttctctagatatatgatttattggcagataagaagcatggaacacatgatcgagcatgaaactttacctctaaataaagaaaagcaattgatacgcgagatcaaacaattgaagcagaatcgtgaggagttgtcttctaatatgaaaaggccagatccatcacaacaatc

SEQ ID NO: 63147 - DNA, 352 bp, Glycine max
tctcccactcgtcctatccaaaaacaaggggattaattatccatccaatatgactcattctgggtatgtgatcttctaaattgttaacctattatcttgatatgtatcattcatacccatgattattcataattcactaactctattcataaaatagcacctaatacactatactaatcaactgactcataatctagaatagttaactcataaattgaatttcctatatccaacacaatctacttctatattcatttatgatcctctttaatgaccactctaaacattactctatctaatggaccattatgcagaacttactaataccgtaaatgaattacctactgattct

SEQ ID NO: 63148 - DNA, 153 bp, Glycine max
ggaaacaaaatcctatgattcttttttcctttgggaattcctaatatcccatgtttccaaattcccttttttttcaaattgcccttaaatttataaccccatttttcaattatccaccaatttttttccacaatttttttttaccattttttt

SEQ ID NO: 63149 - DNA, 259 bp, Glycine max
ccactcgtccatctatatcgcttatcaccgccctttttttttttcaaggaaggttttcaattttaggttgcgagacttaacttttttttttatttttatacaaacaaaatcctataattattttttacctccgtaaaccctaattttccacgcttctcaaatacattttatctctaatttccatcaaatttctcccccctttactcaatttcccattttttttttccccattcattttttaaaaatttttttttaaatc

SEQ ID NO: 63150 - DNA, 91 bp, Glycine max
ctcactctcgagctcgcaactcacgttaactccgttcgaaccgtggcttcctcaagggcggattacctctctcgaggagaaccttcttcta

SEQ ID NO: 63151 - DNA, 330 bp, Glycine max
  unsure (1)..(330): unsure at all n locations
ctactgctctctctctccctctccctctccctccaaattttccttcattctcacgcgnccgggtggtttccgccggcggctactccctatccaccgcgcatccatcccgtttccttttcttgcttttcttaacaaaccaaaaaaaattaaaaattcttccgaaaacggggaataatcgtaatggtcaactgagtaaggtttggctgtccttcctagggtttaatggtgtccaataccaggaggagggggaagagaaccaaaccaaaaaaaaaaaggattaaagggcaaaaattagggaattttttttgggaaaaaaaagagaaatttaag

SEQ ID NO: 63152 - DNA, 283 bp, Glycine max
aacactccttctagcacggaacatttaactctacctactgcacactatcctaacacattagaagggttatatagccattacagctggtgattgatcaaataatcatagacagagccttctaggacgaatgtatggagaccattgcaatagtaccttaactattaccatctcttgataaactccatgaccatgtatgatgtaactctatgtatccacataaacatgctatgaatgtaacatactattacctaattcaatatctcacatcttgaacgttataaca

SEQ ID NO: 63153 - DNA, 245 bp, Glycine max
cccctactgctctctctattcctctacctctatctccaaattctccctaattctcacgctccggggtaggttccgacggccgctactccctatccaccgatcatccatactactaccctcatctcccttttctcacaatacagacaagatcaaatatttatcctaaacactcactattatcgttctcaatcactgcatcatgcagcgctgttcatactaagattctattgcgaccaatcacaata

SEQ ID NO: 63154 - DNA, 236 bp, Glycine max
atgtgtcttgatagaagggtacataggaatgtacgtactggttacactcataactcactagggcggatatgtagtgattgcagtctggtgattgatcaaatgctcatgacgatgtctgtaggacacatgattggagatcattgcgctagtaccatagataggacgagctcttgagcactacgatgatcttgtaggatgttctgctacgtctcctcattaaacatgatcttatgttt

SEQ ID NO: 63155 - DNA, 287 bp, Glycine max
  unsure (1)..(287): unsure at all n locations
caagaacacaacatnagttactttttctcttcagctctttcttcgcttttctacacttctgctttgggctgaatttgtagataatgctgtgcaaatgtgtggataaacattcttttggtgaatgcaactgtctcggcacaggtgtaaaaaaaaaaaacaaacaaaaaaaaaaataataaaaaaagatacacaaaaaaaaaaaaattactgaaaggacgcataaccatataacaaggtaccaaatcaaagaaacgataccataaacaaaaaagatggcggcaatttta

SEQ ID NO: 63156 - DNA, 378 bp, Glycine max
ggggaattcatgcgatcaatgatgggatactactaccctttaggtatctgcgctttgaacgggggaggatgcgctgagtatcaagtttgctaggatggaattgaccgcgcggcacgatgctttagttggctgtcacaattgttaatggattgtattatgaatctttgatatgctatacatgattgacctgatcgaacatttacgtgcttatgattggatcgacaagctaggaacgcacctgataggtgtaagaatcaaggatcctgcattgggatctacatctacagatgatgagttcaggcataagagcatcatgtggagataccatcgtggacaatgttctgggatcacaaagtgatcatatgatgggtatgaata

SEQ ID NO: 63157 - DNA, 331 bp, Glycine max
gtattgtctgtgaactattaatgagttatgttttgttgatcggactcgtcttccctctcttgatcaagaaactactcattatcttggtcataggcttattcatgcttgcaataccatgctcaactattatcctatacctacgaatccttagttggggcatacaacgctcactgcagtactcatgacttatgtcatcatcaccaaccacctgatcatcatgcttcgcaacgacggtggatgcgatgaggaagatgttaacaaggcatgcaaacgttcacaggattagcgttctccttgcgtgaaggatatcatggattaggcacacacacat

SEQ ID NO: 63158 - DNA, 233 bp, Glycine max
acccacgcgtcctcccacacttgctcccactctttcaacttaatactttaaaataatttatatacaatacgataactgtaacttttaaacccccttatccaaacaacctaaatacacaacactcaccgcccattttcacatatcttaacacactattactttacaatgtacaatacctacatttacaaatcatttacctacataaatcatcgttaatatcaacccaactatat

SEQ ID NO: 63159 - DNA, 439 bp, Glycine max
ggaaaagttacggtctaagaaagggctgcgttaataactatttaagagtctcttaactagagaaaggcaaactcatatatgagtaaattcatttcatttgacagaacaatcaaactcaccctgatcctatcataccttattacaatcctcactgaagacacatggacacatatatcgcctttcacggtttccagacaatcaatcatagccattagcaaccatcccatcataaaagataaaacattattttctgaagatgaaaaagacatatgtacgtattaataattatatgtaataattaattattgtgtatcacaagtttataaactgatatttcattatcttaaaagaaatatcaatcatcatatacgtgactttgtgcggataagtatgagaaactgatcgaaacgtgtcacatgatgatagatggattaacaca

SEQ ID NO: 63160 - DNA, 434 bp, Glycine max
cccacgcgtccggaagtccaaaagaatattgaggggcttgaagactctcttcttcttgatgactatggttatatcgcttcttcttttctccgccccggttctccttgttattgccgatgcacttgttccttctgctctgctctcctcgctttctcaatcttctttctccatggaaactctcgcttcccatttccacaactacgattttcgatactctctcattgatattccccttgtgtcaataatacgatccttcatcatcttctgtaagtacatatactcaaattcacagtagtaaattgaaatcagtagcggaacatgtaattatatgaaaagttcgtcaccaaaatttggtgattctagaattagtgaaggaaattaagtttccgtcgctaaatttggtcgcctaattcattatttttctagtattaagt

SEQ ID NO: 63161 - DNA, 297 bp, Glycine max
atttgtgatgacctgcttaagatatacaagaacaataataatcataatttatgtttgaaagaaaaaaaaaaaaaaaaaaaaaaaaaaaaaaaaaaaaaaaaaaaaaaaaaaaaaaaaaaaaaaaaaaaaaaaaaaaaaaaaaaaaaaaaaaaaaaaaaaaaaaaaaaaaaaaaaaaaaattgaagaactaaatttcaaaatgcaattgtatattaatcaaactgaacaacaaaaaattaatacatactcaaataaatcaacattttaatgaacaatctttttagctaaaatgtatat

SEQ ID NO: 63162 - DNA, 78 bp, Glycine max
aaaaaaaaggaaaaacaaaaaaaaggtattaaaatttaaaaaaaaaaaaaaaaacccaggcgtcctgccacgcttccg

SEQ ID NO: 63163 - DNA, 197 bp, Glycine max
accctttcttaggttataggagggaactcatgaatccagaaaaatttgtcccaaatttgggggaatgtttttgggtgattttctattgtaggaaaatgaatacataacacaagttcaattgagtcacaaaatgtggttttactctagcccattatgaatgttaattacaaaaaaagaagaaaaaaatcttttatttt

SEQ ID NO: 63164 - DNA, 416 bp, Glycine max
ctcgctcatactctcaatctgagactagaccgctccaacacgcgagttgcaagtcgtcaggcgggtcgtaccgaggaatcggccgggaaatcgcgcttcacctcgactcactcagcgcgcgactagcagtgaactacaccttcaactcggcccaagccgactcactcgaggcgcatatcaacgccgcattcggcaccactacaccgatcgcacgacgggaccatgccgacgtgtgacgatccggctcatgagaagatgctcttctactcagtctaacgaccactggactgaccgatccacatactcgtcaactcagcaggcgttatcgacagaacgtatccctgcgtcagctacaccactcgtagagtcctttgaacgaactgtcgctgagaacgctcgtggcgccttcaactgcg

SEQ ID NO: 63165 - DNA, 443 bp, Glycine max
cccacgcgtccgcccacgcgtccgcccactcgtccgatggcccgttagttagggtaagtggatattttgtcctacacatgacggcatgagaatggaactacatctaacactatgttgtttcagtcctagttgactactctgtctgtatgaatgagatgatatagtagaaaaaaaaaaaaaaaaaaaaaaataataataaaaaaaaaaaaaaaaaaaaaaaaaaataattacaaaaaataaaaaaaaaaaaaaataccaacataaatactatataaaaaaaaaaatccttcagttttaaaaaggggaccaaagggtttcgttttctgtgtttaatgcctagggggttattttttgaacctttttgaggtgtcccccatctaaatccaaaatttttgaaaaaaaattggcaaaaatgccccaaatggggtattttatataaaaag

SEQ ID NO: 63166 - DNA, 353 bp, Glycine max
aaaaaaaaaaaaaaaaaaaaataaaaaaaaatataataaaaaaaaaaaaaaaaaaaaaaaaatgaaaggataaaaaaaaaaaaatacaaaaataaaaatactaaaactatataaaaatatactataccaatcctttaaccacacaaaaacctcttttttttgctaaaaccaattttcaaaataccacccatcatcctaaattatgcagcatgtcttataatctgaaatttcctgttcattataatttctcatgcaaatttcaaaattctgaattttgacctttctcattatcttagccctttaaattttcctaacaattttccccttaaaaatcctaattattcgcattttaa

SEQ ID NO: 63167 - DNA, 218 bp, Glycine max
ctgacgcgtgggaaaaaaaaaagatttaatttaaaaaaaataaaaaaaaaacaaagtggaaggataataaaataaaaaaaaaaaccaaaaaaattactaaataaatacacataaaactaaactaatccttacctttctataccttttacatttactccccctttattcatcacacttactcttctttatacctccctctttgtaattccatttccctt

SEQ ID NO: 63168 - DNA, 301 bp, Glycine max
tccacgcgtccgaccacgcgtccgaaaaaaaaacaactacaaaaaaaaaaaaaaacggggtaccggacaatctagacgatcgaatcttaggctcacatgctttcgacgtcataactactcaatctgattcctaaattcatttacctggccgtcattctacaagattaactctgcattaaacccttgcgtgacccaacagcatcgaattactgaaattgccatttacttcagctagcgttaaaacgaatacgccttaaccgatattccttgccaacagttacgcagtctcaattgcgaatga

SEQ ID NO: 63169 - DNA, 433 bp, Glycine max
cccacgcgtccgcaaatttcctttgttgtgttcctcacacacatgagtgtaggaacaacagcgtttgggcattgttatgatggagaaccagaatctttctttgccaccccacgtggacgcatctcgaccgtcccttgggttccctttgggcactgtccttctcttgatcatcatcttcaccttcagtggcgtcctctcttgctgctaccattgggatagggtccgttccttccgtcgttctttctctcattccgacccccaaatgccttcctcacccaccaattctaagcattccaaggaatcgaaggaaaacagggggcaaagcttgccagtgttgatgccaggggatgaggtgccaaagttcatagccatgccgtgtccgtgccagccttcaagaccagaaaacatcgttgtcaccgtcgaaatggagaag

SEQ ID NO: 63170 - DNA, 167 bp, Glycine max
ggaatttgtgttttctttcgcttgtttgtttgtttaattcaataaaggaaattaggcgtgactcttgttgagtatgctctgcctatttgaaaatttccacacctcttttaattgtcgtaatgatgtgtgaagtgtgtgttattttaaaaaaaaaaaaaacaaataaa

SEQ ID NO: 63171 - DNA, 67 bp, Glycine max
cccacgcgtccgcccacgcgtccgaaaaaaataaaaaaaaaaaaaaaaaaaaaaaaaaaagggggag

SEQ ID NO: 63172 - DNA, 285 bp, Glycine max
acgtacgcgtacgcattcgcaattgtggacgcccatggtgcaagtcactaccatacaagggggaatggttatcgcatacttggcgaaatctcagctgctctgactcatcgtggaatacaatcatcaccttgcactgaaagtatacactgcatctaacatatatctgtatactcttgcatatttatcgaacgatcactggcatcaaatatcatatgccaaacgtgtataacatgatcacagctgattcaaacgccacactgacacattgtcttcaaagaaagatga

SEQ ID NO: 63173 - DNA, 155 bp, Glycine max
cccactcgtcctcccactcgtcctaaaaaaaaaaaaaaaaaaaaaaaaaaaaaaaaaaacggacaatatcaaaaactaataactcacatacacatacatacaaaatattaaaataattatataaagtaacctatattaaattaactctaccaaca

SEQ ID NO: 63174 - DNA, 433 bp, Glycine max
  unsure (1)..(433): unsure at all n locations
ggatagtctaatactggtctgnngtggatgttgcagtcaatcaaagggttgggtgctgggactagagatctgagtcttgagggaatcggaagtctccgtaatagtaggatgctcaagaatgcaacattttgcatgccattganggaaggtattgtacactggggtgtggcaactgcacttggttcatnctctccacttcatgtccgcagcatatcaaggacaatgcttgagtgatgcgagatgaagaggcttaggagtctgacanttgtgcaataaggcatctgtatagctcctggcagcattgattgctcaannaatgctgagaatagaagggttgaagttgttggtggaagaaaaatataagaagtggtgaaatgggaagggtcggttacaaattgccatggcaagacaaggtattgagaaatttaagtgg

SEQ ID NO: 63175 - DNA, 325 bp, Glycine max
tcttcctcatacacatctatcgagaacaagactgcattttatctcaccatcccatatactgggactagatatatcatcagaggagaacatcttcaattcaccaagaattatcccaaaatcaatcttcttttcctcatcccatatatatccaagcatcagactaattttaaaagaactaaaattataaaacattcaaatcatcaaaacccgtcattattccataaacttatcaactcttaacattcaacttcacaatttaaaacaactttcattctcaacgtacatacaatcttttaacctgtaaactcaaattcgttgactccta

SEQ ID NO: 63176 - DNA, 370 bp, Glycine max
gaaacacatgtatggtgaacaggaatccagctgatctcaccataccagaaacagggaatggctatatgatcagaggagaagatctgaaattcgagaagagttttcccaaaaacaagcctcgtttccccattccatatggatccaagcagcagaagaatttgaagggaactaaaatgaaagaacattcaaaacattgaaacccggcattattccataaactggtgaagtcttcacatggaacttgagaatggaaggtgactttcattctcagcgtagaaacaaacttttgacttggaaactgaaatttgttgactcggggaagggttgatcggatgtcatttcgaaaaccgagtgatacataaatcagtca

SEQ ID NO: 63177 - DNA, 400 bp, Glycine max
tcctgcttcttaacatccttactgtccgtcatacaattgtactcacatagtgtcggttaaatgctgagccctaccactgtcaatatacttctcactctccaaacgcctcaactgctgcttacgtacatttaaactcagtatactactactatcaccagactaactaacacacaattcttccattccaactcactattccagcatccacttctatgtattgatccccacctggtaattctaagtgcatctaagtattataccaattctaatcctcaagttaggactatctacagacacatccacatgtactaacgctatcgtaggaatataagaccacatcacttgaatatctcagttgctggagacaacagatctcttagaagaagcctatcatcatgtg

SEQ ID NO: 63178 - DNA, 182 bp, Glycine max
attccctgctctacccactcttcctaaaaaaaataaaataaaaaaaaaaataaaattaaaaaaatatatataaataaaaaagaaaaagaatataaataaaaataaaaaaaaataacactaactattaatcacaatattaaataaaacatctttcaaaaatttaatacaaaaaataatctcaa

SEQ ID NO: 63179 - DNA, 181 bp, Glycine max
actctcaaatcaaacgtattcagcaatcagctcttatactcctgatttccttatccagggtaagtttctcagcaccctttgccaaaacatctaaccaaatcacacaaatcaaacttacaactcatactcaatcgaatcaactactctcatcaatatgcaaatatacaaattcatacagtct

SEQ ID NO: 63180 - DNA, 198 bp, Glycine max
tgtataatcatcaccactttatctatacataagacctgcctctaataacctggtacccaacggcctgactcttcaattctttttaagccaaatttttaattcctaaactggtgtttaaaaccgtataaaaaaaaatctaaaagacccttacgcatatatacaaaacaaaagataactgcatctgcatgggaagtgtat

SEQ ID NO: 63181 - DNA, 149 bp, Glycine max
taaaaaaaaaaaaaaaaaaaaaaaaaaaaattttacaaaaaaaaaaaaaacaaactaaggaacgcatacatacaaaaataaataactataatataaaatcacctaaatataaattcactatccatcattttacaacattaataactgat

SEQ ID NO: 63182 - DNA, 121 bp, Glycine max
gctagacgtaatctttgactgaatttggcaaagcccattcactaatcatcaccaatacctaggtgctcccaaaccacatcatcgatcatcagcgcgccagtatcacgaacctcaactaatc

SEQ ID NO: 63183 - DNA, 269 bp, Glycine max
tcgatggatattaagtgcttctgggctgctaccttaaagatgatcgacgatatactgggcagagatgcccttataacggttctatgagatatcctgaaactggctgacagatcttacgtccattgactcaggatccactgaaaggattttcccaacgtgacgatgacgctctgtcccagaatcttatctgagctaaaaaatttgttatatgacaaagcagttcttcagcatacattctagcgatcagatctggtgaacactttcattat

SEQ ID NO: 63184 - DNA, 282 bp, Glycine max
atttcattctggtatgcgtttggatggcgtacgaggtaatgccggatttcgacctgctcggggaggcaattttggtgttttaaggaatccacgcacacagacacctctgcagtatgctggagggattctttctggtccaatgcaatccatggttaatcagggaggaatgcaaagaaatagccctgatggagaaaggtggcatcgtgctactagcttccagcataggggtttaatttcatctacttctacttctcaaactcctttacagatgatgcacaaagc

SEQ ID NO: 63185 - DNA, 329 bp, Glycine max
gtttcgctagctcacacactaagttctgtataatgatttccaaaggttttcttatgctacgtatatccatggccactatacttatgatctcctctaatgctgcacccgatcacgcataccacaattttgacaaaacatattgcaagcgtattgcacttggtgccgatgaaagcatatattgtccttgcgcctatgtcaactatagcggttagcccattgagggatatcaatggccactaaccatcaagaagcttactcttgctgaatgttcacgttatctgaagcacctcgtatattcaatagacacagaatactatgtgtacaactat

SEQ ID NO: 63186 - DNA, 211 bp, Glycine max
ctccacagaccattccatccatttacatgccctcttttcagattcaacctgcagctcacataagctctcctcatcacaaaagacatctacccctcggcgcctcactcttctctaatcaatccctatatcatactttgcatggacagactatgcaagctctacctgatcttcaatgcacactgaaaccacttatgacaacactgataatcta

SEQ ID NO: 63187 - DNA, 183 bp, Glycine max
tcggttatgctagttcacacactaagttctgaaaaatgagttccaaagtttttcttattctacgtatgttcatggtcactatacttttgatcttctatgaggttgcaccccatgatgcataccataattgtgacaaatcagacgggaatcctagtgctaatggttttaacgaaaccaaatatt

SEQ ID NO: 63188 - DNA, 251 bp, Glycine max
taacgacctagtgctctctctatgcgactttatatattccgtattgcacacactgaaacaagttctggtccttaatctaagtagatatcattatgctaaatcactattaaaccatatccatcatcgtcagctttcattaaacacatatctcaaattgattatacatacacattttcttgttgcatacttatccactcaccattaatatgtgcattatacaatatacaattccttaactgtcaataaaatga

SEQ ID NO: 63189 - DNA, 291 bp, Glycine max
gcactcgtacgcccacgcgtacgtccacgcttcctacagatttctcctcaagatgaacatagttctgaatcgccaatactgtaagtatctccatcttcaattaacaaaaattctacaacacaccaaaaaactacctcacattcttctatgctgaccatcataacataatccctaactcgtcaaccctctaaacctctgatcacctcatataagagatatatcgatcaaaccttcacactataaatcacaatattcaatgaccacacctgaaaagtctccaattcaatctgt

SEQ ID NO: 63190 - DNA, 428 bp, Glycine max
tcttcctcacaatcgaacgacaactcttactttaaatttctcctccagattaacatcattcggatggttaaaattccatactatctccatcttcacttatcaaatcttctacaatacaccaataaattatcttacattcttctatactgacactcataacataatccttaactcttcaacactctaatcctctattctcctctataatagatacatatatcaaaacttcacactatatatcacaatactcaaatttcacaccttacaaatatccaattcaatatgtatctcatgaaacatcgagttataccatctagaaatgtctaattcctcatgagaaccctataaaacaaacaatagataacttgtccaatgaaaataacacgaatcctattaagaaacatataacccatagacctatcatttac

SEQ ID NO: 63191 - DNA, 357 bp, Glycine max
atttccgaatcgaccgcacgcatccacgcacgcgtcgtttcagattaaacgcgaaatggtcaatggaaaaatgagaactgatctaggggtcaggggataaataatggactgaatatagaaaacttgcatcaaatgaaatctgagcaaagaattgcaccaatgcaatattatcactggacgcaataactagctgaatatttatagatgtaccaggacaagatgctcgtacatgcttcttctatacaccatcatgggtaccttagatcctactgaagagaatattatggatagcatacacagacagtaactggtatgatgctggctacacatttgatggatttagtctgcatgatagca

SEQ ID NO: 63192 - DNA, 318 bp, Glycine max
gcggccacacctaccttcatatgaaactccatatcgacttttgcgacatgaccactaatcttggggtcagcagcacataacagagaggactacactaaaacgccatgaactatcatcatgtcatttatcttcatacccctactataaccctcgacacctatcctgctctaagactgaagccttacaatgacacccgtcatcttacatccctctttatagaccatatctgtcactatcatcaatctcatgataatatttattgacaacatgccatcaataacttctatcatcctagctacacttctcatggatttattc

SEQ ID NO: 63193 - DNA, 416 bp, Glycine max
ctaaactcttcatcaccataaccatgttttaactaacaacatcctctcacaccgtcctagtacgaaacctcaccaaccctttcactctctactccttcaaacccacattcatcaaatacgccacccaactccatactcaatccctgcccctcacccactcccaaaatctcctcttcaacttccacaaccttccctccaacctcacttaaaacttactcctacatgcccaatactagctctacaacttcaccttatcacccatcagcgtcatctaaattatccaccccttcaaggacaatctctccataatccataaagccaaatccgatctccacgctctgctccagatccgccctaaatactccgtcctctatctccacagcagaaccaccttccaaaacgccttcatcaccctc

SEQ ID NO: 63194 - DNA, 250 bp, Glycine max
  unsure (1)..(250): unsure at all n locations
nncgccacgcgttccgtagcagaggataaggttttgcagttgcttcgattttccttgttaagcggctttacaaggaatgagttatgaattatgatgcgaatggcaaaagcaattcatttctgatttcccgtatttagtaagaaagtgactggataagagaatgagtgctgagattggattcaacttatgctcctgaacctcacaaaatgtctggagcaactaccagtggccaaaagctctctatattttc

SEQ ID NO: 63195 - DNA, 419 bp, Glycine max
  unsure (1)..(419): unsure at all n locations
aatagacggacgcatccacgcgctactttcacgcttcctactagcctagggcccaatttctgaacatgaattcataggaggtgagatgggcggttaaagtggccatgatggtccgcatatctgctatactgctgcaagtatattgaggctatacctactgataaaggagaatgctatcaatgtacatctgaagcatgcatgatataaattatatgatagcgccatgttatcaagatatggtgtggctgtaaagaacatgccacctgatgcactgacaagacctgcaaaggtcatgaatgtgacattatgcacttttcgataggaagtgctattccaggacgactgtacngtggcaatcccatagacaatagagatgggaatggtggctataggcttggacacttggttgatctatatgc

SEQ ID NO: 63196 - DNA, 300 bp, Glycine max
cccacgcgttcgactagctagtgttctataagttcacgggcagttctgaaaagggggttgcacggttttgcttgttgtagttatcttcatagcggctatacttctgatctctactgaggctgcacccaatgaatacgaaaattctaacaatatacatgggaagcatgcttcaaatgggttatatgatagccaatggggttacagttgttggggtggaccttgcaatcgccgctatgctgggccttattatggtggcggcttgagtgggccatattacggcagtcgttggggcctgccctt

SEQ ID NO: 63197 - DNA, 374 bp, Glycine max
actaactaactcttacaaccagactcacttactgaaatgttacaaaaggggtacgagcttaaatgagtgcataaaccacacaatatcttatctttgctacacatttatagtaactattcatactctaaaggggtatgctgtaaatgtgcatatcgtgctatcatatcacacattgtctatagagcatcctatcaagaattacttctctactgcaggacatcagtccttacgctctgccctgacatgcacacgacataaaaatgacctctcgcactatacgataagacgcgctattacagaacgactgctcctattcctgctccatagacatatagatgaccaatagatgctattggcttgcacatctacggtga

SEQ ID NO: 63198 - DNA, 298 bp, Glycine max
caatttccagattcgacccacgcatcccacatacaaactcacttaccactaactagtctttcattatcccacatctaaaactgaaatgaggtcctgttatatttatcgtgttgagataccatacatctcgttatctatttttacacatttgctgaagtcactcacaatgaatacgaatattttaacaaaaaacatatcaagtattcttcacatgcgatatctaataacaaccctcattactatgactgctgtactcctggatatcaatcaatacaatgaacactactactctcccata

SEQ ID NO: 63199 - DNA, 292 bp, Glycine max
attgtaaattaaaaaatttgaaatacattttaattgtcaaaaaaaaaaaaaaaagaaaaagtaaaaattaaaaaaatataaaaaaaaaaaaaaaaaaataaaaaaaaaaaataaaaaaaaaaaaaaaaaaaaaaaaaaaaaaaaaaaaaaatgtgaccccctataaaatgaatcaatcataatttccccttatcattaaactctaaaattattaaatagtgacacttaaataaaattcactgaccgatttttaaaaaacatcaaactgaaaaacatttgattatacactata

SEQ ID NO: 63200 - DNA, 213 bp, Glycine max
ataacatgcagaattcatcaattttaaaatttaaaataaaaaaaaaaaaaaaaggccaaagaaaatatataaaaaatagaacaaaaaaacaaaataaaatataaaaaaaaaaccttaacattttaagggaatcattcttgattacattgctattccggacttcttctaattctttacattccctcaaactcaatatactttaattgggtttaa

SEQ ID NO: 63201 - DNA, 333 bp, Glycine max
ataacatgtagaaagcatgaaggataagatagttcatatctacatggcatgaggagtcctgggatggtaacattgtggaccatgttggcctcaaagccatggagtcaggaattgaagtgtttgggagtatactgctcaacccattgcttggcgggcaacaaagaacagattacgataagcgtttatatgggaagtattatggtggagaaaaggatcgagactggtattggatggcttttcttaaaggaggtgaagatagataccaccatgcatgcagccttgctggactcaaagacaaaaaccttgaagggataatctttaccaaaagccttg

SEQ ID NO: 63202 - DNA, 166 bp, Glycine max
aaataaaataacatacaaaaaaaatatatattaacatttaaaaaaaaaaaaaaaaaaaaaggaaaaaggtaaaaataaaaaggttggcccctctaaaagaatccatcttacataaacttacatacaactatataagctcacatataatgacacctaaattcacatt

SEQ ID NO: 63203 - DNA, 188 bp, Glycine max
accacacgttcgaaaaaaataatacgcattttgtattcacaaacccaaataattatacaaggtgcggataatcactactgctggatatgtacttaaacaactacattcatctaaagataagacacatactcaataactaaatacatatccaaatccctctgaacgatgtccaacccgttcgcattatg

SEQ ID NO: 63204 - DNA, 411 bp, Glycine max
  unsure (1)..(411): unsure at all n locations
gtgcctccaacattcttaaaaaccaaaaccaaatccataaatttgcaggtctncgncgncgtacagncaccaccttcgttcggattctccgcggacctactatccctactactctatttacacggaagaacaaaaaaactatcccacaaaaaaaattccaaagcggttcggttagggtttaagttttttttttttttataataatttcgggtatcaaattttcatcagtaatatttttttggaggcggcgaaatggcgcaaattcaggtgcagaatcaaagtccggggtcggttccttctccgaacggcgtggctaacgcgccgaacaacccgaaccagttcgttacgacgtcgttgtacgtcggcgatcttgagcagaatgtcaacgacgcacagctatacgatctgttc

SEQ ID NO: 63205 - DNA, 342 bp, Glycine max
acggggacatccatgcacttgtggatggcgagtatccaagaaccattcaacatatcgtggtgagtatactccacaaattcactagtgctgaagctaaaatcgggaagggtctaattgattacggtggaatcaaccagtatactacgatcattcatatatgatcctgatcaatcaaaacctaagatgccatgctatcaaatggactggaatgcaagattagcttgacagacaatgctgactttaaccattgctacagatatgatctatgcatgcccatgactatgctctctaatgcccatatggatgatgtgaacattgaatatgcagataatggactgccta

SEQ ID NO: 63206 - DNA, 231 bp, Glycine max
cctatgaacaacacaaaatataacatagatttaacaaactaattgtccatattgttgaaggtgattctgtgaaacagtaactggggttgcatctaggttgagacttgttatggagggtgatggtagtagatttaggattggaagttaatccatttagaggaacagcgcacgagctgagatcttgtcaaactgtgtacaccgagaccatgatgaacatgatgctatatggga

SEQ ID NO: 63207 - DNA, 256 bp, Glycine max
cccacgcgtccgtgaattttctgtgatgggtactgcttttttttttttttttcgtttaggtttcttttgttcttaccaccagcatgatgtggtttggcctaaattattagtagtacttgctactgttagtgttagttcctgccctcttcttgcactgcaagtgtttttgttgcgtcaagtgctggctggatctcgtgagatgtgtattgtttcctgtatggttttaattagccaagtaaaatttcatattactgtc

SEQ ID NO: 63208 - DNA, 166 bp, Glycine max
taccaattcccaattcgagccacgcgtcacacatacgcctatcaacatcacaacatatattataaattaaacaaactaattaggcctatccggtatggagaatctaagttacagtacccttccttgcaactaatacgatatttataatggaacctaaatgtaattg

SEQ ID NO: 63209 - DNA, 460 bp, Glycine max
aaacatctcaataaacatgtacatgaattgttggaaagacatcttaattgtggtcactcctaacccaccttagttgtggcgggcaaccttgggcaaagaaaggtgtgttgaagtcccccatcaactaaaatgaactaagtcctgtttgtatatacttctctgtatgataaggttactcgtcatccaaaatcatcacaaattggcccttcctttgacaacaacagaatagagaagatgaagcctctttcaagtaacttgcatggtatgcatgaaactaccaaggaaaatgatatcaacagtcctggaacaagaacaccgaaatttctagaagccaaccgttgataaaaatggtttcttttcttggtggtggtagttaattttcatcattaatggcaattgaaaatgggatgaaagctcacactaacgcagacttttattctggtattggcgatgatatttt

SEQ ID NO: 63210 - DNA, 250 bp, Glycine max
cccacgcgtccgatatattccattctctctgtgtatttccctacctctcccttcgggatgcagatcttcgtcaagaccctcaccggcaagaccatcacccttgaggtggaaagctctgacaccatcgacaacgtcaaggccaagatccaggacaaggaaggaatccccccggaccagcaacgtctcattttcgaccgaaagcaacttgaggacggacgtacccttgctgactacaacattcagaaggaga

SEQ ID NO: 63211 - DNA, 437 bp, Glycine max
cccacgcgtgcgccggcaccggcgtgtgtgagatagaagaagtggacgagaattcgaacgataggcggctacatgatgatgatgatgatgatgaagagtactgagtttatgtcgcatagggtaagagcgacacaagcatggacgctctctcatgggctctcaacaactttgttgctcaatcaccatctaccatcatttatctcattcatgttttccctcagatcaaccacattccaaatccattgggaatctgaatgattccaaggaatcaagtgagtgctgagcacgtggagagttatattgaccaagaaagaggcaagaggagagagctccttcagaaattcctacaatcatgctctacttccaaggttaacgtagacaccatcctgattgagagtgactcagttgcaaaggctatcctcgacctgattcccatt

SEQ ID NO: 63212 - DNA, 216 bp, Glycine max
acgtccacgcgtacgcttatttagggttatagtgactgtgctccacaaccgagtcgcgatggggtgacatgagagtataggaaggatgcaagcacggcagaattaccggaggtgatcgcacacgcatctgatgagatggattcaagcagctactccgtatcggagcctcacgttgaggagagcaccatgaatgtcgaaccttactggcaaacgggc

SEQ ID NO: 63213 - DNA, 345 bp, Glycine max
ggatatctctctattacatgatcgatcattcatagcatagtgtgaaatttgagcgagacgctaagaagaagaagaagaagaagaagaagaagaagatgctcgagaagatgggggtgaacacgaaagccgaggccgccagggctcgtaagagcgcggcggatacggagcggaaggagaaggagagtcgagagaaggaggaccagtactggctagaggcggaaggttcaaagtcacgcgccgcgaagaagaaggaggaagaggccgaaaagagggcggaagcagccgcgcggaaagcggatgcgcgacggttggcggagcatgaggagaaggagctggagaagtcga

SEQ ID NO: 63214 - DNA, 443 bp, Glycine max
actcggttcggaataccacggctgcgagccacgcgtcgcgtcgcacgcgtacgatccaaagtatgctctcttcatcattagacaatcactataggagcatggggttgtaagaccatggaattgtggtaacactcggagagggaaatctgattctatgacggatcagagtataactattagttttggaactttgaagagacttgctatagaaactattacttttaagctctttctctgatatgttgacagctactttgactcaatgtaccataatgtcctcaactgaatactgctcactaccatgcactccaaggcacagtatattacggactgaaagtacatatattaatcacctttttgatcagtgacattggaattcggattgactattaaaaggatatattaaaattagatattgccacattggtttatacttcattatg

SEQ ID NO: 63215 - DNA, 214 bp, Glycine max
cccacgcgtccgtaacattggaaaatactttacattctatttttcgtttattttggcttggtttggtatttgtttttcagatattgcttttcataagttaatcagtcaatgaaataaaagttgttaatgaaaaaacaaaaaaaaaatataaatattatataaactattaaataaaaaacatagtaatttattaaaataatcaaactatacaatt

SEQ ID NO: 63216 - DNA, 69 bp, Glycine max
cccacgcgtccgaaaaaaaaaaaaaaaaatttaatttaaaaaaaaaaaaaaaaaaaaaaaagagaggat

SEQ ID NO: 63217 - DNA, 131 bp, Glycine max
aaaaaaaaaaaaaaaaaaaaaaaaataaaattaaaaaaaaaaaaaaaaaaaaaaaaagaaagaaaaaaaaaaaaaaaaaaaaaaaaaaaaaaaaaaaaaaaaaaaaaaaaaaaaaaaaaaaaaaaaagaaa

SEQ ID NO: 63218 - DNA, 216 bp, Glycine max
taaaaaaaaaaaaaaaaaaaataaaaaataaaaaaaaaaaaaaaaaaaataaagaaaaagtaaaaataaaaaaaaaaaaaaaacaaaaaaaaaaaaaaaaaaaaaaaaaaaaaaaaaataaaaaaaaaaaaacaaaaaaaaaatccaaacctaaaatctaaaaaacaaacccaaataaaaatactaacccaaacataaaaaacccaaaaacaccaa

SEQ ID NO: 63219 - DNA, 106 bp, Glycine max
accttcaatcccttccaataccatttatcataacattaacattaatctaaattacttatctaacttatcattttcaaccccctcttatccctcccaaaacaatccc

SEQ ID NO: 63220 - DNA, 265 bp, Glycine max
caagagcctaatcccatatgcatcactgttagttatttaaggcacaaagttcacaaaaagtatcgctctaaattttgtgcatccgcccacacttcatagcatatgaaatactgcaaattttccctcatctgtaacgctaattaaaaatctacctatattcattatattgttgaatatattgtacatatcccttccactctgtctaaaacacatatacctaaattttaaatacattatgcccatcacatgttaaatctcaattttt

SEQ ID NO: 63221 - DNA, 115 bp, Glycine max
atacccgagccgacccactcaaacgaaaaaacctacaaacacacacccattcaatttaaaaacaaacctaacaatacaatgcactgttaaatacaaaactcacactacccaaaaa

SEQ ID NO: 63222 - DNA, 289 bp, Glycine max
aggccacgcgtagctattcatctgattggtctgcatacatggtaagctagtcaccacacagggcatggtcaaccttcaacatacacttgaagtgcagtgaactcaagctgaaaccaagggaggaagaatactgtgctatatgaacactagtcttcgacttgcctattacgatactagacacatgatctatacagctgcagagattactatcatcgattctctgcacttcatactcaacaaagaaatctcagcttatcctcaacaattactcaatggatactagggaatc

SEQ ID NO: 63223 - DNA, 314 bp, Glycine max
ctcacacgtgcgcaacaagctgttcatccttctattggatctgccagtgaataatgctgaggaagattgctgccacttcacaggacactctacagaacaagctacataaccacgtcgataacgcctgcgaatacgcgtggcattacctctagctagtgcgacagccgtaagataatccgtcgcagcaagttctcaatcatggtcactatatccttcaccacccctaacaccgatcctatctatgctcctatgaatagaccttgtctgatcatgatgcagatgctgatatgcattgccaatgtcacgactgtgcc

SEQ ID NO: 63224 - DNA, 198 bp, Glycine max
tcgaccacgcgtacgagcacatgactcatcacctttacaccttcactggcaatcaattcaccaactgaatacggtctcatttctcactttcacatttctcctaacaaacttgtcttcgacgaggacgtctacaccatagatctcaataattgtcatgtcaccaaccgttcatctaaacttggaaagcctgatacatct

SEQ ID NO: 63225 - DNA, 297 bp, Glycine max
ctatcaagattaacttttactccctcttctacataaatacgggaatgttctttatcatttgacatttactgtcatagcacttctaatattaactcaaactttatatactgcgatgaactgcatttccatgtttcagtgaaacatcttttatttaactgctacactctgcctgtactccatgataaatatgaagatcatctagactcttttggctcgaagtcaattgccaacattaacaaccaatattcaaatgatgatgctaatgtgttgatcaagatacccatacgacctttaaaa

SEQ ID NO: 63226 - DNA, 221 bp, Glycine max
cagaacaacaacttggactcgaatatttataaaggttcaactctctgtttagttaaagcaaacgccattctatatttctatctttgaccaatcccaaacccagaccataacatgtgtatggggggagatccgatgcaaatgctggtgagaagaagaaaggaccaggacgacgacgatgaagaatagttatcatatagtcaacatggtgtgaaacgagagca

SEQ ID NO: 63227 - DNA, 340 bp, Glycine max
ctcacgcgttcggtcacgcgttcggcagacttaatttgcaagtacgaccgaggctacacgcgggaggcggcacatactgcacagaatggagcccatcgacaactacgacatctcagaaaggtgtgtcccccgacgtcagagactccgcgaagcaaaccatttccaccatgcttggattggtcccatgggaccacttttctgacatagacactgtatataaacaccctctataccgactaatctgctcctgccacaagacaaggtgaatacagaaacaatgtgaattatgacgatcattctagtggagtgcctggaacatatcgagaatcgacgacgacgt

SEQ ID NO: 63228 - DNA, 285 bp, Glycine max
cccacgcgtcccgatcgctctctctctaggatctgctgccttttcttctctttctcaattctcattcatagaggcgaattcatttcttcgatctggaccctctatttcttcctcatcacatcacgcgacaacatgttgctctttgactggttctatggcaatctcgctttcctcgatctcatgtcacatagaagcctaaattcttttcctaggtctcgatcttaacggccaaaccacccctctttacatgctcaatgactagagatttgatcatcaccatccgac

SEQ ID NO: 63229 - DNA, 366 bp, Glycine max
cacacacgatcggcatatatagcactaagtacgcgcgttgagtgctgaggactgaatcggactgcacaggtatctacctaggaagaggaataaatgggatccaacggacacatctcggtctgaccaatgggataacagacctgacccagtgactcgcatacaatgaatcaaaggaaacagaacaacacggtgctttgcaagaccaaggcagtcgcttccaccggagtgaacaagttgaaggagggtacccttgatgaactgcattggatcaagacccactatcacaacaccacccagaagcattaaactacttcttacttatcttaatatgattgcttctgtacatatttataataatctttgtct

SEQ ID NO: 63230 - DNA, 368 bp, Glycine max
ttaaactcacagagctcgatgcagaaactatgagacgaactcgaatctccaagctctgtcctatacactatcgtgaccatgtggcacacgcagagaagctaactcaataataataagtcaggggatcttcaaactagggcttaagctctcagtgacacactgtggacagtgtagagtcaccatcttcctgactgactaaaggacttttaacgatagtgatctgctatgcaactgggctcgagactgaaatggatgtaagaatgatgtctgatgtacaccttcagttaagcccacagactaccaatgcacttggctatacagatatggaaacaaaggtgactgagacgctagttgcggaatctatgaat

SEQ ID NO: 63231 - DNA, 346 bp, Glycine max
ctctccatcacaatgttctcacttaccaaaaccgctacgctcaaaaaattcaaaattggtctgcgccaattctccttcgagcgctactccttacaaatcatacctatccgataacctgtgattcatacactggctccctgctaaaaccttcactcggaacaaatgctcctaaacagatagcaatgtaagtcctgcactgatgacagtaactcatgatcttcatgagatacaacgctcgatccactgtctgacaatcactacatacctgattcacaccttattaatctatagcacgaggtgactgaggacttactatctaccctgtgatttaacacaatgctatctc

SEQ ID NO: 63232 - DNA, 77 bp, Glycine max
tcgtgctcttgtaggatgcttaaagtggaaagaagagtgactttatcaaagggagctagaaatgggttaaaattttt

SEQ ID NO: 63233 - DNA, 335 bp, Glycine max
cacacgcgtccgcccactcgcccggatttacggctccttcactcacatcacagccgcgtggctcatctgtgcgtgctcttgttctttgtcaggtctgtcgcttcttgatccacaacttggatccatttcattccgatcctgccccttcaccggcactgcatatcgatctgatcaatcatacaagttgattgctctcgcctgtatgttgctggttggctttgaggacaagaacttttacattgttcacacatgtgccatcattgaatgcataaagggactggtgtttgacagtgcagcgatgacatttggcttgacgtactgtaatttatgcaatg

SEQ ID NO: 63234 - DNA, 260 bp, Glycine max
aaaaaacaaacaaacactcacttaaaaattaaaaataaaaaaataaaataactaggaaagaaaatctacttcctctcttacagatccatgctgactctgtcactcacgcgatgcacatattagttccacttcatacctatcttcaacactctctcactgttcatacctctctgaaattcaatacacgctgattgctctcgcctgcatggtctcgcataacattgaggtctagagctttaacgtctttgccacgtgaacca

SEQ ID NO: 63235 - DNA, 432 bp, Glycine max
aaaaaaaagatttcttagggtgaaggttggatctagttatgatttaggtatctcaattggccgctcttccgctgcgccgcccccttatcgtcaccacaaaacctaagacactcaatagatcttaacttggtaaccactttctcacggcaagggctgtttgaactttgaaccgccgccgtcaaccgtctgccactgccaggttagtagaagaatacaatcaccactttatattattcgatcgttggtatgtatgactctcttattgtaaaaattcttatcatttatgaatttatgatgatttgttattagataatagtgtaaaaatcttttacatttactttgccgaccacaaagccatgcctctccatagctgcaagctgcgtcatttgtaaagattttgctagagttgtaagagcaacagaattaaattct

SEQ ID NO: 63236 - DNA, 547 bp, Glycine max
  unsure (1)..(547): unsure at all n locations
aattcccgggtgcgacgccacgtcgtctcgctgtgctttcttgtctcttctcgctttcttcaagtgtctgcttcctgctgttttccttttctttcttctcatagatgnggggtggcatcagtccctctaagaagatccaaaaacgtagaactgtcgatcatggaacgtgattctcaatagtaggatnagtgtttgagcagtctgaaatgcttcaagtagcagtgtctttatacatcagtaggaagggggtgcatatcggctttcaaaagtgctttggtaccataacataaattggaagtagaaataaagaatagcatagtttttagaaagttcttgggttttatgtnggaaaccccttgtcttgnggttaatggaaagctgctgctataatggcgcattgtctttggcaaaatggaggaaggaaggggccaccagattggcaggaactttgtncggaattatncgcgctgcttagtgatcatacttcacaattagnttntattgagggaaaaccaatgnctggcaatgcnntgctgctgctcttatg

SEQ ID NO: 63237 - DNA, 424 bp, Glycine max
tccactcctacgtccactcgttcgaccaccttcctatgcttcttcttcatccgtggtgggccaaatgcccaatcttgtcgaccctgaaatgttggcctgcatgacccgcgccatctgcgacgtattccagacccgatccgcactcaagctaatcgtagcaccgcccacccacgagcaggtggactacgcctatgccagactcgacgacctctatgaccatctctgccgtcagctccaacagatcgtggacctgctcatgccccacgagatcgacgagctccgctggcggtcccatgatcacgagaaagataatgccattaaagaatccacggagcaagagaagcgcgttctcaaatcactgattcaactcgtccagatgcacgattactacgagaagctgctgaaggacgcccttaagcgactc

SEQ ID NO: 63238 - DNA, 229 bp, Glycine max
attcattcaaaactacaaccttatcttcttcaacatattctactatctaaccttcctattaccccttttttctcatcaataacaccttaacttctcttgttctcatacatacttctccatacccactttcttcataatatttcatcactatacaatcataacatacctttccctttactacaatacaacttttacaatcttctcttcaatacttacaccaacttttttt

SEQ ID NO: 63239 - DNA, 437 bp, Glycine max
cttctttgccgtagaccaccattactaccattgtttccactcaccaacacacaggaccggagcaattagggtttgtagattctgttgttcccaccacagatatcacattcgtagtttcaatcagcgtttgaatctcgcatttgcaccccctactgccgcaccgcaccttcctcactccatctctgcctccgccaccagtcactttcctccccaataaacaaaactcacaaagttaacccctttccctttttctcgaaccagaagacacaatttttcacgaaaagaaagacaacccaaaagcagaagaaaccttttcctaacccttgcaagcgttgcggcatcaccctcgatagttgaaaccgatcaatcgttcccagaaaccgaaaaaaatgaaactaagagtttaacgatgagaactcagacactgtttttgtgtt

SEQ ID NO: 63240 - DNA, 372 bp, Glycine max
accacgccttccggtggttgtgccttatttctaaagtactgcagacatccctgcacagagggggttccagctgactggtgactggcaaagcccgttgcgcacgcctctcccggaccctgcctgacttatattgcaggactgctacactagacgcctccagatgatacattgcattagatactgaccaagcttatacgctggataagagtgtccactctgcatcttaatccatatgctctaagccaactaacgcctcataggatccatatgtccactgacgtaaacatgcacggtacacggggcctggactagtgcaaactcatgaatgacccatcggtatccaaggaccatgctatctgcgaacatccttca

SEQ ID NO: 63241 - DNA, 451 bp, Glycine max
ctttttcttttccctttctgcctctcggaactttgaaaacgtggaaacacacgggagagcccacaccagtgcccggttgttccgctgcatatcataaacaccgtgtattacccgtgcggggaaaaagataataaaagaaaagaaccctcaattttccgggaaaaccctacccacaatggtttcccaggaaaacaccaattggctcttcgattactgcttgatcgacgatattcccgttcctgacgccaccttcggcgtcaattcctgcgccttcacatggccccctaacgccttgaacgcttcctccaatgtcagcgttgaaattgatggctcgctgtgggattctgacagtctcaaagagtctggctcaaacaaaagggttaggtctgagtcatgtgctgcttctcgctccaaggcatgtcggtagaagttgataagggataggcttaat

SEQ ID NO: 63242 - DNA, 420 bp, Glycine max
actcggtgtccttcaaacatggtaaaggtgtttatttttccttcaaatgtgcattattctaataattcagtaagctacaatgacctggtattcttattttgttaaagaagctataatgttattatccagctgatggccaatttgtaacgagcttatggtgcctactgcatttgcttcatgaaaaacccaagttggaatgaaggcccctcagtgaactgatggagttacaactctaagaattgacctgatgagcaagtctatatgctctcgtttatgtgatgatctgatggcttcaaaaccattagcaagcatacggattatcctagataatcttgtatcaatgatgagtccttcctcactttttaaccactaaatgctgagctgccttagaatctgattcaataataactttgggaaatt

SEQ ID NO: 63243 - DNA, 316 bp, Glycine max
aattcccgtcgacccacctccggacctcgcacctcgagttatttatatatctgtaaatagtcttaatcaatccccatccaactatgcatgactctaagtcaatacattgtgaaaatttgatgaccttacgtattcactatcaacaccctgacttaagcttatagctcatctgcacatatcttggcattgactattcatcttttcccttttgatggattgcagttaagaataagcgttatgctaaactagtatatgatcattaactctttttatacttattttaatatctgatatgtgttacgatattattgtgagg

SEQ ID NO: 63244 - DNA, 223 bp, Glycine max
aacagcgtacgaatatggttttctgattcttcttaacactgttcattgaagggttcagagtattctcaacaagactcgcgctctgcgaggaatcgcctctgggataagagtcatactgcgatttgttaagccaggaatcccgctgcaggacatcatcccgctgactcttgatacataggctttcagagacttcatagacttgcatgtttggaggtaccgatgt

SEQ ID NO: 63245 - DNA, 157 bp, Glycine max
cccacgcgtacctacatgaccttctgattctccttaacacttctcattacaggggtaggactatcctcaacagtactcgcgctacccgagaatcgcctattgtaccaacatcattcgacgaataccataaggcagtaatttttcagcagacacataa

SEQ ID NO: 63246 - DNA, 189 bp, Glycine max
ttaaaccttttttaaaccaaggccttggtctttctggcacccaaaaaggttctggggtaagttcttaagattgttcaccggtccaaccaaggaacccaatttgggccagtgaaactaacaagtgatcttggggggggctacttttgggtgaactgggaaaaaggctttgtctaatcaaccttaaaacca

SEQ ID NO: 63247 - DNA, 131 bp, Glycine max
cccacgcgtgcgtccacgcgttcgcacacgcgttcgaaatagagataaaaaaaataaaggataagaaaaaaaaaaggtgaaaaaataatagaagattataatatataaatgaaatgaatgaaatgaaagta

SEQ ID NO: 63248 - DNA, 319 bp, Glycine max
tgtttgctgttgtaactcgttcttcttcttttgttgttctgtgtttgtgtttgatttggctctcacctgaaaatgtctagctgcggtggtaactgtggttgcagaagctcctgcaagtgcggcaacggctgcagaggctgcaagatgcacccagtcttgagctacactgagtcaaccaccatcgagaccttggtcatgggagtggcacctgttaaggctcaattagagggtgctgaaatgggtgatcccgctgagaacgatggctgcaaatgtggaccatactgctcctgcaaccactgcacttgcaagtgaggtgttg

SEQ ID NO: 63249 - DNA, 212 bp, Glycine max
cccactcgtacctcaacactttctatataatatcatcccattatcacttcatcgtcaggccgatcacgcatgcccgactagactcaaccttcgactaacccaatcctcacctttacgatcacctctcatcaacgcaagtacaacaaccatcactgttatacagtcttcttcgacgtctcaaatacaccatcaaattcatactgcctatacaa

SEQ ID NO: 63250 - DNA, 225 bp, Glycine max
  unsure (1)..(225): unsure at all n locations
cggtgaccggctgaatggtgaaatatngnngttatggacccattgatgatggnntagaggtgagtggggnngtgagtggttcatctagtggttgaactttgtaaccaagtggatgcaaccaagggtgagggttacaaacgcaagggaggtacctttaggtttcaggggtataacaaggggtgatcccagatttgagaagaaaatggtttccgcttttgacacatg

SEQ ID NO: 63251 - DNA, 352 bp, Glycine max
gaggaatcacacaagagaaatttggtgtggatcttggcaatttatatttggtggatgaatcgttagaatgaaaaccatcgcttatatagttcgcatgtacttgctaacggtggcgcaccttagggggtcacgtgagttcatgcgggtctcggaaagacatggcggctaattttgcagtgacggctatggtcaatatggctatggacatgacgatcgtagaggtgctgggtgtgatgagctccgctcgtagtacacgtttcatgtgttgactcatggtgatgaataccttctaggtggcactattagattctcaggagttcaatcggttatacgcctataaaaataacttttt

SEQ ID NO: 63252 - DNA, 405 bp, Glycine max
ccagaatttgcatcaggggcagcagttgctgatgcagctggtacaagagataatgcatttgaagagaatgagtctgagagggaaccgagcaagtccatttcaacgctgttagtggtggctggggcggcaggagcagctgatgaaggaccacgtgggtcaaaaaagtcatcagtcgtctcagtttcctgggctccagatgcagcagtagttgcttcggttggattattgtttacaggaaaagatcccgtaagagcagagatttgactaggattatcatttacatgaggagaggagtctctaggagcagatggtgctgaagtttccgcatctctttcactgtgtacagggctgcgagattcaccaacagcttcttcatagctaggaggagcacccatattttgctca

SEQ ID NO: 63253 - DNA, 374 bp, Glycine max
aggacgcgtgggtcagagcaacgctagcattagcattcgcctatattatgcaacgctgtgctcatccgatatcaaccactctcagacaaaccgaacactcgtgctgtgtctatctcattccatttattaaacaatgccattgctgatcaacataattctgacaccctctatagcaatggagttggacctctgattactctaactctagctaggattgagaaacatgatcaatatcaacgactacgagtcgaagagagtggtttgtttcaactgttaataatggctgacgagtatcagcgtcgtgaaactcagatgatcttaccgatattgataattctgctgcttgtgttgatgctggatcgatgtcagggctc

SEQ ID NO: 63254 - DNA, 417 bp, Glycine max
gttcattctctatgcgcagttccctacctctcctttcaagatgcagatcttcgtcaagacccttaccggacagaccatcacccttgaggtggaaagctctgacaccatcgacaacgtcaaggccaagatccaggacaaggaaggaattccctcggatcagcaacgtctcatcttcgccggaaagcagctcgaggacagccgtaccctcgccgactacaacatccagaaggagtcaacccttcaccttgtccttcgtctccgtggtggcatgcagatcttcgtcaagactctcactggcaaaaccataaccctagaggtcgaaagctctgacaccattgacaacgtcaaggccaagatccaggacaaggagggaatccccccagaccagcaacgtctcatcttcgccggaaagcaact

SEQ ID NO: 63255 - DNA, 426 bp, Glycine max
  unsure (1)..(426): unsure at all n locations
ttaactctcttttctagaagaatcagaagcagttttcgtttaacttacagtatccagtgcctggttagaacatgactacgacaataattatgtcgcctgttgttcattattctgatctcattgttcccatttatggtcttatctaagttcaaccagatactattgttcatatcagaagagtgattgctgtattaaggtgcctttctagagctcccaggttgacaagcttggattgcgggtcaagtattagatgttgtatgagatatgaggccaaagttgctgagttgttaccaaaaaattctgcttgtaagaatgtggaactctaatggaggaatgcataatgtttgcaattgctcatgcatatcaatntgattcactgctaactnttcatgattagctatctgacttttccaggttcatgacact

SEQ ID NO: 63256 - DNA, 383 bp, Glycine max
gtgacgcgttagttcacacactaagttctgaaaaatgagttccaaagtttatgttatggtacttatgttcatggacactatactttagatctcctatgaagttgcacactatgatgcataccagaattttgacaaaacagatgggaagcgtagtgcaaatggagtagatgaaagcaaatattaggcgtggtggctatggcgactatggtggttgacgctgaggtggatggcgtagcggctatggaagctaccgtggtggctatagacgtacgcgtcatagctatagaggctggcgttgtggctatgagtagcgacgtcgagactacaagagttgatgtgggggctatagccctaacgaacatcatgaggctaacaattgatgc

SEQ ID NO: 63257 - DNA, 265 bp, Glycine max
gggattcgcgtttactgatctcaagtttttcacctcactgtcgtaaccaaatgattggtataattcaagattatgtaccaatttattcattctgatatcatcattattactatttatattataaatataattaatgtatttaatgataatttttttcgatattgccaatttgtgattttaaccttagaaatttaatatatattaaaaaggtctttcattctaaaggattcaaacttacttacactttcatgctaatttataccta

SEQ ID NO: 63258 - DNA, 125 bp, Glycine max
aaaaaaaaaaaaaataaaaaaaaaaaaataaaaaaaaaaaaaaagaaaaaaaagggtaaagaaacgttatgggcggagggtaaagtgttcgtgcgtggactttcctatactggctacgtattaac

SEQ ID NO: 63259 - DNA, 388 bp, Glycine max
cccacgcgtccgcccacgcgtccgtccacgcgtccgcccacgcgtccgcccacgcgtccgggtttttttttttttataaaaaaaaagaaaaaagaaacatattcttgcaatttcgttgtacaaacaaaattcccctattttcggcacgcctttgttgaatttccaatctctatttttctttctttctatttatacgtaataattccaaaaagcctaacgcgagagattcatcagtttttcaattattcctcgaattttgaaagaatcatacaaacgcttgaaatattcgtcatcaacaacaaccttacgctgctatagattttttttttctcttcttacagatccaaacatggccgaagaacaccgatgccaagcttccgaaagtcac

SEQ ID NO: 63260 - DNA, 180 bp, Glycine max
cgttgctttcactttacaaaaatgaatagcatgtaaaagtgttcagagacgctatgcttatcaatagcgttccttaaaagagccgcagcagatcaatgcggcgcacaatctgggggagcgttaatgccaaacagatgattgtgcatcaaattttggcggtgtggttacacatattgctac

SEQ ID NO: 63261 - DNA, 58 bp, Glycine max
cggacgcgtgggcggacgcgtgggcggacgcgtggggtaatgtttcttaatgattttg

SEQ ID NO: 63262 - DNA, 100 bp, Glycine max
atcgcaggttcgcacattaacctcttctatgattctcataaactcgtgcgatggacacacgcacaatcttgtaattttaccttctaaagccttacttgct

SEQ ID NO: 63263 - DNA, 153 bp, Glycine max
aaaaggggatcttgtccagaaggccatccccgtttttgaatacttgggaaatgctcttgggaaatttgataatgggccatttttgcttggccaattaagtttgggggaaatggctaatattccatttgttgaaagattccaaattgtctttgc

SEQ ID NO: 63264 - DNA, 350 bp, Glycine max
aaaaaaaaaaaaaaaaaaaaaaaaaaattaaaaaaaaaaaaaaaaaaaaaaaaagaaaaggaaaaaaaaaaaaaaaaaaataaaaaaaaaaaaaaaaaaaaaaaaaaaaaaaaaaaagaaaaaaaataaaaaaaatggggctgccgttttaggggttcaaagttttctttcccgtgattgcaaggtcaaagctttttttttggggcccttaaattaattaaattggccgtgtttttaaaacgtttagattggaaaacccttgggtttcccaaatttaaatgcttaggataaaatccccttttgtccgcttggggaattgccaaaaaggcccgcaccaatcgcctttccaa

SEQ ID NO: 63265 - DNA, 237 bp, Glycine max
gtgatctttccatcagcatctcgacatgctgcttgctgttacttatgctattcttcaggttcacttcctctatgcgggagatgaagggcaccctttaccatggacaagacactagagccctgtgcttacaatggaaacacatactacagctccatacatgatgcacacatagtgaagcagcttcgagcgagcaacgtttcgaatactggctgcgcctgtggtcacaaatcagtactt

SEQ ID NO: 63266 - DNA, 269 bp, Glycine max
aaaaaaaaaaaaaaaaaaaaaaaaaaaaaaataaaaagacaaaaaaatctaaaaaaatggaaggtgtcatactcgtgcatgcggacgtcatacctattctttcaagcaacctgcttttcaattcactgaccctacttctattaccttgactctcattaaacactgacttccctctatttactcgtcttgaaccaaattcaccttgctccaattctgctcatacctattaagcccgcatcgctcgaccttactaacacctactcgacctt

SEQ ID NO: 63267 - DNA, 372 bp, Glycine max
aaaaaaaaaaaaaaaaaaaaaaaaattaaaaataaaaaaaaaaaaaaaaaaaaaaaaaaaaaagaaaaaaaaaaaaaaaagagaaaaaaaaaaaaaaaaaaaaaaaaaaaaaaaaaaaaaaaaaaaaaaaaaaaaaaaaaaaaaaaaaggcccccctttttaaaaattcaaattttacttccctttttttctaacttaaaatttttttttttgggcccctaaatttaattcatttgccccctttttaaaaactattaacttgaaaaacccttggttttcccaatttaattccttttcaaaaaaaaccctttttcccaaattggctataaaccaaaaagccccatcccattcccttttccaaaaattttccaa

SEQ ID NO: 63268 - DNA, 53 bp, Glycine max
ctttcttcttctcggttttacctttaccggttctaaaaaggggaaagttggta

SEQ ID NO: 63269 - DNA, 321 bp, Glycine max
ctccacaaaaacaaacagaaccacagattcaggttttgatgctcttctgcggtgtgtccagagagagagagagagggttgtagaggatgttctgagaggaccgctctatctgaaaaaagatcttgagtcgcagaaagttatcgttcacacagagagagagagtgagagaaacaggtgttctagaactagagtgttggagcacggatgtttgccactttacattgaattccatcattcttttctttaactagcttgctgtactcgctacaatctatattactgtaagcgaattcatgttttaccgtggcaaaatggacctaa

SEQ ID NO: 63270 - DNA, 175 bp, Glycine max
gccacacctgcgccactaccacttgaccttgagacatatcgtgcagactaaggatagagggtactggcgctttgtatcatatacattaattgctacagcaaacgagattatgaagtactagctactttcagagacatagagaatcactgcgtgcaacctgacgatatccaacaca

SEQ ID NO: 63271 - DNA, 83 bp, Glycine max
acgcccacgcgtccgattttttaatcgattgtttatccatgtatcagaaagcaataccgagtggagatgagaaattacatgtt

SEQ ID NO: 63272 - DNA, 154 bp, Glycine max
gtatacctttttctctgttgttaatttccgacgtagtcttaaatctaagtaaacggcattggtccgtaccacacatacgaacgacgcaatcttctgattcttatggatacaatttctctcttctattactaataaacgcgtacccaatttcact

SEQ ID NO: 63273 - DNA, 309 bp, Glycine max
ctgccgccaaagtttccgtcattacagtcagatgcacatcttcgggtgatggagacaggccgtggcacaaatcagatactctacgtgtgcatgaatatggttcacattggcaagcacaatcctctggcacgtcaaggagtcaagttgataacggtggcttcaatagatcactgacacggaatcatgacagggtggctgctcataggtacggtgaccagtttgttcacaggaaacactcatcttgtgagcatcatggccaaccttgtgactactacgtatgaacagattctgtccgtgccgggctttttg

SEQ ID NO: 63274 - DNA, 346 bp, Glycine max
  unsure (1)..(346): unsure at all n locations
cgtcggacgcacgcgtacgtaagctccngaattcggctcaagagcgtactggatttcattgcgatatcatttgtgtcactggatggactgccaccccaatgcaggatgttcaggttacaattgattggtttatttcctctcaggaatgtgttcccaggacctattgtgttttaaatccacaaaatccttttgtgttaaatangtggatgggaaaattgactttcccccagggcacttcccgaagtgttaagagaatgcctctttctatagggggaggagctggtgcaaagaatgctattctcatgaatatgccaaatgctgttctttcaatgtggagatattttgt

SEQ ID NO: 63275 - DNA, 353 bp, Glycine max
ttttcacagtaatatataaatattttatattcttcaataacaattaagtcttgtcccattagataaggtcaattagatggatcacatgatgtcattggagttggttaaaagccaaatttttatttattgtaaggttccctttgataatttcttctatatccttcttggtctccttttacccctttttacatagctaaaagccgtagcttgttccccgagtggcctcttggtgtggcaaacaaccttcattgtttttctctcatcctttctttgataggtactgaaccaatatcttcttgcatataatcattccatatctagtcctttcttttgtgggaatagcaaatatgact

SEQ ID NO: 63276 - DNA, 304 bp, Glycine max
gcccttcttcttcatcatcacgctccaaactcctccccattcttttaagctcttgtttcctctcaacatcactttcactcaatttttcattttcccaacattgcatgtagcagatccaaagctttcatacggactccaatgtcttgagtgtatgggttggaataaatgaagccgcagctcaaaattgctcttgctttagttgttagcttgctttggattcagcaatcattttgtgatgaaacttctgatacatctagcttaaacaagtggaggtgtagatgttctttccaagggaaccaaagct

SEQ ID NO: 63277 - DNA, 321 bp, Glycine max
acaaggcagaaagcaagctcatcctagagttttaaaaatggcagcagcctcctccatggctctctcttccccatccttggctggcaaggccgtgaagctgggcccatcagcccccgaagtcgggagggtcagcatgaggaagaccgtcaccaagcaggcctcctccggaagcccatggtacggcccagaccgcgtcaagtacttgggcccattctctggcgagcccccgtcctacctcactggcgagttcccaggtgactacggctgggacactgctgggctttcggccgacccagaaaccttcgccagaaaccgtgagct

SEQ ID NO: 63278 - DNA, 279 bp, Glycine max
ggaatgaatcaaccacaggtatctaaggtctattcacctatcatcaacatcatccgactatctggcgtctacacatctcggatgaggaaggcgtatagcagaatacagcagccctatctattcggtacgatacggctagaatgagattgtcgtcccagcagtgtcaccagtgagcgcactggttatcgcagcactcgtggaattgcttagtacatacattgcgtcacagggtttctaactcaaactgtatatggtctcattacttgatgttcacagaga

SEQ ID NO: 63279 - DNA, 324 bp, Glycine max
actcataacacaaagcacaaagcaaagctcatccttgagttaaaaaatggcagcagcttcttccatggctctctcatccccatccttggctggcaaggccgtgaagctgggcccatcagccccagaagtgggaagggtgagcatgaggaagaccgtcaccaagcaggtctcctcaggaagcccatggtacggcccagaccgagtcaagtacttgggcccattctctggcgagcccccgtcctacctaaccggtgagttcccaggcgactacggctgggacactgctgggctttccgcagacccagaaaccttcgccaagaaccg

SEQ ID NO: 63280 - DNA, 312 bp, Glycine max
tgaacaagggtttctctttctctttctctgtctgcttcttcactttctctcgtttcaatcgagggaaatcatgggcagaaaattcttcgtcggtggcaactggaaatgcaatgggaccactgatgaggtgaagaagattgttactactttaaatgaagctaaagtccctggagaagatgttgtagaagttgttgtgagcactccttttgtgttccttccgtttgtaaaaagtttgctgcgccctgatttccatgtctcggcccaaaattgttgggtacgcataggtgatgcttagactggagaagttagtgc

SEQ ID NO: 63281 - DNA, 306 bp, Glycine max
taaacactcagcagtcatcaccatggccaagctagttttttccctttgttttctgcttttcagtggctgctgcttcgctttcagttccagagagcagcctcagcaaaacgagtgccagatgcaaaaactcaatgccctcaaaccggataaccgtatagagtcagaaggagggctcattgagacatggaaccctaacaacaagccattccagtgtgccggtgttgccctctctcgctgcaccctcaaccgcaacgcccttcgtagaccttcctacaccaacggtccccaggaaatctacatccaaca

SEQ ID NO: 63282 - DNA, 303 bp, Glycine max
acttaattagtgttcatgaatacgtcaagccttactttagtggttctaaattgaaaagctttctagctggtcataatatcaccattactgatggtattgacaagactagtgcaactttgcaatttagaaagttagcagattgtgattttctcaagagaaactttaagcagatgtctaatgttttgtgggtagctcctgaggacaaggcgagtttatggtcacaacttcattatgtttcgtgtaataatctggaaatgcaagaagcttatcttgtcaatctcgtaaatgtgttacgagaattgt

SEQ ID NO: 63283 - DNA, 287 bp, Glycine max
acatctcctcttctctctccgtcactcgcacttcatcgtcactacacactgtctctatcgttaccactctctctgcacaatgctcatggttgctctaatcactaatgctcagattgagtatgcgatcttagcttccctcataccgggctcgcggacattctcctatatcggaatcaacggctctcactgcaaggcctctctgatcagattggtatcgtcggatcaatgggtcatggtcatcatggagtgctatgctcaaggtacgtctactgactacgaggttaact

SEQ ID NO: 63284 - DNA, 278 bp, Glycine max
atttgaatcgagaattgatacccttgttcctcaaaattattactaattttcattttatatatattttttaatcatgttttgaggtacggttttgtctgttgcaacctgcaacccctttcttcttttagatgtctaatttttcgtgactaagttgactctgttattttggagctcatcatccttgttaccaaagaaatgtttttcctttataaaaaccgttcattttgcatttcatctaacactttggagtgttaacatgcaggatgaacatctgataa

SEQ ID NO: 63285 - DNA, 266 bp, Glycine max
taactccggaatccggtccaaccggtccaaccttcctcctaaacaacggtggaaagggtgttcccaaggaattcttctgcgccttaaatcaacacttcatataacttgtttcctaaagttaattagtatgcttaaggttcaatattttgcaatattggttatttattcataatattctgtgtattttggtattcggtttggcacttgccatttaatccgtgcttgtttttcggttgagcaaccttcaaatgttcgttcaacgaaaa

SEQ ID NO: 63286 - DNA, 86 bp, Glycine max
ggatgctatcatggccttctcgtagatgtcatttgcaccatgagatctgactagcgagattactggacttgggacaatctggattg

SEQ ID NO: 63287 - DNA, 340 bp, Glycine max
ctcgagccgctcgagccgattcggctcgagagaatataatgctgcacactatcctttactagttatggcattatactttctgattttatgtgtagtttgttttgctagaagaaattcctgctctccctagtccagagttgataacttgtttttactatgtggttgttgttgtttttactgctagttttctatggatacttttaatcatctttctgccatttcctaaggtgttttggctcttcctgtatcatggatggtattcatgggggtgattctcggatacacataactgatggacagcatcctatacacgtgccatatgtgcaagaacacgagcatc

SEQ ID NO: 63288 - DNA, 310 bp, Glycine max
aaagagtcggagcccaagaaggcctttgatctacgggataccttgcgtggacatggggaatcagagtagatgaaagagtcggagcccaagaatgcctttgagaggaagatgcagtaccaacagcatcagcagcagttcaccaccaccaccaccaccaactccaactcgcaagccatagatccatcgtgtaaatctgatgaccttttccgtttatgtatttaccaagattccgtgcccgctgacttccagcctgatgttcttgggggtaaacgttgcctttcaatggtggccaataatacctttttccttt

SEQ ID NO: 63289 - DNA, 201 bp, Glycine max
gtgaatctggttttcagcatgtgggaatcccaagagtgaatccgcttcagcacacaaatattggggtggacatctcacttcaagtaaccatggtgtcaagacataaagatttgtgcaaagatgccactcttggtatgtcgctactgatattccaagtgacttccatgttcaaattggagaagctaacttccacttgcacaa

SEQ ID NO: 63290 - DNA, 297 bp, Glycine max
gctagaatggaatttcgatgctcagtcatctcttttaccattctcttctctcttgctcttgcaggagagagccatgtccatgcatcgctacctgaggaagattattgggaagctgtttggccaaacactcccattcccactgcactgcgagagcttctaaagcctctccctgcaggtgttgaaatcgatgaactccctaagcaaattgatgatacacagtacccaaaaacattcttctataaagaagaccttcatccaggcaaaacaatgaaagtacaattcaccaagcgtccctat

SEQ ID NO: 63291 - DNA, 83 bp, Glycine max
acgtcgcacgcacgcttacctcagcactcggctcgagaaacaactctttctcttcttccttcgctcgttgttctccctcgcgt

SEQ ID NO: 63292 - DNA, 144 bp, Glycine max
ccaaaattaatccaaatccgtgttccgaagcaaggaatttgggaattccgaaacctacccgatttcaatgggaaaaccattgtttcactgggtggaccggcaacccaaaggaaggaggtcaaggtaccaattaatgggttaatt

SEQ ID NO: 63293 - DNA, 90 bp, Glycine max
gacgtcgcacgcattcgtaactcaggaattccggccgggtactggcaggcttacaacctttcccaaaagtgagtcgtattaaagcttggg

SEQ ID NO: 63294 - DNA, 429 bp, Glycine max
gtcggacgacgccttacttaagtacggaattcggctcaaggtggccatcagaacaccaaattcccaatatcaccagaacaacctacgcatgctaatcttaaagatcccatttgcgacgcctatggaaaatgcaagcacacaatcgtggatgcaatggagaagtctcacgaggtcatccatgagaagaatgacgagaaaatcaacgagagagtgtatgataaagcccgtcaagtccacgaatacgcccaaaacactgtagaaacagccaagaaccatattgcctgtaacgtgtcaaacgccaaagatgcattcaagcgtctaatagcaggatctttggagaggcagagccttaattcattgatgggggtggccaacatgttggggttttccacggcttatgggatgtgtgtgtgggttacgttcatctcc

SEQ ID NO: 63295 - DNA, 328 bp, Glycine max
aatgcctcacacatagaacatcagcagtaaggtgataaacagagaggttcacattgagagacacagataagactccctccctgataagggaacggttgtgatagatagtgagaagaatgacaatgagagagagttagcttctgatacaaccaggtctggaactatacttaacgacgacatcgaggttgacgaaggaagacgaggaatagagagttgtagtggttgtggtgttcagcatgagaggaagtttgcaactaaagttgatgagaacaacggttttggggaaacagctgaactctagggaataacatcagtcgtggtgggaaga

SEQ ID NO: 63296 - DNA, 316 bp, Glycine max
gtttgttattcaaagcaaaagtttgatcttttccacatttccttctaatgttactttatatttcatctgtcaatttctgtcttatatgctatgacagtatgacttaaaatatgctcaaggagaatcattttaaactgttttcatccgtaagttactgattctgcgattttcattggacagtcaatattattagggtttgtctaacttgttattgctaacaatgccgtctaaacctatgacgaatgtaacatttgattttgttatctccagagatgcttaatcttaccactcgtctctgctggaattttttgaaaaa

SEQ ID NO: 63297 - DNA, 116 bp, Glycine max
cttccttaactacggaatccgctccaattgaattcacaatcgggggtctccaccttgaacaagaatcaaggaaggacaatcatcaccataaccaatctcaatggtgatcataacaa

SEQ ID NO: 63298 - DNA, 53 bp, Glycine max
aaaaacataaaaaaaaaaaaactaaacaaaaataaaaaaaaaaaaaaaaaaat

SEQ ID NO: 63299 - DNA, 126 bp, Glycine max
cctctctcccatactcacatttacaggcgtgagactgagaaaactcatatcttccgtgctgatattccacaggtgaagaaaaaggattttaaagggcaagtggaggagaataagattctgcagata

SEQ ID NO: 63300 - DNA, 330 bp, Glycine max
gtatgcatcaacagctctgcagtatcttcttgggaaccaatcagaaacatgtctgtggtttcctctgcacaggagttgcagctacgagacactgttttcagggaccttgcaggatgtgttcccggctacttgcagtggagaaacagtcatgtttaatgttacctccagttcatcgaccttattggtagttttccttttcgaaaactttgttgcacatatcctcaaacgatgagaattctgatactactcatgcttagcatattgaccggctctctgaggaatcatagttgcatctaccagtgactcactgtatacccaagtgcccaattc

SEQ ID NO: 63301 - DNA, 307 bp, Glycine max
attttgttggagatctcgtctttgaagtttctaagatgacttccccctacattaaatgtacagtctctttcttcatagcatttggaaatttggctgatgacaccatcaattttgaggcttttccccacaagctggtgcagtttggagagattcaggaaaaagttgtattgaaattttcacaagaggaatttcttacagcttggtcaactcaggtgcgtcctgcaacaactctgttggctgatgggtgtccatatttgtaagctatggtgcatgataattcagtttccacaataacaagttaatttgg

SEQ ID NO: 63302 - DNA, 392 bp, Glycine max
ctttccgttatgcatatacgtagaagttgtatttgggtattcactttagttagctgtcgtaatttaatctttttcacgtgaaaataggtgttcgaaagagcttatagcagttcttagaagaacaaaatggaatgaaaaagagataaattatcagaatggtacatttagagggctatctggcaaaactgcttctttagcagattatatacattttgcttcaactgaattttacatgcttttcaatatacaacatgataatgaaggcgaacattcgccattattcatattaatcaatatcttacgagttacccaagtttaactacgtttagccaactgtgaatgctaagctaatctcaacaatttgattccgtttcaggccagaacaatgaaac

SEQ ID NO: 63303 - DNA, 301 bp, Glycine max
ctttcggtaacgcatatacgttgaaattgtttttgggtattcactttagttaactgtcgtaagttaatcgttttcacgtgaaaatacgtgttcgggagagcatatagcagttcttagaagaacaccatggaattaaaaagagatgcattagctcaatggtatatttagatgcgcatctggaataactgcttctttatcagatgatatacattttgcttgaactgaattttacatgcttttcagtatacaacatgattatgaacgagaacattcgccattattcatatgaatcaatatctta

SEQ ID NO: 63304 - DNA, 288 bp, Glycine max
atgagtttgaagaacaacatggtggtgctaaaggtgtgtttgttgcttcttttccttgtgggggttacagctgcacgcatggaactgagcttcttcaaaagtgatcagtcatcaagttatgatgatgatgagtattcaaaaccatgctgtgatctctgcatgtgcacacgctcaatgcctcctcaatgcagctgtgaagatattaggctgaattcatgccactcagattgtaagagctgtatgtgcacacgctcacagccaggacaatgtccttgtcttgacaccaac

SEQ ID NO: 63305 - DNA, 254 bp, Glycine max
ctcgagccgattcggctcgagctcgtctttgaagtttctaagatgacttctccctacattaaatgtacagtctctttcttcatagcatttggaaatttggctgatgacaccatcaattttgaggcttttccccacaagctggtacagtttggagagattcaggaaaaagttgtattgaaattttcacaagaggaatttcttacagcttggtcaacccaagtgcgtcctgcaacaactctgttggctgatgggtg

SEQ ID NO: 63306 - DNA, 323 bp, Glycine max
attctctccattgtctttgaacactcatcaccatggccaagcttgttctttccctttgtttccttcttttcagtggctgcttcgctctgagagagcaggcacagcaaaatgagtgccagatccaaaagctgaatgccctcaaaccggataaccgtatagagtcggaaggtgggttcattgagacctggaaccctaacaacaagccattccagtgtgccggtgttgccctctctcgctgcacccttaaccgcaatgcccttcgtagaccttcctacaccaacggtccccaggaaatctacatacaacaaggtaatggtaatttt

SEQ ID NO: 63307 - DNA, 177 bp, Glycine max
agggtcgcaaggttgacgagtatggcaacgttgagaagcaaaccgacgaatacggcaaccctgttcatgctgctagtgtcacctatgtagccaccagaactgctgctggtggttacagtgatgacattaataagcaacatgataccagcaatgcctacggcgtagacactggtatac

SEQ ID NO: 63308 - DNA, 383 bp, Glycine max
ttcgatgcagaggatgatgaatgctcctgattcaaatgataatattgatctactgttgagcattgatttgttgggtttacaaggagcaggtaaagcttttccaaacaagattgtttttgatgataagcttgtgttggctaacacacaagaattctttgatggaaattttccagtggattcttggttaccaatttttgtgaattgtctttatcctgtaagtcaattaccttcagaagctgtcgttgtaaatgttacatgtggtagtggacgtggtggtttacccaccactgcttggattagttctgcagttaacaatcgctcctcagatatcaacaaaaagattcgcacagcacttgggaaaggtaagaaaattgtttttctta

SEQ ID NO: 63309 - DNA, 78 bp, Glycine max
ggcttatggtggatacctaggcacccagagacgaagaagggcgtagtaagcgacgaaatgcttccgggaattgaaaat

SEQ ID NO: 63310 - DNA, 307 bp, Glycine max
ttgaacactcatcaccatggccaagcttgttctttccctttgtttccttcttttcagtggctgcttcgctctgagagagcaggcacagcaaaatgagtgccagatccaaaagctgaatgccctcaaaccggataaccgtatagagtcggaaggtgggttcattgagacctggaaccctaacaacaagccattccagtgtgccggtgttgccctctctcgctgcacccttaaccgcaatgcccttcgtagaccttcctacaccaacggtccccaggaaatctacatacaacaaggtaatggtaatttt

SEQ ID NO: 63311 - DNA, 70 bp, Glycine max
cacccgtacgtaagctcggaattcggctctaggaagagctttttattttggctcccaatggtttaatctt

SEQ ID NO: 63312 - DNA, 120 bp, Glycine max
tcggggaattccaattcctcattttcaagaaataatgaggctagaatggtcatatatgaattggggttatttgctttcttattatgcctatccttaacccatttgaaatcatatcataat

SEQ ID NO: 63313 - DNA, 219 bp, Glycine max
atatcctagtataccttaataaataatttaagatactatgatgagagcacggttcccattactgttgctgggacttgttttcctggcttcagtttctgtctcatttggcattgcttactgggaaaaagagaaccccaaacacaacaagtgtctccagagttgcaatagctagagagactcgtacaggaaccaagcatgccacgctcgttgcaacctcct

SEQ ID NO: 63314 - DNA, 145 bp, Glycine max
ctctctccttgttcaattctctatctctactattaatcggtctatgatccaattgggtgggcataaagcaaattaattactagagagcatacccatattttggttggtgaatttttgcaatacacatatgggaacaaagaggagc

SEQ ID NO: 63315 - DNA, 174 bp, Glycine max
aaacactcatcagtcatcaccatggccaagctagtttttgccctttgttttctgcttttcagtggctgctgcttcgctttcagttccagagagcagcctcagcaaaacgagtgccagatccaaaaactcaatgccctcaaaccggataaccgtatagagtcataaggagggctc

SEQ ID NO: 63316 - DNA, 315 bp, Glycine max
tcggggaattccaattccacattttcaagaaataaggaggcaaaaatgggcatatatgaattggaattatttgttttcttattaggcctatcctgaagccaaaggaaatgagatcggaattcctcggggaattccaattccacattttcaagaaataaggaggcaaaaatgttcatatatgaattggaattatttgttttcttattaggcctatcctgaagccaaaggaaatgagatcggaattcctcggggaattccaattccacattttcaaaaaataaagatgcaaaaatgttcatatatgaattggaatta

SEQ ID NO: 63317 - DNA, 76 bp, Glycine max
gcaagcattctattgttatgagtatactgaacgcttttctttaggaatggtaatatacggtactagatatagtatt

SEQ ID NO: 63318 - DNA, 85 bp, Glycine max
gttcactcttcttctcttgcggctagggttttagcgcaagttcttgtatatttaatgaaggtaggtaatgaaaatgatcacatca

SEQ ID NO: 63319 - DNA, 189 bp, Glycine max
aagaatgctattctcatgaatatgccaaatgctgttcttgcaatgtggagatattttgttggagatctcgtctttgaagtttctaagatgacttctccctacattaaatgtacagtctctttcttcatagcatttggaaatttcgctgatgacaccatcaattttgaggcttttacccacttgctggtg

SEQ ID NO: 63320 - DNA, 148 bp, Glycine max
cttatagagtaaaaaaaaatggctgatacaggtggaggaggtgcagtgagaccagtggtaagatgtaataacaagtgtggctgcacacttgcatgcactggttgttccactttcatgtgtactagtttttattatatttcatataaat

SEQ ID NO: 63321 - DNA, 111 bp, Glycine max
aaacagtctttgtggtggtgatgaaaaattgatgcctggggagaggcacctgctgttggcttgttgttcatggatggcaatttgtaagaaagatgtttggagagttgaatg

SEQ ID NO: 63322 - DNA, 226 bp, Glycine max
ctccttttcttctctccacacaatttctctctcctctctgtctcgacaaatccttctttcggtcttctcttcgctgctcactgtagccatggctttcagagtaggatgagcgggagggggaaatgcctctactggcatgggtgttgctgagcataatgttaacaccttcctggaattgctaatgaataatgttcatcgctattttattattaaataatgatgatat

SEQ ID NO: 63323 - DNA, 122 bp, Glycine max
ttcttctcttgcggctagggttttagcgcatcttcttctgtatttaaggaagatgggtagggaaaaggttcacatcagtattgtggtcattgtccatgtctactctgggaaatccactacca

SEQ ID NO: 63324 - DNA, 120 bp, Glycine max
gagaaacatatccaataggaaactcgtgagaagaaataggaggaaagccgtgaaagggaataataacaactttagcatcatgaagaacaagatgaatattccctacatttttgaggaata

SEQ ID NO: 63325 - DNA, 309 bp, Glycine max
aaatatgccaaatgctgttctttcaatgtggagatattttgttggagatctcgtctttgaagtgtgtaagatgacttctccctacattaaatgtacaatctctttcttcatagcatttggaaatttggctgatgacaccatcaattttgaggcttttccccacaagctggtgcagtttggagagattcaggaaaaagttgtattgaaattttcacaagaggaatttcttacatcttggtcaactcaggggcgtcctgcaacaactctgttggctgaagggtgtccatatttgtatgctatggtgcatga

SEQ ID NO: 63326 - DNA, 345 bp, Glycine max
cgccaattgagaaggaaagctctctctcgtattgaatgggtgcaaaaagctgatgtgcctaccatagcacagattgaagagtttcattcgatgcagaggatgatgaatgctcctgattcaaatgataatattgatctactgttgagcattgatttgttgggtttacaaggagcaggtaaagcttttccaaacaagattgtttttgatgataagcttgggttggctaacacacaagaattctttgatggaaatattccagtggattcttggttaccaatttttgtgaatcgtctatatcctgtaagtcaattacctccatatgctgtcgttgtaaatgttacatgt

SEQ ID NO: 63327 - DNA, 104 bp, Glycine max
attgtcttttaacactcatcaccatggccaagcgtgttgtttccctttgtttcctgaattcttgaaagaagcgttctgcttgaacatgcagatagtgagaaacc

SEQ ID NO: 63328 - DNA, 212 bp, Glycine max
aaataaattttaaaaataaaaaaaaataataaatgaaaggtaataataaaaaaaattgtaggaaaaaaataaataaaaaaataaatatataaaaataaaaataaattaaatattaataatataaaaaaaagggccgtccccttatttataactattttaccccggatataatttccgtacctttttctttatggcttaacaatttttcctta

SEQ ID NO: 63329 - DNA, 87 bp, Glycine max
attcaattcaatctgcctcgatcatggagaggaaaacattggtgtttttgttcttgctcctgcttgtcttatcttctgatgttacgg

SEQ ID NO: 63330 - DNA, 128 bp, Glycine max
aaaactcaaaataactagttgtttattatgatgtgctccggagtaattttttgatcattaaccaaccgtcaagttattattaattactaattaagaaagtgtgatagaatgaattgttgaaagatatc

SEQ ID NO: 63331 - DNA, 242 bp, Glycine max
  unsure (1)..(242): unsure at all n locations
cgtacgtaagctcggaattcggcttcgagggtatactcaaatttgattgaaatcaatacctcagcagccactagggtcaagccttctgtcgtcagtcacgtgtttctccggtcctcgtcttcttctctcagaattcatgatactcaagnttcggtttcttgctgaactcaaactttggttttgaagaatattcgagcctgttaatttttctcataggcctaatcaattccattcactagctt

SEQ ID NO: 63332 - DNA, 67 bp, Glycine max
ctctagccgaatcggctcgagcaggctctgcctgttgcttggatgattcatgataactggggggatc

SEQ ID NO: 63333 - DNA, 113 bp, Glycine max
cacgcgtacgtaagctcggaattcggctctagggaactcattttgattgaaatcaaacctcatcaccactacgtcaagcttctttcttagtcggggtatctccatcctttctt

SEQ ID NO: 63334 - DNA, 276 bp, Glycine max
ctcaagtccaacctacccctttttcttctcccacgcaacttgaccgtcttcttcctcgatcatgtctcacttcaagggcaagtaccatgatgagcttattgccaatgctgcttacattggcactcctggaaagggtattcttgctgctgatgagtcaacagggacaattggcaagcgtttggccagcatcagtgtagagaatgttgaatccaacaggcgtgctcttatggagctgcttttcaccgctcccggtgctcttaaatatctcagtggtgt

SEQ ID NO: 63335 - DNA, 240 bp, Glycine max
cacgcgtcacgtaagctcggaattctgctcgagcctactatgctaatggctttaaagcctattggcttatgtacgcttccgctgatccttaccagataaacgaaatctcatctgtatttccacaagcttcaaatcatgaactccacattgccaaaactttatccttcagtgattgtttatctcaacccctacaatactctactggatcctacaatgacctaattatttcatgtcttatat

SEQ ID NO: 63336 - DNA, 88 bp, Glycine max
cacgcgtacgtaagctcggaattcggctctaacttaaggaattcatcgtagcctacactgactaggctcctagcaccttcttcacggt

SEQ ID NO: 63337 - DNA, 87 bp, Glycine max
atccttttgtgttaaataggtggatggacaaacggactatggcccaatgcactggccgaagtgtataactaatgcctctatctatag

SEQ ID NO: 63338 - DNA, 95 bp, Glycine max
ctgatgatcatatccactctggggcggtcccagacgatgtgatccattcaacaggggcctgcaaatacagtgccctacacacacagactggggtt

SEQ ID NO: 63339 - DNA, 160 bp, Glycine max
gttcaatatcctagtacaccgtattaaagaatttaagatatgctatgatgagagcgcggttcccattactgttgctgggagttggtttcctggcctcagtttctgtctcatttggcttttcgtattgggaaagcctaacccccttctcatctttgtgccc

SEQ ID NO: 63340 - DNA, 106 bp, Glycine max
taccaattgaacttgcgttgctgaagaataacatagtgaagtgtacacgctgcattaactcctcattcttcctctctaccttttcattaataatgaatcttgactt

SEQ ID NO: 63341 - DNA, 64 bp, Glycine max
  unsure (1)..(64): unsure at all n locations
agaatgtgaagaaggtgaaattccacgaccacgaccacgaacacancacccggagagggaactc

SEQ ID NO: 63342 - DNA, 317 bp, Glycine max
ggagaagcatcaactccaattcccatctaaggaaacaaaggcacattctgattacttagtaaaagaatgcagcacttaagggcctccaattcaggatattccctatgttaaatacacagatttggaagattataagcttcaaggttatggttgatgtcgtcattctgaaccacagacatgtccttgatctcgagccactaacgcactcaatctcatctggtgctgcattttcatgcgattcaaatatctctgccaataactgccattatcattgatagagtcgcttaattaatcacacttacgatactacatctttc

SEQ ID NO: 63343 - DNA, 358 bp, Glycine max
  unsure (1)..(358): unsure at all n locations
tacgtaaactcagaactcggctcgagcatcttttgatcaatttncaacattttaactggcatccttcagttttaatcccaaggccatcaactttaatcatcctcccttctgatttctagattccccgttctgctcagatagttaaacataaagcaaattgtcccatcaaactatttcatcatcacttcttccttccattcacacattttcttagtatagtacttgcacaaaatgtcacgtggtgttggtccaactggcagtgacattagcctcccacaagaacaagaagttgatcacaaagagcagcangaacaacattcactcaggaatctccacaaaaccatcaccaccacgcctc

SEQ ID NO: 63344 - DNA, 276 bp, Glycine max
ggaagatagattaaatctcgcagtgtacgtgctctgtagtacattggagaggcagcatctgacacatgatctgtttgagactcgcagaattcgcagtttcgaccaaatgagatcatcatatatcaggatgtctcagtagactatatcatcatcacgtcgtccttggagtgacagatttacctagtacaatagttgcgcaaaatgtcacgttgagtcagtctaatcggcagttgcagttgacctagcacacttcatagatattgatcatacagagca

SEQ ID NO: 63345 - DNA, 198 bp, Glycine max
acgcgtaagtctactcggaattcgggtcgagcacatcgtggtctcatcccgttcccatcaatcactcgtcttccacgttggcgtcgtcctccggatctgagtctctctgagtggtgccagtgcggcctgagtctacgctactgtctacgggggcgtcccatcatctaagtatccgacgatgggtaatgcgtcgccgtt

SEQ ID NO: 63346 - DNA, 247 bp, Glycine max
  unsure (1)..(247): unsure at all n locations
gtttgcaatactagcgatagctgataagagagatacgancatgatcagacaaaaggaagagttgagattccctttgaagaaaaaatggcatccaaaaggcaaactatgaaaccgggtaaaattaagggcgaactgaagaaaagaagaaccaaaccattgggaataattgaaaaaaaggtcaagctgcaaaggagaagacccaagaaatggcccaagctgcaaaggagaagaccccagaaaaaaccca

SEQ ID NO: 63347 - DNA, 132 bp, Glycine max
gttgagagggatccatcttgccaacctatgacgatattggactttgagcttgcatcacgactactctcacacgaggaatctcgagagctgactttccgttgcacgtgagattcctaccctcggctattcgct

SEQ ID NO: 63348 - DNA, 389 bp, Glycine max
gaaagtcttccatagccccccaaaaatgaagagcaccatcttctttgctctctttctcttttgtgccttcaccacctcatacctaccttcagccatcgctgatttcgtgctcgataatgaaggtaaccctcttgaaaatggtggcacatattatatcttgtcagacataacagcatttggtggaataagagcagccccaacgggaaatgaaagatgccctctcactgtggtgcaatctcgcaatgagctcgacaaagggattggaacaatcatctcgtccccatatcgaatccgttttatcgccgaaggccatcctttgagccttaagttcgattcatttgcagttataatgctgtgtgttggaattcctaccgagtggtctgttgtgg

SEQ ID NO: 63349 - DNA, 402 bp, Glycine max
cggctcgagcgagaatctcgacgccatggacaacgaggtcgcacacaagctggcttcttacaccgccccctaagtcgcttctcaagtacatgccctccgcccccgactctgacaacgacatcggcttccgcaagccgcagcgcatcatcgatcgcgacgacgactatcgccgccgtcgcctcaaccagatcatctcgccggcgagaagaccccggacccttcggtgaggacctacgcggatatcatgcgcgaggaggctctcaagagggagaaggaggagactctgaaggccatcgctatgaagaagaaggaggaggaggaggccgccaagggcgcgccgcctcaacagcagcagaaaaggaggaaccgctgggaccaatctcaggatgacggtggtggcgc

SEQ ID NO: 63350 - DNA, 221 bp, Glycine max
ctcacatatgagagatcaagctacgaatcactctctatcatgttcgcctaatcgcatccacaaagcttatgataagaggaatgcattgcagtctccatgatcgatgtgcatgtgtgactcttatgtatattttggactgtattagtccgaccttctgtcagtcgtgtatgctctctaaaagcacgcatagccgtcgtattcgtattaggagttatggtagt

SEQ ID NO: 63351 - DNA, 126 bp, Glycine max
acgcgtacgaatactcgggccgccgattgagctcatcgaaccgggaattaagtcgggacaggaacctgcacgcgttacaactttccctatcatggggtcgtattaggaactgtgacgataatcgtg

SEQ ID NO: 63352 - DNA, 177 bp, Glycine max
gcgtacatcactcggaagtcggctcgagcacaacatcagatcgcaatacagtgtctttgagtacgagagagagagagcgatacaatcagcacaatggcatctgagctaatgcctcgcagagagatcaacagcgatacggtgctagagagagaggtgcacgttgagactgccacatga

SEQ ID NO: 63353 - DNA, 235 bp, Glycine max
acgcgtacgtaaaaccagatattcagctcgaggtcagattcattcagaatacttaacaaggatacaacacgtgatgatttgttcagcaaacattttccaaaaattcatgatctgaattttcggatataaacttggaaccaaaattggttcacggatccgaatagaggcttggcgataaacaagttactttccgcggagatgagttcgagttgaatttttccaatacggagagtcc

SEQ ID NO: 63354 - DNA, 89 bp, Glycine max
gtacgtacactcagaattccgctcgaaggcttgttggtcaagggagggcactttgtcggaatgatcttgagacacttaaagttggaatc

SEQ ID NO: 63355 - DNA, 292 bp, Glycine max
  unsure (1)..(292): unsure at all n locations
gacaaacgacgccttctctttcctccttganaganaacgtagtttccaaacggagcctaacaaagccttcttcagcgtgcgagagaatattaataagccatgcgaactaagcaccgaagtggtgaattgcgacaaattggatttggagagtgaagagttcgattgcgaatcgatgctcgacgaggaaatcgaggaaggaatcgatggcatcatgcggggaagaacagttcaaaaagatgatactaattgcactgaaggtcacataggactgaaacaaaggtctcaatcaccg

SEQ ID NO: 63356 - DNA, 346 bp, Glycine max
aatttctgaagcgtactggatttcattgcgatatcatttgtgtcactggatggactgccaccccaatgcaggatgttcaggttacaattgattggtttatttcctctcaggaatgtgttcccaggacctattgtgttttaaatccacaaaatccttttgtgttaaatacgtggatgggaaaattgactttcccccagggcacttcccgaagtgttaagagaatgcctctttctatagggggaggagctggtgcaaagaatgctattctcatgaatatgccaaatgctgttctttcaatgtggagatattttgttggagatctcgtctttgaagttttcaagatgac

SEQ ID NO: 63357 - DNA, 313 bp, Glycine max
  unsure (1)..(313): unsure at all n locations
taattattaacacttccttagttcaatatggggaagcccttcactctctctctttcttcnctttgcttgctactcttgtcgagtgcatgctttgctattagctccagcaagctcaacgagtgccaactcaacaacctcaacgcgttggaacccgaccaccgcgttgagtccgaaggtggtttgattcaaacatggaactctcaacaccctgagctgaaatgcgccggtgtcactgtttccaaactcaccctcaaccgcaatggcctccacttgccatcttactcaccttatccccggatgatcatcatcgccc

SEQ ID NO: 63358 - DNA, 101 bp, Glycine max
gcacacgattacgaacctaattgaggctgctgatcaagagtatgagaaagaaaagctgaatgagagaattgctaaattgtctggtggtgtggctgtgatac

SEQ ID NO: 63359 - DNA, 218 bp, Glycine max
gctttttctgttccacatgctactgccagatcttctgaaaatgcggaatcctctgcatgatctggaatttgtgttttctttcgcttgttcgtttgtttaattcaataaaggaaattaggcatgaccctcttgttgagtatgctctgcctatttgaaaatttccacacctcttttaattgtcgtaatgatgtgtgaagtgtgtgttattttaaaacatg

SEQ ID NO: 63360 - DNA, 73 bp, Glycine max
tcaattttcaaattttactgcatcttcagtttagtcccatgccatcactttaatggtcttctcttctgatttc

SEQ ID NO: 63361 - DNA, 328 bp, Glycine max
acgttacaatctaccagattccacatctcgccggtgcgggtctaactgccaacatctcgtatcctagctatcatgccatctggcacatatcatcagtcttctcctgcgatacctgccagatgcctacacgctcagagagctgtgaatatgctatcttcacaagtactggttagatacctccatcgctcacctatacagcgctaacttgaactcgctcaccatctgaaaccagaagatcactggatcagcattaggtatggagatattccggagcttaacctgcattaaagctattgattactatttcttccctgaaattacattctaa

SEQ ID NO: 63362 - DNA, 53 bp, Glycine max
cggttacattttactagattccaaaattcttcagggcgggtctaataaccaag

SEQ ID NO: 63363 - DNA, 88 bp, Glycine max
cactcgtacgtaagctcggaattcagctcgaggcgcgctttttcgtttttcaaagtctctaccttatgcccgttgagtctaccttaaa

SEQ ID NO: 63364 - DNA, 71 bp, Glycine max
cacttacatttactacaagtacttccttacaatcggatggaacaactactatggcgggtggtcaaaagcac

SEQ ID NO: 63365 - DNA, 104 bp, Glycine max
gcttgttgctcaattatagcaatttgtaataaagatcttggacgggttctacgtatactaggacggctactactaatcctttacactcttaatctcataatcaa

SEQ ID NO: 63366 - DNA, 275 bp, Glycine max
gtttgaagaacaacatggtggtgctaaaggtgtgtgttgggcttcttttccttgtgggggttacagctgcacgcatggaactgagcttcttcaaaagtgatcagtcatcaagttatgatgatgatgagtattcaaaaccatgctgtgatctctgcatgtgcacacgctcaatgcctcctcaatgcagctgtgaagatattaggctgaattcatgccactcaaattgtaagagctgtatgtgcacacgctcacagccagtacagtgtcgttgtctt

SEQ ID NO: 63367 - DNA, 65 bp, Glycine max
acgcgtacgtaagctcggaattctgctctaggttttttttttttttctccttatttttttctttt

SEQ ID NO: 63368 - DNA, 88 bp, Glycine max
cttaaacactcttcagtcatcaccatggccaagctagtttgttccctttgttttctgctttgcattgtctgctgcttctctttcattt

SEQ ID NO: 63369 - DNA, 232 bp, Glycine max
acgtaacctcggaattctgctctaggcaaagtgttatactcattcttcacttgcttacaacattttgggcgagatataaatgaacacagcttgaaccaatattgtggtatgttaaatatactacttcatccattaattatttttatttttcatattttcttatattttatttttttctttatttttatttttttttattttttttttatttttattttttatttttttttat

SEQ ID NO: 63370 - DNA, 254 bp, Glycine max
cttgatccccactctgttccatcagaagaactttccacttggtttgtatacattgtgcaacggctaaatcctggtattcacaacttggctgccccaacacttcataactcaagttttgcgggttcttgctctccgatattgcaacgaaattcttaatgggatgcacgttctttcttaaggaagtattttggctgaaattattattgcatgggttatcataattcaaaaccagatttgatgataaatcttgagtg

SEQ ID NO: 63371 - DNA, 287 bp, Glycine max
gtcacatatgctattaagggtgagatatatagaaaagcaggtgagaatagatagaaatggagaactttccagttgttgacattgggaacccttatatttaatagatatcttctacctttgatattatcaaacattccttttataactttggtttcttatcttattttttttcttttctttttcttttcttttatctatcttatctttttattttattttttattgtttttttttttttttttttattttttttcttatttattttttttttcctttttttcttattt

SEQ ID NO: 63372 - DNA, 177 bp, Glycine max
taaactcggaattcagctctaaacataatacatacatacatagaagaataacataataacaagtatgcaatcctcaaacgataggatgaatcacatgtccattcctaccaaagaacaagtccacatctataaatccaaaataaactagaacgcagacaaatcaactgcaataacata

SEQ ID NO: 63373 - DNA, 140 bp, Glycine max
cattgaccaattactaccatttcaaatcttcttctgtccgtctcattccttctttttagtggctacttcactcttacaaatcatgcacatcaaattaactgccttatccaaatacttaataccctctaaccttataacca

SEQ ID NO: 63374 - DNA, 107 bp, Glycine max
acgcgtacgtaagctcggaattcagctctagcgaaacattttttccagtatatacaatttcatgtaaatgctatacttaatttgaatggatgatttattatcattac

SEQ ID NO: 63375 - DNA, 65 bp, Glycine max
acgcgtacgtaagctcgtaattctgctctaggttcattgtttacaataccaagttattttaacat

SEQ ID NO: 63376 - DNA, 171 bp, Glycine max
acgcgtacgtaagctcggaattctgctctagatttgcccgtgtctctcactcaatcactcactcattctctcgtcaaattctaatcttcgcggatcgacaacatctctcttctatactcttaaaacttactttcaatttactttaactatctactcaattcttatttcatt

SEQ ID NO: 63377 - DNA, 427 bp, Glycine max
acgtaagctcggaattcggctctagaaaacctaatcttacaattagaaacatataattgaataatgtagggatttgatcgttgaaagtgcgtctaagaaataaagccgtatagtctatttatttaacattttcaaacattttttcttttttccaatgctttcattgatattaccattcctcttttactaaattttattttatataatttcatattttttttttcatattattatattatttatttttattatttttttatattttttttttatttttattatttttttatttatattttattattattttttttttatttattttattatttataatttttttttttaatttattttaattttttttttatatattttttattttattttattttattttattaattttttatatttttttttttta

SEQ ID NO: 63378 - DNA, 290 bp, Glycine max
cttaattattaacacttccttagttcaatatggggaagccgttcagtctctctctttcttgcgctttgcttgctactcttgtcgagtgcatgctttgctattagctccagcaagctcaacgagtgccaactcaacaacctcaacgcgttggaacccgaccaccgcgttgagtccgaaggtggtttgattcaaacatggaactctcaacaccctgagctgaaatgcgccagtgtcactgtttccaaactcaccctcaaccgcaatggccttcacttgccatcttactcacc

SEQ ID NO: 63379 - DNA, 389 bp, Glycine max
tcggggaattccaattccacattttcaagaaataaggaggcaaaagatgttcatatatgaattggaattatgttgttttcttattaggcctatcctgaagccaaaggaaatgagatcggaattcctcggggaattccaattccacattttcaagaaataaggaggcaaaaatgttcatatatgaattggaattatttgttttcttattaggcctatcctgaagccaaaggaaatgagatcggaattcctcggggaattccaattccacattttcaagaaataaggaggcaaatatgttcatatatgaattggaattatttgttttcttattaggcctatcctgaagccaaaagaaatgagatcggaattcctcgggggtaccgagctcg

SEQ ID NO: 63380 - DNA, 169 bp, Glycine max
acgctactaactcggaattctgctctactgaatcaaacatggcttcttccaccatcacctccgcctgcctcacatcacaccctggatgcctcttcaacaaatcatcatcttcatcattcccctccttccatgccacccccactctccacccccacaagccactcacctc

SEQ ID NO: 63381 - DNA, 210 bp, Glycine max
cacgcgtacgtaagctcggaattcagctctagctgatgcactagtctctgccactgatgccattaacagtagggtggtcccttaattattcagacttgctagaatatatcgttcctttgctaataataaatcgttttcttaatttgtggtgtcgtttattaaatttcttaacatcttaacttatattatatatatttacatacactttat

SEQ ID NO: 63382 - DNA, 290 bp, Glycine max
ggtgcatgatagttcagtgtctacaataccaggtggtttggtcattggtgttaagttgacgaccataaacaatatgtgtgcatatgggctcaatcctggtatttcaggttctcgtcttttgggcaccattcctcagtccatttcacagcaaactgtttggaatcaaatggcaacagtgagaacaccattgaattttgattctagcaagcagagcttttgtcaattctctattgatcttcttggtggatgaattttagtggacaaaactggagattggatcacacttatac

SEQ ID NO: 63383 - DNA, 107 bp, Glycine max
ccaccgccatgtcatactcgtttctatgatcccttttttgagttagcaaaacacccttctgaggctgggaaatggatggtcacggatgaagatgatgatggatcata

SEQ ID NO: 63384 - DNA, 453 bp, Glycine max
ccttaacctcgaatttcgcttcaactttaataattaacttttcctggctaacacacataaattcgttccgtcaaattttccagtgggttgcttattaccttttttcttcaattttttctattctttactttaattactttcttaaccttcttttctaattctttattttttttttttatttttttttttattctttttttcttattttttttctaattctttttattatttaagatatttctttatattctttctttatcttatataattttttttctatttttttatacttttttttcttttttttttttttctttttttttatttttttatacttttatttttttatatttattttctttttatttttattttattttattttattttattctttttcatatatttatttttctttatttttttttttatttttttttcttaatttttttt

SEQ ID NO: 63385 - DNA, 142 bp, Glycine max
cctctaactcgaattcctcaacaccttgctttctaccatcccctaagaatgtcttctctgatctttaccctttttctgctttctttctttatccatatccccctcaaccatacctgtgtcacctcaaatatgtcccaggctc

SEQ ID NO: 63386 - DNA, 119 bp, Glycine max
gcgtacgtagagctcggaattctgctcgtagcttctacccttttaacaaagatgcttttgtgtcacgtatgtatacacccttcttcgggccggactcaccatccacatattctctcttc

SEQ ID NO: 63387 - DNA, 186 bp, Glycine max
acgcgtacgtaagctcggacaacgtcctcttcactatacattctggtcttccataatggaagcacaacaatgaatagactcctattattgccggttctattattcacaccaacatcttatacaaccatctctaccatattcctatgatattctatcttactattaaccataatcaatattttctaa

SEQ ID NO: 63388 - DNA, 181 bp, Glycine max
ctacaaactcggaattctctctaaagaaaactttttccataacaacctaataaaattagtaagactaacttgaacactaggttgctactttacaccttcacctcatacctaccttccaccacctcccataacttactctacataaatatcaatccaattcaaaactattacatatactact

SEQ ID NO: 63389 - DNA, 410 bp, Glycine max
aaaacactattttaaaacttattcagtatatggattaaatgcaaagatataaacattagtggggtggatgctaaaatttttatttattaaattataaaaaataattttaattataaattaaatattattaattttaaataattaaatatttaaaatattacaataatatatataatttaaaattattataataaaatattattaattttaaaaatataaataatattataatatattaattatataatattaaattaatatattttatattatatatttattagttaatatttaattttatatatcatatatttaatatatataaatatatatattaataatttttattatatatttatataatataaataataaatatatataaataattatatatatataataaataa

SEQ ID NO: 63390 - DNA, 197 bp, Glycine max
cacgcgtactaactcggaattcggctctaaatattatacctaatatcatattaactaattaatagtaaagatttaaaattggccgtgagacataatagcaagttattgaaaggcttatcatttaaatttaaacattaaacataatataaaaatgctgactataaattattagaatattatattttatttaatttatt

SEQ ID NO: 63391 - DNA, 156 bp, Glycine max
acgcatacataagctcggaattcagctctaagagatattctttaaaaagttatattgaaatttacacgatagaaatttcttacagcttggtcgactcacctccatactacaacatctctttaatcatattcatatccatataaatatactataaaa

SEQ ID NO: 63392 - DNA, 150 bp, Glycine max
aaaaaaaataaaaaaaaaagaaaataaaaaaaaaagaaataaaaaaaatatataaataaaaaataaacaaaaaaaaataaaaaaataaaaaaaaaagaaaaaaaagaaaaaaaaaaaagaaaagagagaaagaaaaaaaaaatataatac

SEQ ID NO: 63393 - DNA, 218 bp, Glycine max
ttatgacctcgcacgcacgcgtacttaagctcggaattctgctcgaggcatcttattacttgaatcagagtgcaaccatatcagggacagcatcatcatcaacagcggtcgttgaactgctgctctaatttgaggcacaatgatattgtacaaattctagctttgctcttaaaccttataccctgtacatagaatccaaattcatcataattatgcat

SEQ ID NO: 63394 - DNA, 79 bp, Glycine max
acttaaactcggaattcatctcaacccaaatccctttatcttctctctcttgcaaaacctagtaggatctcttccctca

SEQ ID NO: 63395 - DNA, 154 bp, Glycine max
attcttctctatcacacttactatttacaacacttacttacaatcaaaagcaagaacaactatatcattttgtggaaatcactactatgatcaatatctcaaggttaacaaatatatcaacatttataatcatacctactaatacagctactct

SEQ ID NO: 63396 - DNA, 277 bp, Glycine max
cgttgacagctttttagaatggtgttgcgtcaagagtatgagaggaatatagtgtagtgtgcaaccttaaaaaaaaaaaaaaaaaaaaaaaaaaaaaaaaaaaaaaaaaaaaaaaaaaaaaaaaaaaaaaaaaaaaaaaaaaaaaaaaaaaaaaaaaaaaaaaaaaaaaaaaaaaaaggggggcccccaaaaaaaaaccttgtaaacccgaaaataaattccaaaccggaacttgaaggcttacaaatttcccattaaggaaacttaataaaacctg

SEQ ID NO: 63397 - DNA, 333 bp, Glycine max
cacgcgtacttaagctcggaattcagctctagaaaataaaatttaacaaaaaaaaaaaaaaaaaaaaagaaaagaaaaaataaaaaaaatagaaagaaaaaaaaaaaaaaaaaaaaaaaaaaaaaaaaaaaaaaaaaaaaaaaaaaaaaaaaaaaggccctcccccaactatgaacccttttaacccgaaatttatttcaaaacctttacctttatccttacaattttcccttatattaattcttttaaaaccttgccatactcatggctaaaccttttcccttaataaaattttatcctattcaaatttccccaaactatataaccctaaac

SEQ ID NO: 63398 - DNA, 166 bp, Glycine max
acccgtacgtaatctctgaattcgctctatcacactttttaatttataactccactatatcctttctttgcctggtccaaatcacaaaatggaaagacaaacctttttatataatttctttaatacactttacttttttacaccacactaatccatattaaacatt

SEQ ID NO: 63399 - DNA, 92 bp, Glycine max
gctcactgatcgagctctcttgcgccgaagatgaacgggggtaaggtatcttcctaagctgggggagggatattgaattattgatttttttt

SEQ ID NO: 63400 - DNA, 234 bp, Glycine max
  unsure (1)..(234): unsure at all n locations
atagattatgactccatcgcgnctcgtaactcggaattcgctcgagtgaatacatttattgaaacgcctgaaaatgccgaaagtggtgttgaacccgtgtgggcacaaacagaacgcctccagaaagcaaaagagatctgaaatcattgcaagtaaatgggatgagtatttgatcaaatgcattcaagtgatccctctaaaagggcaattaccaatgaagtatttcagataaaa

SEQ ID NO: 63401 - DNA, 61 bp, Glycine max
acgcgtacgtaagctcggaaaccctaggagagccaccgacttcaactaccgtccatgtacg

SEQ ID NO: 63402 - DNA, 135 bp, Glycine max
tgattagtcattatcatcttcataattcatttaccgtattgctttctttattttcggattagggtaactaacatcaatttttgtattttgcttcagtgattaattgtcacctctatttcaaagtctcatcttttt

SEQ ID NO: 63403 - DNA, 87 bp, Glycine max
cacgcatacgtaagctctgaattcttctctagtgttaataaatatatctacaaattttcatcattctagatgcattaaaaaaataat

SEQ ID NO: 63404 - DNA, 133 bp, Glycine max
  unsure (1)..(133): unsure at all n locations
gtaagcctcgnaattcatgctcgagcgcaccagtcttcacctcacgaatatttcttgttgtttggagcggatccgtataaaaactnctgtaagacatggttggtattaccaggaccctctcttacagtgtgat

SEQ ID NO: 63405 - DNA, 386 bp, Glycine max
  unsure (1)..(386): unsure at all n locations
gagtgtccttaacaggagtagttgtcattgtataatagtaataataaatctaattaattaaaaaaataaaagacatattaaaaaatcataatattttttatgaaatttaaaatattaattgtatttgttaatacttgtatcaaaatcttaaactatcttataaaattgaatagagagagtatactactccaaacttaaatttaattaaanaaatttaatcaatttttatgttaattaaacaaatcggtttatatcgttaattttactatttgcatttaagaaatttttttcttctaaattagtaactttcattaaaatctgatattaataataaaaaaatgacacattaaaaatagaatctcaaataatanaaaatatttttttta

SEQ ID NO: 63406 - DNA, 392 bp, Glycine max
  unsure (1)..(392): unsure at all n locations
ctcgtaaatgtgttacgagaattgtatttgcacagtccagaggaagctcgccaattgagaaggaaagctctctctcgtattgaatggctgcaaaaagctgatgtgcctactatagcacagattgaagagttccattcgatgcagaggatgatgaatgctcctgattcaaatgataacatcgatctactgttgagcattgatctgttgggtttacaaggagcaggtaaagcttttccaaacaagattgtttttgatgataagcttgtgttggctaacacacaagaattctttgatggaaattttccagtggattcttggttaccaatttttgtgaattgtctttatcctgtaagtcaattaccttcagaagctgtncgtgtgaatgttacatg

SEQ ID NO: 63407 - DNA, 396 bp, Glycine max
ctcgtaaatgtgttacgagaattgtatttgcacagtccagaggaagctcgccaattgagaaggaaagctctctctcgtattgaatggctgcaaaaagctgatgtgcctactatagcacagattgaagagttccattcgatgcagaggatgatgaatgctcctgattcaaatgataacatcgatctactgttgagcattgatctgttgggtttacaaggagcaggtaaagcttttccaaacaagattgtttttgatgataagcttgtgttggctaacacacaagaattctttgatggaaattttccagtggattcttggttaccaatttttgtgaattgtctttatcctgtaagtcaattaccttcagaagctgtcgttgtgaatgttacatgtggt

SEQ ID NO: 63408 - DNA, 215 bp, Glycine max
ctaagaactcgaatagtgcattcttaactatggctcgctgctactgcgacaggctagaagcacacgatgacagctggtactatttctacgttggcaaatcctcaagctgggtacgaatcatggaagtcgatacggtgcttaccacatcagctatcactgcctaaccctatgaatctgcctaagatggtcaaaagcctgtgacgtctgtaaatgca

SEQ ID NO: 63409 - DNA, 365 bp, Glycine max
ctcgcaaatgtgactcaagcatcgcatcgggacacgcgcgcactagctcgccaagctcgaatgctagctctctgtcgtatagaatggctgcaggcagctgacatgcctactatagctcgaatcgaagaactacatacacatgcaacaggctatgaatgctaatgattcatacgataacatacacctactgctaaccattcatatgctgcggaataatacaactagcaagcatggactttccccacatgattcattgtcatgataaacatgactaccctagcacacattaactacttgatggaaatgcttcacacctatctatgaacataccaatttgtgtcaaatgatctttatcctgtatgcca

SEQ ID NO: 63410 - DNA, 399 bp, Glycine max
cagttcagtgtctacaataccaggtgattttgccattggtggtaagttgacaaccataaacaatatgtgtgcatatgggctcaatcctggtatttcaggttctcgtcttttgggcaccattcctcagtccatttcacagcaaactgtttggaatcaaatggcaacagtgagaacaccattgaattttgattctagcaagcagagcttttgtcaattctctattgatcttcttggtggaggaattttagtggacataactggagattggatcacacttatacaaaattctccaattagtaacttgatgagagttgctgcttggaagaaaggctgattaatggctaagattgtgatgtctgggaatgcatcactcaaaaagagtgattgggcctcattggt

SEQ ID NO: 63411 - DNA, 392 bp, Glycine max
ctcgtaaatgtgttacgagaattggatttgcacagtccaaaggaagctcgccaattgagaaagaaagctctctttcgtattgaatggctgcaaaaagctgatgtgcctaccatagcacagattgaagagttccattcgatgcacaagatgatgaatgctcctgattcaaatgataatattgatctactgttgagcattgatttgttgggtttacaaggagcaagtaaagcttttccaaacaagattgtttttgatgataagcttgtgttggctaacacacaagaattctttgatggaaattttccagtggattcttggttaccaatttttgtgaattgtctttatcctgtaagtcaattaccttcagaagctgtcgttgtaaatgttacatg

SEQ ID NO: 63412 - DNA, 177 bp, Glycine max
ctcaatactccatagtcttgaaatagggccttaaatgtgtcctgggggacactggcatcaatgggttcctcaaatccactaaccttcagctccttgacatgagatctgcatcacacagggatttctaaccacgcacaatgtggaactgaagcatctcaaatagcatacttattaagc

SEQ ID NO: 63413 - DNA, 339 bp, Glycine max
ctagagtctcacaaaattcttgcgttttcggactatggcctcgcacgtcaacattggctatcacacttcctcttctccgtatactaactgcactaagattctctcacacctgaagctgactagtaactcctatttgcactcgccactcatgcgcgacatgactgttctggcaaccagcgcagcccattacatggacgctcacacctgtctgtccccagatatcgctcgtacgttgcagaaccacaatagtacacactttcaacaccttctactaggtgtctatccacagtgccaggttgcttgtcctccaatacatgaacagctgttatcatcacaaga

SEQ ID NO: 63414 - DNA, 301 bp, Glycine max
cacaaaagtgtctactaaagcaagagaggaagtagatagtgtagaattctccgcagtgaacaatgagaatacatctgagcgtacagatagcgaatgaggaactggcattccatgtaacaaaattgagatgccctgacactgaaatggctggtatcatgtggcacctgagagtacaccatatggatgtgatgaaaactagctaagtcgaaggcaattggcctatgagcaaatcagtggcagaaaatatgaggtcataaatataaattgctatctacacatacataatgctacaaaaaataac

SEQ ID NO: 63415 - DNA, 198 bp, Glycine max
cactacagtgtctcacataccccgggagtaactcattagtgtacatttgagcaccatgcccgctgagggcccttatccgctcactggccgcatttcaggtacttgcacatccgctcaccatacctgagaagctcttacaataacctggctgaagtcaaatgtcgccagacactacacgactgtattgttacgatgcct

SEQ ID NO: 63416 - DNA, 430 bp, Glycine max
  unsure (1)..(430): unsure at all n locations
aaagacctattaccatgcatgcacgcgtactttagctcatcatntcggtcaatgcccaattcacattttcaagaaataaggaggcaaaagtgttcatatatgaattggaattattagttttcttattaggcctatcctgaagccaaaggaaatgagatcggaattcctcggggaattccaattccacattttcaagaaataaggaggcaaaaatgttcatatatgaattggaattatttgttttcttattaggcctatcctgaagcccanaaaaaggaaatgagatcggaattcctcgtggaattccaattccacattttcaagaaataaggacgcaaaaatgttcatatatgaattggaattatttgctttctttattaggcctatcctgaagccaaaggacatgagatcggaattctcgggggtaccg

SEQ ID NO: 63417 - DNA, 387 bp, Glycine max
atcgcccagtacaaaaatccttcagtgagagttggttcacattttgctcttacagagataaaaaggaaattgaaatgtgctatgggaaaggagaggcatggaaaccctgaattgatcccacgcaaactccccgttgaacgtcaaaataagctgccaagaggaaaatgcaaagataatgctggaatgagatctcctaataaagaccatttcttcattgaaaaaaaaaattacaagacctatgtttaatgtagtgaaaggaaacaagaccggtacaatgaaagactctgaattgaatgtggaacatgaaagtggtattcccaatcaaagtgtttctaacatatatattgaggctaggaaacatctgtgtgagatgctagataatgctta

SEQ ID NO: 63418 - DNA, 65 bp, Glycine max
aaaaaaaaaaaaaaaaaaaaaaaaaaaaaaaaaaaaaagaaaaaagaaaaaaaaaaaaaaaaaaa

SEQ ID NO: 63419 - DNA, 214 bp, Glycine max
ttcttgttttgttgagaagagagaatggcgatgtctggatcatcataccttatcacgttctatgtgaaaccttgcattttcggctctcctccgagatccgcggtggttcggaattgtgcgaagtcaacggcagcgacaatatcaacgagttggagcctgtacagttggagggcgaagaaagcgcttcaacttccggagtccccagatgcgaaaa

SEQ ID NO: 63420 - DNA, 327 bp, Glycine max
attcacgcgaagatagtatacaccttgatcaggcctgatggaaccaggaaggcctatgtcaggttgtcacctgattatcacgccttgtatgcggtcaacaagattggaattatctaaactaatatatggtcttaccaaagtagattcgtgtttagatggtagtttgctatggagtgtagaggggagacatttgaagcaacattaagttatttaaaaatgctcggttgggtatctgctgtattctagatcaatcggaattatatttactcatgttacattaccaaaaggacatctgaaggccacaaaccctatatgggactcgttgat

SEQ ID NO: 63421 - DNA, 389 bp, Glycine max
gaacaccattgaattttgattctagcaagcagagcttgtgtcaattttctattgaccttctcggtggaggaattttagtggacaaaactggagattggatcacacttatacaaaattctccaattagtaacttgttgagagttgctgcttggaagaaaggttgtttaatggtcaagattgtgatgtctgggaatgcagcagtcaaaaggagtgattttgggggcctcattggtacaagtgtttttaacaaacagcaacagtacagagcattttgatgcatgtaagtggacaaaatcagaaccacattcctgggaattaatcttcccaatagaggtatgtggtcctaataatggttttgaaatgtggagttctgagtgggcaaatcaaac

SEQ ID NO: 63422 - DNA, 174 bp, Glycine max
ctttattctctctatctctatatatgctgtgcattctggtggcatgacagattgagacacacttctaattagccgcctacttatctcaattcatctactttctcttcaattcttcaaaagggtcgactccaattcttcaaaacggtgtaactttgctggagtaaagatgggtgg

SEQ ID NO: 63423 - DNA, 380 bp, Glycine max
  unsure (1)..(380): unsure at all n locations
ctcgagccgattcggctcgaggcaagcagagcttttgtcagttttctattgaccttctcggtggaggaatcttagtggacaaaactggagattggatcacacttatacaaaattctccaattagtaacttgttgagagttgctgcttggaagaaaggctgtttaatggtcaagattgtgatgtctgggaatgcagcagtcaaaaggagtggnaaattgggcctcattggtacaagtgtttttaacaaacagcaacagtacagagcattttgatgcatgtaagtggacaaaatcagaaccacattcctgggaattgatcttcccaatagaggtatgtggtcctaataatggttttgaaatgtggagttctgagtgggcaaa

SEQ ID NO: 63424 - DNA, 176 bp, Glycine max
ctcaatgtctagcatcgcttgctcaaagtcctgaaaatagggttatctgcgctgccacatgcatgagagcgcgacaggttttggctaaattgagactccctccatctcaaccgcgctcacctggtgaaaaggttcatgctctgcatcctctatcgcatctaaccatgcataactac

SEQ ID NO: 63425 - DNA, 173 bp, Glycine max
ctcagagtcgttcatcgctaccccagagcgctaaaaatatggctaaatgcgatggcacatgcatgagtgagtgacaggttgagggtggcttgagactcgcgccacccggccgcactcacatcgtgtacaggtgcaatctctgaagactatatcgaatctgaccaggcatagct

SEQ ID NO: 63426 - DNA, 133 bp, Glycine max
cgatggtatcacgatcgccacacatgcttcgaattgaagtgaaatgacacattgcgagtccatgctagatgcagcgtcacagctgcattggacggattaaagagaaatgcatccgatgggacgaccagtaaac

SEQ ID NO: 63427 - DNA, 379 bp, Glycine max
ctaactctgtatagcccgaacgaaagaaagaaggaaatggggatcacagccttcaacggaaccggcttcggatatggcttctgcataggttgcgagttcggtatcggatggggtttcggcggtatgccattgaactcagtgggtcttggtgcaggtagatgctgtcgcgtaggactaggacttggttgatcatttggtgctgcctttggtagcaagtatcgatccttacgggtcacatttacaggagtggactgtgatatgaaggagcaagttatcagcacggtaatgtgcattcccggatcacaagttacaagattacgggcacgtttggacaatgtagaactctagttggcctatggatacacattgaatgtgaact

SEQ ID NO: 63428 - DNA, 137 bp, Glycine max
aatgaataaaagaaacaaaggcttaaatgccctttgttaagtgtagaataacgggtatagtaactatgtacccttgtgtaatgagtcactcaagtacctatgcgggaaaagcataaataaaagaagaaattccaata

SEQ ID NO: 63429 - DNA, 61 bp, Glycine max
gcttcatgtcattatctgtgcatgcgctatgcttatgctgacaatctcgctaatgagtcac

SEQ ID NO: 63430 - DNA, 325 bp, Glycine max
gcagattgaaccagacatgaattcaaggtttcagcttttgagtaccactaccaatggtgattttgttcaagggaaagatctcgcaatggttaaagttaatgtagcatgtgctgctgttggcttgacatcaagttacactccaactccattgttggaatctggtttgcaaaaagacagagggttaattgtggagtattttggaaggatgtcttacgttgctcataacgttaatcagccccaagagaaagatttgttggagggaaatttttcctttgatattaaatctcgctctagattggaaaaagtttcctctacaaaagcacaa

SEQ ID NO: 63431 - DNA, 364 bp, Glycine max
cacttatacaaaattctccaattagtaacttgttgagagttgctgcttggaagaaaggctgtttaatggtcaagattgtgatgtctgggaatgcagcagtcaaaaggagtgattgggcctcattggtacaagtgtttttaacaaacagcatcagtacagagcattttgatgcatgtaagtggacaaaatcagaaccacattcctgggaattgatcttcccaatagaggtatgtggtcctaataatggttttgaaatgtggagttctgagtgggcaaatcaaacttcatggcatttgagtttccttattgacaattccaaacagtctacagcttttgatattctcttgggaatctctcaagattt

SEQ ID NO: 63432 - DNA, 326 bp, Glycine max
cttaaacactcatcagtcatcaccatggccaagctagtttgttccctttgttttctgcttttcagtggctgctgcttcgctttcagttccagagagcagcctcagcaaaacgagtgccagatccaaaaactcaatgccctcaaaccggataaccgtatagagtcagaaggagggctcattgagacatggaaccctaacaacaagccattccagtgtgccggtgttgccctctctcgctgcaccctcaaccgcaacgcccttcgtagaccttcctacaccaacggtccccaagaaatctacatccaacaaggtaagggtatttttgg

SEQ ID NO: 63433 - DNA, 398 bp, Glycine max
cttacactctatgttactatctcactcacatgcagtatttgtgtagttcattcttttatggctgatgacaccagacaggatttacctgctcaagactatgatggaacacccatctatccagcatccgaccatgatacgtcattttacgatcatgcatcctaacaaagagcatctaaatctactgatccacctgaagctggctcgatcacagcgaccacttggcatttgtctgccatgtctggctcacatcaatgatccaagcatcaaggaatagcatgaccagatagcaactgatccatgattaagccagattgctgaaccgctgccgactactgaccaaggcgatgcacaagacactatgcctaactgtgatcatcaaccatatatttactccatgc

SEQ ID NO: 63434 - DNA, 259 bp, Glycine max
tctatgacatctcattcactcttacttaagtctcgtaactcctctcgatctccacttcccctaaattaatcccttacgtttcctagctaccttaccacctttccctatactaacatcacattatatctactctcatatcattatcatacctaactccctatgtactaattaacataccactcacaattcccactacaaccttactatcctcactcatactattccaacacctctccgcttactaattactctatctaac

SEQ ID NO: 63435 - DNA, 325 bp, Glycine max
aaaaaaaacaaaaacaaaaaaaaaaaaaagaaaaaaaagaaaaaaaaaaaaaaaaaaaaaaaaaaaaaaagaaacaaatgccaacgaacaaccaaacgaaacaaaaaggcccaagaaaacaaacatggaccgtaccctactagcttaccgagcaaccgtacactgagcatgttcagaacgcactagtaaccatggtcataaattgcttcccaagatacaattgaatgccgataccaattacacacaaacattcaactccagactcataaattttacatcctaaactgcctaaaaggcgaactccctgaaattattaccgcttcac

SEQ ID NO: 63436 - DNA, 284 bp, Glycine max
tagattttctagtatataggtttaatgtatgtagccggtgccccataactgactttggtataatgggaactggttagtgtacaaagcaatatatagagaagacactgaaaatacatgtataaaaaaaaaaaaaaaaaaaaaaaaaaaaaaaaaaaaaaaaaaaaaaaaaaaaaaaaaaaaaaaaaaaaaaaaagaaaagaacatacaaaaaaaaaaaaacaagaattaaaaagacgataaaaacgattagaaaggaagctaaaaaaagaagatgcgggtgcccc

SEQ ID NO: 63437 - DNA, 349 bp, Glycine max
tctctccattggtccttaaacactcatcagtcatcaccatggccaagctagttttttccctttgttttctgcttttcagtggctgctgcttcgctttcagttccagagagcagcctcagcaaaacgagtgccagatccaaaaactcaatgccctcaaaccggataaccgtatagagtcagaaggagggctcattgagacatggaaccctaacaacaagccattccagtgtgccggtgttgccctctctcgctgcaccctcaaccgcaacgcccttcgtagaccttcctacaccaacggtccccaggaaatctacattcaacaaggtaagggtatttttggcatgatata

SEQ ID NO: 63438 - DNA, 400 bp, Glycine max
agaaagtcttccatagccccccaaaaatgaagagcaccatcttctttgctctctttctcttttgtgccttcaccacctcatacctaccttcagccatcgctgatttcgtgctcgataatgaaggtaaccctcttgaaaatggtggcacatattatatcttgtcagacataacagcatttggtggaataagagcagccccaacgggaaatgaaagatgccctctcactgtggtgcaatctcgcaatgagctcgacaaagggattggaacaatcatctcgtccccatatcgaatccgttttatcgccgaaggccatcctttgagccttaagttcgattcatttgcagttataatgctgtgtgttggaattcctaccgagtggtctgttgtggaggatctacc

SEQ ID NO: 63439 - DNA, 223 bp, Glycine max
gaaaaatctttccttacacttgccctagagatgagtcaaggctgtgctcaatctgatgcacggctacttctgagaaggctgaagtctcttaacccttcacaagttcaaagacctacgggtccaattgaattatccccgcaattacttgaatggctagcatttgctaagttggctggtacaaaagttgcgctcaaaattgtcacaccgaccaagcccataaaat

SEQ ID NO: 63440 - DNA, 309 bp, Glycine max
acttcattgtgagtgtattttaatcttctttgtgttgattcattgtttctccctaaaccaaccctctctttgtccctcttcttccgtaaatcttaattaaacacccctcaaggcctcaaccaaaaaacaaaaagcatgaaaaagctcaatctaatacttagtaagtgcaagagcttgtcaaggcatctaggaagatcttcatcatttaatagcctaaggtccaagtttgctaaggaagagttacgggaaggaaatggcatgcaagaaggtgaacattgtgaaactgtattatttgttggcagcacaagg

SEQ ID NO: 63441 - DNA, 332 bp, Glycine max
gggcaccattcctcagtccatttcacagcgaactgtgtggaatcaaatggcaacagtgagaacaccattgaattttgattctagcaagcagagcttttgtcaattttctatcgaccttctcggtggaggaattttagtggacaaaactggagattggatcacacttatacaaaattctccaattagtaacttgttgagagttgctgcttggaagaaaggctgtttaatggtcaagattgtgatgtctgggaatgcagcagtcaaaaagagtgattgggcctcattggtacaagtgtttttaacaaaaaacatcagttcaaaacatttttatg

SEQ ID NO: 63442 - DNA, 345 bp, Glycine max
ctggagtggaacgccactttggaatgctggaactggggcagtgtcaataggatccaatgcttgcctttcgccgacttcctcgactaataacagttgctgctcaggcaatggctcaccaacacttggaaaacacactagagatacagtttgcactgatgaagagaaatcagaaaagtgtgttttggttccaaagaccattagaattgatgccccaaatgagggcctcaaaagtcctataataagagctacattagctatcaagcttgataagcagcaatttgtatcaaatggtgatattttgaaaaaaattgaaccaaaagaaggcaaagatcgtgtgttgggtgc

SEQ ID NO: 63443 - DNA, 343 bp, Glycine max
tctcggtgaattccaattccacattttcaagaaataaggaggcataggtgttcatagatgaattggaattatttgttttcttattaggcctatcctgaagccaaaggaaatgagatcggaattcctcggggaattccaattccacattttcaagaaataaggaggcaaaaatgttcatatatgaattggaattatttgttttcttattaggcctatcctgaagccaaaggaaatgagatcggaattcctcggggaattccaattccacattttcaagaaataaggaggcaaaaatgttcatatatgaattggaattatttggtttcttattaggcctattctg

SEQ ID NO: 63444 - DNA, 380 bp, Glycine max
tcggggaattccaattccacattttcaagaaataaggaggcaaaagggttcatatatgaattggaattatttgttttcttattaggcctatcctgaagccaaaggaaatgagatcggaattcctcggggaattccaattccacattttcaagaaataaggaggcaaaaatgttcatatatgaattggaattatttgttttcttattaggcctatcctgaagccaaaggaaatgagatcggaattcctcggggaattccaattccacattttcaagaaataaggaggcaaaaatgttcatatatgaattggaattatttggtttcttattaggcctattctgaagccaaaagaaatgagatcggaatttctcgggggttcc

SEQ ID NO: 63445 - DNA, 134 bp, Glycine max
cgattttggttgttatacattttcatccgttggttcgcttgtttgagaaaatattaagtggtgacatattatgtttttgtgaatcttgatactttaaaatatccagattttccattaaataatttttgatgatc

SEQ ID NO: 63446 - DNA, 401 bp, Glycine max
  unsure (1)..(401): unsure at all n locations
ttcttctcttgcggctagggttttagcgcagcttcttctagatttaaggaagatgggtaaggaaaaggttcacatcagtattgtggtcattggccatgtcgactctgggaaatccactaccactggtcacctgatttacaagcttggaggcattgacaagcgtgttattgagaggtttgagaaggaagctgctgagatgaacaagaggtctttcaagtatgcctgggtgctggacaaacttaaggctgagcgtgaaagaggaatcaccattgatattgctttgtggaagtttgaaacaacaaagtattattgcacagttattgatgcgcctggacatagggatttcattaagaatatgattactgggacatcccaagctgactgtgctgntcttatcattg

SEQ ID NO: 63447 - DNA, 355 bp, Glycine max
tatgcacgctactaagctcggaatcggtcggctttaacatcaccttcccaaaacctccctccaacgaaccctacgctattttctccaactcaatcgcatggccgaggctgcacgaaccgcgcataaacccgcgccgcacccgatccaacccaaacccgacgataaaaccccgaatccggcgaaggagattccgccgtcgtcggagaagccggagcccggcgattgctgcggcagcgggtgcgttcgatgcgtctgggatgtgtactacgacgaactcgaagaatacaataagcgatacaaacagggctaaaatgtacgatttatataatcccgaagattaattcggagatttact

SEQ ID NO: 63448 - DNA, 408 bp, Glycine max
ggcgggggttgatttggaagaaacccagctaaggtaattcgtcgcaacccctaactaaaccttcaaaggatcatcatgggcagtcacaatgctttggctgccactttcggaatattaggtaattaaccacctacacgtgctcatcatcgatcattgctatctttctttctttctttccctttcttgtttcttgcatcttggtttctagatagctatttattgatatgcatgcgcaccaatttactctaagttctttaattaagtagatgtccgttcgtgtgcatgtgctgccttatctcctctcctctgcatttgcaattctcctccaatccattttttccatctttgtatctcacttacaattcgggtcatgcaattttaattcattattttttgtgtgtgtgtgtg

SEQ ID NO: 63449 - DNA, 413 bp, Glycine max
agcaactgtggcttacaagcactggacccctttactcggaaggcctaagtcccaaaaccacggttaacccaaacaccacaatcaaccccatcaacaccttgagaccctgcctaaggaggaggtgggaactataactcaccagcaacttatgggggtggtagccctccaacaccaatcactgtgagcccaccttcaacccgatttgaccccggcacccggactataccctacacacccgcttaccttgcttacgcaactcccttcactggtacatgcaactactggaacactcacccaggaatcatttggggattgctaggctggtggggaaccttaggccatgcatttggtgtctctagtatgccaggatttggtgccagtctcagcttgccacaagcactttgcaacactag

SEQ ID NO: 63450 - DNA, 280 bp, Glycine max
gtcttccaccagcagagcaaacctctttgagcggacgccgagacccttgtcagtgacgagagttcaccatctgcagggctgaagagatcatcaaggccctttaaaacccttgaatcctcttgatggctgattaactgtctttaatgcgtggtgtgagactcttttgatgcaagaatatactaggaaccttttccttttcataaatgtaattggagttgtgtgctctgggaagggccatgatatggagcatattatggaaataaataagatttcttggttc

SEQ ID NO: 63451 - DNA, 381 bp, Glycine max
gataaaggttagcgtgaaacatttttacctaaatggattgaattgacaaataataacaaacaactaatagcagaaggacttaccacagcaaccctgctcaagatggtctgttagtgtgtttgatattctaatgtccctaagttgtgcacaagctgaaatagcacccaccattgccacctcagtgattatgatctttgcttctctcattttctcatacatgtaaatagcttcctttgctgatgtgaaccttcggctcttgatacaggttctatcctatcctatcctatcctattttttttcttcgtaatttgtctaggtttgtgtttttgtccttgttctgttatttgcgttcttgttcttgctcttgctcttgtcacgttc

SEQ ID NO: 63452 - DNA, 104 bp, Glycine max
gctatgacgtcgatgcacgctacgtaagctggaattccggttgaggatggattgatatcctaggcataattggtaaatcttcacacggtggaaacttgcttcct

SEQ ID NO: 63453 - DNA, 283 bp, Glycine max
cacctcgagctgctcgagcggctcgagctagcagttcagcgtctctaattatttatgcagaagacaagttgcagtcaatctgcgatctcggaattatgcatcatctaacagtaaagatgacctaatgattgaagaagatgctgagagaaatgctaggtcgctattgaaaacgatattatgtgtcactgcaagtgtagcaggataccatatgtttccttatatgggagagaatttgatgcaacagtctgaatacctagagcgtgtcaaggatcccttgttcaaa

SEQ ID NO: 63454 - DNA, 270 bp, Glycine max
cacgcgtacgtaagctgggaattcggctctagttcacattatatctatagagaatcatgacaacaagcgggggggttatcacacctctgactgcaacactcaactcctctactctcccgagtctaagattcgccgagttgactcatccgattccagtattaactcgtccaagtctcaactctaatctgtcctagactcctctcatgcacacttacaatactacattgctatcatgcttgaccacacccactatttgccctagcgtaactt

SEQ ID NO: 63455 - DNA, 347 bp, Glycine max
cttcgtcgttatcttcttcttttgttgtttgtgtgtttgttttttctctcacctgaaaatgtcttgctgcggtggtaactgtggttgcggaagcgcctgcaagtgcggcaacggctgcggaggctgcaagatgtacccagacttgagctacaccgagtcaaccaccaccgagaccttggtcatgggagtggcaccagttaaggctcaattcgagagtgctgaaatgggtgttcccgctgagaacgatggctgcaaatgtggagctaactgcacctgcaacccctgcacttgcaagtgaggtgttggagagctaaagcttcaagcagaaatgggcccttagaaataat

SEQ ID NO: 63456 - DNA, 163 bp, Glycine max
gtgctctagacggttcatgttcagatggaacttgaaattctgagtgtaaccaattcatgcgagaagaatatcttgatgctcatcaaaatgcgtagcgagatttgctatggagaagctcaaacgaatgtttgcaagtgcaagtggaaggctagggtactattga

SEQ ID NO: 63457 - DNA, 398 bp, Glycine max
gttttgtgggtggctcctgaagacaaggcgagtttatggtcacaacttcattatgtttcgtgtaataatctggaaatgcaagaagcttatcttgtcaatctcgtaaatgtgttacgagaactgtatttgcacagtccagaggaagctcgccaattgagaaggaaagctctctctcgtattgaatggctgcaaaaagctgatgtgcctaccatagcacagattgaagagttccattcgatgcacaggatgatgaatgctcctgattcaaatgataatatcgatctactgttgagcattgatttgttgggtttacaaggagcatgcaaagcttttccaaacaagattgattttgatgataagcttgtgttggctaacacacaagaattctttgatggaaa

SEQ ID NO: 63458 - DNA, 335 bp, Glycine max
  unsure (1)..(335): unsure at all n locations
ctcaagagaaactttaagcagatgtctaatgaagttgtgaccataaactggaaatgcaagaagcttatcttgtcaatctcgtaaatgtgttacgagaattgtatttgcacagtccagaggaagctcgccaattgagaaggaaagctctctctcgtattgaatggctgcaaaaagctgatgtgcctaccatagcacagattgaagagttccattcgatgcanaggatgatgaatgctcctgattcaaatgataatattgatctactgttgagcattgatttgtngggtttacaaggagcangtaaagcttttccaaacaagatggtttttgatgat

SEQ ID NO: 63459 - DNA, 278 bp, Glycine max
gtccgtaggctgggaattcggttggggctcaagccgattgggttggggcactttttttttaataattggtggcttttaacaaggccggcgaatccttaattctaataatccttctttggttttttccaaattcggattttttcgacagaatccgggaaaccaacccaaccaaaccttgggccacccaatcctggagcttgggttaagggggacccagggccgtggttctaaggaccttaaaatggttgaggaacttggacctggtggaaaagggattg

SEQ ID NO: 63460 - DNA, 418 bp, Glycine max
  unsure (1)..(418): unsure at all n locations
gtcatttgtcattaaaattctcccttctctctcccctccttcatttctctgtttcaacttgcactattttctattcccccttcaacccttttgacattctctgcgcggacattgccacagccttttttcactttaccctcttaaactaaactccattgtcttcccttctcacctcacactcacaccaccaacatcattccctctcttctcatttcactataataataacaacaacttcccattcctcttnccctgtagtagccaaccanattaaacacccccaaaatgcacgagagatcgatgaaagaagctgctggcacgtgcncacaaaggagaagaaccccttcctcttctcttctcttctcgacgccatttaccggtccattgacgaatcaaaatccaccttnacgacgatcaa

SEQ ID NO: 63461 - DNA, 393 bp, Glycine max
gttttgtgggtggctcctgaagacaaggcgagtttatggtcacaacttcattatgtttcgtgtaataatctggaaatgcaagaagcttatcttgtcaatctcgtaaatgtgttacgagaactgtatttgcacagtccagaggaagctcgccaattgagaaggaaagctctctctcgtattgaatggctgcaaaaagctgatgtgcctaccatagcacagattgaagagttccattcgatgcacaggatgatgaatgctcctgattcaaatgataatatcgatctactgttgagcattgatttgttgggtttacaaggagcatgcaaagcttttccaaacaagattgattttgatgataagcttgtgttggctaacacacaagaattctttgat

SEQ ID NO: 63462 - DNA, 260 bp, Glycine max
aagacctataacctcttgcatgttagcctgtgtcaccggaaaccaaacatactctaaaaggtaaaaagacgggcacttattgaaaagatgcattcttgaggggtcaaaatgcgatcccataaaaggatttcattaatcccgcggcctccatctttattcgtctttctcatacctcttcaacgacgctctctcccattccttgcgcacaataacatcgtgaacgctccttctccgaccagagatcaatggtggcttggtct

SEQ ID NO: 63463 - DNA, 253 bp, Glycine max
agaaagtcttccatagccccccaaaaatgaagagcaccatgttctttgctctctttctgttttgtgccttcaccacctcatacctaccttcagccatcgctgatttcgtgctcgataatgaaggtaaccctcttgaaaatggtggcacatattatatcttgtcagacataacagcatttggtggaataagagcagccccaacgggaaatgaaagatgccctctcactgtggtgcaatctcgcaatgagctcga

SEQ ID NO: 63464 - DNA, 330 bp, Glycine max
aaacactcatcagtcatcaccatggccaagctagttttttgcctttgttttctgcttgtcagtggctgctgcttcgctttcagttccagagagcagcctcagcaaaacgagtgccagatccaaaaactcaatgccctcaaaccggataaccgtatagagtcagaaggagggctcattgagacatggaaccctaacaacaagccattccagtgtgccggtgttgccctctctcgctgcaccctcaaccgcaacgcccttcgtagaccttcctacaccaacggtccccaggaaatctacatccaacaaggtaagggtatttttggcatgata

SEQ ID NO: 63465 - DNA, 343 bp, Glycine max
  unsure (1)..(343): unsure at all n locations
ttgaagaacaacatggtggtgctaaaggtgtgtttgttgcttcttttccttgtgggggttacagctgcacgcatggaactgagcttcttcaaaagtgatcagtcatcaagttatgatgatgatgagtattcaaaaccatgctgtgatctctgcatgtgcacacgctcaatgcctcctcaatgcagctgtgaagatattaggctgaattcatgccactcagattgtaagagctgtatgtgcacacgctcacagccaggacagtgtcgntgtcttgacaccaacgacttctgctacaaaccttgcagtccagagatgactaganaaactaatagctctctcaaat

SEQ ID NO: 63466 - DNA, 407 bp, Glycine max
  unsure (1)..(407): unsure at all n locations
ggcatgcaagaagagagaggaatcgtactacacaagtttcggactgcccctcatttttgtactgcatttgggactcttcactcttctccacaccttcatctttgtcaagtttccatagcatagagacaaaaccgggtgggtttaattggctttcttttcctttccctcggattcttcttttttttcactctctggttttcatgcctcatctcactaattgtgccctttagctgctttttttcacttggagttggtacactcattcactcatctttcaatggcataaaaaaagtttttttttttttttttttttaattcacttttgcatttggagtttatggggtggaatgaaatgatggctttggcttccaataataatggtttcttcatttggcatgttntttttt

SEQ ID NO: 63467 - DNA, 416 bp, Glycine max
gatgagtttgaagaacaacatggtggtgctaaaggtgtgggtgttgcttcttttccttgtgggggttacagctgcacgcatggaactgagcttcttcaaaagtgatcagtcatcaagttatgatgatgatgagtattcaaaaccatgctgtgatctctgcatgtgcacacgctcaatgcctcctcaatgcagctgtgaagatattaggctgaattcatgccactcagattgtaagagctgtatgtgcacacgctcacagccaggacagtgtcgttgtcttgacaccaacgacttctgctacaaaccttgcaagtccagagatgactagaaaaactaatagctctctcaaatggacgaagcccctttaggctttgtttgttatgttaggggagacaaattaaacaagaaataaaagc

SEQ ID NO: 63468 - DNA, 313 bp, Glycine max
aaaattcagatttctaaattttgcatatcaaactgcggtgagagcatagaacggacgccctattgagtaaaacaaaacttagaagaagattattgaaacgcccatcataaagcaacccgcagcttgatatgcaaaattcagatttctaaattcaaattatttgcagatctacaaaatgagagcttgtacttttgatttcattggagcccctgaaatcatagagttagctatctattttttttcgttgttgaaacgaattggagtttttgccattaatccccaagtttattacatggaattcgaatttctagct

SEQ ID NO: 63469 - DNA, 398 bp, Glycine max
caaaatgctctgtactgttgctgtttgtaagtggacaaaagcagaaccacattcctgggaattgatcttcccaatagaggtatgtggtcctaataatggttttgaaatgtggagttctgagtgggcaaatcaaacttcatggcatttgagtttccttattgacaatcccaaacagtctacagtttttgatattctcttgggaatctctcaagattttgaaattgctggtaatactcttatgccagctttttctgttccacaggctactgccagatcttctgaaaatgcggaatcctctgcatgatctggaatttgtgttttctttcgcttgatcacttgtttaattcaataaaggaaattacgcatgaccctctagttgagtatgctctgcctatttg

SEQ ID NO: 63470 - DNA, 393 bp, Glycine max
gcttttccccacaagctggtgcagtttggagagagtcaggaaaaagttgtattgaaattttcacaagaggaatttcttacagcttggtcaactcaggtgcgtcctgcaacaactctgttggctgatgggtgcccatatttgtatgctatggtgcatgatagttcagtgtctacaataccaggtgattttgtcattggtgttaagttgacaaccataaacaatatgtgtgcatatgggctcaatcctggtatttcaggttctcgtcttttgggcaccattcctcagtccatttcacagcaaactgtttggaatcaaatggcaacagtgagaacaccattgaattttgattctagcaagcagagcttttgtcaattctctattgatcttcttggt

SEQ ID NO: 63471 - DNA, 384 bp, Glycine max
cttaataaataatttaagatactatgatgagagcacggttgccattactgttgctgggacttgttttcctggcttcagtttctgtctcatttggcattgcttactgggaaaaagagaaccccaaacacaacaagtgtctccagagttgcaatagcgagagagactcgtacaggaaccaagcatgccacgctcgttgcaacctccttaaggtggagaaagaagaatgtgaagaaggtgaaattccacgaccacgaccacgaccacaacacccggagagggaacctcagcaacccggtgagaaggaggaagacgaagatgagcaaccacgtccaatcccattcccacgcccacaacctcgtcaagaagaagagcacgagcagagag

SEQ ID NO: 63472 - DNA, 415 bp, Glycine max
  unsure (1)..(415): unsure at all n locations
caagaagcttatcttgtcaatctcgtaaatgtgttacgagagttgtatttgcacagtccagaggaagctcgccaattgagaaggaaagctctctctcgtattgaatggctgcaaaaagctgatgtgcctaccatagcacagattgaagagttccattcgatgcagaggatgatgaatgctcctgattcaaatgataatattgatctactgttgagcattgatttgttgggtttacaaggagcaggtaaagcttttccaaacaagattgtttttgatgataagcttgtgttggctaacacacaagaattctttgatggaaattttccagtggattcttggttaccaatttttgtgaattgtctttatcctgtaagtcaattaccttcagaagctgtcngtgtaaatgttacatgtg

SEQ ID NO: 63473 - DNA, 423 bp, Glycine max
atgagatgctcattagatatagctatgaaaaattactgcgccaggctaaagctccaagtatgtttttacaatccttcaaaaattttgtttctttgtgtgtgtatggtgatgataacttaattagtgttcatgaatatgtcaagccttactttagtggttctaaattgaaaagctttctagctggtcataatatcaccattactgatggtattgacaaaactagtgcaactttgcaatttagaaagttagcagattgtgattttctcaagagaaactttaagcagatgtctaatgttttatgggtggctcctgaggacaaggcgagtttatggtcacaacttcattatgtttcgtgcaataatctggaaatgcaagaagcttatcttgtcaatctcgtaaatgtgttacgagaattgtatttgc

SEQ ID NO: 63474 - DNA, 141 bp, Glycine max
cacgtcaccctcctaacaacctcctctgaccctttcaacaactacaacgctactatcgtcacataacgacaccaagaccacaacaccctgctagccaacgtcacccactccttcaaaacgactaagactaaagttcacagg

SEQ ID NO: 63475 - DNA, 406 bp, Glycine max
cgaccacaacacccggagagggaacgtcagcaacacggtgagaaggaggaagacgaaggtgagcagccacgtccattcccattcccacgcccacgccaacctcatcaagaggaagagcacgagcagaaggaggaacacgaatggcatcgcaaggaggaaaaacacggaggaaagggaagtgaagaggaacaagatgaacgtgaacacccacgcccacaccaacctcatcaaaaggaagaggaaaagcacgaatggcaacacaagcaggaaaagcaccaaggaaaggaaagtgaagaagaagaagaagaccaagacgaggatgaagagcaagacaaagagagccaagaaagtgaaagttctgagtctcaaagagaaccacgaaaacataagaataagaacccttttc

SEQ ID NO: 63476 - DNA, 340 bp, Glycine max
caaaatatgatttctgagtacagatttcaagataaagaacgatatttcaaaaaatgaatccccccaccccctcaagggaactactgcatacacatgaatgaatttgtttgcttgcaagctttgtgatgatcttgagttgcaaatgtatgctaatacaatgccttttcaggttacaacgataataatatagtaacacgatatccaacccagtcattgattccaaactccagctcccggaatcagttcgatagctcattatatgtgtcgaatgaccaattaatcaggcatgctcaccaaacccaaagcactagtaatgatcattgcaccgttgggttagctc

SEQ ID NO: 63477 - DNA, 182 bp, Glycine max
ttgcagtacatgcaaaggccccaccgttagaaaagggtcggcaaggttatcctgggccaagggccccctttccaagtccaccaaaacccgtttcgaaaaaaattggcccgttgccgaaaaagcccaagacttcactttttaagcttccgacaagcccagaattccggttgcacaaccgccaa

SEQ ID NO: 63478 - DNA, 283 bp, Glycine max
ccaaaggctgaatgcaaaaaaaaaaaaaaaaaaaaaaaaagaaaaaaaaaaaaaaaaaaaaaaaaaaaaaaaaaaaaaaaaaaaaaaaaaaaaaaaaaaaaaaaaaaaaaaaaaaaataaaaaaaatataataagaacataataagataataaacaaagtcaaggaaataacatattatgataataaagacgaaaaataaattcttttgaccattgcgttgaagaatcaactacataaagtggaactaatgttaaaacgaagaacaagaataatacggaaaca

SEQ ID NO: 63479 - DNA, 409 bp, Glycine max
ctctacaattgtgatcttcacaaatcaacaacgtctctctgtgtgactctgaaagtaggtgaccatggagcatcatcttcatatgtgtgccatgatcattttgatgggtgcaattttcttgttcagttttgatcctgtgccttatttttttgtggagttttatattattattattattattattattattattattattattattattattacaagtgctagtatgttgatctcattcttggtagttagatcgtgttttttgtacggatattgatataaagattgggttttctgtctttctttcggggtcttacttagattagttagtgcagccaccttatttttttatatgattggagctgtaacccattttttaatgctaatatagtgatccaattgtgagtagtag

SEQ ID NO: 63480 - DNA, 326 bp, Glycine max
aaaaaaaaaaaaaaaaaaaaaaaaaaaaaaaaaaaaggaaaggaaaaaaaaaaaagaggaaaaaaaaaaaaaaaaaaaaaaaaaaaaaaaaaaaaaaaaaaaaaaaaaaaaaaaaaaaaaaaaaaaaggggcggcccccaccttatgactttttcaacccggaaattaattccggcccggtccttgaaggcttcccaattttccctaaatggagcccttttaaaccttgcctaaatcatggaaatagctttcccctgggtaaaatttttatccgttaaaatttccacacaatttacgacccgaaagcttaacgtgtaaaccctggg

SEQ ID NO: 63481 - DNA, 413 bp, Glycine max
cctcccaaacctcagctctcaattctactccagaaatttatattacaacaaaaaaaaaaaaaaaaaacggcaagtctcaaaaataaggctggcccaacaaaaacaacaacaaaaaaacaacaaaaaatcataccaaaaaatcacaaaaaaaaaaaaaaaatgccctcccccccctattaccctttccacccctcaaattaattcctacccctaaccttcatcctacccacctttcccaaaattaataccaattaaaactttcccaaaatattccaatacctatcccccttttaaaaatttcacccccccccaattccccacaaaatacaaccccaaatcctaaatttaaaacccccatatcccaaaaaaattacccaacccccctaaattcctttccccccacttcccccttt

SEQ ID NO: 63482 - DNA, 342 bp, Glycine max
aactaagaaagtcttccatagccccccaaaaatgaagagcggcatcttctttgctctctttctcttttgtgccttcaccacctcatacctaccttcagccatcgctgatttcgtgctcgataatgaaggtaaccctcttgaaaatggtggcacatattatatcttgtcagacataacagcatttggtggaataagagcagccccaacgggaaatgaaagatgccctctcactgtggtgcaatctcgcaatgagctcgacaaagggattggaacaatcatctcgtccccatatcgaatccgttttatcgccgaaagccatcctttgagccttaagttcgattc

SEQ ID NO: 63483 - DNA, 406 bp, Glycine max
gaaagatgtttggagagttgaatgtggaatcccttggggagttccgctcacaggtattggtaatagcatttttaatgagatgctcattagatatagctatgaaaaattactgcgccaggctaaagctccaagtatgtttttacaatccttcaaaaattttgtttctttgtgtgtgtatggtgatgataacttaattagtgttatgaatatgtcaagccttactttagtggttctaaattgaaaagctttctagctggtcataatatcaccattactgatggtattgacaaaactagtgcaactttgcaatttagaaagttagcagattgtgattttctcaagagaaactgtaagcagatgtctaatgttttgtgggtggctcctgaagacaaggcgagtttatggt

SEQ ID NO: 63484 - DNA, 397 bp, Glycine max
gaaagtcttccatagccccccaaaaatgaagagcaccatcggctgtgctctctttctcttttgtgccttcaccacctcatacctaccttcagccatcgctgatttcgtgctcgataatgaaggtaaccctcttgaaaatggtggcacatattatatcttgtcagacataacagcatttggtggaataagagcagccccaacgggaaatgaaagatgccctctcactgtggtgcaatctcgcaatgagctcgacaaagggattggaacaatcatctcgtccccatatcgaatccgttttatcgccgaaggccatcctttgagccttaagttcgattcatttgcagttataatgctgtgtgttggaattcctaccgagtggtctgttgtggaggatcta

SEQ ID NO: 63485 - DNA, 177 bp, Glycine max
atactacttttaaacattttaactcatccttcatacctaccgataatgatcactccccacaggaccagcaaactccttcctcacaaactgcttcaaactacaacacctccttccacaaccaaattcccaatcttaaacaccacaatttcaaaatcaacatcctcctataccaccctc

SEQ ID NO: 63486 - DNA, 381 bp, Glycine max
attagtgttcatgaatacgtcaagccttactttagtggttgtaaattgaaaagctttctagctggtcataatatcaccattactgatggtattgacaagactagtgcaactttgcaatttagaaagttagcagattgtgattttctcaagagaaactttaagcagatgtctaatgttttgtgggtagctcctgaggacaaggcgagtttatggtcacaacttcattatgtttcgtgtaataatctggaaatgcaagaagcttatcttgtcaatctcgtaaatgtgttacgagaattgtatttgcacagtccagaggaagctcgccaattgagaaggaaagctctctctcgtattgaatggctgcaaaaagctgatgtgcct

SEQ ID NO: 63487 - DNA, 428 bp, Glycine max
  unsure (1)..(428): unsure at all n locations
aagccttactttagtggttctaaattgaaaagctttctaggtggtcataatatcaccattactgatggtattgacaaaactagtgcaactttgcaatttagaaagttagcagattgtgattttctcaagagaaactttaagcagatgtctaatgttttgtgggtggctcctgaggacaaggcgagtttatggtcacaacttcattatgtttcgtgtaataatctggaaatgcaagaagcttatcttgtcaatctcgtaaatgtgttacgagaattgtatttgcacagtccaaaagaagctcgccaattgagaaagaaagctctctctcgtattggatggcttcaaaaagctgatgtgcctaccatagcacagattgaaaagttccattcgatgcanaggatgatgaatgctcctgattcaaatgataa

SEQ ID NO: 63488 - DNA, 424 bp, Glycine max
agagcgaagagaatggctcccaagggtttaatctttttggctgtgttatgcttctcagcactgtcactgagtcgttgtcttgcggaggataatggacttgttatgaacttctacaaggaatcatgccctcaggctgaagacatcatcaaagaacaagtcaagcttctctacaagcgccacaagaacactgctttctcctggctcagaaacatcttccatgactgtgctgttcagagttgtgatgcttcactgttgctggactccacaagaaggagcttgtctgagaaggaaacagatagaagctttgggttgagaaatttcaagtacattgagaccatcaaagaagctttggaaagggaatgcccaggagttgtttcctgtgctgatatcctcgttctctctgccagagatgggcattgttcgc

SEQ ID NO: 63489 - DNA, 268 bp, Glycine max
aataactccttttacttccacgtcaattacttaaccataatgactttttttaacgcaatcatgctcatcacacatccattctcgctaatcattctctaacaactactatcctctcaatagcaccatcatatctattaccctacatatcatactgtcacactcttcatacacacattctcctatcaccaaaccatacttattctacacatactcaccaaattccatactctactcaacatcataccatcctacttaatctcttcaatca

SEQ ID NO: 63490 - DNA, 132 bp, Glycine max
tatctctcgcttccacttcctagcccataatcatcatccactgtctccgtcaacagggcctcacggtctttcaccactctcatttccactgctcacaacgatctggatcccaacatttacaactcccatccc

SEQ ID NO: 63491 - DNA, 323 bp, Glycine max
gatattctcttgggaatttctcaagattttgaaattgctgggaatactcttatgccagctttttctgttccacaggctactgccagatcttctgaaaatgcggaatcctctgcatgatctggaatttgtgttttctttcgcttgttcgtttgtttaattcaataaaggaaattaggcatgaccctcttgttgagtatgctctgcctatttgaaaatttccacacctcttttaattgtcgtaatgatgtgtgaagtgtgtgttattttaaaaaaaagaactcatgaaaaatgatatgagtggttcaacaacaattttaggaaca

SEQ ID NO: 63492 - DNA, 264 bp, Glycine max
gacgtcgatgcacgcgtacgtagctggaatcggtcggggcaccggtgagaggcatgcggaagcttctcgcggttcggctgccgagatgccacccccaaccgaacaactgaccgctcaaaaccggggtgctgaacgtaaccgtgcccaaggtggaaaaaaacccgaagaccaggaccttaaggcaaatggaggtggttggataataatggaccatcatgaggactggaaaggttggaaggagtttggggtaaggggggggtcccc

SEQ ID NO: 63493 - DNA, 206 bp, Glycine max
cgatccatctacacggtcaaaaagaaaatcgtttgccttgggaaaatacggacacagagacagagagagggagagagagaaggaaatggaaagcccaaagttctaatggttggtaatggggttcttggcattgtccttgggaccatccaggcctggggttaataaggtagttaagaatgaaaagaaggccaaccttttgcaagcaa

SEQ ID NO: 63494 - DNA, 137 bp, Glycine max
ttatgacgtaggacgcacgcatacttaagctcggaattcggctccaccattttatatttataatccaagctaacatcatcgcgtccgggtaaactatgatgccagctccgaccatatcatatacacactccaaaact

SEQ ID NO: 63495 - DNA, 338 bp, Glycine max
atcaacaagcgttcgatgtcgagaaatcgcgtcttacccctgtttgtgcactaagtgtatgtggatataccatgacggacaatgtctactcagctgtgccaagagtgcaggtgctggtttctttagaatctactatgttgcgagtagtgatgcacttaaacgtgcatcccttgatctgctattatcctgcatgttaatgatagtaagtaattaagtattattacttttttgatcgtagctattacgatggatgctaactatgtctgtggcataacttctcttgaaacataactgtattcttctctaggtacttccttaccctctatctactctttttc

SEQ ID NO: 63496 - DNA, 456 bp, Glycine max
atgacgctcgcacgcacgcgtacgtaacctcggaattcgcctcgagcttctaccatttacactagcacgctagctccaaggtgatcggatcctgagttaatggccgatacaatttgcatcagtgctttcatcaccaggactgcattgatcacagacttaactgacgactgcatgctcgacgccttgcatactgtcaagagctaatggaacttaacactaacatcgacgagccaactattgactgagtaactccagaagcatcactaaccgagacagcacgaccctacacacgtgtaaaaaagacaccttacgattcaggtacatgatgcataactcatttatggcgcataagatgcaccatctgacgatatacctggatcttgcttctgatatctacatgtgagtatcacaatacatttgtaatgtcgtatatacggacttttcaaatgctactga

SEQ ID NO: 63497 - DNA, 328 bp, Glycine max
  unsure (1)..(328): unsure at all n locations
aaaaagttgtattgaaattttcacaagaggaatttcttacagcttggtcaactcaggtgcgtcctgcaacaactctgttggctgatgggtgcccatatttgtatgctatggtgcatgatagttcagtgtctacaataccaggtgattttgtcattggtgttaagttgacaaccataaacaatatgtgtgcatatgggctcaatcctggtatttcaggttctcgtcttttgggcaccattcctcagtccatttcacagcaaactggtttggaatcaaatggcaacagtgagaacaccattgaattntgattctagcaagcagagctttt

SEQ ID NO: 63498 - DNA, 122 bp, Glycine max
ggcatcaatattgggctttgcgctatatcacaagcggtatcggtacagtgcaagctggttggttgcctaactgtgcgcacggcttgctatggtgtcttgaagtttggtatggaaaatcgtgc

SEQ ID NO: 63499 - DNA, 398 bp, Glycine max
cttaaacactcatcagtcatcaccatggccaagctagtttggtccctgtgttttctgcttttcagtggctgctgcttcgctttcagttccagagagcagcctcagcaaaacgagtgccagatccaaaaactcaatgccctcaaaccggataaccgtatagagtcagaaggagggctcattgagacatggaaccctaacaacaagccattccagtgtgccggtgttgccctctctcgctgcaccctcaaccgcaacgcccttcgtagaccttcctacaccaacggtccccaggaaatctacatccaacaaggtaagggtatttttggcatgatatacccgggttgtcctagcacatttgaagagcctcaacaacctcaacaaagaggacaaagcagcag

SEQ ID NO: 63500 - DNA, 401 bp, Glycine max
tcggggaattccaattccacattttcaagaaataaggaggcaaaaatgttgatatatgaattggaattatttgttttcttattaggcctatcctgaagccaaaggaaatgagatcggaattcctcggggaattccaattccacattttcaagaaataaggaggcaaaaatgttcatatatgaattggaattatttgttttcttattaggcctatcctgaagccaaaggaaatgagatcggaattcctcggggaattccaattccacattttcaagaaataaggaggcaaaaatgttcatatatgaattggaattatttgttttcttattaggcctatcctgaagccaaaagaaatgagatcggaattcctcggggaattccaattccacattttcaagaaa

SEQ ID NO: 63501 - DNA, 265 bp, Glycine max
taaaaaaggtttacaaataaagtaacatcaatattataatttgtttccagttaaaagtatattaagtccactaacaataaaacaaactggtctacacgcttacaagcaatctctatcaccctataattaaattcgaaccggaacctgctggcatacaaaatatccctataatgaatccctttaaaccttatcatcttaatgctcatcgttgtttactgattaaaattgatattcccttacaattccacaaaacctacaactacta

SEQ ID NO: 63502 - DNA, 310 bp, Glycine max
tatgacgtctgatgcacacagtctcggaactcggctctagcttcaagcgctctgactatttgtcgctaaatattatattctgtgtctgggactctgtcataggcgcccgtttccctctcataatatgcaaactagatcgaaacttgaactcgacaagagtttaaagtaagcacttcgcgaccagcgctctacaaaccctaaataccaagtcactgcttaataattgccagctatatgacaataacgctccacgtgcattcaaaatttccatcccttacctagatatgttatgcatcatgagtacattcat

SEQ ID NO: 63503 - DNA, 397 bp, Glycine max
gaattctccagagagaagaagaaacttaatcgatcatcactgcactggactaatacatcatggcagacgagacccagaacaagtatgagagctctgaggttgaggtccaggatcgtggtgtttttgactttctcggtaagaaaaaggatgaagaagacaagcctcatcctcaggaggaggtcatcgccaccgagtttcaaaaagtcactgtctcagaccaaggagagaacaagcacagcctcttagaaaagcttcaccgatctgacagcagctctagctcttcaagtgaggaggaaggagaagatggagagaaaaggaagaagaagaagaaggaaaagaaagggcttgaagagaagatcgaggagaaaatagagggtgatcatcatcatcacaagga

SEQ ID NO: 63504 - DNA, 372 bp, Glycine max
caatttccgtctctccctttcactactgacgtgtgccttgggaacccacctcattataataatacttttccctaaccaacatttaataatattataacattatgcaataaaaaaatcatttccctattaaaaaacattaaatttatcattaaaaaaactaaaggtgaggctctcaaggcaaaggaagaaccaggtgacacacactgccacacacatgagacccccctcatctgctactaccccccctttttttacaatctaaccccttataaatactacccctcaccccctcatgcttttctcagtgattcagtctctcagtaaattcattcaccacccgcagttactctctttaccttcttaattagttct

SEQ ID NO: 63505 - DNA, 262 bp, Glycine max
gttgatcattgatttgttgggtttacaaggagcaggtaaagcttttccaaacaagattgtttttgatgataagcttgtgttggctaacacacaagaattctttgatggaaattttccagtggattcttggttaccaatttttgtgaattgtctttatcctgtaagtcaattaccttcagaagctgtcgttgtaaatgttacatgtggtagtggacgtggtggtttacccaccactgcttggattagttctgcagttaacaat

SEQ ID NO: 63506 - DNA, 333 bp, Glycine max
tcttcacacaaacatctctctctctctctctctctggcatgggtgccagacacaatcgccaagacacacaaacactacacatgacaggcccacactgaacgcaacaacgaccaacacctactactgccagcccgccaggacactaacccgccatagccaaagagacccagctccggcacaccaacctcaactataccacgcaaaaccacaaccaactgcactgcctgactcacacaacagaatacagcaccacacaagacgcccacaaacccaagaacatcgaacaaccacacagagtgcacatataccagacccaaaacaaggtacccacat

SEQ ID NO: 63507 - DNA, 293 bp, Glycine max
  unsure (1)..(293): unsure at all n locations
agctggtgcatagaatgctattctcatgaatatgccaaatgctgttctttcaatgtggagatattttgttggagatctcgtctttgaagtttctaagatgacttctccctacattaaatgtacagtctctttcttcatagcatttggaaatttggctgatgataccatcaattttgaggcttttccccacaagctggtgcagtttggagagattcaggaaaaagttgtattgaaattttcacaagaggaatttcttacagcttggtcaactcangtgcgtcctgcaacaactc

SEQ ID NO: 63508 - DNA, 358 bp, Glycine max
ctcgagccgcttctctccccagggaaatgaagatgggacaggaaagaatcgaggctgacataagactggtaacccttccttttcccccaatccctacttgcgtacaatttgtcctctggtaatgtgccaataacgctgtcatcagagaatcagattacgaatgaatgctatgctgctaatctccatgtgccagccttacatcaaatactgcaagctcgtcacactgagtccaatattggagaatgcaacatgccttccaatggttatccccttactaaattggcatttagaccatggcgaacttctacgacactggactatcagcctaaacttatggctactgtcatactatcttctg

SEQ ID NO: 63509 - DNA, 355 bp, Glycine max
gatctcgcaatggttaaagttaatgtagcatgtgctgctgggggcttgacatcaagttacactccaactccattgttggaatctggtttgcaaaaagacagagggttaattgtggaatattttggaaggatgtcttacgttgctcataacgttaatcagccccaagagaaagatttgttggagggaaatttttcctttgatattaaatctcgctctagattggaaaaagtttcctctacaaaagcacaatttgttagtggaaaaaccttcaaatatgatataattggtgctggttcacattcttcagatgattttcctgaaaaggaagatcaagaaaaacccaaaaagattgatg

SEQ ID NO: 63510 - DNA, 411 bp, Glycine max
gcttatcttgtcaatctcgtaaatgtgttacgagaattgtatttgcacagtccagaggaagctcgccaattgagaaggaaagctctctctcgtattgaatggctgcaaaaagctgatgtgcctaccatagcacagattgaagagttccattcgatgcagaggatgatgaatgctcctgattcaaatgataatattgatctactgttgagcattgatttgttgggtttacaaggagcaggtaaagcttttccaaacaagattgtttttgatgataagcttgtgttggctaacacacaagaattctttgatggaaattttccagtggattcttggttaccaatttttgtgaattgtctctatcctgtaagtcaattaccttcagaagctgtcgttgtaaatgttacatgtggt

SEQ ID NO: 63511 - DNA, 250 bp, Glycine max
tctccattggtccttaaacactcatcagtcatcacggtggccaagctagttttttccctttgttttctgcttttcagtggctgctgcttcgctttcagttccagagagcagcctcagcaaaacgagtgccagatccaaaaactcaatgccctcaaaccggataaccgtatagagtcagaaggagggctcattgagacatggaaccctaacaacaagccattccagtgtgccggtgttgccctctctcgct

SEQ ID NO: 63512 - DNA, 143 bp, Glycine max
tttcaattattttgcatcaatcttcgtctctgatccatgtcgtacgtggagctaggtgttgtctaatcaaatcgatcaatatgtccacttaatacaatcacctatcttctctgttccattgtttacttcataggcgtatactt

SEQ ID NO: 63513 - DNA, 389 bp, Glycine max
ccttgtagctgatgtagaaaggtaactgggtaagagtgttctagcttgcattttttatgggcattgtacatattttttttttcttcaatagttcgataaaacttactggctccatctggctatcatcctcctactcttcttactgacactagaggtattgctacgaaaataaaattgtattctaaatttctacttgcatgtgcggatagagtaataaagacagaagaggactaccaaaaaatgttcaaaggagaaaaggaaacaaataaagaggcaagatattttgacatgtttacaacgatcaaagtcttttctaccgagaagaacgatgcaagcatatttatttgttacttataaaaattcaaaactcgtgtaaattgaataccact

SEQ ID NO: 63514 - DNA, 407 bp, Glycine max
ataaatggcatatgagaagactaaagatgacaagggtctttgacggtgtactacatatgctatgatttggttactttggctgtagagaaaaatatcaaatatttcaaggataattccagagttacctctacattaggattttggctagtgactgttaactttttttcattgaatattgaaagcttggcatgcattgctgaaatgatgtgttttttgtttttctctctgtaataggatatcttatcctagtctcttataaatttcttttgctaaatataatgaggtgatgattattcttgattaatacggtagcattaaaggaaagtaaattacaatatactaaaatagtgactaggatatagaaatggtaattatccaagtatatgtacttctagtaccactggtac

SEQ ID NO: 63515 - DNA, 407 bp, Glycine max
gattatcctaagtctttgggaatagtgctgcaatggcttcgagtcaggaggaggtgacccttttgggagctactggaagcccatttgtgtgcagggttcatattgccctcaagttgaagggagttcaatacaaatatgtcgaagaaaatttgaggaacaagagtgaactgcttctcaaatccaacccagttcacaagaaggttccagtgtttattcacaatgagaagcccatagcagagtctcttgtgattgttgaatacattgatgagacatggaagaacaaccccatcttgccttctgatccttaccaaagagccttggctcgtttctggtccaaattcattgatgataaggtttttggtgctgcatggaaatccgttttcacagctgatgagaaagagcgtgag

SEQ ID NO: 63516 - DNA, 354 bp, Glycine max
  unsure (1)..(354): unsure at all n locations
gtacgtaaaactcaaattcngctcgagtgaaagctccgacaccatcgataacgtcaaggccaagatccaggacaaggagggtatccccccggaccagcaacgtctcatcttcgccggaaagcagctcgaggacggccgcaccctcgccgactacaacatccagaaggaatcaacccttcacctcgtcctccgtctccgtggtggcatgcagatcttcgttaagaccctcaccggcaagactattaccctagaagtcgaaagctccgacaccatcgacaacgtcaaggctaagattcaggacaaggagggaatccccccagaccagcagaggctgatcttcgccgggaagcagct

SEQ ID NO: 63517 - DNA, 369 bp, Glycine max
aggccgactctaacggatccctcggggaattccaattccacattttcaagaaataaggaggcaaaaatgttcatatatgaattggaattatttgttttcttattaggcctatcctgaagccaaaggaaatgagatcggaattcctcggggaattccaattccacattttcaagaaataaggaggcaaaaatgttcatatatgaattggaattatttgttttcttattaggcctatcctgaagccaaaggaaatgagatcggaattcctcggggaattccaattccacatttttaagaaataaggaggcaaaaatgttcatatatgaattggaattatttgttttcttattaggcctatcctgaagccaa

SEQ ID NO: 63518 - DNA, 64 bp, Glycine max
gtgtctcaaaaaactccttggatgctcatgtcaaaagttgaaagaaactttccatatgagattc

SEQ ID NO: 63519 - DNA, 210 bp, Glycine max
gctgcaagacaaagtcttggaccaagatcactccaatctccatttggcttctccagaaaagcctcctttcttgttaaggcagctgctaccccccctgtcaagcaaggatcagacaggcctttgtggtttgcatcaaagcaaagtctttcttacttggatggcagccttccgggtgactatggatttgaccctctgggactttcagaccct

SEQ ID NO: 63520 - DNA, 205 bp, Glycine max
tcgggtcttgccttgctggtttcttctctgctgctttcttcgttgttcggtctcctgttccgcttcctcgtgctgtgtgccgccttctttgtgcttgggggcttgggctttcttccttggccttgctgtgttttcctccttcggttccttgtctttccgtctttcttttgtgtgttgtcgcgctctcgctttggtcgggcggccg

SEQ ID NO: 63521 - DNA, 118 bp, Glycine max
tacgtaaactcgaaattcggttcaacccggaaccaacccttaatttcaataattaaaaaatttcaaaattaaaaattcaattaaaatacaacgttcaacgggctgctattcattgttt

SEQ ID NO: 63522 - DNA, 397 bp, Glycine max
attccattctctctgtgtatttccctacctctcccttcaagatgcagatcttcgtcaagaccctcaccggcaagaccatcacccttgaggtggaaagctctgacaccatcgacaacgtcaaggccaagatccaggacaaggaaggaatccccccggaccagcaacgtctcattttcgccggaaagcaacttgaggacggccgtacccttgctgactacaacattcagaaggagagtactcttcacctcgtcctccgtctccgtggtggcatgcagatcttcgttaagacactcaccggcaagaccataaccctagaggttgaaagctccgacaccatcgataacgtcaaggccaagattcaggacaaggagggtatcccccgggacaacaacgtctc

SEQ ID NO: 63523 - DNA, 392 bp, Glycine max
ctggggcctgcaaatgttcctgacaaatacgtttctgatcccatacatggctatccgattgaatgatgctgatgatgagagtgttacaagaaaactttcacagtttggctcagtgatgacaaatggtgctccaattgttggagtgattggtgggagtgcatgcattgtatctctattgtgggctctttttggtcgaatggatgcaaattttgggggcatagcagatagatgggactacttggtgggttatcttggatcagaaaggctggcttatgctttcatatgggatatatgtctttacataattttccagccttggttgattggagacaacctccagaatgtccaggaaaacaaggttgttgtagtgaagtatcttagatatgtacccc

SEQ ID NO: 63524 - DNA, 173 bp, Glycine max
ccttgctggtttcatctatgagactttcttcattgaccgatctcatgttccacttcctcgtgatgaagaaagctaaacaatatgattggcaacttgcactttcttcattggccttgctgtattttcctacttaagttaataaaataacaatatttcttttgtgtgttgaaaaa

SEQ ID NO: 63525 - DNA, 119 bp, Glycine max
aatgtgttgtgtttgtcggaacccctgattacatttttgttaagcgcagcgagtttcaggactttgctgcgttgtgttgctttggtttattaaatgtcaactttctatttgtagtgttc

SEQ ID NO: 63526 - DNA, 379 bp, Glycine max
tttccaattcaatagagagaatggtactgttgttacacctcttgtcgtgtgtcatgctaagaagaaactcagttttatggagcaaattctcgattacattgaaggacgctctaaaattgttgatgatgtggctgcaatcatggtcgcggactgatcttgtttccacctttttgttttccttgttgtgctcattgcctttgattttctgttcattttcagggggtcctaaattaaggaagtggtatggtgcacctgatatccttgaaaaagatggtactgcaatagaagataatgaggatgattatccggaagatgaagtcagggatgcagtgctggtaacagatggagatagtgagatgggtcagatggtgatattgtc

SEQ ID NO: 63527 - DNA, 381 bp, Glycine max
gcaacacccactccttcttcctatattctattcataactctcatcattcattcattcattcgtcattcatcttccatcatccatccactttcctcaatcttccattccagatctctcaccttcttcttcttcctctgtgccacccttttgttccatgattgttttttgtgtctgtatcagcttgatctttttgtttttttccttgttgtaaaaacatttcaatctgcaagataattattggcagcttcactaatatcttttaagactacatactttagctaggcaatcacatttcttgggataatgttgggaggcaacaacggaaattgcttgcttcctgttttcttggacgaaactcaatttcagcatcaaactaatgtg

SEQ ID NO: 63528 - DNA, 235 bp, Glycine max
ctccgggaaattcaaattcaaaattttcaagaattaaggaggcaaaaatgtccaaaaatgaattggaattatttgtttcctaataaggccaatcctgaagccaaaggaaatgaaatcggaattccccggggaattccaattccaaattttcaagaaataaggaggcaaaaatgttcatatatgaattggaattatttgttttcttattaggcctatcctgaagccaaaggaaatg

SEQ ID NO: 63529 - DNA, 406 bp, Glycine max
tcggggaattccaattccacattttcaagaaataaggaggcaaaaatgttcatatatgaattggaattatttgttttcttattaggcctatcctgaagccaaaggaaatgagatcggaattcctcggggaattccaattccacattttcaagaaataaggaggcaaaaatgttcatatatgaattggaattatttgttttcttattaggcctatcctgaagccaaaggaaatgagatcggaattcctcggggaattccaattccacattttcaagaaataatgaggcaaaaatgttcatatatgaattgggattatttgttttcttagtaggcctatcctgaagccaaaggaaatgagatcggaattcctcgggggttacgagctcgatttccctatagtgagtcg

SEQ ID NO: 63530 - DNA, 380 bp, Glycine max
  unsure (1)..(380): unsure at all n locations
tttttcttcaatatataataccctcattatattacagtgaaagctatgctggcaagtatgtacctactatagggtattatatattgagggtgatgcttgaaaacagggtcaagctgaacaaacctagttatagcagcaaaaagatgttttgcaacggcgttttgatccattgggatctcttctggggttgaatgttgggtttttcgggctcccctcctatgtggagtaagggtccactttatctcacttatttaagangagaaggctccgattangatgagagaaaaattattttaaagagaaaaacagttacaaaacattgaaagagaaaggagaaggaaaatcattgtgattttcgcacacacaccagaaagcgtttt

SEQ ID NO: 63531 - DNA, 357 bp, Glycine max
  unsure (1)..(357): unsure at all n locations
acgcgtacgtaaactcggaattccgctccaagtttcaagggaaacaatagcactttccaaagctcaagttccagcaataacagaacccttgttccccgcaacaatcaaccagcgaaagtagtgttgtgagaaatgactttggtcgcgttctcgattcatacgaagaggcaagagtcgataacttttggacacagtcatatgtagctgacatgtcncacgttccaagcgaactatttgttccctccgtggcagaatctgaatattttactccattatatgatgatctgtggggtcaaactcatttgtaccatgagcatcattgcgtattctgatgaacacaattactcgatctctaga

SEQ ID NO: 63532 - DNA, 198 bp, Glycine max
cccggtcttcggctccatgtgaggagatcagtacggcgcattttcccacacgagtacacgattgcatcatgtgctctcattctggcgggtgctgcgtttagatagtcctacctgcataaagtgttcttcgcgttgactatagtgttcggttttcaatttgagggatcaatttaatagtgtgcagatcagttaagtcat

SEQ ID NO: 63533 - DNA, 298 bp, Glycine max
acagagtttacttggaaacttcaatttttcaattcttaatgatactgttttgatatcttcaatgaattgaactgcctgcagttcaaaattgaactgcatgagttgcctttagccagtcatgttttacttcaatccagaaataaaatattttcttaaggctggggtgcttgctgttagaaagtaactggagaggatgttgatgccctggagacctttgttggtgaaacttgtagctgtcgagttttgcaattaggggtctgtttgaagatcgtgtcattgttagcatgatttgtgattc

SEQ ID NO: 63534 - DNA, 379 bp, Glycine max
aggtcgaatctaaaggatcccctcggggaattccaattccacattttcaagaaataaggaggcaaaaatgttcatatatgaattggaattatttgttttcttattaggcctatcctgaagccaaaggaaatgagatcggaattcctcggggaattccaattccacattttcaagaaataaggaggcaaaaatgttcatatatgaattggaattatttgttttcttattaggcctatcctgaagccaaaggaaatgagatcggaattcctcggggaattccaattccacattttcaagaaataaggaggcaaaaatgttcatatatgaattggaattatttgttttcttattaggcctatcctgaagccaaaggaaatga

SEQ ID NO: 63535 - DNA, 376 bp, Glycine max
ccacgtccctctcttctcttaaaaaaatgtaaaagatggaggcaggaaagcatctggaagcattttctattcagcttgtaattcttgcaatctggaagcaagcactgcatatatgccatacacaagctgcatcagccatggaaggaagtccaaatcaagaaacttcaagatatagaaggagcaccagcaggaagcatggcagtcctgattcagaagaatgccttgatggaaacaccctaaggccgaaggatatattatctcaaattgaaagtgaatttttgagggaatttgagcatgctgaagaacttgccaagaccattgagcccggaaacacagagatgccagatgcaatggagacaatatttcaatccgccct

SEQ ID NO: 63536 - DNA, 316 bp, Glycine max
gcaagctcatcctagagttttaaaaatggcagcagcctcctccatggctctctcttccccatccttggctggcaaggccgtgaagctgggcccatcagcccccgaagtcgggagggtcagcatgaggaagaccgtcaccaagcaggcctcctccggaagcccatggtacggcccagaccgcgtcaagtacttgggcgcattctctggcgagcccccgtcgtacctcactggcgagttcccaggtgactacggctgggacactgctgggctttcggccgagccagaagccttcgccagaaaccgtgagctcgaagtg

SEQ ID NO: 63537 - DNA, 259 bp, Glycine max
gggatgtcacgggtgtatctcgctatcaacttctcagaatgataaaggcgaccccttcttgattcttgatgccttaaacacatggattacaatttacgttttaatagagatgtgtttagtgtattgtgttggtgaacaatattgaattttttttttttttcatataccgggctatttaacccctagaatattgagagttgcaacagatttgagtgagtttcagattaatattaaaataaataatcgcagtatcaaaagg

SEQ ID NO: 63538 - DNA, 281 bp, Glycine max
gacgtctagaccacgcggacgtaaactcggaatatggctcgagaaaaaaaagagaaaaaaaaaaagagagagaaaaaaaggaaagagaaagaaaagagaagaagaggaaaaaaaaggaaaaagaaaaggggggaataggaaagagggggggaaggaaggggggagggggagaaaggagagagtaagggaagggaaagagaaaaaaaaaaaaaaaaagggggggggggcgggggaggagagggaggggaggggggaattgctggggggggtggggggggggg

SEQ ID NO: 63539 - DNA, 158 bp, Glycine max
gggaatactcacttagccactattgaaggatcaaagatcatggctcaagcaatggcaacaatcgctggcttgcatggttcccctcaggctgtgttgggacgtagccttcacgagagtggctccacactcgtgaccgtcacgagtggcatcatggtggt

SEQ ID NO: 63540 - DNA, 358 bp, Glycine max
tgcatgactccaggtcgaccctaaaggatcccatcggggaattccaattccacattttcaagaaataaggaggcaaaaatgttcatatatgaattggaattatttgttttcttattaggcctatcctgaagccaaaggaaatgagatcggaattcctcggggaattccaattccacattttcaagaaataaggaggcaaaaatgttcatatatgaattggaattatttgttttcttagtaggcttatcctgaagccaaaggaaatgagatcggaattcctcggggaattccaattccacattttcaagaaataaggaggcaaaaatgttcatatatgaattgggattatttgttttct

SEQ ID NO: 63541 - DNA, 303 bp, Glycine max
gagttccttcggggagaaagtgctgggatacagcaacaccgagcacaaaatcctcatctccaacatcactgcacgcgccctctcgcagcacgagtgtgcacacgtatcccctgcgcagcccctcatctcgctggatgacgccgagacgctcagtataaaggttgtgggttggagacttgtgaattacgaaggtggacttacaattcagtgcttgtggaagttaagagattttaaacgtcgggttgaactcactaacaggatctctaaggttgttgatgctttgggccatttcccagatatcga

SEQ ID NO: 63542 - DNA, 363 bp, Glycine max
ctcgagccgcgagtcaaccgagtcaactcaccaccaccaatgcctccgtccaccaaaccgaaccttccttggaagcttcgcatattgacctctctcctcaacctcctcatcaacgcctctcgccgctccaatggcaccgtcaaccgccgtctcttcaacttcttcgaccgcaagctcccctctagccccaaccccgtcgacggtgtcaaaacctccgacgtcaccgtcgacgccacccgcaacctctggttccgcctcttcgccccttcctcctccgtcgccaccacccttcccgtcgtcatcttcttccacggcggcggcttcgcgttcctctccccggcttcagccgcatacgacgccgtt

SEQ ID NO: 63543 - DNA, 391 bp, Glycine max
taagtatgtacatatcactgtacaatcccttctcgcacagattcggagacctgacaagtgcgtatagggacgcaggtcctcctctaaaagacgttaaagttacaaaacgttgcgctctcactggaaatgactaccagaacactccaggcggacgactcattgttaccgcggcgctcagagagtgaactcttgacagggatctgaatgcgtgacacatttccacatagcgcgtcctataaaagattgtcctcacagtcatatggtagattcactatatggacctgcaagaagatgagaaaacctgtagtatagtaggcagtcttagcatttcttaagcctttggtgccaaaatagtcatccatctcaaatgcactgcttggatttcacgggg

SEQ ID NO: 63544 - DNA, 496 bp, Glycine max
  unsure (1)..(496): unsure at all n locations
ggggggngtgggggggggtgggggggggggggggggggggggggggggagggggggttgggggctgggggcgagnggggtggcgggggacggggagnggggaggggggggggggggggggggggggggggggggggggggggggggggggggggggggggggggggggggggnnggggggggggggggggngggggggggggggggggggggggggggggggnggggngggggggggggggggggggggggggggggggggggggaggggggggggggggggnggngggggggaggggggcgagggggggggggggggggggggggggagggggggggggggggaggggcgcagggggggggggggggggggggggaggggggagggggggggcggggggggggggggggggggggggggaggggggggggggnggcggggggcgagggggggggggggggcnggggggggggggggggggggggggggagggggg

SEQ ID NO: 63545 - DNA, 95 bp, Glycine max
gaagatgccaagtttgagatgattttactatatttttcatattggactgtcttcctctataattttgagttaaagtgtccacttaaattgaaaaa

SEQ ID NO: 63546 - DNA, 146 bp, Glycine max
agacaactcaacattatcacgtgaactccttgatagtagacaaatatttagcttttttttttttttgtatttatatgttattattattcaaggcaacaaggaatggtacttttatatacaatagcattatggagttttgaatctat

SEQ ID NO: 63547 - DNA, 104 bp, Glycine max
atttcattaactttttaattcatctggatccatatttgttgcggttactatagaaaacatttaacacgtaactcttaatgaaaattttaaaatatattcattaa

SEQ ID NO: 63548 - DNA, 381 bp, Glycine max
aggtcgaatctaaaggatcccctcggggaattccaattccacattttcaagaaataaggaggcaaaaatgttcatatatgaattggaattatttgttttcttattaggcctatcctgaagccaaaggaaatgagatcggaattcctcggggaattccaattccacattttcaagaaataaggaggcaaaaatgttcatatatgaattggaattatttgttttcttattaggcctatcctgaagccaaaggaaatgagatcggaattcctcggggaattccaattccacattttcaagaaataaggaggcaaaaatgttcatatatgaattggaattatttgttttcttattaggcctatcctgaagccaaaggaaatgaga

SEQ ID NO: 63549 - DNA, 362 bp, Glycine max
gatccctcggggaattccaattccacattttcaagaaataaggaggcaaaaatgttcatatatgaattggaattatttgttttcttattaggcctatcctgaagccagaggaaatgagatcggaattcctcggggaattccaattccacattttcaagaaataaggaggcaaacatgttcatatatgaattggaattagttgttttcttattacgcctatcctgaagccaaaggaaatgacatcggaattcctcggggaattccagttctacattttcaagaaataacgaggcaaaaatgttcatatatgaattggaattatttgttatcttattaggcctatcctgaaaccaaaggaaatg

SEQ ID NO: 63550 - DNA, 329 bp, Glycine max
aaagaaaaaaaaataaacagcaaataaaacagcttctttctccacaaacctagcgggtctctccacttatatatccaaaaaaaaaattcactatccatcatggacatgaagaaggttacctgtgccgttctcatcgccgccgcctccatgagtgcagcattggctgccacagaggtccctgcgcccgcccctggccctagcagcggtgcctcggccgcagccgctgtcggctccttggttggtgcctcagtcttgtccttctttgccttgttccactaaaatgtgacatggttagttaatggggaaagaatgttggaagaacaatgcag

SEQ ID NO: 63551 - DNA, 381 bp, Glycine max
acgcgtacgtaaactcggaatacggctcgagaagtagttgagaactaagaaggagaagcaaatggcttcctcaatgatctcttccccagctgttaccactgtcaaccgtgccggtgccggcatggttgctccattcactggcctcaagtccatggctggcttccccaccagaaagaccaacaatgacattacctccattgctagcaacggtggaagagtgcaatgcatgcaggtgtggccacgagttggcaagaagaagtttgagactctttcctacctggcagaccttgatgatgcacaattggcaaaggaagtagaataccttcttaggaagggatggattccttgcttggaattcgagttggagcacggtttcgtgta

SEQ ID NO: 63552 - DNA, 340 bp, Glycine max
aaaatgttgataaagacgaatgggaatcgctgaacagatgaaggaagtgtggtttgtggacactgacaagatttcagtattatatgcttttcgggaaattgaatgaaatggtaccttatattattacaacaagcgggtagggggcgcatatacgttgctgattgtcgctcaaccaccatgatcttcaaattatttgaagccacgaaagtcaatctacccaaacccaagcatgtttgtttattactattatttccggcagtattggttctgccaagtgactatcatggcactggctaaaacttgaaagaccacactttccatatggcaggctaacttgtta

SEQ ID NO: 63553 - DNA, 335 bp, Glycine max
tcggggaattccaattccacattttcaagaaataaggaggcaaaaatgttcatatatgaattggaattatttgttttcttattaggcctatcctgaagccaaaggaaatgagatcggaattcctcggggaattccaattccacattttcaagaaataaggaggcaaaaatgttcatatatgaattggaattatttgttttcttattacgcctatcctgaagccaaaggaaatgagatcggaattcctcggggaattccaattccacattttcaagaaataaggaggcagaaatgttcatatatgaattggaattatttgttttcttagtaggcct

SEQ ID NO: 63554 - DNA, 332 bp, Glycine max
cggaagttgatccatgtagccgaccccacctagtgggataaggcgttattgttgttgttgtatattgtcttatgtttctgttagaggtgatgactcttatgtttctgttagaggtgatgacgtgacggaataagatttttgttgttcttgtgtttgtgtcagtgattgtgtttacttttgcgagagatataattttttcctcgtgaagctgtattatggttttgaaaagttaaatgagaattggatgcgcatagtcagataatctttatgtatgtacttgggagtcatattttttctctgaacattatcaccataatgtgcagatattttga

SEQ ID NO: 63555 - DNA, 318 bp, Glycine max
tagaagatctatcacctctcatgcacgcctacataatctcataattcgtctctagaataatcttacacataaacaaacacactaaacactcacagtgacaatttacactctcttaccctattttttatccttctctttttcttaaacacacaacccctcctattatcacaaccataactcatatttcatatacattttcaacactatttaacctacactacttacttcattcagtacacttatcactcatcaattatctctatacactaatctatacaacacacaatacatatacactttatgttattcataactctc

SEQ ID NO: 63556 - DNA, 300 bp, Glycine max
gcatggaggcctcctacataagctaattcttctcctacagcttcttatactaaaccataccaaaattacttcatcaagtgcacagataacgacgggatcatgctctatatcaaaaccctttccctcgtagataaccaccctacctccttcacaaagagcgctaacatgaccaacctttctcagtacgagtctctaccaccgcacgatcccaactcaaggtatgcctcagactacgtcgttcacccctcccgtcacacccataaacgcaagctatgggttccgtggacagatgaagagcac

SEQ ID NO: 63557 - DNA, 201 bp, Glycine max
  unsure (1)..(201): unsure at all n locations
tatctggggctatgcatatagcaatgaaatagaagtggtcgaatatgtagcaactatgttcccaattctggcagcatccaactttctggatggactccaatgtgttctttcaggtttttcttttcccccattacttttacttgtctgcacaggagctatgactcanaagcactggtataggctgagaggcatattggaact

SEQ ID NO: 63558 - DNA, 412 bp, Glycine max
caaagtctttcttcttgtcattctactactattccaggctttcgcagaagcttcatcaatcactggagtagccaattctcttgagattacaaatgaaggaagtcaaactgtggctctgaataatgaacatatccacctgcacaaaatcaattgcaaccatgaatgttctcgaagatgcagtaaagcatcaaaaaggaagagatgcaaacgagcatgcaagtcatgttgccacacatgccactgcgtaccccctgggacctatggtcataaggaggtttgcccatgctatgcacgcctcaagactcatggggataagcctaaatgcccttgaaattattattgacgggaagtatttttaatatgaaaaagggcattcaaatctatattatttgaatgttcgattaattgaatg

SEQ ID NO: 63559 - DNA, 393 bp, Glycine max
ttggggaattccaattccacattttcaagaaataaagaggccaaaatgttcatatatgggattggaattatttggtttcttattaagcctatcctgaagccaaaagaaatgagatcggaattcctcggggaattccaattccacattttcaagaaataaagaggcaaaaatgttcatatatgaattggaattatttgttttcttattaggcctatcctgaagccaaaggaaatgagatcggaattcctcggggaattccaattccacattttcaagaaataaggaggcaaaaatgttcatatatgaattggaattatttgttttcttattaggcctatcctgaagccaaaagaaatgagatcggaattcctcgggggtaccgagctcgaattc

SEQ ID NO: 63560 - DNA, 269 bp, Glycine max
tctatcacgccacatgcaggcatacataatctctcaataccctttaacaaacaatttctcaaaccttcccacgggaatatccggggctttaatctactttatccaacatcttaatacctttaactttcacaatctacataattccaccattaactttctcccatacatccttctacaaaaaacaccatttaattaccaaacaaaatttactaacatcacaacacacccacacaattaaaacacttatacacacataattaatactatta

SEQ ID NO: 63561 - DNA, 313 bp, Glycine max
tctctacaaactacattaatcacctaacaacatacaaacacatacgggtaatatacaaatttttctaaacacctacttcatcttctcattccaattatacttaataaatcaaatatttctaacttctactcaatatcattcattaacccttcaccctcttccaccttacttacaatctctcccttctacttctccactctccatccattaaattatttcttctcactccactctttcactcacccctacaccctttactattccactctcctcattaatctcaacctcttccacttcctcattaactactcca

SEQ ID NO: 63562 - DNA, 378 bp, Glycine max
tctatcacaccacatgcactcttacataatctcacatattccctctaaatcacaacttcaatatatactacaacgtatctttacaggacaatatatcccataccttacctatcaactcctattatacataacaatcctacatctatgctacatatatattcttacctccatttatttacatccacaaccataatattctccattcatataatccatctatcaccactccacactccacttaaacaacattacccactctatctaccacttttatcctatttattacccatataaaatatcaactaactctctatcattccataaccattatcatataaacattcaattaatacattattattttattcataacacatt

SEQ ID NO: 63563 - DNA, 332 bp, Glycine max
tcggggaattccaattccacattttcaagaaataaggaggcaaaaatgtggatatatgaattggaattatttgttttcttattaggcctatcctgaagccaaaggaaatgagatcggaattcctcggggaattccaattccacattttcaagaaataaggaggcaaaaatgttcatatatgaattggaattatttgttttcttattaggcctatcctgaagccaaaggaaatgagatcggaattcctcggggaattccaattccacattttcaagaaataaggaggcaaaaatgttcatatatgaattggaattatttgttttcttattaag

SEQ ID NO: 63564 - DNA, 198 bp, Glycine max
aagctcgcaatcttactctcagaattaattactcacctttatcaacaatcgatccatctggccctattttgagtcttatcatatcttcctattatcattatcctatctgctctcctctttaaactaattataacttcacaatctcacacaacctactatccatatacataatcacaatttaaccatactcctaataca

SEQ ID NO: 63565 - DNA, 268 bp, Glycine max
gcacgcctacataagctgctaattcttctccattatttatttattctcatttataaataattctatcttatagaaatattttcggcttctattcatcttcctattaactatatactcttttttccatatttaatttattttcacttactattcttttaatacctataatttatttaataatcacaatttaatcatactcttaatacatctaactttaccttcctactcctactatcatctttatatttctacaatttctaccctatca

SEQ ID NO: 63566 - DNA, 273 bp, Glycine max
tctatgacgtcacatgcacgcttacataagctcataattcggctctagcacatgcttcatcactacattcaacaggtctaccctggtcttatttcaccatatactcatccatataattccccacactcttttccatccaccaatactacctatcttccaatcatcacctccctcattcccccaaacagactagacttcaacatatcttcaatacaaaacacataccttactaacatattacatctaaaacccatcataactcaaattcaccac

SEQ ID NO: 63567 - DNA, 402 bp, Glycine max
tcggggaattccaattccacattttcaagaaatagggaggcaaagaggttcatatatgaattggaattatttgctttcttattatgcctatccttaagccaaaggatatgagatcgcaatttctctgttatctccttctcctcatcttttttatccattatttctttttttttctttttatattttgtcttcttttttctcttattttttctatttcctttcttattttcatttttcttttctcttctttatctttctttttttttacttatgttgtttttttttctttctttctttatttttatatttatatttttttctttttttttttttctactatctcttatttttattattttatattttttttcttttttttctttttattttttcttatttttt

SEQ ID NO: 63568 - DNA, 383 bp, Glycine max
ggtgaaaagaactgcaatggttccctcttgctatgctattggatacatcaactcatccgactgagatgcttataaatgatatgcttgcagaaactgctagaatcagaggaggatatgaggctgaaaagtctaaggcagaggagcttcagggaaaacctggtgaaaatgtggacctggtttctaacacaagtgacattaaagaaagatggaaattgcgtagagaaaatgcaaagcatagccatagaagactgctgaccaagtgatattcctatgtttgttttattttttcagcaatctatctagattgttacatgtagtccagtttaaaggattctaatgtatgcattacacaatgttaaagtcactaattccagctcaatgcc

SEQ ID NO: 63569 - DNA, 267 bp, Glycine max
aaattatagattctttgacactgctcggaactctctatcatcacccaactccgcgatcttcaaattgaaaagaaaagccaattataaccgtcataattcttgaattgggacctttaccaactcttccttagcccaatcccttcataactcccaccaactcattcactcctctcaaacatttatctttcaattttaccgaattttttttaaaatctataaatttaattaactcaattcctttaaacccttttcaaacttttttaaaat

SEQ ID NO: 63570 - DNA, 228 bp, Glycine max
ctttaatacatatacatttcttcttactatattccttccaaaccttacccctatattattactctcatacaccacacttatcaaacttatatcacttatctttacacttcttacatctattatcctcacaccaactaactccttctataaaactctcttaatatattaattataaattaatttaaatatactacaaattattataattaacatttcttaatgtaatat

SEQ ID NO: 63571 - DNA, 324 bp, Glycine max
tcggtgaattccaattccacattttcaagaaataaggaggcataaatgtgcatatatgaattggaattatttgctttcttattaggcctatcctgaagccaaaggaaatgagatcggaattcctcggggaattccaattccacattttcaagaaataaggaggcaaaaatgttcatatatgaattggaattatttgttttcttattaggcctatcctgaagccaaaggaaatgagatcggaattcctcggggaattccaattccacattttcaagaaatcaagaggccaaaatgttcatatctgaattggcattatcatgttct

SEQ ID NO: 63572 - DNA, 272 bp, Glycine max
ccttcatgttttcaatcatcccagttgataacatctccaagctctatctatatttgtggcaaaccctataataccttacatagacatcatcctatttaccttttccactttatctactacactcacatttcacaccaccgatcatacccgacctatgctgatacttatattcctctgactcctatatctctcatataaaacctctctcactatcaatcaatactgctttaaattattacaccctttaaactattctacacattttatccaat

SEQ ID NO: 63573 - DNA, 173 bp, Glycine max
catgcacgcgtacctaagctcggaattcgggttgagcttgaacccgttcaaagctggggattacatttctaaagggtgcttttggatggtcatatgaacacattggcagggattcatttcatgggattaaattaaccaaaacaagaatagctttgcttcctcttgtatgttca

SEQ ID NO: 63574 - DNA, 280 bp, Glycine max
actctactaccatgcctgcacgtctactctatatcatcctctcgctcaattccaattcttcattttcaagaaattattattcaaaaattgtcatatattaatcttttgtgtatttttttcttattatgtctatcctgaatccaaattaaattatatcataattcctcatttaattccaattccacattttcaataaataactattcataattattcatatatcaattctaattattttttatcttattatccctatccttaatccaaattaatatatatc

SEQ ID NO: 63575 - DNA, 140 bp, Glycine max
accaccatgcacgcctacacaatctcatcctccctctcaataccaacatctttatactcatgaaattactaacccaaaaccagcatatattcaaacatttattattcctccaccttataatatctctatctcttaaacca

SEQ ID NO: 63576 - DNA, 431 bp, Glycine max
gagacctgctaccatgcatgcacgcgtactttagctgatcctctggctgaaggccaatttctcaagctcaggcgatagagttggattcatgatcatatatgaattggtagatatcagatgattattagagctattctgaagccaaccgaaatgagatcggaatccctcgaagaacaccgatctcacattggcaagagatactgacgccgaactgttcatatatgaggacatattatagggcggcttcttcagactatcctgattccaatggatctgacatcggaatagctacacgcactgcaattccacgattctaaagcttgactgatacgcacacgtagatatctgatcatgtacttaatggttaaattaccaagcctatcctggttccaaccgaagtgctatcgctatggatcacgcttaccgatctc

SEQ ID NO: 63577 - DNA, 410 bp, Glycine max
tcggggaattccaattccacattttcaagaaataaggaggcaaaaatggtcatatatgaattggaattatttgttttcttattaggcctatcctgaagccaaaggaaatgagatcggaattcctcggggaattccaattccacattttcaagaaataaggaggcaaaaatgttcatatatgaattggaattatttgttttcttattaggcctatcctgaagccaaaggaaatgagatcggaattcctcggggaattccaattccacattttcaagaaataaggaggcaaaaatgttcatatatgaattggaattatttgttttcttattaggcctatcctgaagccaaaggaaatgagatcggaattcctcgggggtaccgaactcgaattccctataatgagtcgtatt

SEQ ID NO: 63578 - DNA, 130 bp, Glycine max
gtttcatatgatgctttcctttgaaaaaattagctattcggtaaatgatttttcatcaatttgcattctgctgggatttcaatttttgctgccttcttttgttaacataattaaagtgcttattagcagg

SEQ ID NO: 63579 - DNA, 312 bp, Glycine max
gtttcatattttcctatccttccacaaaattaactatacggtaaattatattacatcagtttgcattctgctgccatttcactcttcgctgccttctttcgttaacataattaaattacttattatcacaacattctaaacttactgacttccacctactatttacctcttctacctcataattaattccttactcatacctacattcttaccacctttccctatattcagtcctattataccttgacataatcatcctcatatctgattcctatattaaattggtatcctctcactaatccacacatcata

SEQ ID NO: 63580 - DNA, 377 bp, Glycine max
  unsure (1)..(377): unsure at all n locations
gcagaaagcaagctcatcctagagttttaaaaatggcagcagcctcctccatggctctctcttccccatccttggctggcaaggccgtgaagctgggcccatcagcccccgaagtcgggagggtcagcatgaggaagaccgtcaccaagcaggcctcctccggaagcccatggtacggcccagaccgcgtcaagtacttgggcccattctctggcgagcccccgtcctacctcactggcgagttcccaggtgactacggctgggacactgctgggctttcggccgacccagaaaccttcgccagaaaccgtgagctcgaagtgatccactccaggtgggccatgctcggngccttgggctgcgtcttccccgaacta

SEQ ID NO: 63581 - DNA, 199 bp, Glycine max
tctatcacttcacatgcacgcgtacataatctcaaaattcctctcgagcaacaactttacaactctcacctctaccctcttcttaggctccttcccctccttgaccccctcccacatcctcacccttattcttacataacacccatactacaccaccttcaaccatcttcttttctctacataactctcttaacacatc

SEQ ID NO: 63582 - DNA, 130 bp, Glycine max
gtttcatatgatgctttcctttgaaaaaattagctattctgtaaatgatttttcatcaatttgcattttgctgggatttcaatttttgctgccttcttttgttaacataattaaagtgcttattagcagg

SEQ ID NO: 63583 - DNA, 415 bp, Glycine max
tgcaattgaagttgaagtcttgcccttctctcttcaactgcaaacacaagacatcatcatccatggctgcctccgtctccactgtcggagctgtcaacagagctcttttgaacctgaatgggtctggacctggggtttcagctcccagttcatccttctttgggagcagcttgaagaaggttattggctcaagggtccccaacacaaagatttcctctggaagcttcaagattgttgctgtagaagagaagaaagagattgaagagacccagcagaccgacaaggacagatggaagggtcttgcctatgatatctcagacgaccaacaggacatcacaagaggaaagggtttggttgactcccttttccaagctccacaggatgctggaactcactatgctgtcatgagctccta

SEQ ID NO: 63584 - DNA, 183 bp, Glycine max
ccttttctctcctttcccttaccactttcaccttacgcgtcatttctatttctcgttttcatcaacaccatctcactgaaactcatttcatcagctatcatctctactccaattcttcaacataaccatttctctctacttttccccctacctattaaaccctctccctaaccctctcaccat

SEQ ID NO: 63585 - DNA, 385 bp, Glycine max
caaaacactcataacacaaagcacaaagcaaagctcatcgttgagttaaaaaatggcagcagcttcttccatggctctctcatccccatccttggctggcaaggccgtgaagctgggcccatcagccccagaagtgggaagggtgagcatgaggaagaccgtcaccaagcaggtctcctcaggaagcccatggtacggcccagaccgagtcaagtacttgggcccattctctggcgagcccccgtcctacctaaccggtgagttcccaggcgactacggctgggacactgctgggctttccgcagacccagaaaccttcgccaagaaccgtgaactcgaagtgatccactccaggtgggccatgctcggagccttgggctgcgtc

SEQ ID NO: 63586 - DNA, 139 bp, Glycine max
gaagagctatgacatcgcatgcacacgcacacaaaatctgggaattcatctcgaggaagcatgcatcatcccggtctgtgatttttaagaacgaaatccaacattgctttaattctcaattatgtattgatgtattagc

SEQ ID NO: 63587 - DNA, 339 bp, Glycine max
tcggggaattccaattccacattttcaagaaataaggaggcaaaaatgttgatatatgaattggaattatttgttttcttattaggcctatcctgaagccaaaggaaatgagatcggaattcctcggggaattccaattccacattttcaagaaataaggaggcaaaaatgttcatatatgaattggaattatttgttttcttattaagcctatcctgaagccaaaggaaatgagatcggaattcctcggggaatccaattccacattttcaaagaattaaggaagcaaaaatgttcatatatgaattggaattaattggtttcttaataagcctattc

SEQ ID NO: 63588 - DNA, 401 bp, Glycine max
  unsure (1)..(401): unsure at all n locations
ttccaatatattccattctctctgtgtatttccctacgtgctcccttcaagatgcagatcttcgtcaagaccctcaccggcaagaccatcacccttgaggtggaaagctctgacaccatcgacaacgtcaaggccaagatccaggacaaggaaggaatccccccggaccagcaacgtctcattttcgccggaaagcaacttgaggacggccgtacccttgctgactacaacattcagaaggagagtactcttcacctcgtcctccgtctccgtggtggcatgcagatcttcgttaagacactcaccggcaagaccataaccctagaggttgaaagctccgacaccatcgataacgtcaaggccaagatccaggacaaggagggtatccncccggaccagca

SEQ ID NO: 63589 - DNA, 397 bp, Glycine max
tcggggaattccaattccacattttcaagaaataaggaggcaaaaatggtcatatatgaattggaattatttgttttcttattaggcctatcctgaagccaaaggaaatgagatcggaattcctcggggaattccaattccacattttcaagaaataaggaggcaaaaatgttcatatatgaattggaattatttgttttcttattaggcctatcctgaagccaaaggaaatgagatcggaattcctcggggaattccaattccacattttcaagaaataaggaggcaaaaatgttcatatatgaattggaattatttgttttcttattaggcctatcctgaagccaaaggaaatgagatcggaattcctcgggggtaccgagctcgaattccctat

SEQ ID NO: 63590 - DNA, 241 bp, Glycine max
attatcacaagcgtcacttgctatttcctaagttagagatacagccaccattcttcattgaaatctatatccaccattcttataaatcaccatcatctacaatacaaacccctatccaccttcatcaccatattatctctataaaaatatatatatcttaaactattcacttcacttatccatgtactaaactcttctcttgataacattttcaaaatcctctacttacaaaattatcatt

SEQ ID NO: 63591 - DNA, 104 bp, Glycine max
gctgtggttgcttctattatgtaatgcgtggcaggtgcgtcattgtgtagtacctaattgtcatgtgtattttcgaatgaaaaagcaacgtgaattcattgaaa

SEQ ID NO: 63592 - DNA, 194 bp, Glycine max
ctttacttatcatcatcagtgttccacatttcagattgaacaacgtaaatatcgggacttagatacctcaccctaaatataaatccaccgaaaatccattcaaaaaaaaaacacaactcacatcttacatttactaccaaacccaataaacccataataaattccattcctatacctaaaatccttccaactcc

SEQ ID NO: 63593 - DNA, 234 bp, Glycine max
  unsure (1)..(234): unsure at all n locations
ctatgacttctcatgcacgccctgacagtaagctgcngaattctgctcgagccttacttttctcattttatgtaacactcttcagaatgaacattgtaacttaccgaattagcacacctaacacacactctaaaaccaacgataatccatttaaaaataatacacaactatatcttccattcattaccacactcaataacctcataacaaattccattcctattccttaaatct

SEQ ID NO: 63594 - DNA, 293 bp, Glycine max
agcttgcatgcctgcatgttctctcaataggactctagtgcatgggtttgtgctttgcgtgttcctgttatgagggggaagatgtgatttttggctttggcaagttctgtggtggtgttgcctgtctccgctgctgaggatagtgagattttggatgctccatatgagagtattatccattatttgtttggtgtgttgttggcttataattgatggtgaaaatgtttagtgtttccttcgttgtaccctattgttgttttattaaaagtatttgtttttttattattttccta

SEQ ID NO: 63595 - DNA, 244 bp, Glycine max
atcatgaactgcttccagcatttgatgtactggggaacaggactttcttactgtgtgaggttccaaatggtgcaaaaattaaacttgttgataacatgataatgtccagtttgattaatgctttctctgaggtactcacactaacttaaataagtggtttgaaccctataactcttctcaatatgctgtatcttcttgccatatgcaactgcatgtttaaattgaaatgacctacaatgcttta

SEQ ID NO: 63596 - DNA, 185 bp, Glycine max
gccactgtcaataagccacaacagcatcagcaactacgacagcttcatcaacagagaacaaaggctcattgaccgactacaacaacaacgttctcattcaatttcattttcttcaaacaattgttgtatgaaattgtgtgcagtaaaggataggattttatttttggtataacagtttttttatt

SEQ ID NO: 63597 - DNA, 225 bp, Glycine max
ctcgagccgatttggttccggtcgaagaggttgcccgtggattcatatgggtctaactactgttcatctatatttatctgcaattcttaacattgtgaatggtcagaagtgtaaacaaataatttgaaataaaaatagaaaataaagatattttattaaaatcaacatgaatgaaaaaatatttaaattgaacacaaatatatatactaggctatctactactaa

SEQ ID NO: 63598 - DNA, 362 bp, Glycine max
gtctcatgacagtagataatcaaccagatcaggaattgatgcaggatgaagttaatcttattttgggtaactctttatttttctcttctagtatgtttgaaatgaaaaaaatacctagcctttggtaatattctgttgcaactgtcttaagcctcaaatggtgatcgggccacgtactgattctagttgttattattatgatgtgtcgtgggggaaaaagggatttgttcaatcaagcaagtgaactagctaacttataaattaaatcactaacttgaaatatcactcgttcaggacttcagggtacatgttttacctttccctctcattttccatgatacaagatttgattaacacatcag

SEQ ID NO: 63599 - DNA, 358 bp, Glycine max
gtctcattacagtagataatcaaccagatcaagaattgatgcatggtgaacttaatcttattttcggtaactctttatttttctcttctactatgtctgaaatgaaaaaaatacctatcctttggtaatattctcttgcaactgtcttaagcctcaaatggttatcggtccacctactgattctagttattattattatgatgtgtccctggtgaaaaaagcatttgatcaatcaaacaaattaactaactaacttataaattaaatcactaacttgaaatatcactcgttcaggactttaaggtacaatgtttacctttccctctcattttccatgatacaagatttgattaacaca

SEQ ID NO: 63600 - DNA, 355 bp, Glycine max
ggaaataactattaatacatcaaatcaagtggcgctgcgtctcatattcaattggaattatatgctttcttattatgcctatcctgaagccaaaggaaatgagatcggaattcctcggggaattccaattccacattttcaagaaataaggaggcaaaaatgttcatatatgaattggaattatttgttttcttattaggcctatcctgaagccaaaggaaatgagatcggaattcctcggtgaattccaattccacattttcaagatataaggaagcaaaaatgttcatatatgaattggaattatttgatttcttattaggcctatcctgaagccaaaggaaatgagatcgga

SEQ ID NO: 63601 - DNA, 396 bp, Glycine max
tcggggaattccaattccacattttcaagaaataaggaggcaaaagtgttcatgtatgaattggaattatttgttttcttattaggcctatcctgaagccaaaggaaatgagatcggaattcctcggggaattccaattccacattttcaagaaataaggaggcaaaaatgttcatatatgaattggaattatttgttttcttattaggcctatcctgaagccaaaggaaatgagatcggaattcctcggggaattccaattccacattttcaagaaataaggaggcaaaaatgttcatatatgaattggaattatttgttttcttattaggcctatcctgaagccaaaggaaatgagatcggaattcctcgggggtaccgagctcgaattcccta

SEQ ID NO: 63602 - DNA, 329 bp, Glycine max
cccaaacctatcgatccgctagagccgattctactctgtattctgttcaacccatacttcttcaaatctccatctcatcctttctcaccaaccaattacaaagactatcactacccttaccaaccttccacgtactacttctacatcgataatacaaattaataatcctactaacaccataatctctgtaccatctgtaccctctcacacctctacaccctatacaaccttataccactatgctcagaatctgaattgcatgacccatgctctgaatggcaacctttttgtcaacctcactgtccattaaacatgacaacaatctgaac

SEQ ID NO: 63603 - DNA, 83 bp, Glycine max
tttgagatgagagtcttgatgaacagtaccattctggtgtattgctttccttgaaagttaatgcatgcttcttatcttctgtc

SEQ ID NO: 63604 - DNA, 375 bp, Glycine max
aaaatagcaaaaaggtagtccaaaaaagatggatagctgctgcgagaagagatcgaacgaaggacatcgaagccaaagaacaaaaatgaacggaacaacaacactttcaacaacaccacaccactgtttccactccaacaccccaaccagtttcctcaacaccgtttccccaatccaattcctctctttccgcaatcacactcacaatctcagagtcctctgtttctcttcgaatccgtcgcagccgccgccggtggtggtggtgggctccgccaacgccgacatctacgtggagatcgaccgtctcccgcgcgagggcgagaccctcgcggcgaagtccggccaaacccttgccggcggcaagggcgccaacca

SEQ ID NO: 63605 - DNA, 347 bp, Glycine max
ctatgacgtctcatgcaggcgtacataatctcggaattcgtctcgataaaatattaaaaaggtagtccaaaaaagaggtatatgtctgctttaagagttcgaactaatgacatctaatccaaagaacaaaaatgaactgaacaacaacactttcaacaacaccacaccactgtttccactccaacaccccaaccagtttcctcaacaccgtttcctcaatccaattcctctctttccgcaatcacactcacaatctcatagtcctctgtttctcttcgaatccttcacatccatctcctattatattgttgggctccgtcaacgcctacatctacttttatatctac

SEQ ID NO: 63606 - DNA, 276 bp, Glycine max
tctacacgtcacatgcacgcgtacataatctcttaattcggctcgatataatagttaaaaggtagtccaaaaaatatgtatatcgcaactttaagagttcgaacgaattacatctaatccaaataacaaaaatgaactgaacaacaacactttcaacaacaccacaccactgtttccactccaacaccccaaccagtttcctcaacaccttttccccaatccaattcctctctttccgcaatcacactcacaatctcatattcctcattttctctt

SEQ ID NO: 63607 - DNA, 277 bp, Glycine max
attccttttcatatttaaaactaacgttaacatactggttcattgataactttatatcttttatacccaattcaaatacactatactaaatactaacctttctattctttattattacttcactacttaatacaatcctttccttctcatctttaccttcatttaatccttctctaattaatattaatacatattaactattttttatatatatcattattccaacatttatctaattaaatattataaaattaatatactacctacattaatactt

SEQ ID NO: 63608 - DNA, 377 bp, Glycine max
ctttctctttctctgtctgcttcttcactttctctcgttggaatcgaaaaaaatcatgggcagaaaattcttcgtcggtggcaactggaaatgcaatgggaccactgaggaggtgaagaagattgttactactttaaatgaagctaaagtccctggagaagatgttgtagaagttgttgtgagccctccttttgtgttccttccttttgtaaaaagtttgctgcgccctgatttccatgtctcggcccaaaattgttgggttcgcaaaggtggtgcttatactggagaggttagtgctgaaatgcttgttaatttgggaattccttgggttattattggtcactctgaacggaggcagcttttgaatgaatcaaatg

SEQ ID NO: 63609 - DNA, 184 bp, Glycine max
ctcaagcttccataccaatggcaaccaacacctctgtgttatccggaccactatgaggtcactaagccatccaccacgcttacctgccatccatgccacacttctgtctattcttgtccagtcctaaccccctgaagatctccataacagatacagatgcaccatcgtgccacacagaccacat

SEQ ID NO: 63610 - DNA, 366 bp, Glycine max
ctcgagccgctcgagccgattcggctcgagaacaggttggtcctcatcagcttttgtgttccaaaactaggaaattatccttttcttgaggcatattcccgtccaattcgatgcatctccagaagccgtaacacaagagtgtccactctggtgtggaaaaggtcaactgctcttcattgccatagtttatctcaatcttcagctatggacgatagatccttggaccttcagcattccagtcatgaagcacaagccaatccactgatgaagcggtttagacttggtcaagataagacatctgtatcagtgaaggctgaccccaccatagagcaacctgatgaagaatgtaattctcatgttcggact

SEQ ID NO: 63611 - DNA, 384 bp, Glycine max
tttcagttggaaacctcaatgggaagcgtcaatttctcttccatggtcgcttccttgctcgttctctcccagggcgtaaccctaatgctatccaaatcactgcttctgttcttcgactacgagagatcctactacagcgaatactccgtcggattctccggcgtcctcttcgccatgaaagtcgttctcaattcccaatcggagaactacacctccgtctacggagtcatcgtcccgtcccgttacgctgcgtgggccgaattggttctagctcagcttctcgtgccgggtgtgtcgtttctcggccatctcggtggcattctggcggggcttctttatctgaagctgaggagtacttattcgggttctaaccctataaaagtt

SEQ ID NO: 63612 - DNA, 334 bp, Glycine max
aattccactcctatccaccttctaaacctacttctacatcctcgacaactgataattttcatcatccttacccaccccaaccacactccactcataactctcaacccaatccctctactaaaatccacactacactaatgccaactcaactcaaactcaccatctaatcccaatactcctactcaacctaataccaaaactccataccatcccaaacccaccactaaaccaacaactcctcatccatctacttacaatcccaatcactcacactccaaacccaaacggactaatcccactctcaaacccacacccaaccccacttcttaaacaa

SEQ ID NO: 63613 - DNA, 115 bp, Glycine max
cacgaattttgcttctccgacatgtccaaggtttattgttacttttgtaagtttgagatttccttcttacattatttctttcttattcatttttcttttttttttcttctacttt

SEQ ID NO: 63614 - DNA, 396 bp, Glycine max
tcggggaattccaattccacattttcaagaaataaggaggcaaaaatgggcatatatgaattggaattatttgttttcttattaggcctatcctgaagccaaaggaaatgagatcggaattcctcggggaattccaattccacattttcaagaaataaggaggcaaaaatgttcatatatgaattggaattatttggtttcttattaagcctatcctgaaaccaaaggaaatgagatcggaatttctcggggaattccaatttcacattttcaagagatatagaggcgcaaatgttcatatatgaattggaattatttgtgttcttattaagcctatcctgaagcccaaggaaatgagatcggaattcctcgggggtacccagctcgaattcccta

SEQ ID NO: 63615 - DNA, 217 bp, Glycine max
tatgactccatgcacctactaagctcgaatcggtcgactgcatgcccgccattgtgactccactacgcagtatttgagatcctcatctccttccacattttctcctgttatatccctacattactatttcaaccccctgatatgtcaaatctagacatcagacttatcgacatagacaacactactaccgcaattcacatcatcatcaactactttc

SEQ ID NO: 63616 - DNA, 345 bp, Glycine max
caggacgcaaactatttcaataacatgggggcgcccggggttcaatactctaagaaagatcgggatattcaggcttatttttccttgattgctcaatgtggcgaacttgatgctgagagatcacttgatctctggaaagcgcaaagatcttccgattcttcaatcatctgcggcactgggtctttgatccagctgatagggatatctatggccctagactagaagatagacgactatggccaactcagaagctgcaaaacgcatcggctaacgcatgacatagcataatcccaggtcttcaatgatgagaacatcaccaattcatacagagaccaggttctcttc

SEQ ID NO: 63617 - DNA, 383 bp, Glycine max
gcagaaagcaagctcatcctagagttttaaaaatggcagcagcctcctccatggctctctcttccccatccttggctggcaaggccgtgaagctgggcccatcagcccccgaagtcgggagggtcagcatgaggaagaccgtcaccaagcaggcctcctccggaagcccatggtacggcccagaccgcgtcaagtacttgggcccattctctggcgagcccccgtcctacctcactggcgagttcccaggtgactacggctgggacactgctgggctttcggccgacccagaaaccttcgccagaaaccgtgagctcgaagtgatccactccaggtgggccatgctcggggccttgggctgcgtctttcccgaactattgtcc

SEQ ID NO: 63618 - DNA, 422 bp, Glycine max
  unsure (1)..(422): unsure at all n locations
caacgaatcaacatatgactacttgctacttctgattagacggcgcctgtatacttttgatgattgcaaatctgagatccaagttttctcattcaaaacgggtttgaggaatagagatgttattacggattcagagctcggtcgttattggatgtggctcttcattggttggtcttttgcgagaatgtagacaatgggttgagtacatgtagttcctataatggccatttgttacaatggagagagaatgtgacctatgagttgagtacccataacgaagagagaagagagcctatggtttgaatatccatagtttccataatcatcgactgctacgacgaagagagaatgcaacctataatctaagtgattgttatcctatagttattgtttgccacaacanagagataatgtggttcatt

SEQ ID NO: 63619 - DNA, 227 bp, Glycine max
cacatgcactcgtacataaactcggaattcaactctagcaatcaactattttcacatccaatcataccaatctcaagctagtttacatttttactacttttttcaatcttctccatacacttcacacaatcctcatacttcactctacacctttactccttatttctccctcacaataaccccatactacaatccatataccatttcaaactcactacaatctacta

SEQ ID NO: 63620 - DNA, 189 bp, Glycine max
aatctcggaattctgctctagcttattcaattttaaaatctatttttcaaaaacattccatagaaattttaaaaacttcaatctaatcctctccttattaactcaatctacacaccaaactcataacacaattacaaatctttaacacaaatcttctaatacaactttctaacaccaaaacattccttc

SEQ ID NO: 63621 - DNA, 379 bp, Glycine max
taataagcatttttcaaagcgctcccatactcatattgggtggacaccacagctactatagactagtcatggagcagcttcagcaccaaatgcacagaacccacattcgccacaaagccattgacatgcactcatacgcctagcacatctattatcaacattgccaacctgacacactccacgagctggctgacatcaacaacaccctgaaggacatcaaagacgaagataccgcccttcgctatatccacgccatcgtcaccatagagatgtatactgctcaaacttacacagccacttctaccgctactgctttgaacactgagatgcttgatcatgatactgatagtctagctgatgactatgcgtctactcatct

SEQ ID NO: 63622 - DNA, 398 bp, Glycine max
agaagaacaagtagttgagaactaagaaggagaagcaaagggcttcctcaatgatctcttccccagctgttaccactgtcaaccgtgccggtgccggcatggttgctccattcactggcctcaagtccatggctggcttccccaccagaaagaccaacaatgacattacctccattgctagcaacggtggaagagtgcaatgcatgcaggtgtggccaccagttggcaagaagaagtttgagactctttcctacctgccagaccttgatgatgcacaattggcaaaggaagtagaataccttcttaggaagggatggattccttgcttggaattcgagttggagcacggtttcgtgtaccgtgagcacaacaggtcaccaggatactacgatggacgc

SEQ ID NO: 63623 - DNA, 404 bp, Glycine max
tcggggaattccaattccacattttcaagaaataaggaggcaaaaatgttcgtatatgaattggaattatttgttttcttattaggcctatcctgaagccaaaggaaatgagatcggaattcctcggggaattccaattccacattttcaagaaataaggaggcaaaaatgttcatatatgaattggaattatttgttttcttattaggcctatcctgaagccaaaggaaatgagatcggaattcctcggggaattccaattccacattttcaagaaataaggaggcaaaaatgttcatatatgaattggaattatttgttttcttattaggcctatcctgaatccaaaggaaatgagatccgaattccttgggggtaccgagctcgaatttcctatattgagt

SEQ ID NO: 63624 - DNA, 93 bp, Glycine max
tgtgaaactatgcaccttgatgtattgtgtgcttgcatttgaagggaccattttcattaaatgtcattcagaacagtagattatatattaaaa

SEQ ID NO: 63625 - DNA, 308 bp, Glycine max
atcgtctcgggctttcaactcctcattccaatgacgtgagttcttgaaatgggcatatccgaatggggactacacgtactctgactcagatgccactttttgcagcttggacagatgcatagttcatagctcaattccaatttcacattttcgttctctcaagtgaaatttcaatcctttttattgtcttttttttgcatgcatgaacaacacaagaggaaggggttgtagctagtcaaatggagggtctaaatattatatcatcaaaaaaatcaagaaataagggcggacgactgctaatgaactaa

SEQ ID NO: 63626 - DNA, 410 bp, Glycine max
  unsure (1)..(410): unsure at all n locations
gttttattttattataattatttgttagagcctgtctgatgcgtgtatatatatattgaacttattgaaatataccattatctctaagcatatattgaacttcttctgagcaggttgtgatgcctgtctgatgcgtgtatatatatattgaacttattgaaacatatgtataaagaaaccaatcttaagataaaaactagtatatcaataatctttaccttcaggtctttaacttcttctgtcttggatataatttcttctaacaattgtttgaatttgatttctctctggtacacgcatgagtgcatacacacataaacacacattttgtattacctagaatctaaacatacattntactttgcccaaccttactatgatcaaggagatcttattaatgatgagtagat

SEQ ID NO: 63627 - DNA, 340 bp, Glycine max
tatgacggcgcatgcacgcatacgtaagctcggattaatgggtcggccggctcttagaattacccaacgctcataacccgctgggggtggcttgctcttcatcggcttttccatatcttcatacttctatccgcctctatgataattacaagtgcagagtaatctgattcgaaatggcttgtggcctctctgtcctgtttttttccccccctacataattgtctttattgtagatttgtgttgtacttgttccctaggaaagctcgatactaactggaacatgagattttgaatcccattctttttttgtaaaatatgttaagtcttcgtctcctcaaaa

SEQ ID NO: 63628 - DNA, 407 bp, Glycine max
ccagcctctccttacacatcatacacctcttacactggctcctattctaattactaccccgcttactattctggcgctcctccccctcccccccctagacccttcttcgaccgttacgctgggcccagtgggccttctgctccgcttgattactcctccacttatgaccccatgcccaagcctcccaaaatgggcctcggcgctggcctcgccattggcgctgttgctggggctctcggcgggcttgctctcgacgagggccttaactacgaagaggacaagatcgccgagagggtcgagaacgacgtcgctgctgctgcgcgcgacgattacagcgattaccgagtggattattgaactctcactactaccggtgttgtcttgagatctttgacctacgagtatag

SEQ ID NO: 63629 - DNA, 388 bp, Glycine max
aagaaaaaggctgtgctcttactcttgaagaagatcgtgtggaagagggataacacattcatagaggcctgaaagctgacaggttgacattgatctagactaaatcgcacactagtaactggcataccacttacgaattatactgaaatattcgctaatgccttccgacatgattacaaaagcattgaggatacttgaaggtgatggcaagtcttctgtttctatccgacgcataagttattgcaaaagttcaccacttgtgaaatcatcctttgacaaaattgaagctactgatcaggaaaagaaggtagtgtacgacactatcattgatggggaactcctgcaagagtacaaaacattcaagggagacatttcagtgactccaatt

SEQ ID NO: 63630 - DNA, 284 bp, Glycine max
attttatcgataattcatttttaataaaaaaaatttgattgacggtcttccaatcacctttttttccatcaacaaaattatttcagaatctcatgagaaaaaaaagataaagtatataattaactgaattaaatggtttttttgtttttatgtattcaaagattgttctcgaaataaatttatcgagtaacccatctctatttttcttcgaattaatatttaataaatatttttcttattttgttctgaaaaatagttgttcaaaattatttgtgtgatttttc

SEQ ID NO: 63631 - DNA, 289 bp, Glycine max
cgagaagcgagagctggtgttcaaggaggacgggcaggatgacgcgcgggtactttggatgctactatacaggctattattaggccaattctgtatacttgtgatataggataggaatttcttgacgaattacaatttctcattttgaagaaataaggtggcaaaaatgtttatatatgaattgttattattttttttcttattaggcctatactgatttcaaaggaattgagattggaatttcttgttggtacctaactctaattccttataatgagtcttattaaat

SEQ ID NO: 63632 - DNA, 105 bp, Glycine max
  unsure (1)..(105): unsure at all n locations
agcagctatgatcgtcgcatggcacgccgtatcgtanatgctcgtgaattcggcttcgaggatctcgaatcagtaatcagtcatataggtgcagtgagtggatct

SEQ ID NO: 63633 - DNA, 295 bp, Glycine max
ctcgtttcaaaaaaaggtgccgttattgttgttaccatccagaaaatggcctatcttgttgttatcatcccaatactttcttataactcttacttgaattatcaatcttatttttatttcttttttttttctttttttatatctttaatttttttttttaatcttactatttttttatattttttttcattatattatttctttttttttttttaattttttatttttattatttcttttttttttctttttttttttttttctcttattatttttttatattttttttattttt

SEQ ID NO: 63634 - DNA, 121 bp, Glycine max
attaaccgaagggcttcacacccggaactgtatactttttaaatactctcgaaacacgtccatttcacacttttatgcctcagttattctggcaacctgtattaagacacccctttgatgg

SEQ ID NO: 63635 - DNA, 167 bp, Glycine max
attagaggtgccattatttacatcagcttccactctcttcagtgcttgttccaatctctttttaccatgccaaaaccagaaggattaccatgcggggtccagggattccatgcaaataatcaagggcaagcgcaccaggcgacaaaggcttcaatcccaactaaggt

SEQ ID NO: 63636 - DNA, 55 bp, Glycine max
cggaacctcgagcgggaaagaagacttggtgactctaccagggagagacttggag

SEQ ID NO: 63637 - DNA, 305 bp, Glycine max
tatgacatctcatgcacgcgtacatacgctcggaatccggctcgagacatcatgaaacctcgtctcggcttcgcaatcgcgtaccggctcctagtacatacctctcttgcttccgacatacacataaaccaaagcaattttcgatttgaaggatacaatcgtcaagggatatgcgataacggcggacgatgatgttaatagtacggtgaacgatccgagagacgctgatgtaaggcaataatcggaggaagcaattcaacatccaaatcggtcacagggtcatccaatcgaggcttttcgaaaat

SEQ ID NO: 63638 - DNA, 164 bp, Glycine max
cattgctctgttatgcctgcactgtttaaccaagatactggcaacggctccacatgcatcgtctgatgctctcgatctggcaattttgctctatcctgaaatgcacttcaccggggccactgctgactatggcagttgcccggtaggggttgctacctcttttg

SEQ ID NO: 63639 - DNA, 394 bp, Glycine max
attccattctctctgtgtatttccctacctctcccttcaagatgcagatcttcgtcaagaccctcaccggcaagaccatcacccttgaggtggaaagctctgacaccatcgacaacgtcaaggccaagatccaggacaaggaaggaatccccccggaccagcaacgtctcattttcgccggaaagcaacttgaggacggccgtacccttgctgactacaacattcagaaggagagtactcttcacctcgtcctccgtctccgtggtggcatgcagatcttcgttaagacactcaccggcaagaccataaccctagaggttgaaagctccgacaccatcgataacgtcaaggccaagatccaagacaaggagggtatccccccggaccagcaacg

SEQ ID NO: 63640 - DNA, 253 bp, Glycine max
gcatgcacgcctgcgtaagctcggaattctgctcgaggatcatgcctgcttcattgtcctggtcttatgccaattacgataaggggatacagctactcttgatcggtcacagctatgttgtatatagctgcctcctaatgcgcttctacaatgggactattaccactagtatcattacacctataggcatcgaacccttatattgaaccatagagctttatggcaaacggatcatgctgtacatctgggaaac

SEQ ID NO: 63641 - DNA, 209 bp, Glycine max
tgcagttcatttgcctcaatttacaacggcaatgctgagaggattattgaggcaaatgaactgcatatattctcagcattgccgttgtaaattgatttgtatgtattattccaagaatagaactaattctctatttttggtgtaaataatatttgtatttcctttcaataaaataaagaagatgtaaactatggaagacctatagatgt

SEQ ID NO: 63642 - DNA, 249 bp, Glycine max
atcaaattagttcattctctttgcgcagttccctacctctgctttcaagatgcagatcttcgtcaagaccctcaccggaaagaccatcacccttgaggtggaaagctctgacaccatcgacaacgtcaaggccaagatccaggacaaggaaggaattcccccggatcagcaacgtctcatcttcgccggaaagcagctcgaggacggccgtaccctcgccgactacaacatccagaaggagtcaaccct

SEQ ID NO: 63643 - DNA, 254 bp, Glycine max
cgcatgcacacgctcgtaatctcgctatacgactcaagcatcttaatattcccactttcttgtttgaccggggctcttggggcttgttttgctgatccaaacttgccagtcgccatatttcgacctgcatatctcgaggatacatctaaccaagcatgcctatcataacttgcgaatgccaaatacacctttcctcgtgatgatcatgggaaccttccctatctttgcatggatcttatataccactatacact

SEQ ID NO: 63644 - DNA, 300 bp, Glycine max
  unsure (1)..(300): unsure at all n locations
ccgaatgaacactggctatggtgcccgtactccggaggtgaaatgcgcaagttggaggcttgctgtggaagcacacaacatctttggctttgagaccattcctgaagagtgcgttgaagcaacaaaggaatacatccatggcgaacaatatagatcagactccaaaacagttaaccaacaagcttacttttatgccagagacctcgaagtccatcccaaggacacatttgtgttcagtatagatggcaccgtactctctaatattccatactacanaaaacatggatatggngtggagaa

SEQ ID NO: 63645 - DNA, 274 bp, Glycine max
ctcgagccgttctcttaaaaaacttctgatatatgtccaatgtgttgaccatcatacattctaacccttacgcatgacttagaataataacgtgaaatcaacaaatggaaaacataatcttcatgcattgttaagaaaatgaagcaaatgtgtgtatccaagaagccaaaactatagttagtttaatcttctccccattagcactaaaacaaggggaacaaggttaactattaacatattttgaaaaaaaaaaaaaaaaaaaaaaaaaagaaag

SEQ ID NO: 63646 - DNA, 289 bp, Glycine max
tatccctcaattctatatccttataattataatatacacattctgggcatttgcaattttatctcttcatagaaattttaccaacttacaacgatcattagcataaaatcatcaagcttctctacaccttccctgaacaatctattgatttctttgtttctctcatgtctattatctatgtcaatcataataacctattaattatatgtatattattaatactcaatttatgattaaacttttgaactccatgtaataaccttcattctactaccatactaatataact

SEQ ID NO: 63647 - DNA, 315 bp, Glycine max
tcggggaattccaattccacattttcaagaaataaggaggcgaaaatggggatatatgaattggaattatttgttttcttattaggcctatcctgaagccaaaggaaatgagatcggaattcctcggggaattccaattccacattttcaagaaataaggaggcaaaaatgttcatatatgaattggaattatttggtttcttattaagcctatcctgaagccaaaggaaatgagatcggaattcttaggggaattccaattccacattttcaagatataaggaagcaaaaatgttcatatatgaattggaatta

SEQ ID NO: 63648 - DNA, 397 bp, Glycine max
tcggggaattccaattccacattttcaagaaataaggaggcaaaaatgtgcatatatgaattggaattatttgttttcttattaggcctatcctgaagccaaaggaaatgagatcggaattcctcggggaattccaattccacattttcaagaaataaggaggcaaaaatgttcatatatgaattggaattatttgttttcttattaggcctatcctgaagccaaaggaaatgagatcggaattcctcggggaattccaattccacattttcaagaaataaggaggcaaaaatgttcatatatgaattggaattatttgttttcttattaggcctatcctgaagccaaaggaaatgagatcggaattcctcgggggtaccgagctcgaattccctat

SEQ ID NO: 63649 - DNA, 407 bp, Glycine max
tcggggaattccaattccacattttcaagaaataaggaggcggaaatggtgatatatgaattggaattatttgttttcttattaggcctatcctgaagccaaaggaaatgagatcggaattcctcggggaattccaattccacattttcaagaaataaggaggcaaaaatgttcatatatgaattggaattatttgttttcttattaggcctatcctgaagccaaaggaaatgagatcggaattcctcggggaattccaattccacattttcaagaaataatgaggcaaaaatgttcatatatgaattggaattatttggattcttattaagcctatcctgaagcccaaggaaatgagatcggaattcctcgaggggaccgaactcgaaatccctatagtgagtcgt

SEQ ID NO: 63650 - DNA, 81 bp, Glycine max
ctcgctcgttcgctcaaacctcacacacaacggacacagcgcgcactcttttgctctctcttaacacataaaccctatagt

SEQ ID NO: 63651 - DNA, 387 bp, Glycine max
tctctgtctaatctctttcggtcaagctctgagaaatttggctacaacttgggtttgatgaagtcttattcttgaacctagagtatttccataattaggagctatatgtaatgctttaatttgtaaacagtagatcttagtttagcctaggtagtctgctttgaatcccattgcaatgctttacggtagatctttctagatttggtgtaagttgtaattagatgtcagattctagagtttgatctaagcatgtttctaagtgaattggatattaatatgcctttgttacattcttctcagactctaattagatgtcaagctgtagagtttgatctaggcatgtttcttggtgaattgtatattaatatgcctgtgttacattcttct

SEQ ID NO: 63652 - DNA, 78 bp, Glycine max
ctcactcactggaagccttgccgctacctacgggcatacgggctgtccctatctcgagctgcaatacagtttggcctt

SEQ ID NO: 63653 - DNA, 274 bp, Glycine max
tcggtgaattccaattccacattttcaagaaatagagagtcagaaacgtgcatatatgaattctgacgattcgcgatcttattatgcctatcctgtagccataggaattgagaacggaattcctcggggaatgtcaattacacgttagctacacataaggcatgccacttgttcatgtgtgactgggcagtatgcgaaaccttattaggcccattctgaagccaaaggaaacgagatcagaatttctcatggaatgtcaattgcacattcatat

SEQ ID NO: 63654 - DNA, 309 bp, Glycine max
tgggagtgccacgtttgggaggtatagcaagcgggttaccttagacacttgcgacagggtgttttacgtgtgctatagctggattgagatcttcgaaatcttgtgcactatattaatgttagacattgttaatatcaattgctgcatttttacatattcggatatttacttggtataaatatattacttataattattattattatatagtgtttatttaatgaattacttcgttgcataaattggcaatatttgctactacctaatcatgatcatgatacaaacagttgatgatgtttggaatgaatt

SEQ ID NO: 63655 - DNA, 140 bp, Glycine max
ggcgaatctaattattttttttattatttacaaaagatatatgtacatatattttgttatttccagtctcaaatgatattttagattttcagttatagctcaatacaatgatgatcttaaatttggagaagccttagata

SEQ ID NO: 63656 - DNA, 331 bp, Glycine max
cagagaaagggctaaattgatacaaaacttaacttgcatatttttctggcatctatatggtgttatgattccagagaaagggctaaattgatacaaaacttaacttgcatatttttcttttttgggaggttagacattgctgtacagtagatgggaaactgttttgtgattctgcatttacgaatggggaagtcaaggttttgtagagagtccatgcatggtttttgggctctgatgtattgttgtcattgtatactctactactgggtctgttctgtacattattattcaacagtaaaatggaagaaatctgatcttatgatcctcatta

SEQ ID NO: 63657 - DNA, 338 bp, Glycine max
ttcggggaattccaattccacattttcaagaaataaggaggcaaaaatgtgcatgtatgaattggaattatttgttttcttattaggcctatcctgaagccaaaggaaatgagatcggaattcctcggggaattccaattccacattttcaagaaataaggaggcaaaaatgttcatatatgaattggaattatttgttttcttattaggcctatcctgaagccaaaggaaatgagatcggaattcctcggggaattccaattccacattttcaagaaataaggagggccaaaaatgtcatatatgaattgaattattgtttttattggcctatctga

SEQ ID NO: 63658 - DNA, 356 bp, Glycine max
  unsure (1)..(356): unsure at all n locations
agaaaatattgattctctgttgtcgaagaatacatcacgaaacaattcacaagcaaaaggggtggaagctgaagtaacgagtttccttgcatttccagttggggcggcacgtaattatagagcatttgttcgtgtgactttattctcctgacacaacctggtctgcattcacacattccaacttgtcatctcagattggatgcaggatgtaagtgcaaacactgtcactatatatatatatacacacacacacacaacacacaagaaagatagnttttgggagaatgaaagacggctaggtggattcactcctttctctcttgattgccttggaagaagttgggaccccatagaat

SEQ ID NO: 63659 - DNA, 245 bp, Glycine max
ctacccataccatagtctatgcactgctgcaagtgaagggttcgttgacaccaacatggtatgtgtagggtctatagcaatgttgctgagatatcaagaaggacccaaaggctaaactgtctaagagatattgatagcctaaatcctttagatactaatcaacgcactttcaacatcaacatcatacgtacgctcaactcagacattttcgaaccatgggtcaattcgaatattacacaaaagcc

SEQ ID NO: 63660 - DNA, 377 bp, Glycine max
atgaatagctgaatcattaggataatgccaaaagttttaggttataaaaaaagaaaagataagaacattattccactcaattgattgaaggaaacatgattttttatacagttgtagtttttttttaattaaaatatgattttgcattgctgtgttaaggaagatttatgatgattcctttccttataaaaagccttacatttcagttcatttacattttgtggtgctcctttttcattactgactgattacactgggagatcaggaaccgagatggcaggtgggtaaattgtatactccagcagatgctgttgctcaagggcttaaatctctttctttgaatgataccaagatccttgccagaaccattagtgact

SEQ ID NO: 63661 - DNA, 107 bp, Glycine max
ctcgagccgattttaacatttagtataacattcagtcttgcagttttggagtaagcaaataaggtttatgtatgaaattctgctttgtattgattcatcaactcaaa

SEQ ID NO: 63662 - DNA, 390 bp, Glycine max
caaccttctttctttttctgtgagcctttctttcaggttcttaacttgatcagtgtgcagtgtccaaatcataagggtagttgcaaattgcaatggctaagcatgatgttgagggtggttccttctctgcaaaggactaccatgatcctcctccagcaccgttgattgatgctgaggaactcacacagtggtccttctacagggctttgattgctgagttcattgccacaatgctcttcctttacatcacagtgctcactgtgattggttacaagagccagagtgatgtaaaggctgggggtgatgtgtgtggggagttggcattcttggcattgcttgggcctttggtggcatgatcttcattctggtgtactgcactgctggaatctc

SEQ ID NO: 63663 - DNA, 235 bp, Glycine max
ctcatgtaagacaggcctaaatttgatgacgaattgtacgtatgagtacaattacaggcaaaatgatttgctatcagtgttgcgagtatgcttatatctactgttgctgcagacatgtatcttgctcttgatgaagatgcgacatgtatacattaagcacacccgagcttggatactctccatacgacacgctatctgatattgctagcgagagattatatcatacactggcact

SEQ ID NO: 63664 - DNA, 109 bp, Glycine max
attctattcccccatattgtaaagcagttgtgatttctagcaatgcaagttttgaacaaaaccagctaaatacattatatatatatatatatatatatttttttttttt

SEQ ID NO: 63665 - DNA, 314 bp, Glycine max
ctacagccgccaagagctgttttgctcccagtctctgaagacacacaagtggtagtggtacagacacaggatacatacaaactgatggtggaagccatgcgtgtcaactaagcagtggttacttacacttggagtcaagaccattctaatggaagcctttagtgcacatgcttagctctacatgttactgaggacccatggtatcgttgtgtgtacatcagacttcggtcgccacatttatagggttcacatcgctctgggagaatgttcaatcagcgaatgaatagatagcctatcgatacctgaacacactg

SEQ ID NO: 63666 - DNA, 149 bp, Glycine max
gggagtagaagtacaagcttcacttcactctgatcagttcgtcattgtggcatcgataattcgtctctatagctgttaccaccgttctctctcctctttgcgcattggaatagcaactcttagtctccaatgtccaagatgctggcagt

SEQ ID NO: 63667 - DNA, 254 bp, Glycine max
ctctaaaagacctatgacgatgcatgcacgcgtactttagctgataatttggctcgagatcataaccacacactctagatcatatgctgcttatacggctagatcttaatctatctgatgacgagcattatggactctatagcagagctataggagactatatctgagcttccggccatgagttgaagtcattattccagcgaagaaccgttgctgcgttaaggatatattatactgagacctttgccgtgcta

SEQ ID NO: 63668 - DNA, 372 bp, Glycine max
gatctcttccccagctgttaccactgtcaaccgtgccggtgccggcatggttgctccattcactggcctcaagtccatggctggcttccccaccaggaagaccaacaatgacattacctccattgttagcaacggtggaagagtgcaatgcatgcaggtgtggccaccagttggcaagaagaagtttgagactctttcctacctgccagaccttgatgatgcacaattggcaaaggaagtagaataccttcttaggaagggatggattccttgcttggaattcgagttggagcacggtttcgtgtaccgtgagcacaacaggtcaccaggatactacgatggacgctactggaccatgtggaagctgcctat

SEQ ID NO: 63669 - DNA, 387 bp, Glycine max
gagagttgggacaacatatcaggcagtgcatatggcctctggagggtcgttacgctagcaattacttgtgtcttcttcattttcttattcttactaattgtaaatgtgagaagaagaacgtccaaagttaagaagtgaaagtaattaaatcataatatgtgagatcacagagtctaaaagattttagagaacagatattttagacaaagccatggtttgaattgaaccatcgatattctcatccccggtcgtatagcttatacagttaaactggattttgttctaagttttgtccattgatgagaaacccagttcttgatttcaaaaaaaaaaaaaaaaagaaaaaaagataaaagtaacgagagcacaacaagtaaccaagatact

SEQ ID NO: 63670 - DNA, 367 bp, Glycine max
  unsure (1)..(367): unsure at all n locations
tcggggaattccaattccacattttcaagaaataaggaggcagaaatggtcatatatgaattggaattatttgttttcttattaggcctatcctgaagccaaaggaaatgagatcggaattcctcggggaattccaattccacattttcaagaaataaggaggcaaaaatgttcatatatgaattggaattatttgttttcttattaggcctatcctgaagccaaaggaaatgagatcggaattcctcggggaattccaattccacattnttcaagaaaataagggaggggcaaaaatgttcatatatgaattggaattatttgttttcttattaggcctatcctgaagccaaaggaaatgagatcg

SEQ ID NO: 63671 - DNA, 250 bp, Glycine max
ccgacccaccttagcctgtctcaccccaaaaacaagtccgtgaggattccggtcaaactctttggccgtttactggctcaacaaatttggagtggcagaagagagtggcattagaaggcataatcccagtgctggtgcaattgctgcattccggaacacccttttacaaacaaaatgcagccatttcaatcaagcagttttcaaaaaggttcatatcgctttgagccgagccccaataaagaagccctag

SEQ ID NO: 63672 - DNA, 213 bp, Glycine max
cggtctcactctcactctcacaaacgagaccgtcggcgtgggcggcggcgggtgcggtagcagcagctctccgagtccgtcgccgtcgccggatcggcactcgtgaggaccgtcgtgccggatgccgatgcggtcacataaggacttggccgtgtagcccgctgctggtggccgaaatcatggtgcggcggatcctgagatactatcttcctg

SEQ ID NO: 63673 - DNA, 348 bp, Glycine max
tttatcagtggccttacgatgactatgcttcagccaggcgaaatgagatcggaatcactggaagaattccgctgccgcagtttcaagaggctacgttgcagactaggtcatatatgaattgaaactattcgtgatctcagtaagactcttctgccgcccttggttatgagatcggaagacctaagctaatgacgatttcacattataccgtcctatggatgctctcatgatcatatgtgaataggatgtattcgtagacataacatgtctatcgtgtagccgctggtcatgtgatcatgatacctacatggtaccgaactcgactagactcatatgagtctcattaaa

SEQ ID NO: 63674 - DNA, 427 bp, Glycine max
cttcgttccctaattgaggactggcagaccaacaggatcaacctaagttagaaagattttagactcgaccctgcccatgaatcattaactcaactgggtattgcttaagtaacacgtgtattaattagcgtcactgtcaagcattgcattatcatctgctcatagcatagcataacatgcttatcccttagatcatcgatctgctgctatggaaactggcgtagcatgctacactcacacgccattctagcttagtgttgcttccaagcactctcacacctgtcatgtgtggcatcttttgacattgacgagctctgttatcaagctctttatatggtgacttgctaaaagtggcctacaattcaaccatgaatgtttcaatgacaaagaatccttcactcgtgaccagataccaaaattggtgaca

SEQ ID NO: 63675 - DNA, 396 bp, Glycine max
ctcgagccgttgaaagcgtgagaatgccggtgaagaagtgttactgcgattactgcgacaagctattccaagacacaccagcagatcggaaacgacacgttcagggcattcaacaccaccaagccaaagctcgctggtacgattccttcaaacaacaacaaatccctccgattcccaatcgacccctttgctttcacttcgtcaacacgggattttgccgctacggcgactcttgcaaatatctccatcccgttcccaacaacaatgtccagcagccgccaatcgtaaccacaccgtcgccttcaccagcagcaaggggaggcaaatggagtttatggacctattcatcgaaagcactcttagtttttgtcaacatcttatctttttcatctttat

SEQ ID NO: 63676 - DNA, 359 bp, Glycine max
catgacttgcatagactattgattgctaacgctattgtcggtgattcgctagctccaacaatgggctctagcaaattatcagtcattatagaccttgagcgtgtaaccatctcatacgtgatcattgactaacgggttgctaaagcacgtgctctgccagaaccatccgtattgcctggcaaaggagatatgcctactgacgatcctcatgcactggtggcactactgacatattaggctgttacttttcctgcagagcatgatctaccagcagtatccaaagcaccagttgctgtagtaatagacaataacctccaagtaatccctagagtacctatgatcgatccagacactactac

SEQ ID NO: 63677 - DNA, 341 bp, Glycine max
agacagcttgacgtcgatgcacgcgtcgtagctcgaattcgctcggtgaaaacttgtggtctacgaaaagcattcctcggaaggatgcgcaagaggtcattcaagagtgcaaagagatatatgagaattcacttgttgatggaagacctccaaaggcaggttttgtttttcgacgtgtgaagtgcttaacagcaaccaagggagggctttggcgtaaactcacttgaagtacgattccattcagttattcatatatcttgttttgcctgttaaattatttgttccttttgcataattcccaaatgctatgctgtcaattagaaaacagttttgtaaattca

SEQ ID NO: 63678 - DNA, 422 bp, Glycine max
aaattgtagattttttttttgtgatttttgaagatgatccacatggaattgttttcccaatttgaagctcttcccgtattgttaaagtgttggtatatccacaggttaagagggatgtaaatcttttagcacattagttgcagctgcattgtgatttgaaggtcataggttcaatttaaatcctagaaacagtctgttgggacttaggaagttaggatccagttgcaaggcatgagacttgagtcacatattggaagtatggcatgttagtgtgggatttacaacaacagctagtttttgtggtgtggttcttctaaagtttctcatcaatttgtatcagagcctttcactatgtctcccagctgcaaacaagtggtgctggttgcgatgatggcatcactgtgtttgaccggagctagtgc

SEQ ID NO: 63679 - DNA, 328 bp, Glycine max
gctgattcttcttctagtttcaatgaaccatcaacaagcagagtcggagaaccaaaacataagttcttctcatttggtggtaatgaatcctcatgcacacaaatcaaaatgagccaagttgatctacatcaatcaactcaactgcaaccaggtgcacaagagctcatgcctaataataagtttgcaacaaatgaagtggaactgaagaccttgaaaagaaaggcttcagatattgaccttgatttgaatctgtcacttaagttaaattcaaaggtcaatgctgagaaccaaggaagcatggtggaccatgaagttgttgatagcaatc

SEQ ID NO: 63680 - DNA, 249 bp, Glycine max
tcggggaattccaattccacattttcaagaaataaggaggcaaaaatgttcatatgatgaattggaattatttgttttcttattaggcctatcctgaagccaaaggaaatgagatcggaattcctcggggaattccaattccacattttcaagaaataaggaggcaaaaatgttcatatatgaattggaattatttgttttcttattaggcctatcctggaagccaaaggaaaatgagatcgggatttc

SEQ ID NO: 63681 - DNA, 352 bp, Glycine max
tcggggaattccaattccacattttcaagaaataaggaggcaaaaatgggcatatatgaattggaattatttgttttcttattaggcctatcctgaagccaaaggaaatgagatcggaattcctcggggaattccaattccacattttcaagaaataaggaggcaaaaatgttcatatatgaattggaattatttgttttcttattaggcctatcctgaagccaaaggaaatgagatcggaattcctcggggaattccaattccacattttcaagaaataaggggaggcaaaaatgttatatatgattgaattattgtttttattaggcctatcctgaagccaaaggaaaga

SEQ ID NO: 63682 - DNA, 406 bp, Glycine max
  unsure (1)..(406): unsure at all n locations
cgttgaaacactttcccccttaccattcgtctcctcaatgcctgtcttgtttctcgtcactttgcagcctgagtgttttatctcacaaacaaccataatggaatttcaccaccaggtcctatcaagctggagctcaaggtgggtctgaaacggtgttggtggcttgagagcttaggaagcagtgcagtcagaaagcattctatggactgaaatttattggcagtgaatccaatggccttgttgtctggatcaagagatctattcagcctctttggatgcccgtcggaacctgcaacgtgtctcccgtctcatgtcttaaagatttatgttctttttggagcaatctttaaagatttatgtccactaatntattattacaagtatcttctttgattctagttgcatg

SEQ ID NO: 63683 - DNA, 326 bp, Glycine max
gcacctactaactcgaattcgctcagcctaccaacttatcattctcacacaaaaacaatggaaggatcttcaagctcttttcctttactgctcaacaaatttcagtgcaaaagatccattaaagcataatcccatctgtgcattctcattccaacacccttacaaacaatcacctttaatatcatttcaaaattatatccttgacgaccataaaacctacatttaaatctcctttaccagaactgttgtcacacactagccctgctcattcatcttcattctcatttcaactaatgccttgacccttgtccatcttcaatcagata

SEQ ID NO: 63684 - DNA, 339 bp, Glycine max
  unsure (1)..(339): unsure at all n locations
attctttcagcttggctatgatgactcataaacgtcttgattcacccaacagcagcaaaagcccctcccacaaagaccaagatttcccttccaactgatacacaaaatacaaagtatgtctcaattctcctctcgcaatttgcatggatcatgaagactgtgagaaagattcttcagttacaagatattccacggttaccacgggtttgaataatcattttgtttgtgaatgcatgtttggatttccttttatttttttgaattatataggtaagnnccttaaatttccctcagtttttgagttatatatgattcctgatcgatctacatgaatagctt

SEQ ID NO: 63685 - DNA, 351 bp, Glycine max
  unsure (1)..(351): unsure at all n locations
gttagttgatgagcgggagcgcatgaagaaacaactggagaaaactaaaaatcagaaagaaaaactggaatcattatgccggtcacttcaggcagaaaggaagcaaaattcttcagagaacaagagcaataactcggttcaaacatgaagaagaatcggttccttcttccatctggatggaaatgtatttttctaatagtggcattaatgtgattcttttgcttttttatccatttcaagatttaattgtgtaccttttcttgctttttcacgacaaatntncctgtattggaaagtttgtggaatcttctgcgtcgtcggattatgaaccttcacgaaaaatatgacttt

SEQ ID NO: 63686 - DNA, 332 bp, Glycine max
tcggtgaattccaattccacattctcaagaaataaagaagcaaaaatgggcagatatgaatcgcaattattcgttttcttattaggcctatcctgaagccaaaggaaatgagatcggaattcctcggggaattccaattccacattttcaagaaataaggaggcaaaaatgttcatatatgaattggaattatttgttttcttattaggcctatcctgaagccaaaggaaatgagatcggaattcctcggggaattccaattccacattttcaagaaataaggaagcaaaaatgttcatatatgaattggaaataattggtttcttaataag

SEQ ID NO: 63687 - DNA, 301 bp, Glycine max
  unsure (1)..(301): unsure at all n locations
catagcaaggaggcgtccatgtgctttgtgatgaggttgggatatccaaaggggcacccttgctgttgccagaatcaccgaggagtgaagacccaatatgctgccaaaggcaagttgaataccaaaaaataatcaaatcagacagcactgggtttcaaggacaaaacttgctgtggagaagaagatatatttgcaaacatactactaataaattatagtattaaattgttttggaattacgatttcttgtgaatgntcannataattaggnnttaatanannaattgagtgcattgtgtta

SEQ ID NO: 63688 - DNA, 364 bp, Glycine max
  unsure (1)..(364): unsure at all n locations
tcggggaattccaattccacattttcaagaaataaggaggcaggaatggtcatatatgaattggaattatttgttttcttattaggcctatcctgaagccaaaggaaatgagatcggaattcctcggggaattccaattccacattttcaagaaataaggaggcaaaaatgttcatatatgaattggaattatttgttttcttattaggcctatcctgaagccaaaggaaatgagatcggaattcctcggggnaattcccaattccacanttttcaagaaaataagggnaaggcaaaaatgttcatatatgaattgggaataattgttttcttattaggcctatcctgaagccaaaggaaatga

SEQ ID NO: 63689 - DNA, 63 bp, Glycine max
gagtaaccaaaaagcttgatctggttacaaaggtgaaaaagtagttaaccccctttaatggac

SEQ ID NO: 63690 - DNA, 143 bp, Glycine max
atttttttatagcaataatagctagttttaagagcaaggtatcactagtcactttcaatttgtacagttttagtatgatttaggatattaagcttgacttgaattggtcaaattttaatttaaaaaagaacaaaattgtcttt

SEQ ID NO: 63691 - DNA, 165 bp, Glycine max
gctatgacgtctgcacgctcgtagctgattatcgccggcctgagctccattcttggggggaactggtatatgctatgtctgggaatgttcctccatcccccttcacccgactaaggtaccggggctataatactactactatgctggctactgccgtttcaccgg

SEQ ID NO: 63692 - DNA, 379 bp, Glycine max
  unsure (1)..(379): unsure at all n locations
ctcataacacaaagcacaaagcaaagctcatccttgagttaaaaaatggcagcagcttcttccatggctctctcatccccatccttggctggcaaggccgtgaagctgggcccatcagccccagaagtgggaagggtgagcatgaggaagaccgtcaccaagcaggtctcctcaggaagcccatggtacggcccagaccgagtcaagtacttgggcccattctctggcgagcccccgtcctacctaaccggtgagttcccaggcgactacggctgggacactgctgggctttccgcagacccagaaaccttcgccaagaaccgtgaactcgaagtgatccactccaggtgggccatgctncgagccttgggctgcgtct

SEQ ID NO: 63693 - DNA, 62 bp, Glycine max
ttgtgctttggaagaaaaacataaccctcctttctactgtttgtccttggagataattctta

SEQ ID NO: 63694 - DNA, 403 bp, Glycine max
tcggggaattccaattccacattttcaagaaataaggaggcaaaaatggtcatatatgaattggaattatttgttttcttattaggcctatcctgaagccaaaggaaatgagatcggaattcctcggggaattccaattccacattttcaagaaataaggaggcaaaaatgttcatatatgaattggaattatttgttttcttattaggcctatcctgaagccaaaggaaatgagatcggaattcctcggggaatcccaattccacattcttatgatgtatcgaggcaaatatgttcatatgtgaattgtaattattgggtgaaatattaagcctatcctgatgccacacgacatgagatccgaattcctcgagggtaccgagctcgaattctatatagtgag

SEQ ID NO: 63695 - DNA, 239 bp, Glycine max
tgcacgcttacattagctgataatttcactcaattccaattcttcattatcaccatataattcataccaaaactgaaatatatccaattttaaacatctctcctcttattacacacaatccttaatccaaactacatgaactcacaactactctacaaactccaactccatattttcaatatataattcaccaaaaatattcatatatcactagaaattatctatacttcttattaacc

SEQ ID NO: 63696 - DNA, 415 bp, Glycine max
atcaaaagtattgaatgatcgaagcaattgctcatctgatgcatctttattatcctgccatattaaaagactttgttaaacttggtttcattccatatcgtttcaatttttatcctatcttgtcatttctttctattttattttatctttttttttttattttatattttttttataatttttcttttttcttaatattttttaatttttttttttttttttttttttttttttttttttttttttttattttttttcttcttatttttttttatttattttttctttttttgttttttactctttttttttaactttttttttttattattttttttttatttttatttttttttttttattgattttttttttttattatttttttatatttttatttttttttttatttttt

SEQ ID NO: 63697 - DNA, 116 bp, Glycine max
cttcactatttccattacgagtatcttatatcataactgtatacatgccttttattctttcgggtccctctactatttatagccaccttcatcttcccaaatgttattatattact

SEQ ID NO: 63698 - DNA, 335 bp, Glycine max
tctcattcacgcctgcctaaactctcaatttctttccagcacaaccacattctcacaaacattaattactcaatttacagacgtgttatcttcctatcaaaaagagattgcataaacaaaccttttaaaaccttccaatacctttcaaaactcgtaaacttgcaccttgaaaccactcacccctacacattcaatatgttcaatcaattttaaatttccttctgccttaacataaaatcctttataaccttaaattttccttatccgctttaacatttctttcaaaaacccatgcttcaccctttctttaaactactaacaatccttttaattct

SEQ ID NO: 63699 - DNA, 458 bp, Glycine max
  unsure (1)..(458): unsure at all n locations
gatcgcgattttccgcccttttttttcctatntaatncgtntaatttgtaattttttgttgtcttttatttatttttttgttatttttatatatttttttttattttttattatattatattatattttattatatatatattttttttattttttttaattttattttttattatttattttattatttatattttatttttttttatattttattatcttatatttttatttttttttattattttatattttattattttttattttaattttttattttttattttattatttttttattattgtttttttttttttttaattttattattttttttttatttatttttattttttattttttttttattatttttatctaatttttttattattatatttttatttatattattatttttatcttatttatatttttattctattttaatttt

SEQ ID NO: 63700 - DNA, 441 bp, Glycine max
ctattaccttgcatgcactcctacattagctcttaatttttctctaacactttctatttttcaccactatttccaccttcacagccggaacctttatcttttttttccttccattttcctttaaatctatttttatgactttcttttcttttaaactcaacctatttattaactattattccatattttttctactttcttttttcttttttaaatttttaacttttattttttaatttttacttttcttatattattctacttatttctaatttcttttttctttttcaatttttttttttccttttattttactaattacctctttatttttttattttttacttttttattataatttttttttaacatttttttttccatttttatttattatatttatttctattttctttataatttttataattttttttttaa

SEQ ID NO: 63701 - DNA, 169 bp, Glycine max
ccaattcaacatatgaaaagttcttttccttctatacaaagatgggatataaaaagggcgtacgtctactaatgagctcgattaccaccgaattaattccagactctttcctgcaggcctaccatcttatccctatattgagtcttattacaactaagcttatataatc

SEQ ID NO: 63702 - DNA, 165 bp, Glycine max
attttacttcccttcatcgaagaagtaaattctctgttgtgttaaaattcttaagggcgttaatgaaacatgggcaagggttttgcagaaatagggagccttcctcctcccctttcactagaaagatatctcttcccaacctattgaagcactacatttcagcct

SEQ ID NO: 63703 - DNA, 429 bp, Glycine max
tacgaccatgcatgcacgcctactctagctgctaattccgctcaatgccaactcctcatcctcaagaactcactatctacaatgggacacagatcaattataatatcttgtcactatatcatacccactatgaaccatatgcaaacctgatttgaaaaccacgctggaactgctattcattatcccatattgaactctattaaattgcttatcatccaatatctgacatatgatcagaatcacattaatttcaacactacacgcaaaatcacactaatttcctttagataaacagctcaagctatcaactcatccaaatctgatgcttcttcagataacactccacatggctcatttcagaaaaagccttttcaaactcctactttttctaatgtattttaagctttcgtatttaaagtctttgattat

SEQ ID NO: 63704 - DNA, 467 bp, Glycine max
gctatgactccatgcacgctacgtaagctcgaattcgctcgagggaatggaaatcggagctgcagattggaatgccaaaactttgaacttgaggcttccgttaagcttccttctagagttccttatgggtttcacggcacttttattcattcaaatgatttgaggaaacaagcttgaattggtgacggtatataagtgagttattcactttctgatgagagttttttctgttttatatttgcatatacgctttctttatctattttttttgtttatactgttttttaatttttttttttttttctttattttattctttttttttttttgagtttttttttttttatttctttttgttttttttttttatttatttttttctttatttatattttttttctctttattttttttttttattttatattcttttctttttattttttattttttttttttttactttt

SEQ ID NO: 63705 - DNA, 237 bp, Glycine max
gaaacttatcctaagtttgttttggtgactacatctctgggtggcttacagaagttccttccaaggaaccaaatccaagctgttaccccatgtgagaaaagcaacttgctttcgtatagaaaatgctcacacgcttagacctattgttgttttgatgatcatatatgcttcatctttaactgtgttctaatgatatcgatactatagcacatgcttgttagatcaaaagtattccat

SEQ ID NO: 63706 - DNA, 302 bp, Glycine max
tcggggaattccaattccacattttcaagaaataaggaggcaaaaatgtgcatatatgaattggaattatttgttttcttattaggcctatcctgaagccaaaggaaatgagatcggaattcctcggggaattccaattccacattttcaagaaataaggaggcaaaaatgttcatatatgaattggaattatttgttttcttattaggcctatcctgaagccaaaggaaatgagatcggaattccttggggaaattcaattccacaatttcaagaaataaagaagcaaaaatgttcatata

SEQ ID NO: 63707 - DNA, 402 bp, Glycine max
tcggggaattccaattccacattttcaagaaataaggaggcaaaaatgtggatatatgaattggaattatttgttttcttattaggcctatcctgaagccaaaggaaatgagatcggaattcctcggggaattccaattccacattttcaagaaataaggaggcaaaaatgttcatatatgaattggaattatttgttttcttattaggcctatcctgaagccaaaggaaatgagatcggaattcctcggggaattccaattccacattttcaagaaataacgaagcaaaaatgttcatatatgaattggaattatttgctttcttattaagcctatcctgaagccaaaggaaatgagatcggaattcctcgggggtaccgagctcgaaattcctataatga

SEQ ID NO: 63708 - DNA, 322 bp, Glycine max
catgcacgcgtacgtaagctcgtaatacaactccatgctacaggtttatgttcattatctttcacttcaaaaatggtaaaatgtaaatttaaactgtttgatcaataaatatacctatactgcatcataatcaaacgatatctctattcctctaactacctaacctacattcattatactaagtagatttaaattcatatcatatcatagctattaacattattaaatatttatatactcacaatttaacacatcatacataaccttattcataaacttttatactctatactgcctaatgagttatctaacttacattaat

SEQ ID NO: 63709 - DNA, 313 bp, Glycine max
cggctcgagattctctacattcaacttgcacatgttggattatcaatctagccttgttcgttgtgtgcttggctctttaattatgcttcagtacgtggagtgtcccctattcgacatttatggctttcagtgaacattacccatagattttaaaccacgcatagtactataattactttcgcgagataaaccgctgagtatatagtaggtaaatgggtacaacatgatgcatatccatatccattgtcgctatataatttccacttgtctcttaagtatactgactaatctatttcacctggttatattattc

SEQ ID NO: 63710 - DNA, 369 bp, Glycine max
tcggggaattccaattccacattttcaagaaataaggaggcaaaaatgtgcatatatgaattggaattatttgttttcttattaggcctatcctgaagccaaaggaaatgagatcggaattcctcggggaattccaattccacattttcaagaaataaggaggcaaaaatgttcatatatgaatcggaattatttgttgtcttattaggcctatactgaagccaaaggaaatgagatcggaatttcatggggaatttcaattccacattttcaagaaataatgaagcaaaaatgttcatatatgaattggaattatttgccatcttattaagcctatactgaagccaaaggaaatgagatcggaatttc

SEQ ID NO: 63711 - DNA, 138 bp, Glycine max
tatagcccaagccctatacaaccaaaccctaacacagatgcattttattcagtttccatggctagcctcaaggttgcatttttgtctgcagtgctctgcatggttctggtgagttcacccattgcacatgctgctttt

SEQ ID NO: 63712 - DNA, 314 bp, Glycine max
ttgcatgcatgcatgcagactctagatgatcgattccctcaatgacaatcacacactcataagaaataaagaatgtttcatgtgtgtgtatgatttagaaggaattagtttgtcttattaatgacgatcctgctgccaccagaagtgatgtcagcggaactccagggggactaacaacaccacattaagaagtaatgaggaggcaaagatcatcaattattaataggtattagttgtcttattatgactattatgctgccacctgatgtgatgtcagcgttactccttggagaattactacacctcattatgaa

SEQ ID NO: 63713 - DNA, 408 bp, Glycine max
ggctaatccctcaagcaagaaaggcatgtggtattgggatgatgatgaacaagaatatcctattactgatgtgatcaaattccgagttactaatgtgagttatccccaaattccagttgaacaaccaaaagaatcaaagccatttgcccctatgttggtctctggagcgatagatgatgatggtctaggccctatttcttggtggtttggagatgaggatgaggacgagtaaatgagtccaaaaatggtcggatagaagatatttcggatgctttctgcatgatttttaatttaacaactcaagttacaactcgacaacagtatacttttgttaaattcctttgcttcataaagtatttaattcaatgaaaaaaaaaaaaaataaagggcggacggcgactagtgagc

SEQ ID NO: 63714 - DNA, 281 bp, Glycine max
cacgcatacgtaagctcgcaattcatctcgagctcacacaacacacatcacacaccatatcatatccacctctttgtatatctcaacctttattcccatccatcatctcatcacaatcctcccacttgcacttcctcttcacttccaccaatcacaccaacaatccttaacctctaacacaatctataccactatcaatctccttaccacattaacactatctcacagaccctaccttttcaaatacttaacaccactctctaaccactctacttactacc

SEQ ID NO: 63715 - DNA, 396 bp, Glycine max
tcggggaattccaattccacattttcaagaaataaggaggcaaaaatgttcatatatgaattggaattatttgttttcttattaggcctatcctgaagccaaaggaaatgagatcggaattcctcggggaattccaattccacattttcaagaaataaggaggcaaaaatgttcatatatgaattggaattatttgttttcttattaggcctatcctgaagccaaaggaaatgagatcggaattcctcggggaattccaattccacattttcaagaaataaggaggcaaaaatgttcatatatgaattggaattatttgttttcttattaggcctatcctgaaaccaaaggaaatgagatcggaattcttgggggtaccgaactcgaattccctat

SEQ ID NO: 63716 - DNA, 232 bp, Glycine max
catcactcccatctttataacctatatttcccacctacattaacctacaactactttacatactcctaacacttttcttatttaatatatcacttattttatttgcttatcacatattattccaatactcttccaaaccatactctatatacaaacaatacttacaattactaaataattttctttgatattcttattatccatcttactcatttataccttactttaatct

SEQ ID NO: 63717 - DNA, 373 bp, Glycine max
tttttttttttttttttttttttttttttttttttttttttttttttttgtttttttttttttttttttttttttgttttttttttttttttgttttgtttttttgttgttttttttttttttttgtttttttttttttttttttttttgttgtttttttttgtttttttttttttttttttttgttttttttttttttttttttttttttttttttgttggttttttttttttttttttttttgtgtttttttttttttttttttttttttttttttttttttgtttttgttttttttttttttttttttttttttttttttttttttttttttttttttttttttttttttttttgttttttttttttttt

SEQ ID NO: 63718 - DNA, 417 bp, Glycine max
  unsure (1)..(417): unsure at all n locations
cccgaagaccaatacattactagccctgatggattgaaatactatgatttggttgagggcaaaggtccagtcgctgaaaaaggaacaactgttcaggtacactttgattgcttatatcgcggaatcacagctgtctccagtcgagaatctaaactcctagctggaaatcgtatcattgctcagccatatgaattcaaagtgggagctccaccgggaaaggaaaggaagcgcgaatttgttgacaacccaaatggtttattctctgctcaagcagcaccaaaacctccccctgctgtgtatataatagttgaaggaatgcgagttggtggaaagcgaactgtgattgttcctccttgaaatggctatggtcaataaggaatgaatgagattccgnctggagctacatttgaactaaat

SEQ ID NO: 63719 - DNA, 203 bp, Glycine max
  unsure (1)..(203): unsure at all n locations
tcttggtgaattgcaattccacattttcaagatataaggaggcaaaaatggtcataggtgaattggaattatttgttnacttattaagcctatcctggaaccaaatgaaattggatcggaattcctcggggaattccaattccacattttcaagaattaaggaggcaaaaatgtgcatatatgaattggaattatttggtttc

SEQ ID NO: 63720 - DNA, 200 bp, Glycine max
tccaaattctccagccatggcagtttcttctgcgtctgcttcctccaaacttatactattcccccatgcttcatcttcttcccttatcttcacacccttccgttcctccaccaacacccacaaactatcccctctctcctgcttcttccttcaccctatcatcgttcttcgccgcaccctctcctccaccactaccacca

SEQ ID NO: 63721 - DNA, 383 bp, Glycine max
caactgcactgacgaattccaggttcgccgcgtttgcagagcgagaccaaagtctcatcgatcgtggacctgatgcatcccatcaccatctcgtggtgctgtgcacccctatcaatccttattggcggccgtgccgtacgtttcctgcggcagatcggtaccagttatctgcaccgtaccctatatatctatcagctgtgcaagctgtgatgaccatcttcgacagcttcgatgaacccgacgttaactgcatcatcgtattcaaagttaatggatcggtcgggatcctgcacgaccgacgatttctcctcgactcattcatcgaccaacgagtcacccttcgacagatgatagtgactgcacatgatccatggcaagcttta

SEQ ID NO: 63722 - DNA, 214 bp, Glycine max
cttgaaaccttaccaatattaaccctcgcttcgtagtgggctctggctatcttatgcatcgactttgcatattcttgatcctatcgcagcatcgttatactctccattccatggctttgcccaatcagcaaaccgtggattacccttgtgtcatactcgttatctacagtgatggacgcacacgaatgactacttctgtgctaatgcatctgac

SEQ ID NO: 63723 - DNA, 92 bp, Glycine max
aaaacagtaagaataaaaaaagataattgatgtttaatttgtgtattttctgaaggcagtatacaatttggcttgtaaactccatctcgtaa

SEQ ID NO: 63724 - DNA, 231 bp, Glycine max
catgcacgcatacgtaatctcggaattctgctcgagatttcctgtttacctaattgcttttactcatttgactacggttcccttatatgttctatctccctttatatatatatctcataactaatcttatcatacaacaaattcaatctcacacttacacttacacacatattaattctcattttatttctcataactaatgatttcatactcattattctctataactat

SEQ ID NO: 63725 - DNA, 320 bp, Glycine max
acacctgacggaatctcagaattcgtcttctatacttattgccttcgattcacacactctcttcaatttctatgttaaggctatttctttgcctccgttccccctttctcacaaaaacaactccttttctcttctccttcttatctattctttgcatattattttttgttgattgaatgcattcacatcctaattcattactacattttaatccatttatctaaccattactgaattacctaatctaatctaaacgtttaaaaaataaatctattattattattattaaatcaaatttttactaaacttacctcccatac

SEQ ID NO: 63726 - DNA, 73 bp, Glycine max
ctatcacgtcgcatgcacgcatacataaactcggaattcggctccagcacatatgcacaccatctacacttac

SEQ ID NO: 63727 - DNA, 331 bp, Glycine max
aataggtgctaacatcgcctggccaaattcagatgtcattgacaagtaatatccattcattgtgggcggtttaatggtccgtttcaacttgattagatttgttatctagtattccttttttaatttcattttcacatttttttgtttatattttttctttcttgtttatatatttttttgttatatttctttttcttattatgtctttttttttattctatttattattttttctttttttctattttatattttattttttttattttatatatttttattttttgggggtgtttttattttcttttatttttatatttttttttttttt

SEQ ID NO: 63728 - DNA, 309 bp, Glycine max
caacccagattcataaactctcaattagcttaccgtctctgtcttatacctcaattttattactattactagtacaacttatcatacacatataccactggatataactccaatctatgctatctctgtcactatgaagatatatatacacagaccaagtacaacaccaagctctatctagctatctacatgtctagccgtatatccatacaacattcactttctacaaagatctccgacgaccaaatcatctaacttcttaacaaattgctccaacttcttcctgacattcataatatgcaatcatat

SEQ ID NO: 63729 - DNA, 286 bp, Glycine max
catgtatatatggagtccctacacatatactgtatatagtggttttgtttttttgccaattttgttcagaataaaaggtggagcaagtttgtattcttaaagcagatgatgaaagaacgtgaaataaccctatgaccttacgtcccgacactgtagttttactatgctgtggagtcctttaatcttaattcgtatacgtagtttgaaaaataaaggctaaatgaatttgtaagttcctgtattatttaacaattttaaacatgtcaatacttttaaaaaaattatt

SEQ ID NO: 63730 - DNA, 413 bp, Glycine max
ctcaaagttcttaacccccgaagctctctcaattgcaatggaccatacatcggatcctaaattatcacatagttatattatctcactgcctctcttttacctatcttctatattcttctttcatgtctcaaaattcctaactggatttaagtgattattgctaatcatcatccttacattagacagatataaaggtctttcctatgatgttacatacttccatcattacatcacattactgaatatttttgtattattacctctttcatagcttcttactatggctggttcttactattcattcattgatcttttattagttcctttatctctttactttaacatttcaatttttatatcatcatttttcttttttactattgttacttcttttatttattttctattttttt

SEQ ID NO: 63731 - DNA, 215 bp, Glycine max
ctcgagccgatcatacagatcaatcaaactcgttattcatgtctatgataccctgctgcaaaagagaagaataacgagtttgattgatctgtcacgtagctacttcacgtgaccacttgtcgtactcatatttagcatgatatgaatctgaatttttatcttgtgccttatcattaagtaaggaatataattgtgttccagttaaattgaatgtc

SEQ ID NO: 63732 - DNA, 316 bp, Glycine max
  unsure (1)..(316): unsure at all n locations
ttcacatcatgtcttttaagaaaaattgttcatcttctgtagggtttagggttaatgattgatttttcattgtgatactgctatgattggtttgcactactatttttctcaaatggacacccccctgttcatgatataaacatgaattaaagcaatgctattttaattgtgtagggttttttttatcagatcgtaaacaatgtttacattgttcccctctagatttcagattttttagaagggaaggtgttagactctctggtttagaggaccagaaacctnccaagaagaagaggattaagaaaactcaagtaat

SEQ ID NO: 63733 - DNA, 388 bp, Glycine max
aaaacataatcttcgttacaatgtcaacgacttacttgaaaaggttggcatttctcattgtctatttgctcttcatcctgcatctccacttgtccactgcacaactaaatcttaacgcatctgttcgcactatcaatgacaattacctcgtgtactttgaacttctttataacacatacacttatcaagaatctatcgttaatgtctacctcaacaactacaattacaatcacacatctaattaaacttttatttaatcttatctcacaattacttttaaccactgaacctgacacttaattaccttatgaatcttctttctaatttactaattaccttaatgctgactcttacactgatacttacccttacacttatctaccttatt

SEQ ID NO: 63734 - DNA, 407 bp, Glycine max
  unsure (1)..(407): unsure at all n locations
cttgagcagacttaacaacagcacaaagcgggttactgtctgttcaagctaccatctctctctctctttcttagtgcctccttgccagaagttaaaatggcccaagaaactttcctattcacatctgaatcagtgaacgaggggcaccctgacaagctctgtgaccagatctccgatgctgtgctcgatgcatgcttggagcaggaccctgacagcaaggttgcctgtgaaacctgcaccaagaccaacatggtgatggttttcggagagatcacaaccaaggccaacgtggactatgagaagattgtgcgtgacacatgcaggaacattggttntgtctctgatgatgttggtcttgatgcctgacaactgcaggtcctcgtcaacattgagcaacagagtcctga

SEQ ID NO: 63735 - DNA, 327 bp, Glycine max
tgcaattgaagttaaaagccttagccttccctacaacggcaaacacaaagacatcatcatccatggctgcctccgtctccactgtcggagctgtcaacagagctcttttgaacctgaatggttctggagctggagcttcagctcccagttcagccttctttgggaccagcttgaagaaggttattgcctcaagggtccccaacagcaaggtttccggtggaagcttcaagattgttgctgtagaagagaagaaagagattgaagagacccagcagaccgacaaggacagatggaagggtcttgcctatgatatctcagacgaccaac

SEQ ID NO: 63736 - DNA, 99 bp, Glycine max
  unsure (1)..(99): unsure at all n locations
ttctcatgtaacatagaaagaattgaatcctaaaggaggggtaatgggngtattttctgaaggcagtatacaatttggcttgtaaactccatctcgtaa

SEQ ID NO: 63737 - DNA, 61 bp, Glycine max
atcaacaaagttaattattaattattagtttttattgatcaatcttatatcttgttattgt

SEQ ID NO: 63738 - DNA, 335 bp, Glycine max
actctacttaccaccatgcacgcctacttaagctcataattctactcaataattactccttacacactaattattactaccatcgcatccgtacaatttctactttcctcctcaaaatccaaatattcctaaacatatactatttccaactttattctaaccaatacctcttcttcaaacttatacattatagcttactctattcctaaccaacctataccacactaccttgataattcatcacctattcactttctattctaccctcttcttcttatataaattaccatataatcttcatatactccaatattcataactcattcactgtaaat

SEQ ID NO: 63739 - DNA, 365 bp, Glycine max
ttgaggacggccgtacccttgctgactacaacattcagaaggagagtactcttcacctcgtcctccgtctccgtggtggcatgcagatcttcgttaagacactcaccggcaagaccataaccctagaggttgaaagctccgacaccatcgataacgtcaaggccaagatccaggacaaggagggtatccccccggaccagcaacgtctcatcttcgccggaaagcagctcgaggacggccgcaccctcgccgactacaacatccagaaggaatcaacccttcacctcgtcctccgtctccgtggtggcatgcagatcttcgttaagaccctcaccggcaagactattaccctagaagtcgaaagc

SEQ ID NO: 63740 - DNA, 367 bp, Glycine max
tagcatgcctgcacgcctactttagctgatcctttcgctcaagatcaattccacattttcaagatataaagctgggacaatgttcatatatgaatcaggaattatttgtcttattattagtgcattatcctgtagcctaacgcacatagatccatatccctcgaactatcctaattccacaacacctacacatattcatgcattactgttcacatattgctatgcattaatctgcttttaacatcaggccaatcttgaactcatagcatatcactacttcttcaactcagacttctgcttcctcattgactaagcttccactagcatgtttggtaatatactatatatttcttatcctccatttact

SEQ ID NO: 63741 - DNA, 215 bp, Glycine max
ctcaaatctttcaaactagaagatatatcatgcacaatagttaatttgaatgtgttggttcataccttcacatatatacttattactgattcatttcatgctcaaatgtacattaaacactatatcattcacacataattacattaattacaactatataactacatcttaattaataactacaaaataaaataacaaatgccatccacttacta

SEQ ID NO: 63742 - DNA, 404 bp, Glycine max
ggaatttgacaagtacttgaagggtgagcatttgaaaaacggagaggacccttttgcgcctccgctcacatacaccactctctttgtatctgagtgggggaagttgggattcaaccacgtggactacctgtggggcccacccgtccacgtggttcccattcaaggatccagcatcatacctgtggccattgtggggtccctgccccttcccaacagagggattcgtttgatgacgtggtgcgtggaggaggcacatcgccttccttttcttcatcacatgcatggtgtcgtgaatcatgtaagcggaagaataattaaatgaagattctactttgccttcttttatgaacctgaaattgctatttcctgttccttttaatccctgatcttaccatttgagatag

SEQ ID NO: 63743 - DNA, 70 bp, Glycine max
ctcgagccgattttttttaatcttcttgtacaacaccctggtatatatatataaatgtgattcttactct

SEQ ID NO: 63744 - DNA, 323 bp, Glycine max
atctaatacacgccttgcacacctacgtaatctcctacatatctactatagcttaccgtttgctccccaatgaaacaatcatgatctttgttttcttatcagctagcaaatatctctagcgaatacctagcttttacaactgatacacctgcttcctcaattccacttgagcccactaacatcatcactgctccacatcttgctctgacaaaatccttttcctattgtcttcattcacaaagtctttatttaatcttcttatgtttatccataatcattcttcacaacttttttattctaacaaaatatttttcacccaatct

SEQ ID NO: 63745 - DNA, 348 bp, Glycine max
gcatatagagtagaggaagaagacgatggctgtggtttcggtgtaaagcttggactcgctgacgtcgttctgatactgcctcgtccattttcaatgaactgccttagctcactcttgaagatccacctcatagtgtagctgattatgcctcatttgctactacacatgatggtgctgaacggatgtgtcgaatcagcgtattgagtacgctactaatactaagatagagcagctgctaaaagctactggattttcctctcttcttctaatatacgctaacacttattcattgctctttgtaaatttattttgtttctggcacttatatgcatgcatcggatagatttt

SEQ ID NO: 63746 - DNA, 364 bp, Glycine max
gaacaagtagttgagaactaagaaggagaagcaaatgggttcctcaatgatctcttccccagctgttaccactgtcaaccgtgccggtgccggcatggttgctccattcactggcctcaagtccatggctggcttccccaccagaaagaccaacaatgacattacctccattgctagcaacggtggaagagtgcaatgcatgcaggtgtggccaccagttggcaagaagaagtttgagactctttcctacctgccagaccttgatgatgcacaattggcaaaagaagtagaataccttcttaggaagggatggattcctttgcttggaattcgagttggagcacggtttcgtgtaccgtgagca

SEQ ID NO: 63747 - DNA, 63 bp, Glycine max
ttgtgcttttgtaagaaaaacataacctcccttgctactgtttgtccttggagataattctta

SEQ ID NO: 63748 - DNA, 353 bp, Glycine max
taacattattacgacgcatgcacgcgctcgtaatctcgctataccattcgagtattgcttctttatgaaatgcacttcctccatagatacgtggtgaccattatattttcagctgcattaattaacctaatcttctatccacaacgatctagcccacacaccagcataataattttggagccgatcttataacatgcatactgagattttaactcaattacttagatcctttccttgtcttggatgaattctcattgactgctactgctgaatttcctgatcattcacatataatattttatactgtcacataccttttgcatttatcttgtatctcactaatatttttaatg

SEQ ID NO: 63749 - DNA, 330 bp, Glycine max
ttacaaggccgagaaccggaatttcactgttgcaactatggctcttagtgtgcttaacgtatctatctagtacgttgtactcaacatcatcgagccggctccctaagcagagccaagaactttaggagcctttacaactccatgatgcaaaactatccaaaacctgaagggtgctcacaggggacatgatgctatcggagatggcgaactcataagctaccttcacatatatggctacctaacaaagggtagactttccaacgacaacttcgacgaaagcgtctagtacgccctaaagcactgagaagcattccatcactaacgcgacac

SEQ ID NO: 63750 - DNA, 89 bp, Glycine max
attgtgggaaatgggagggtttatgttctatgttactttgtactccaatcttttatgaatgtacgagggaaacttgttttgtttgatta

SEQ ID NO: 63751 - DNA, 236 bp, Glycine max
caaacatcagaagccattcgctattgctacaagatgacgctggtcgtcgaatagattgcgatatcggatcaacaatagttacggtagtaccgaaatcagttgtacaaaacatgtgattgttaaccatgtgtacacctcatcaagtcgaatggacatcactaaactagaatggtgaagccatcgaatctgcacatttcgaatttgatgaagtcaacttgttgccaccgtatacattt

SEQ ID NO: 63752 - DNA, 310 bp, Glycine max
ctctagtgattcaagaacattagtaaatccatgatgatcataccgtagcaacttccactgttgctattactccggatccatcggaagcatgccatttccgcgagtgcatcacagagtcggtttatcctgatcctttcaaggttgccgaattccttgcaccataagtcagatcgtcactagtcacttgttcaactcaagctcaacgacttccacaatttgctggctgataaggtgggacttaagcggatatcccaagatgggagagatcggacaatctcgtttcactaaccatagaaggcgtttattccaa

SEQ ID NO: 63753 - DNA, 216 bp, Glycine max
ggctagcaattgaataacatgactatccacatatgatcatagtgtggccacggtgaatcgtcctattgctccagatccatctcctgtttgccagtactctgattacttcaaagattcggtttccacaagtcgtgtcaaaggtgaaggatactcttctgcatatttctgactatcaccacacgcttgttcatatgaaactcccacatgttgaccatg

SEQ ID NO: 63754 - DNA, 299 bp, Glycine max
ctcgagccgattcggctcgatcgagggcgtaatctttttcatcctaacttctttgatcccttgcatttcttcaatcttggatagacataggactggcctagttcttacgtccctgtcttgcgctttttcggattttactcaaacttgtgtacacagtttgttcatgaaagtttattacgtcccactgtccagacatatgggtctaaccggaagtattgcaccatggatgcttttcttggcatatttgcattagtttactatcttgtacagaaatttcagtaatgctgataacttgctat

SEQ ID NO: 63755 - DNA, 306 bp, Glycine max
atggcatgtctgtctgcgatggttcaccttgaactagctcatggttgtatcctctcaaacatggaccttgtgacatcggagaacgatcgtgaagattttttggatccagagtgcagctttttactggctgacttgcatcaccggatgggtcctcactatgcatcgctgaatactgctttgattgaattggtacataggtagaccatgggtagttctatgccattacacttaacgaaggaaagaagtacacactatgtactggcccaagttgacaactgcattcaatatcgagaagatgcagatgtg

SEQ ID NO: 63756 - DNA, 310 bp, Glycine max
cgaagatagcataacagcatacagggacatgtattctgtgacaacatctactgcacagccataacgatgtggtgttcagatctttactacagcacttcgatcactcttaggttcatcttcccgacggcttagattcattctttcaaggagtagcagtaatcactgtcgtctccattttagtgatatcatccgtctgtatgctcggaatggtgaatttatcggatctgcgtcatgaatggttcatgctgttagcactcacagtgtactatctgaaaggatagagcagtatagggcggcatcttttctgcga

SEQ ID NO: 63757 - DNA, 249 bp, Glycine max
gtcgatttgctgtagcgttgcctctggtttaagttgtcataacacagccgctaaagtcgcagctgatcgttagatctgaaggattcttgataatggttcacgttatgatgacgcctgaatcggcgggcatctatctcatggtggcagtagtgttggcatacttcaaggcaagtttgatactaattttgacatatacataatctgccaacttcgaccaccagtactctgagttcagcatcagaagtttcg

SEQ ID NO: 63758 - DNA, 305 bp, Glycine max
atctaaacttattaaatgcagtattccttatatatatatatatatatataaggaatactgcatctaaacttattaaatgaaaaataagtgtgaaaattgaaaatggatcttaagtagttctctagtccaaaattatggtgttcatccaaataaattccaactcatagctgtatcttgagtataaagtgttggatgattgtgcccaccaaagtaggggagagaacgagagggcgcgcgcggggtagtgagctgggcgacccgggaattagggtccggaccggtacgtggaggggtaccagctttcc

SEQ ID NO: 63759 - DNA, 278 bp, Glycine max
gtacgtaagctcaggattccgatcctgaatggttcaaagtcgacgtcaaatgattccgacggaaaggggttgaatcacttttagaccagtttcaggggttgtccaagcttttactaaagtagtcctatgagatctccggtgacttcaggttcaatgagtattctgtgtgataaatgctaccgctcagtattcgtcacactaggtaacccgaaagcatcaagtctttggcctgaggtgcccattgactgagctaattcacatcatttgccatgtgcgca

SEQ ID NO: 63760 - DNA, 264 bp, Glycine max
gtggattcagtgaatgtttggtgctcgcatgattacacatcactcggcagcaacatcctcatcaccaacgctgaatgcagagaatgccgatgaaaaatatcgatatcatgacagcctgaatacgggagccgctacgacaccgtgcacagtagagttgtgctgagcttcaactccaacttgatagtcgtctacagagatacatgttccagcatctccgactagtactagcaccgagagcagcacctgaagtctcgctggacagat

SEQ ID NO: 63761 - DNA, 193 bp, Glycine max
agtgaatctacgcacaatatgagcgccttcggcggtaagaattgagcgtgatagacttaaagatggtatgagcgtgggaggcaaccatacacacatataattgacgtgcatcaatggtgtcaggaggatgaaggttcacggcgggaatgtgaattggcacgctttgaagctttatactggcatcgacacctga

SEQ ID NO: 63762 - DNA, 251 bp, Glycine max
gttaaactcactcatcagatacggttaggtggattgaagattatctcaataactattgtcaatgcttatggaacatgtccatgagcatgtttcaagttacgggacttcgccaaggtggacgtgaattcacaatgtcaacgttcctgattgaatccagctatagtgggattccaacttcagtgcaatgatggactgcacatgcgcacacgtcacgaagacctccaggatttctcggacagcacatcatcgta

SEQ ID NO: 63763 - DNA, 281 bp, Glycine max
attgaaatgcttatcaggagggtgaggattcacggaattacattagggtttacaataacgttagcggttgctggcattgtagcagtgcaacgcatctctcgttaagtacgccttcggaacttgtctaatattcattaggaatgaaaggagtactatagagctcgctggtcaattactcagccatcaacagcatgctgcaagtctctgagaaatgttgacatgtcctgcatgtgccgacatactaacaaatttcactcagacgtgatcgcgggactagttgt

SEQ ID NO: 63764 - DNA, 314 bp, Glycine max
attagtttctctttttcattgggtttgtgagcttagcacaacatgagacctcaactatggtacctcgaagtcgctcctttctctggttggccggcctctggatcctcgccttggctcaggctgaatctcatttcaaatgctttgattccgtgatatgatatgcgagctctaagactcttccatcggatccagtctcgctacgatcaccaggctcactcagactctatctcttgatataatcgaatgcacacacaagtctcggggatcagatcacgagaaagcgtatttgctcaggaacttcgatttcagggact

SEQ ID NO: 63765 - DNA, 253 bp, Glycine max
agcgattgccacaatatctcactcatgaaatcgtacatttcacttcagacgtatgcactctcaccaggtgcagagaacactagagtcgtatcgtacagtcttcatactttgtcatgctgatcacgacgcaacttggactgctttcaagtccagatctgatagctcgcggatcatcttctccgacgtatacaggattacaaaggtgacccattaagtttagtactgcatgtctgttaatacatgacattacacc

SEQ ID NO: 63766 - DNA, 96 bp, Glycine max
atagattcccccaagttctcactcacgcaagacaacagattgcgtcactggtatgctctctcagcatggtcagtgaatatgacattcccaacctac

SEQ ID NO: 63767 - DNA, 124 bp, Glycine max
agagaatgggaccaaatctggaacgagtgagaggaggggaatcgcggtggggagactcgacactgacacgaggtgacaatgggtcttgagacgaagaattggcaggagatcacaggttgaacac

SEQ ID NO: 63768 - DNA, 249 bp, Glycine max
atccaactctctttctccctatcccaataatctcactcatacctcttcagtctaacaaacttagtttcttttgttttgagtttcttagagaatggatgataagggagcacgaggtagcaacacccttttaagttgtgaggacgagatggaccttcgaagaggtccttggatcgtctatgaacaccgcactcttaacaattacattgcgacgcatggcgagggtcgctggcataggctggcggtctctgc

SEQ ID NO: 63769 - DNA, 349 bp, Glycine max
ggaggaggaagagaaaaagaagataaaacaagagggaaagtctagcatgattcttaaagaaaagaggaactataatggagctaatccaattgttttggtagacaggctttggtttataattagataattgaatgaaaatgtgacttgtcttttgttactttgaccattaattcattcgtgtttctcagtttgtaaaggaaaagaaaaaaggcggcggccgacgaggggggctcgtcgacgggggaattaattgcggagcggtacctgcaagggtaccagctttccggagagtgagtcctatgagagctgggggtggtcaagggcagagctgtgtcgtgggtgaaagtgt

SEQ ID NO: 63770 - DNA, 57 bp, Glycine max
cttttatatatggaacataatgagagatgacgttgccttaattaatagctcgatttg

SEQ ID NO: 63771 - DNA, 309 bp, Glycine max
attgtttgttgttgtaactcgttcttcttcttttgttgttctgtgtttgtgtttgttttttctctcacctgaaaatgtcttgctgcggtggtaactgtggttgcggaagctcctgcaagtgcggcaacggctgcggaggctgcaagatgtacccagacttgagctacactgagtcaaccaccaccgagaccttggtcatgggagtggcacctgttaaggctcaatttgagggtgctgaaatgggtgtgcccgctgagaacgatggctgcaaatgtggaccaaactgctcctgcaacccctgcacttgca

SEQ ID NO: 63772 - DNA, 288 bp, Glycine max
accgggtttccctgattgaattaatggcattcatcaaggtgaaatcaaatcttttcctcctgcacttcctaagacagcgtcacaccaaattacacgtagtgtttacgcacaggttgactgtcaatccgcaaaaaactttttaaccaatatctaacttacccggatgaatctcatgctgagaatcttcgccctggatgtactatactgcagcatgttcaacacctgctgttatataaatgccacgaagtggagcacataactctgtaataagccatctgagaagctatc

SEQ ID NO: 63773 - DNA, 235 bp, Glycine max
cacgactgcaggccaatcaccttcggttgagatatgagagctaaggtcgttcatcgtacaataactattgaagtagttttgcacgatcaagcagggattccagtacatgtcatgtacatcgcctatcatggtcacgctaagctacagcagcgtgtgccagctcagattgcaacaagacactcaaagatatacacccagacttgacacagcatctacaatgatgacatcactctca

SEQ ID NO: 63774 - DNA, 252 bp, Glycine max
aggaaaagttaggtttttccttacatttaatagtcaaccttgtgagaaattacggtaagccctgtagttaagaatgtgtttgtgatctgggaattggattagtttgtggcttcaatgcattatattgtgttaagagcagatgctggtgcctgttaagattgatcagatgtgacattgtgatacatgggttgactttgccaccctgctaactggggaagtatctggatgtggcttacgtggtgggagttttgt

SEQ ID NO: 63775 - DNA, 311 bp, Glycine max
agagatttcaaccagctctctctcccaaaatcccaaagtgtgctgcttcaatttcggtaacaaagatgggcacaattactggctccattactttgtctccaaaaatttccatggtcaatcaggaccaacaactgcctcatatgagtccaaagcagtagcaatggggactagatctctaaagcagacagatactcatagtggacttagaatttttaacccggtggatgagctacttaacagaaccccaattaaaaccaatgcaatgcaagctatgaggaagggacctcaaggcaagaatgtctggccaaaaa

SEQ ID NO: 63776 - DNA, 291 bp, Glycine max
attcatacataccatgtcacgtagcatgtgtaatgtggagagtgttgcattgtgttgagaccactagacttggtttcattgtgaaatgagacggcgtaacaatgttgatgtggcttgatagacagactaaactgattcataggtatgtatgacggtgtcattggatgggtttcaattactgacatttactgtgcgcatgtagataaatggcacagtactattctcttagctataatactgtgttcatttgataattctgacgatattgatgatgattctgaggatcatata

SEQ ID NO: 63777 - DNA, 243 bp, Glycine max
acatcacattgctagcactcgaagcgtcactacaggtatccacgtcctacatgcaagtcactctattcaacacagagatcactttgcatcacaactccagccactccatctacatcgcattcgcttcgggccctgatagacctctgcgagtgacatgatctctacacgcagatcctacagacctgggccaaaagtgagtcgatggtacaattcatgcatgattccccctcgtcatcttcgccg

SEQ ID NO: 63778 - DNA, 204 bp, Glycine max
ctcgagcagacacggcacgggctcgagacgaatcgggccaagtcgaattcacgcacatcatcgcacgtaagacgcacacagctcatagaagttctcggctccgtccgagatgtgtcgtcgcgtatcacacacacttggcgcacggatgaggttgtgatgctgtgaatcacgcgtactgtgcctaatatggcggttaagaagcta

SEQ ID NO: 63779 - DNA, 409 bp, Glycine max
ttgggaaccatttcagatgacctagtgaatgaaaaattgaatgttgccaactgagattctaggtctggttgtgaccaattttggaaagaaaaaaaaccttgaggcttcatttcatgtgacatcaattcaatccaattcttctaagttttcaatcttgttcaaactcatctagtcctgtctgttatttgatctcgtttcgaagtcatgtctttgttatttttttcggagctttcttttgaagttctttggtctgttcgtgttctagagcatccttctgatctattagttctctgcctgctatgtgcaagccatggctgtctgaagaagcttgcattttttttgtttctgaaacctaagaaatgggttttttaattaaaataaacacttgaggatcttcggactgaaattt

SEQ ID NO: 63780 - DNA, 286 bp, Glycine max
ctagtttcttacaaggctctactctactgcttcaccttctgctctagaaaattcagtggtgatacatggcttcggctactctctctgtagccaaaccagcccttcaggcaaatgggaaaggcttctctgaattctctggcctccgcagctcatcaggcttccttcccttttctagaaaatcttcagaggatttccattctgtcattgccttccagacctatgcagttggaagcagtggaggatacaagaagggtgtgacagaagcaaaactgaaagttgccataaa

SEQ ID NO: 63781 - DNA, 412 bp, Glycine max
  unsure (1)..(412): unsure at all n locations
ctcgagccgattcggctcgagctcgagccgctcgagccgctcgagccgcaaagtcagtgaatagtgagtgagtgagtagcagctagcaatggaaaggactgccatggcttcttcagctactcctccacgaccttctcttccaactccttccacttctccacacacagtagtcaccagcacctttagcaaacctcaactcagacgctctcacatagcactaccaacttcaaccaccatttcattgctcgctctcttcgcccctccaaacgaagccaaagccgctgtcagcatcgccaaggaccagaatggcccttctctcaaccaagtggagaaaacgctggatcaggttcanganatgggttcgggtgtgctggacacggcacaacgtgttgctgaagtgatacggaacgct

SEQ ID NO: 63782 - DNA, 208 bp, Glycine max
gacactcttacgcagtccagaatctaagttcctagaaccaacatcattgcgcaagtgcagcacattgtcgcaaacgtcgcatgactccagttccgacagactgtcgttcagctcatctcggcacaaatcagggattatgatcacgtcaggcagatctaagagacgtttgacgcaagcgtgttcattggaacatcagaggatgacacgc

SEQ ID NO: 63783 - DNA, 318 bp, Glycine max
aaattttaaaagaataccccctctttttgctgcatcagaggagttgtaaattaagagcatggctgcacaagctcttgtatcatcatcttctcttaccttctcagcggaggctgcaagacaaagtcttggaccaagatcactccaatctccatttggcttctccagaaaagcctcctttcttgttaaggcagctgctaccccccctgtcaagcaaggatcagacaggcctttgtggtttgcatcaaagcaaagtctttcttacttggatggcagccttccgggtgactatggatttgaccctctgggactttcagaccc

SEQ ID NO: 63784 - DNA, 318 bp, Glycine max
  unsure (1)..(318): unsure at all n locations
gtgtctttcatgcttggttganagatattctcccttcacatatgtggagtaagacttcagatccttcaacagtgttgggtgaataagaccagtgatctcttatggaaaatattgtcatcaaaggctctcatcaatgcaaagcacctgattcaaatgggaggtccatgaacaacaaactagattagactagtactcaggatccaaggtgagactagtttaaccaacagatccttcatagtgttccatcgtatgcaatcttcaagcatatcacatgccaagatcaatggggtctgagttgcctcataagcagtctccacg

SEQ ID NO: 63785 - DNA, 137 bp, Glycine max
ctcaattcgacttcagccgagatatgaatcacattcttggggtcaataccgagcacctttgcacgactgatttgacgtctcttaatggacgggaggggaataccacgttttcgactcccgttaacctcatactgtac

SEQ ID NO: 63786 - DNA, 396 bp, Glycine max
  unsure (1)..(396): unsure at all n locations
gaccggagcgccctcccacaaatcgacacccggcacactccccgtctgaacagcgttcgcctcctctcctctcccctccgaggactccttcctcaccctccagatcgttcactccaaaccctccgacacccccaaacccctcgtcgccgacctccgcctcccctcaaagacctccacgacctccacgactccacgcgcctccgcaagttcnccctctctcgcgcctctggccgcncccacggcaagatccacctcaaactcggcctcctcggccgcccccaattcgattacgcctcccccaaccctaaccctaaccctatacctagtcctaatttcgtctgctacagaagatacacccccttcccttcccattcccattctcactccccttctcca

SEQ ID NO: 63787 - DNA, 343 bp, Glycine max
ctcactcactcttcaatgccccgagtccacgttccccagctgttgcagccaccaggtcgccgtcacacatgccgcaccaccttcgcgtaagctgccgcgaagttgctttcgtggctgccgtcacctatatagaaaatacaggcattgttttccagggatacacttcagatcaaaggagggcagcctcccttcccgcgactgatgattaggtggatgactatgaagaacctgatgctagaggacacgggaacacaatgctttgataggatgtgacattagggtataagttctatattaattgtatgaagttttagacgaccttgttttgagccgaagtgaattt

SEQ ID NO: 63788 - DNA, 180 bp, Glycine max
tatatgtatacatgtataaatttaaattatataattcaggtttggatggatcaatgggacgcaccacgatggccacatattctaaagattatatattactattatgttaagagcgtgttccagaatcaattgccacttgcaatgattgtagtaataagatcaatatttgtgtcaatgggt

SEQ ID NO: 63789 - DNA, 130 bp, Glycine max
tccaacaatgatgttcaattaaataaccaatgtgaaaccccaagaaaatttaaaacccaaaaccaaccgtcctggagcacaaggataacaagttaaaatgggggttccgtcaagccttattattccaaaa

SEQ ID NO: 63790 - DNA, 215 bp, Glycine max
cacactctctctctccaccctccaactgcaatggccgtcccttccttctccgcgcgttctttttctctccctgcccaaaaccactactgccatctctcttctctcccactaccctccttcactctctcatctcgccgcccaagacattcttcttccaacctcttcacacctcttcgctctcccacaacccccatttttgcatcggcccctggcgg

SEQ ID NO: 63791 - DNA, 312 bp, Glycine max
  unsure (1)..(312): unsure at all n locations
ctggatcaactgcaaccattgaggttcctgcattggaggttggaaactctttgtgctgggatttgactgttctcggttgggaggtgagttacaaggaggagtttgttccaactgatgaaggctcttacacggttattgttcaaaaagggaagaaaatgggttcacaagaatggcctcttaggaacacttttatgaacagtgaaccagggaaagttgtcctcacaatagagaacacttcaaacaagaagaagagggtactgtaccgttacaagnacatcaagagctccttctgagaaacacattcagaagttg

SEQ ID NO: 63792 - DNA, 62 bp, Glycine max
gtacgtaaactaagaattcagctcgagggagaacttgttcagtgaacgaacgcccaattttc

SEQ ID NO: 63793 - DNA, 222 bp, Glycine max
ggaaatggtacctctgcaatcgcttgcaatgtccactcgaatcgccaagtcacctcaaaaaccaggctcatgtacagtcccatccacaattgttcatgagcgtgtaaccctttaatccatggtcaatgattaaaagggtcctgttgaacgttacctgtgctaagaaaacatactcccatgcacatgtctgttatcaagaggggcaaaccatccatagagttc

SEQ ID NO: 63794 - DNA, 349 bp, Glycine max
aggtcgacactaaaggatcccctcggggaattccaattccacattttcaagaaataaggaggcaaaaatgttcatatatgaattggaattatttgttttcttattaggcctatcctgaagccaaaggaaatgagatcggaattcctcggggaattccaattccacattttcaagaaataaggaggcaaaaatgttcatatatgaattggaattatttgttttcttattaggcctatcctgaagccaaaggaaatgagatcggaattcctcggggaattccaattccacattttcaagaaataacgaggcaaaaatgttcatatatgaattggaattacttgttttctta

SEQ ID NO: 63795 - DNA, 99 bp, Glycine max
gggaccaattatttactatgatctcgctatttgtaaccaagaagttgttgctattgaattactacaggccactcaatctgtagtaggaccgtccccctt

SEQ ID NO: 63796 - DNA, 276 bp, Glycine max
cccttggtgaatttcaaattcaatttttttaaaaattaggagcaaaaatttcgtgtgtgattgggaattattggctccctaattaggcctatcctgaagccaaaggaattgagatcggaattcctcggggaattccaattccacattttcaagaaataaggaggcaaaaatgttcatatatgaattggaattatttgtttccttattaggcctatcctgaagccaaaggaaatgagatcggaattcctcggggaattccaattcacattttcaaga

SEQ ID NO: 63797 - DNA, 274 bp, Glycine max
cggcatcctacactaacgggccgacggaaatctcgccggaactcattctccggctccggaagtgcaatcattccgagtcttacctcttcgccaggaaattcaccccggattgcttggagaccttgatgcgcattgctaaatcggtcatcttcagggattgaaattcaaattgtggaaaaggtctgtgaagagatttatggtgtgagatgatattttgcttgcttgtgctgtgacttgaagttgatggtggtgtataggttgaaaggcacgaaca

SEQ ID NO: 63798 - DNA, 425 bp, Glycine max
aaagaatcattaatgttctttattacacacaaattatatcaagagggtctaacttggttggtttagcttggcagagagtatgagttgtcgtaaaccttctcatattgtcttcgattcctaaggtgttaaaaacacacacacactaattgtgttgagtcactgaggttcaaagaatgtgtcactgttcattatcaatggccacactatactaccactgattgtgttttaattctcatcttccatatacaaaggtgttgcataaaccctctgtcttttctaggtggcatgatcctgcttcaaccactacttagtatattattgccacccacagaaacaccaccattccactgtcacaaagaactaattgtctttttgtttctcttttgttgtttatcttgtgtcattctttgatctattctctctct

SEQ ID NO: 63799 - DNA, 409 bp, Glycine max
tatgacgtcgatgcacgcgtactagctcggaatcggtcgagatcggatatagagagagaagagggatggaaaacggaggaaaagtgccgtggcttccaatccaatggataacgggggaaaaaatgaatatcaaaggggaatgatccctcctaacacggtgtttggagatccaaagggcattcccatccagcagaccatttacagggacactcctgctcctttcaactgcccttactgcggtgacaccgctctcactaccgtcaggtaggtttttctccaatttcaattcaaatcatcttatctcataacaaattactagattcaatttgcaatcaaaatcgctcttcttttattggtattagggttaaacaatttttttgctcattctattattatgattttgtttcgt

SEQ ID NO: 63800 - DNA, 174 bp, Glycine max
ctacgtaagctcggaattcggcttgaggatgctctcggtgactgcctttgaacatccaagttcacctttggttgactgtaaatgccaccaacttagttatgcctaaaacgccgattggtgccgtccaagggccgacaatttcaacggcgacaggatcgccaatttcaaggaggc

SEQ ID NO: 63801 - DNA, 238 bp, Glycine max
ggcacccacaagtcattaaacttcgattgagtttcaaaggggtcacaggtagtgtggtacattggggtggtccagggttggaccaaagaagtttgtggcactattaaaggtggttgtgggcaaaggttcatctattctgaaagggacccaaaggtttaagcttctgtaccatgattaaaaatggatggaaggcttcaaggccctaatggcctaacccaaacccagttgacccatccct

SEQ ID NO: 63802 - DNA, 474 bp, Glycine max
  unsure (1)..(474): unsure at all n locations
tatgacgtcgcatgctnacgcgtacgtaagnnctcggaattcgggctcggagggtttttcaattaaaatttttaacccaaatttaaggaaaggggtggtttggaaggaatgtgttagaaagacatgagcctatacatatagaattatagatcccttgcataatctatgtaccacattcaattgaataagaaagcatttcccattctcaaaattctgtctatgatattcatttctatctttctctaaatctccccttctaaattcaacatctatgtggatataagaacattttgtaactttaacgttagaagcatacatagtttgagatggtgatgattttaattctggattttcttgctttaggatagttatattgcacaaaagtgcttacatatttttgcaactctntctttctagctaggggttttcattttaagaattaattangtttgacttttgagaaataatacacac

SEQ ID NO: 63803 - DNA, 152 bp, Glycine max
agactcgagatctgttcttggcaggagggatacagagagggggaacagtccggtggtggcacagcgtttgtcaactgatcataatgtagctgatgaggaggtgctcttgcacctatgatcaaactaaaatgtgtaagccagctcttgctact

SEQ ID NO: 63804 - DNA, 328 bp, Glycine max
ctcgagccgcataatctgtggctgaaggacatgttatggtagccaagtcttttcgcctttatttgggagctagcctacattcatgggtttaattgaaagccttccaaattaatttggaaaaaaagtttcctttcaactgttttttttcctgcccaattaaactattaaaagcaagagaatggctgtgagaaaagatggtctagaaatttttcatgggcacaagaatcacattgatgaaaaatttgcatgccaaaacctacatcaggtgtctttgttgatactatagattggtcaatccaaaatgaagttgcagcagctctctctgatg

SEQ ID NO: 63805 - DNA, 398 bp, Glycine max
acgagcttgctgtgctcagatccctatgcagctctcactctggccaaatctacatcgagttcctttccaatttccactttgaattccgcttaaccatctttcacttaaggcacccagtgtcaacaacccttggtcctaagaattttccaacactttaacttaattggggtggaccattacaagcaccaaagccgcttaaatgccggtcccgagaggcccccaaaaccccagtgcaataaggcctgcacctgaagttgcagcttctgcatctgatcgtccatcagctgaaagactcttagaatctgaagatgctttgtggagatctttaaggccacatactatacctggtacagcactaagttcattggtaaaccaaccttatttacctatagctgctg

SEQ ID NO: 63806 - DNA, 424 bp, Glycine max
tcccttcttattcgtcgttctgttcaattcctcgccgagtagttcgtacagatgctactaaccggtgccgttgatccacgcgccggcgaccttccgttttgattcaccggcaccgatttggtacagtaaactcactccttcttcttcgatctgcgatttgccgttttgtttcccgaacaagtgagcgaagaccgacacttcgaaatctcgctttgcgttatttgatttgagtgtgatttcactgtgttcagggctcggcgtttctgattttcttttctcatgcatttgcaagtaactcagaggctttggtttaattgtctctcctattgatgggtgtgcaatgtattctgttttctcggagtttaaattgtgtttgaaaaattgcttgctaactcgagtattcggagtggttgcattgaaacag

SEQ ID NO: 63807 - DNA, 199 bp, Glycine max
atgcaagctcttactggttttaagccttctcttagtttcactgatgctgggtgtgaggtcattagattcccttcagaatggaagggccatttccccaacatgccagcgccttaagtggtccaactatgaaggcattcaatttggccaccggttccaaattcggcggtattatttaaccggttggaatttgaacaagccc

SEQ ID NO: 63808 - DNA, 293 bp, Glycine max
gtttaggtggattggagttatagggatgcaatatttgacctggccacgattaaacctaatcagccaaatgaccttccttggccgatccttgcataactccattgccaatggagaataacaacccctcaatgctttggtcaatggactacattgcatcatctaacgaggaactggatttggagataaatctgccaatcattactactagttcgaccaatattaacctgcccctttacgtcaagcgcataccgccgccacaatctgtgaattctgagccctgagatattccggat

SEQ ID NO: 63809 - DNA, 92 bp, Glycine max
cgactagtgagctcgacaactccggtaattaattccagaccagtacctgtaggcgtaccaactttccctatagcaagtcgaattaaagctgc

SEQ ID NO: 63810 - DNA, 297 bp, Glycine max
ggagatgatgaagagatctggaaaacatgaagcggagggaggagaagacatactcatcgacagattcctcaagcgcctctctttcgtagccatcgcagtagcctccctcacgctcctcttcctcctcctccgcacgcccgacacgtgtgtcccccaccacgcgccccggaagccgcacctccgcttccccaaatccacgtgcgacttctcctccacgcgcccccacgtccccgccgagaagcgcgccctgcgcattcaatccacgcgcctctggaccgccaaggtcctctccttctc

SEQ ID NO: 63811 - DNA, 169 bp, Glycine max
gcaatttcagtattagttttgacccaatctctttccattccggacacaagtcatcttacttcaagctgaatccttagatactggcaagactcatacctgtgctaccctgaacttgactggatctggaccggaacctgcatctctcaaagcatgcatctttgtgagcagc

SEQ ID NO: 63812 - DNA, 270 bp, Glycine max
cttcgttctgaaaatcgtagatttttgttttagggtttctcttatataatcttttcgtaacacaaaaaaaaatcacataaatcttcctttatatttattactatttcgttttttctttggattaattaactaggcttgagctatccgaataataataataatagtttcggagaatggaaaagaaaaaggtagcagttcccctcgtgtgccacggacactctcgccccgtgggtgatctcttctacagtcccgttacgcccgaatggtttt

SEQ ID NO: 63813 - DNA, 399 bp, Glycine max
cttgattggaaattttcactccttgtaatggcgagatggttgtccttggagctttgcttagaattgaacttttcatcttttattggggtgtagcagtgaattgggttgatgtgcaatgcagagatcacggaaagctcttctggaaagaagggctatacagaaggctacaagtgggaggaactatgtctatctgtataaagtttctctgtcgttggtttttgttttgtggggtctggtcttcctcttcagcttatggacaagccatggccatggttatggagatcatgaatctagagaagttccagttggtgtatcaaattggaatgaagatgaacacagacaatgtagaaaatctaattctgctgatgaatatttaactaaagagactgatgatgtcta

SEQ ID NO: 63814 - DNA, 261 bp, Glycine max
  unsure (1)..(261): unsure at all n locations
ctagcaacggtggaagagtgcaatgcatgcacgtgtggccaccaagtgcaagaagaagtttgagactctntcctacctgccagaccttgatgatgcacaattggcaaaggaagtagaataccttcttaggaagggatggattccttgcttggaattcgagttggagcacggtttcgtgtaccgtgagcacaacaggtcaccaggatactacgatggacgctactggaccatgtggaagctgcctatgtttggttgcactga

SEQ ID NO: 63815 - DNA, 154 bp, Glycine max
gaccggcagtggcattcataccatcagtcacagccggacaccattgctcaggtaggccacattacgcccgtgcgtgctcgtcacgctgatcactcttgctggtacttcctctgcacttagagggcccaatatcattcagcgacaatgcctgcca

SEQ ID NO: 63816 - DNA, 306 bp, Glycine max
ggcgcatgaatctgaatggggcactacacataatgtcatgtgcgttaccagttcaaggtcactcgatcccaatgagtgatatcgctagagcatacaatggaagagcagtgaggacaaccatagtgaccactcaactcatcgtagctactattcttgcaacattactaatagagacagagacagatatacaaatgatgactgtgaaattgcctagtgcagatgctgattcacctgaggtatgcgaaaatacacagtgaattgccttgactgactagggaccgactgtcttaaaggcaatcatgatgt

SEQ ID NO: 63817 - DNA, 327 bp, Glycine max
  unsure (1)..(327): unsure at all n locations
tcggggaattccaattccacattttcaagaaataaggaggcaaaaatgttcatatatgaattggaattatttgttttcttattaggcctatcctgaagccaaaggaaatgagatcggaattcctcggggaattccaattccacattttcaagaaataaggaggcaaaaatgttcatatatgaattggaattatttgttttcttattaggcctatcctgaagccaaaggaaatgagatcggaattcctcggggaattccaattccacattttcaagaaataaggaggcaaaaatgttcatatatganatggaattatttgntttctta

SEQ ID NO: 63818 - DNA, 262 bp, Glycine max
ctcgagccgaatcggctcgagatttgcaaaaaaaaaaaaaagaaaaaaaaaaaaaataaaaaaaaaaaaaaaaaaaaaaaaaataaaaaaaaataaaaaaaaaaaaataataaataaaaaaaaaaaaaaaaaataaaattaaaaaaaaaaaaaataaaacgtagcttgacctttagaatatataggccactatattattattgggccctgataactgctggcaaaatcattttactttacatgctcaaatataaaatattag

SEQ ID NO: 63819 - DNA, 428 bp, Glycine max
gtttagttgttaggttgttattttttttttttttgtgttagtgagtaggacttgaaaccacatctccctcttccttttccagtcaaccttataatttctccctgaatttttttattcgcaagtgttgatattcttttgtttccaattacaatttcagtaactgttggaaaaccaggtattgtaaataatgaaactaaaattattgtgctataattttttttcattctttcgtcacatgaaaattagtgcagctcctgaaattttaatgaatcaagtttgctacattagctagcaaattagcaatgatcatgggcatgcataaagagatgggaagtctggaaaaaaaattcaaaagagtttttgattccttcaagttattctttgacttttttgatagtactatgccaaatatgtaatcttgaaaatga

SEQ ID NO: 63820 - DNA, 426 bp, Glycine max
gtgcacaacactaaaaaaaatctctcgtggagactaatagaggacttaaaccccataagttcgaaacttggagcatgtctagctcagggaatataactgctaattgattactgattacataataacctgcacacagtagattttggttgacaagaatcacaagataggcatgtagcctggttaagagtagcctgtcactctatttttcagagatatataaatcaatgatgcaatttcttgttctgataattgcaatccggttgggttctgataatgcatgcaggggacacaatcgcagaagaagaaaactgaagcattttctattgaaagttattgatgaagttgccagcatgtaatttgaagttgaagcactagcatatttggcgttttgaaaaggataaaaatgtgccccttgattaatatatg

SEQ ID NO: 63821 - DNA, 187 bp, Glycine max
agaaaaaggggagggagtaactattgtctaatttttaatgagacaaatgtatcatcacaaaattagaaaaaggggagggagtaactattgtctagtgactagtatcaacgtggcctttcgttttcaccaaaaacaagaaacgtggccttttgttgctaaatttgtgtttgtaaagtcacactttgac

SEQ ID NO: 63822 - DNA, 397 bp, Glycine max
cgcgtatggggttgtaattaatccacataatggatgcaacagctgctacggcatcagtgctccatgtgccatcatcggacgctgaaaaagggaaacccaaaggagtgggaagctgatgcatatcggtgaacctaccgatgactcaaagagaagcagggattgtgcgaacactcagcaggtcaaggcatacgcaaaagcccattcgaagaccatggatatagatgagaatgactctgcatagaaggcgacgacggctatcttacacgccccgaggacttttataaatcagctacctgactggagcatgcttctggccatcatcaccacacgcgttactcgcaggcgaaaagcattggatgatgctgagattggaagacgctccgccccgacatgctca

SEQ ID NO: 63823 - DNA, 157 bp, Glycine max
cggcaagggagtgacctttagctaattttaattgagtttaatcatgtcgtacccttttaatactttcatggaaaatttctgggaatatgagatttgaatggtcagtttatttggagcctaataattttccatacataaatgatgaaatttgcaacat

SEQ ID NO: 63824 - DNA, 424 bp, Glycine max
  unsure (1)..(424): unsure at all n locations
ggaacaacatttacacataccaaacaagccctncctctcctaattctccttctccttctccttcactttcaacacagtcattggctccttcaccagcaccttctcagcaagtggctccacctccactttctccagtggcagctcctcctcagcaagaggctccttctccaccatctccagccacaaataaccccactccagctcctgttagtgatcaaccttctcctncttctcctcctcataatgctgcttcttcaatcttggtcaactttgcttgttctgttggagcgttcattgcttcagttctggttttttctttctgagtggagtgtatgtgatatgagtggttcagtataattntttaattnttttccacatttttcttaattntttatggattcttatcctttgagttcagtattat

SEQ ID NO: 63825 - DNA, 240 bp, Glycine max
atttgaaagttcaaccagcaaaatgatcaatgacagggagagtacctaagatttatcgtaacatgaatgctgttctgtgaaatgactcaacagagtgctcaccattcattgttgtccatctcggaaatgtctgcttgttttgtgaagagatgtcacttgtttgatttatttatttttacttgaggaagcaaatcataaaggaagagggttttgggttggggtgagcgcctgggaacatgt

SEQ ID NO: 63826 - DNA, 426 bp, Glycine max
ctttctggactttcacattcagtatgttggtgttttgcaataaatcattagtgggtgttttatgtagttacatgtacttgtttttttacgttgatttttttttaaaaattcaaataggaattatacattgtcgatttttcgtaagatttttactcaatttttccgaaatgcttggattgtgtttccttaaagttcctttagaatctttctgaagcataaaatttagatcaacacttgattcgttgttcttctttcccagtattcatttctgaattgcatgtgatgtatgttcaggtatttatgaaaacaataatttctttttaatactattgaaataccgacatttctcgtccattaaaattttactattttgccgtcgtatttaaatctatatcaaattttaaaatcttctgtttttagtgtcgt

SEQ ID NO: 63827 - DNA, 261 bp, Glycine max
cagaggttcttaaatcatctatttatatctctatcaatctaggcgcagatccgtgagcaagacgagaagccaaaaaatggaggccgacgagaagaaagcaatgatccgcgacgtagcgctacaagtcgttttcatttccctcactattttcagcttcctctggatgcacggcctccctcaaaacctctacgccaagctccgccaccgtcctccaaactctcgcgccgtccaagccaagcgccacttcgtccaaagcgcaca

SEQ ID NO: 63828 - DNA, 224 bp, Glycine max
tcatcgttcactatcgttgctgggatcttcctccggtcaaaatacgagcgctcttaagagtttacggcttgctgacggtactggcaacgatgggtgcgtgccattgacatctacatccacttcgtcgcgctcattgtcaccatgactgctatcagatatgcgcatcttcacatttacaggcacttgactcattacgagcgttcccacttatcagagttacatca

SEQ ID NO: 63829 - DNA, 367 bp, Glycine max
  unsure (1)..(367): unsure at all n locations
gcaattgaagttgaagtcttgcccttctctcttcaactccaaacacaagacatcatcatccatggctgcctccgtctccactgtcggagctgtcaacagagctcttttgaacctgaatgggtctggacctggggtttcagctcccagttcatccttctttgggagcagcttgaagaaggttattggctcaagggtccccaacacaaagatttcctctggaagcttcaagattgttgctgtagaagagaagaaagagattgaagagacccagcagaccgacaaggacagatggaagggtcttgcctatgatatctcagacgacccacaggacatcacangaagaaaagggttgggtgactcctttttc

SEQ ID NO: 63830 - DNA, 267 bp, Glycine max
caaggctctactctactgcttcaccttctgctctagaaaattcagtggtgatacatggcttcggctactctctctgtagccaaaccagcccttcaggcaaatgggaaaggcttctctgaattctctggcctccgcagctcatcaggcttccttcccttttctagaagatcttcagaggatttccattctgtcattgccttccagacctatgcagttggaagcagtggaggatacaagaagggtgtgacagatgcataactgaaggtt

SEQ ID NO: 63831 - DNA, 400 bp, Glycine max
ctccataatttgcttctattctttaataaagttcttcaaccctgaaggttcctgaagacccttcttaaggtttggtctccaaatacatgaattggagagcatggaaagtgaccagaaagttcaaatggcatctaggagtgaggtcgtgtcaagtgttgctggggtggagtttcaaggggctcctaatttgggacaaggtggtggtggtggtggccttcagagacaacctagtatgaccaagagcaattgtctttgttctccaaccacacatgctggttcttttcgttgccggcttcaccgtgcccctagccttcagaggaccaaaagcatggaatcagagtcccttcaggatcaggcatctacggttcattctttaattgttgatgcttgtgctggtgct

SEQ ID NO: 63832 - DNA, 397 bp, Glycine max
cttaatatggttaggctgggggaatcaattggggataggtggatgaataaggaaagcttggtctgattagtctatactatatgccttgctattccactttttctgagtttttctctgcactcctttgctagctaccctctcttttggggtatttctcttttcattctgcaaaaactcttcaaatttccttcccttttctgtgccttattttctcttcactggtcaaaagatttctgggatttttgctaatttggtgcaaatctgattcccctttgacaaaccctcctcatctcttggcttattgacaactactattaatttcaagttgctttttttttttccactttttttctagctgtgtaggattaatcaattttcgaatcaatcatatatactt

SEQ ID NO: 63833 - DNA, 212 bp, Glycine max
tcctatgacgttatgagcacgcatgcactcagctcgtgagctcggtattcggctcgagctcgagccgaatcggctcgaggaagcgttcctggaaagttgggagcccaacggctaagactacctccatgagagcttcttcgaaccgtcgtaagaggccaagctcttcgtcgggaacttgccttactactttgatagccagaaatggtcaaagc

SEQ ID NO: 63834 - DNA, 316 bp, Glycine max
tgcaattgaagttgaagtcttgcccttctctcttcaactccaaacacaagacatcatcatccatggctgcctccgtctccactgtcggagctgtcaacagagctcttttgaacctgaatgggtctggacctggggtttcagctcccagttcatccttctttgggagcagcttgaagaaggttattggctcaagggtccccaacacaaagatttcctctggaagcttcaagattgttgctgtagaagagaagaacgagattgaagagacccagcagaccgaccaggacagatggaaaggtcttgcctatgatatctc

SEQ ID NO: 63835 - DNA, 120 bp, Glycine max
ggagaactcatttaaggttgtatttggaaaactctatgcttaatttcttttaagcattatatgatgatacttgtgtgactactgctgctgctgcattaattcactcattgtatattctta

SEQ ID NO: 63836 - DNA, 359 bp, Glycine max
cagagtaatgaatccctacggaggcaggcagcggctgttgctttcgagcagaaagttcatccagaaaaaatagaatcagaccattcagcagcttctttggagcagaaagttcaaccagaaaaaatagaaccaggccattcagcaactgctttagagcagaaagttaatccagaaaaaatagaaccagtccattcatcaactgctttggagcagaaagttcatccagaaaaaatagaaccagatcattcagcagctgctctagagcagaaagttcatccagaaaaaatagaaccagaccatgaagttgctgttgcagagaaaatgcatgtgcaaccaagaataattgcagataatatgac

SEQ ID NO: 63837 - DNA, 232 bp, Glycine max
gcagagtagataatgaatacatcaaatagaataccttctcagctgcttctttgccttttgtttatttttattgtgagagaaagaaataaagttgagtgttgagaataccgtttcttccaacttccacggtccaataattctgattcagccatttttgattctttttcttttcttctttcttcggttcctgacttcttttcttttccccaaaacccaagagagagagagaaga

SEQ ID NO: 63838 - DNA, 420 bp, Glycine max
ctcacattcacgaccagcataattgtacatttttgcattgcgccggcaacgttggtgacgagtgacgaccctttgagtagcttgggcaaatattttggtcaacaaatatttttctgcaatatcagtgttttccattccatatcaaatttcaatcctttaggagtttccttccactcagatgtagctactagaatggacaatcagaagggaatgagtattagttttgagacattcacgtggaaaattgaaaatttctcaaaacagaacaccaagaaactacaatccaagactttccgaatccgaggttataaatggcggattcgtttgtatccattaatgaagaatgttgaccatttttcattgtatttgatggttgcggattctttacctccgtatggatggaacagaaatacgcatttc

SEQ ID NO: 63839 - DNA, 385 bp, Glycine max
aagtttttgatcgagtggattgttcttgcaaaacatgccaatcttttttatgatccgtgtttcttttcctatatatatatattttaatttgttttgccttggtctcaggtgaaaacatattggttgaattctgatggtgctgatgtggtttaccatatgatagataacttccttctttagcctttttgttaagtttgatttcatctaatcaatgttgtgagcaacaatagtagttgtaatccaatcatatatcccctatattatgtcttgcaacgtaatggatgaagattttttgtacattgtattgtggcatgagaagtcgataactctgtttgagaataccattatgtacatgggaatcataaatgactaatttgtccatctt

SEQ ID NO: 63840 - DNA, 240 bp, Glycine max
tgcatctttgaaaaggcgcaaaaagtcagtgaagtaaataagctgaaacaagaaacgttggttcagtttgcatcaatggcggatctgaagaacggtaatttcctcacctacgcgtacattcttctctacattgctctctccagcggccaaatcttcttcaacaaggttaatgatctgtttcttacaggttatgaaggttgaggagggaatgactcctgaaatatacgctactttagtagt

SEQ ID NO: 63841 - DNA, 428 bp, Glycine max
  unsure (1)..(428): unsure at all n locations
gcacattatttgtttggtttcagaagctcatatcatttgagttcccccggaaccaaatcttcattgaccatctttaccttttcaaactggacccttaatcttaatattatncctttttctttttcttcattagatatttgaaatatgaaattgttggatttaaggcaaacaatggacgacggacagcaaccagtaaaaagcattttccggattcgggattcaggattccatgaaagcccaacctacacttctttcccaaactcctaagcggncacaaagcgcgccaatctcgcccggtaaaattctcctccaatgggggcgccttctcgcctttctccgncgncgacaaagaccctcccgaacctatggctttcacgaactccgactcggacttcgagagccctgacgctgtccncgatgcagcagta

SEQ ID NO: 63842 - DNA, 417 bp, Glycine max
gtcagcatacattaagaggtataccattagcaaagggaggcagccgttttttagattttaagtgaaattagaccttgactccttgccccttacctcctgtcccagtcaaatggtaggcagtggattgacggagtatgtaatgcatattgcagttgaatacaacaatgtgctaactcaactaaaattgagatggaaactatctccaacttattagaacatatatgatttcagtatggaattaagttataatatggaaattatcttccttttctatcaacataatcgtgcagtgaaatcttagctataaattcatcatagtatgatttcattaatctttaatttctcttggcgatcattgaaacagtatgacgattcattttccatttgaccacaagacttatttttgaaactcatgac

SEQ ID NO: 63843 - DNA, 285 bp, Glycine max
acttatatcatgtcacttaaggttactcacttatgaacagggttgccactgcaattacatagatggctacttcgcttacttatggagctgtactaccatcgattgctattctccaccgcaacgtagcctatgtcaaagctattaagaataccgagggaatgggccctggcacatacaccatgtggattggatggcatccatgatcaaacgctgtgatacattttgaacccgttctagtctctgactatgccatacgatcatgtgaattgaaatgtggatcttgag

SEQ ID NO: 63844 - DNA, 381 bp, Glycine max
cttaactagtactatgaggttcatgttagtcagttgtggatactctggggctagcaactatagttgcaattaagaacaaaatatgcatgacaatcgtaatcatattctattgtgttattttgcatcatggtgtttgtttgtgtgtgtttaaagttaaagatcttttcatttgtgcccgctatatacatgtgtgtgttttcatacatattagtggacactatgatattaccaataaaggtccatacatagtcctatacaatcacaaatacaattaattatggtggttttattttggggaggggaatcttattttccttctcactaagctttggtgataaccttttggtaatgaaaaatgttaaaataaaaagatctttgttc

SEQ ID NO: 63845 - DNA, 352 bp, Glycine max
agctaaaccatattattacacacacatgctaacaagcaggggggcttatacaatgcagctgaaacatctacaaaagaccgcgatctgtctcaacctcactgcgatggacatcatcaccgtgtccacagaatgcctgccgagactctagctcacacgcagctcacttcgcatcctaatacttcactactggatccaggtcgactacaatctgacatcacagcaacctgacctgatctggccccgaattcaaagacatcgtactactcctcatgaggcaacgtattccagtcatggtgatttcctatgagctcgacagagaggtcttgcacacgcattgcgtcatattctactg

SEQ ID NO: 63846 - DNA, 289 bp, Glycine max
tttctctcttctcgactcgatcccaattccactagggattcaattccgatgcgattccgagcttggtagatccacgacaagggttcgtttcccagattcttttggaaaaaaaaattctttctctggccaacaggtgagttgtaaaaaaatggaccatgacaagactgggtgccaagcttcttctgaaagtgctatattgtgcattaacaactgtggggtttttggaaatgcacataccatgaacatgtgttctaaatgcgccacagacacattgctgtgacacgagcac

SEQ ID NO: 63847 - DNA, 407 bp, Glycine max
  unsure (1)..(407): unsure at all n locations
ctttttctcattctctggatccgattcaggaatattattatttttaaattcccctgtttgcaaaanattaagaattgtttgcgtcgtcagatttgaaagtgcttcaattgaaatttattttcatttttattttagtctattttattcccattcgtttcgtaaagtcaacgctgccgggagaagcgtgaaaatagggtgttgatcccagttctcacgtttagttgtgtaaatggatccgtttcagaagagaggaaacatacaaaattaggttcaaaacgttgacattcttcgtgttgggaattagtgcctttggtggtcaccatgttccttcttagaaggcaaacccagaatcaccatgagaatgattcctcatatcaagatacaaaggtggctgaactcaagacagc

SEQ ID NO: 63848 - DNA, 404 bp, Glycine max
agttcattctctttgcgcagttccctacctctcctttcaagatgcagatcttcgtcaagaccctcaccggaaagaccatcacccttgaggtggaaagctctgacaccatcgacaacgtcaaggccaagatccaggacaaggaaggaattcccccggatcagcaacgtctcatcttcgccggaaagcagctcgaggacggccgtaccctcgccgactacaacatccagaaggagtcaacccttcaccttgtccttcgtctccgtggtggcatgcagatcttcgtcaagactctcactggcaaaaccataaccctagaggtcgaaagctctgacaccattgacaacgtcaaggccaagatccaggacaaggagggaatccccccagaccagcaacgtctcatcttc

SEQ ID NO: 63849 - DNA, 415 bp, Glycine max
ttgagaactattaaggagaagcaaatggcttcctcaatgatctcttccccagctgttaccactgtcaaccgtgccggtgccggcatggttgctccattcactggcctcaagtccatggctggcttccccaccagaaagaccaacaatgacattacctccattgctagcaacggtggaagagtgcaatgcatgcaggtgtggccaccagttggcaagaagaagtttgagactctttcctacctgccagaccttgatgatgcacaattggcaaaggaagtagaataccttcttaggaagggatggattccttgcttggaattcgagttggagcacggtttcgtgtaccgtgagcacaacaggtcaccaggatactacgatggacgctactggaccatgtggaagctgcctatgtttg

SEQ ID NO: 63850 - DNA, 128 bp, Glycine max
gtttgtttgtacttaaactacattcccatttgtttttgctttttgagatttcatcatcctgtatttttggtttctgttttcggacttcaatggaaattaatggatgagaactaatgaataagctaaaa

SEQ ID NO: 63851 - DNA, 401 bp, Glycine max
gaacaagtagttgagaactaagaaggagaagcaaatggcttcctcaatgatctcttccccagctgttaccactgtcaaccgtgccggtgccggcatggttgctccattcactggcctcaagtccatggctggcttccccaccagaaagaccaacaatgacattacctccattgctagcaacggtggaagagtgcaatgcatgcaggtgtggccaccagttggcaagaagaagtttgagactctttcctacctgccagaccttgatgatgcacaattggcaaaggaagtagaataccttcttaggaagggatggattccttgcttggaattcgagttggagcacggtttcgtgtaccgtgagcacaacaggtcaccaggatactacgatggacgctactgga

SEQ ID NO: 63852 - DNA, 335 bp, Glycine max
atcaaagacttgaacaatgaatccaatggaagctcaaggtcagggacaactaacccagaagacgagttggatgctgtggccacagctgaggagctgaaggcattaagaaaggaacttgcatcattgaggctgagcaatggagttggaaacaatgacaaagatggagacaacaaacccagcatggacaaagctgtcatgagcaaggtgaaagggttgctcaagtcaaagaagtctttcattaagatttgggccagtaaagggggacaaggtgaaaatagtggctcagactcatcagagagtatgagttctgctaacccagaagaagccaaatctac

SEQ ID NO: 63853 - DNA, 395 bp, Glycine max
cacaatcactatcaccatcatcatcaatattcttcttctggtgggttctcattggcacaaatccaactaggacattctcttcctgaggcaatgaatcacaatgtttcagcattcaacaataatgtgagtggtgagaaccaaaaccactcatcatcagatcctcatctgcaacagcagcaacacttctcattcataccggatcatcttatgtcagctgtggttacttcttcttctcatcatcaacctagcgggagcgactacaatctgaacttcaccatgtcttcgggcctcgctggttacaatagggggacccttcagtccaattctccgtctcttttgcctcacttgcagaggttttcgcctctagacggatccactgtacctttcttcattgg

SEQ ID NO: 63854 - DNA, 412 bp, Glycine max
tcgaggcaattgaagttgaagtcttgcccttctctcttcaactccgaacacaagacatcatcatccatggctgcctccgtctccactgtcggagctgtcaacagagctcttttgaacctgaatgggtctggacctggggtttcagctcccagttcatccttctttgggagcagcttgaagaaggttattggctcaagggtccccaacacaaagatttcctctggaagcttcaagattgttgctgtagaagagaagaaagagattgaagagacccagcagaccgacaaggacagatggaagggtcttgcctatgatatctcagacgaccaacaggacatcacaagaggaaagggtttggttgactcccttttccagctccacaggatgctggaactcactatgctgtcatgag

SEQ ID NO: 63855 - DNA, 414 bp, Glycine max
  unsure (1)..(414): unsure at all n locations
cttttgtttgtctaacaaccccacaatgctgattccctcctctcacccctcaatagtaacctcttatcgtttattcccttatctttcaattccttctgttgatttctgctcattcatttgtagggaaataaattcaatactgaagaaaaccaagttgaaccaacagacgtgaaaccatgttatggaatcctacaggaataattcagtggcaagaagagaagaggtggcttccctggccttgtgtccccccacaactccgtgaagactcaagaaagcatttgaatcactctcgagaatgtgcaaacccagatctaataataggcatgactatcaacaacattgcttagcaaacatagtgtggtgtanggagacattatgtaaggttgtttgtgcagttccaacaagctatttgaa

SEQ ID NO: 63856 - DNA, 120 bp, Glycine max
tgacaatgatcctttcttgcttccattttttccacagatgcacaaacgcttaattgatctcatcagcatgccagctttagatgctcacgcaactgctataggtgcactctattaccctgc

SEQ ID NO: 63857 - DNA, 307 bp, Glycine max
cgactgtccatacatatccacctctctctaaatcacccttgttgcccttatgtacgagccatagctcattgccgcatagaacccagatgctagctacccatgtcgctgaagaaagcctatcgctgcaacaagttctacaaatcgttcaaagaggagctaccgtcggatggcaccatcgaccaagacgaagacgacggcaccagctaagaacctgatagaggtaatagtaaaggatggccaagcatgctgtcgacaatcctctgagaaatcgtgcggagagtggactcctgctatgagcaaagcccga

SEQ ID NO: 63858 - DNA, 420 bp, Glycine max
  unsure (1)..(420): unsure at all n locations
ggaacattgcttgtactggaccgaacgcaccttaaaagcggtgatccggtcctaagccaacaacggtcctttaaccgaacttaacatactcaacattgcccattcccgagcctcttcttccctcttcggtctctcattacccgattatctcaaagcctctgctctaacgcgcctccgcactccagacgccgatgctttccgctccgccgagtacaccgncgacaaggcctccgagattctccgagactacatctccgccatcgccaatgaactcaaagattatccctcttggtgtatcaatcttggaatggaatactcttccggttgttattagaggatgaggatgactttggccatgttagcttgaaaatctattcactgacttagatgtcgaagacaaagggaaaatcagcaagaatg

SEQ ID NO: 63859 - DNA, 140 bp, Glycine max
aattggaaaatttcatcaatagtggagcaagatgggaaaagggtcacggcccaagagttatgcaattgcctcttcaatagtacaagaaaaccaacaacaaacaccaactttcattgcctgcacaacttttaacaattctt

SEQ ID NO: 63860 - DNA, 389 bp, Glycine max
gaaagacaaaagcttgttatgactgtacgaaacctcaagaatgccagaaaggcccaaatgactactagttcatgatatctgctgtggaaatagtataaggtgaataaattaatgtgtacactggcaagatatgtatgtattttcttctccttttcttagggttttttctccctcccttctgaatcgtaaatgcgtgccataatagtgctcattttacagagttatcctagcagtttgtgatgttttaagttctatagttaccaatagtgctcatcagttctttgattgtatcttttcttttctttttcttatgcgtttatatacatattcttttattgtatgctttaactgatatatgatataatacaaatgagcatttattttattgg

SEQ ID NO: 63861 - DNA, 403 bp, Glycine max
ctcagttgacctaattaatataggatagagagattggaaagttaaaatggcatttggagctaagaatggcgtgtgttttcccttcttttttttcataactttcttggttatatgttctgccactgctcggagccctattttcttctcaaatgatgaagcttcgagcatggtggggaggtcattaaaggtaataaaccttcaagactatggtgaaccaactgcaaatcatgggcacgatccatggaagggggctagttggggaggtaatggagggcgaaaaggctgagccatgagagattattggaaatgcaatactttatagtttacattatttcagttaacgcagttaatgcaatatttagcctttcattttataaacatatgtatcttttaaaagaagaac

SEQ ID NO: 63862 - DNA, 391 bp, Glycine max
gaaaaacaagtagttgagaactaagaagaaggaaatggcttcctcaatgatctcctccccagctgttaccaccgtcaaccgtgccggtgccggcatggttgctccattcaccggcctcaaatccatggctggcttccccacgaggaagaccaacaatgacattacctccattgctagcaacggtggaagagtacaatgcatgcaggtgtggccaccaattggcaagaagaagttcgagactctttcctacttgccagacctcgatgatgcccaattggcaaaggaagtccaataccttctaaggaaaggatggattccttgcttggaattcgagttggagcacggtttcgtgtaccgtgagcacaacaggtcacctggatactatgatgga

SEQ ID NO: 63863 - DNA, 92 bp, Glycine max
ggcatgttttctgctgtagctcctactatcgtaaccagtggcccattcaccacatgcataccggctgccatacatgagctatgcgaccatgc

SEQ ID NO: 63864 - DNA, 410 bp, Glycine max
gcgtttttgtaggtactgaggaagaaagttttggcagaataactttgttggagagaataaaattcaggcaaggcgttgaagttggagagtattagattggaagcttagaagtttctctttggaccaaagaaatggaggcattgcaacttctgctcgagttttcctttggtgaagtttggagaagccaacagttatgggactataaagagtttaaaggctaagtaggaaatcctaacactacagggtgtcaagaattgaggcaagaacatttatgatactgtacagatacggtagagacacactattcaaagatgaaaaatagatgtgaggtgacaagggcaaataaaggggggctttataaggaaaggatacttatcagcagcagcatcaatctttcaaacttgcatagt

SEQ ID NO: 63865 - DNA, 405 bp, Glycine max
cacagtgatgaccaccagcactctcactaccaccaaaccaactctacaactacaaggacgagcttactgagctacttcaactgtagcataaaagcttaactatcaatggaatgtataaccttttcgtgtctgcctaacgccgtggacggacaataattgtggtttcgagcttggtgatcatttacttggcacttgattctgatttatgaaaacaaatgtttcatttaaaccctaatcttaaacagtgattctatattacacttagcgtatagtttcaaatttgagtatttaatctagaggtataatgaatatgagtaacatgtaaatggcgcttaggactctttgaacctgtaccaccagctccaaaatatgatgatgaattaatacaggaacacaaattaaaaa

SEQ ID NO: 63866 - DNA, 158 bp, Glycine max
  unsure (1)..(158): unsure at all n locations
gtaagctcggattcggctcgagagcaagcacnctcgcagtgaagtctgagcgtcgcacccgagggtatttaccaattataatataaggttgtaattagtaagcaaaagaagatggtgaagatatgtggaattggagcagggtatgtatggggtacaac

SEQ ID NO: 63867 - DNA, 351 bp, Glycine max
aaagcacaaagcaaagctcatccttgagttaaaaaatggcagcagcttcttccatggctctctcatccccatccttggctggcaaggccgtgaagctgggcccatcagccccagaagtgggaagggtgagcatgaagaagaccgtcaccaagcaggtctcctcaggaagcccatggtacggcccagaccgagtcaagtacttgggcccattctctggcgagcccccgtcctacctaaccggtgagttcccaggcgactacggctgggacactgctgggctttccgcagacccagaaaccttcgccaagaaccgtgaactcgaaatgatccactccaggtgggccatgctcg

SEQ ID NO: 63868 - DNA, 390 bp, Glycine max
tccaatatattccattctctctgtgtatttccctacctctcccttcaagatgcagatcttcgtcaagaccctcaccggcaagaccatcacccttgaggtggaaagctctgacaccatcgacaacgtcaaggccaagatccaggacaaggaaggaatccccccggaccagcaacgtctcattttcgccggaaagcaacttgaggacggccgtacccttgctgactacaacattcagaaggagagtactcttcacctcgtcctccgtctccgtggtggcatgcagatcttcgttaagacactcaccggcaagaccataaccctagaagttgaaagctccgacaccatcgataacgtcaaggccaagatccaggacaagggaggtatcccccc

SEQ ID NO: 63869 - DNA, 387 bp, Glycine max
tgagaactaagaaggagaagcaaatggcttcctcaatgatctcttccccagctgttaccactgtcaaccgtgccggtgccggcatggttgctccattcactggcctcaagtccatggctggcttccccaccaggaagaccaacaatgacattacctccattgctagcaacggtggaagagtgcaatgcatgcaggtgtggccaccagttggcaagaagaagtttgagactctttcctacctgccagaccttgatgatgcacaattggcaaaggaagtagaataccttcttaggaagggatggattccttgcttggaattcgagttggagcacggtttcgtgtaccgtgagcacaacaggtcaccaagatactacgatggacgctact

SEQ ID NO: 63870 - DNA, 419 bp, Glycine max
  unsure (1)..(419): unsure at all n locations
ggaagagaattttagaatgaggaacctatacaggaaagcagctactttacgttgctatgcagggagcagatgctattctgcatcggctgtgatatggagcttgttagggtgcttgcttttgtttcatctatattccaatattcatcacaaacacaaggaaggtagagaagtgccattgcatgtgactaatcatcctcagtcacgtgaactccaacaagtggaaggggagatcatccgactccaaccaaaggggaagaggtcccctcgggcagcaaaatgcagacataagcaggtcacaggaaatggtagttattactactaccctgngagaatttggttggatactgatgganatcctattcaagctcatggacggngcattctatatgatgaaagatcaagaacatactattggtatg

SEQ ID NO: 63871 - DNA, 243 bp, Glycine max
  unsure (1)..(243): unsure at all n locations
gcacgcgtacgtaagctgggaattcggctctagcgaacagacttattgaacgacgcacctatacttcaaagaacagtanttttcaaagaacaccagcgggccaatactacgcccaatccgaccttatatctaccttgttacagcgcttgctctcagtccatgtagctgccaacatacgtcacaaacacacccaaaataaatacataccaatacatatgactaaacatgctcatagacgccaac

SEQ ID NO: 63872 - DNA, 416 bp, Glycine max
attataactaaaaacatatttaacttgggccttcaaattagtttgggccttcagcaacaattaattgtcttgatagtgtctctgcctctgggccttcatccttctccacttgagccttcatccttctccacttgggggctttgtccttctccacttgggccttcgtccttctccacttgggcctttagcctgtatttggccagtttcatgattctcatcattccctccttcttggaaaacatttgtcctcaaatgttcaggatcatcaccgtgttcaagtaccacttccttccttttcttgggggcttgcttgacataactttatggatatgaagaatatgtgcaaccgataaagaaagcgatagaaaaagaagaagaagcgcttcgcgatgcacgaaagagaagaattggaagca

SEQ ID NO: 63873 - DNA, 377 bp, Glycine max
caataacaatgtcaacaacactaataatgtgtgcaactgcaagcactctccctccgccaccttagaccttctcatcctcctcctagtcctcttctccggcgcgttcctcctctcctcctacctctgctacatcttcaactccctctccctcctcctcccctcggtgccgctctcctacctcctccccttcctcctcttcttcgccctctccctcgccaccgccgacttctgctgcggcgcccgatcccgccgctgccagcgccagggctgcaagggcctcaagaaggccatggagttcgatttgcagattcagcgcttcggctcctccgtgccttcctccgccgaaatcgataagctcccctggaagggcggcactg

SEQ ID NO: 63874 - DNA, 393 bp, Glycine max
caataaacttcttcctcatttctcatttctcattcaacacgatggcaagaaaaaccaagtccattttcttggccttcttactactatgctctttctcactgggggtagtggtagtagcccaagaggaggcaatagcaaaatccgaaagtgaagcattaggggaaccagagaaaagagaaacacttgaaatcatcattggtggaggtaggatcagctgctgcgctgtactcttccactacatataggccactttactcaccataaccactgatgcccttggagaaggcaaaccggggactcatcacattcacaatcacaatcggggaccccaactgttacacgcacaactggagccaggacacagacgcgtgtaaattcaatggggtacgatgc

SEQ ID NO: 63875 - DNA, 267 bp, Glycine max
gcagcattcaggcaagtgccagggctataaatactatcttaccgtgcttcagtccacttgagaagttagtgagtgttatgttgaccggctatctcatgctagacgtttagaagtgatctgtaaccgggggctgattatatgctatacgtttcatggtatttttaaatggtatttgggaattaggaccagggtaaagtttggggggaaaagggggcaacctaaggtcctttttgggccgaccattattaacaccggcggtttaaaatt

SEQ ID NO: 63876 - DNA, 335 bp, Glycine max
tggagatggatcctccaccgaagagctggagcatctcacacccgatccgagatcatcgcaaaatacgaggtcatggagcggttccgatcgcaagcctactcctacatctaacgtgggcattttttcacacattgctcatggggtagcttgtgcatcacatggtggtcatgggtacccacctgaggcttacccaccaccacctgggtcatacgctccacaacaaggatatcctccagctgggtatcctgcacaacaagggtatcctccagctgggtaccctgcacatcaaggctatcctcctgctggttacccccccagctggttatcctggttca

SEQ ID NO: 63877 - DNA, 238 bp, Glycine max
ttataattaacataaataatatatatatatatatatatatatatatatatatatatatatatatatatatttattaatttcactcctgctttttttttccctgtcttcacctctcttctagactttaatttgataaaccttggaggtgtgcgtgtttgtgtatgattagaaatttgatgacttgtgaagcactcaagcttaataatgtgtgtcgtgtaaatgaacaatgttttcagtc

SEQ ID NO: 63878 - DNA, 306 bp, Glycine max
ttcgtcacactcactcaccactcaccactcaccactcaccgagacactttctcagaggtcaattatcgcgcgactcggtaggttgtggattttgagagtggctttgatttaattctagcactagttgcagagagctgcatggtgaatacaaaacaagatggttcacatggcagcatctcgaggaggggttcataaacttgtatcctcctctcgaattgaaaaactagtttcccttttatattccaaacaatatctgcctccgtggcttgagactgtgcgccatttgagctttaccgatgatcgcag

SEQ ID NO: 63879 - DNA, 259 bp, Glycine max
  unsure (1)..(259): unsure at all n locations
gctatattgttggtttactncactgctctatcatataccggaggggacatcaccaaacctcattattaccttaactgtaaatgcttaccaagtcttaacaataaaactaccagatatcatacattacacttacaatgatagatacagcatcacacacaatttggtgcttatcatgaaataacctgacactcctattatacctaacgagactcacttttttgcatatttcgacagttatctactcatacacctttctacc

SEQ ID NO: 63880 - DNA, 405 bp, Glycine max
  unsure (1)..(405): unsure at all n locations
gtttgttgttgtaactcgttcttcttcttttgttgttctgtgtttgtgtttgttttttctctcacctgaaaatgtcttgctgcggtggtaactgtggttgcggaagctcctgcaagtgcggcaacggctgcggaggctgcaagatgtacccagacttgagctacactgagtcaaccaccaccgagaccttggtcatgggagtggcacctgttaaggctcaatttgagggtgctgaaatgggtgtgcccgctgagaacgatggctgcaaatgtggaccaaactgctcctgcaacccctgcacttgcaagtgaggtgttgggagagcaagcttcaagcagagatagcccttaattaggaataatgataaactattaatgtgtagctaanaacttatgtattatgtct

SEQ ID NO: 63881 - DNA, 405 bp, Glycine max
actttttgctatagggatcaaaaacacatatgggaggcaccatgcgccttggatctaggaggacatatttccagaccaaggaatgcaaatctgcaaaattgtaagtattattactgcattgaattttttttaagatatattttgtgtttatgtaggacaatatgaatgagagtaatgtgtgtgcaagtatgactgcactataaaggacttgctatatagtttggctaaactggtgagatttattaggtttctaaccctttgacccttcttagatatggctgcaaaagcttcattgatgagagacatcggcatagatatgaggtattgtattgtgatttaaaaattatcttgtgaatgtgagtagaaacagaaaatgatcttgtcatatgcaggttgaatccggat

SEQ ID NO: 63882 - DNA, 263 bp, Glycine max
gagctacgacgatgcatgcacgcgtactttagctggtaatttggctcgagactttttgctctagggctcgaaaacacgtatcggaggcgccaatgctctcaaggatctaggattgacatatcttatagacgcctgaatgcaaactctgcgaaatgagagcggtattactgcatggaatccaatttcagatatacaaggtgtatatgtgcgacaatgtgcatgtgtgtattgtgagtacaggatgactgatcatagcctatact

SEQ ID NO: 63883 - DNA, 191 bp, Glycine max
ggcaatgctaatcatatctataggcacggcgcgagcccgttgtgcggactcatgtataaacagctccagtgcgagtaaacactcggaacatggggcatagcactactgaatgaaccgccgctaaagctgcaatctcaaagagcgacccacacgccttactggatgcccatctctgacactcacatctatac

SEQ ID NO: 63884 - DNA, 484 bp, Glycine max
  unsure (1)..(484): unsure at all n locations
actgtacgcatggcacgtcgtatcgtcnnagctcgtgaattcggcttcgagcgcggagggtatatactatttngctacttaagcaaagcgggcctgacgagtgatacatgtcttgaaccgtaacttgcataagaatgtgaagggcgacttttgacagagtaaaacaatagctagctacatttagctgatactatgccctgatatctgtgtttgagtgactcttgcataccttgtcattatcagtgaatgctctaatgaggaagtagtacatatataattctaagtaaaggagtgttacatgaaggccaacgaacgttagtaaagttgaagacccaggagccagattggttgaaggggattagtacatagaatattgagaaaggatttaaattcttctttggtgctactgcaagttgaagacaaactacaaagattggtgttactgaatgcattgacaagctagcacaggctgggattaagctat

SEQ ID NO: 63885 - DNA, 291 bp, Glycine max
ctacaggatcatctatggtagcacatcgtaccgacgtccagagtatttagttgcagcaaaccaaaccagagcaaaatggcagcagccacagcctaattcatgatgtcaacaccagcctcatctccgaccatccaaaagcatcatcatttgaagccatgcaacgtgtgcttacaaggtcttagacccataacatggttcaccaaagcgttatcaaccagagtgagcagcagcaccaaaagggtcataccaagagctggtgctagagctgaactcaactcagccagtgcgata

SEQ ID NO: 63886 - DNA, 251 bp, Glycine max
ggacagggtctatgatcgtggctggacgtagggacttagagcggcttaaagtgacgcatagtaaatgagagctgcacgatacatgctcaacgtccagttgagatggaccgtgatatcatgctcacagtacacgacatttcatactaggttaatgcctaggcatcagacatatggaacaggatcatggacaagcttgctcatctacctgcactgatacgctctgatcgtagcgtaaatatcacgatactatc

SEQ ID NO: 63887 - DNA, 405 bp, Glycine max
  unsure (1)..(405): unsure at all n locations
agcaagtgttgtggccacagcttaaggcaatctgtttaaaatttattgcaaatcctgcaaacttgggaggtgcgtatcgttttagaatatgaatgtaaaaatttttggttgtttcatttcaacttaagattcttttggaaataagcataatatgtattacagtcttgatgtttcctgacactttccttattaagtatgttttcttgtttctcttagtctctttaagttgataggagggtaagatgtttgatatgctatatggccaaatatcattatgagcgacggtaatctgttagaacttttgaatgggttatgggttaggttgtgtttctaattcattataatgcgaggaagttgntactgtgttttggtagtataatgtgaattttcttctttcttattcat

SEQ ID NO: 63888 - DNA, 187 bp, Glycine max
gttaaaccgtgccctcaagttcacgggaccggtatcgagaagggtaggtaagggtacctccactataagagaaatgcttgtgctaaacaacctgataactggcagctagccttatgagagagggaatcttgaagaggccacaaggattggcgcatgggacactctggtaactggggctatgtcatta

SEQ ID NO: 63889 - DNA, 252 bp, Glycine max
tcgcacgcgtacgtaagctcggaatgcggctcgaggacggcgaacttttttagacagagcacctgcaccagcaccagcagcagaaccaccactcggaggaacagcgaatgctttatgctggtggtaacagtggccacggcggtggcttttgggacaacacgccggcgccagtgcaagtgcctgcgttttgccagtattctgctcacaggggaccccttcagttcagtaacaccccttcgattcgtgcttgga

SEQ ID NO: 63890 - DNA, 313 bp, Glycine max
aaaaacttttttagtaggtgaaagcaaaagagttcttgtgtgtgcttttttatatatacttgggtgctaagctgtgtgagttcattgacaagcctgaaatggcaactatgctgacaaaggagcatggtctgaacctcaaggagaccgaactttgcctcagcttgcctggtggatgaggcagaggcagtggctgcgccgacgaggaaactccaaagaccactgatactacagggtgctaccctactgatgatctgaaacttaatctttattccaaggaagatctgaatgagaatctgaataatgtttcaaagga

SEQ ID NO: 63891 - DNA, 421 bp, Glycine max
atagagagagttagaaagcatgccagcgagatcaaattgttggagaaacgcgaattaatccacatatcctagaaagcgttacttgacgttcgcttgaacatcttaaacatttaccccaaatggcaacacgaactggtccgttggttccaaacccaaaacttcatgttcacgtttatggaggaggagcatgtttctggcaatgctggtttaaccggtcagaatgaaaacttggagctgggggaaagaaaaccacttggagatctattcaatgcaaggaacccttatgaaccaaattttattggaagaacggccttgacggttcattgaacacatgtcaaccctcagtctatggtagtcaggcaccgaaattgctcaagtcagagaatcttgaaagtgaccaaagaatttccgcttctgagaa

SEQ ID NO: 63892 - DNA, 195 bp, Glycine max
cgcaaatcttccctatcccttatggatcacataagaggggccattatcaaacaatctcgagctctaacaatagccagactgctcatgagccgctaacgctcttgtataacccacacaccaatcatcactcactaacccacagcgtcatcacacgagcaacaggtacactgcagctgaacgcatcacctgaaatgc

SEQ ID NO: 63893 - DNA, 247 bp, Glycine max
gggcactaatttggtgcacgtaataacccaactagctcaagaagtagctgataagcatgcagccatataacgtgacttagctgtgcatgcatcagatgtacattgatagttacatcggcccgatgttgtccttggtctgatatcactatatccttcactcaaaatgcgctaggagatatgcatgctgcttccggatataggacacatattgatcagacttctgcataattggtcaaggtctatacat

SEQ ID NO: 63894 - DNA, 255 bp, Glycine max
ctggctttttttacattaccagaagacgtgaaaagacgggggcgttgttagtacactttggatattgcacgcgttcaatcttgccaatcaatacaagttatacatatcctagatatttgttctcatcacaaatatggtttcatatatgttaacagattctacttctgtactaagtatgtctcaggacatgtcctaataactgcgataagtttcacacatatcacttattaagataagccttataccgagatttta

SEQ ID NO: 63895 - DNA, 94 bp, Glycine max
caaacctggtttctatcaatctctctttgtctttaattatggtgggcttacataaaactctgtgttcctgccattaccatattaatcactctgc

SEQ ID NO: 63896 - DNA, 340 bp, Glycine max
ctcgagccgtccaagatgagatgcagattgttgctgtgaacatggctgtgtctggtttgtctgctgctaatgagcgagtgaaggaggttgccttgttgaggattgaaaatcttgcggattaactgattcatgaccttcttgaatgtctcaagggtaacatgttcttgaaacattagaatgtgtacacgctgtacctacagtacatgcatcttagaactattagatgcgatggctgtcgtttacttaggatacaaatgattctcactctataaacatgttcacaaatgacaatttctatttatgttatttaaatcgaaggttaactttgtgacgagtttcg

SEQ ID NO: 63897 - DNA, 176 bp, Glycine max
tccatcaccgtactaagctcgaattcggctctaggccttatttctccctcttttggagaactctcattggtatattaaattaaccggcttcactatttgtattttataaaattttttttttattattttttttttttttttaatttatattttttattttttatattatttatttt

SEQ ID NO: 63898 - DNA, 295 bp, Glycine max
ggggggtttttttttttttttttttttttttttttttttttttttttttttttttgaatgaccaaatttttaggcaatgaagttttaaacttttaacaatttgatgtccattgtccaaagctttggttaaacaaacacttaaatggagagacaatatcggttatttatttcctaacttttttcaacgaactgaagcaaaaatggactgttggttgtacaattttgggactccatttgggatcttttgcctgtttttcctcctttttgagacaacttttaaacctttaacaatttc

SEQ ID NO: 63899 - DNA, 350 bp, Glycine max
cgaatagagggttttgacgctatcgttcattgaatttcggagcttatctattaatctaatatacatatatataacgacatagataatagtcatatagatataatcatatcgttatattgtccttgcatgtgctgctaagatgtctcgcacgtgctcacattgcggtaacagctgtcatatctcatggacatagcaccgtacagatcgtccgtcatgctagcgaagatactggcatatgtcggacaggagaatgaatgctgacatatgtattcgatggataggctggaagaattagtattgaacctattaacctattgcttgacaagttttttgtagaacagaaattggtg

SEQ ID NO: 63900 - DNA, 358 bp, Glycine max
cgaaagctcttttgctaggagcagatcatgatgaagcgtagtcgatcaccatcaacttcaggagtgagtggctacagccctaccgacttcgaattccgctctactgtcatagactaaggccaccaggtcacagcagcctgggttcttaagatgttccaaacacttcaactcaattgggttgcaccatcacagtcacagatgctgctcaaatgctgtacccgagagaccccagagacccagttccataagggctcgcactggagttggagcttctggatctgatcgtccattagctgaaagacttttagatctgaaagatgcttgttggagatttttaaggccatatactatacgtggt

SEQ ID NO: 63901 - DNA, 415 bp, Glycine max
  unsure (1)..(415): unsure at all n locations
gccacaggtggcttcaggctgcactgccgaggaagtggcagcatcactaggcacatttgtgcaaactgcacctagaatggccagcataggcagctatgaggtgaacttgttggctggagaagacctaggtaattgcatgcacattgatgtgcttaaatctgaaaaaaaaaatgttctagagctttcaaaagaaacacatatttcaagtatgtgtagtgatagtaagttgaagaatgaccccatggaacaaattagcaagttgtttgtcaattcagagaaaactaggcagacacctgtttctaggactgtaggttttcaaattagagcatcaactcctcgtgttaatggtttcggaggaaatggatattcatcacctgtgtntaatgtcatcagtgatgcaactgaggcttctgag

SEQ ID NO: 63902 - DNA, 413 bp, Glycine max
ctcgagccgtttcggctcgaggtgtacaatacacacttgtctctcaattggttgtaaccttttcttgggtacatttctctttgtatacattcaagcattaatgaaaatgaggaaactcattcctaaaatagtattataatttattctagatctattattaggttagttatcatattgtctacctaccaagcctaattattttttacatgaaggaatatattgagaaaagttcaaattacacatgattatgcgtaatacgtgaaaaaaaaattattacaaatttaatgtatatgttatcttagaaatcgattttacaggaagagttgcgcctaaaatttaactgatactaaaatttatcttagatttattaactatttttcataatattgagaggaagaaaaatttaaatttca

SEQ ID NO: 63903 - DNA, 220 bp, Glycine max
cacagttcctaattatctggaacgcgaaattacttaaaagcttcttcttcttggaattcaaggatcttgcactagcactatatttaaacaagccaagtttttgtattggaaccaattttctgattaaaaacttcaagattttaaattgaatatccaaaataaccagtataaatatcctagtattttacttgattgaaaaaaaccccttgaaaaagaagct

SEQ ID NO: 63904 - DNA, 322 bp, Glycine max
ctactattttatattgtctcaaaaaccttctctctcaacggaacctacaacaacaactaagaaagagaaattttttagaacaatggaggcatcaaagatgaagtttttcttggttttggtgattgccatgttggcgatggtagcaactggggtctcagctgctgaggcacctaccccaagtacttaatccgatgccaccgccttctttgtacccactgctcttgcttatgtctatgctcttgcatttgtcattatcttctaattaattctctaacaacctatggttatttgctacattacatatatggaattcactttgttc

SEQ ID NO: 63905 - DNA, 258 bp, Glycine max
ataaagaagcagggattggatttggagctgcatataacatcaaagcttcaattttgcaatctatatttggaagtcctttcctgggtggttccgttgaaaggatccccaatacctaattatatgcccccttggcgggtcagaacccaataatgatagtgatataccaattcttctgcatacttttccgtcaaacaccaaattccacaagggatattataatatcaaccatttccatgaccatgctgttgagcccaacct

SEQ ID NO: 63906 - DNA, 281 bp, Glycine max
agatgatcgatttgatgacgcaaaaagctgagagactccgcgagtacattgtagagaagcaacaacagaatggcaaggccaaaatgccaatggaggaataggccaaaatgctgattttattagtctcttatcacttgctttgtttgtaagtatgctgacatagggcatggtcttcataaatttagttcctactcgcagggaatgatatatcagtttgctaggtggttaatggtttttctattcttagatgaaggttgaggacttgtactgcataatctgca

SEQ ID NO: 63907 - DNA, 356 bp, Glycine max
acgagacactgcagtccatggctagaatgggaagtagggaagggtatgttaaagtcctgggctgcgcggcgggcgaatttgatccggcgtattcgtacaaaggacccgtgatgatgctcgacatgaagtaacagatcctgagatatatagtggatcactatcgaagaagccaacatcattaacgtgaagctacagtgatgctaccgtatccaatgcatatccacctgcagatttccactacctcggcaaccattatatgcagtgctaccgcgacatagatttgagcatggacggtctgcacccatttatccacgctgacaaggatgaccctgttgagtatgaatgaccttactgtg

SEQ ID NO: 63908 - DNA, 303 bp, Glycine max
aatgtatacacccactcactctagttagctagtactaaagggagcatcagcatcagcactcagtagccagcagcagcaatgggttctgcttcagtcaccaaagcaccaccctcttcctcctcatcacccaactcttcttctactgagtcccttgatggcttgaagtttgtccagaaaatctactttgaggaagtgagtgttgttgcatcatcagcaacaacaactcaaggtgtcaacagaacactacttatgctttctgcttcaaagatggcaaggtgtgtctcaatgcaagctcctacgcgt

SEQ ID NO: 63909 - DNA, 367 bp, Glycine max
atcttgacaaaatataatgaacgattgctaatttcaactgggaaaagtattaactgatattgcaagtttgaaactcatctcctcagcagccaacaagcacaacagtatcattatcatatacttggaagtgataaggtttcatttcaaaggtttggtggtgcaattcctttccattagcaaccttgcttgactgcatgtgctaatgcaaattctgaaattcaatccacgcgtccaccattgatgaggagcgtaagcagaaacaggagacaaattattcttttattttgcgtacatagacagtgatgtaaatagcacaatgtttaataattcatgatcgggtattatcattagaggcttagcgtgacac

SEQ ID NO: 63910 - DNA, 389 bp, Glycine max
cttataacgtctttaaagttcggcaggctaacgatgggcctcactgaaaaacttggggactctgacctagtaatcaatacatcttcaggaagatgctgactagaagaatgatgccatcaaagccacccccaagaagactcgatccaaatttgttgaacagacttaatacactggagttgggatttgctgcctttctcttcgaatgtggatgctatgattatgttcatgggaaacacaactacttcatctacctcttccttcagaccttaacattctcaattgtaggatttggctacgttggcaccatcgtgtaaacctcgttgagccaaatttctcaagttacttaaagttccatcaaggttgtgtccctatttttctaggttttccct

SEQ ID NO: 63911 - DNA, 397 bp, Glycine max
  unsure (1)..(397): unsure at all n locations
cttattttaccaccttagattattaccttccttggcttttggctgaaatggaatttctctctatttttcaatgttttgatttactctacacanattaactctcaattttcactttcacttaatagaaaaccttctttttaattaaaataaaaaattaaacagcgttctaataattgatctgaaatcccctttgtttataataggaaaaccctgtgtttgtattcaaatctagcttaaaaaatcaaattatttctgtaatttattctgaattctatgtgtttatttcgttactcgggattcttttgcgttaaacattatatattctaaggagaacgagaccactttttattgagtttgtagaatattttattctgattgacattagctngctaaatgc

SEQ ID NO: 63912 - DNA, 223 bp, Glycine max
aactgctcccactggtcgtcgaatgcggcatgctgcagctatcgcgtggggctggcaagggcactgcacaagacaaacttataaccctcatggaagctagtgacacaggtgacaagtcatttgccaatatagcagctgaaatgctagaagaatatttgctgatggccacggatcagtattatgcgtacatatctagcgagagtatttggctcttccattatta

SEQ ID NO: 63913 - DNA, 365 bp, Glycine max
gttttcttcattatcttccttgtcactgcccgtgtgtcggcggcatgtccaccgtcaccacgcaagccttcgacgcaattttccggccatgtacctagaaatcgaggtttttgaccatgtcttacggtaaacgtaaccgcatgagagactatgcgaatccaagggatacaattgttctgaatttgaatgaatatttgcacatgaagaagggtttgccaaaaggcttagctattgggagttgcagcattcttgagactgcaggtcaaggagcactcattcccctctaccagacattgaagtctgccattacttccaaggaatcagaatctttcagttccaataaaattatttggctgcattttggg

SEQ ID NO: 63914 - DNA, 137 bp, Glycine max
tcattcttcatccatagacatggccaccgtcacttctgcagccggtgctattcccttattcactggccttaaagcaagccccagcaaagtgaatgccccaagtaaaggctcaactccccaagccacaaaggtgggca

SEQ ID NO: 63915 - DNA, 406 bp, Glycine max
aattagttcattctctttgcgcagttccctacctctcctttcaagatgcagatcttcgtcaagaccctcaccggaaagaccatcacccttgaggtggaaagctctgacaccatcgacaacgtcaaggccaagatccaggacaaggaaggaattcccccggatcagcaacgtctcatcttcgccggaaagcagctcgaggacggccgtaccctcgccgactacaacatccagaaggagtcaacccttcaccttgtccttcgtctccgtggtggcatgcagatcttcgtcaagactctcactggcaaaaccataaccctagaggtcgaaagctctgacaccattgacaacgtcaaggccaagatccaggacaaggagggaatccgcccagaccagcaacgtctcatct

SEQ ID NO: 63916 - DNA, 146 bp, Glycine max
attatttttttcattccttcattttaaacctactgcagcccttttatcaccatatcatggcatcagaagcaaatgctgccaacaccaacttctgtgtaaatgttagcaactatggctacattagtgctaatgaccccttgtactga

SEQ ID NO: 63917 - DNA, 397 bp, Glycine max
gtgatcacttcagcaggtactggaaaaattcttcctggtgtggagcactggactctacccttgctaaatctattaacaccctggatgatcccaacgaagtgcaactactaatctgttcaagctacaatgaaatgccaatggataactaggaacctaaatccttgcttgatttgatatactttgactagttagtgttatgcttttatattctaagactagtaaccaaatggttcgatactttcatggtgatagggttaagagaatgcctaaacctcttgttaccaaagtgtatgttaggcgccagcctggcagtaataggaataactaaccgaattctgttaggaataactaacagaattctgttagttaaagagtactataaataagagctttaact

SEQ ID NO: 63918 - DNA, 374 bp, Glycine max
tgaaattgcagtaattggtgacttcaatggggaattctgggctgtgtatgcactccaccagtttattggaaatcttataacatttgctctactgagtgatgatcagcaggagggaagtaccaagggcacaactttattgtttattgtattccttttcattatgacctttggtgcaatactaatgtgcttcttgcgcaaacggagtgctaatagcaagggacaacaagagctttcaggtgcagatgctggcgcatgtgcgtccttgaagtctctatccaaatcacttgccagtgcattgtctgatgtaaaaaatgttgttgatcataccccttattgcatattcaggtctacaacaagccttttgtgtgggctga

SEQ ID NO: 63919 - DNA, 400 bp, Glycine max
agggattggagaccccgtattatcttgataacttgcagaaggaggagcgcattactgaacagtgagatgcttgaacgttcgaagcatacgttgtcacggtatatgctatctctttcacagagatcgctgctaatgacctttaaacagatagaacttccgatgcgcgtacagatggatccgctgagagctccgtgtccatgatcggagcttcgattgcgctggcattgatggctatcttgaagcattgaatctcgtaattgcgttgggtttagacaaaatttattcgattgatatacacagtggtgattatgagctttggtatctatacttataggtattccggagagagattatgcagtatttaatatacttattgttatttggtttaggacttaaggag

SEQ ID NO: 63920 - DNA, 409 bp, Glycine max
ctttcttttggttcagaactgatatagaaactgtttttctgggtttaaattggaaataaaatagatttagtttataatcaggattcggatctcttagcaatttggtgatatttgtttagtgacgtttttgtttagttattattttttaaaaggttctgcaacctaagtaaatctacttttggtagtcaacgtgaaggcataatgggactctgttaaacactcttgtctcgcgccccaatctgggacaaattgcacatattgtctgcctttcacttttgccgtacatacaggtatgagtattgttgtggaaagtcctgtccatcgtttaccttttcttgttccgtgtgtttgcaatgtatggaactcctaatattttttttgcataccagataaagatgttttgcttttt

SEQ ID NO: 63921 - DNA, 127 bp, Glycine max
cttatatgctggtgtatatacgtgaaagtgacaaggacaaaatcatatgcaatgtggatgagaaagacattgcagcacatttaagggagaggttgaagaaagaacaagaagagaaagagcacataat

SEQ ID NO: 63922 - DNA, 355 bp, Glycine max
  unsure (1)..(355): unsure at all n locations
acctgctggtgggggttaggcaaaaaaattgaatgctaaccttaattaggggngcacaactaaaacatgagccttaatttgatgatttagttgtgcccctgagtaaggtaagcatcaaattaagctcatgttttactctactaatgctatctaagaaataaaaattgatgtattatggggcttaattgacccttaattccatcaatttcatatgttaaaagctgaataaagtgcatcagccacgactaggcgtgagttgggcacaagtgtgttatgttgttctattgtgtttcgtgtgattgtcgttgattgtaacctgagactgaaaagtcatttgctttgaaatctccaaaaa

SEQ ID NO: 63923 - DNA, 372 bp, Glycine max
gaatgatacgtccttaagcaatgctagatgctgctcatctgataccacagatatttgaatgacacggactgatagtgttgaacggaagggtgttactgctgacctcatggtcattgatatcttatatcaccatcttagccaggagcttgagcagtagcctcagcttgagcaacaggcactgatacatgatcaaagttgtgcaatcagcgctcaaccatgttgcatagggggtccctgtcagtgctctgacactattcaggcagtaaatagctctgcttctgtcaaccaggatatcagttttgccaggaatgccattattgattataggccattggcaccaaaatcacagaattcatttagtgcatctcaatt

SEQ ID NO: 63924 - DNA, 405 bp, Glycine max
gatgaaaacctctccacactcataggaacaagaacaagaaacgtttgtttcaaaaggaagagagaacactatgtcaagattctacaagatttgaccaaacataacgatttgatccgtggggagataaagaatgtgaagtgtcacaatgaaaaactgaaggagtacaatttgaagttgaaagcgagaaaacaagagcgaagtcatggcccaagtcaaggtggtctggtacacaagcaaccacaacagcaattccaattttccggcatggcgcatcatccaccgttgatattgaatcagacggctgggccagcccaaataagaggcggcgagggcgttgttggtcctgctcacgcaacgacgtcgttaggtagtaatgatgtgggcccaattgggaattccgatctg

SEQ ID NO: 63925 - DNA, 343 bp, Glycine max
catccatgcaccgtgcatctcttaccgtcaaatctgaataaaacacttttgatgcattttagaatcacttttgatgacatttcctagccaaattgcattgtaacataaacactggaaaacaaagggtctataacacatcattagcctgttcccttttccagcctttgttgttttggttcgttgtgtgtctctctcagtagactccaatgagaattccccatgtttcattgctttccttcatattctgctactgcttctggatacaccacagtgtttactacaccggggtttcagcccaaattgttgaagatcaacaacaatcattgctcaaactaaagaatag

SEQ ID NO: 63926 - DNA, 410 bp, Glycine max
caattctagaatgcaattgactctagattttattcatactgctgcttgcattacgtttgagtaagttgaaataattgaattttgttccatattactacatttaaattgacttgctaacaacttttcactttaaactcgttgataaaatttaccaattattgtttgacttaaccactaaaataaataaacacaaacttactcttatcaaaagtggtattgatgcatattttgatctagttgtatctcagacccatatctatatacagacttgcatattctaactaccctcttctaaactggaatttgtggattgttagcattttgaaaaagcttgtcctttacatcaatgtatatattctcctgagttgtcttgcaacacaaaaatttgactattttcgtacatattatct

SEQ ID NO: 63927 - DNA, 236 bp, Glycine max
gtggtgtctccctctgtattactgggtatcttttaatgttatttctggacctttcagcctgtccaaagaatatatttgaagacactagacagatatattctttggacaggctgaaaaggtcaagaaagtaaaactcagcacataatttgtgtggtgtctccctctgtattactgggtatcttttaatgttatttctggattttatcttctataaaattgtccctatcaaaacatag

SEQ ID NO: 63928 - DNA, 278 bp, Glycine max
ctctagccttttcgtatccagctctacaaccactgcgtcggtcctgcactcagccaaccttttctcctactccaccgccacctatcaactcccaatcctcctagcgcgtacagctcacctcctacctccaagcccgccctctgcgccgcctgggcttcgctcactcgtaacccaatgctcacggccagtgtaacgtctctcgtggcagcagtgagacgacgaggaaagggccctaaccaaatggtctcgattacgaagaataacctatgtgacctgaa

SEQ ID NO: 63929 - DNA, 360 bp, Glycine max
cttgacgtcctgccgcgtcgtagctcggattcgctcggcttgtcgcttttctgcttccgactcatttggcggggttcaagtctcccagttttctcttggattgctctacttaaattacccgtaacctgtcaagtgtgcaggaaaaagtctctggcgcgactgcactcacaactatgacttatctgatattaaggtttccgtgaggtgtgacggtgtgaaaaaactggctttggctactacagataacgatggctccttcaaggatgatcttcccctagaccacacagaaccttcttcttctgtgaataattgcctagcaaaacttcttggtgggccagttcagctttatgtctcaaggga

SEQ ID NO: 63930 - DNA, 260 bp, Glycine max
agttttcctttaacatacacactaatatcgtgtcagaatagcttcctaaccatatcaccattgccacatatagttcacactcatgaatagtgccactaaaattctattcaattcatcaattcctatctccacttattctatacattatcatcactgtcaaaccctgatatccgcatcatcagcaaatctactgcgaaccaatctcgctctcctactccacacataatagagactaatagcctatgacttcactctatctc

SEQ ID NO: 63931 - DNA, 400 bp, Glycine max
ggctggttggggcatgtatacttgtcgtttacttagcttgactttatggaattcatgttccagactggggattcactgtccataacccagacagcatatacaatggcacaactttaactgtgacttgtggtgttagagggaaacttgatcccccttgtaatgctgtgggatatattgaccgagaggtgcttggaattaatcacatgtataagcgtccagcatggaggagatctgaagcttgcaccgagaattccccatatgaaggtccttttaaaaaaaatgctccttcatggtgttatgcgccttttgagccagaaggcattttaagttcaatatctgctatcctctccacaatcattggattgcattttggacatgtactcatacacttacaggatca

SEQ ID NO: 63932 - DNA, 282 bp, Glycine max
gctcaatgatcagtctaatcctactcttcagccatggccggcactggctgatccgcgctgtcgagtctcagactagcgtgaaatgcgccatattcttcatctatgtccagagaattgcgatcgtaaccgactctcacacgctactgggcttggctcacaagctagtcagaatgaagtatggcacaggcacgtacattgattttgatgactaccactagctctctgggcggtgctcttaccgtgcgtgctggctgcatcgtgtcacagcgcgggacgatgcac

SEQ ID NO: 63933 - DNA, 213 bp, Glycine max
ctttatttttcggtcgggaaataattgggggttgtgcttggacctggcggtaatcggtcaagctttggtctagtggttctctcgcctgtggaaagtaaaaaatagttgtaatgggtcattctggggctttcatttgcttaaggtttgggtcaaccatagtcactcatatacgtggttcttttacatatggaatatttcatatttagcatggaa

SEQ ID NO: 63934 - DNA, 175 bp, Glycine max
cgtggatatatgtagattgatgtgcgctacgctcatattcgtatacaccgtaacatgcaagagcgattcgctagaggcgtaaagcattgacgccatccacatcttatacgtgaagatccatgacacgggaggaatccatggtgaccaactgcgctgcacagaagacatagagcaa

SEQ ID NO: 63935 - DNA, 411 bp, Glycine max
atgaaggtataattaatagctgttcttcagttaatattgtatgtttgttactattggtgctgacctgcagcttttgaaggtttggtcataattatgttatttattttcttatttgagagtgcttacgtacagtagtgccccaatcattgtgaatattcatggaactttggaagtcaattttgttgtttcaaccttaaagcctgggtctttcttttactttttcaatttgttaatgcattgtttttttctttcccttttcccttgatgtatgttatgaagagatgagatatatcttaatcatttcatcacagtttatgttgtttagctgctaaactaccaactttttagtttgttccagagttgattcatgcttaatggaattggtgtagcacttaatgaaatattccttgt

SEQ ID NO: 63936 - DNA, 69 bp, Glycine max
cccaaccaaattcccatcaactacattgctatattctgctacttctgagttaacacacaccatatcatc

SEQ ID NO: 63937 - DNA, 291 bp, Glycine max
  unsure (1)..(291): unsure at all n locations
caacactctgcaactgactacggcaatgaaagaccatgtctgttaaggagtgctagcaccacgaggggtaatagacgcagatctttagcatatgttctgatgctcaatggtcgtcctgcacagtcggctgctcacaatgcttttgatatgggcaatccttacaccgatcatacgaaccttcacgctacaagacttcaacggctaagaattgaacggcaccgaggcgaacttacttacttctaattttcaggctacgctnatctggcgtaacccgaaatagcgcatatgtga

SEQ ID NO: 63938 - DNA, 336 bp, Glycine max
agctatgatcgctcgcatgcacgcgtcatcgtgagctcggattgaggctcgagcaatattctcatgacaatccggggatcaagatggtatactcgcgagggcatgtgagatcctacttacgtggtagaatgtgtcaagtgttgtgagggcttgaatggactgggagccggtagacttgtagtgacttcagatgacagcatagtgttgcctacctgctgcataggagctataagaattggcatgacagtgtgagcgtctaaagaatcatcactgatgctcaaggatctaacatgaagctcaactcagctgcagcaagacttcaaacgcaactcactg

SEQ ID NO: 63939 - DNA, 393 bp, Glycine max
cttgcttctctctcttactaactttactatgttctccttctacttagttgtcccctcagggttagatctcacgcgttgtgcgacatactgtgtatatatatttaatataatctatatccatatatctcttccttctgattctaatccgatctataatctatttcaagcatacatatatataaatatgaaatatttggaagtaccctttatttattttcttcttgagaaacctctccttcctagctatatggatttgccaaggtacgtgagtctttccctctttaagggattactgctgggatttgattcataaatcaagggttcctgttatgtctttatcattgtcaaatctctttccttaagtgaaagtatatggcttgtaatcgatacatc

SEQ ID NO: 63940 - DNA, 237 bp, Glycine max
gtagatcattgcctctgacatcttcacctacttggctgttgtttatacaatgatcagtgctgtcacaaggatagatccaagggctttcactgtatccgtactactgcggctataagactgagagacgaatacatgtgctttcatgcactttatgtgccatatatgctagacagcgattcataatgcttctacgttgatctttactctggctaactgactaacttgaccaatgaatca

SEQ ID NO: 63941 - DNA, 371 bp, Glycine max
agaagaacatgtagttgagaactaagaaggagaagcaaatggcttcctcaatgatctcttccccagctgttaccactgtcaaccgtgccggtgccggcatggttgctccattcactggcctcaagtccatggctggcttccccaccagaaagaccaacaatgacattacctccattgctagcaacggtggaagagtgcaatgcatgcaggtgtggccaccagttggcaagaagaagtttgagactctttcctacctgccagaccttgatgatgcacaattggcaaaggaagtagaataccttcttaggaagggatggattccttgcttggaattcgagttggagcacggtttcgtgtaccgtgagcacaac

SEQ ID NO: 63942 - DNA, 449 bp, Glycine max
tctatgacgctatcgatcgcacgcagtgacagtacagtcatcggaactcggcatcgaggctcgaggaaaatatctatctagccaatgccagtgtatgagcaccatgtcgaccgacacatcccacgcgtgctcaccgtgatgccggccatagtgcgttgaaagcgaggcatctgaccagctcacacatgatactctatcacctagtggctatccggccaatgtgatgcccatgatgagtctgctgctcggtataaggcgagatggatgtgtgtagtcctgactagaataactattctgacggcgaattccattgctattgctgcatcggttgccacacactttgtacaggccattttcacattggaccagactagtaacagggatgctgatcatgttatgggacgtgtgccatcgttacccgttatcctacggcctcattggaaggatag

SEQ ID NO: 63943 - DNA, 378 bp, Glycine max
cttgatttctcgcatctttcgggaagcccatggcggatgtcttatagccaaggaagcatatgggatgtgtgtagatagatctatcttctgtgttattcccaaatgtgtttacctgatcgcaggtgctctcagtggccagcacatgacttgtgctcaaccggaccatgtcaagacctactgcctagctcctcctgaaggtcctatattgcgcatgaacaactgtcagttttttggaagtgcaactaccatgaacatgtgttctaaatgccacatagacatattgctgaaacaggagcatgccaagcttgcagcatcatccattgggaatattatgaatgggtcatcaagcatcactgaaaaggaacctgttgttgctgc

SEQ ID NO: 63944 - DNA, 362 bp, Glycine max
cctttggagactactcgccatgtttcaatgatcacaattaccttgtcaaagaaagaattggatacgtcatccacaggataccaacctcctcttccagttgatcaagtaaaacctttaaatgaatatgatgaggaaggagaaggctcaccaaggatacgaggaagagggcgtggtcgtggaaggggcaggggtagaggattttacaatgggggtatggaatatggtgatggttgggaatggtgacgtggctatggtggaagaaggcgtggtcgtgcaagggggcatgcttttcggggacgaggacgaggacgaggctatggtgtgcagccagttggttactatgactatggtgaatatgatgc

SEQ ID NO: 63945 - DNA, 396 bp, Glycine max
aacattgtcaactctgaaaaaagaagaaaaaaaggaagcacttcaggcttcagcacttgaatcaaattgttaaggggaggcagagagagaaagagagatctgaaaaaaagaaataaaaaatggatttttttgaaatttgaacaaaatgggttcaagagagagagagtgtgtgtgaaatggataggagagaaaaaagtttagagggaggggacaaaaggggttgtggattaatggtggaaaagttgagggaaggggtttcggtggggaaaaagggagggcctagtactccaccacccacatggagacttgagcaaaatggtggtgataaggttcaagagtttcttaacttttccacttcaactctttctgctagaaagctctgtgccaacctctggg

SEQ ID NO: 63946 - DNA, 208 bp, Glycine max
gttggagaagtcaagtcatgcctccacaaaaaaatttgatctaatacggacataaattgaggcccaagtaaaaggaacaatgacctcaaatatcataatctatatctgtattagatcaaatttttttgtggaggttggagaagtcaagtcatgccttttttattttattatgtaatgtcacttttctactccattttatagctttctg

SEQ ID NO: 63947 - DNA, 408 bp, Glycine max
accagatcttgtgcttgtttacggacaccccatctactagctatgtgcatatgagctgtgaaggcgtatgatgtccgaggtgtcatcaattggaaactgggttatctcgctgtttgcagataagcatcaataggatactagatcatggattggtactatgggaacggcattaatgattatctggttcccagagatcaggatttattggacaggcattcttcaccagactattggtcaaactggggaataagtgcaactgaagggattctgtacctgaaggtcttccatgtgttgacgttgaaaacctagacaaatccatcaacatttctcctgaaaaccaatgcagcagtacacctggtatattgcataaagatataccagcttcatagtctgtttttagcaactcag

SEQ ID NO: 63948 - DNA, 430 bp, Glycine max
cctgcaactgtgtctgcatgtgcgtgtgtcactaccattctctcgggagaacaaaccaccttttcttgttttttccagcattccaatttcccacgaattgtgtagatttctctgcagatatcttcttgtgaagcctctgctactagaagtgcaaacagtaactgtaccatgtattgcagagatcttcctgagcttatctgtacaggaaatacaaggtctcaggtctgcaaaaggccaagtccaagtgaatgttttgtaggttcttattcatcttgaggtagctttctcataattgactgaatgaagttccttaatgatttgataaattatgcttcagcttgtgaaatacccatgtattttccgttggttttattttgttgtattatgaaatgggattcatttcatttaaaaaaataacagtttctctttt

SEQ ID NO: 63949 - DNA, 327 bp, Glycine max
caataagggaatggctgatgcgagtgatgatactgtgagcgagaaagctgcatcgacgagagcgtctctggagagaagccaggccatcaccgaccacgtaccttcgattctcggctcctgacgatcatcgtctgtccgacctagaaaccgacatgctctgcacccagatcagaacgcattctattcctaaagcccatgagaatattgataggactaggaagtatgcagatgccatattggctcactccgatcaatatcatcaggcagaagcaaagatagttaacggaccacatgaagatgtgaagaactatcctgaagcaattgatc

SEQ ID NO: 63950 - DNA, 341 bp, Glycine max
ctcgagccgaatcggctcgaggagtcttgcaattgaagttgaagtcttgcccttctctcttcaactccaaacacaagacatcatcatccatggctgcctccgtctccactgtcggagctgtcaacagagctcttttgaacctgaatgggtctggacctggggtttcagctcccagttcatccttctttgggagcagcttgaagaaggttattggctcaagggtccccaacacaaagatttcctctggaagcttcaagattgttgctgtagaagagaagaaagagaatgaagagacccagcagaccgacaaggacagatggaagggtctggcctatgatatc

SEQ ID NO: 63951 - DNA, 193 bp, Glycine max
ctgacaactgtgcggaattcctggaaaagatacttctgtaagccatctatctcagtctctatgcgtccatggagtgcagggacgtgaaggagaatagcggagaatctctcaaggctgatccgagcgatgacgagatatccagctagaagatgcatgcctgggggatgtcactatagatagagaaggactacca

SEQ ID NO: 63952 - DNA, 432 bp, Glycine max
ctcaaaaacctacacttatacaccttgcattctaatattaagagaggaaaccaactcttaaaataaagataacatttttagatcaaagcaaaatcttacagagttgataatatctttgaatttaaacattatcttaaaaatttgaatttaaaaatttaaattattctcccgagtcccaacactttcttccttctacagtagattgtgtgtgcttgtggacaatttgactgagtttgttgtgttggccccatgaactgaatttatgtctgtgaattttcttttctacgtaggtgtcaagtgctacagccacttttgccatgacattttcagcatctatgtcagtggtggaatattaccttctaaaacggtttcctattccttatagtaagtatgaatgtgaatgggaataaaactaacaaaattaatcttata

SEQ ID NO: 63953 - DNA, 347 bp, Glycine max
ctcgatccaaggcattcagctcataccatggattctgctcatgtgaagtatcgtagctatgatcatgcagcacgcgtgagacacagaagccaaaggactgcgagatatgaatatcacagtgctctcaagtcattatgcagcttcacatcaggaattgctgcactgggaacttgagggagatagaattgttctcattcctgacttgtctatagctgttgaggaccgacatgtgaacaagttgcctgatgtgttagcgccataatgtcaatagtggaaagtgacattgcccgtgagctttgagcaagtcactgagatatgagattcactggttcatgtggcagcagata

SEQ ID NO: 63954 - DNA, 326 bp, Glycine max
atctggacgagggtccaagtgaactaagcggcacgttgcactcgctgatgcagcttcaggtgccttcctttgcagcatgtagctctcatgacgagctggcacggggatcatttctacatcacatcagcatctgtaaaagagggttagtcagagagtccgtgtcagctgatttctgatgcgttgcatgatgagtgacgtgaaaacgcgtctaaaagcacggctgcgtgtaagacatgcatggctacgactctcgtcatagtcatcgggcagataaccgccaatgctatagtagacgatgctttcactgtctgcgacacatgacgcaa

SEQ ID NO: 63955 - DNA, 218 bp, Glycine max
atcagcctgaatgcagctcacttcaattgcggtagcgtatctatagctagctgggtgactaggcatacatttagtatctcaaaatctctcggcgtctaagtgagaagcagcacatgttaattctcgtgtgccagtcgcatcgtgatgctatgtgatttgtgcataggattttcctgctttagaatctcgtacactcagtccgcctctgtctgggcccc

SEQ ID NO: 63956 - DNA, 336 bp, Glycine max
ctcgagccgaatcggctcgagatcaaattagttcattctctttgcgcagttccctacctctcctttcaagatgcagatcttcgtcaagaccctcaccggaaagaccatcacccttgaggtggaaagctctgacaccatcgacaacgtcaaggccaagatccaggacaaggaaggaattcccccggatcagcaacgtctcatcttcgccggaaagcagctcgaggacggccgtaccctcgccgactacaacatccagaaggagtcaacccttcaccttgtccttcgtctccgtggtggcatgcagatcttcgtcaagactctcactggcaaaaccat

SEQ ID NO: 63957 - DNA, 290 bp, Glycine max
cacgcttacgtaagctcggaattctgatccagctcgacccgcatgacttatcccacatcatggatattaagtatttgaatgatcctgttcaggagcatgcacacgttttgtgcatatgttgaatatgatgttcgcctactgctggacaccgctctcacctcagtacactactgggaacaagcatcagcatgtttgcgcacatctgcgaaataaaatggtcccatttccagagctgtataaagctgtagtagacggtggtatcatcaggtttcccgtactgttaacgggtg

SEQ ID NO: 63958 - DNA, 261 bp, Glycine max
acattttagggtaatattcccgcgattgatgaatcacacgacatatacattaaacacatgattacgaaaactctggttttcgcagcttacagtatcttctcactgctggccgaattatagattcgtgaagcagaatcattcccagcgcgagttaacgtctcgagattaggcccaatccatgtcaatgcacgctactacctccctcgataacatcgatgatgaattccattctcgcttgcatcaccacagcatccgtctcac

SEQ ID NO: 63959 - DNA, 292 bp, Glycine max
ggggtatcactgcgaattcactcatatgatgaatcagaccatggggtttgatgaagcagggatgaactggcacttgtgtgattcaccggcacgaagttactcaaagcatgacacggaaaaaggtccagatcaagcgtaataccatgatcaacctgacatcgctattgaagacactgttactcaaaaagaacctgccaagcgatcagtcatccaacgttcacatgcggatttgtcatctgcgccatgccatttttactcatatgaatgtggaagtggtccagttgattataga

SEQ ID NO: 63960 - DNA, 237 bp, Glycine max
gcagtcaattcagtgaattcgagggttgagccttttgctcacggttccaccacgtcatgcataaaatggctctatagatcgtagtttccttgcggatccttgcaactgagatagcaaaaatagaattcatgctcaaactgcttttacactcaacaaactctatgcacatcactttgcattcacagagctttgccataataaaatacatgtttagtcaagctcacaaagcttctggtt

SEQ ID NO: 63961 - DNA, 156 bp, Glycine max
tacgtaaaaccagaattcggctcgacaagtttgagggaaaatgggtttcgtgaaagtggttaagaaccgtggttacatcaagcgctaccaacttaaattcaagatgcaccgccaatgaaagaccgattactttgccacgtaaccgtttgactgtgc

SEQ ID NO: 63962 - DNA, 291 bp, Glycine max
ttatactgcacgctcccgcttcttcaactcttctaaggaaaatcacaagacgcaagatactttctcagggaatggagcgatggagaatgtggtggggctctcgcagtgtcgtactgcaacaagaagctctagaaatgaggcaagtccaaacgcactttggattcgttagagtctcttggtcgaaaacaagcctcagaggacccaggtggattcgatcaacggaatagggttcacagctgattgctgcattgctgtgtaggaagagaccagagaaatggatatcataggaga

SEQ ID NO: 63963 - DNA, 321 bp, Glycine max
cggctcgagcttcaattaactcctcaccatggattgtgtcagccataagggttcatgctttcgtctccgtgagtctccgcgattatagttcgagtgtcaatccatcatggatcctgtcaacagttggtttgtgtccctgatgagttgcttactggacaaagattaatccagtacctgaaacaatcacatggcacctattgaacgttaagactgaatcatgtgatgaaacttcaatgggttgatgatcgttgttgtatgttgcgactactgttggtgtggcactatcatctaatgctgttgtctggccgccatgtaagctaa

SEQ ID NO: 63964 - DNA, 185 bp, Glycine max
atcaagttcacgaagaccaacagcactcatgacgtgcaggctgcacaacatgattccgcagggactctttcagacaagcatgcggacaatgaatgggagcggtcatgctgtgagacacccacatggcatgacccagcctgcgcggctgctacctgggcgtcattgcccggcggagacacagtcca

SEQ ID NO: 63965 - DNA, 253 bp, Glycine max
acgttaactcaacattcggctcgagacgaagttcacccgctcagttgcacatatctgtctttccatctgcaacacatcattgcacagcgacttcttcctactgttctttgaaccatgaatgtggcagggcatgtcttgagccactcacatggcatctcccatgctccaggtcacgtagctgggtctcatcgtcacgacatcactcagttctttccacactttgctacgcttaccacatatcatacttcaaagg

SEQ ID NO: 63966 - DNA, 341 bp, Glycine max
ctcaaccctctcaaccacacaatcctcacgtatgtgcagagtctccccattgccatccacttaaccctcgcctacgttcagcaagacccatgggccacacagtatggtcccatcagcaggaactttatcattggccctggaccagaatgcatgccctactgtatcgaagtacacaatatgatcacatgcagtatgacgatggtcacatctcatcctgagaagtatccgagggatactgaatatctctggcttcggcaacttagtcacgatagcatcattaattgctccgtatctcacagaataggatcgatgcaggtcttcgatccatacgtcaatacagt

SEQ ID NO: 63967 - DNA, 253 bp, Glycine max
ctttcttgttcgactctgcttctttctccaacttcacacacacacacacataaaatctaattaactaacatggtaattgatatagcacttggtgtggctctggatttctccaaaagcagggagaatgctcagtaatggggaattgagaacttagcccaaaaatgtgacactatttaagttgttcacattgacttcaactctcgacacgattccatcatcaaactatgggcagaatctgggtcacctcttaatc

SEQ ID NO: 63968 - DNA, 278 bp, Glycine max
aattgacgctatgatctgatatgtacctatgtcagctgagatatagatagtggaaattgcattagttagagtgagatcatgacttctgacatgtatgcagtggagccagttacactggttggagtcaatatgaggcacatagtgcatcgagccgaggctctaattccaaccttgttaaaaccttaacttgcagaactaactttacgtcctgtagctacaagtgcctattcgtccaacctgaatgagcgaaccccatgaccacagggacattcacagcc

SEQ ID NO: 63969 - DNA, 337 bp, Glycine max
attcatttctcacgtttttgttattggaatcccgttcaagattcgttatccttttgagtgcttctcatcgcacttctgattttcactttggtgtcgttagcacagcttccaccatacacgtatgtaagtggattgggtgatcccaagggaattattgcagagaataggtacgacacgatatgctggaggggtcaactggacttatcattgggatttccataagtgttgtgattggggttggattggcaacttcagcactgttctgtcatagatatcagcggaagcggtcgcaaattggcaagagcagttcgcggatggcacataccataccaatccg

SEQ ID NO: 63970 - DNA, 186 bp, Glycine max
gtcgcttcgcttttcactgcgattggaatgcttcttcagaatatatgactcttgatggagggattgatcaggtgtttatgaggatagtagctcttcgatgtggtacccatgtgatagttatgcatcaggctggtccatacgcatcgcgcacttcatcatcaccaatgtcttactggaatggacatc

SEQ ID NO: 63971 - DNA, 194 bp, Glycine max
tggcatattagttgacaataccgtatccaacgtgtgatatacgtatatatctgcaactgcatttactgcttcaagattggcttaacttcagcacatcttcaagtttattttacaacacaatgttttttgaaataatcaagagatattctatattaattgtttgcgagtcaatcacgtaagatatacagaaagat

SEQ ID NO: 63972 - DNA, 280 bp, Glycine max
ctctagtatcctccacagtttcatacaaattcgtaatcatttttgctacgatctaccgcctcttcgaagctccaccgtacttgcaaagttgggtggcatggtatttggcctaagtctctccatacacacatcaactctcagtttttaactaaccggcgacatatttagcatccatcgcattcagttccaagctaacttcagtcaatgtttcgcatctaacatagcccatgtcactcactacagatttgctctctcgaactggtggccttcaccatgcatt

SEQ ID NO: 63973 - DNA, 84 bp, Glycine max
ctcttgaagcctctccagtttgccttcacttcttaataataataataatattaattcctcttttcatgtagcaaactaaattga

SEQ ID NO: 63974 - DNA, 303 bp, Glycine max
gtgaaggcgtggatatggaatgtgcgatgaacacgcaacacgactgccttcttccgtgcattcgccaccgtatgccgcgtcattcctgcagtcatacgatagggtgtcatgcagctcactaatacactcaacgaggagcatgagtgcaaaattcgcacagatgcccgtctggaagcattgttgatgagggaagtcaatgaatcgagactggcagactacctgagagagctacagcgtacagaggataagaaagaacgctatattgcagctctaaaacgagaaacgttaaccagggaaccttaa

SEQ ID NO: 63975 - DNA, 192 bp, Glycine max
gtctagccatgtttctcacacctgtgttgcacaccctatgcgtgtatcatctggccatctgtaatgaaaacggtatggtgactgttacagggactttggttgttgcggctctggcagagaatctcatggcgaacctgaacaggagggttgaggtggttcctccacgctactgctaggatcgtggtagtgtgt

SEQ ID NO: 63976 - DNA, 289 bp, Glycine max
ttcggctcgagcgatgctggcggtgcaagcttctgatttcgaatgcacatgagtttttaaattctactatgattttccaattttccctcaacccctttattcctcgaagttgaaattatgggtttaattcaccatacggggacgattttatagattttatgatactatcattactaatactgttataagattttgagtagtagtagtactgtgataaggtgacatgtctagatgtgtttacatgttgcaaacagaaattgtaatcacttcagaatatcagtcgaatcgc

SEQ ID NO: 63977 - DNA, 335 bp, Glycine max
acgcgtacataagctcggaattcggctcaagctcaagtcaccagcttagtttgatatcgctgcttcataataatagcaataatgagtcgacttatcgtgcttcaacgaaattgctaagtagagggcaatgggatgtggcataagcagcgaattacacccacatattttcaagtttcaccgaaaggacgatgtacagatagggcatggcattagttgccaacctaccacgcctatatgcacagcatcgaacatcgcataggtagctctcgataaattcgatctctgcgatttgccgcattaaggaggcattgcagttcatgtatggtatgtcatta

SEQ ID NO: 63978 - DNA, 251 bp, Glycine max
gtagcatccgcctccgaagttttggtcaaaatcgatcctaacgccttggacattctctcatatcaccaccttcgtcgctcgtgccacggggggggacaagtgcatcctacggctatggtccttgattccctgttccacactccagtttgggtacggtcttgccggtattagtattctccgtcaggaacactctaccctctcacaacatcaatttccacggtgcctagccctgtaccaccaattgtttggcc

SEQ ID NO: 63979 - DNA, 371 bp, Glycine max
caagcttgtcttgactgaagatggatcagtggacataagcactgctcaatttgttgcatgggctgtaaggattttggctgcagttatgattcttcagagttctatggatcctctgttgggaacattggcattattatgtggatcatttgtctccttattgaagaaaatgcataggttgagattccttcgtcatttacgcaggcgtttgtttaaatctcccaagaaaaacaggaggagatcccaggttcctgattcatctccttttgatgattctcgtgatgaacttatgtacaagatgcaaagtaaagaggactctccactttttcggccacaactgagaggccctaccttgtccccttgcaaatctcctg

SEQ ID NO: 63980 - DNA, 334 bp, Glycine max
tcctcatccactttcccgattgaaatgaaagaacagtacagacagctctattctggaagattgccgagaacagaggcatcccaccagacgagagcgtttattttccaatccgagcgatgagagttcccgcatccccatatgctagcattagcaatgtccgccacacatgtaccaacccgaacaccttcacctactaacacacctcggtcctcgacatatgccggagcgccaagccactaacggaagctcactgattccatgcatgacccagttcagaacaaccagctagacctgtatgatcacgttctgccaaattctgaatggtgggaatcca

SEQ ID NO: 63981 - DNA, 236 bp, Glycine max
tccccatccactttctcgattgatatgcaagaacaggacagactgctccattctggatgtttgccgaaaacatgaggcatcccaccacaccaggggcgtgtcacatttcaatcctagcgactagagttcccgcatccccatgttctagcatgtagccatgtccgcggcacatgtttcaatccgagcacccgtcacctacgaacacacctcggtcctcgacatatgccggagcccaa

SEQ ID NO: 63982 - DNA, 355 bp, Glycine max
gtagaagccacttggattctctcgtctcctcggtgatcaccagttacccttctcgatttctcagcacagcgagagagatagagtcattcggcattcgaatgcgtgtgttgtgtggtcagtcaccgatggcagcactaactgccagggtacatgccgctgacgattaacgcatcacactgcctcgtaatggcgataccggtgtcagacagagtgactgcttttgcgaatttctgatggctccatcacaactaattttatgacatcagtggcattgatcttaagagatgaatgattgtacttgatggcaaacgggtcaagtgacaaatctgggatactgctgatcacgagcgatttc

SEQ ID NO: 63983 - DNA, 147 bp, Glycine max
gtcgctctcactctctcattcataaggttcatagtcgccatagtgcgattcactgattactggatcgcaacggtgttgtctctcatgcattcaactgcattgtcatcgccagaggctgagggtagtcacccgatgtatcacccgcta

SEQ ID NO: 63984 - DNA, 269 bp, Glycine max
  unsure (1)..(269): unsure at all n locations
taaaagttatgcactaaaaaataatgggcttgacctttggataagtgcttatatgtataataaaatcggtgtgaagtttgacgagaagaatgcttagttatgtagatccttcctttgtatggaaaataaacttggatatgcatgtcggtgatatcttgaagtgtgttaaattatatttggaattgcncantgtnatgcatgggaaaatcataaacatccattcattaataatattcccatgcatcacattgagcacttcaaatgattac

SEQ ID NO: 63985 - DNA, 279 bp, Glycine max
aaatatgcatcacgacgctcaattcccctctggctagtggcgtcgttctgctcatatcaacatcatttcgtcatcgattaactgtggatctccaggatccagtgtcgagcatctacagaacttcagcatgctggcggagctttctaggggataacatcggacatgaaagtggagagtgagctatggcatgacttctggcaatgatctttccatgcactcttggacaggctccactcttggaccgaatgatatagtgtatgaatgaataccttatctgtt

SEQ ID NO: 63986 - DNA, 325 bp, Glycine max
gaattgcaacgtcgaattagtacaactctatatcgcagcacagcacacatggaagcgttgcgcgtcgccccgagatcgccaactcgcgtccgccgccaccaacctcgcggccgaatgggactccaacccctcacagcgctcgtgcgacacgcgctccacatcgccgcaagcctctccaggcggccgagaggccgctcacgcttccgtcgccgccgctcgtcgcagacgatcgctcagaggcgaggcatcatgcacacatgtgcgtcatgccggattgtctcgactacccgcacggctacggcaggtcaattccagcttgcccttg

SEQ ID NO: 63987 - DNA, 148 bp, Glycine max
  unsure (1)..(148): unsure at all n locations
gtacgtaaactaggnattcggctcgagattaattgcangaatggcacttcgttgcttggtgatgtccctttctgttctcttcactcttggtcttgcgagagaaagccatgccagagacgaagatttttggcatgctgtttgggcaaac

SEQ ID NO: 63988 - DNA, 400 bp, Glycine max
gcagaaatgaagatgatagatgatggctttgaggagaaagctaaagagcggaaaaaacagaagctgaaaatgctagaagagaaaggattgttaactaagagaagtaaaaagagaaaacgaaataaagaatttgcagaggaagggaaagaacaaaagaaagaggttttaactgctaggaatgtggcggaaatgaagatgatggatgagggtggcattgaggagaaagcagaagaggggggaaaacaaaaattgcgaacagagaaaggtttgtcaaagaaaaaaaagtcaaaagaaagaagaaaagaatctgcagaggaaggaaaaaaacagagaaaagaggaagtagaaccattagcagatatagcaactccaaagaaaaggagtaagaagagacagtaaa

SEQ ID NO: 63989 - DNA, 61 bp, Glycine max
gacgtcggacgcacgcgtacataactcggaattcggctcttgattcaagccacaatggaat

SEQ ID NO: 63990 - DNA, 399 bp, Glycine max
aggtagactctagaggatcccctcggggaattccaattccacattttcaagaaataaggaggcaaaaatgttcatatatgaattggaattatttgttttcttattaggcctatcctgaagccaaaggaaatgagatcggaattcctcggggaattccaattccacattttcaagaaataaggaggcaaaaatgttcatatatgaattggaattatttgttttcttattaggcctatcctgaagccaaaggaaatgagatcggaattcctcggggaattccaattccacattttcaagaaataaggaggcaaaaatgttcatatatgaattggaattatttgttttcttattaggcctatcctgaagccaaaggaaatgagatcggaattcctcgggggt

SEQ ID NO: 63991 - DNA, 170 bp, Glycine max
aactttctcatctgggaagatcagttgacgaatcgaggatccgatgacgtgcaaggaatgacggtttcaatcaatcgcatcacacacagacaatcatgtttaaccggatgtccggtccacctaaacaggaaagcatagcagttgccagtttgggcaagccaaactaaaca

SEQ ID NO: 63992 - DNA, 371 bp, Glycine max
cacacacctctgtttctttctctgctccacactttctcttcctccattattgagcttccactagtttttttttctttctttctttctttcaaggacttaattgcactgcttaaagtctcaagctttacaacttttggaagacacccatcaaaccattttttgcagccatcacttgcctaaggaagagggttcttttggtttcaaccattttctgcttttagcttcaaaaggatcatcatagatgatagccagctccttctgcaatgctgattctatgttttcaagagaagaggggatagatgttagaaagatgatggaacataaaaggagcccctgctctgtttgacaaagcagttatacttctattgcct

SEQ ID NO: 63993 - DNA, 211 bp, Glycine max
atttctctcagtctcatcttcctcactgccgggcctcagtttcttctcttgtgtttcggttcggaccatgaccttctgtcgggagcaacgtgtagtcttttagaaccatgtgagtaagctcgaaagtcaggttgttatcacgactcgcgaaaataggttaggtgtttgcaatttcaccgtctgtggtgttcacaggatttgacttgggtgc

SEQ ID NO: 63994 - DNA, 367 bp, Glycine max
caacacaatacagaagaagcttaacgtctcttccacacagctactctaccagtctgctccattccaagcagcaattctttttgtttcaggccctgttgtggatcagatgctcaccaagcaaaatgtcttcgcctacaaatattctcctgtggtcttggtaatattcaatcctcaccatgtattatatttaaattaatatgcatgtcatatgcgagtattggagcagaaccactgttgttacaactaatttccacgtgaacctgtaactgaattttattaattctttcatctaaaatgagaatctcagtttactatcacgtaaagaatggtcatgacatatacacatggtgattccagaccatgtaat

SEQ ID NO: 63995 - DNA, 355 bp, Glycine max
cttctggatcaacacctgagacccatgcttcctcttcaacaactgatgtcagtctagcgttcttttcaagttcaaatgcctcaacctcagttgggtggaacgcctctcctcagacgacaagaactccagtgtcgaaatacgagatagacgcatgtttgttgggtggctgcttcaactcgagcgtgttcaaaggcaaactatgttgtgcacccaatgtctgaggtctcacatcatcattttccaaagtttatggatctttattgttgccaagtgtaggcagcaacaggacaagcagttcagttgtcaggaagtgatatacgtattagagttatgctgtaacccaagttaacttttc

SEQ ID NO: 63996 - DNA, 346 bp, Glycine max
  unsure (1)..(346): unsure at all n locations
attttttttgttatatattgaatcatatatatttttagaataattgtaccgtcgtataggatacatatcatatattggtgcatatttgcactctctggttgtgttgtatgttttgaaaatcaatgcccgcaaaatggaatgctgaagtcacactttttcatgttctgtangggggtatactgaaaaaattaaggacatatgtaggttaaaggagaaggagagatttttttaatagctagaaactttaaacaatttttggaggctgatatttccttcttcagcatgttaataaacgttggtgatcttgcacatgatttcagtctgcaggctgtttagtgaggcttgt

SEQ ID NO: 63997 - DNA, 388 bp, Glycine max
tcaggctgatgctcaaaactcagttactgctgcattaagacaaggggagaaatacacaacttttgaagatgaagactctctcatggatgggtcttcacacttaactaatgtactctactccccaagctctcccaagactgagggatcaagtgccattttggctccccaaaagactggaggattcaattatccgcctgcaagtgcctcttccccagatatcatgtcatccatttattctgttggtggaactagtagcttggatgactattgcttgcctaattttgacagcatgggctttagatatgatcagaccctcagctttccagttcaagtttccaactctttgatctgtgacactgattcaatggctcatgcttttagtgatgaa

SEQ ID NO: 63998 - DNA, 379 bp, Glycine max
ctctaccagtcactctccaaaatgcaaataatcagtcttcgcaaataggtgatcaacttcaaaagggtattatacttgagctctcatcatgagtgcttccgtcgcacacgtgcagcctcaggacgccttgaggagcttgaaactgacgaagacactgtctcacagttcagctggaaaggctccgacatcagggtaagcagctacgacctcgtctacgactaactcaatcaaggactcatcgacctccgcaagcttagtgactgtgcgtcatcaaccgtatgtatcatcaccaaaatgtacaagtgtgatgcttccagcaatgatcgtcatgttgcaaagtgacacacggaggtactcgatgcttctgataataatacac

SEQ ID NO: 63999 - DNA, 382 bp, Glycine max
atcaatgttctccacaagcaaatataagtctccctcctggcttcgatcctaattacagagctcgtgaggtgcacatattattttaactggctgagatcaaactacatttgcatatgagcacaaatctaacatggagatttttgggatgggccaagtcaatttattgtgttgtataaatattgatatttttttaatgatcctagttagcatttgttttttgttggccaaataaaggtataattattatattttattttatttattttcaatattatctgctatactagttgtgtgcttgtaggagccaaactttagtctgttattgagccatgggaattactagtgttggtgacatttgggatatatgggaaaatgttaatag

SEQ ID NO: 64000 - DNA, 293 bp, Glycine max
aaaacactctgacacaacaaacacaaacacaatcgtcaattaaaacaacaacaatatcgaagctgcacaaattaatatccaacactctcaagctttcgagtttcaaactctgggcgctgaatttggttcatttttctaaggtagtttttcttttacaactttaactgaaaatgaatactctttcttagccttcttgatgttccaaaccaatacaacgtcggtggttgtctgaatcaaacatatgtgatatgtctctgtatctgttttctctgtcctttttttttttaagaaac

SEQ ID NO: 64001 - DNA, 333 bp, Glycine max
atcccctcggggaattccaattccacattttcaagaaataaggaggcaaaaatgttcatatatgaattggaattatttgttttcttattaggcctatcctgaagccaaaggaaatgagatcggaattcctcggggaattccaattccacattttcaagaaataaggaggcaaaaatgttcatatatgaattggaattatttgttttcttattaggcctatcctgaagccaaaggaaatgagatcggaattcctcggggaattccaattccacattttcaagaaataaggaggcaaaaatgttcatatatgaattgggattaattgttttctta

SEQ ID NO: 64002 - DNA, 254 bp, Glycine max
tgacgtcagatgcacgcgtgcgtgaagctcgggaatgcgactcgagctagggcggtgatgtacaccaaagaggaggcagatggaagaagacttaagaatccattgggcactataagcggaaaggaataggaataaccgggttgaccaggaaatagtgcaatggcagaactggatggggcctttagaggcaccgatagggaggctggtgaaatgtctaggtttcttttgaagagcgatgggctcttccttgggag

SEQ ID NO: 64003 - DNA, 366 bp, Glycine max
tcggggaattccaattccacattttcaagaaataaggaggcaaaaatgttcatatatgaattggaattatttgttttcttattaggcctatcctgaagccaaaggaaatgagatcggaattcctcggggaattccaattccacattttcaagaaataaggaggcaaaaatgttcatatatgaattggaattatttgctttcttattaggcctatcctgaagccaaaggaaatgagatcggaattcctcggggaattccaattccacattttcaagaaatatggaggcaaaaatgttcatatatgaattggaattatttgttttcttattaggcctatcctgaagccaaaggaaatgagatcggaat

SEQ ID NO: 64004 - DNA, 255 bp, Glycine max
tcggggaattccaattcttcattttcaagaaataaggaggcaaaaatggtcatatatgaattggaattatttgttttcttattaggcctatcctgaagccaaaggagatgagatcggaattccgcggggaattccaattccacattttcaagaaataaggaggcaaaaatgtgcatatatgaattggaatgatttggttacttattaggcctatcctgaagccaaaggaaatgagatcggaatagctgggggaat

SEQ ID NO: 64005 - DNA, 375 bp, Glycine max
tcggggaattccaattccacattttcaagaaataaggaggcaaaaatgttcatatatgaattggaattatttgttttcttattaggcctatcctgaagccaaaggaaatgagatcggaattcctcggggaattccaattccacattttcaagaaataaggaggcaaaaatgttcatatatgaattggaattatttgttttcttattaggcctatcctgaagccaaaggaaatgagatcggaattcctcggggaattccaattccacattttcaagaaataaggaggcaaaaatgttcatatatgaattggaattatttgttttcttattaggcctatcctgaagccaaaggaaatgagatcggaattcctcgggg

SEQ ID NO: 64006 - DNA, 368 bp, Glycine max
ccaaacagtaccaaatgatctcacacacatactaagaagctgcaactctgattcacaggacatcatccaccggaaaaagactgaaagagctccatcacctcgctgcaacagttgatgtaacaggtttcaggaaattccatggagtttctgagaatccaacggagacaattgtcaataatttgaatgaatatttgaacaagaagaagggtttgccaaaaggcttagttattgggagttgcagcattcttgagactgcaggtcaaggagcactcattccgctgtaccagacattgaagtctgccattacttccaaggaatcagaatcttcaagttccaataaaattatttggctgcattttggggttaac

SEQ ID NO: 64007 - DNA, 346 bp, Glycine max
tcttcttcttcttcttcaatgcaactctattctgttcggtgacacaacatacatcactctgaagaacatagcacgcgtggcccctttctttctctctctctctcttcaacaactgtgctctcagaacagatacagtttccactgagtaaatcgcaatgcaggtaactgagacgaggactgttcaagttaagcagctttcagatctagctggtgtaagagagattcacgagttcttctccttttctggagaaatcgagcatgttgagatcctgagtgaagatgggaaatcaaagactgcatatgtgacatttaaaggatcccaaagccctttaaattgcattattat

SEQ ID NO: 64008 - DNA, 310 bp, Glycine max
  unsure (1)..(310): unsure at all n locations
ctttcaaatgctactgttcacgttcaaaaaaaaaaaagaaaaagaatgaaattgaatacatgaggtcttgggttaagacttggattggtttgaagacttggttgactttgttttgggttgtgaagcatttggtgtcctctacggacttagaggtcttgtaatacggctctttcgcatagaacgagtttttttctttctttctcaaacacgtgccgaattctgttcaattcatactctttatacattcccttgaagtgtttgnttttacatttgctttggtttaacattcaaagaatttgaatattcaacc

SEQ ID NO: 64009 - DNA, 144 bp, Glycine max
gccgttatttgcgcaaatgagccgtgtactataggggggccattgacgtgagaagtgtgaagacctgataagctacctatgtctccgataccagaagtatagtacgatgacctagctaaggttgcactgatcgtggatacacca

SEQ ID NO: 64010 - DNA, 250 bp, Glycine max
gattcacatatctactactctcaatgatttgaagtcactgcatcattatatctgccaaacctcaacactacgcaacgctaaagtcaatggtttatccgatactattctctgtcctatttacattcactttgagtctagcttttctactctcaaagcgtctatcaaaaagtcaaacacaaaatgttccacaaaggtctcttgcgtaccctatcatcgtagagacacttatttctctcaaagcacatataca

SEQ ID NO: 64011 - DNA, 337 bp, Glycine max
cgtgaaccttgtgtgaatcgaatgcttattgatcgagtgctgtgactaaggtactacaacatttactactcatactcataggatctcaacgtatggtgtagcatatgatggagcataatggtcacacatgctgacagttgagtgcaccagctgtggttacaggcatccaattagacaaacctttgtctacaagattctatttgtatcaacaattacatctgcaagaagtgtgttgaacggattaagcttgacatctaacaagctggtgagatccaatttttcaagtcaaatgattcagcttgtgattaacactatcacgtgaatggatctctaactg

SEQ ID NO: 64012 - DNA, 261 bp, Glycine max
acagcatgattcactcatactatgaagcatcagcacttatgcaatggatctgctgcttctggaacagaccctgattagtctctacatcgctgctgtggtctgcatgatcgaatatcaactacggaagctgtaattcgtgctaccacacatgagaattcgcgtcccaatcttcggcatctgactcctagtttgtgacgatctcgagcacacgtatcctgaatgatttgaactaaaaactcggtgacatattgctacttcata

SEQ ID NO: 64013 - DNA, 332 bp, Glycine max
cgactatgtatttaccttggtctttatagaatgcgggtagagtcttatttgtgactggatgggtttttacaagaccatgtgttcaattgcccaatgcccagactgcactaaccgcctgcactgcaatgtattagcgttccttcattaccatactacgcatcacatgggcaacttgcttacccatgcgttgcagttaaatcatgtaccctcttgatattacgtggtaccaactcttcgagcattatcagctctttattccgacttctatggattcaacaagttacacagaatgtgaagttgcctatgacattccacccatgcttcaatgctac

SEQ ID NO: 64014 - DNA, 386 bp, Glycine max
aattagttcattctctttgcgcagttccctacctctcctgtcaagatgcagatcttcgtcaagaccctcaccggaaagaccatcacccttgaggtggaaagctctgacaccatcgacaacgtcaaggccaagatccaggacaaggaaggaattcccccggatcagcaacgtctcatcttcgccggaaagcagctcgaggacggccgtaccctcgccgactacaacattcagaaggagtcaacccttcaccttgtccttcgtctccgtggtggcatgcagatcttcgtcaagactctcactggcaaaaccataaccctagaggtcgaaagctctgacaccattgacaacgtcaaggccaagatccaagacaaggagggaattccccc

SEQ ID NO: 64015 - DNA, 200 bp, Glycine max
gcacgcgtacgtaagctgggaattgggatttaggtcaagagttttcttttaggtgaaaaggctagaatatccgagatggtgcgcattctgaagtggctgaacaaattcatgctagctgggctaataagccttggcaacagacccgttttggcagtcttctggatccacctgaggtcctacgcgtcaaacaactacacacg

SEQ ID NO: 64016 - DNA, 329 bp, Glycine max
ttgaactatgttgttttagttgtgtaattgtgttaattgactcattacgggcacgggagtgcggcaattggttaagcagcctgattttgctaaggcagtgggttatagcagcagggtggattcattagtggtacttctatggaatttaactgggcctaaaatttgacaaaaaataaaactcttaaatggtagagggttataaacctacaatagaaaaaataaaaagagggttttgaaaaagacaagaatacaaacaaaaaatttaaatattaggttaatttattgtataaaaaaatttaaaattttattttaaaaaaagggggggcccc

SEQ ID NO: 64017 - DNA, 359 bp, Glycine max
gcgatactaacagggaggaagatgttaattgaagcaagaggagactgacaatctggggatacggctgctctagaatgacatctatgcaaaccgctgagacgctagtgctgcaggagccgcggagaacacatgagacactggagctacttgctagaagaaacagtgcagttccagggctacataatgaccacaggacgacaactgatggcaattcaagtcgagatactatctggctatgacggaccagcctactagatggggcaaagttcaggcattgtcatgaaccgccatgccgacagcatcagacatctggggcatgaagatcaaagaggtctagaaggcatgaacgctagaattat

SEQ ID NO: 64018 - DNA, 393 bp, Glycine max
ctcgagccgattcggctcgaggtaaaaacagaagaacggtgttcgaatatggataatgtgatgcgactgataccatggcttcgatcactgccttgcagatcttattatttcgttcttcgaccttctcttatctatcgctctgccaatcctcttacttctacttcaccctcagaatgcaagtctgctctctcaatgagtctagggagtatgagattctatagtagaagatgtgacccacatgcccaatattaaggaccctgagcgttacaatgctgtcaaggatttgatggcggacagttgcagtgagcttccggattctgtcatatctgatcgttagaatgcactgtctagaaacactgatgacatagctggcaaggaggttgtggaaaatgt

SEQ ID NO: 64019 - DNA, 379 bp, Glycine max
cgcactgctctctcgtgttctgtgtctctctgactctccgttctctgttcaatcttcagatctcgaaaaatgcaaagcgcggctttcactttctctacctctctccatatccgcaaccctagccctaactcttggaggagaccctctctttctctccgactccacgccaaacacagcaacaacaacaacaacagtaacagcaccgaacgcgttaactccaatggcgtctcttacacttccttcactcgccgatcttggactcttcttccttcttcttctttcaaattcaggcctcttgcttcttcacctaatcgcgccgtcgaaaacgccgttcccgaaagcgcagcatcacacgtcgaaaacccgatcttcaaaactc

SEQ ID NO: 64020 - DNA, 229 bp, Glycine max
atgggactgttcaacaaccttgacttggaggctgggcaggtggagctgagggtgaatccgcttgggatccgtaattgccagcgaggcccaacctgcaagtcaaggatatgggactgggcatcaacctagcccaaatgctgccaactatgcaccacaagctcaaccacactatggggtgatgtcaacctcactaacggatactaacgtcagtcaacctataggtgaatgc

SEQ ID NO: 64021 - DNA, 403 bp, Glycine max
gcagttgtgaaaaaggctctttatcaaattgcatctcgacttcatgacaatccttcacgatctcagcatcttcttacttctgctgtttctggtgtatatcctgccggtggttcgctcattggtccaggtgctggagctccaattgtggggatagctcctcttgttggttcttatgggggatataaaggtgacactggtgactggccaccgcggtccatgtactcagctccaagggacgaggcatcttcaaaggaattttcagttcgattggtttgtccaacaggaaacattggaggtgtgataggaaaaggtggtatgataataaatcaaattaggcaagattctggggcaacaatcaaagttgatagttcaacaatagaaggggatgaatgcttaatagcca

SEQ ID NO: 64022 - DNA, 428 bp, Glycine max
gagagaactcagaaaaagggaggcatggtaatgtgtgctactgtgcttctcatcatgtgcttcgtaatgttggttctcttaatcattaaggaaattattttgtgatccatggtgatattcgatttatttttaatatttggccacctcttgttggtgtgacctttcatttgacaccaatatcccttgcctacccggatagtaacacgcagcttgccttggagaagaccaagcagttttggagtagacaagccacattaattttctcaatttttggttgtatgtagaggccacattaattttctcaattttttttttttgttttgcaattgggaagtaaggtggagtaggtgtgttagaggcacaagaactttagaagttggtgtggtatagtaggaaaggatatttaggtcagaaaatgtataatgttt

SEQ ID NO: 64023 - DNA, 425 bp, Glycine max
gtgatgcgcacaatctgtgaagtcagatcaatctgcaaagcacaaggaaaagatggtaagaagaagaagcaaacacctgcaacgacaattattagatacagagaactgaacatttacagctacataagaaaataagcgagtctgattcctaaattcattagaatactgcacagaaaacatagaagcgagcaagtgaagtaattcatatatcgtgaatccttccgattcattccttttgattatatggtcgacattgaatagaatagaggcaagcgatatataaaaaatgtagatcggaggaaatccttgggagtgggtaatttaaacgggctcggtgtattgtaatgtgttgtgaagaaaagagatagagtaaaagatgagagatcgaaacccttaaacgtgaagaagaaaggaaagatgtgaga

SEQ ID NO: 64024 - DNA, 236 bp, Glycine max
  unsure (1)..(236): unsure at all n locations
gaagagtctatgatcgtcgcatgcaccgcgtaccgtaagcctnncggaattcggcttcgagcccatnntttctatcttctttcgttggtcgccccgttcagttcacccagcgtanngcctctgcttcnntcgaagatggctttcctcnnccagaggtgnngtgagtgggttcanngggcgtggtcaggggtgaccagagnngtagaggaaaggggtgnnngcggtggaggggaaga

SEQ ID NO: 64025 - DNA, 363 bp, Glycine max
actatcttgagattcatctcttttgggctggaaaaggtacttgttgcataccaactcaaggtacttatgggcccttaattcaagcaatccatgctatcccagatttcatacctactgttagtaacaaacctccaagtagtaacaacaataatatcggtctaattcttggaatcgtacttggagttggagttgtaagccgtttatcaatttttgcaattctctggatcattcggagaaaaagacatcgagatgatgaaaaagagcttctaggaattgatactaagcgctacactgtcagctattctgaggagaagaatgctacaaatgattgtaatctttgaaataagcttggaaagggaggtt

SEQ ID NO: 64026 - DNA, 314 bp, Glycine max
tcgcatgcacccgtacggtaactcggaattcggttcgagggtttcttttgtggattggtagtgtgactgtgggaactgttttctccaaagttgcaattttaagaaggaaacgcactaactggtatcaggttccaaaattatcatatataggaaaagacgaaccattttacttttccctgagtaatccccttaggtatatataatcgttctatttctgcttagaactgattgagttcgttgtttttagagtttgcatcacagtaacagtgttttaggaaacttaatgtaatgaatttttgaagggaactaaaatt

SEQ ID NO: 64027 - DNA, 132 bp, Glycine max
ctgcaatgcttgcctgtcaccctaagctccggccatatgacgagcatttaaaacattgacgcggcaggctaacgtagatgttccgaacaagtctattgagacactaggcatcaacccttggaggcttaacgg

SEQ ID NO: 64028 - DNA, 301 bp, Glycine max
tcggggaattccaattccacattttcaagaaataaggaggcaaaaatgttcatatatgaattggaattatttgttttcttattaggcctatcctgaagccaaaggaaatgagatcggaattcctcggggaattccaattccacattttcaagaaataaggaggcaaaaatgttcatatatgaattggaattatttgttttcttattaggcctatcctgaagccaaagggaaggagatcggaattcctcggggaattccaattccacattttcaaagaataaagaagcaaaaatgttcatat

SEQ ID NO: 64029 - DNA, 64 bp, Glycine max
ctcgagccttatcggttcgagggaaacttctgaggttgaggctaagagtaaaatcaggataagg

SEQ ID NO: 64030 - DNA, 186 bp, Glycine max
cactactttacttgctagagacataactcaccacaaatgagcataagggtcttgtcttcatgtgtgaacttgtcttagagccactgactcgacttgtatattctctagcattgctttcagcatgatcattgccgatctataggcaacatcagactgctgctattctcttggctaccgactactact

SEQ ID NO: 64031 - DNA, 246 bp, Glycine max
gtgacaagataaagatttacatttcccagcaattggaatgagggcttgaaggttttacccgtagattcagggttggctattttttgtttttgttttgagtggcaagtatttaactcacatgtcctaagatattgcaattactagttatctattataagcatatttcgcatgtattaatatttttaccctgtcattgtaaagacattaagtggaaaagttaaggtattagtggtgattcgggtctaa

SEQ ID NO: 64032 - DNA, 247 bp, Glycine max
aaggtcccaaagtcacttagggaagattattaggggagggaaactggatgaatccacgaagaatggggctgtgacctcactcgccttcctcttgccactacaggacgcacagagggcccgcaagctcgttgaagacaccattgccgacaagcagagcaagctcgaccgcctacgaagcatagacaccgtcaacaacagcctcatgaacctatgtcacaagctgcccgaacagatcttccacgacatc

SEQ ID NO: 64033 - DNA, 368 bp, Glycine max
  unsure (1)..(368): unsure at all n locations
ctctgctggtatcgcaaacacaggatcttacattgattggatccttttagaggtgatctttgattccggtttcttgtgaagtggtaatgataatttgatgggtttatccatcatctcattttcctatatttgcgagtttatcttctcgcactgtagaatgctagaatcacctgtacaagaagatagctaaattcttttttctntgcctatctgngtgcttccttgtgtgctcttctttcctttttaagctgtcctcatgaatgattttgtaagtaattggggtttgtactttgtaggggtattggagggagggaagaagttgaagtatgctttaatgttttctgaaaaatgtggacacatcattgtca

SEQ ID NO: 64034 - DNA, 397 bp, Glycine max
tcggggaattccaattccacattttcaagaaataaggaggcaaaaatgttcatatatgaattggaattatttgttttcttattaggcctatcctgaagccaaaggaaatgagatcggaattcctcggggaattccaattccacattttcaagaaataaggaggcaaaaatgttcatatatgaattggaattatttgttttcttattaggcctatcctgaagccaaaggaaatgagaatcgaattcctcggggaattccaattccacattttcaagagataaggaggcaaaaatgttcatatatgaattggaattgtgtggtttcttattaggcctatcctgaagccaaaggaaatgagatcggaattcctcgggggtaccgaactcgaatttcctat

SEQ ID NO: 64035 - DNA, 152 bp, Glycine max
gtgttacgcgttaacatccactctattaagcaaatgtgctcctagtagtacattaaaaatttaaattaaattaaaattaccaaatattaatataaaatggggtcctggcaggttccaggttccaggttccagagtaatgcacaacgaatctt

SEQ ID NO: 64036 - DNA, 399 bp, Glycine max
cacactctcttaaccaatccggggatttcgccctctgcaaacgcctctcttccattctgcacaaagtaatggggttttcgaaggaacagcttcttgcacgattgaaggagcttcttattaatttttcccagtatgagcatccggctattttgacagtggaggaaggggaaaagtatgttggacatttggggggtggagtgagtaaaaatttgtttttgaaggacaagaaacagcggttttatcttgtttctgctttaaaggataccaaagtggatataaaagtgttatctcagcggcttggtttaggaaaaggaggtctaagaatggtgccttcagaggctttaggtgaaatacttcaggtgtccttgggttgtggcactccatttgcagtggtgaatg

SEQ ID NO: 64037 - DNA, 196 bp, Glycine max
gacatcccattcgtcaacacgcgcagctatccctgcatcgtgctctaactctggctctgcctcgagctctaggtcagacgacatcgccgagtactactaagggcggcatgacagcgcgctgagcactgagccgaagcacttgctcatggcccagttcttcggagttaagggttcctacgcttggctgtacgcacgg

SEQ ID NO: 64038 - DNA, 420 bp, Glycine max
  unsure (1)..(420): unsure at all n locations
gtgattcaaatataaattcagcaggtgttgtgagattaaatatttatcaagtatgtttgttgtgtgcaatgaaattccattgctatattcgggatctatctatcatgtgcaaactccacaaaagattttgttcaaatattatacaaaggtccttgaggtacatgtaccagatgataaagaaacaaatgcactccataagtcttaattcagatattcagccgattcttgtattggagaaggaagaagtagaattggcttggatttcatgctttcgtacaagtactgaagagaaagcaatcacaacataaggagttgctgtcaantttgaggtcaagggtgtcatcacatagaatatctgagagtgtctcacctgaactgaaatatgcaattaataccaagaattctctttgctatggaaca

SEQ ID NO: 64039 - DNA, 261 bp, Glycine max
ctagcagacggagcacatgtacaacatagcgctcgtactagtgtcttccttaaagaacaacaacattcataatactgagcctactgaatcatataacactagtaccagctatggataatactacaggattggctcacacagatgaaagcttggatctgactgtaagcattgcagcactggactcggcatctgtaacagtggaactgtacatctcagcgcgtcctatcaggctacgcactacatgagagcaacaggacaaaa

SEQ ID NO: 64040 - DNA, 359 bp, Glycine max
  unsure (1)..(359): unsure at all n locations
aaacacgccccaacaccaccatgggcaccagaggcttcccttccggtggccttcttcttttcttccttctttttcttcttaaccttttaagcgcccgggatctccccaaccctttctcccaacccaaacctcactccgaacctaaaaccgtttcgttcacgatcgacaccatcgatcccgttccgctgacgctcctncgcttccgtccgatcaaccggcacttccagcccggccgtccgttgccgctgtctctccgcaccggccaccgccgttgccgncaccgncgcgagatcccctacggcaacgacgcaatcctggtcggcgacgccgctgccgncagtcggatccatccgcgctgg

SEQ ID NO: 64041 - DNA, 87 bp, Glycine max
cggctcgagcatcattgtacacggaacatgttaggaatccttaaaggattaacaatgacacaatcttatattctttggcttttcaaa

SEQ ID NO: 64042 - DNA, 301 bp, Glycine max
caaatcgatcaagctggcgcgcacatgtcatctgctgttgcaaatcattgaattggagcttagttatcaataagtgtgtggttaaagtcgttggagctatgtggaagtgatactggcagtccctgaagtgatggatagcatcgacactgggaacagtgaccgtgctaggaaatactcatccaatgcgattggtaaacgtattgcttcatttaactagctgcagattgactaaacccatttcgtcgacgatgttaaggatcacactgatgagtatatgacggctattattgaggctcacagc

SEQ ID NO: 64043 - DNA, 120 bp, Glycine max
gagaatcgaaacagctctacgcagctcagcacaatcgcaacgcatgccattaataataatcgattggcatcgatcaatcgttggttagggtttttggttatctggtattggcgaatttac

SEQ ID NO: 64044 - DNA, 390 bp, Glycine max
aaaatctcacaaagcttagtgtcttcaaatccagatgtcttccacaattccacagttccatggttatgctagaattttctagagggtctcatccacaattccacctcgagccacgagaaaaaccccaaaaagcaaacgtctccctagcctctcacatcaatgtcagagcagttggaaaggaaaatgaacttagtgggaaaagcaaacgtctcccttgcctcttttccatagttctcttatacactgtctctctttcttcgcttaaacgttgccctttctcactatctcactttgcttcttctccttcgccacatagatcttctccttcttcttcgacgtgaatgtctgctacctcgcgagcgtgttcgtggctgaacaacatcgattctg

SEQ ID NO: 64045 - DNA, 153 bp, Glycine max
cttatgccctagatctgtagactcagctggtaatctggtggtagcacatgttgtgcatcctacgctgattccactatttgtcggatttattattgtcttcggaattctaggaacacttgtagtaggccttgccactctacgccttcacattag

SEQ ID NO: 64046 - DNA, 289 bp, Glycine max
attgaggcctagattattctgttcaccaaggtagcatatggcgtgccaaatcatgcttgcatccgtcattcctctatagtttgaatttatgattgaattctacccggtggtaacaaatatattcgaccgtactgagcaatgcgattccaatagtggtgtattcaatgggtcgtgccccgaataacgtggtatcagtcgaggcagcttacagagctgtagtactcattgttgaagtagtgattgatgtctatgagccagtctgatattctgatgctccatgatccgatga

SEQ ID NO: 64047 - DNA, 270 bp, Glycine max
tcgtaaaggaggagaaacctctttacttggacgagtttgataattttccagagcaaagcgatggagaaatgaatgattttgaggagcatatgcgacaaatgtctctgaaatcaaaaaacatggaaaaggacgataacttacctaagttggacgaagttgacaagatttttctgcaagctacttcctttttaaagaaaaagataaaatgagaaatatgcaaaagacaagtgtaatcattgtattggatataaacagtgtagtttgggagaa

SEQ ID NO: 64048 - DNA, 357 bp, Glycine max
ctcgcaccgagccaacggtgttgaatccatatcaactgaggtgtggatccttattgtaaccaatgccactcttaatcagagtccagccaggaccttgaccggctaatacccgcaacaccaggaacgataccacagatgccctcatctcaaacgcaaaatctgagtacacctgatcaggcaccggcaatgcctaccttatgctaacgccctacgtgcttatcacatcagctggctttattttcgcaaacatggcacatgccaaccatctgttggcacgtggcggaaagccaccgatcaatactacagaaactggtaccccaaactcgatctttgcctcgttaccacccaaatcctgga

SEQ ID NO: 64049 - DNA, 238 bp, Glycine max
atgcatcgcacgccgacgttagatggtaactgggctttagtctaaaggtttatgtttccgaattactgaggcaacaatgcgcatacgtcaaatggaatccatggcatgcctattatgcttaatgctaatccaacagacatgaataccggaatgactctgagtattccaaatccccatcttgtcgaaatagagctgccccattgttcatatatgaatggctattacatgactactgaat

SEQ ID NO: 64050 - DNA, 404 bp, Glycine max
  unsure (1)..(404): unsure at all n locations
aatgagacctagatttttctctccaccttcctccctgatggcagaccaaatcatgctggcggccttcattcctctattggttgccttcatcgatgaattgggttcgttggaaacaaatctattcgaccgatgtaagcaatgcattcggggaagtagtggaggttatcggccttgccccaaatgacgaggtataagtcgaggcaagggaatttgcggtggtggtcatcggcaaagttggttttggtgtcagggagccagacagagggtttgatgtagaaggagcggangaaggcagggtcganggcgttcggggtggcgatggcatgccaccgatctagggctcgaccttgacgacgacaatgctggcctagacatgcagcggtgtttgggttaatttttttcta

SEQ ID NO: 64051 - DNA, 271 bp, Glycine max
ttcatcatcaacaacagaagaagaaacagctcagagggtttcattggccaaaaaaatcacaggacaaaacttcgtgatctgagacatcacattccctcttcgatttgtgccctagattggaactcccaccttttttccaggtcaaccttaacaagtttcgttttccttttttccacatttccgagaaaaaaaaaaatcagaaattcccgagtttctatttctaatggtaaattggtaactattccctttggaacaattcaattgcaatttt

SEQ ID NO: 64052 - DNA, 408 bp, Glycine max
ctcgagccgattcggctcgagctcagcttcttcccaataagtagcaatattggcactggcaccataataccaggtcaattcaacaacataagtggtagtaaccaaggaacaacaacaacaacaacaacaacactctatggcaattcaatagaaaacgagtcatcccctcatgctggatcgagtttttcttctatctttggcaattcaatagaaaatgcgtcatcctctcatatgtctgccactgcgttgcttcaacaagctgctcaaatgggttcaaccacaaccacaaccaccaacaacggttcttctttacttggaggaatgtgtactaacaatagttccaaagctgaaaatgaccaccaccacaatcttcaagggttgatgaactctattgccaatggaaacacg

SEQ ID NO: 64053 - DNA, 330 bp, Glycine max
cataaagattttaaattcatggcggtgtaagtgtaatggcgggtcgggcgcttcgtctacacggtccggcgtcgggtagtatgaagaacgcgacgctaatttgactccgcatgatggtcgattcaggggagaagatgaagatcgatgggtacataacgaaagccccttgggctgcccttgtggaaattcaaacggatatttgctacctatgaaccctatgcaaatctcaaagacttagttgaaaaacgttatttaccctgggcgtgcactatcgggccagactataccggagaacggtctaatgggacaaaggcttgacggggaagctca

SEQ ID NO: 64054 - DNA, 95 bp, Glycine max
ggtaaaacctacctgtggtggctcaagccttggtcttggagttgcatattgtgtcaatggttcccttggactagccaattgaaaaacgtacgtcg

SEQ ID NO: 64055 - DNA, 387 bp, Glycine max
tcggtgaattccaattccacattttcaagaaataaggaggcaaaaatgttcatatatgaattggaattatttgttttcttattaggcctatcctgaagccaaaggaaatgagatcggaattcctcggggaattccaattccacattttcaagaaataaggaggcaaaaatgttcatatatgaattggaattatttgttttcttattaggcctatcctgaagccaaaggaaatgagatcggaattcctcggggaattccaattccacattttcaagaaataaggaggcaaaaatgttcatatatgaattggaattatttgttttcttattaggcctatcctgaagccaaaggaaatgagatcggaattcctcgggggtaccgagctcg

SEQ ID NO: 64056 - DNA, 175 bp, Glycine max
  unsure (1)..(175): unsure at all n locations
cgaccctttcatcaccaccgattacatgacatacatgtntaaatacgacagtgttcatggacactggaagcatcacgatgtcaccgttaaagacgagaagacccttctcttcggtgacaagccagtcactatttttggacacagaaaccctgaagagatcccatgggggtcaact

SEQ ID NO: 64057 - DNA, 108 bp, Glycine max
atatatatatatatatatatatatatatatataagtgttttatctatatagttattgtgatgtttgaaatgtagaataaaattataatatgcgtgtttgcttctgtcc

SEQ ID NO: 64058 - DNA, 330 bp, Glycine max
cttgaagttattcttttgctgtacgtcatttccgcttccaggtacgtgttattatatctccttgatcgaagtcctctacatggaccattggctaaatcgtacactgcagaaatcgacgcattacagatcttcaaacgtaatcgatggccgagtgattaatacagcaaggcttgttcacgtgacttccgaatgagaattttgactaaatgaaacgctttgagagaattgcttgggccatgaactagaatgagtgacggtataaccctccgaaaagaaccattggtggacttacttatagttagcgcgtaactgtttagtgaccatattata

SEQ ID NO: 64059 - DNA, 295 bp, Glycine max
  unsure (1)..(295): unsure at all n locations
tttttagcgatgaagagagtcgtagtctactagagactccttgctcgtgtctggtatttgagaccctcagcttaccacgctactatgtgctggtgtctgtagacttatgttgcacatgcatagagctagggtgtagcaaccgaggcttgagtacactgaagtaaggtggtacactcgacgtcataccggagctatactacaatcgtacgtgagattgaggatcacgctagatcatgaatctgcagntgccatagcttgtaaagcagctcctcacctctcaatgccaaggaagtca

SEQ ID NO: 64060 - DNA, 266 bp, Glycine max
ccgacaccgttcccggcgactccgtccactgttggatttcaattggatcttgattttgaacggctgagtaaagaggcatggctgacagagacgaagagtcggcaatgcctatggacgcgaaaattgcgaagccttagcagacatcaatggaccgactacgactacggaacctggctttattcacacagcttctagagcctagagacttgactacgcttgtgcatgtgcttaagccgatgcacaacgtctgattcatagctatgctc

SEQ ID NO: 64061 - DNA, 385 bp, Glycine max
aagaaattgagtttgagatctgattgtgcggcgacgatggagaacaacgacagcatcatatcgcgggagaagatcgaccaggcagcggtgtggctcggctccgacgtctcttccgctctcttttcctcattggaacgcttttcctgcgtcaacgtctaccacctctgaccccgacaacgacgatgactactacgattattactccaccaccaccgccactcctacctccgcatccaccaccaccaccaccgtgctcgacaccactcctccctccgttcaggtcaacgggcaaaaaacaaacgacgacgtctccaacctacccgtttgaggcaatataacgacgacgacgtcggtgctgcgctgcgtatagaaccttttccctttt

SEQ ID NO: 64062 - DNA, 175 bp, Glycine max
acaaaacccattttacttcttcttttacaaaagaaccatatgtgttggtatttggcaaacttcgaacattatttaaaaccatggctttctttaccaaattggctttgggccttttaatttcattcctttttattcatgcctttttaacttaaaatgtgtgttaaggcccggccaa

SEQ ID NO: 64063 - DNA, 258 bp, Glycine max
ccaacgagggatcgatcattttaactcctgcttctctttgctttgggacccctcaagcttgttctggtctgtgcaggccaattttcttttgattaggtgcactctttgatctgatcaacaaaattcgagaattcaagtatgggaacggccattactctttagagccaaacagatcgcaggatcccttggactaatagccactaatgaaaaagtttcaaccaatggtatttaaccacttgcccaggagttcaaaaatct

SEQ ID NO: 64064 - DNA, 235 bp, Glycine max
ggcacctaaactaccttggttggttttggtgcccaaggaaatcaagcctaaaatcggcttccgaagacttcagccacgccctgaaccaggaacccatccatttcactggcacagattatgtcaaagatgatttcagaggggaacggaattaagaaaatgggtttaaaggtgatcaacttggtcctgaccgtaaaaggttaaattttgaaaaaggaggcttttaacattgaaaaca

SEQ ID NO: 64065 - DNA, 422 bp, Glycine max
aataggatcacctgcagatatatcttgggatattagtgtggatactcctcaggttgatgtcattgatgatgataatgccccaactgtagtgctggagaatcagacttctcttcctgattccctatctcaattgacaggaaacaaggaagaaaggagccagcttttagatacggagtacagaaataaaattcttgatgatctgtatgagatgaaatcctttttaaatcaacggttggctgaattgaggaatgaggaaactttgtccctgcaacatcaagtccaggcagttgcaccctttgtactacagcagtatgctgctgatgccattgaaacaatgcaaagtgatatttctttggcaatttcattgctgacaaataggaagacaagggatctgattatgattctcaactccaaaagatttc

SEQ ID NO: 64066 - DNA, 325 bp, Glycine max
gaaaaaaaaggacattcattcatctatggctacccttattgctcccagcaaccactctccccaagaagatgctgaagctctcagaaaggcttttgaaggatggggaactgatgagaacactgtcatagtaattttgggtcatagaactgtgtatcagaggcagcaaatcagaagagtttatgaggaaatttaccaggaggatcttgtgaagcgcctagagtctgagatcaaaggagactttgagaaagccgtgtaccgatggatactggaacctgcagatcgtgatgctgttttggccaatgttgccatcaagagtggcaaaaac

SEQ ID NO: 64067 - DNA, 375 bp, Glycine max
  unsure (1)..(375): unsure at all n locations
gcttttggtggttacacccctttggaacccttcctggttatgatgccttgacttctttctaaattctgtcccaccgtgaatggttctttttcttttttttctgggtctctggccataaaagtcctaccttttgtgggttggatggatctaatgccagtttgggtttctggggtgtctgtgttccctaacccactttccctccttttaggatactcgtctaaatgaatttttttttccttttttgctcaagttattttctgaatttgggtcttcagtttgcttatgctgttttggtggctttggaagtttgaaccaangggttcttagatccttttgcacttttccccttgctgaaatttttcagacatatcaaat

SEQ ID NO: 64068 - DNA, 238 bp, Glycine max
  unsure (1)..(238): unsure at all n locations
gagatccactttaccaccagacaagaatcacattggcnaagctcaatgacaagagccactaccacatccagccgagacatcacggagaagaacaagcgccgacgcgagcccaaaggcaaacaggctccaaaaacagccgttcctgatcatgtcacgacccacacccccaaggaagaggaagaagatgcccggccagcagctgtataggcaactgatagagaggtccctgaagcttgaa

SEQ ID NO: 64069 - DNA, 220 bp, Glycine max
caattttcgctccaaaacatgccaaccctaaaccatgttcttacgttgacattcttacttctaccttcttggccatggcaacttcgtcaattgcccaaaaggccccttattttgcccgtcccttaaccggaaaatggttaggcctatgcggaaaacaaaggctcaaccacttcaaatttaatggccatgacatagtgagtggccgcaagcccacttcggt

SEQ ID NO: 64070 - DNA, 160 bp, Glycine max
gtcgaatgcacgccgtacgtaagcttggaattcggcttcagggccagcccccccagaatttcctcattcaaaggtttcttgaaaggagggttgtttaactcttaccttctttgcccaattggaaaggccatttttgaccaccttgattgtccttccttaa

SEQ ID NO: 64071 - DNA, 329 bp, Glycine max
tctgtccctcgttctgcttttttgcatctctctctctctctctggaatgttgaactgagccagccaagcttgttgctttgcaagtggaaacagagatagatacatacatacaagggcttcaaaatgaggggtcctttgggtgcagtcataggaaggtacccttcaagtgatggaaccactcatttgggtggcatcataaggcacaacaaaaaatgcagagacatagccgttcttgtcatctttgatgcattctggattgccttgattgtcaactccagctttgctttcaaccgaggaaacccattgaggcttacttatgggctggacta

SEQ ID NO: 64072 - DNA, 229 bp, Glycine max
agaagccacacacacctctgtttctttctctgctccacactttctcttcctccattattgagcttccactagttttttttcccctttctttcttccaaggacttaattgcactgcttaaagtctcaagctttacaacttttggaagatacccattttttgcagccatcacttactttgccaagaagaaaagggctttcttttgggttcaaccattttctgcttttggct

SEQ ID NO: 64073 - DNA, 382 bp, Glycine max
atttgcttttcccttttgagttacctgcgaggctgcttgcattggaacatgttaagcgggctcttctgggtcaataatttctgacaagttctattgttctttgttggggtggaaaaaccgtctacgcgaggcagctgtattggaagcattggccagcaaatttagccccggatcttggggcaattctaggtaggggtccttgagtaggaccttttcccggcatttaagccccaagccttcgttgaatctttgccgaacaaaccacggctttcagcttcggccgacagccctcgctcgatccgattcgccgcagaccctgctccggcaacgccgagctcaccgtgccggagaacctggactgcaccatgcagctcctcttcat

SEQ ID NO: 64074 - DNA, 393 bp, Glycine max
ggcctttgctcgacctggctccctcactctctctgctccgccgccacggaggttgatttcggccaccataggccttgccttctgattttgcccaatccaagctgcgaccatcaaagctatttccgcccaccacgatacatttcatgaggtgagaaggagacgtgactgaaaggagtagctacataagttctagcttgtcaagaagctattggccaagccacactgtcttggctaagtaaaagtctcttaagtaataattttacattgcaagaaaggtattttctacatacttatgccaccagttcagaaatatgaagttgtatcactgttcaatccactagtacttttgcttttaggagtcatatgacaccataatgttggaaaagtatggag

SEQ ID NO: 64075 - DNA, 242 bp, Glycine max
ctttccaccaacaagaaagaaaacagagagaaactttcatttcatagattttcatcatctcagcaaaggaatcaatcaatcaagccatggcaggcttcagtggcgacgaaaccgctcctttcttcggcttcctcggtgccgctgcggccctcgtcttctcctgtatgggagcggcgtatggaacggcgaagagtggggtgggggtggcgtcgatgggagtgatgaggcccggactggtgatg

SEQ ID NO: 64076 - DNA, 397 bp, Glycine max
  unsure (1)..(397): unsure at all n locations
tcggtgaattccaattccacattttcaagaaataaggaggcaaaaatgttcatatatgaatcggaattatttgttttcttattaggcctatcctgaagccaaaggaaatgagatcggaattcctcggggaattccaattccacattttcaagaaataaggaggcaaaaatgttcatatatgaattggaattatttggcatcttattaggcctatcctgaagccaaaggaaatgagatcggaattcctcggggaattccaattccacattttcaagaaataaggaagcaaaaatggtcatatatgaattggaattatttgntttcttattaggcctatcctgaagcccaaggaaatgagatcggaatttctcgggggtaccgagctcgaattccctat

SEQ ID NO: 64077 - DNA, 204 bp, Glycine max
ggaatcttgagaaatggcaagggaccgcaagaaccagaatctggtcattggaaggaccggttaccttggaaaattcatcggggaaaccaacggccaagcttgccaaccaactttccttttggtgaaggaatccaatcttttcaaacccggaaaatcaacccttaatggccatttcaaaaggcctggtggcaaatctggtttaag

SEQ ID NO: 64078 - DNA, 94 bp, Glycine max
ctcgaacccattccgctcgagtcaaaactcaagccacccatttcaaattccattattgggaggctaaacctttggggcttttttcttccgggtg

SEQ ID NO: 64079 - DNA, 356 bp, Glycine max
cacaactcggggagttgttgttgtggttcatcttcctcctctattcactggcacttgatagatccctctctcacagcttccattcgcaatccagtttctctttgatcgatgcctttgctggtttttctttttctctttgttttctttctcagctgagaaactgcagtgtggagctgtgattttgctttttctcgttttcactgagacttctgcttttcgtttctcttatcgctgaattgaaattcaagcttcggtgtggattttgtgctagttgctgttgtgtctgcatgtttgtgtgtttctggatttttattggccagagattgtgaaacaagttcatgcaagtgatttgaaaa

SEQ ID NO: 64080 - DNA, 389 bp, Glycine max
aactctctctcactttatcttccactcttcaatcgcaatggctccacactctcatacacagctacatcactttctattactcttttctaattcttatatgcttataatgtaatgtgaaccttaagttttcaaccatttcttatcaaagggtattgcgagcgagactctgcggttgctgatactttcatgatttgatcacaacgctatcctgcgtttttagtttggttactggaatttacagactactaagaacatggacttagaaggaagtgaaaagggttcagtggttactcagattagcattggtggatttggcagtgaggtcaaagcaagtgatctcctgaattacttggaggataaaattggacttgtgtacaggtgtaggttga

SEQ ID NO: 64081 - DNA, 427 bp, Glycine max
tctaatgcacgcgtgcgcacgctcggaatctgggtcgagggctcgcgatcactgcctgtcaacagatacttacttgactggatctttgagtctacggcttgaaacgctgcagatcatgcaccgaacccaagggcgaggcacaacgtagaacgtgcgagtgcagatgaagcactcggatacccatcttatggggcatatgaccatgacctcaagaagctcaaacgcattactgaagctgctgtatcaaccatagaccaacaagtccctgcattacccctttccaatatatcggatgatgcatttaaggagaacaccacagatggtgtcaaatttcaactgtctgtgagcaaatcttatacacaatcaacttcaacttaccctgcaccagtatacacattgaaagtcacaaatgcttcaacttcgaatg

SEQ ID NO: 64082 - DNA, 187 bp, Glycine max
gggtcccagttttagatcagattccagaattgaacccattgcttaatttttttttttggcctaatttagttcaaaacctttccttcattcaagtggtaggggttaaccttaaccttaccaggaacttttggaaccaactcaagtttcaagcctctggtacctggctttaatggtccggttggtgggt

SEQ ID NO: 64083 - DNA, 205 bp, Glycine max
gctcctttaactttccttttcctttggaattattaccttaggagaagcaaaacctccccttaaaacggataaggttttaagccaaccttcaaaagcatttggccattctcttcaatttattaacccaaaatgttgtgcattaaaacctaatctttggcataagttcttccacaacaacttggtccaaacttttcaaaaattcaca

SEQ ID NO: 64084 - DNA, 66 bp, Glycine max
ccgtggtggttgaccattaaattgaaatgggcatttgatggggcccttcggcctcggttttggggg

SEQ ID NO: 64085 - DNA, 396 bp, Glycine max
gaactaggatgacaaggtggtggtgctcgtgccagggccagtgtattacggtggataaactgaataccacaggggcatcatacttcctaacgccgcgtttgcagatccagacggcatccacattcatcaatccatttactgggactcttctgctcgtttcaactgcccttactgcgcttataccgttctcactaccgctagatctgtgccaagtctggcagcattcgttggatgctagatgccaatgacgcttgcagatcgctttctttgcccttcaatggattgcctttgtcatctatatcactactgtgctaaatgtctagacaaggctgctgatactgagaaatctgatccctgtgtcgtgatggatccagctcactggactgatgtgagctc

SEQ ID NO: 64086 - DNA, 409 bp, Glycine max
  unsure (1)..(409): unsure at all n locations
gcaacaaggaactcgttcagaatttgggttttgctttcctagtcggtctttcctcttcacttcaatatggccgtggtaccctacaacaacgggtttggaacttcttcttcttcttcctctaactttaagggttgcaccaaacctttaattccgattggaaccttaaacctggaattccttccgaacttgcaaaccctacctaacccctgaagtttaatggaaaggtcaccaccactttcaactgtcggtatgctaaccccatttcatcatgggcacgtattcaaatgatgccaatagggactcctaaagtcccctataggacacctggtgaaggaactngtcaatgggttgatgtatggaacgcccctttatcgagaacgtgttatcttcattggacaagagttagatg

SEQ ID NO: 64087 - DNA, 279 bp, Glycine max
aagacattttcctgatcttctggtgggccaagaaagccgtaatctccatgagcctctattggattgattccttggtcaagatggatgggaaaaactctcttcaaattacttgaaatggtattggtgcttatgatgattattgacattccaaaaggacctggaatttgcagaatggcggatcttatattattaccggtggtaatgggtccggtggtccttctcttggcttgaacaatttccaatttggattgaatggaaggccatttttcctggcttggt

SEQ ID NO: 64088 - DNA, 118 bp, Glycine max
  unsure (1)..(118): unsure at all n locations
tctagctatagactatgacatgcactcctcccttacctcggaatggaattcggacncggtccctggcagccgtccaacttttcctaatatggatcggattaaaacctggccgtaaaca

SEQ ID NO: 64089 - DNA, 366 bp, Glycine max
aaagcctgcaacttttgcaccacaaccttcgtatcctcaccgtacctcgccaccgatttcatgtaatcggatggagaatcgggtaactgattagaaaggggaacatcattttctatgctccgaaggttgcgttgggtttgatcaataattgagtctaaggtgttcgacgaaatgtcaaaccgagtttgcataaaaaaggggttgttgacactaatgggtgcgaagtttgtgggcaaacaagggcacccaactcgtttttccatgtgtcttcgatccaaaactacgtctgcgcagtatgtagcaacaagatttcgagaccccacgtttgagaaactcatggacaactacaagaaccttgtcaaagtc

SEQ ID NO: 64090 - DNA, 166 bp, Glycine max
gtgatttcaatttctgcaactgctaagagtgcaaaaatgcggcacgaattggacttcgaattggaggaagctatgcacctccacagcatcggcaaaagacctcgaactctctctatactctccttcgaaactcgcatactcgaaaaggtatcgtcatcagatgagc

SEQ ID NO: 64091 - DNA, 325 bp, Glycine max
  unsure (1)..(325): unsure at all n locations
cctcgaaccgtccgttcggaatctgcgggttacaagcccggttagggccaacttaacggtattaagtaccggggtaatgtgaacacattaacccgtgccggttatggcaccatggatgggggtatattccccggttaacctttttgcggttaatagggtggtaaaggggcttcttccttctaagttggtggctactaccaaaaagccattcgttcccgaacccgttttaaagccggncccggtaacctccgcaaatgatttgccgaaggcccctaaacctgaaaaggagaagccgtcgcctaaaccggaacaatcctcggagtcc

SEQ ID NO: 64092 - DNA, 394 bp, Glycine max
  unsure (1)..(394): unsure at all n locations
caatcatcaaagaaacacttccattgaaccttaaccaaaccacctncttttttctttaaaccgtttctccatctttctcagtgcaaaacttttttcttattttccctctttattccctcatctcactctctcttttccccagtcaacactttcctactggtttcatctgattcctcaaccagtttacacccaaaagagtacagtgaacaagaaaaaaagaaaaaagaagaaaggaaaaaaagaagaaccatctttattccctcctatacatatacatattcatatatttcccttttggaggttaaatatggggttctctgagaagccacaagtggaagagtcagatagtactagaaaatgggtcattgctggaatcccttcacgagttccattg

SEQ ID NO: 64093 - DNA, 405 bp, Glycine max
ttcgtcaacatcagttggagtgggagcattgtcaagtggaaacaacaacaacaataacttgagtaatgctactaattcttcaacggaatgggcccagagaacgggcaccattaccaacaatgattgcgatcacggaggaggaggagctctcagtggcactatcaactacagtgacactaatggcaaagtacactactcagcttcttcatcggattttcatggagagaaggggccagacttcactgtaactgcaaccagaactcaaggaatggtggagtcctggattaattgttcttctgattaaagcatgggcgaccaaacagaataagaagaaaaaaaaaggattgatgtttgtgatttcataaagtttaaagcaactaatggtactatatgctagtataattc

SEQ ID NO: 64094 - DNA, 176 bp, Glycine max
gtgacattgaacatgagtaggattaatattatatgcatttaattatgatgactagtaaattgtaataatcaattccctaaaatctgctaagaaagggtacttttaattggcattggccatattgtacaatagaattaaaattttatcacaggctttggaatttgggttgacgtgta

SEQ ID NO: 64095 - DNA, 268 bp, Glycine max
ccgcaaaagttgaaatttctaactgcatacaccagatcccggaaacgccatatttaagcgatggataaactaattatctctatgagcatattccacctatgtctcctatgtcaaacttcatgctaaagtacaataacttacctaagttgcactaaattgacaagatttttctgcaagctacttcctttttaaagaaaaagatattattagaaatatgcagaagacaagttgaatcattgcattgtatataaacattgtacttcgctag

SEQ ID NO: 64096 - DNA, 403 bp, Glycine max
atcaaaacctcagaacgcactttgatcttcccttcccaccctccttttctccaacaccaccccttccctctctcccacctcgacactgatcccaacctccacctcaccttccgctacctccgcgcgtacacctcaacaacaacaacaacctccctcgaccccttccacgtcatctcctcctccctctcccacgcccttccccacttctaccccctcaccgccaccctccgccgccaacaaacctccccccaccgcctccaactctggtgcgtcgccggccagggcatccccctcatccgcgccaccgcggacttcaccctcgagtccgtgaacttcctcgacaacccggcctcgagcttcttggagcagttagtgcccgacccgggacccgaggaggggatgg

SEQ ID NO: 64097 - DNA, 329 bp, Glycine max
tcggggaattccaattccacatttttaagaaataaggaagcaaaaatgttcatatgtgaattggaattatttgttttcttattaggcctatcctgaagccaaaggaaatgagatcggaattcctcggggaattccaattccacattttcaagaaataaggaggcaaaaatgttcatatatgaattggaattatttgttttcttattaggcctatcctgaagccaaaggaaatgagatcggaattcctcggggaattccaattccacattttcaagaaataaggaggcaaaaatgttcatatatgaattggaattatttgttttcttatt

SEQ ID NO: 64098 - DNA, 191 bp, Glycine max
  unsure (1)..(191): unsure at all n locations
tcctggctggcttgntctccggttgcgcttctctcttctcgcgtggctctcgtgggcctcngtctcctccttccctgcgggcttcttcgtngtctgcttgtcgngtttgtggcggtgtgtttggttccttggtgtttggggtgctgtttgtggcttgtcntgtgtgtggntttcctgtttgccgtccgtgt

SEQ ID NO: 64099 - DNA, 172 bp, Glycine max
gattgaagattcacatgcacgtgatatctgactggctgggattttcatggaggcagggtgatacatagatgataactcaatgggaacctcatgctattcaacgcttcaaagagttcaacagcacttgacccagcgagtattaaggaattcccttgaagtccatttggcttgg

SEQ ID NO: 64100 - DNA, 390 bp, Glycine max
atccttttataattctgatcgaaacaaatcggtgcgagaacatcaccagagcagagcatctttggaagtttgatttcattgttgtttggcaacttgtgtttttcccaccgaacccaatccaagagttatgggattggcctctgttgttcacattcacgctcctcctttcagatgctctgtacttcaccaccccatctcttccttttgctcaatgtaccattatcgtcctcctcgccgtttcccacttctgtgctccagacgaattggccatgacaattatgcctcagaagtaaagaggatcagtgctcaacaaaatgatgacataggcaaagttgagaaatctcccactcaggaatctctgggaaatgagggttacaattctttcggcag

SEQ ID NO: 64101 - DNA, 208 bp, Glycine max
ctctccttctcgatcccaattccactagggattcaatgcccatgcgattcccagctcgttagatccacgacaacgtcacggttcccagattctttgggaaaaaaaaataatcctcctttgcccaacaggtaagttggaaaaaaatggaccatgacacgactgtgtgccaagctcctcctgacggtactatattgtgcatcaacaactg

SEQ ID NO: 64102 - DNA, 369 bp, Glycine max
ctcgagccgaatcggctcgagaacctacctgtttttcttctctctcaacaacttcaccttcttcctcctcgatcatgtctcacttcaagggcaagtaccatgatgagcttatcgccaatgctgcgtacattggcactcctggaaagggtattcttgctgctgatgagtcaacagggacaattggcaagcgtttggccagcatcagtgtagagaacattgaatccaacaggcgagctcttaaggagctgcttttcactgctcctggtgttcttcaatatctcagtggtgtcatcctctttgaggaaaccctctaccagagcacagctgcaggcaagccctttgtgaatgtcttgaaggaagctggtgtgc

SEQ ID NO: 64103 - DNA, 266 bp, Glycine max
cgacgagcatgcgcatcacatgtatacagcacagccctcccaaccaatgcagccaaaggaccagccacagcgtgaacgatacctaacaaggcgtcgaaagactaagcgcagtgaaacaaagaggatactaagtctcccaaaccttgtacagacccaaaatacgagcccagacaatcagaatctagatggcctgcaaaactcgggggatactcgaacggcagcatccgatcaaaaacgaacctcatcaatcacaggcagaagaaaaa

SEQ ID NO: 64104 - DNA, 329 bp, Glycine max
tctcggtgaattccaattctacattttcaagaaataaggaggcagaaatgtgcatatatgaattggaattatttgttttcttattaggcctatcctgaagccaaaggaaatgagatcggaattcctcggggaattccaattccacattttcaagaaataaggaggcaaaaatgttcatatatgaattggaattatttgttttcttattaagcctatcctgaagccaaaggaaatgagatcggaattcctcggggaattccaattccacattttcaagaaataaagaggcaaaaatgttcatatatgaattggaattatttggtttctta

SEQ ID NO: 64105 - DNA, 242 bp, Glycine max
catgaatatctttttctaccatgccctagccaatcttagttgggacatgaatatctttcaaatgggcccatctccacatatagaagttcaatttatgcattgtcgttgttatttcagttcattttccccaacattatttagtagtatgttgtgttagttaaaaaaaaaaaaaaaatataaacacaaaaataacaaagaaaaataaaagaagcaaaatataaagcttaatgaaaaaatgggcg

SEQ ID NO: 64106 - DNA, 402 bp, Glycine max
ctatcatgcacgcttacgtaatctcgaattccgcttgagggtttcccccccccttcttggtacatattggtattttcgttatttcacacaacatttcattcattcattcaacttttggtaccttttttacctggttattccaggtcctaacttaaaactggaacaacactatgtccattacaggccttatagaccccaaaaatgaatcaccacaagtccttccaccggcgaaataactccggcgagctcgatgtgtttgaggcagcaaggtacttctcaggatacagtgaagttcttggctccaccaccaccacctacactcagaagatcaatatgagagaagaaaggcaccatcatcatcatcatcatggacatagagctgccagaatcagcttagacatg

SEQ ID NO: 64107 - DNA, 402 bp, Glycine max
gtgactcgttcttcttcgtcgttatcttcttcttttggtgtttgtgtgtttgttttttctctcacctgaaaatgtcttgctgcggtggtaactgtggttgcggaagcgcctgcaagtgcggcaacggctgcggaggctgcaagatgtacccagacttgagctacaccgagtcaaccaccaccgagaccttggtcatgggagtggcaccagttaaggctcaattcgagagtgctgaaatgggtgttcccgctgagaacgatggctgcaaatgtggagctaactgcacctgcaacccctgcacttgcaagtgaggtgttggagagctaaagcttcaagcagagatggcccttagaaataatgataaaaactatatgtagtttcaaaacttcaaaattatgtagt

SEQ ID NO: 64108 - DNA, 397 bp, Glycine max
  unsure (1)..(397): unsure at all n locations
tcggggaattccaattccacattttcaagaaataaggaggcaaaaatgttcatatatgaattggaattatttgttttcttattaggcctatcctgaagccaaaggaaatgagatcggaattcctcggggaattccaattccacattttcaagaaataaggaggcaaaaatgttcatatatgaattggaattatttgtgttcttattaggcctatcctgaagccaaaggaaatgagatcggaattcctcggggaattccaattccacattttcaagaaataacgaggcaaaaatgttcatatatgaattggaattatttgctttcttattaggcctatcctgaagcccaaaggaaatgagatcggaatttctcggcgaattccaattncacattttca

SEQ ID NO: 64109 - DNA, 390 bp, Glycine max
attttctttacttttatatgattgcttcacactttacaattctttattatattcatgaaaattaaaatcataatattgttccaaattccagtatccagttccttgcttcttcttttggaaaaccagaatggaaattattaaaagtaaaaacatttatattacacttaaaatgtaatttcaagcattaccaagcctttaaatcaattagtgtgtaattgtttcaacttattcattagttttcagtttgagttctattgtccatgatagtcttattcaaattgagcaggattatccctaattgaagaccactatagtctttgtcaaaaaaaaaaaaaagatttcaagtctatttctttaatcagcattctcaataaaagaggctttttggga

SEQ ID NO: 64110 - DNA, 323 bp, Glycine max
gtgcctcaattgcgctgactaacacactcacagatacgaaaccagatagagagagtgaaaacaaaactacacaattacacatagcagagcatagcgtaccgtgtcagatggtagacataggaacagacgttgtagaatccgcgccaaatgcataacagagcatctctgacgaacatattcgtacaagatatctgtatgcactgtgatcggaacatatcttctactaatgtaccaatgagcgcaattttgagtttcgtgctttccatgcatcattcgtctgcctatttccagtctattgaatttggctcatagatcagaacatg

SEQ ID NO: 64111 - DNA, 294 bp, Glycine max
ggcaagttttggaattttctgggggcttcgtctggattattcttcaatttgaaaacccaccaagggataagcaagcgtttcctcgttgcaacttgcaacttgcaatgcctacttctgttgctgacctggttttgaaggatcgtcttctgtaaattcttcacccctgcagttcttctccatgatgtcactttcacctagcttaggttctcccaacaatctcttgtttagggaaatgaaatccgaggaaaggggtttgtacttgatccatttgttgctcacttgtgcaaaccatgt

SEQ ID NO: 64112 - DNA, 264 bp, Glycine max
  unsure (1)..(264): unsure at all n locations
atctgtcagtcctcagcgaaggtagaaaatcactaggttctgataatgcttccactctgatggattctggtcatagacatgctatttgcagtatttttctgcttttagtttgtctttgggtgcatattttgatcatgtgtcttctgttcattctggtagcctcctangagtttggttgtatatgttgaccatcttcagttattattaatccctgcggtcatacatttttaccatacatagtaccgtatcataattttggcctgt

SEQ ID NO: 64113 - DNA, 308 bp, Glycine max
actgtggcttgttagactgccggagcatgcatcatggtggctgacaacaacttgaaatataacttcaatgtaaaaggaactaaaccggacactgaactaagcgtaatggacactgaacgtgctgcatacattatttctatgtacgataacaacggacctgaatcacctactgtggaatttgcagctggcaatgcagatagggatgctcaggtgactattgttgaacatgagcctaagttcaaccgattttaagcaactgacagaatctaggatggaatacctacgaatcatcatgatattccagtatc

SEQ ID NO: 64114 - DNA, 298 bp, Glycine max
ctccccttctttccctttcttgtcttttctgccctttcacctgtcttctcttctagtcctttccagcatacaaatttaactgaattttcatcccattctctttttctcacacattctcattctcatggatgacctttccactcccaaacaccgtcttctaactctcctcaactccctcaaagaagcttccaaaaggccttaaaccaacaacaaaccccttttccttcacattagaaaccctttacacgccccgatatagactctcttctagacctcaacgcaaaagcccacgccaccc

SEQ ID NO: 64115 - DNA, 383 bp, Glycine max
gccttttccagtttgctcgaaagattgaggacttgatattgaataatgttgcacctgaagagattcctttccaagttgggctgtcaaaagcagatctacggaagacgttaaaatccagtttatccggggtggacaagtccattgctgcgatgtataagaagttgcataaaaacttgacttcggaggaactcttaccttccttgtggaataaatgcaagaatgattttcttgataagtacgaaacctttgtccaacttgtcgcgaggatttaccctgctgaatcagtcccttctgtagcagagttgcgagaccttttagcttccatgtaaaggtttatacacatgccttctttccatttttttggcctgtaatcattcttttta

SEQ ID NO: 64116 - DNA, 394 bp, Glycine max
caactttcttctgtcaaaacagatatgaggtacccaaggagagcttcacttctaaaatttcttgagaaaagaaaagaaaggtaagcttctgttttctacttgctacacttttatttatggaaaatgctgatctgtgccttatggaggaggataccggataaagaagtgaaattagaaagcttttattgcaaaatattaatgtattttcaacattgttttgaataaaactttttattaccaacttatggtagatctaagtggatccgaacacaaattctttaagtaagatattgagttcgagtctttttgaatgaaaaaaaaaatatttggaaagagaaacctcacttaacttgatcggttagttttttcgataaagattagttccagacaaaac

SEQ ID NO: 64117 - DNA, 139 bp, Glycine max
ctctatccgaatttcacaagtcgtagtctaaggtaagtagcctgatgacaacagactgtcactaactgaacttgacgacgctcctgcgggaactgcccaactaccatggtcgttgaacacggattgggcaatcaagtct

SEQ ID NO: 64118 - DNA, 171 bp, Glycine max
ctcgagccgctcgagccgctcgagcggctcgagctcgagccgctcgagccgattcggctcgagggccaatgttgttgatgtggttcttatcttgctttggggatatttgatagatcttacggttggggatgttcaaatatgggtttcctagtatcatttttttacgtactt

SEQ ID NO: 64119 - DNA, 373 bp, Glycine max
caaaggtggaaattaaggaaaagtttcaaagaatggattataggctcaaccaaagaagagtgtccttttctgatccaaattcacgacaacacataccagatgatgagcgtgtaactgcagttgcagctgctgcattttccattcattcacttagaagaagcagggttacttaatttgcagaaaatgaaagaatctgccaaatttccaaggaccaaaactgtgagagaaaaagaggggaaagtatctaggcaaccaagtcatggggaaattttaacaagaaggtcattgtgacaagaactcgctagagcaacagaaagtgctattcctgctagacgcccaagtggtgtatccccggcagcagggtatcaaaatc

SEQ ID NO: 64120 - DNA, 352 bp, Glycine max
tctgactacggtaattaactggtaaatacttgcacaatggcctcagaaaatggagacaaactagaacttgctttcagtgttgttcctgatcccaagcccaagaaggattgggtcaatttgtcccttagggtggtcgcatttttggccacagcatctgctacgcttgttatggcattcaacaaacaaaccaaaagcatggtagttgccaccattggcactaacccagtaacaattactcttactgcaatgtttcagcacactccagcttttacattcttcgtgatagtcaatgcaattgccagtttctataacatggtggtgataggagtggagatattaggaccacaatatg

SEQ ID NO: 64121 - DNA, 289 bp, Glycine max
gatccattttcaaattccatcacagacaagtgggtatctgacttgtacatttgtaatacgccgagtgatcgattattcagagtcacaggtgttagttatggcgaccaggtactgcatggcgtctctgactgtgacaaaattccgatacactctctggaacactactgcaggaacagatgtgcaaacactacttcgacactgctgtctacagattcaacatccccaatctccgcgtcggaaccctagactgcctactctgcctcagcgacgataccgtcaagtcgaacag

SEQ ID NO: 64122 - DNA, 299 bp, Glycine max
ctacgtcaatttcatacgaaatctatcccatgcgcactgtatacccggcgctgactcgcgtgcacatcaagctaattctgtcgtacacactcgtagtactcgtcgccttgtgctcaatcaccactatagctcaatcaccagctgcagccctcaaagccctatgcaaagcctgcaccttctaaacctgctcctcgacacaccggctcgagcgcccgcaaatccattactcccttcattaccccactcacgctcttcagcgtgtcgattcatgtggcgctcaagacattgcgaagatccta

SEQ ID NO: 64123 - DNA, 379 bp, Glycine max
  unsure (1)..(379): unsure at all n locations
ctcaaagaagatggctagtggtagtttgaagaacatgttgagtgtagcaatgaatcaaggagtggtggaagcacgagccaggatcttcggccaccaattgaaccccactggcatgaaaactccacacaagcttctccgcatgaagctcttcggtgaaaaagtcgctcagtggtaccctcacgacatcaagaaagacgaccctcttgtcatggcccgtcaagaacaagaacgcttatcaaagcttgaaatgttgaagcggcgaggaaaaggaccacccaagaagggccaaggaaggcgtgctgccaaacgcaacaaataaattatactttcacctntctctctctcctctctctcatctctctctctctggaattatttt

SEQ ID NO: 64124 - DNA, 385 bp, Glycine max
ccgtcacaatcctccgcattgcgaagatgaacctcaccacttccgtcgactccccttcccacctcaccacgctcttcaacctcactctcatcgcgaagaaccctaacaaccacctcgtcttcttctacgacccgttctccatgacggtgttctcgaactccgtccccgtcgggaacggttccgttacggcgtttacttcggacaagaacaaccagacgagcctccgagcggtgctgtcggggtcgcaagatctggacacggactcgttgactagcctgagatcggggctgaagatgaagagaggtttccccgtggagattcagatggacaccaaggtgaagatgaagatggattggctcatgagcaagaaggtcggaattcgagt

SEQ ID NO: 64125 - DNA, 336 bp, Glycine max
ctcgagccgaatcggctcgaggtgatttcagtgagtgatcggtgttcacttgatctcatcataatcgtcagcgtcaattgaagaagatgccgatcagaaacatcgccgtcggaaggcctgaagaggcgactcaccccgacacgttgaaggcggctttggctgagttcatctcaaccttcatcttcgtgttcgccggctcaggctccggcatcgcctacaacaagctcaccgacaacggcgctgccacccctgccggcctcatctccgcctccatcgcccatgcattcgccctcttcgtcgccgtctccgtcggcgccaacatctccggcggcacgt

SEQ ID NO: 64126 - DNA, 449 bp, Glycine max
cactcctacatcagctggtaattctcctcgagcttcagttttatcaacatcggcagcgaagcactatcgggggccgttaaacgctattacaagtagcctaatccatcttgaccacatatcgaccgactatctgactgtactgctcaaacggacaattacattgtactccatcatgaagacactattcgtaacactacacaagatcgcaagtaccctacaacacccacacttatcatggctagttcaacagtcacacgctttgatgactttctcatctgcccatactactaattgtactgctgcatcgtctctgacagcaccacactcttactatgtagaagctaagagggactatatggcaaagacagctatttagattgaaggattgaacgctaatcgctttaatggtattcccattcactttaacctacattgtagtttaaaattac

SEQ ID NO: 64127 - DNA, 315 bp, Glycine max
atcaatttctaaaagaacacataaagataaaaaaagggtggactttatatcaaattataattaacctacttaaacactatcacaacatttaatatccattcacttacactttatattattcctcgacaatccttgcgccatatagcaatccctcacttacatcagtcctactatactcactcctttactagaaacataagtaatcaacttatgcataaatgcccatattagaacaacatataaacagcctactcacttctcattatcattaccaaatcctttactgatacctcatcaaacagttacagatccaat

SEQ ID NO: 64128 - DNA, 293 bp, Glycine max
ctttgtaatatttcttcttcttcttctacccttcaataggaatattccgtgcaaataccaccaacagcatcatgaccaccaacaagaagaacatgattggcgtcatgggtctattgctttataggaatttggcttgcaaattcatatacccttcatttttatccaagaaggtctccatggatgcgctatcgaagcagttggagaacatgatgtctgtgatctatcctgatactgtcagacatatacagcactataacaatggcatgtaacaagtatgtgggacgcattgctta

SEQ ID NO: 64129 - DNA, 334 bp, Glycine max
ctcaattctaaagaggggtgagaaagacaaagagaggttgggctatgctttacaatatcaactaacctactgaataacctagcacaacatctggactacatctcacttacttacttacactcatcctcgcattggcgtgcgcctaatgcaaatgctgcgatgacatctcgtgactacaagactgaactctcttaccacagacctaagtggggatcctatgcctaaatgcccatacttgacgaacagtaaagagcctactaacttctcatcctcctcacctactgatttacgtcatgccagatctcggagctagaggctcaagctgtgaacatag

SEQ ID NO: 64130 - DNA, 386 bp, Glycine max
catggagtatctggatgtgatattggaaacaccactgagatagagggtgagattgatcaaaacccgtcaaattcgaaggtgaactcacagattgagccttggagtaatcctgatgagcatgtcaatgggactcctggaatcctgaactacaatatttctgtcggggatgactcctgtatgtccttcgaatgtgatgccaatatgcatgtgtcttgccattctcatggtttacgaggtgctagttccgctttgcaagctaggggatataattgtaatcagagtccacatacgcaaggaaaacttgatttgtccagcaatgagatggatcatgtttatttgatggagccctgtgtttctaaagattggtatcctgggtactcaacatg

SEQ ID NO: 64131 - DNA, 298 bp, Glycine max
cgaacgtgttacaaacgactctgcggggcgaattatggcatcgggcaggggcatgggcaaccttacctactccgagccgtatatcaattacagtcactttcgctcaccacttaaaatttccaacatcccctctctgcagaacgcttcgcataaagtacttatgcgcgataagactgtacaggtaaccgtcagagccggcaacatcgacagccacacggtccttgagctctagctcggaggtttcagagccgtcgacctcgacaacctggagaaatcctccgaggttgccatccacaga

SEQ ID NO: 64132 - DNA, 255 bp, Glycine max
cgcatacaaaagccggcaatacttctccacaacctttcttaatcaacccctcaatcacccaaacacggaggcttcttaaaaacacccgggcctcctacaaatcccccccacctaatctactacctcctcgcacactacaaccaccccgaacccctacatacacaattcctaatactcaaacactcctcacaaacacactctgaacctacatccattcactaattactcccccatatcacactacactccatcata

SEQ ID NO: 64133 - DNA, 308 bp, Glycine max
atcctcacttccttgccctcattctcatacacctattcggaacccagacgcaatgcccatgttcactccatcactcttcacacccttcttccatcacattgaacccagtgccacactgtgattatatatcaccaccaccaagctcaatctcaagcaacagcattacaccataccaatgccaatacccgtgtgccacggaattcaagcccaaaccctaacccaagcccaacctgggttttagctcgtcggtttcaaaaacttcggccgtaccaatcctaagtcggaccggtttcaagtcaaccgctttc

SEQ ID NO: 64134 - DNA, 101 bp, Glycine max
agcaaacactctgttccttccttctctcgttcgttcatggaacttcagaggcgccaagatcagagcctctcccagcggaagggccagaaacggaagctcga

SEQ ID NO: 64135 - DNA, 389 bp, Glycine max
ctttaactccattactggttttgtgtctctgaatagtgttgtgttttccttttaataatatcaaattggtagagcttctaaggcttctctatttcatccctgcagactgcagctctacattaattctttgtgattataactatcactttgtaccactaataatcccaaatcacaatgttgccatcaaatgtgtttgcgaaggattgtgattggagcttcatgagctaacatattcattgctttgctgaatctctctttgctattcctacttcataaacaccctcaaatcaagtatttataatatgaaattcatgatagcaatctgtttaattttcgtgtaccttctgccgattattttgtttactcatttccagcaccctgcaaacaga

SEQ ID NO: 64136 - DNA, 58 bp, Glycine max
actcgatctcactagtcgctttctctgctctcgtcccgcaggtattcctccaatctcc

SEQ ID NO: 64137 - DNA, 354 bp, Glycine max
tgaacctgtgcttgtgctgacactatttttgagtccctctttcgctattttcgagcccgctccgttctgagctgtgttacggcaacaaaagtttgaagttttaattggcttaattgttagtattagcaaatgaggataaggatttatgcttggtaacttcactgggcaaaagatatacttattcacctttatttgtcttttaaacaattatcaaatactaatagctaatgaactcggaaataatccaaaagtccatattaccgatgggcaagaaccaaacgcacaaatgcggcatctagattgcgccgattcatttgttgtgacaacatattcacctaacatgataagtgaagc

SEQ ID NO: 64138 - DNA, 376 bp, Glycine max
cgggccatcaagggctatgtggatatgttaaacaggggatctcagaatgtgaaagaaaatttgaatcatgtcatgatgaagcttccggaaatctacttgttggactgtacattgaatgactgtgatttgatactgaagtctgtagatcagagggaagtttatcctgctctgatattatttccagcagaaaagaagcagcctcttctttatgaaggagatatggctgtaattgacgttatgaagtttgtggctgagcacggaagtaacttgcatcaacttataagagacaaagtggcagttttgtgggtatctgaaggagcattcaagaatcagaacttacatgatactttgcaaactaatatccacccggaatcac

SEQ ID NO: 64139 - DNA, 238 bp, Glycine max
ctcgacgccatttctggtttgcaggggtttagtgagttatatgagtgggtgcttcatcttcaatcttactgacacatagattgggaagaaggtggttggttggtgtggcaaagaagacagcgccatcaattgcaaggcaatcaagttgcttcaatttttagatcatacttagttaattttttaattttgcatttatctctgtctgaagaattgaaatatgttatttttagaggtatta

SEQ ID NO: 64140 - DNA, 407 bp, Glycine max
acttcatgtgcttttttgtttttgttttattaactaacttgggtctttttggaagagacggtttgaatttctgtggggagagatattcatatttagcatctgatcgagtcttgaacaatatgattgtcttggatttgtcttccaaggaagatacttgtgggaaataaaaataactaaccaactacaaattatatatgtgttctcacatttttttttcgtagagattggatcgatctggaactgggagtcgccagaaaagaactccgtctatttctcagggggctaggatcactgaacaccatgttggccctttggattctcttagcaatgtcagtctcatggagattgaaactagatcccgagcacagacccctgcttcatctgctgttgcagttaaagcacgttta

SEQ ID NO: 64141 - DNA, 388 bp, Glycine max
attctctctgtgtatttccctaactctcccttcaagatgcagatcttcgtcaagaccctcaacggccagaccatcacccttgaggtggaaagctctgacaccatcgacaacgtcaaggccaagatccaggacaaggaaggaatccccccggaccagcaacgtctcattttcgccggaaagcaacttgaggacggccgtacccttgctgactaccacattcaaaaggagaggactctttaacttgtgcttcggtctccgtggtgcatgcagatcttcgttaagacactcaccggcaagaccataaccctagaagttgaaagctccgacaccatcgataacgtcaaggccaagatccaggacaaggagggtatccccccggaccagcaac

SEQ ID NO: 64142 - DNA, 390 bp, Glycine max
cagcacaaagcgggttactgtctgttcaagctaccatctctctctctctttcttagtgcctccttgccagaagttaaaatggcccaagaaactttcctattcacatctgaatcagtgaacgaggggcaccctgacaagctctgtgaccagatctccgatgctgtgctcgatgcatgcttggagcaggaccctgacagcaaggttgcctgtgaaacctgcaccaagaccaacatggtgatggttttcggagagatcacaaccaaggccaacgtggactatgagaagattgtgcgtgacacatgcaggaacattggttttgtctctgatgatgttgtcttgatgctgacaactgcaaggtcctcgtcaacattgagcaacagagtcctgata

SEQ ID NO: 64143 - DNA, 102 bp, Glycine max
cgaaatgaatatatggtaaacttgatggaattttgctgagctggaaatttgaaagttgggttcaccggcctgtttatgatttgataataaatttatttgtca

SEQ ID NO: 64144 - DNA, 400 bp, Glycine max
  unsure (1)..(400): unsure at all n locations
aatcaattaaagtgagggttttagctttgagcctaaagcctctgcttctcctccttctccttttccttcttctccttttccttgtatagtaccgatgttgacactcacttctccttccatggccttatccatggattctcttcccaaattgcgccacccttccccatttcccactcccttatcctcttccatctccttccgatctttgccgccacctcactttccctcttcctcctcctcctcgtttaggttacactccatcagaccctncttnccaaaaccacccctcgtttcgcaccccctccntccccctctccttcaaccctaacctncttcctctcccccgtcgtcgaaaccacctgcatcgtcatcgccgccgctgccttattcttcatgcgct

SEQ ID NO: 64145 - DNA, 341 bp, Glycine max
catttccaaaccattctttgagactctgtcctcactactcccttagttcagctacaatggaagtaagtctttttctcatgtcttcaacattcattaactcatcttcttaattgatatatccttgatccttatcagtcttggttgttagtattatgttacaatgttaacagggttggggctttgaatcacgacttcttctctcttcgcccatagagagcttctaaaattttcaaatcaatttaattgtccataatcttaagtcacatagtcttcctaatgctagaactgacttatgtaatggtgaaactaataatcaattaattcgatgaagctattatcaa

SEQ ID NO: 64146 - DNA, 122 bp, Glycine max
gctgtccattctttgccaccctcaatctctgtcctttggcgaacttcattcattcattaaccttttcgacaaccctctttgaaatttgaattaccttattaggatggcccaccaaacccaaa

SEQ ID NO: 64147 - DNA, 417 bp, Glycine max
ggaaaatggcattgttccgtgtgaatgtcaagcgttggattgtaacctatgctatcctttacgtttgtgtattcgggaaaaactttggaaatgctgatgaggatgagtcagaggcacagacaggtggtggtggattcggggttgtggggggtggttttggcggtggctggggccggagttggcagtggtggtgggttcggagccggtggtggtactggtggtttttgagcccgtggtggtgggtatgggtgtggtgacccagctcaaattgtctccaaagccttgctctgtttcaatgataaagatatttatcgaagctgtgaaaagacgtgtggattgaacgagaatggaaacctgaacgtgcccgcagagtaaactgttacattctgcgaaggaccatgtctctaggagacaaac

SEQ ID NO: 64148 - DNA, 194 bp, Glycine max
aaacattgctttgttaacagtagctgtataataaacctttggtggttgcactcattgggatcttacgcttgaatcttggcattgatatataaatattatccaaaacatgtgagcgactaacaacccttttggaaaatcatggcatctgcttctgggccatatactttgccttaggttattaccctgacacactt

SEQ ID NO: 64149 - DNA, 54 bp, Glycine max
gcggtcctgttgggcctgcgccgacttatgtttctcatcgaccatggcgcatac

SEQ ID NO: 64150 - DNA, 66 bp, Glycine max
gacgtcgcacgcacacgtacgcaagcgaaggaatcccgagctaggcaaaattattttaacccagac

SEQ ID NO: 64151 - DNA, 233 bp, Glycine max
gtacagtgcttgcatattgggtgcatttggccttgaagatgagcttcaacaaggcgtgctagaatgcattgaatgtctaaggattgcaggccttaaagtatgggatctgacttgcgacgaccatgatactgccatcatcatggacttctcctcagatctgctaaccagcaacatgactcacattattatctatagctcgagcagagaatcatgcaaagaaagcttgcaggatg

SEQ ID NO: 64152 - DNA, 183 bp, Glycine max
cgcaatttgacatgctcacatacgaatgagccaacataggccatgtatgagagtgtgtagtgcatggcttcctataatggatctatcatagatgcatagtgtaactagagagcgtaattcctaaggagaattccgactgcacatttttaagaaatctcgatgcacagataattatatacgaat

SEQ ID NO: 64153 - DNA, 145 bp, Glycine max
gaagagctttgtagacctttcttaatattattggtgggacgggggttatatcaaatgttgggagcctgcgccatttcttggccttggttcaccttggccttggtttggctccttccggttccggcattcaataacaggtttaagg

SEQ ID NO: 64154 - DNA, 354 bp, Glycine max
cacgcacgcgtacttaagctcggactctagctcttatattcattactttttttccagatacaaatatgcataattggtcacgtatcaactgtaattatatgtatactcatcatgcctatcctgaatccaaacataattatatctgtattcctcattgaatatcaataccacattttcaataaataactacgcaaaaatgttcatatatgaactgcacattatttgacatcttatcacgcctatcctgcagccaaaataattgagatcgccattcctctgagaataccaattgcacatttttatgaaatcaggcatctcatatgtacatatcttaattggaatcaatttgatttc

SEQ ID NO: 64155 - DNA, 393 bp, Glycine max
actccatgtgaaagctagataggtaggcacacactcgggagggaccctgctaggaattcaagagcctcactcatatatatatatataacatggttggaagaagcaacctaattaagttctatctcccaatatatatatcattcctttatttagtatttatatataacctttcttctcttatattcattcctattctttagtgagacaaatatttaaagcactcaattagctaagtgtttggaggttagatttcttgtgaggcttatttgcttttttaacttgttgaatttgaatcatcttgtgaaaaacagactcgatcgttattgaagaaagaaagtaaggtgtttggaatgaagtttgatccgaaatcattgtctcaatttcattcattta

SEQ ID NO: 64156 - DNA, 127 bp, Glycine max
ctcgagccgaatcggtttgagatgactatctctctaagtcattgtcaacgttgagaactgctcagagtccaagccatgtactgtgaaaccaccaagagctaatccttgacgctagtagccgtatgat

SEQ ID NO: 64157 - DNA, 310 bp, Glycine max
atctgccatcttttagtcgactatatataatatcttttttaatgtcaatcacccaaaattgctgaatcgtaagtggacaccagcgttactcttcatataccagaacaaattgactacataatgtgtatgcccatgtcgatcttgataatagtcacttattatctgcctactacttctaaccttaattcgtccactactcatgcacaaaatacgacttctttatagctttccccttcttcctgtctagttaggcttagtatgatgacacgtaacagctgtcacagttctgctaataaacccatgtacaaat

SEQ ID NO: 64158 - DNA, 310 bp, Glycine max
ggctgtaaatcaccaaaccggaatcgtgtgacagaagcatgatatgactacagcggtcactatcgcagaggtgatagcgacgagatctacatgaacatatcttggactaatatcctgataccatcacacatcactccgtgtcaagagaattcacctactgttccacagctgaagcatcgaagatcacgactaaacgctatgctgatattgacagaagatcgtggtgccgttcatactcctgatctggacttgcacagaatgattgctctctaatatgccagttaacagctggatacgagctaatttacga

SEQ ID NO: 64159 - DNA, 152 bp, Glycine max
cttgaaactggtcatgaatcaagcgactctctttctcgatcctcgtagagccttactacagtcattacgcatgctcatggtttgcactgggtgtcgagttctgatggcatgttgcagagaatattgctgcgtcagaccgtgaatacaatggc

SEQ ID NO: 64160 - DNA, 365 bp, Glycine max
cgaaaactggtgttaccatgcactcctggccagactcgatgaagtcggctactgacattaacatatctcttcctgatagttgatgatcaacctgcagtctccctgtcaacattcatgatggacctcttggttaaagggttccagtgtggtcctatatggcgtagtttcacactctttttcaaacctattatgatcttttttggcctatcactgtagggcgaagtctctgactagtggtgtaagtcgcatctaggtttatataattctctgtgcctaccagagcatctgatccctcggctgattaggtagatgctgcaatgcgcagtgttattatgagtcggctaatggggatgtaatcacatctg

SEQ ID NO: 64161 - DNA, 369 bp, Glycine max
gaaacggccagtaggagcatagaggctgggggccgatctgatctaacacatgaccctacgacatgggagaccatctaatgcatccttaaattaaaagttaaatcaggctgacccaaatctcaaatgggaaccaacaactaatcccacatctacacataatcgtaggctaactgaccgtttattgactatcctactatgatattactattataggacatgctgctgctgccaaaacgcatatctgatagagggctgatctagatcatcccgacaacaccccagataaacatgtcatctaaaaccgcactcgcactgcgctgagtcacttcaccacagaatacatgctgcgcagaatgcattcacgagctg

SEQ ID NO: 64162 - DNA, 278 bp, Glycine max
  unsure (1)..(278): unsure at all n locations
ccgagcgaattcctttataccaatccaatcctcttccaactcacagagccatgtctccaggtcccgttgtcgacgcattccctgaagttgatgcagagcaacaactgtactacgtcgatgacgccactcagaagaagataccccaaccacatgacgacgatgcttcccttgtcgaggacttgaangatgatgacaaagacgacgacgatgaatacgacgacgaccacgactaagatgacaaggaagacgatgctcaatgtggtgcttanggttcaaag

SEQ ID NO: 64163 - DNA, 388 bp, Glycine max
  unsure (1)..(388): unsure at all n locations
gagattcatgaaaaagttgtattgaatctctccaaactgcaccagcttgtggggaaaagcctcaaaattgatggtgtagtttggagagattcaggaaaaagttgtattgaaattttcacaagaggaatttcttacagcttggtcaactcaggtgcgtcctgcaacaactctgttggctgatgggtgtccatatttgtatgctatggtgcatgatagttcagtgtctacaataccaggtgattttgtcattggtgttaagttgacaaccataaacaatatgtgtgcatatgggctcaatcctggtatttcaggttctcgtcttttgggcaccattcctcagtctatttcacagcanactgtttggaatcaaatggcaacagtgagaaca

SEQ ID NO: 64164 - DNA, 192 bp, Glycine max
gataagcttttgttggctaacacacatgaattctttgatggaaattttccagtggattcttggttaccaatttttgtgaattgtctttatcctgtaagtcaattgccttcagaagctgtcgttgtaaatgttacatgtggtagtggacgtggtggtttaccgatcacttgttggattacgtctgcactcaac

SEQ ID NO: 64165 - DNA, 396 bp, Glycine max
  unsure (1)..(396): unsure at all n locations
tcggggaattccaattccacattttcaagaaataaggaggcaaaaatgttcatatatgaatgggaataattggttctcttattaggcctatcctgaagccaaaggaaatgagatcggaattcctcggngaattccaattccacattttcaagaaataaggaggcaaaaatgttcatatatgaattggaattatttgttttcttattaggcctatcctgaagccaaaggaaatgagatcggaattcctcggggaattccaattccacattttcaagaaataaggaggcaaaaatgttcatatatgaattggaattatttgttttcttattaggcctatcctgaagccaaaggaaatgagatcggaattccttcggggtaccgagctcgaattcccta

SEQ ID NO: 64166 - DNA, 370 bp, Glycine max
cggtttctttataaagcacaacgctaaaggtcagcactcagtactcttatgaagatgattacaaggtcatcatgacaatagcatgatgagctcaggaattagtgcttggagtgcggctactagcgctggagatgcgtaggcttatcaagtcatgggcatacattcaatgattcaacccataaggcaacgcaagcataatatcatagcccaaaccggtctggaagctctcataggcacgttagaagccaacaccatcaccaccactggtctagaacacttgtcgacttaactgggtgactctttctctactccttaactgatgaatcaccccttagctacccatctataaataccatccctagatcactac

SEQ ID NO: 64167 - DNA, 86 bp, Glycine max
aaaaaaaattattttaaaaaaaaaaaaaaaaaaaaaaaaaaaaaaaaaaaaaaaaaaaaaaaaaaaaaaaaaaaaaaaaaaaaaaa

SEQ ID NO: 64168 - DNA, 396 bp, Glycine max
  unsure (1)..(396): unsure at all n locations
gtcttgctgcggtggtaactgtggttgcggaagctcctgcaagtgcggcaacggctgcggaggctgcaagatgtacccagacttgagctacactgagtcaaccaccaccgagaccttggtcatgggagtggcacctgttaaggctcaatttgagggtgctgaaatgggtgtgcccgctgagaacgatggctgcaaatgtggaccaaactgctcctgcaacccctgcacttgcaagtgaggtgttgggagagcaagcttcaagcagagatagcccttaattaggaataatgataaactattaatgtgtagctaaaaacttatgtattatgtctgtgatggttttcgtgcactctggtgttttgtgttaaacaaacatncttagaataaagtggtcat

SEQ ID NO: 64169 - DNA, 283 bp, Glycine max
aaattaactttgctaacaagaacacccataactcgcctaggttaaatcgaccacaggcgaggcaacgcaacgaggaagaaccaggaacatagcaggcgcaagcaacgccaagacccgatcctaaaccgctacgagaaggacatcaacgagaacatcccacagaaggccaatgaccaggatgatgctgacgacaaccatcacacggacacgaccatgcatgagaagaaccaaacacataaggacgaacgaaggaaaacacaaagacgactaaaaagaaggacac

SEQ ID NO: 64170 - DNA, 143 bp, Glycine max
gtgaggggtttttaaaataatttttttagaaatttataaatgatttgttttttgttaaaatatttgtttatttttttgaatgattgtatattataaaatgtggatatttattatttggttattgtttttttaaagataatttt

SEQ ID NO: 64171 - DNA, 171 bp, Glycine max
cataaggttcgtcccccttaccagccttaccaaaattcacccttaagttcaaagttgccaaaccccgcacggcctttaagatacccagcgttttccccctgaaacttccttaggcccctttccttttccgacctttccgttaaccggatccctgtccgcctttctcccttc

SEQ ID NO: 64172 - DNA, 469 bp, Glycine max
atttcttttgattgattagaaattaaaacatgattttttatcgactaaattaaacaatctctaaaaataaaaaaagttatacttttcattaaaacttatgattcaaagagagtttgagaacatttatattatttaaaccattatgagtcatgaaatacccaacacatcaatctcataataaaataggtgttctatcccaatatcatagttcatggttatggagacatcactacttcttgtccctaatttcttggaaaaaatattctgaattttacaacttaccacatatccatagaaagataaatcataaaatcttcatacatataaagcacgcctcttataaagctaatatattaaaacacatccctaggtcataacacatcaaccatccaatttcaattccaaataaaatcatgactgtccaataacattctattctcacttcattcagatggttggactggccact

SEQ ID NO: 64173 - DNA, 372 bp, Glycine max
agaagatctatgacgtcgcacgctcgcgtacgttcgcgaaattggtctagtgttgcgtattgttgacacacagggatatcccgggcccctctgtgcgacgggtaatatacgtgtccgtatatgggacccacacgcggtcccggggcctgtctcctggttttggggtaagaatgggtatgggttctggtttctgacacaaggggcattcgcggtattaccaggacaccaaaaaggttttaaccccaaagaagaagttgaagctgctcaagggtttctccaaattagggcttgcatcggatcccgagaaactcgccatgttctatgatcttcaacaaaacctgacctcggatgctggagatgtattactgagag

SEQ ID NO: 64174 - DNA, 334 bp, Glycine max
  unsure (1)..(334): unsure at all n locations
tatgactcgcatgcacctactaactcggattattcccgggcagagattantnnaagnatttactgcctaaaaggggactttacagggatagtgctaggctagctatctagaaacccaacaaggctgctcctgtgcatgcatcagcccatggtatctggataatgtttgtctttctacatagttatgttttgtttatttttttcattttttacatactgattatttcaactatcctatgatattcatcttttatcttgatatttatctttcaagtttaacttttttccttatattttattaatttatgattctcttattttcttctattttatat

SEQ ID NO: 64175 - DNA, 408 bp, Glycine max
caaacagcatcagtacagagcattttgatgcatgtaagtggacaaaatcggaaccacattcctgggaattgatcttcccaatagaggtatgtggtcctaataatggttttgaaatgtggagttctgagtgggcaaatcaaacttcatggcatttgagtttccttattgacaatcccaaacagtctacagtttttgatattctcttgggaatttctcaagattttgaaattgctggtaatactcttatgccagctttttctgttccacaggctactgccagatcttctgaaaatgcggaatcctctgcatgatctggaacttgtgttctctttcgcttgttcgtttgtttaattcaataaaggaaattaggcatgaccctcttgatgagtatgctctgcctatttgaaa

SEQ ID NO: 64176 - DNA, 97 bp, Glycine max
tgaaggatgatttttctatagttaaagagctgcctaaagagtggagcttttgcacaagagagttctatggcttggctattcgagaaacccgaatcaa

SEQ ID NO: 64177 - DNA, 581 bp, Glycine max
  unsure (1)..(581): unsure at all n locations
gctatgaccgtcgcatgccacgcgtaccgtaagcctcagtgaattcggcttcgagtactatacctatgcatgtagaagtgcgagttgtccttttgttaggtagttgcttagggaactaggttttcctaggccattcagtttgtagtcttcatctaaagggtgaagagacggatgacgaagtaacccgtttctacccttgatgaagctctaacccagcttccaaacctcttctttgagaacccaaaacgagtgcgcattcgtcgtccttccagaagattcagaccaaaccgctttccccgacaacttggagaaccccttcgagaactacccggattagtcccaaagtttcagtcatgaaacccaacaccaagtccttcttcccccaaccatgccctgacgccgatttccttcctctttggtccttatgcgggatgagcncanntacttaccttaggtgaaccaacgaccgacatgagaccctcctacaacnncttcaccctgggcgattgcccanngagaatcccagcttggaacccacttnactatnttggggttaaccctcacgacccaccaggaatctc

SEQ ID NO: 64178 - DNA, 141 bp, Glycine max
tatgacatcccatgctccctaacctaagcatttggctcgagccttcctttaaacctaagccgttagcctgaatgggtggtgaagaccttttggcaatggccttccaaaggccttcctgccaaggttggttggtaccttcct

SEQ ID NO: 64179 - DNA, 379 bp, Glycine max
gttggagatctcgtctttgaagtttctaagatgacttctccctacattaaatgtacagtctctttcttcatagcatttggaaatttggctgatgacaccatcaattttgaggcttttccccacaagctggtgcagtttggagagattcaggaaaaagttgtattgaaattttcacaagaggaatttcttacagcttggtcaactcaggtgcgtcctgcaacaactctgttggctgatgggtgtccatatttgtatgctatggtgcatgatagttcagtgtctacaataccaggtgattttgtcattggtgttaagttgacatccataaacaatatgtgtgcatatgggctcaatcctggtatttcaggttctcgtcttt

SEQ ID NO: 64180 - DNA, 110 bp, Glycine max
acttacaccaatgacgcatcgtcaatcctgctagaccaaagaatgctcgcatacaatacactacatactcaatcaaatgattgtacacctacaacatgcccatcattcta

SEQ ID NO: 64181 - DNA, 300 bp, Glycine max
tatcacacgcactccacacgtagctcgcaattcaactcgatagtatcccattatcttaaaactgaataccctaaaaccatatgaccgtattattttaaagtatgatcattcatacctgcaaccctaacaacaatccatatcataataccacattttccctctatccctgcaaccataaacacaatgcccttattagacctacctacacccacattccccaatacacatacatacaacaatgtaaagatatttattgcatcataatcccaacttttcctaacacttaatcacaaccataat

SEQ ID NO: 64182 - DNA, 362 bp, Glycine max
ttcaagcggttatgaaccgcctttatattaaacgtcgttgaaagtcaagtacatttaaggaggattccaactacaaccatcataaaaaagttgacatattctaagatgattctttgttacgaaccgtcttagaaagtacgctttctaagatggttcttaataaataatcgtcttagaatatgcacattctaagatgtttcttaggaaagaatcgtcttaaaaagtgagcttggtcatgaagttcttggtcatgaattttgtacataatgcattacataacatggttatactacaactatatcatatacaatgcatttgatgaactaaacttgaaaacaaaaatccaaggtcccaacatttta

SEQ ID NO: 64183 - DNA, 317 bp, Glycine max
cgaatacacacgcacgcaaactctagattcggctctagatggataccatttccctgtctcactcactatctccactcctgagcagggaaccttcaccctcatgaatgctctcgtcttcctcctctcatcccacctcaaatactgtcatctgctctaaacccatcatttctagtctcaaaaagaaccaaacaatatctcctaaaccttcatcaagcacaagctattatgctcatgctcaacaaggcctaccagctttcactatctcctagacactcaaccctagcccaattctgatcaatgacaatgcactggcaatc

SEQ ID NO: 64184 - DNA, 419 bp, Glycine max
  unsure (1)..(419): unsure at all n locations
aataaagatgagtttgaagaacaacatggtggtgctaaaggtgtgtntgttgcttcttttccttgtgggggttacagctgcacgcatggaactgagcttcttcaaaagtgatcagtcatcaagttatgatgatgatgagtattcaaaaccatgctgtgatctctgcatgtgcacacgctcaatgcctcctcaatgcagctgtgaagatattaggctgaattcatgccactcagattgtaagagctgtatgtgcacacgctcacagccaggacagtgtcgttgtcttgacaccaacgacttctgctacaaaccttgcaagtccagagatgactagaaaaactaatagctctctcaaatggacgaagcccctttaggcttttgttgtatgttaggggagacaaattaaacaagaaataaaa

SEQ ID NO: 64185 - DNA, 358 bp, Glycine max
  unsure (1)..(358): unsure at all n locations
aaaaaaaataaaaaaacaaagaacctaaaaaaagcaaagggaactacaacataaaacaaacctatatataatttacattatctatgacttgctgttagcaccattactcttagctcaatctccaccttctccttctccttcttcttcttcttcttcttctgttgcctgcaaaggcacactatatccaaaactctgccgttccattctctcagccattcgttcatccccttcagacccttatggctatggcaagttctccataaaacaaagcctcaaacaggcaagagaactagccaaagtctttgaggactntctccaacgccaccaaaaatcaccttccctcaaccatgctgagact

SEQ ID NO: 64186 - DNA, 438 bp, Glycine max
tcggggaattccaattccacattttcaagaaataaggaggcaaaaatgttcatatatgaattggaattatttgttttcttattaggcctatcctgaagccaaaggaaatgagatcggaattcctcggggaattccaattccacattttcaagaaataaggaggcaaaaatgttcatatatgaattggaattatttgttttcttattaggcctatcctgaagccaaaggaaatgagatcggaattcctcggggaattccaattccacattttcaagaaataaggaggcaaaaatgttcatatatgaattggaattatttgttttcttattaggcctatcctgaagccaaaggaaatgagatcggaattcctcggggaattccaattccacattttcaagaaataaggaggcaaaaatgttcatatatgaattggaatta

SEQ ID NO: 64187 - DNA, 421 bp, Glycine max
gttgttttttacatagttaaccaggttggttggaccagtccaaccgggacccggtggcataaccgggccagtttgatttattggaccggcatgcatttggcccggttagatccggcctttttggggtaaacatggcgacccaagcctgattttaaaacccatttcgcgtaaaaaaaaaatgctccaaaaatagcctggtacttgtgtaattgtgttattgaattattatttgtggacttgtgttattaactttaatactttaattgttattttggattttggagtatgaatgaacttttcttaatcaaataatgttagttatatacttatatataatagatacatatataattttaaattttttaatatataccatgaattattgacccaccggttggactattgatccactaccttaagc

SEQ ID NO: 64188 - DNA, 106 bp, Glycine max
ccgactagcgagcgcgtttacctgaaaacaaataccaacttgcttagcgagagggttacttaaaaacccgatcattacaaaggtctactatataaccgtttttcat

SEQ ID NO: 64189 - DNA, 77 bp, Glycine max
atgctttggttgtacgaaatcattacactaaataaaataatcaaagcttagatatgccttccgctaaagccgaatgc

SEQ ID NO: 64190 - DNA, 386 bp, Glycine max
actaactaagaaagtcttccatagccccccaaaaatgaagagcaccatcttctttgctctctttctcttttgtgccttcaccacctcatacctaccttcagccatcgctgatttcgtgctcgataatgaaggtaaccctcttgaaaatggtggcacatattatatcttgtcagacataacagcatttggtggaataagagcagccccaacgggaaatgaaagatgccctctcactgtggtgcaatctcgcaatgagctcgacaaagggattggaacaatcatctcgtccccatatcgaatccgttttatcgccgaaggccatcctttgagccttaagttcgattcatttgcagttataatgctgtgtgttggaattctaccgagtg

SEQ ID NO: 64191 - DNA, 367 bp, Glycine max
aagcagatgtctaatggtaggtttgtggctcctgaggacaaggcgagtttatggtcacaacttcattatgtttcgtgtaataatctggaaatgcaagaagcttatcttgtcaatctcgtaaatgtgttacgagaattgtatttgcacagtccaaaagaagctcgccaattgaaaaggaaagctctctctcgtattgaatggctgcaaaaagctgatgtgcctaccataacacagattgaagagtttcattcgatgcagaggatgatgaatgctcctgattcaaatgataatattgatctactgttgagcattgatttggtgggtttacaaggagcaagtaaaagctttttcaaaccaggattgtttt

SEQ ID NO: 64192 - DNA, 390 bp, Glycine max
  unsure (1)..(390): unsure at all n locations
attttctcaagagaaactttaagcagatgtctaatgttttgtgggtggctcctgaggacaaggcgagtttatggtcacaacttcattatgtttcgtgtaataatctggaaatgcaagaagcttatcttgtcaatctcgtaaatgtgttacgagaattgtatttgcacagtccagaggaagctcgccaattgagaaggaaagctctctctcgtattgaatggctgcaaaaagctgatgtgcctaccatagcacagattgaagagtttcattcgatgcagaggatgatgaatgctcctgattcaaatgataatattgatctactgttgagcattgatttgttgggtttacaaggagcangtaaagcttttcaaacaagattgtttttgatga

SEQ ID NO: 64193 - DNA, 283 bp, Glycine max
cagcctattacgccccttccttctacaacaaacacacactccctctcgagccgtgttatcttctcgagatgcaacacttgcaacgcctacaaacggcactaccagcaccatacctagagtaagcacctccatcgatagaacctgacgccctgctacaagcacatcatggataatatccaatgccagtcatgatcacaaatgatcataatgactaccacaaccacattctcatgaccatgcactgaagaatcaactacctcacgagcaactaacgaaaagacca

SEQ ID NO: 64194 - DNA, 373 bp, Glycine max
gaagtttttaaattttgtgaggttcattatgaagaaaagggacaagcttagttgtcaagttggaatcaacccatattctatggaatggactggtttggccaatagattactgagtaagggcaacgatattctgtgttgcgattatgctagttttgatggtttgattaccaagcaagttatgagcaagatggcagaaatgatcaacagtctttgtggtggtgatgaaaaactgatgcgtgaaaggacacacctgctgttggcttgttgttcaaggatggcaatttgtaagaaagatgtttggagagttgaatgtggaatcccttctggatttccgctcacagttatttgcaatagcatttttaatgagatgctc

SEQ ID NO: 64195 - DNA, 263 bp, Glycine max
aaaaaaaaatcattctaccaaaaacaccaacacactaacaggaagaaaatcaaaaacaagaaataatcaacaaaacaataagcaacaagcacaaagcaaaaccaaactgaaagaaacaaactaccaatcaacaacaactgaataaacaacaaaaagaaaaaccacacaaaaaaaaaaaggggggcccccccgccatcggctcttacacccccagaaaaattttcgcaccatcctttctgggctaacacaattttccttaaaag

SEQ ID NO: 64196 - DNA, 338 bp, Glycine max
tgccttgaaaggagtttttttattagaagggaagcacacagaaattaagcacaacaaaaaccaaaaccttccgggccacattgcaatacttacaaaagaaggaccatgctcatacaccttggtgttcatgcttctcaccagaagcattcaaagccaaaacctcatcacctaataatctacataaagtctaaatgttctttgaacaccttcaacatattagaaaaagtgacaattccaactaagctacaatcatcctcaataacccacaagtagttcactctatgtgcaatggcctggatcatcacagcaaccagggagctctttggatgacacactat

SEQ ID NO: 64197 - DNA, 292 bp, Glycine max
ctcgagctgtttcgggacgcactcgctccaaccggacaaggggtgcccaaagcttgattcattgatgcgtgctcacactatgatcactaggagctcttacaccaccatacattgctatggactcaaccataatcccatatcatgcatagggtctggaggcggtgtctacaagttctaccctaaaaggcaccgctgccatatgcaagccagagcttgctaggaacaacaaaactatgtcagctgggacggcattcaattcacataatcagcagacaagattgttgcacatgcc

SEQ ID NO: 64198 - DNA, 307 bp, Glycine max
ggccgctttgctggcgtaattacataggctacgtatatcctgacgagcatcagagaaatcgacgctgcaatcagtaagctgcgatcctgacgggactataactgtaccaagcagggtcagatgtgagctacaatatgcgctactatagtcatactctgaagagcatcgaagctgtgatctgttacctaaagaagcatgacgctacatatacctcacgctatatgttattcaacatcattgtacgtcgttcgatcaaaactacgctgtgatcacgtacccttgggaaactcacatcgctctgcgttat

SEQ ID NO: 64199 - DNA, 284 bp, Glycine max
tggaaatgcaagaagcttatcttgtcaatctcgtaaatgtgttacgagaactgtatttgcacagtccagaggaagctcgccaactgagaaggaaagctctctctcgtattgaatggctgcaaaaagctgatgtgcctaccatagcacagattgaagagttccattcgatgcagagaatgatgaatgctcctgattcaaatgataatattgatctactgttgaacattgattttgtggtttacaaggagcaggtaaaagcttttccaaataagatcgttttgatg

SEQ ID NO: 64200 - DNA, 377 bp, Glycine max
tggaaatgcttgaagcttatcttgtcaatctcgtaaatgtgttacgagaactgtatttgcacagtccagaggaagctcgccaactgagaaggaaagctctctctcgtattgaatggctgcaaaaagctgatgtgcctaccatagcacagattgaagagttccattcgatgcagagaatgatgaatgctcctgattcaaatgataatattgatctactgttgagcattgatttgttgggtttacaaggagcaggtaaagcttttccaaataagattgtttttgatgataagctcgtgttggctaacacacaggaattctttgatggaaattttccagtggattcttggttaccaatttttgtgaatggtctttatcct

SEQ ID NO: 64201 - DNA, 392 bp, Glycine max
atcaacatcactgctagcagtgatagtagaaacaccatcctgactattaaaatatccttcttaatttctggcttgaaatctgcagccatggttccctggtggctttgttttgttccaaggattgtatctttaggaatagaagctgaattatccgagggaagatattcattgtgtcctaatgttgagaccatcaaaatcatcctgggacaataattgtagttaaagtttgcttcccaatttcaataaattaagcttttaccattctatttcaagcaatcctatgtccatcttataataagattgtggttttaaatcacggttttttagatttatttgaggttaaaattttctgatttatataaccaaaagcttgaagcatgcttggcaatctg

SEQ ID NO: 64202 - DNA, 353 bp, Glycine max
ctcctttactgctatctgtatctctctctctctatgggggagcttgcttgaagcaatggccaaagccttggcatcagagctgctgttcctactagcagctgcaagtaatgtgcatgctgaacagcttgaacttgaaactgatatcaacctctctaccattaccctcaacctgttcactaccccacaccatcaactcttcacccaccagcaaatgctcatcacgcacactaacattaccagcaccaccaccattcagcaccagcaccatcaccagcacatgttgcttgaccttctcaccacaataacactgctacccctagccctgctaagcctactactcaccatcatcacca

SEQ ID NO: 64203 - DNA, 68 bp, Glycine max
gaattaaatcctgaccgataccgtcaggcgtaccagctatctctatatttagtcctattagagcttgg

SEQ ID NO: 64204 - DNA, 408 bp, Glycine max
aatcggtcggcactgatattaagaagcatttatacacctagaaatgagagcactactggtcgtatcttctacttggggctttaacttatacctacctttcggcaacggccaagacgtgcttgacgtggatggcgatccgattcggaacgggttcatataccacggtttggcggcaattagaagaaaccgtggccgaatagaacgagccgcacttgggaaagacacttggcctataactggaatggcaatctcccaatccaaactctaaggggttagaaattaagttggaatctgcatacccggcctattacataaacgaaaccctaattttgcaaataaagttcagttacccacagcagtgtgaaagaaagaatccttggtgggccatttctaaggatatatctgaag

SEQ ID NO: 64205 - DNA, 410 bp, Glycine max
  unsure (1)..(410): unsure at all n locations
ctcgagccgttccattctctctgtgtatttccctacctgtcccttcaagatgcagatcttcgtcaagaccctcaccggcaagaccatcacccttgaggtggaaagctctgacaccatcgacaacgtcaaggccaagatccaggacaaggaaggaatccccccggaccagcaacgtctcattttcgccggaaagcaacttgaggacggccgtacccttgctgactacaacattcagaaggagagtactcttcacctcgtcctccgtctccgtggtggcatgcagatcttcgttaagacactcaccggcaagaccataaccctagaggttgaaagctccgacaccatcgataacgtcaaggccaagatccaggacaaggagggtatccncccggaccagcaacgtctcatct

SEQ ID NO: 64206 - DNA, 404 bp, Glycine max
ctcgagccgtttcattctctctgcgtatttccctacctgtggcttcaagatgcagatcttcgtcaagaccctcaccggcaagaccatcacccttgaggtggaaagctctgacaccatcgacaacgtcaaggccaagatccaggacacggaaggaatccccccggaccagcaacgtctcattttcgccggaaagcaacttgaggacggccgtacccttgctgactacaacattcagaaggagagtactcttcacctcgtcctccgtctccgtggtggcatgcagatcttcgttaagacactcaccggcaagaccataaccctagaagttgaaagctccgacaccatcgataacgtcaaggccaagatccaagacaaggagggtatccccccggaccagcaacgtc

SEQ ID NO: 64207 - DNA, 366 bp, Glycine max
gatgctcattagatatagctatgaaaaattattgcgccaggctaaagctccaagtatgtttttacaatccttcaaaaattttgtttctttgtgtgtgtatggtgatgataacttaattagtgttcatgaatatgtcaagccttactttagtggttctaaattgaaaagctttctagctggtcataatatcaccattactgatggtattgacaaaactagtgcaactttgcaatttagaaagttagcagattgtgattttctcaagagaaactttaagcagatgtctaatgttttgtgggtggctcctgaggacaaggcgagtttatggtcacaacttcattatgtttcgtgtaataatctggaaat

SEQ ID NO: 64208 - DNA, 277 bp, Glycine max
tagctgactactaatataatttaccatagatcatatcgtataccggcaagcttcacatacaagaggtcaatctccaaaacatatgtccacggatcgttccaagccagaattgacgaaacaaccccaatcattaaccttttattctctactacatgaaatgccaatcaatttgtatactaattcaacttcggcatttgcctttacactgtttctcgcgttttttcagaaacatagataacctgattcaccacactataaacagtcctataagagacac

SEQ ID NO: 64209 - DNA, 214 bp, Glycine max
aactattaactcgcattcaccccttcctaaaccccgaaatccgctccagaaaaaaattaaagatattctcaacttaaaaaaaaaaaaaaaggggaaaaaaaaaaaaaaaaaaaaaaaaaaaaaaaaaaaaaaaaaaaaaaaaaaaaccaaaaaaaaaaaaaaaaaacaaacaaaaaaaaaaataaaaatatacccaaaaaataaaattattaaa

SEQ ID NO: 64210 - DNA, 136 bp, Glycine max
tttctttcgcttgttcgtttgtttaattcaataaaggaaattaggcatgaccctcttgttgagtatgctctgcctatttgaaaatttccacacctcttttaattgtcgtaatgatgtgtgaagtgtgtgttatttt

SEQ ID NO: 64211 - DNA, 58 bp, Glycine max
aaaaaaaaaataaaaaaaaaaaaaaaaaaaaaaaaaaaaaaaaaaaaaaaaaaaaaaa

SEQ ID NO: 64212 - DNA, 402 bp, Glycine max
  unsure (1)..(402): unsure at all n locations
gtgagaacaccattgaattttgatcctagcaagcagagcttttgtcaattttctattgaccttcttggtggaggaattttagtggacaaaactggagattggatcacacttatacaaaattctccaattagtaacttgttgagagttgctgcttggaagaaaggctgtttaatggttaagattgtgatgtctgggaatgcagcagtcaaaaggagtgattgggcctcattggtacaagtgtttctaacaaacagcaacagtacagagcattttgatgcatgtaagtggacaaaatcggaaccacattcctgggaattgatcttcccaatagaggtatgtggtcctaataatggttntgaaatgtggagttctgagtgggcaaatcaaacttcatggcatttg

SEQ ID NO: 64213 - DNA, 95 bp, Glycine max
cgactagtgatctcgtcttacttgggaattaattactgaccggtacctgcgggggtaccagctcatggtatagcgagtcgtattaaagcttgtca

SEQ ID NO: 64214 - DNA, 187 bp, Glycine max
aaaaaaatttaaaaaaaaaaaaaaaaaaaaaaaaaaaagaaaaaaaaaaaaaaaaaaaaaaaaaaaaaaaaaaaaaaaaaaaaaaaaaaaaaaaaaaaacaaaaaaaaaaaaaaaaaagaagaaaaaaaaaaataaaggggtgcccacagattagatactaggccatccagaatttaaaacagatac

SEQ ID NO: 64215 - DNA, 97 bp, Glycine max
ccgagtatcgagcctcagagacttcgaaattaagtgcggaacgaaacctgcaggactgcgggctatcacgctatagagagtcgccttatactcgagc

SEQ ID NO: 64216 - DNA, 418 bp, Glycine max
tcggtgaattccaattctacattttcaagaaataaggaggcgaaaatgttcatatatgaattggaattatttgttttcttattaggcctatcctgaagccaaaggaaatgagatcggaattcctcggggaattccaattccacattttcaagaaataaggaggcaaaaatgttcatatatgaattggaattatttgtttttttattaggcctatccttaatctatttgtaaagtgttcggaattctttgttttattcttttttctactattgtttttattattttttgtttattttatttatttttttaatttattttatattattttttttatgttttttatttttttttatttttttttttaaatttttctttattttttatttttttttttatttttattttttattatttattt

SEQ ID NO: 64217 - DNA, 197 bp, Glycine max
accccgcatactagacccagaaaaacaacaagggtcaaaggtaaatttgcaaaaaggacagaatctcgcatattataacatttaaagtaaccaggatattcaaaatcctctatttcgagaacatatccttcaacaatttcaccgctactttctatctctaatgtgcaaacagacagtccataacggatgaataatat

SEQ ID NO: 64218 - DNA, 273 bp, Glycine max
ctcttgcgctctacgtccggggcgattgtcacaactgcacgattattcctctatggatcctgcatgcgtaccacgttttcctacagtgtgtagtcctaaagctcggcgtactcatggcaatagcagcctaccgtgagacattgacacccaattacaatcacggacgcctactaaacggctgcctactgtgtgagacctcagatgcccaatgactgagctacctgacattcgttccgttgcggtcactgcaggctctgaagcgctgaaacatgc

SEQ ID NO: 64219 - DNA, 403 bp, Glycine max
cagctatgacgtatgactgcacgcgtcacgtcagctcgggcttcgcgagcttggatcgcgctctagcggtcgacgactagggagattgtcacacctgcgcattaattctctgtacgtatcctgaatgcgtaccacgatttcctacagagtgtagtccgaaagctcgaagtacccatggcaatagttagcaaatgcgagaactcgcacaccaatctaagatcatggacgccgactaacaacgctgcctactgcgaagagagaacagatgaccaagaactgaactacctgaaattcgtgcaattggggaccatgcaggctctgatgcgctgagacatgctgtactaatacgcctaggaacgcgcggatcctgcgaagccaggcgtctacaccgtggaggacgccg

SEQ ID NO: 64220 - DNA, 369 bp, Glycine max
caccattgaattttgattctagcaagcagagcttttgtcaattctctattgatcttcttggtggaggaattttagtggacaaaactggagattggatcacacttatacaaaattctccaattagtaacttgttgagagttgctgcttggaagaaaggctgtttaatggttaagattgtgatgtctgggaatgcagcagtcaaaaggagtgattgggcctcattggtacaagtgtttttaacaaacagcaacagtacagagcattttgatgcatgtaagtggaaaaaatcggaaccacattcctgggaattgatcttcccaatagaggtatgcggtcctaataatggttttgaaatgtggagttctgagt

SEQ ID NO: 64221 - DNA, 138 bp, Glycine max
caatttgcttttaccaagctaagggttaccttgaggcgcggggagactccctataaggactgcccattaagctcagcctatcaactcgaatagccgtattgtacctggacctagccaaggctaccacacagacacagg

SEQ ID NO: 64222 - DNA, 199 bp, Glycine max
tagtaatttactttcaccacgcgaggggcagccacggggggccggggagacccctcagaggaccgtctaatagttacagcacatgaactcatatgaccataagggaccttgacctaaccaagaacaccacccagggccacgtgtttgcactgaagcaactatgctagcgagatcatacacaagactaccataacctcta

SEQ ID NO: 64223 - DNA, 230 bp, Glycine max
cagggatctggagctttcaacccatcatagtcgtactacatcatctacagcccactgccatactttgtcattgctctatagtcatttttagtacctattaacacttttacctgaagcatcccaaaacacttaccctctacacatcaccatttgctatctttaatcaatttgcactaaagctttcaattctataggactcaattctgctacttctacataaatacctgctc

SEQ ID NO: 64224 - DNA, 219 bp, Glycine max
ttaatatacacctggtgataattaattgtttgttgttctgctctatagttgttcctagaaattctcaattccttatgttgttatgaatagtttcaagtgtaggaaattaattgatctacttagttgtaattagtaaatggtgcgtaatgatccatccctcatttctgcatctaactgtattaatggtaatgaattcaagcacattattgtttgtgataa

SEQ ID NO: 64225 - DNA, 398 bp, Glycine max
tctcggtgaagctcaattccacattttcaagaaataaggatgcaaaaatgtgcatatatgaattggaattatgtgttttcttattaggcctatcctgaagccaaaggaaatgagatcggaattcctcggggaattccaattccacattttcaagaaataaggaggcaaaaatgttcatatatgaattggaattattcggtttcttattatgcctatcctgaagccaaaggaaatgagatcggaattcctcggggaattccaattccacattttcaagaaataaggaggcaaaaatgttcatatatgaattggaattatttgttttcttattaggcctatcctgaagccaaaggaaatgagatccgaattcctctgaggtaccgagctcgaattcccta

SEQ ID NO: 64226 - DNA, 136 bp, Glycine max
cttaaatacttacacttccttaatggaatatgggggagcgggttaatatctgtatttctttactttaattgcttacctttgatactgcatactttgacattaacttcagaatgcttaacatgtgccctcttaacca

SEQ ID NO: 64227 - DNA, 190 bp, Glycine max
ctggatgtcacggcaattttataggtcctccatgaaagagagagagagagaggaaaacgaatccaagggagatatacaaccaccgtccaaaccaccatcaacaacgtacgtcttacgttgctacatggccactcgtgttatccaaccaggattcctaaggaactttcgttccaacaccgtcacaaaaccc

SEQ ID NO: 64228 - DNA, 368 bp, Glycine max
ctctaataaattttaactctaaaccatggctattaccatggtgcgactctacttcatgctctgcatcacaatcacacaccaaacgattatgtaacccctaacacactcaattaccaatacccattacaacagtacctaccagcttgtcaaatctacctacactcgctcagcctcacgcttacactgacaaactcatcataactccgaagtccctctcccaatttcttcaggaagcgactacacgctttccttaaacttacgctcacacacttctcaattcataaccctttacatggacacatgcagcgacctcctctgggatccatgcactaccttataatgcattctatgcgaaggcaaattcaacg

SEQ ID NO: 64229 - DNA, 259 bp, Glycine max
cacaaagcaactaggcatagtgtgcatgatagggacaacggcaagagctgtgtacagagatgaatggcctaagcgagagcatggatctacggaaggttactctgctcttgccattggatgcaagtgccagatacatgcccaatgacgcttgttgggacgaccagaaaaactaccttggctatggggtctcgggagttggcaacaatggccttccctttgcctgagtgagttctggattcaaatgatataagggtggccc

SEQ ID NO: 64230 - DNA, 160 bp, Glycine max
aataatttctctttcctttttccaatttctctgtcgtccttaggctccgtggtgtccctgtctagtttcggtactgtggaatcttgttaatgatgtgtacttcaattttattaatataatttcttcgttatgtaatagcaaattgttatttgtgtctgaa

SEQ ID NO: 64231 - DNA, 94 bp, Glycine max
ctcaaattcactttctgcggatattccttatacctggaggggtccaacaattgtgtacgaaaacgatacatggttgatatccacttggattcct

SEQ ID NO: 64232 - DNA, 213 bp, Glycine max
tgcataaatgactcgctgggctatatggaaaccatggcgggagcgggtgtagatgactaaccggcagccatatggatctacgcagaatgctgggatcacgcaagctctatcctgaccgcttaaggcgatgactatgccatgaacatcgtaccggacgaagagctgactgcaatgcataggttactgtcaactgacgagcataacctatattga

SEQ ID NO: 64233 - DNA, 409 bp, Glycine max
tccttaggattcaaaataattgtgtgcttttggaacaagagattggaagggacgtttttagaagtaaaaacctattcgtgttgtgtgttggggcgtggcacggcactctttgtctcaactcaactcaatgcaagcccttcgtccactcctttcccatttctgatccaattgggtggccattagtgtgttgactggatgagattgatggacatgcttctaacagttcaataatctttaattcgaaacatggaaacactgctgtcttgtctttttatctctggggctctatagcaacacacaacattttttctgaatttgattcaggtgataatgttaatacaaacttctgtccttagttcagttgaagctggtctatgttatgtatctgatgatgggaaagatgttctat

SEQ ID NO: 64234 - DNA, 232 bp, Glycine max
gtgagaaacatagaaaggaaataattgatctttgaaaatgcgaggaggaaagaaagctggagagtccatcaaggaaacagctgcaaacattggtgcttctgccaaggctggcatggagaaaaccaaggccactgtccaagagaaagcagaaagaatgacggcacgtgatccgatgcaaaaggagttggcaacccaaaagaaagaggcaaagatgaaccaagcagaacttgac

SEQ ID NO: 64235 - DNA, 77 bp, Glycine max
aaaaaaaaataaaaaaaaaaaaaaaaaaaaaaaaaaaaaggaataaaaaaaaaaaaaaaaaaaaaaaaaaaaaaaaa

SEQ ID NO: 64236 - DNA, 424 bp, Glycine max
  unsure (1)..(424): unsure at all n locations
agtttgttgagatagctagaagcaataagatgaaaatgaaagtgcttgttttgtttgttgctacagttttggtagcatatgaatgccatggctcagactaccagaagttccctctccaaatgaaaactgggtttggtgggcaatacagcaatgaggtggcatgtgccagttggaggcttggcgtggaagcaaacaacgtagtcaagtggcaaactgttcctgcagcttgcggagagtacatagctgactacgttctaggagaccaatatagatcagattccaaaacagttaaccaacaagcttatttctatgctaaatccctcaaactcaccaacaaagatgtctntgtcttggacgttgacgacactactctctctaatctccagtattttgctaaccatggatttggtgtggaaccaccaca

SEQ ID NO: 64237 - DNA, 340 bp, Glycine max
tccagccagaggtgaaatctctagcactggaaattgctaagctgattgataatgacgatggcgttgccgctgcggttgatgcatcccatcgacatctgcctgatgagctgccactgccaactgctattccagcggaggaggaccacttgaatcctttgcagtggctttttctccaacttggaaggttctgttgtgcaccttgtggaggtgtgtaggttctctgcattaattactttttcattttcattgattcattgcagaatacatgttgtacgttgcctagtgaatggctatggcatatccttcattgtcaagtctttagggtgaggactcgactaac

SEQ ID NO: 64238 - DNA, 337 bp, Glycine max
attgtcttgtacagaggaagatatatattctagatatgcgtgcacagagaatgatcaagaaaacaaaatatggaagcaaaaaactaaagaaagaagacaagtctcgttctattttttttttcgtttctggacagtttaaaaaaaggagaaaaagaaaattgtgcagctttccttgggttttgttttggagctaaacaaacgcaatggtatgctccaacattttccttcaactttatatatatgtttttcgtacgtggaaatgtctctccgaggtattttcatgtatacaattttgaaccacaggtaaataccacagcatatagggatttgtctttct

SEQ ID NO: 64239 - DNA, 394 bp, Glycine max
cttttgtgttagtgagagaaagttctctctgcttgtctcgcttagactcaaaaccctattgcgtgctttgcaatcgaccccgattatggccaacagtaacctccctcgaagaatcatcaaggaaacgcagcgtttgctcagtgagccaggtaagttgtaatttcgagcaattttttagtgctttagaagctcaagctaagttaaatgggtagtgtttgttgtgcctattattttttgttaaatttgtaaaataccttgagtgtttccttgtggactttcgcaagaattccgtccttggtgtgttttgtcgtactgagttaatttgtttgtgtcttgtgtgatgatctgatgatgcagcaccctgaaattagtgcgtccccttcggaagacaata

SEQ ID NO: 64240 - DNA, 319 bp, Glycine max
ctaatgcagtgaaaaggcctgttcgtattcgtgaattttgatcctaatgtgtttaacaagtaatgttctttctttgacttgattgccttagaattatcgatttatcaagggctccatttgttccctttagattaactttgttgtatgcttcagaatcaaagttcttaccaattttagtcatgatctttattgttgtgtatcatttacactttccaacaagaagagaatgtagtggcagatatgtcaaccaagctaaattgtctatggttacagtttactcatctaaaactaatttgttcagcaaaagaaaatttacaat

SEQ ID NO: 64241 - DNA, 362 bp, Glycine max
atagcgcagcctgcagcatgatatcatgacgtcaataggatgccaatcaccgtattgaggccatccatctggcgctgatgcataggctatccttatgctgcacgagcatcgagaagcatcggactaatattatacgagctaaagcccgataggattatagcgataccaatgcgatcattgtgcaagcttcattgtgtgctgatctgcctataccatgctgcataccctatacctatgcggcgatcgatgttaggatccatactctcagactactagatcactactgtagatgtgtcagttatcagtaggacgatctattcttgctgacctgactgcacaaaccttctagtcatcatactcga

SEQ ID NO: 64242 - DNA, 67 bp, Glycine max
  unsure (1)..(67): unsure at all n locations
aaacaataaangcgttacagggaaacaaagccccaacagaggaagaatacatggaaatcaaaagatg

SEQ ID NO: 64243 - DNA, 317 bp, Glycine max
tcggggaattccaattccacattttcaagaaataaggaggcaaagatggtcatatatgaattggaattatttgttttcttattaggcctatcctgaagccaaaggaaatgagatcggaattcctcggggaattccaattccacattttcaagaaataaggaggcaaaaatgttcatatatgaattggaattatttggtttcttattaggcctatcctgaagccaaaggaaatgagatcggaattcctcggggaattccaattccacattttcaagaaataaggaggcaaaaatgttcatatatgaattggaaattat

SEQ ID NO: 64244 - DNA, 379 bp, Glycine max
tcggggaattccaattccacattttcaagaaataaggaggcaaaaatgggcatatatgaattggaattatttgttttcttattaggcctatcctgaagccaaaggaaatgagatcggaattcctcggggaattccaattccacattttcaagaaataaggaggcaaaaatgttcatatatgaattggaattatttgttttcttattaggcctatcctgaagccaaaggaaatgagatcggaattcctcggggaattccaattccacattttcaagaaataaggaggcaaaaatgttcatatatgaattggaattatttggtttcttattaagcctatccctaaacccaaagaaattagaatcgaattcctcgggggtac

SEQ ID NO: 64245 - DNA, 379 bp, Glycine max
attgcaatcaaattagttcattctctttgcgcagttccctacctctcctttcaagatgcagatcttcgtcaagaccctcaccggaaagaccatcacccttgaggtggaaagctctgacaccatcgacaacgtcaaggccaagatccaggacaaggaaggaattcccccggatcagcaacgtctcatcttcgccggaaagcagctcgaggacggccgtaccctcgccgactacaacatccagaaggagtcaacccttcaccttgtccttcgtctccgtggtggcatgcagatcttcgtcaagactctcactggcaaaaccataaccctagaggtcgaaagctctgacaccattgacaacgtcaaggccaagatccaggac

SEQ ID NO: 64246 - DNA, 95 bp, Glycine max
attttaagcagttattgttagtcttttctggttcagcttgtgtcaaagttcgttgtttatttggcaatgaatatctagaatcttgattttgaaaa

SEQ ID NO: 64247 - DNA, 239 bp, Glycine max
ctcttggcatcttggggtgggtccctcttttaagctattggcttctcttaacacaattgggtgtgccaattgccatagtcaccaaccaattaacaaaggtatatatatcatcatatcatcaccaaatgagaaatattgggttggtttttcttgtggtgggggctacttttgtgggaggcagccacagctggtagcttttaccaagactttgaaataacgtgcggtggtgagcgtgccaa

SEQ ID NO: 64248 - DNA, 305 bp, Glycine max
cggctcgagcggctcgaggagagaagcttaattggtattgtcatgtttttcggatttgcatcggggcaaaggaaaaaatggaggcatccattatgttacctcttgaaaggacttcgtcaattgaaagagagcccaggactcttaatatcaaccaaattcaatccgctagggagttagcaatatatatattgaacacaaagaccatagaagaagcgtccagaattttcacggaggggttgcagccggtggttagtgctgctccaaagatgggttttgggttgagaagttgaagtggtggaattcca

SEQ ID NO: 64249 - DNA, 383 bp, Glycine max
gaggagggtactcataacgtagttgacattccacaatgccaagctcatcatcctaatattaatgctgctgtggagctgcttagacggggtattattgaaataggtgttgagccatatattgaagatgaaggtactggtgatttgcgatatgtccagatggctgtgacaacatataacacatctcttcctgcggctcaaagatataagaatggaaaggttcaggttacattggtttggaattcaagaaatgaaaactcacccggttcagacaaactgaatgcattagcaaattttctgtggaaaaatggtggtcaaaggagcaggcttcatttaattcactctgtgtgggccaactttcagacttctactaacaatataatttt

SEQ ID NO: 64250 - DNA, 201 bp, Glycine max
aaaagttagggtttgtaccttggcctttggcttgcaaatctgatgggattagtattcattcattcttaaggtcgccggcaaaaaaaatccccctgaaaagtccgaccgccaagctttccaaggggaccaagccgttgcccctgaatcttaaaccattaagcccctgatccaagaccactgggcccaccgcggcattccttt

SEQ ID NO: 64251 - DNA, 271 bp, Glycine max
  unsure (1)..(271): unsure at all n locations
tcagcatgttccatgcttttgaatttttcgctttgttaatgaaagnctaacgcacctgttctagttgccgcgttggcgagaaatccagtttccgatttgctccattgaggcatattcactattctgcaagggttgcctctactttctctttccatgcaactattcttattaattcgttcaattgtcgattgcacatttaggttgaacgaaccttacggcttgcactgcaccaccattatctcttaaaggacgcccgccctctaatacactc

SEQ ID NO: 64252 - DNA, 255 bp, Glycine max
ggacaaagccccctttatgctttgtttgttatgtaaggaatgactagataaacttggaataaaacttcctctcttttcgtggcccataatttgctttctgcaaatctgggtcttcttcattccaaaaaaaaaaaaaaaaaaaaaaaaaaaaaaaaaaaaaaaaaaaaaaaaaaaaaaaaaaaaaaaaaaaaaaaaaaaaaaaaaaaaaaaaaaaaaaaaaaaaaaaaaaaaaaaaaaacaaaaaaactagaaaaa

SEQ ID NO: 64253 - DNA, 379 bp, Glycine max
tcataacacaaagcacaaagcaaagctcatccttgagttaaaaaatggcagcagcttcttccatggctctctcatccccatccttggctggcaaggccgtgaagctgggcccatcagccccagaagtgggaagggtgagcatgaggaagaccgtcaccaagcaggtctcctcaggaagcccatggtacggcccagaccgagtcaagtacttgggcccattctctggcgagcccccgtcctacctaaccggtgagttcccaggcgactacggctgggacactgctgggctttccgcagacccagaaaccttcgccaagaaccgtgaactcgaagtgatccactccaggtgggccatgctcggagccttgggctgcgtctt

SEQ ID NO: 64254 - DNA, 129 bp, Glycine max
tcttaagccattttgatttaggggttcctgatcaattcgggggggtctgaattggacgtcctcatttcttgtaacgaagctaattgaattttttttattatatatagtaatctttttagtgtataaaaa

SEQ ID NO: 64255 - DNA, 452 bp, Glycine max
  unsure (1)..(452): unsure at all n locations
acaataccaggtgattntgtcattggtgttaaagttgacaaccataggcaatatgtgtgcatatgggctcaatcctggtatttcaggttctcgtcttttgggcaccattcctcagtccatttcacagcaaactgtttggaatcaaatggcaacagtgagaacaccattgaattttgattctagcaagcagagcttttgtcaattttctattgaccttctcggtggaggaattttagtggacaaaactggagattggatcacacttatacaaaattctccaattagtaacttgttgagagttgctgcttggaagaaaggctgtttaatggttaagattgtgatgtctgggaatgcagcagtcaaaaggagtgattgggcctcattggtacaagtgtttttaacaaacagcaacagtacagagcattttgatgcatgtaagtggacaaaatcgg

SEQ ID NO: 64256 - DNA, 62 bp, Glycine max
caagattattgtaaaaaaaaaagttgtgattcattcaataatgaaaatattagttatcttgc

SEQ ID NO: 64257 - DNA, 354 bp, Glycine max
aaaaaaaaaaaaaaaaaaaaaaaaaaaaaaaaaaaaaaaaaaaaaagagaaagggaaaaaaaaaaaaaaaaaaaaaaaaaaaaaaaaaaaaaaaaaaaaaaaaaaaaaaaaaaaaaaaaaaaaaaaaaaaaaaaaaaaaaaaaaaaaaaaaggggggccccccaattatgggccttgtaaccccggaaataaattcggacccggcccttgaggggtaccaattttccctaaaagggggccaattaaaaattggggaaaaaaagggcaaaaatttttccctgggaaaaattttattcccttaaaatttcccaaaaaaatacaacccgaaaccataaagttaaaacccggggggcc

SEQ ID NO: 64258 - DNA, 366 bp, Glycine max
aaaaaaaacaaaatttaaataaaaaaaaaataaaacacataaaaaaagtaaaggataaataggtaaataaaacaaaaacattaaaaataaaaaaaaacaaaataaaataaataaaaaaaatataatacaaatataaaaaaaaaacaaaaaataacccatcatataacatataatcaatataccaccaaaaaatcactaaccttaaaaaaaccactttacaaattttcttaaatatactccaatttaataactaacattacaaaaatctacactcaattcacaataaattaaaccccacaatactataaaaaaactattcatatcccaatcaaaaatatttaatcccctatcccttaaaaaacttac

SEQ ID NO: 64259 - DNA, 447 bp, Glycine max
gagaaacatggcttccttaagctccttagtgctgctccttgcaggggtaattctatcccctcaagttcttgcaaactatgagaatcccccagtgtacaagcctcccactgagaaaccaccagtttataagcccccagttgagaagcctcctgtttacaaacctccagttgaaaaccccccaatttataagcctccagtagagaagccaccagtgtacaagcccccagttgagaaacccccagtgtacaagcccccagttgaaaaaccaccagtgtacaagcccccagttgagaaaccaccagtgtacaagcccccagttgaaaaacccccagtttacaagcccccagttgaaaaacccccagtgtacaagcccccagttgaaaaaccaccagtgtacaagcccccagttgagaagcccccagtttacaagcccccagttgagaagcc

SEQ ID NO: 64260 - DNA, 366 bp, Glycine max
gatctttcttctctttttctctctctatcctcatggctgagaatttggacgacggcgagttctggctgccgcgcagttcctcgtcgacgacgacgtcgtcgtatttccgacaccctttgaagcaaagactccgcctttgtccgacgacgccgctttgctcccgtacgcgttctaccgtggattccaccgttggtggctccagcgagaccgagagcgacgaggatacagcacactcgttgccgagcttaactggcctcttatcttgctcctgtgttgcaccttgcaccgagtcttgggcgcggcttgggtctggatatcctatatcctatctgcgcggcagctgactatgacgtggatccatgaccc

SEQ ID NO: 64261 - DNA, 345 bp, Glycine max
ctcgagccgctcgagccgatccaagtaaccaaacacacccgccgagaatgatcccgcgctaattcgaagacggagacaaccaaacgccatagtagtgccgaggcggtgacgatggatcccatcatcctctccgacgaagaagacccttcaacgccgttcccgctccgtcccaagaaacgccgaaccgaaccggatccaaacccaaacccaaaccgcaccgtcttcgtcatcgacgatgacccaacccctcacaaatccgccacaccttctatcgttcccgagactccaatgtccgcgctattcgattccgacattgcaatcgtcaaatgcaccataccttccgat

SEQ ID NO: 64262 - DNA, 224 bp, Glycine max
ctcgagccgattcggctcgagatgcactctagtttattccgtggtcatcactcatcagtggtgctacaaattacttttggcttttatgtaatcacccttaccaaggtgaaactctaattcagatagtagatcaacacccaaagcacctaagaaacagtatccaagttttgtccttagtttatctcttttcaatcataatatattagggtaatatcttggtctta

SEQ ID NO: 64263 - DNA, 376 bp, Glycine max
gcaatgacagctatattagaatggttagccccgctcgctcgcaacgggcttagatggcaatccgagagaagctatgagcaacactgctttgtttccaggacaaatgtgttgctggtgcaaaccctttattttgcaagtcaagaaaaaacagaagcaataatcactgagcttcttgtgggtctgaattatgtgtggagatatgctagggagttcaataaaaaagctctgctagactgtggcagtggtggggtagatattggatattctcaactaaatggataagcaatttttatgaagctcatgtgaggttctcttttcaacaaaagtgcagtacctgacaagtgattgggatgaatcttttcaggcacaccaattc

SEQ ID NO: 64264 - DNA, 303 bp, Glycine max
caaatattttctttttttcctttatctctcttcattcagaaaacaatgtctcgctgctgatttgcagtcttcttgtgttgactggaaaatgatgtacccttgattcccataaagagctattgaaactattatattagctgaaaaaaaaaaaaaaaaaaaaaaaagaacaaaaaaaactaaagatactcaaacccaaaattaacttctgtcagggaccgattaaaactaccctacgaatattcgttgaaagctaccttggatatgttgcttacacctaatgacctttttgcgacccaaatcaca

SEQ ID NO: 64265 - DNA, 59 bp, Glycine max
aaaaaataaaaaaaaaaaaaaaaaagaaaaaaaaaaaaaaaaaaaaagaaaaaaaaaaa

SEQ ID NO: 64266 - DNA, 202 bp, Glycine max
tcggactctctcggcaaattccaattacacatatctaacaaataaggagccacaaatgttcatatatgaattgcaattattcgtcttcttattagaccctatcctgaagccaaaggaaatgacatcggaattcctcggggaattccaatttcacattttcaagacataaggaggcacaaatgttcatatatgaattgaaata

SEQ ID NO: 64267 - DNA, 169 bp, Glycine max
aaaaaataaaaattaaaaaaaaaaaaaaaaaaaaaaaaagagaaagagaaaaaaaaaaaaaaggtcaaaccaaaaaataaagacataaaaaactcattaattaattcctgaccgattcctgcaggcttaccaagctttccctttatcgagtgcgattacaactttacgc

SEQ ID NO: 64268 - DNA, 310 bp, Glycine max
tacgcctttattgttttacttaatggacaatggctgatttaacaatgactcaccacgggtagataattgtaatacttcaatatatctatggacgccacactagttacacagctacattgaatgtaaagtaacacttagcaaaacagcattcaagaccacttattaaacaaatatccgaacggtcgatgaatcgacagcagcttatatacctaatggtgtagcatctgaagcctttttcctgaaattcacagcaggactctttaactgggactatgatgcaaattatgatgcataaaatagccaagattat

SEQ ID NO: 64269 - DNA, 392 bp, Glycine max
gtccaaatacagtggtgctgaaacaacagctagcattgcatttattctttttgttttgggttttaccgtgacacggatcatttactacccattctggattcttaggagtacgagctatgaagttgttcacgccttgaaaatggacctggtggatggtccattatattattatgtgttcaattctcttctatatttcttgcaagttcttcatatatattggtgggttctgatgcttaggatgcttgttaaacaaatgcaagaaaaaggaaaagttagtgaagatatccgatctgattcagaagatgaagatgaacatatacatgatgaatgaacagataaacaagactggatacgatcccattgtgttcaaatggtatcatggttgtcttacc

SEQ ID NO: 64270 - DNA, 407 bp, Glycine max
ctccaatatattccattctctctgtgtatttccctacctctggcttcacgatgcagatcttcgtcaagaccctcaccggcaagaccatcacccttgaggtggaaagctctgacaccatcgacaacgtcaaggccaagatccaggacaaggaaggaatccccccggaccagcaacgtctcattttcgccggatagcaacttgaggacggccgtacccttgctgactacaacattcagaaagagagtactcttcacctcgtactccgtctccgtggtggcatgcagatcttcgttaagacactcaccggcaagaccataaccctacaggttgaaagctccgacaccatcgataacgtcaaggccaagatccaggacaaggaaggtattcccccggaccagcaacgtctc

SEQ ID NO: 64271 - DNA, 401 bp, Glycine max
cattctctctgtgtatttccctacctctcccttcaagatgcagatcttcgtcaagaccctcaccggcaagaccatcacccttgaggtggaaagctctgacaccatcgacaacgtcaaggccaagatccaggacaaggaaggaatccccccggaccagcaacgtctcattttcgccggaaagcaacttgaggacggccgtacccttgctgactacaacattcagaaggagagtactcttcacctcgtcctccgtctccgtggtggcatgcagatcttcgttaagacactcaccggcaagaccataaccctagaggttgaaagctccgacaccatcgataacgtcaaggccaagatccaggacaaggagggtatccccccggaccagcaacgtctcatcttcg

SEQ ID NO: 64272 - DNA, 378 bp, Glycine max
tcggggaattccaattccacattttcaagaaataaggaggcaaaaatgttcatatatgaattggaattatttgttttcttattaggcctatcctgaagccaaaggaaatgagatcggaattcctcggggaattccaattccacattttcaagaaataaggaggcaaaaatgttcatatatgaattggaattatttgttttcttattaagcctatcctgaagccaaaggaaatgagatcggaattcctcggggaattccaattccacattttcaagaaataaggaggcaaaaatgttcatatatgaattggaattatttggtttcttattaagcctatcctgaagccaaaggaaatgagatcggaattcctcgggggta

SEQ ID NO: 64273 - DNA, 433 bp, Glycine max
tgctagcatgcctgcacgtctactctagatgatcctctcggtgaattccaattccacattttcaagaaataacgaggcaaaaatgttcatatatgaattggaattatttggtttcttattaagcctatcctgaagccaaatgaaatgagatcggaattcctcggggaattccaattccacattttcaagaaataaggaagcctaaatgttcatatatgaattgcaattatttgctttcttattaagcctatcctgaagccaaaggaaatgagatcggaattcctcggggaattccaattccacattttcaagaaataaggacgcataaatgttcatatatgaattggaattatttggtttcttattaggcctatcctgaaaccaaaggaaatgagatcggaattccttcggggtaccgagctcgaattcccta

SEQ ID NO: 64274 - DNA, 324 bp, Glycine max
gtcaagaggtgctaccctcattgtatataggtttacatattggtggcagcattgggaatagcagatgttgccaattgaccttactgaagccaaagtgaaatgaaatggggatcccaaggggagtgccccaatgacaatgtggataaatatcgtggcaaaaggggtggacgcagattgggagctgttcggccccgtaataagcctctgccgggtacctgcggaatgccagctgtcctcatgggggaccttctataagatgggcagaataatggacgaagctgaaacctgtgtaaaagagttgtcacgcatacgattcctcacaag

SEQ ID NO: 64275 - DNA, 408 bp, Glycine max
agcttctatatcttcagattcagagaccaagtcaaatgatttacctcctcgtaatggttttgaacatatccacactgctccacctccacttcctcagagtccaagattgtcccagaagttatctggtttacaaaattcatcaaataatttagagactagttcaacaagtgctgatcacagcagtgaacagacaaatcttgattcttcagctgaacggagagtagaatctgaaaaagatatggcagatgtacctggatcaggtgacaatttgcgaaaggatgataaagttgttaataatgatgtttctgtggtttctaatacctctacaacatataagcacccaacccatttggtaactccatctgagatattctctaatgcttctttatcttctgatacttcccatac

SEQ ID NO: 64276 - DNA, 54 bp, Glycine max
attccatgttaaactggaagttgaggctgtcaaattttctaaattttttttgtc

SEQ ID NO: 64277 - DNA, 343 bp, Glycine max
  unsure (1)..(343): unsure at all n locations
ctcttttccttgtcctaaccctttttcctattaaaaagaaaaggaataaccaatacaatatacacaatggctttcgctttcaatttcaccaaaaccctaattctcttggtctacctctactgcctgcgtatgcaaacccaagctgnccccatgccctcgtacccgtcaagcccggctctacagcctctgcaagcccaccaacaatgctgggctgagctacaggaccattctgccagaagtgctgggcctgccccgattcaactattacaaggccctcaaagtggagatgctcgtgacccatatacaagtggagaaaaccctcgagttgataagcgtgctcctg

SEQ ID NO: 64278 - DNA, 302 bp, Glycine max
attgtggggcgcacacattggttggagaacttaagaggctgtctcttgacttttccagaaaaaccaacaccaagtttgattttcataaagagaatttttaaattcttttatcatagttcgttatttttattttttccaactgtagcatacgtatgtagttgagggaaatttagtttgctgttttttttttctttggtgctagagctaggtagataaagctgctagctgcattcaattggagttgtatacatgtataaaaaaattgtattcattttgatataaaatgaaatgattacgtcgtt

SEQ ID NO: 64279 - DNA, 406 bp, Glycine max
caaggcttggaggctcagtatttgcttgagagggttgagtgcgtcaaggcttggcaaactcaaccctctcactgctttgcttgagagggttgagtttgtcaagcatagcagtgaaggtgagccatgccaattgtgacgactcattggagacggaattccacgttgacgtgaaaaacgaaggctcaatggatgggacccacacccttctcatattctcgaaaccacccccgggaaaatggtcacacattaaacagtcggtgaccttgcacaagacccatgttcctgctggctccaagcatcgacttaatgttaatgttcattcctgcaaacacttgtccgttgtggaccagtttggggttcgaagaatcccaaccggtgaacatgaactccacattggcgatctcaa

SEQ ID NO: 64280 - DNA, 140 bp, Glycine max
ggattctttaaaacgggcggcgacttatgaacttggtgacccgggaattaaatcccggccggtacctggaaggcttccaacttttccttatatgaagcggattaaaagcttggccggaattcatgggtcataagttggtt

SEQ ID NO: 64281 - DNA, 223 bp, Glycine max
tcgatcctgggccccttagagcggcccttccacttatgacctcctcaactgggcaattaattacggaccgtaacctgcaggcgtacgagcttgtgctatatggagtgcaattagagctcgacatagccagggacatagccattacccgtcataaagtgtaatacactcacaatttcacacttcatactagccttaaacagcatacgtgaagtctgtggtgcct

SEQ ID NO: 64282 - DNA, 403 bp, Glycine max
  unsure (1)..(403): unsure at all n locations
gttgagggccaaacaagacaacctggatgccggtttcaagccttggggggctttttttacaaacccaattgcctttttttcatggatattccccattaggacttatggagaaacggacactttaattttccaaaaacccatttcactggtttttaattccaaaaggggtgtacaatgaaatgggttgatgggcaatggcgaaaatacggaaaggctttcttggaaaaatgggtattcggaagctacaatgggaggaactatgtctatctggataaagtatctctgttgttgggttttggtttgtggggtctgggcttcctctttagcttatggacaagccatgggcatggntatggagatcatgaatctaaagaagttccagcttgtgtatcaaattggaatg

SEQ ID NO: 64283 - DNA, 326 bp, Glycine max
cagaaaacggatcgtttcgttggactgatcagatgcagggctaggagcgtagcgtagagataacggcgccatttttaacggtaattggtagaaattccaacttggtctcttgcttactaaatataggacctaataacgattcgctcttagcacttgggtatgtctcgattctgatgtcacacagtcatgaattcatgtaaccgtgacacgaattggtgatatttaacactgctatgcatatatattctatggagtaaaatttgtctattatgaaggcaacattctgaagacgaattattgctggtacaaaaggcactgagacatat

SEQ ID NO: 64284 - DNA, 167 bp, Glycine max
gatcattatgtattggtttcttgtgttttggaacaatttgggaattgtggtttttatttttccttatctaagggaaaaaattgaaacgctgtccccgaacaattttgttcttgcacacttttcagaggattaatgagtagctattgctctacttaagtcgtgatttt

SEQ ID NO: 64285 - DNA, 320 bp, Glycine max
gaatttagatcaaaacttggaagctccttttgccatggccactagtgctgcacccaaacccaaccaatattatttcttcacattaatccttcatttctgtctcctccttatcatttccacatgcactactcaacaacgcttcaaacaagcccccaaattctacaacttccccagctgtcccaccattcgcctctcacccaccgacacgtgttccgacgaggcagtccacgtggccatgaccctggacgtaacctaccttcgtggcttcatgggcgccatcctctccgttcttcaacattgcttctgccccgaaaacatta

SEQ ID NO: 64286 - DNA, 364 bp, Glycine max
tcggggaattccaattccacattttcaagaaataaggaggcaaaaatgttgatatatgaattggaattatttgttttcttattaggcctatcctgaagccaaaggaaatgagatcggaattcctcggggaattccaattccacattttcaagaaataaggaggcaaaaatgttcatatatgaattggaattatttgttttcttattaggcctatcctgaagccaaaggaaatgagatcggaattcctcggggaattccaattccacattttcaagaaataaggaggcaaaaatgttcatatatgaattggaattatttgttttcttattaagcctatcctgaagccaaaagaaatgagatcgga

SEQ ID NO: 64287 - DNA, 109 bp, Glycine max
tgtcagttgattcatgcacagggtgttgcaagtgtgtttgttgtacatgtaaactataatgtagtttgttattttcctgcactgtgtatgaaatgtttgttttgccaaa

SEQ ID NO: 64288 - DNA, 220 bp, Glycine max
gttcttcttcggcttcgtttttgaggcagttaagtgcaaaaaaggagggttggaaagagagatactataatagtggtagtggtggctggggaatgagctttggagggtgtgaggcaagtgtgaaactaatggaagggtttaacatgcaggggaatgtggggaggaagagggtgatggtagtggttgatgactcataacatttcaagcatgcattgttgtg

SEQ ID NO: 64289 - DNA, 204 bp, Glycine max
tgaaaatcaagctgagttggaaattaaaaggccaagttgacaacaggtttaggttatcatttagcaaaacatttaaggtttgtatatgacctaacagaacaggacattagttaaagatgaaaacccatccaaacagggggttacacacgtacttctcttttcctatgtattgcggtgccttatataaaatttatcaattattga

SEQ ID NO: 64290 - DNA, 218 bp, Glycine max
ttggacttgaaccttgctctcaagcccaaggattggagccggcagggggtcgaccgcgggaggtaccgcccctgcgacttccgaccgcacctgcagcgccagactgaacgcggcgacgccgctcagcagccactggctgcccgccccttagggtgccactcggcagggaaccactgtcatcgacgccatcaacgcctaccctaagaaccaccaaggca

SEQ ID NO: 64291 - DNA, 172 bp, Glycine max
  unsure (1)..(172): unsure at all n locations
catgaagcnctgataatgcatgtagaacaaagctctgaatgggacgttgacaaccggaacgcgtatgatgtaccgatcctcgatgtcatacataacatctactactaaactctgcacttatgctcaatcaatttgcataccaaactcatctcattgagaagaactagatctc

SEQ ID NO: 64292 - DNA, 337 bp, Glycine max
ataatttcctttaccatatccaccttcccactaactcgaatgtgatccttacaagatgggatccccattacaattttatatcactctttcatgatcacactgataagtctctacactcaatattaacctactgactcctctccacatatatacccatacctctctcaatctcctacatttcatccatctcctgtaacactttttccactcatgaccactacaccatactcatctactttaacaaccccgaaaccttctcataaaatacacatacttactatgatacatcgtataacattactcgcttcacattctccaccctaaaatgactctctta

SEQ ID NO: 64293 - DNA, 405 bp, Glycine max
ggcaaatggattaagcaataaaatagtagccattaattttatgaaatatgcaaaaagatgttagttttgcaggtttgttgcctttgaaatgttaattaaatacactgagaagtttaatttcagaatatataaatagttttccaaaaaaaaaaaaaaaaaaaaaaaaaaaaaaaaaaaaaaaaaaaaaaaaaaaaaaaaaaaaaaaaaaaaaaaaaaaaaaaaaaaaaaaaaaaaaaaaaaaaaaaaaaaaaaaggggcggcccccaattagggactttgtaaacccggaattaaattcggaaccggtccttgaagggttacaatttttccttatagggagtcgttttaaactttggcgaaataatggcaatagctgttccctggggaaaattgttttccgttcaa

SEQ ID NO: 64294 - DNA, 292 bp, Glycine max
tcgttgaattccaactccacttaatcaagagatatggaggcttaaatgttgagatgtgaatcgcaattatttgagttctcatatagcctatcctgtaaccctaggatatgagatcggaattcctagtcgtattacaactccacatgatcaagaaatatggatgccatactgtccatatattaattggaatctatactttcacatattaagcctatcctgaagccgggcgaactgcgactagagtgcttggcgacccgggaattaaatacggacctgtaccttcaggcctacc

SEQ ID NO: 64295 - DNA, 372 bp, Glycine max
  unsure (1)..(372): unsure at all n locations
gaaggatctcaaaagtggttgcaaaatcctcataggaggtgatagcagatgggcaagaataatgctgttctcttaacactggtttgttgtatgtgttcataaacaggttagggtccatgtcaaaaccttattgtcccacttagtatgtattatattaaatgattgtaagagtttcagagttatgctgcccttttgcaatgtattcttttgatttacttaaacttgtttccaaaataggagtaataggatattctgttttctttctctttaaggtttatgtgttcaacacatgcaataaatctaaagggtatggtcattattggccttaacgaanaaaaaaaaaaaagggcgggccgccactagtgagctcgt

SEQ ID NO: 64296 - DNA, 397 bp, Glycine max
tagcatagtagctatgacatgcacatcgctcccttagctcggctcgcaattcgagtcgaggagagtatgaggcatgcgagaactcggagtaggaaattgatacagtatcaaggaccaaagcgcaaactctaaaggataaaaactgcggttacagctcatgactgtttcattatttaataacgatactgatactgaatccgcaagactactttcaacttacgaagctccgctggtaacgtcgcctcaataagaccgtctgtgaagtgactccattgtctcggactcaacatccatacccggcaggatacggagggtcaccagaagacaacaggcggctcatcgacggaaacgttggcagcaacaccttgaccatagcaataaccatgaccggcctcgt

SEQ ID NO: 64297 - DNA, 196 bp, Glycine max
ctgggattaattttttgctttccagtattgggaattgagaagtaggacaacgggatttgatttttcagataaagatgtactatgattctgtcatccaccaacaaattacagaatcatagtacatctttatctgaaatttgttggtggatgacattcaatctgtctaataataaaattctatactttcacatttaaa

SEQ ID NO: 64298 - DNA, 298 bp, Glycine max
aaaaaaaggaatcaaaagccatggaaaccaacacactccgaggccggcagacaccaaaagccaaaaggcaaatcttcatactctcaggtcaaagcaacatggccggtcgtggcacgggttatcagggacgctaacaaccgtaagcagtaggacggggtggctcctacggagagccgataccaggcattaattctgggactgtccgtcacagtgcaatgggttcccctctaacgagcccctttacgacgacagggactccagaaaggctagcggcgtcggcccaaacatggtcttcgcg

SEQ ID NO: 64299 - DNA, 430 bp, Glycine max
gagacatgctagcatgcctgcacgtctactctagagtgatcccctcggtgaattccaattccacattttcaagaaataaggaggcaaaaatgttggtatatgaattggaattatttgttttcttattaggcctatcctgaagccaaaggaaatgagatcggaattcctcggggaattccaattccacattttcaagaaataaggaggcaaaaatgttcatatatgaattggaattatttgttttcttattaggcctatcctgaagccaaaggaaatgagatcggaattcctcggggaattccaattccacattttcaagaaataacgaggcaaaaatgttcatatatgaattggaattatttgatttcttattaggcctatcctgaagccaaaggaaatgagatcggaattcctcggaggtaccgagctc

SEQ ID NO: 64300 - DNA, 261 bp, Glycine max
ctcaattcatttaaatagtgagaaaagtctttcacgagctggtgatcctaacaagtttggactgatatattaacgtagaattctgcctcatcatataactagtagcacacatccacttattgatgataatacgtacatgcctgattactatccaactcatctacatcgctctattcgatcttatcatagtcattaccgcaagaataccctttctcactcgactctagtcaaaactttgcacctgactctctaagtatacta

SEQ ID NO: 64301 - DNA, 210 bp, Glycine max
ctggatgaggcgtcaatgtgtcattctgatccttccgtccagcattctctaattgccttatatactaatccaccatcctccaaatagatcagcgcttttgcaaccattgattcgagtgattcatagtccactctgctcatctgctctctcttcttacagcctacgactcaggaccgccgccgactagtcgagctcgtccacccgctaatt

SEQ ID NO: 64302 - DNA, 441 bp, Glycine max
gtgaaagtgagaaaaaataaaaatcaaagagcataatgtcagggatcattcacaagattggggagacccttcatgtgggagggcacaagaaggaggaggagcataagggtgagcaccatgctggagaatacaaaggggagcaccatggtgaacacagtagtgagtacaaaggagagcatcatggtgaacacaaagctggagagtaccatggtgagcacaagccagagcacaaagaggggttcctagacaaagtcaaggacaagatccatggtgagggcggcgccgccgagggcgagaagaagaagaaggagaagaagaagaaggagcatggccatgagcatggccatgacagcagcagcagcagtgacagtgattaaactgctgcatcacctatatatttaaaaggtttatgggaccatagtagcgagggctgtgccttaa

SEQ ID NO: 64303 - DNA, 147 bp, Glycine max
ggaatttgtgttttcttttgcttgttcgtttgtttaattcagtaaaggaaattaggcatgaccctcttgttgagtatgctctgcctatttgaaaatttccacacctcttttaattatcgtaatgatgtgtgaagtgtgtgttatttt

SEQ ID NO: 64304 - DNA, 271 bp, Glycine max
agaaggtactttggcctatagtgatgattaaggaaggcgaggagcctgtttacttttgggatgcttgttcagattttctgcccttaatggacctatctggcacatttcgcacttatgattgaagatcgaaaactatctgtttagtctggtcagacgcttgcatctgcattcaatgttcaataccatagttggttcttagcgatagatcaagcataagcaactccttgattcttattaaatttgattctttccaatttgatcttcgaatttt

SEQ ID NO: 64305 - DNA, 286 bp, Glycine max
ataaataaccattgatgtgatttagttcccattatgtgctggtttccgtatattatgtgttgtttcttgattgtagttttcgtagattcttcgttccttgttgtaatgttcttctaggcaatgaattgcatatttcaaacattatccaaaacaccaaagtgtcacaatagctcgagccttctcttgcattttgatttcaatcaaggaactggctcgcattggtagattaaaaaaaaaaaaaataaaaaaaaaataaattaatataaactaaaataaaaaaaggagt

SEQ ID NO: 64306 - DNA, 380 bp, Glycine max
ggattccacctcttcccgtccttcgagacggttgttgtgctgcttgctcttcaggttgacctgggattgaatctaaagaatcttgatttacattttgagatatggagggagtttgtttctggacaaattgctaccagtatcggttttttgcattccaagaagtgcttgattggcgagttttcatccttggagattttcttcgggtttcctttgttaattgcacttagggttctgctccgctttaatgatcagcacagggtacgtgatgctacattcttctgatacaggtgctgcatcttaagtgcacttgtacaatgcattgctgacccaacattcagttaaaacttttggaagtgctgctttgtgttccacgggaacaa

SEQ ID NO: 64307 - DNA, 277 bp, Glycine max
ttccccagctagggttgatgatgatgctctagaggctggtgagattaattctcctgagctttcaagtgatgattagaatgatgagggtgacttggtaaaagaagctggttattggtctgaccaggtgattgatggcaacgaaccaattttaacttaaagcgatccagtggctgaacctgttgcgagttagactggtactttgacaagcactgtttcaaagagatgctcctttaaagtggacttaactgttccaaagcaagggacccctaatgccccc

SEQ ID NO: 64308 - DNA, 344 bp, Glycine max
aaaaaaaaaaaaaaaaaaaaaaaaaaaaaaaaaaaaaaaaagaaaaaaaaaaaaaaaaaaaaaaaaaaaaaaaaaaaaaaaaaaaaaaaaaaaaaaaaaaaaaaaaaaaaaaaaaaaaaaaaaaaaaaaaaaaaaaaaaataaaaaaaaaaataaaaaataatgggtcagccttgatatgaaaacctactaccctgtaaaaaaacaaacaacagttccagggtgttgaacatgattgaatataggggagatctctaaagattgtgaagaaaacagcgatagcatttttacaggtgaaaaagatgctcccgaaaaatttaaccaagattagttacctggaagatt

SEQ ID NO: 64309 - DNA, 394 bp, Glycine max
  unsure (1)..(394): unsure at all n locations
cttcgcttccgatttcattggtttatttatttatctgtggggcaattttttactacacaggttcgcaattctcaatctttgctttatttattgcctattcatgtagaattaattttctgccatcgtaacttttgaaactcccttttaatcggtttgaatgttaattgtttcttttttgaatttaacgacttggatggtgtaataatcgatgagatactcaaactgagatgtattaaattaaatgatttgttcttggtgtatttatgctgcttattatgatatgggctatgataatatatggctaataattgttctggtttgagctacagcacanattgtgagaggtcatcgtgacaaactccagcagttcttaacaataactggagccagcgag

SEQ ID NO: 64310 - DNA, 315 bp, Glycine max
ctctgcgctctttctctccgtctcctacaattcgagttgcggcttttgttgccctaatgtcaaccatgcctcgccgtagctcctgtggaagatctgcccatactgctcatcgggctgctcctacgaatgctccaattcaccatgctccttctacagccactgctcatattggtggtggatctatgctagttggcattggttcaaccatagctcaaggtatggcttgtggcaccatacgtgcagtggcactcttgtctgcacatgcagacatggctccgcttatcagctcacgtgcatcagttactacataggctg

SEQ ID NO: 64311 - DNA, 292 bp, Glycine max
agaaaaaccaattgcaaaaaaatatagaatagatgactatttgggcatgccttgtaatatgctggttcttggttttactacatatccagcggttgggtggtatagggttgaattaatgcgttcgtccttaagtagaatcgaatcattcttgtttctggatattcaatcctaattttcatttttggggtcaatttttattattggattcagaatcttttatttgcagctacttggtctagtttgaacgagtgtgatttgaaattgacaatctttgggatcgcttaactaataa

SEQ ID NO: 64312 - DNA, 222 bp, Glycine max
agaaagtcttccatagccccccaaaaatgaagagcaccatggtctgtgctctctttctcttttgtgccttcaccacctcatacctaccttcagccatcgctgatttcgtgctcgataatgaaggtaaccctcttgaaaatggtggcacatattatatcttgtcagacataacagcatttggtggaataagagcaagcccaacgggaaatgaaagatgccctc

SEQ ID NO: 64313 - DNA, 66 bp, Glycine max
aaaaaaaaaaaaaaaaaaaaaacaaaaaaaaaaaaagaaaaggaaaaaaaaaaaaaaaaaaaaaaa

SEQ ID NO: 64314 - DNA, 303 bp, Glycine max
atagctagaagcaataagatgaaaatgaaagtgcttgttttgtttgttgctacagttttggtagcatatgaatgccatggctcagactaccagaagttccctctccaaatgaaaactgggtttggtgggcaatacagcaatgaggtggcatgtgccagttggaggcttggcgtggaagcaaacaacgtagtcaagtggcaaactgttcctgcagcttgcggagagtacatagctgactacgttctaggagaccaatatagatcagattccaaaacagttaaccaacaagcttatttctatgct

SEQ ID NO: 64315 - DNA, 97 bp, Glycine max
ctcaaccactatagataaccatgagacacactccgaagattggtggtcacggtgtctttgggggttataatatattggtattggtggtgaacaattt

SEQ ID NO: 64316 - DNA, 185 bp, Glycine max
  unsure (1)..(185): unsure at all n locations
tcggngaattccaattccacattttcaagaaataaggaggcaaaaatgttgatatatgaattggaattatttgttttcttattaggcctatcctgaagccaaaggaaatgagatcggaattcctcggggaattccaatttcacattttcaagaaattaggggggcaaaatggtccttttttgaat

SEQ ID NO: 64317 - DNA, 161 bp, Glycine max
tatgacgtcgcctgccctcagcctcgaattcgggttcaggtttttttttttttttttttttttttttttggataatatttggctctgtacttctcattgatcgattatggccgaatgccaatcgaaattagtatatcaatgaagtcttctgtttacattaa

SEQ ID NO: 64318 - DNA, 258 bp, Glycine max
cccgtttgagtcccagaactgcctatacatagtcgcggcagagaccccaaccaagatggccgttatcaagtatctggggtaaaatgagactaaccctcacatcttacacacatacacactatcccaatccaactctcgaaccgtctcacctgcctactaactccactaactcacattaattccctttcgatcactatcccatgtccatcaatgccacctgtcgtacaatcttcattaatgaatcaggcaacacacctg

SEQ ID NO: 64319 - DNA, 216 bp, Glycine max
tcatcgtcatataaacaaattccaacttaattaaaaaaaaaaaaaaatacttcctcccactacaaaactaatcaacccaataactaatctcccaactcatccccctctaaacacaccagctttacctcataaccaatacattaaaacttaccataatcatctacatacattcttcctatatcaaatcctaatccactcacaatttcacacaacata

SEQ ID NO: 64320 - DNA, 299 bp, Glycine max
aatgccgcattacactctatctcataatgcacgccttgcattcctatttattcaacatctcactcatattcagccaccatattgaccacatgatcactatatcattctcttactcactgcactcaaacattccggtcctctactcgttatcatgtcaatcacagacttaattacggacctgtacctacacacgtaccaactctccatataacatgtcatcttacagcttggcgtagtcctggacctagctaaatgccgtgttaaattcgtatccccatacaattccacacaacatacaa

SEQ ID NO: 64321 - DNA, 166 bp, Glycine max
attccattctctctgtgtatttccctacctctcccttcaggatgcatatcttcgtcaagaccctcaccggcaagaccatcacccttgaggtggaaagctctgacaccatcgacaacgtcaaggccaagatccaggacagggaaggaatccccccgcaccagaaacg

SEQ ID NO: 64322 - DNA, 390 bp, Glycine max
tctcggtgaattccaattccacattttcaagaaataaggaggcaaaaatgtgcatatatgaattggaattatttgttttcttattaggcctatcctgaagccaaaggaaatgagatcggaattcctcggggaattccaattccacattttcaagaaataaggaggcaaaaatgttcatatatgaattggaattatttgttttcttattaggcctatcctgaagccaaaggaaatgagatcggaattcctcggggaattccaattccacattttcaagaaataaggaggcaaaaatgttcatatatgaattggaatcatttgttttcttattaggcctatcctgaagccaaaggaaatgagatcggaattcctcgggggtaccgagctcga

SEQ ID NO: 64323 - DNA, 87 bp, Glycine max
gaggccccaccaccctttgtgcctgcaatcttaactttgggggatcctgctgtggttgtagggaccaatgcctattttccaaccctt

SEQ ID NO: 64324 - DNA, 172 bp, Glycine max
gccaactctttgtattataatgaatgtggttgtcctaaggaggattgggttggatcattttcgttcattacactttatctcattattttcggcttgaagtcctattaattcaacatgtaactcatttttagccacaaaattgacaacatgatgagcataagattttcttaaa

SEQ ID NO: 64325 - DNA, 280 bp, Glycine max
  unsure (1)..(280): unsure at all n locations
tctgcttcgcgttgaccaaccagaagtgtaaggtttcattcaatgggcaacgcttaacttctaacaatatcttccgccgtccttaccgcggtcgttgaaaggccttgaactttaggcgttcaagttggtttcccgggcagaatcagaattggcaatctatgccaaaagtcttttccgggcttggctggcaaaagccgcaacgcttgtggccccaaatacaccgngaattaacctctgggagacagagtgctgattaaaattaaaggagccnaagggaaaa

SEQ ID NO: 64326 - DNA, 116 bp, Glycine max
atcaaaggtgcctagttcccaaacacccaaactttttttttgcggggaccaggccctaacctttttggaacttccctttcggaacacagatattctttccggcggttctttcggtt

SEQ ID NO: 64327 - DNA, 192 bp, Glycine max
caagaacgcaccatatatatataatatacttaaggggtgcatggttttcttctctacattggcagaatagctagcactccatgaaaaatgtgtatggttcgggcattgacttcctgtgaagggacttgattattattaatattcataatttattggtgttcaccttttggtggaataaatctatattttatc

SEQ ID NO: 64328 - DNA, 402 bp, Glycine max
aaaaaaaaaaaaaaaaaaaaaaaaaaaaaaaaaaaagaaaagaaaaaaaaaaaaaagaaaaaaaaaaaaaaaaaaaaaaaaaaaaaaaaaaaaaacccaaaaaaaaaaaaaaaaaaaaaaaaaaaaaaaaaaaaaaaaaaaaaaaaagggggccccccaatataggaccttttccccccggaataaaatccggacccgtcccctgaggggtcccaattttcccataagggagggcctttaaaaccttgggaaaaaaagggaaaaaccttttcccggggaaaaattttttccccttcaaattcccccaaaaaatacaacccggaacctaaaaggtaaaacccggggggcccaaaaggggggcccacccccaaataatggggtggccccaattgccccttttcc

SEQ ID NO: 64329 - DNA, 298 bp, Glycine max
caaaacactcataacacaaagcacaaagcaaagctcatccttgagttaaaaaatggcagcagcttcttccatggctctctcatccccatccttggctggcaaggccgtgaagctgggcccatcagccccagaagtgggaagggtgagcatgaggaagaccgtcaccaagcaagtctcctcaggaagcccatggtacggcccagaccgagtcaagtacttgggcccattctctggcgagcccccgtcctacctaaccggtgagttcccaggcgactacggctgggacactgctgggctt

SEQ ID NO: 64330 - DNA, 98 bp, Glycine max
ggctggccaaaccaacacgcttgtcaaatggaacctggtgaaggtggtccgcggcacttgacacttgacccctgattcctaactccttaatggcccct

SEQ ID NO: 64331 - DNA, 209 bp, Glycine max
agtaggagcagcagcacattcctcgggactcgtgaagttcggtactagcgtgtggggattttaaatcaagggcgacgcggtgtaaaaagtggccgtggtgtcgccgtggccgaagtgagaatgactctggaccgagcaacgtcggcggcgacttaccggaggaagccgtcttgggaggagagggagaacaaccggaggagagagagaag

SEQ ID NO: 64332 - DNA, 226 bp, Glycine max
ggaatcccgaggtgggtgtctctagaacagtgagaaattggcagttatggtggaccgaggaattccgatactactattcttattctactactagtcttccaaggaaggggatcactattcaaaacattcttaatttgtccctttaatggcactcttttttccttatctttgagagactggacacaaatttttactgtgttcacagcgacaattggtcccgggggca

SEQ ID NO: 64333 - DNA, 418 bp, Glycine max
tagctgacaagtctgttgtttaaagtgcatccggctaaactggaaagtttcaggtgttgcattctatataaccccttttatatgaagtagataggatttacttcttaaaataagcagaaatagtttagacaaaacacactaaaaaatcaaaaaaacttcttattattaaaacaagcgcttatttcaacaaataagtttaaacaaattggcccttaatcttaaaagaaaaaggggttataggatatagcttgtttttaagacccttaattctcagaagtttttttccatataaattgctgagaaaaactctgaaacactttttatttttgagtgtttttttcttctgaaaacttaataattataaattttattaaacatatattttgattaaaaagcatttttttcataaagacaacac

SEQ ID NO: 64334 - DNA, 123 bp, Glycine max
tgaaaggggaatggacttaattggcttcaaaggaaggaaatgccagggccaaaaggtggggctggaaccaaatttctttaaggggaaaggcaaaggtgttggccaaaaatgcccggttgaaat

SEQ ID NO: 64335 - DNA, 415 bp, Glycine max
agcagaatgaattgagtgacacaaagcacactgaagggggatacaacaacatggaaaatcagaacaacaacaacaacaactacttctacaacagcaaggatgctttcggtaagcaaaatgaattgagtgacacaaagtacactgaaggaggatacaactccatggagaatcagaacaacaacaaatattactacaacaacgacaatgctgccaatgggaagtacttctacaacaacaatgatgctgccaacaacaggtactacaaaaccaaagctgtcaacaacaattacaatgatgagaggcagggtttgagtgacacgaggtttatggagggtggaaaatacttctatgacgttaactctgagaagtacaaccatccaacacaatatggaggctcaaccagaggaatgaactc

SEQ ID NO: 64336 - DNA, 83 bp, Glycine max
atttgcttggtctcctaacaaggaacttcttattgcgatagttgtattatgtccattgtcatatagttgggtttgtttttggt

SEQ ID NO: 64337 - DNA, 99 bp, Glycine max
caatgcttagtgacactatagccaatacaagagtcagggttgcagatgccattagagaccccattgtttataccccttggttagatatatccttttctt

SEQ ID NO: 64338 - DNA, 196 bp, Glycine max
tgggttgaggctgctttggagatttttcttcccctttaagatgaacccgggcctaggtccaattttccaatgattcctaatccttttggaccaatccacttggggaagggctcttaatagaaggttaatagaattcttttcaaaattaaagaatcctttaaatcctaaggctgaaaaactaaaatcaaaggtttta

SEQ ID NO: 64339 - DNA, 308 bp, Glycine max
ggattccaattccacattttcaagaaataaggaggcataaatgttgatatatgaattggaattatttgttttctcattaggcctatcctgaagccaaaggaaatgagatcggaattcctcggggaattccaattccacattttcaagaaataaggaggcacaaatgttcatatatgaattggaattatttgttgtcttattatgcctatcctgaagccaaaagacatgatatcggaattactcggcgaattccaattccacattttcaagagataaggaggcaaaaatggccatatttgaataggaat

SEQ ID NO: 64340 - DNA, 110 bp, Glycine max
atgaaaagaaaggcttgttagtagtgctacgagttaggtgccatagaatgccaggctcagactaccataatttcctttcctaattaaatctgggataggtgtacaataca

SEQ ID NO: 64341 - DNA, 412 bp, Glycine max
gtagacatcttcatctgcatacaagtatttataaggtgcatgtaccaagcacttgctggaatactctcttgccagtgaccacctcatcgaatgctcatacaatttcttcaattactgctgctacttctactttaccagaggacactacaccgacagcgatgtcgccgtcgaccactgccgccccgcgtctactgagatctacgacttcactgatccgaatgccgcttactctgaatgtgtattagaatcggccaccgtaaataacgtaaacgctaaccgaaaccgctatcgtcaatgcgacctggacggcaacggcgtttttatctacgatggtccggtgcttacgcctgctacataaatggagcccgatgaaggttacactgtgtgcgagtagcgccgtcagaatgccatt

SEQ ID NO: 64342 - DNA, 152 bp, Glycine max
ggaaaaactgccaatagtcaaacgtccttatttgatttggagtgctctgcagtttttttaatcagggaatggtatttttatatgtaaatttgtgaaaataatatattaacttttgtttggatacatcatacatagattaatatttttgtttt

SEQ ID NO: 64343 - DNA, 416 bp, Glycine max
  unsure (1)..(416): unsure at all n locations
aaaggaactcctgtgtttcctaaggtaaagttctcatacatgtcttgcattattactttatattgttatttatcttatgctaaatttaattttaattcctctgtaattctcaatattcgagtttagtccttctattttttccatgattttaacttttagattttaaaaaattcacaattttagttcaatctttaattttacatgcatgtctatctttcttttactttttatattttaatcaaataaattattttttaattgtgaaatgttaatttcaacctcaccataatactaggtgatacatcatcatcaaccttaaacggtaaacatgcaaaattaaggattggaaaaaaattgtgaattttctaaaatttacgactaanattgcagaaaaaataagaaattaaaattataaa

SEQ ID NO: 64344 - DNA, 97 bp, Glycine max
ggtataaattgtgggaactggggagggtttatgttctatgttgttttgtactccaatcttttatgaatgtactggggaaacttgttttgtttgatta

SEQ ID NO: 64345 - DNA, 170 bp, Glycine max
catctgcatctgtttgtgttcgacagaacagggaccttaaagctttgggtcgagaatcctaaccctgggtaacaaccggttgaggtacgaaatcgcacaaaccgcttacatcaaattcatccttcactccctcaaacacccaaccttcggcgtcaacggggtcttgatcg

SEQ ID NO: 64346 - DNA, 186 bp, Glycine max
ttccattccttttttctgcttactttacgagagaaaggaaaggcaatagtgtatgtgtatataaacaaaagtttatagcataaataattgatcttggttaaaagcaaaatatattataaacaataaagaatgaaaatttttctggtgttgaaaaagagaacagaggaaatgagagaaagatcaacg

SEQ ID NO: 64347 - DNA, 388 bp, Glycine max
  unsure (1)..(388): unsure at all n locations
cacaatcacatgcacagtttttgcattgtattttggatcgttgctaaatgttctccaaagacgagttggagaggaagaaagacttttgaaagataaagttgcaaacaaagcagtgttccttcgtcgagtactatctaaactatctgccaagcttagaggcagatcgttggaattgactccaccagctccctcgtggtcatcatcatcgtcctttgttactccaaaattgattcttagagtactagtggttgcaagaattgcctttgcatggcaatactattcacaatgatatctgccaactaagtagttttacttgtactattgcatgtattttcatgtacaatacaaactttncactgcccgatgtgcctgcgtgcattcatgactt

SEQ ID NO: 64348 - DNA, 291 bp, Glycine max
ctgtacatcatatatttaccatcctcagaattttcgcagaagtgaaaaccctaactctagcaatcaatataacaacacaagcatacaaaaatgactcacaatgcgaattttttcaagggtaaatcatacaacaaattaattcttcacaattgtcactacaaagtttctgttactcgcaaacgaaatagattcctgaagccattcaatgatacaaaggatatggatactgatcgcgatgatagtaaattcattaaccactacaattatatcaaagcacctactctaacaact

SEQ ID NO: 64349 - DNA, 236 bp, Glycine max
atttctctatcattatgacaatgattcgttcaaacccacgacgcgtttttcacctttctcttcttctcctattcctctattcttcctcaaccgaatccctcagatttctaatccaatccaaccacaccaaatgcatcttccaggatatctacagcaattacatgaccgttatctagtaccaaattgttagccccaactaaagtcaacctctaccagatacccacacattcaccgtc

SEQ ID NO: 64350 - DNA, 337 bp, Glycine max
aaacaacactctggctctccctccaccgccccaggccatggcgggcgagcctctgctccgccccccgccccgcaggcgccgaggccaaagcggcctcggcctccgtcggggcgcaccaacctagcctcctgcgtggtggccaccatcttcctaatcttcatcatcatcgttatcctcattgtatactacaccgtcttcaaaccccaggaccccaaaatcgccgtcaacgccgtccagctcccctccttctccgtcgctaacggcaccgtcaacttcactttctcccagtacgcctccgttagaaaccctaaccgtgccgcgttcacccactacgaca

SEQ ID NO: 64351 - DNA, 263 bp, Glycine max
ctcaatcctatttaaaaaatataaaccgaaatttcaatcgcagatatattttatatttctactcacaagaatatacactaccattattaacaagcatctcataaaatctaactctcaataattacttcccaacaactcatactccaactatcttataacaatccttcctaaatctagcttctatcttaacttataaacacaataccataattatatataatcaatacttcactccttactttaccgtcactaaaaccaaaacc

SEQ ID NO: 64352 - DNA, 288 bp, Glycine max
  unsure (1)..(288): unsure at all n locations
ctcnagccactttagccgaaaaaaaaaaccctaaaaagtcgtcaaaattttcaaatatcatgaaaccaaaaaaccttcaaacaaacaaactcaagcggcatccaaaccactagtaatcttgtcaccccttcaattaattcatactatgtacctgcatgccaaccatattaacatatangatatcctttaaatcttggacaaaataccaacatatatgttacctatgcgaaatatttttcctatcaaatttctcaacaacatacacacctaagatataaattttaaaac

SEQ ID NO: 64353 - DNA, 388 bp, Glycine max
ctccaactccattgttggaatctggtttgcaaaaagacggagggttaattgtggaatattttggaaggatgtcttacgttgctcataacgttaatcagccccaagagaaagatttgttggagggaaatttttcctttgatattaaatctcgctctagattggaaaaagtttcctctacaaaagcacaatttgttagtggaaaaaccttcaaatatgatataattggtgctggttcacattcttcagatgattttcctgaaaaggaagatcaagaaaaacccaaaaagattgatgccagattgagacaaagaatagatcctcaatacaatgaggttcaggctcaaatggaaaccaaattgtttaaattgtctcttgatgatgttgaaac

SEQ ID NO: 64354 - DNA, 123 bp, Glycine max
cccaatactatttacttgatatatttcaccctttcaacttcgcagatttttcaaattttaagcgtccataaactttaaaacttccagtatcaggcctatccaaatgtctaaattgctattact

SEQ ID NO: 64355 - DNA, 372 bp, Glycine max
  unsure (1)..(372): unsure at all n locations
tcggggaattccaattccacattttcaagaaataaggaggcaaaaatgttcggtgtgaattggaattatttgttttcttattaggcctatcctgaagccaaaggaaatgagatcggaattcctcggggaattccaattccacattttcaagaaataaggaggcaaaaatgttcatatatgaattggaattatttgttttcttattaggcctatcctgaagccaaaggaaatgagatcggaattcctcggngaattccaattccacattttcaagaaataaggaggcaaaaatgttcatatatgaatnggaaattattgttttcttattangcctatcctgaagccaaaggaaatgagatcggaattcctcgg

SEQ ID NO: 64356 - DNA, 231 bp, Glycine max
ccgatatcctcttctattagctacacactggtactaatatcgtggcattattgctgtgtactgggctgtattataccggggtggactgataggtttaacttcatgctgtctaagatggttatcggcacatagattgaactcagatactaagccggtcgcgtagagattgatttatgatgagactaatgatttaaagaacttatattaattccagaagacttattgctcacc

SEQ ID NO: 64357 - DNA, 54 bp, Glycine max
aaaaaaaaaaaaaaaaaaaaaaaaaaaaaaaaaaaaaaaggggggaaaaaaaaa

SEQ ID NO: 64358 - DNA, 109 bp, Glycine max
tccaataacatcatctattaacaccacaccacttctacctccgctgtattttcaaaattaaatcggcacaaccaaccaccactcctcttccatctttaccctaattcca

SEQ ID NO: 64359 - DNA, 144 bp, Glycine max
cttactatcgagactaaatacccttctattaactaaacactggaactaataggcgtacaatatttctgtatactgagctgtattatactttggtttaatcatatgcattacttcatgctgtgtaaaattgttatccgcatataa

SEQ ID NO: 64360 - DNA, 105 bp, Glycine max
tccccccttccttaacctcggattccgcttcgagcatttccaagattcattttaagctaaccaaaccaaactcgacttggttgatcctctagttttgccaaacac

SEQ ID NO: 64361 - DNA, 135 bp, Glycine max
ctctcaagccatttctttctataatctaaaccaccctaataacactcacgttattttatcctcatgtaatagccaacacaatatgacacggctcttacaataccatacttgactttacaataccaatcattaaca

SEQ ID NO: 64362 - DNA, 134 bp, Glycine max
taggctttataataactcagtaaagccactttcttcgttgcgtgaaaaatagcttgatcccgtgctaccacgccagcagcatctgctttttttgttattccttttggttctggggtggaatctacgtataaaag

SEQ ID NO: 64363 - DNA, 60 bp, Glycine max
caagctgttgagaagctattaaagaaccaaagagaatcctacggtgtggatgctcagcct

SEQ ID NO: 64364 - DNA, 244 bp, Glycine max
ctccgatctacagatagatgagatgaattttagacgcactgatcgattgcaccattctcttctcgtctgctctcctctaaaggaatatctcgccacatattaaatgttgcaagctcactgaagatgaggatgcacgccttttggttttgactttattattctctattcaaaagtatcctattcgtctgttacttttacataatctgtactccatgttgaactattgaatattgataatgctcct

SEQ ID NO: 64365 - DNA, 257 bp, Glycine max
gagcttctgctacaatctagcgtctagtgatcctctaaacactccggacaacaggtccccaccgtacctgcgaacactccaacttttcctatcgcgattctgattatagctaaccctattcatacacataactacaccctgtctgaaaatgatgtccactcacaatttcacacaacatactatccggaaccatacagtgtcacccctggatatcctaatcagttatctaacttacacttatctacttacactcactg

SEQ ID NO: 64366 - DNA, 222 bp, Glycine max
tgaaatccaaaactggcggaaacggtctcactctcactctcacaaacgagacggccgtcgccgcatcggcactcgggaggtccgcggtgccggaggcgggtgcggccggcgaaggacttggccgagagccggcggctggtggccggcatcatggcgcggcggagcctccgatacttcttcctgctgccgctggtgtacatctcggggctgctgatgtgcgtg

SEQ ID NO: 64367 - DNA, 73 bp, Glycine max
cttccatgtatatttgagagtggctttgatttcagtgaatgtgggcccttttgtattaaaaaaaaaaaaaata

SEQ ID NO: 64368 - DNA, 296 bp, Glycine max
cctcgtgacacttcttacctccctcttctgattatcttctacttacatcatctgcactcatctctccctatcggaccctgacctaaccaactttaccacacaacaacaatcgtattcactactccaaccatagcacagtcatcatctacatgtctaccattaccacaaagaagaggcttcgacacttgcaaatttcacgcataacttgaactatcttatgtacaagaactcatactgaaaatcaccccattcatcatcgttactatctaacaatatcactgacatgactcctcaac

SEQ ID NO: 64369 - DNA, 238 bp, Glycine max
accaagttaatgttgcaatcgcattataataaccggccaaaggtgattgatagaaatttgcaagtttgaaaagaaacattgcatctcatccaccaaacaaggccgagcctgattaaaaggcaaggccaggagaaactggtgatccgggtgggacttgtggcgagaaccttgaaggttaacaacattttggtgaaagaaagaaccagggaaggaaaaccagggaagaaccaattgggac

SEQ ID NO: 64370 - DNA, 261 bp, Glycine max
gcatgcacgcgtacgctagctgatcctatcgctggaggccaacacgacattatgaagacaccacgaggcgtaaatgatcatagatgaagggcaaggatgaccgatcatataaggcctatacagaagccaacggatatgaaatcgtgcttccttggggaacttcaatagcacatttccaagagctaacgaggccctactgtccatatatgacttgccattatgatgacacctaatacgcctaatctagatccatacgcaatg

SEQ ID NO: 64371 - DNA, 347 bp, Glycine max
tatactgaagccaacggaaatgaaatcgtacttcactcgcgaactccaataccatattttcaagaactatcgagagcacaactgttcatatatgacttgccattatgagaacacctattacgcctattctaaatccaaacgcaatgagatcggaattactaaggaaattgcaattccacatttacaagcaatatggatgcaaaacttttcatatatgaattgatcacatatatgctcttattaatcctatactgaatccaaatgatatgagatcagaattactcgtagataccgagctcaaataatctatgtgagacatattaaattcgtaatcatatcatatctga

SEQ ID NO: 64372 - DNA, 91 bp, Glycine max
attttcaaatctgtatctagtcaccatcaatttagaggattctgaccaaatgctggtacattttgtagagattcaggataatgtagtattg

SEQ ID NO: 64373 - DNA, 263 bp, Glycine max
caatttcatactatctctacaccgtgaagagaaggctaattccggtctattcctacaccataaacctttactcttaatgccctattacttgaatcatcttcatttaccttaacaaccaccaacaacacgcaccttatggtaacccggaacccttatcaaattccataaattacattccgggcaaaaaccctaccttcttgttcgggttcaaaagaaccacctggtccttcaaaccccgaaaatagacctttttatgccaccca

SEQ ID NO: 64374 - DNA, 268 bp, Glycine max
cgctgctgactaaaacacttctgaacctttaagtgggtttgtggtgattaattccgaatggaggataatgactagggatcaaatggaggattcagatacacctaaagccaatgatatacctagacgtgcttgtcatgtctggtcatcttacacagaagctcctcaaactattagatactttcataatgccattcactgaaacatgagtactcttacttacacagcctatctgaacatctaccgttatgcattctgccagctccaggaa

SEQ ID NO: 64375 - DNA, 179 bp, Glycine max
cttctatcgagatcttcaactaggtatcttcacaacctctattttggggacttgggccacaatgtcttgcagcttggacactttcaatgttaagtataattgaactatactcacgtcaaaattctctccacttgcacaaattacatgcatgctgaaactacactaatagccaaatgcta

SEQ ID NO: 64376 - DNA, 193 bp, Glycine max
cttctaaatggtttggtgaaaattagaaaaatggtcccgcctggttcacactttgaagccaagggttcccaactattatattccgggattaaggttattggcttgcttggccaacggaccaaatttggggaccttgaacccttgaggaaattaaggaaggaattattgacccattgggatggacttttgacaa

SEQ ID NO: 64377 - DNA, 277 bp, Glycine max
gctaatgctgatcatataaccttagactatgatattatacatctggcacacggcattaatctatgctcatgatgctgatcagaaatcaaattgcttatcttgagatgctttacagattaccatactatatgttataagctgcatcatataagacatatgaatatgctaataactctgcacataatactaaacataatcctactcagtacaccatggactatctaagtaatgcatctaatgctactaattacactaaactcactgctccttataaaac

SEQ ID NO: 64378 - DNA, 340 bp, Glycine max
gtccttaaacactcatcagtcatcaccatggccaagctagtttgttccctttgttttctgcttttcagtggctgctgcttcgctttcagttccagagagcagcctcagcaaaacgagtgccagatccaaaaactcaatgccctcaaaccggataaccgtatagagtcagaaggagggctcattgagacatggaaccctaacaacaagccattccagtgtgccggtgttgccctctctcgctgcaccctcaaccgcaacgcccttcgtagaccttcctacaccaacggtccccaggaaatctacatccaacaaggtaaggggatttttggcatgatatacc

SEQ ID NO: 64379 - DNA, 263 bp, Glycine max
gtgttattttaaaaaaaaacacacacttcacacatcattacgacaattaaaagaggtgtggaaatgatgtgtgaagtgtgtgttattttaaaaaaaaacaagaagtgccgatggtcagagctgaaaaacgcgtgcaatcgacgtcatgagcacaattgtagagaagatactaaccgataaaaaaaaaggggcgaccaccaattagggagctattggacccgggaattatttccggaccggtacttgaaggcgtacaagttttc

SEQ ID NO: 64380 - DNA, 307 bp, Glycine max
  unsure (1)..(307): unsure at all n locations
ttggtccttanacactcatcagtcatcaccatggccaagctagtgctttccctttgttttctgcttttcagtggctgctgcttcgctttcagttccagagagcaggctcagcaaaacgagtgccagatccaaaaactcaatgccctcaaaccggataaccgtatagagtcagaaggagggctcattgagacatggaaccctaacaacaagccattccagtgtgccggtgttgccctctctcgctgcaccctcaaccgcaacgcccttcgtagaccttcctacaccaacggtccccaggaaatctaca

SEQ ID NO: 64381 - DNA, 128 bp, Glycine max
atttgttgactatttcaattgagataaaaaagtgtaatttagggtcccagctgatccaactctccctccccttattcttgcttgtatatactgagttttttttttctcgtaaaaattaaataattctt

SEQ ID NO: 64382 - DNA, 210 bp, Glycine max
ttagaattagaaacaaagaaccgaagaaagccaagaggacatcgatgacaacgcattacggaaagatagcggtatagtccattcaggaaacagctacaaacattgatgcttctgccaaggctggcatggacaagaccaaggccactgtccaagagaaggcagaaagaatgacagcacgtgatccggtgcaaaaggagttggcaacccaaa

SEQ ID NO: 64383 - DNA, 114 bp, Glycine max
ctcaaaactcttgtctttcattttgataattcccacactatggctgagcttcactaccaacaacaacaccaatacccttaccgataccctaatgatccatacgaacaacaaact

SEQ ID NO: 64384 - DNA, 385 bp, Glycine max
  unsure (1)..(385): unsure at all n locations
agcacngttcccattactgttgctgggacttgttttcctggctggagtttctgtctcatttggcattgcttactgggaaaaagagaaccccaaacacaacaagtgtctccagagttgcaatagcgagagagactcgtacaggaaccaagcatgccacgctcgttgcaacctccttaaggtggagaaagaagaatgtgaagaaggtgaaattccacgaccacgaccacgaccacaacacccggagagggaacctcagcaacccggtgagaaggaggaagacgaagatgagcaaccacgtccaatcccattcccacgcccacaacctcgtcaagaagaagagcacgagcagagagaggaacaggaatggcctcgcaaggaggaaaaa

SEQ ID NO: 64385 - DNA, 272 bp, Glycine max
  unsure (1)..(272): unsure at all n locations
ctttatcactatatccatannnctgccaaattatactaactcgctttctctatataaagaagagcaccctctaaaaaancatntnttnacttcctatcatctcacacttcatttttctgaaccataacctcaacctcccctcacattaacttttttcctatcttgaccctttctcttacctccttctcttccataccaccaccaccaccaccaaccaaccaccccttccatacaaaaaaatcccctcatcatcttataacaacaataacaaa

SEQ ID NO: 64386 - DNA, 92 bp, Glycine max
actaaaaaactcataaacccataaattaattccctacctttaccttcaaccataccatctttccctatagtgagtccaattatatcttctct

SEQ ID NO: 64387 - DNA, 363 bp, Glycine max
  unsure (1)..(363): unsure at all n locations
gtttnnatatattcatgaaaaagttgtattnaaattttcggaccggtatattttttacagcttggtcaactcaaatacntcctgcaacaactctgttggctgatgggtgcccatatttgtatgctatggtgcatgatagttcagtgtctacaataccacgtgattttgtcattggtgttaacttgacaaccataaacaatatgcgtgcatatggcctcaatcctgctatttcaggttctcgtcttttgggcaccattcctcagtccatttcacaccaaactgtttggaatcaaatggcaacagtgagaacaccatttaatctttattctaccacgcagagcttttctcaattctctattaatc

SEQ ID NO: 64388 - DNA, 256 bp, Glycine max
  unsure (1)..(256): unsure at all n locations
gtttanaaatattttttaaaaacccnnactnaaattcccgcgcccgcctttttataacacattggtcacctcaaaaacctcctncaacaattttttcctctaataatttcccatatttctatactattccccattatccttcacatactacaattccacttgattttatcattactcttaatcctacacaccattaacaatatatatccatatactctcaatccttctatttcatcttctcatcctttcttcacca

SEQ ID NO: 64389 - DNA, 327 bp, Glycine max
ccccattacatttttctgtatttcagggttaaaaattcacacgtttattttataatttggaaatcgtgacaccaaccctacaccaccatggcctccttacacaaattttttgcttttgccctcgctcttctcctccttgcctcccctctccttcaatttgctagatctcactcagactcctaagatttaatggaggctgctgaaaaatcaaatcatatcgacattgttaatcatcatgtccaaaacttttctgatggtaccttcccttctgctccagtaattcaaacaataagtgttttttcaaaaaatattgctatatttataaca

SEQ ID NO: 64390 - DNA, 313 bp, Glycine max
atttttaaaaaaactaacacaaatgggcaggtttaatgaaatcatctcacacaatcaacctaatctcacaactaaaaaattataccgtaatactctcaaattcccaacctcatcttctaaaaataaaaaatcaaatacgatcatatattaatcacaatccattataatcttattcaacctaacctaaagccaatctataatataactgaattcctaaagcaaatccacctccacattctcaaaataaaaagatccaaaaatattcatataataatagaaactatttctcatattataatacctatcctacaac

SEQ ID NO: 64391 - DNA, 264 bp, Glycine max
  unsure (1)..(264): unsure at all n locations
ctaacctcacacattcttccactccncttcgttctattatcgacaccaccactcttncaccccgctcgttttttataaacttactcgccaccacaatttcctaccattcntacantctcatactttatgtaacaactccaatcaccaaccactttttacccaccatttcttataccacccatttttaaatctaattcacctccatcatcacctcttccacttttttccccttttatccacaaacatatcttcacttcatcacca

SEQ ID NO: 64392 - DNA, 345 bp, Glycine max
  unsure (1)..(345): unsure at all n locations
gaaaaaaaaanaatattaataaaaaaaaaaaaaaaaaaaaaaaaagggcgggtttttaaaaaatatattgccaactaaaaaaaaaaaaaaaaaaaataaaataaaatcaaaataaaaaataaaaaaaaaaaaaaaataaaaaaaaaaaatctgccccccccctcctaatataattctttcccccccctaattatatcccacccctcccccttatacttccccatttttttttttataaaacctataaaaatctttctaaaaatattcaaaaattttttctttttaaaaaaattttttcccttaaaaatcccccaaaaataaatcccccaaaataaaatattaaaa

SEQ ID NO: 64393 - DNA, 162 bp, Glycine max
  unsure (1)..(162): unsure at all n locations
aaaatatcagcagcagcagcaaggaggttcccaaagccagaaaggaaagcaacaagaagaagaaaacgaangaagcaacatattgagtggcttcgcccctgaattcttgaaaagaacgttcggcgtgaacatgcaaatagtgagaaacctacaaggtgagaa

SEQ ID NO: 64394 - DNA, 218 bp, Glycine max
caccaccacactaacaccgggttgggggcatccgacgaatattgcacctacaatacccgacaattaattgcaggacccagactctgaagtcgtaccacctatcacctatagagagtttgcctcacagcttgtcgtacacacggtcataaatgttatctatgtgaaatatttattctttcacattttcccacaacttaccagccgcatgcataaactgt

SEQ ID NO: 64395 - DNA, 404 bp, Glycine max
attcttcgtttcttctctgaccattttcaattcttcacacaacaggcattcatataatcatatctgacaatttgtcacacactttaactttactacttacttgcccaattaactatttcatcgtcatatgctaaaaagctttcaactttaaagttaaccataaagaaaagctctctgtgaaagaaaaaagcaacaaccaaattgatcttcggttctgggttacaattgaaatgctgaagctctctgaggtcgttcatgacatataagcagttcagaatttatcgctacttgctaagcatttagtttagcactacccttctgcttctgccacaacgtaaaaagatggcagctctggtcaatgctgcaacaagtgagaaacttgcttgaactgactggatgaaaaa

SEQ ID NO: 64396 - DNA, 407 bp, Glycine max
caaagaattgatatttttttacatccacttttctatatggcaaagggtgaggcgttatgtttacggtacagaccccatttatttattacaacgcttgaagcaaagaaactcttggtgagcacctaccatggccgaacaaggagctttacttcccatgaccctgttgtttcctcatatggaaaaactcagttcatttattgacaactgagtgacgatatctatccttggtatggaggattgaatgtttttttggtacaatgaggatttaatgttaattgattatctttcacggacttcggttaccgcatattttagcttaatttcttatttaaatatttctatagatgatggtaaaaaaaatatattttttcactatttattatgacatataagtaaaataaaatata

SEQ ID NO: 64397 - DNA, 125 bp, Glycine max
ctggcggctatagaatcctttataacctgaacgacgagtgctacacttgtatgtttgtttacaccaacagaagaaggctcctacaagaggccatggctgatatcacagcaacagaggtatcaatc

SEQ ID NO: 64398 - DNA, 258 bp, Glycine max
cggctggctataaaatcctcttaaccagttgttgctgctgcgttgcacttcagtttacagctcccgaaaatggctcctccaagaggtcgtggtggttttggtggtggcggtgggttcaggggtggtggtaggggtgacagaggcagaggatggggcggtggaagaagtatgagagacaggggcacattcttcaaagcttgccgaaggtgcttacggggcttgggcgcgaaagccggcacgggtgttggccccaaatac

SEQ ID NO: 64399 - DNA, 123 bp, Glycine max
ccttaagtcagttctggcaaacatgcatggccctgctcttacttacactctggctatttgtaaatctgtacagctctttgaattatcgaaatgatctacgcactgtgagttgttttaaacgta

SEQ ID NO: 64400 - DNA, 361 bp, Glycine max
gttatttgtaatagcatttttaatgagatgctcattagatatgggtatgaaaaattactgcgccaggctaaagctccaagtatgtttttacaatccttcaaaaattttgtttctttgtgtgtgtatggtgatgataacttaattagtgctcatgaatatgtcaagccttactttagtggttctaaattgaaaagctttctagctggtcataatatcaccattactgatggtattgacaaaactagtgcaactttgcaatttagaaagttagcagattgtgattttctcaagagaaactttaagcagatgtctaatgttctgtgggtggcttctgaagacaaggcgagtttatggtcacaac

SEQ ID NO: 64401 - DNA, 146 bp, Glycine max
tcactcactgacttcctacaccactttcaccattttcactcaacttcttcataacgcttattttgaaaaatatccatatcatgatactccctttacatctcataactactctataatattctattcacttaactaaaacacattac

SEQ ID NO: 64402 - DNA, 96 bp, Glycine max
gccgactagtgagctggtttacccgagaatcaatgctggaccggtacatgaagcgtgacaagctttgattatagtgagtcgcattatagcttgcct

SEQ ID NO: 64403 - DNA, 404 bp, Glycine max
  unsure (1)..(404): unsure at all n locations
acacgttatctttactttttctcttcatcacagttcaatctttactcaaagagtatagaagatgaggaagaattgcaacttggagcttcgccttttccctccttccctctccgatcttcgccccatgatggaagcagaagttagtgagagaccccaacaacaggtcggccaccatcaacagcaacagcaaccacaaccacaacatccgctgaccattttctatgatggcaagatttcagtttcagatgtcacagagcttcaggtatatacatatatgctccttttgtttatcaactgntcttatttatttctttaatttttcatttaattaaaggaatctctttctctatattttttggaaaaaatataaaccttgaattggtgggggaaacacccgggaaaaa

SEQ ID NO: 64404 - DNA, 295 bp, Glycine max
acactttatcttttttttctcttttcatcacaattcaatctttgctcaaatagtatatatttaccaccaataattacaacttcaatcttctccttttcccttcttccctatcccatctttcccccatgattgaatcacatattagttatataccccaacatcatttcttccaccatcaacatcaacagcaaccacaaccacaacattctcttaccattttctatgatcgcaatatttcattttcatatctcacatatctttaactatatacatatattctccttttctttatcac

SEQ ID NO: 64405 - DNA, 161 bp, Glycine max
cggatcaaacgaaactttattccacacgatgaaagcctcctaataagcaactttcaaccaaaacctcacataaatctgcaccaactactcaacagtctaacaaaccccaccataattaatctcatacctcatctcatccccagattataaaataccattat

SEQ ID NO: 64406 - DNA, 149 bp, Glycine max
ggtctcagggctgcaacatgcatattctacacatgtgcttagtgttgagtgggtgattttttcatttattaatatcaaagttttattattgtagctcactctaccaaatatttggagcaaaaaaaatcaacaacaactgatagcccaac

SEQ ID NO: 64407 - DNA, 320 bp, Glycine max
aattcccagctcatgtggtgtttcagtcacaacacatctcttacaggcacacgatcatcatcatagtagatccaccatcccctccaccaccaccaccgctgtggacaaccttacgtatcaaaccacaatcataaacatctaaataccggccacctcctactacacactctcctcaaccctgatacaaattcctgaccggtaactttaattttaccaccatttcctatacccacttgtatcatatgatcgaccaaaccatcaacataactcattacatgtcaccaaattacattccgttacaatataacacaacttaccat

SEQ ID NO: 64408 - DNA, 224 bp, Glycine max
  unsure (1)..(224): unsure at all n locations
aattcccaaccttttttctgtttcttccacaccattaancatagcaccatttgatcattttcatagcgcatccaccacaccctccaccaccaccaccgctctgtccaaccttacgcatcataccccaatcatcaacaattaatcgcccaccacctactattccacacctcttataccccaatacaaattccacatcgttccttccactcctaccctcttttcct

SEQ ID NO: 64409 - DNA, 78 bp, Glycine max
aaaaaaaaaaaagattaaaaaaaaataaaaaaaaagaaaaaaagaaaaaaataaaaaaaaaaaaaaaaaaaaaaaaaa

SEQ ID NO: 64410 - DNA, 74 bp, Glycine max
aaaaaaaaaaaatatttactaaaaaataatattaaagacataatagaaaattataataagaaaaaaaagaataa

SEQ ID NO: 64411 - DNA, 397 bp, Glycine max
  unsure (1)..(397): unsure at all n locations
gaaagtcttccatagccccccaaaaatgaagagcacgatcttctgggctctctttctcttttgtgccttcaccacctcatacctaccttcagccatcgctgatttcgtgctcgataatgaaggtaaccctcttgaaaatggtggcacatattatatcttgtcagacataacagcatttggtggaataagagcagccccaacgggaaatgaaagatgccctctcactgtggtgcaatctcgcaatgagctcgacaaagggattggaacaatcatctcgtccccatatcgaatccgttttatcgccgaaggccatcctttgagccttaagttcgattcatttgcagttataatgctgtgtgttggaattcctaccgagtggtcntgtgtggaggatcta

SEQ ID NO: 64412 - DNA, 86 bp, Glycine max
aaaaaaaaaaaaataaaaaaaaaaaaaaaaaaaaaaaaaaaaagggaaaaaaaaaaaaaaaaaaaaaaaaaaaaaaagaaaaaaaa

SEQ ID NO: 64413 - DNA, 95 bp, Glycine max
caactagggagctccccaacccggaaataaattccgaaccggaacctgaaggcgtaccacctttccctatagaaagccgtataaaaacttggcgg

SEQ ID NO: 64414 - DNA, 185 bp, Glycine max
aaaaaaaaaaaaaaaaatcgcaaacgtgcaaaatttaaaacggccatccccaacaaaaaaaaaaaaaaaaaaatctccctccctcccactataaaactcatctccccctaaaaaaattcccaccccttccctcaaatctacccaccttcccctaatataactctcattaaatcttcccttatatc

SEQ ID NO: 64415 - DNA, 311 bp, Glycine max
aaaatttaaaaatttaaaaaaaaaaaaaaaaaaaagggaaaaggggaaaaaaaaaaaaaaaaaaaaaaaaaaaaaaaaaaaaaaaaaaaaaaaaaaaaaaaaaaaaaaaaaagggccgccccccaactagggaccccgtcaacccggaaataaattccgacccggaccctgcaggcgacccacctttccctataggaagtcgaataaaacctgggcgaaaaaatggaaaaacctgtttcctgtgaaaaattgttatcccttaacaatcccacacaaaatacaacccgaaaccataaagtgaaaaccctggg

SEQ ID NO: 64416 - DNA, 447 bp, Glycine max
atagcatttggaaatttggctgatgacaccatcaattttgaggcttttccccacaagctggtgcagtttggagagattcaggaaaaagttgtattgaaattttcacaagaggaatttcttacagcttggtcaactcaggtgcgtcctgcaacaactctgttggctgatgggtgtccatatttgtatgctatggtgcatgatagttcagtgtctacaataccaggtgattttgtcattggtgttaagttgacaaccataaacaatatgtgtgcatatgggctcaatcctggtatttcacgttctcgtcttttgggcaccattcctcagtctatttcacagcaaactgtttggaatcaaatggcaacagtgagaacaccattgaattttgattctagcaagcagagcttttgtcaattttctattgaccttctcggtggaggaatttta

SEQ ID NO: 64417 - DNA, 271 bp, Glycine max
aaaggccccagctcaattattaattctataccaccgcactactgacgggcatttgactaattgtcactgaagcctgagcttgctacacccgacaagaccatgactataccattcgctcccccctgcacaactagtgctaccctatcaccctcaaaccctggcaatcaccgcatacctgtccgtcttaatgccttcggaaagcaacatgctaccttatacatcatgctctaaaaatctcaggtctcactacgtccatacttacactctaccc

SEQ ID NO: 64418 - DNA, 134 bp, Glycine max
cgctactggagcgacattcaccaccctttttagattctaatccaggcgctattattccagagcacgaaaggtatttcgccaatctaaggtgtcaacgtaaaagccgcttttccttctcgcgcgaaatgtaagct

SEQ ID NO: 64419 - DNA, 231 bp, Glycine max
cggctcgagataaaaattttcttctttatatccatataaattgcatggagtccaggttatttattcataagaaccaattccattgtttaaaaatcaagaattcttaagtaatttaagttactccatactcatataaaattttcaaaatcagtgcacatactagtactgatcaaccattatatcttttattcagtttaaatctattagaattgaaaaactttaattttccta

SEQ ID NO: 64420 - DNA, 334 bp, Glycine max
  unsure (1)..(334): unsure at all n locations
cttaattattaacacttccttagttcaatatggggaagcccttcactctctctctttcttccctttgcttgctactcttgtcgagtgcatgctttgctattagctccagcaagctcaacgagtgccaactcaacaacctcaacgcgttggaacccgaccaccgcgttgagtccgaaggtggtttgattcaaacatggaactctcaacaccctgagctgaaatgcgccggtgtcactgtttccaaactcaccctcaaccgcaatggcctncacttgccatcttactcaccttatccccggatgatcatcatcgcccaaaggaaaagagcactttg

SEQ ID NO: 64421 - DNA, 352 bp, Glycine max
aacgtacgacataacatgttagaattttgccagcgatagggcagaaaccgggataaggtggtttagcaggcgggatacgatatgctaagagacactgacgtgcattacaaaattggataatgatgctggatgtagattaaccagactggattgtctatataccaggcgctatcatgtgatagctcgatagggcgcgcgccagttgatagtgtgaacgtaaatggagatttgtcttcgtgcgtgaattgcaagagctggattaatgaatatagctaaggctgtagagatgtgagttgcgtatagggcgctctttcgaagcttggctgagtgaactaatgcgctggtgagttcg

SEQ ID NO: 64422 - DNA, 109 bp, Glycine max
tgtaaatgtaggcttgttccggttttggagcttatgtgaaatgctataaagcacaaaaatgtatagtagtatcccattttttgtgtagaatagaactttttttttcgtc

SEQ ID NO: 64423 - DNA, 294 bp, Glycine max
acacaaaaaaaaaaaacaactgcaaaatgcaaaattttaaacgtgccccactccacaccttcatcctttaccactatctgatgcacagatctcttatgatatcaaaaaaaataaaatattattcacctcattatatatacatcctttaaaaaatcaatcaaaaacttttaacatctaaccttttcttttttattattccttcattactctctcaactctcaatataccctttttctctctttgacgccataaaccacccttcactcatttaaaaatcaaacccttgctatataa

SEQ ID NO: 64424 - DNA, 142 bp, Glycine max
  unsure (1)..(142): unsure at all n locations
cgatctataaaccttactaatgaaccctctctataaggcctctgccttctttcattcggngcctattcccattttcttactctaaaccctaaacaactctttctcttcttacttccctccatattctccctctcgtaaatcc

SEQ ID NO: 64425 - DNA, 71 bp, Glycine max
aaaaaaaaaaaaaaaaataaaaaaaaaaaaaaaaaaaaaaaaaaaaaaaaggaaaaaaaaaaaaaaaaaaa

SEQ ID NO: 64426 - DNA, 422 bp, Glycine max
agaagaagaagaaaagatggtgggaccagtgagacctcagtttgtgctggtttgttcttacattgttcagcttatatactcttttcatggttgttacgctatttattcttattattattctatgtttttttatttttttttttttatttttttttttttttttctatattattttatttttattttttttttttttatattttttattttttatatttatttttatttattatttttatatttttttaatattattttttctaattttttttttttgtttatatttattttatattattattttttttaatattattttttattatttttatttatttaatatttttttttcatttatttatattttatttttttatttatttttattttttattatattttttttatttaattttttttat

SEQ ID NO: 64427 - DNA, 238 bp, Glycine max
  unsure (1)..(238): unsure at all n locations
gggccgacccgacgcgaacgannaatnaagcacacaataaacttttatgatttactaatacacaccgaaacaagggattgtggcgataatagtatgatggaaccacatacataatctaatgtatactcattttatatgcatagagcaacccaaccatagctttttttttttcaattattaatatcctaaccctctttttaattgtggaataaaaatatctaatctaaataatacaaaa

SEQ ID NO: 64428 - DNA, 172 bp, Glycine max
ccgggtcgacaaaggtaccattaccttgatgtgcaaaacacaaatagtgcctgaaaatactagaaacgatacgcgccttcactatgatgatacaccatgtgtaatcatggacgatcgctattgcgctttgcacgcaagaccttgactatcacctggatacctgctcgatctt

SEQ ID NO: 64429 - DNA, 199 bp, Glycine max
aaatgtgggacctgcaccataagctcagtgacgccattcactccgtcctcagatcccactttctcactttcgtcaaatccctcaaacactacaactctccatccgaccttcccaacgccgccgtctccactgccgatgaccgctccttcggtttccgtttcgtcaaagactttagaccggtcgccttcaacaataacca

SEQ ID NO: 64430 - DNA, 363 bp, Glycine max
tgaggtacactacttttcgttggtgtcatgtgatcatataaagggctctcaccgtacaaaaaaaaaaaaaaaagggattgaaagtctatttgatagaccttctaatttatatatgtggaattattattagcatgtgttacatctaatttattaagcttgcctttggctattctcaactttttatgtctttttaaatttattattttttattcctactgtgtttacttttttaattcaatatcttttgttttttatttactactataaaataatttaaataaaatcaattttaagttaaaaaatatattattattattatattttattatattctactttatttttattctattttcttattat

SEQ ID NO: 64431 - DNA, 319 bp, Glycine max
tcttgaagagcattcactaagttgattgttgtgttgtagtgtgatttactagacttgcctgctgttacacaactggagaaggatgccaaatatgctctgttatatcagcttcttaagatttttcttacccagaggctggatgcatacttagactatcatgctgccaattccaccttgttgaaaagttatggtaagcactgtttatgaatgattatcatttatcaatagttacatatacagggttcttttctactttatgttactatctaaatgttttgatgttatgatgctcttttaggccttgtgcatgaagaatgca

SEQ ID NO: 64432 - DNA, 147 bp, Glycine max
gtacactactttacgtttttgacacgtgaccatagaatgggattgtgttggacatctcgtctttgaagattctaagatgacttctccctacattaaatgtacagacacattcttcataacaattagcatgagtgtcatctaaattat

SEQ ID NO: 64433 - DNA, 242 bp, Glycine max
gaatatgccaaatgctgttctttcaatgtggagatattttgttggagatctcgtctttgaagtttctaagatgacttctccctacattaaatgtacagtctctttcttcatagcatttggaaatttggctgatgacaccatcaattttgaggcttttccccacaagctggtgcagtttgaaaagattcaggaaaaagttgaattgaaattttcacagaggaatttcttacagcttggtcaac

SEQ ID NO: 64434 - DNA, 167 bp, Glycine max
ccattttcgtttccagaagatcttggggactccaggtacaggttttacaaaaacgggatccagttactactattttaaaatactacaattaaatgtttacactttctgttattatgcttaccataccaatcttgatttttttttttttctctttaaattattttata

SEQ ID NO: 64435 - DNA, 378 bp, Glycine max
tcggggaattccaattccacattttcaagaaataaggaggcaaaaatgttcatatatgaattggaattatttgttttcttattaggcctatcctgaagccaaaggaaatgagatcggaattcctcggggaattccaattccacattttcaagaaataaggaggcaaaaatgttcatatatgaattggaattatttgttttcttattaggcctatcctgaagccaaaggaaatgagatcggaattcctcggggaattccaattccacattttcaagaaataaggaggcaaaaatgttcatatatgaattggaattatttgttttcttattaggcctatcctgaagccaaaggaaatgagatcggaattcctcgggggta

SEQ ID NO: 64436 - DNA, 234 bp, Glycine max
gagaaacaaactagtacaatatgtaagctgaaatacaaatatattcataaattctgagatgcaaataaaattgaattacatcaacaacaataataataataataacatacttggatgaacatcaaagcatagacaacacctagaaggctagaagtcattctcccaggccaagcaagaaaaaaaaaaaaaaaaaaaaaaaaaaaaaaaaaaaaaaaaaaaaaaaaaaaactaaaa

SEQ ID NO: 64437 - DNA, 269 bp, Glycine max
agtctaggccttaaatttgttcgcgagcatgcgactttgagggtaggaacacgacactgtcacctacaaaacttacgctccaattctcttataaacagaattatggtgttatatataacactgagttacatcaatgtctatttaaagagtatgtacattcttacaataacatttaatactatttctattcatatatcttataccaatcattctatccttatactgttatcataaataaaatatatttactatttataccattttttatt

SEQ ID NO: 64438 - DNA, 288 bp, Glycine max
aattgtttttcttactagagttgatccttttccagtagctctactggctgttctttttggcgttaagaatgaaattctgagttccaacgccactaaccctatgctgacgcgacttcttgagaactgtaagagtctcaaatatctggttgatgagtgtccttttgcatttgtgaactagtatgtaatattttattcacttaaataaagcgcattactatgtgcaatgagtgtgtttaaattttaaaaaaaaacaaaaaaaataaaaaaaaaaaaaaaaaagaaaaattt

SEQ ID NO: 64439 - DNA, 248 bp, Glycine max
gacagatcagatattttacttcacccatttttattagtcttcgttacccaggccatttgtattctacagtatcttctattttgtgcttcgtgctctggaaataaataagataataaaataaaggaatgggtggatcttctattttcttcttgtacgtatttcaagtatgaactaagcttatgcttaactttctgtatggtgtaaagtatatggacattaggatataataattgtgctttattaagaaa

SEQ ID NO: 64440 - DNA, 344 bp, Glycine max
gacatatcagttactttttgttactcatttttattattcggtggggcccaatccatttggattctagagtatcttctattttgtgcctcttgctctggaaataaataagattattaaataaaggaatgggtggatcttctattttcttcttgtacactattttaaggattaactaaacttattcttaactttctgtattgtgtaaagcatattgaccttttgatattataaatgggccttatttagaaaataaataaaaaaaaagggccggcctccactaatgagctctgttcacctcgaattaatttccgaccctgtcctttaagccttccaacttttcctat

SEQ ID NO: 64441 - DNA, 358 bp, Glycine max
gaaaatttatttctcgttaaagattgtacttttttggtaatactctagctagcggtggcagcgaattgtttaggctcgcgccaccggcgataagcatcgaggggtagttacctgttaactacactgactaagtcactcgttcgaaaaagaacatatcctcttcgttggagtgttacatcactcccaaggggtccaagacccttgccctcattatgggggttatcgatggatcatcatctgatgggcacaccatgccatggacgcgatgcgtcaaaagaaacattccatccacagttataatactgcctgagggattctcaagcattgctaaaatacatggtctgagattacgcggcga

SEQ ID NO: 64442 - DNA, 376 bp, Glycine max
tcggggaattccaattccacattttcaagaaataaggaggcaaaaatgtgcatatatgaattggaattatttgttttcttattaggcctatcctgaagccaaaggaaatgagatcggaattcctcggggaattccaattccacattttcaagaaataaggaggcaaaaatgttcatatatgaattggaattatttgttttcttattaggcctatcctgaagccaaaggaaatgagatcggaattcctcggggaattccaattccacattttcaagaaataaggaggcaaaaatgttcatatatgaattggaattatttgttttcttattaggcctatcctgaagccaaaggaaatgagatcggaattcctcggggg

SEQ ID NO: 64443 - DNA, 107 bp, Glycine max
cagagcaagatgatcacgacatatatatataactagatcatgatgccacacttgctctgttcagcaataaattataatggaaattaataaattagttatgccttttc

SEQ ID NO: 64444 - DNA, 325 bp, Glycine max
aaagattttgctcaaaagagcaaagactatgccggtgatgctctgcacgagatctaatattatgcacattatgcaacgcacaggagcagagaagatgctagggatgctacgccacatgagcaaagactgctttgactacacctgttgtgccagctcaatggaaaagtaactaatttgcgacatctgcgattatactctttaggctgtttaatatgtacgtgggtggcccggatgaccacacagtatactggctgttcagagacaccaggctactctgcgacatatcataacaatgatagggttagattgaccacactctattgac

SEQ ID NO: 64445 - DNA, 390 bp, Glycine max
cacgcacgcttacctcagtcccggaactcggatcgagcgccaatcctttttgttttgccatctatagcatcgaactggggcccagttcttctgtgcctgacataacacacattgcaattttccattgcacgcacaggatcatacatgctgctgattcacctattaatatcgaccgactgcccatcattgatttgccacgctactgggatctttttaagcttctccaatctcgattgcactttattacaagcttttgcagaatcacacataggcaggttctccacgcaataaaccatctgattatagacatccatttactgtgaaacgttctaatactgtactggaatttacattcacaagccttaattgactatcttacatgcgctatta

SEQ ID NO: 64446 - DNA, 407 bp, Glycine max
gtgacatgcacccctcccgtacctcagcacggaattcgagctgaatgaacattacttaccctaatcaacacccaaaccccggttggtctaaatcgtcttggaaaatgactgatcctcaagacaagtccatgcttcactcttaaccacaaccagctgaaccaacaccaacctcatcatcctcaacgccttgtaacacaaccacctctctaccaccctaggctgcttgctcctaccaagattgaaccataacccagagcaaatatgcctccctggtactatccacaaacttaccccaaaccgtatgttgctaacattcacacacaactaaccgtatcgcctgatgatcatcatctcccaaggactaggagcacttaaagttgcaagctcatcataaactaaaacgcatg

SEQ ID NO: 64447 - DNA, 293 bp, Glycine max
gtgtctggtttttttttttttgtttccgttttttttttttattttctttttttacttttttttggccgaaaaaccgggggaaaaggggcacgcaaaaatccctgtttacccaaacccaaaactttttaaaccctggggcgggccccctggaagggaatcccctgcccctgaccctaaaacccatggggaaagggtgccccccttccattccaaaccaaagggggattttccctttgggggcccagttaataaccttggggggtccctttaaaccccccatgggaacggaaggg

SEQ ID NO: 64448 - DNA, 259 bp, Glycine max
atgttttcattatccactgctactccccagcatgggactggtattattcgcctggcgaccgggttttaatactattggagtcttttacatgccccgcgtacatcgatgtcaacagcctcatgcgcaaataccattcgaccctaaccataaccgaagactctgtattgaccttcactctcacatcatcatagggaattcctatatcttactccgtaaacaataatactacggtgtacaccgtttccaatcctaataaaat

SEQ ID NO: 64449 - DNA, 412 bp, Glycine max
  unsure (1)..(412): unsure at all n locations
atccttttgtgttaaataggtggatgggaaaattgactttcccccagggcacttcccgaagtgttaagagaatgcctctttctatagggggaggagctggtgcaaagaatgctattctcatgaatatgccaaatgctgttctttcaatgtggagatattttgttggagatctcgtctttgaagtttctaagatgacttctccctacattaaatgtacagtctctttcttcatagcatttggaaatttggctgatgataccatcaattttgaggcttttccccacaagctggtgcagtttggagagattcaggaaaaagttgtattgaaattttcacaagaggaatttcttacagcttggtcaactcangtgcgtnctgcaacaactctgttggctgatgggtgttcatattt

SEQ ID NO: 64450 - DNA, 194 bp, Glycine max
ctgccccgccccacctcgaatttgctcgtgctagaagacattctctaagtcgactgttggaattacaggggcgctgacttgaaggggaacaccctgtagaaggatgcccactatgctatgtctctgaaattttaagatcttctcacccacggctggcgctttctagactatcacgctgcaattcaaccttgttg

SEQ ID NO: 64451 - DNA, 322 bp, Glycine max
aaaaaaaaaattaaaaaaaaaaaaaaaaaaaaaaaaaaaagaaaaaaaaaaaaaaaaaaaaagaaaaaaaaaaaaaaaaaaaaaaaaaaaaaaaaaaaaaaaaaaaaaaaggaaaaaaaaaaaaaaaaaaaaaaaaaaaaaaaaaaaaaaaaaaaaaaaaaaaaaaaaaaggggggggccccaaattggaaaagggtgtccccggaaaaatatgcgagacccgggacttagggggttccaagtgttaaataggggggggcttaaaagagctgacaaaaaaggggccgaaatcatttcctgggaaaaaaggggtaccccaaaa

SEQ ID NO: 64452 - DNA, 182 bp, Glycine max
attaaaaaaaatttaaaatttaaaaacaaacaaaacacacagggaattttgtttataacaagcggggacttttgtcaattttctattgaccttctctataagaggaatattactggacaaaaactcgggattgtttcacacttattacaacactctgctatttaattactcgctgtgccctt

SEQ ID NO: 64453 - DNA, 271 bp, Glycine max
gtttggaatcaaatggcaacagtgagaacaccattgaattttgattctagcaagcagagcttttgtcaattttctattgaccttctcggtggaggaattttagtggacaaaactggagattggatcacacttatacaaaattctccaattagtaacttgttgagagttgctgcttggaagaaaggctgtttaatggttaagattgtgatgtctgggaatgcagcagtcaaaaggagtgattgggcctcattggtacaagtgtttttaaaca

SEQ ID NO: 64454 - DNA, 284 bp, Glycine max
aaaattcttccaccaagttatgggtttccttgtgttgcttcttttctccctcttaggtctctcttctagttccagcatatcaactcatcgttccatattggaccttgacctaaccaagtttaccacacagaaacaggtgtcttcactgttccaactatggaagagtgagcatggacgtgtctaccataaccacgaagaagaggcaaagagacttgagattttcaagaataacttgaactatatcagggacatgaatgcaaacagaaaatcaccccattctcatc

SEQ ID NO: 64455 - DNA, 367 bp, Glycine max
caagaaataaaaagagttctgactgaagttcttttgaaggttactgatgaattgtttgacgaaatcgcaaccagagttcttgctgaagatgatcttactgctgaagtgggccacaaggttgccacctcaaatcataaggcatcagcatctcctccctcagctacagttcctaaggcatctgcaaaagttttagttccaatcaaagagaaggtagaaaatgaagacaccagtgaaaactctaattccagctctcctggagatgttttaggtcttggaaattatgggtcctgatgctgatgatggagacaatgaaattgagagttccagtgtgccaacaccttgcaagagatgctgcctatcagtcagg

SEQ ID NO: 64456 - DNA, 390 bp, Glycine max
  unsure (1)..(390): unsure at all n locations
cagcggctcaagtaaccagttgctccaaaagtcagatgcaagggttcaaaatctgaaaccagagacaaggattcaaaaatctgacgatcgattgtttacacttgctgctattgggcttactatagcaattgtggttcttttgctgaagaagttcattaaatctacagaatatggtgctgttttcatggatgaatcttagatgaattatttgctcgtgttagcttcaatatcaagattcttagcccaggtatagtcgataggaaaatntagaacttctctgatattttatgatctttgaattgtacgaatggcttgtaattatgggtatataaatatatactacagctatgagttcgggaagcagggtctactatgtggaagtacaagtac

SEQ ID NO: 64457 - DNA, 117 bp, Glycine max
ccaagaccgtcaccagaagatctttgggcctggtgagggggcctttctgtagaggcaacccaaatgtgcctacaaaatgtaccacaattaaaaagctcctcgtgaatgaattggtct

SEQ ID NO: 64458 - DNA, 161 bp, Glycine max
gcggtttatgcataaatatatgaaggcatccctgtggatatatgaattggaagggctgcgcgtcgactattgagctcgtcttcccgccaattgatacgtgaccggtacctgctggcgtactcacctttccatattttcagtgatttcagagcgtgacaatg

SEQ ID NO: 64459 - DNA, 89 bp, Glycine max
tgaaaaattaaattgtgaaagaaaaataaatacaaaaggagacggacacaaacgcacgggagacagaaaataatggggcgcgctaacaa

SEQ ID NO: 64460 - DNA, 52 bp, Glycine max
aaaacttatttgatgcttttttattgaattttaacttttatgatttttgttg

SEQ ID NO: 64461 - DNA, 338 bp, Glycine max
gggttgtttttttgtgtttgtttttgttgtttcttttttttttcttttttttttttttctaacaaaaaatcatagccggttttttccccttccgtttaccctatggttgactgacatgggcgggtacatacgacttcctcctttacgaggaacgtgcaacggtccttataaaaacctaaggctgggggggggaaatttaaacggaaaaaccgggggggggtgggagataattcttgggcacataaaacggcgtggaaagaaacctatgcgggggtcattcatttttcataggcaccaggggggggggtggttcaaaccctatggggattgcccccccc

SEQ ID NO: 64462 - DNA, 362 bp, Glycine max
aaaaaattatatatctatataaatattacattaatacttatactcaaataattatattaaaagattttttaagcaatactaaagttaataaaaattctaatgtatactttaatgttaataggattttaatatacataaatttaaacagaaagtaatttatttaataagtgtaaagcataaattacatttattaaatgcaaaaaattatattaattacatttatagatactgcattaataatattaaatacattttatgaaaagtgataataaaataattaaggtttcatttaaaaatagcatttgactttttctaatttaaaattttttttatagacctatttttaaaacaacgcaattttt

SEQ ID NO: 64463 - DNA, 323 bp, Glycine max
gttccacaggctactgccagatcttctgaaaatgcggaatcctctgcatgatctggaatttgtgttttcttttgcttgttcgtttgtttaattcaataaaggaaattaggcatgaccctcttgttgagtatgctctgcctatttgaaaatttgcacacctcttttaattatcgtaatgatgtgtgaagtgtgtgttaattgaaaaaaaataaactaacatatctatacatctaattatcttaaaccttaaaatgataaaacttggaatatcaaaaaaaaaaaacggggcgccccccatttaggggcctttccaccccggaatt

SEQ ID NO: 64464 - DNA, 398 bp, Glycine max
attttgtacaacaaaatcgtagtcgaacatgtgactttcaggttattaacacgacactctaaccaattaaactaacggtccaattatcttataaaatgaataatgttattatatataacactaagtttttttaatgtatatttaatgtgtatgtaaatttaaataataaattttttgacaattagttttgatataactcatacgaattatttaatctgtatactttttttataaataaaaaatatttactattaaaaaaataatttattaatttttttttaaaaaaaacttacggatcacgtaatccttatgagttaactcatacggattatgtgattcatatgagtcatacggattatgtgatccgtaaaaataaaaaacacttaagaatatttttg

SEQ ID NO: 64465 - DNA, 233 bp, Glycine max
tgagaatttaacttttcaatgccactaatactatgtgtgaacggggtatgaaaagcatttaaccggaccacccttaacagtggtcgtgtaacaaaatgaaagggagcatatattgcactactccatgtgtatatatctataatatagagggtgggagcacaaatagaagcatttgtcacgataattgttattaatgtgacaaataatttagctaccgtactgctcttcttaat

SEQ ID NO: 64466 - DNA, 374 bp, Glycine max
  unsure (1)..(374): unsure at all n locations
cgccaattgagaaggaaagctctctctcgtattgaatggctgcaaaaagctgatgtgcctaccatagcacagattgaagagttccattcgatgcagaggatgatgaatgctcctgattcaaatgataatatcgatctactgttgagcattgatttgttgggtttacaaggagcaggtaaagcttttccaaacaagattgtttttgatgataagcttgtgttggctaacacacaggaattctttgatggaaattttccagtggattcttggttaccaatttttgtgaattgtctntatcctgtaagtcaattaccttcagacgctgtcgttgtaaatgttacatgtggtagtggacgtgtggtttacccaccact

SEQ ID NO: 64467 - DNA, 132 bp, Glycine max
tggaatagaagtagattcaactggaaaagaaatatgccctctcactggtgtgcaatcacccaatgagctcgataaggggattggactagtctttacatctccattacatgccctttttatcgccgaaagcta

SEQ ID NO: 64468 - DNA, 369 bp, Glycine max
cacccgtcctctagggtaaaatgaaagccagaaccgagaagcaacccctctttcccctacttctctcttccatagagattgtcctccaaagagaaaaaatggcggccgcgtgaagaaaatcaatacgcgcacaatttgcatcccttacctccaccgatgcgttctgcatctctcactttcagtcttactatccatcatactcatattattcgtgagctgccgactgttccacctccagcttgactactcgctcctccaccttctttcaccgatcttcctatccgacacgtgtaaacctctgcggttcctccgctccctccgtccgcttctccatcgaccgctccgtctatacgtaccggtccatctctg

SEQ ID NO: 64469 - DNA, 399 bp, Glycine max
tcggggaattccaattccacattttcaagaaataaggaggcaaaaatgttcatatatgaattggaattatttgttttcttattaggcctatcctgaagccaaaggaaatgagatcggaattcctcggggaattccaattccacattttcaagaaataaggaggcaaaaatgttcatatatgaattggaattatttgttttcttattaggcctatcctgaagccaaaggaaatgagatcggaattcctcggggaattccaattccacattgtcaagaaataaggacgcaaaaacgttcatatatgaattggaattatgtggtttcttattaagcctatcctgaaaccaaggaaatgagatcggaattcctcggggtaccgagctcgaattcctatagtga

SEQ ID NO: 64470 - DNA, 287 bp, Glycine max
  unsure (1)..(287): unsure at all n locations
ctgcaaagacaaaggtaccacatgttgaaacgactgggaatgatgatggagggatagatagtgattcacaggcaaggttagacaatttaagaaagatgtaatctttcctctatgatatcatggactctagttttactgggaaaattgatgctcatttgtaccatatagcataattgagaagttgtgcgaagatttgatgaactcatggttataaaatgatggttttcttcanttaactgtgatgcccacatgcaaaagctaccattgatttgtctgctactgcaaca

SEQ ID NO: 64471 - DNA, 398 bp, Glycine max
agcatttggaaatttggctgatgacaccatcaattttgaggcttttccccacaagctggtgcagtttggagagattcaggaaaaagttgtgttgaaattttcacaagaggaatttcttacagcttggtcaactcaggtgcgtcccgcaacgactctgttggctgatgggtgcccatatttgtatgctatggtgcatgatagttcagtgtctacaataccaggtgattttgtcattggtgttaagttgacaaccataaacaatatgtgtgcatatgggctcaatcctggtatttcaggttctcgtcttttgggcaccattcctcagtccatttcacagcaaacttgttggaatcaaatggcaacagtgagaacaccattgaattttgattctagcaagc

SEQ ID NO: 64472 - DNA, 104 bp, Glycine max
aaataaaaaaaataaaaaaaaaaaaaaaaaaaaaaaaaaaaaaaaaaaaaaaaaaaaaaaaaaaaaaaaaaaaaaaaaaaaaaaaaaaaaaaaaaaaaaaaaaa

SEQ ID NO: 64473 - DNA, 229 bp, Glycine max
ccagtgcatgaccttcaactggcttgtagtgctgttttactgctccccttatcattttcatttttttttttttaaacttctgcacacaagcacttgctttcctttttccaagcaatatatactatagtaactggaagaggtctatccgggtcagcataattttctagtatgtgatgagttaattttatagaacaacctagcctacaagttacaacaggctgtatttaat

SEQ ID NO: 64474 - DNA, 389 bp, Glycine max
gtcccagtcttgcaccttaaaaccatccaatccaattgaattctccagagagaagaagaaacttaatcgatcatcacttcacttcactaatacatcatggcagacgagacccagaacaagtatgagagctctgaggttgaggtccaggatcgtggtgtttttgactttctcggtaagaaaaaggatgaagaagacaagcctcatcctcaggaggaggtcatcgccaccgagtttcaaaaagtcactgtctcagaccaaggagagaacaagcacagcctcttagaaaagcttcaccgatctgacagcagctctagctcttcaagtgaggaggaaggagaaaatggaaagaaaaggaggaggaggagaaaggaaaggaagggcttgaagaa

SEQ ID NO: 64475 - DNA, 249 bp, Glycine max
aaaaaaaaaaaaaaaaaaaaaaaaaaaaaaaaaaaaaaaaaaaaaaaggaaaaaaaaaaaaaaaaaaaaaaaaaaaaaaaaaaaaaaaaaaaaaaaaaaaaaaaaaagggggggccgccgactagggagctcgccaacccgggaataaattccggaccggtccctggaggggtaccagctttcccaaaagggaggcgtataaaagctgggggaaataagggccaaagcggttaccgggggaaaaaggta

SEQ ID NO: 64476 - DNA, 213 bp, Glycine max
aaaaaaaaaaagaagaaaaaaaaaaaaaaaaaaaaaaaaaaaaaaggaaaaaaaacaaaaaaaaaaaaagaaaaaaaaaaaaaaaaaaaaaaaaaaaaggggggaaacaaaacaagagaacccagagaccagaaaaataaaatagggtgagaaacttgcaagcacaccatggcacacaaaagagagagactgatgccaacatagaccgaaaca

SEQ ID NO: 64477 - DNA, 381 bp, Glycine max
gacatattcatgaacactaattaagtggttctaaattgaaaagctttctagctggtcataatatcaccattactgatggtattgacaaaactagtgcaactttgcaatttagaaagttagcagattgtgattttctcaagagaaactttaagcagatgtctaatgttttgtgggtggctcctgaggacaaggcgagtttatggtcacaacttcattatgtttcgtgtaataatctggaaatgcaagaagcttatcttgtcaatctcgtaaatgtgttacgagaattgtatttgcacagtccagaggaagctcgccaattgagaaggaaagctctctctcgtattgaatggctgcaaaaagctgatgtgcctaccatagcac

SEQ ID NO: 64478 - DNA, 405 bp, Glycine max
tcggggaattccaattccacattttcaagaaataaggaggcaaaaatgttcatatatgaattggaattatttgctttcttattaggcctatcctgaagccaaaggaaatgagatcggaattcctcggggaattccaattccacattttcaagaaataaggaggcaaaaatgttcatatatgaattggaattatttgttttcttattaggcctatcctgaagccaaaggaaatgagatcggaattcctcggggaattccaattccacattttcaagaaataaggaggcaaaaatgttcatatatgaattggaattatttgctttcttattaggcctatcctgaagccaaaggaaatgagatcggaattcctcgggggtaccgaactcgaaattcctatagtgagtc

SEQ ID NO: 64479 - DNA, 316 bp, Glycine max
aaattcacaatttttggttaaacttcatctattgaccgtactacacccgcgagaactgcaccgaactcgtggaataaatcactgcaccgtcccactccgtaaaaccctaattcgttcacacctaaacccttttccttttgttgtttttcttcacttccaaggcttcactttctcagaattaaaacaaatgcttttcttttttctttttcttttttggtttcttattcagctggttatttattctccttcatcttcacgccctgttccttgtcgaggaaaagacccattccatcacccatgtatgatgtaacaaaca

SEQ ID NO: 64480 - DNA, 439 bp, Glycine max
gtgattttctcaagagaaactttaagcagatgtctaatgttttgtgggtggctcctgaggacaaggcgagtttatggtcacaacttcattatgtttcgtgtaataatctggaaatgcaagaagcttatcttgtcaatctcgtaaatgtgttacgagaattgtatttgcacagtccagaggaagctcgccaattgagaaggaaagctctctctcgtattgaatggctgcaaaaagctgatgtgcctaccatagcacagattgaagagttccattcgatgcagaggatgatgaatgctcctgattcaaatgataatattgatttactggtgagcattgatttgttgggtttacaaggaacaggtaaagcttttccaaacaaaattggttttgatgataagcctgtggtggctaacacacaagaattctttgatggaaaatt

SEQ ID NO: 64481 - DNA, 275 bp, Glycine max
ctaattttcaaataagtcgaactatctaaatataaaactctgaaccggttaaaatagtttaaaatcaattcagttcaatttttttaccaaactaatttttgcacacccctaaccaaaatcagttgggttggttatttaagctttatgtaaaaaaaaaaaaaaaaaaaaaaaggtgtgaatgaaaacattagatagcttaaagagaagtaaagcattacatatatttgaaatatgatgtcataactcataaggcataacatgctatggcttggttc

SEQ ID NO: 64482 - DNA, 389 bp, Glycine max
gatagttcagtgtctacaataccaggtgattttgtcattggtgttaagttgacaaccataaacaatatgtgtgcatatgggctcaatcctggtatttcagttctcgtcttttgggcaccattcctcagtctatttcacagcaaactgtttggaatcaaatggcaacagtgagaacaccattgaattttgatcctagcaagcaaagcttttgtcaattttctattgaccttcttggtggaggaattttagtggacaaaactggagattggatcacacttatacaaaattctccaattagtaacttgttgagagttgctgcttggaaaaaaagctgtttaatggttaagattgtgatgtctgggaatgcagcaatcaaaaagaatgattgg

SEQ ID NO: 64483 - DNA, 339 bp, Glycine max
aaatggcaacagtgagaacaccattgaattttgattctagcaagcagagcttttgtcaattttctattgaccttctcggtggaggaattttagtggacaaaactggagattggatcacacttatacaaaattctccaattagtaacttgttgagagttgctgcttggaagaaaggttgtttaatggtcaagattgtgatgtctgggaatgcagcagtcaaaaggagtgattgggcctcattggtacaagtgtttttaacaaacagcaacagtacagagcattttgatgcatgtaagtggacaaaatcagaaccacattcctggggaataatcttcccaa

SEQ ID NO: 64484 - DNA, 100 bp, Glycine max
caactacgtagtcgaggttggaatattttgtactgaatatcctcatgttttcttcaagtttagttaaaaaataatagatactcagcatgtcatttctctg

SEQ ID NO: 64485 - DNA, 251 bp, Glycine max
cggctcgagattaaaaatttcacttttatatccatgtaaattgcatggaggccatgtgtttatttataagaactaattctattgttaaaaaatcaatacatctttagtaaattaatgtaattcacaattatatataaaattcaaaattagtgtcattactataactgttcaatcaaaatatctatcaaaagttaaaagcgaatagaatggataatcttcaatttttctatggctaaaaattcaattatacc

SEQ ID NO: 64486 - DNA, 327 bp, Glycine max
tcggggaattccaattccacattttcaagaaataaggaggcaaaaatgttcatatatgaattggaattatttgttttcttattaggcctatcctgaagccaaaggaaatgagatcggaattcctcggggaattccaattccacattttcaagaaataaggaggcaaaaatgttcatatatgaattggaattatttgttttcttattaggcctatcctgaagccaaaggaaatgagatcggaattcctcggggaattccaattccacatcttcaagagataacgaggcacatatgttcatatatgaattgaaattatctgtttcttat

SEQ ID NO: 64487 - DNA, 328 bp, Glycine max
tcggggaattccaattccacattttcaagaaataaggaggcaaaaatgttcatatatgaattggaattatttgttttcttattaagcctatcctgaagccaaaggaaatgagatcggaattcctcggggaattccaattccacattttcaagaaataaggaggcaaaaatgttcatatatgaattggaattatttgttttcttattaggcctatcctgaagccaaaggaaatgagatcggaatttcctcggggaattccaattccacattttcaagaaataaggaagcaaaaatgttcatatatgaattggaattatttggtttctta

SEQ ID NO: 64488 - DNA, 366 bp, Glycine max
  unsure (1)..(366): unsure at all n locations
tttcctctctatgtactttgtctaaaaatataagaattaggaaatgctaaagaagcagaagaaacatatggagttcaacttgagaatatttagcaagttcgtgtagatgaaaactttaaatatttcaacttgagaaagaatgacagtccatttcccatgattgaaatgatgattttgtttgtactttgaccttatttttttaactggcttttgcttcttctgatattgggatttgggaatttgtcaccggtcctttttttctcattttgcccaacatgtatttgatcaagtatgtgggagaactgaattgaatagcaacacattactttttttatgtataaaaaaaaaaacctaacanaaaaaaga

SEQ ID NO: 64489 - DNA, 317 bp, Glycine max
gggtcagttggctgggcaaaccctgtaaaaaggctaagaacagattctgggaagagaagaccaagccatacatagggtttccctttctcgggatataaggatggtaaataatggacatattgctactagtctcaggaagaattttagtggccctttcatagagtttacccccatactgttaatatagaattaggcctttaaaaaagtgcattttacggctacctaaatggttaaaatgtaagttctccaatttttttgtttggatatcttcatcgtgcagttgcagctacagctattaaaacttttctttagatgat

SEQ ID NO: 64490 - DNA, 429 bp, Glycine max
tgactcgttcttcttcgtcgttatcttcttcttttgttgtttgtgtgtttgttttttctctcacctgaaaatgtcttgctgcggtggtaactgtggttgcggaagcgcctgcaagtgcggcaacggctgcggaggctgcaagatgtacccagacttgagctacaccgagtcaaccaccaccgagaccttggtcatgggagtggcaccagttaaggctcaattcgagagtgctgaaatgggtgttcccgctgagaacgatggctgcaaatgtggagctaactgcacctgcaacccctgcacttgcaagtgaggtgttggagagctaaagcttcaagcagaaatggcccttaggaaatatgataaaaactatatgtagtttcaaactttcaaaatattgtataaggaataatgtgcacttttgtggtttgg

SEQ ID NO: 64491 - DNA, 311 bp, Glycine max
  unsure (1)..(311): unsure at all n locations
ggggacttacgttagggaaacgccaccaaatgctgcgtcatctcatcaccatcatggaatctccaatgctcatgaaccaaatgctcgctccatataaaattaatgaagagtactgttcagtaggagaacaagacttcttggacttgattagcttaactctcagtgattggtgttagagtactgttgttgaggatggttaattttataattaagggctgggaattggggagttagtatatattcctaatcctaattatgtgcatctttaatttatggaataactntgttttttgttttaacttctgataaaa

SEQ ID NO: 64492 - DNA, 225 bp, Glycine max
aagaaataattgatctttgaaaatgcagggaggaaagaaagctggagagtccatcaaggaaacagctgcaaacattggtgcttctgccaaggctggcatggagaaaaccaaggccactgtccaggagaaggcagaaagaatgacggcacgtgatccgatgcaaaaggagttggcaacccagaggatagaggcaaagatgagccaggcagagctggacaagcaggc

SEQ ID NO: 64493 - DNA, 366 bp, Glycine max
tcggggaattccaattccacattttcaagaaataaggaggcaaaaatgttcatatatgaattggaattatttgctttcttattaggcctatcctgaagccaaaggaaatgagatcggaattcctcggggaattccaattccacattttcaagaaataaggaggcaaaaatgttcatatatgaattggaattatttgttttcttattaggcctatcctgaagccaaaggaaatgagatcggaattcctcggggaattccaattccacattttcaagaaataaggaggcaaaaatgttcatatatgaattggaattatttggtttcttattaggcctatcctgaagccaaaagaaatgagatcggaat

SEQ ID NO: 64494 - DNA, 150 bp, Glycine max
agactttgaggcatcttcgcttgcacttcgacaccagtacgctcacaaacgtggctgccctgcgtgagcaagcggcatacacactgttagacggcacctgcatactcagactcatcgtggcaccttccatgatcaacatctgctagcctg

SEQ ID NO: 64495 - DNA, 329 bp, Glycine max
tgatccttctttttctccttgaactcaaacatggcagatgaggtggttctgctagatttctggccaagtccatttgggatgagggtcaggattgcacttgctgaaaagggtatcaaatatgagtacaaagaagaggacttgaggaacaagagtcctcttctcctccaaatgaacccggttcacaagaagattccggttctcatccacaatggcaaacccatttgtgaatccctcattgctgttcagtacattgaggaggttcggaatgacagaaatcccttgttgccttctgacccttaccagatagctcaggctagattctgggctga

SEQ ID NO: 64496 - DNA, 238 bp, Glycine max
gcaagctctgcattgatgagacttccaacttcccgtagagagtcacatagcggagcctgcgctcttccactgctcagctcactgacgatgtacactaggatgagctgctgctgcgagcagaccatacctgactcaaagacagtaatacggccatccacagaatcactagataactcacgtacgaacatgtcatcagactgactgctatcggtcaaataccgtaaaaatggccggccgc

SEQ ID NO: 64497 - DNA, 328 bp, Glycine max
gaagatcttatcatcgattgcatggcttatgggattactctgttctgaagtacgatgggcctaacttcgtcgacgctggcgcatacatagcatggagtattgcttcacactgtgcctgagcatcatgagaaatatgaagatcatgtccactctatcggcgagaaagcaagtgccgatactcagaaacggtatgcagcgctggatgcgaaggactggatcacgatgcccatagtacctctgacagataaaacgaaggattgactcgcacactagattctgacaaacatgtggtgcagagctgacaggaacccaataatctcataatgca

SEQ ID NO: 64498 - DNA, 181 bp, Glycine max
tgaaggactaatttaaaataaactaagtatttggctacaacggggattaaaggctgaaactaaaatatagaccttgtgatacatagcatatgttgcgcttgacactgatgcatgtgcttcatgagacacatgaagatcatgtagactcttttgttgagaacgcaattatcgtaattaaaaa

SEQ ID NO: 64499 - DNA, 265 bp, Glycine max
tgaaggactaaattaaaataaactaagtattgaaatacaattgaaaataaaggctgaaactaaaatataaataatctgaaactaaaactatgttgtgttattagatgaccatggccgttattgatgccgatgaaaatgggttgggtcgtggccagttgagcacaactatagtactagcaggcatatggtctaattaatgaaaaggaaaccttgcaatatcgctccttggaagcttgggtctataggattgtgccaggttttaatg

SEQ ID NO: 64500 - DNA, 257 bp, Glycine max
tgtagtaactagtaactctcactagagctgcaggaagttcaaaatgctgggatactctgattttatttgaaactagactcactaaggactagaaccttctaaactataacttataaccagtctagcacgatccatcttgacaactctaaaaacagagtacaggattacagtgtcatagtacgctgacgcacacaactttaagtataccattatcggaaagtccttcgcttccacggtttctctgataagaaactaga

SEQ ID NO: 64501 - DNA, 232 bp, Glycine max
catgcagcgatgctgctcataaccgcaatatggaatcctcggggatcgaagacaggaagccggagattctgataagcgcaggaggttgattatggtcgtatgtgccggtgcctgcaaagtcgtatgcgactgcgaatactgacacatatccttccgcccgcctaattcgataagcatgctgcgcacaatctgtgacttaactgacattaattgctctgcgctaactgccagc

SEQ ID NO: 64502 - DNA, 316 bp, Glycine max
gcaaaaatgaagctccttatggacttggaaagagaacctacgggatcaagaaattcaacacaacatgagcagaaactacagccgtaaaagagcattaagtgaatcgagcgttatgtggtgccagagccttgcttctgatctcgtgctggtcttggtcgtgggactacgagcagtcactgttgattgttagaagaaaactgattttagtagtgaagtgaaatactcaatgtactatcctgtgtggtttccccttctgtatttcatcacatgttggttgtagcttacagggaatatagctttgtactctcacaagctt

SEQ ID NO: 64503 - DNA, 158 bp, Glycine max
ctcgaacgatgacagttctagattgtctgtacgaggaagttttgatgcatgtattgatgatcaaaatcacacgatgcatgctgaagcaatatggagtgctctgaatgatgtagcctccagtagcagaagaggcactggacaatctggtggttggacgt

SEQ ID NO: 64504 - DNA, 177 bp, Glycine max
tagatatcttgtagaaaccaacaaactgcaagaattcaatctgatataaaaaaaagaaaactaaaaaaattcaaaccattaaaaaaatgtatcgaaagaataaaaatggggcggccgccatttacagagctatctgaaccggcaattaacccaggtccggttcctaaaggcgtccca

SEQ ID NO: 64505 - DNA, 229 bp, Glycine max
cggctagggatgatgatgacagttctctatcccatgtacgaggaagttttgatgcatgtattgatgatcaaaatcacacgatgcatgctgaagcaatatggagtgctctgaatgatgtagcctccagtagcagaagaggcactggacaatctggtggttggacgtcatctgaggatgagccagaggcaatggagcatgatgatgatgataggaacttgagttttaaaga

SEQ ID NO: 64506 - DNA, 366 bp, Glycine max
cgtcgacaaaagatagtctttctaatggaacacaaacactctttctttcgaagccataggtctctctctgcgcttctcgaccttcgatggcgctcgacctttcttcgaattggctcaaccgtctacgggttcctatccaatctgggccttcaatttcctcattcctttttcgcgggttttgaatgggagctgcggaattgcggacaggtgccgcatgtgcagcatgagcattgacagccccgttggagggaaggattagggtttcgtggtttgtgttcggtggcgaggattttcccatgggagatggaggcgttgcgtgtatacctctgcagcagcagcagcatgttattgagcggttgccgaatg

SEQ ID NO: 64507 - DNA, 92 bp, Glycine max
aactcagtaacaacattcttaactcaaaatggggtatcccgggggggctatcatgccataccgcgttaggttgcgacccatgtgatggggat

SEQ ID NO: 64508 - DNA, 87 bp, Glycine max
cattgaacttatctctcttctcacttctgttggtataagtaactggcctcatcttacaaaacaatcctgcacaggtttcaaaatgct

SEQ ID NO: 64509 - DNA, 177 bp, Glycine max
atttggatctcctacgaaacttaagaataggagattgctcctgactcaaagcatcatgaccatttactatgttgctatgcattgatatgctgctcaagtttcttggttattgttatcctttatattgttgaaattctataatgatttattcaatattatattaactcttgggattgt

SEQ ID NO: 64510 - DNA, 268 bp, Glycine max
  unsure (1)..(268): unsure at all n locations
tgacattctcttgggaatttctcaagattttgaaattgctggtaatactcttatgccagctttttctgttccacaggctactgccagatcttctgaaaatccggaatcctctgcatgatctggaatttgtgttttctttcatttgtccgtttgtttaattcaataaaggaaattaggcatgaccctcttgttgagtatgctctgcctatttgaaaatttccacacctcttttaattgtcgtaatgatgtgtgaagtgtgtgttattnt

SEQ ID NO: 64511 - DNA, 363 bp, Glycine max
  unsure (1)..(363): unsure at all n locations
ctcgagccgaatcggctcgagcggctcgaggcaagcagagcttttgtcagttttctattgaccttctcggtggaggaatcttagtggacaaaactggagattggatcacacttatacaaaattctccaattagtaacttgttgagagttgctgcttggaagaaaggctgtttaatggtcaagattgtgatgtctgggaatgcagcagtcaaaaggagtgattgggcctcattggtacaagtgtttctaacanacagcaacagtacagagcattttgatgcatgtaagtggacataatcaggaccacattcctgggaaatgatcttgcaatagaggtatgtgggcctaataatggttttgaaat

SEQ ID NO: 64512 - DNA, 399 bp, Glycine max
tctcggtgaattccaattccacattttcaagaaatatggaggcaaaaatggtgatatatgaattggaattatttgttttcttattaggcctatcctgaagccaaaggaaatgagatcggaattcctcggggaattccaattccacattttcaagaaataaggaggcaaaaatgttcatatatgaattggaattatttgttttcttattaggcctatcctgaagccaaaggaaatgagatcggaattcctcggggaattccaattccacattttcaagaaataatgaggcacaaatgttcatatatgaattggaattatatggttgctcattaggcctatcctgaagccataggatatgtgatcggatttcctcgagggtacctagctcgaatgccctat

SEQ ID NO: 64513 - DNA, 407 bp, Glycine max
tgaaattttcacaagaggaatttcttacagcttggtcaacccaggtccgtactgcaacaactctgttggctgatgggtgtccatatttgtatgctatggtgcatgatagttcagtgtctacaataccaggtgattatgtcattggtgttaagttgacaaccataaacaatatgtgtgcatatgggctcaatcctggtatttcaggttctcgtcttttgggcaccattcctcagtccatttcacagcaaactgtttggaatcaaatggcaacagtgagaacaccattgaattttgattctagcaagcagagcttttgtcaattttctattgaccttctcggtggaggaattttagtggacaaaactggagattggatcacacttatacaaaattctccaattagtaac

SEQ ID NO: 64514 - DNA, 245 bp, Glycine max
tctatactatgatgcgagtgcagctcccttctgtgacggagctgatcactgctagactgacttcactctacagtttattaaaggtcctacatgaccagactggccgtggctactccagtaactatatactgttttacactctcttggagaaccacgccggtcgcaatctaattcatctagagacatcacaaactctactttcatcttcagaacctacaaacgtacctgtccttcagcttcactca

SEQ ID NO: 64515 - DNA, 341 bp, Glycine max
gtttggagagattcaggaaaaagttgtattgaaattttcacgggaggaatttctacagcttggtcaacccatgtgcgtcctgcaacaactctgtggctgatgggtgtccatatttgtatgctatggtgcatgatagttcagtgtctacaataccaggtgattttgtcattggtgttaagttgacaaccataaacaatatgtgtgcatatgggctcaatcctggtatttcaggttctcgtcttttgggcaccattcctcagtccatttcacagcaaactgtttggaatcaaatggcaacagtgagaacaccattgaattgtgattctagcaagcagagcttt

SEQ ID NO: 64516 - DNA, 234 bp, Glycine max
  unsure (1)..(234): unsure at all n locations
gacacacactatanaatagctatgacatgcgctggtgcgtaagctcggacatcctctcacggctatcttatacaccatcaacaccaccacactttcacccaggtggggggccatcatttaatctgagttacaatctgccacggcgcgtgcaaggcagactggatgtggtaacgccactcatcatctattgtttgccagccagttcatgagccacgcggacgggaatgataattc

SEQ ID NO: 64517 - DNA, 144 bp, Glycine max
tcaataccatcaaaaacctggcataatctacatcaacagtgaggccaaacaaaacacagacgagaacctcatccatctattaatatcatctatatcaacaacaaatccaaccattacacaatcatacactactaatccaacaaa

SEQ ID NO: 64518 - DNA, 68 bp, Glycine max
gtgcagccgactttgttggagctagaggcaactggcttcgtggcggcagttccgtgtcattgtaggtg

SEQ ID NO: 64519 - DNA, 305 bp, Glycine max
caattttctattgaccttctcggtggaggaattttagtgggcaaaactggagattggatcacacttttacaaaattctccaattagtaacttgttgaaagttgctgcttggaagaaaggctgtttaatggttaagattgtgatgtctgggaatgcagcagtcaaaaggagtgattgggcctcattggtacaagtgtttttaacaaacagcaacagtacatagcatttggatgcattaagtggacaaaatcggaaccacatttctgggaattgatcttcccaatagaggtatgtggtcctaataat

SEQ ID NO: 64520 - DNA, 229 bp, Glycine max
aaatttcttagcagacttggaatgctcaaacgcctgagggggtaattatataggtgggcatgcttacaatcattgctacgactcgagtgcatattaacatacatgatctatggagaccagttatgcattcgaaccttcactctgacgagtgagtaaaggttatgcatccaattgacccccacaaaagcaaatcaagaggaaagtcactaaggataacattgcacaaggt

SEQ ID NO: 64521 - DNA, 279 bp, Glycine max
tctcctgtcttgataaataaaacaaaaaaaaaaaaaaaaaaaaaaaaaaaaaaaaaaaaaaaaaaaaaaaaaaaaaaaaaaaaaaaaaaaaaaaaaaaaaaaaaaaaaaaaaaaaaaaaagggggcggcccccaactattgacctcttcaacccggaatttatttccggcccggtccctgaaggcttccaacctttccttatagggagtcgttttaaacctgggcgtaacaagggccatagctgttccctgtgaaaaattgttttccgttaaaatttcc

SEQ ID NO: 64522 - DNA, 374 bp, Glycine max
tcggggaattccaattccacattttcaagaaataaggaggcaaaaatgtgcgatatatgaattggaattatttgttttcttattaggcctatcctgaagccaaaggaaatgagatcggaattcctcggggaattccaattccacattttcaagaaataaggaggcaaaaatgttcatatatgaattggaattatttgttttcttattaggcctatcctgaagccaaaggaaatgagatcggaattcctcggggaattccaattccacattttcaagaaataaggaggcaaaaatgttcatatatgaattggaattatttggtttcttattaggcctatcctgaagccaaaggatatgagatcggaattcctcgg

SEQ ID NO: 64523 - DNA, 73 bp, Glycine max
gtttatcagtttctcaatcgttagatctcatcttatactcaccggcgagtccactcgcgccagcgtcgacgcc

SEQ ID NO: 64524 - DNA, 180 bp, Glycine max
aggttccatgttagatcttaaaatttctcaatctaaaaggggacttcccaaaaacacagttggaggaaccattctgcgtagtgatctattggcaaattttttgacagagggcatttttagagcaagtgttgatttgcagggcacgcttcgtattaaaggaatgattaaaatgttggccac

SEQ ID NO: 64525 - DNA, 135 bp, Glycine max
ggctcgagaaggaaataattgatctttgaaaatgcagggaggaaagaaagctggagagtccatcaaggaaacagctgcaaacattggtgcttctgccaaggctggcatggagaaaaccaaggccactgtccagga

SEQ ID NO: 64526 - DNA, 64 bp, Glycine max
cacaatacatataacatcacatgcactcgtaccttacctcaaacttaatctcttgataactcat

SEQ ID NO: 64527 - DNA, 170 bp, Glycine max
ctctcaagcaaccttgttttttaatgttcatattctcacttttacgtcaggggtgatgactggaattttttgcactgactattattcacatctcatgagggcctgactggatgtggctcaaccacaacctagttctgtaaggcccccatgttggcggtccacgcggcggg

SEQ ID NO: 64528 - DNA, 63 bp, Glycine max
  unsure (1)..(63): unsure at all n locations
natcaaataaattatatattttcaacgggaatgccgcttatccggcgggggcgattgcaagct

SEQ ID NO: 64529 - DNA, 113 bp, Glycine max
ttagggaaagccttaaaattgtttttcttactagagttgatcagttttacagtagctttactggcgtgcattcatcggatcttatatgatcattccaagttatcacgtctcta

SEQ ID NO: 64530 - DNA, 89 bp, Glycine max
gtggtagtggacgtggtggtttacccccactgctcgaagtacttctgcacctaacactgggtcctcatatatcaacaaacagattccca

SEQ ID NO: 64531 - DNA, 199 bp, Glycine max
gcaactcagctacggcatcttccattccactttgtgccgcgtcatctccgaaacttggctggcctgcctcaccacacacgaaacggtctgatacgacacactgctatactatgtgacatcgcgtaactggactgacatcacattcactaccctgactcgactctgttcccgacgctgccatgccgtaccgggaaaggct

SEQ ID NO: 64532 - DNA, 186 bp, Glycine max
acagataaaaaattaatataaacaaaaatccaaaaaataaaaagaaaatataaaaacacgagtataatatttaaaaaataaaaatgaataacactatcaatatggataaattactactaaataaaaaataggccgtcccccacctattgaccttgtatcccctgaatttaattccgaaccctttcc

SEQ ID NO: 64533 - DNA, 218 bp, Glycine max
agagcttaactattaacacttcattagttcaatatggtgaagggattcactcctggtctacctcacctctcatgaatcgttttgatacgagacatccttgttctcaagctcatacagtatcagccagggcttacccaacaccctcatcactttgtaacctgaccaccgtttcaagccctaacgtggattgattcaaacctataactctcaacaacctg

SEQ ID NO: 64534 - DNA, 436 bp, Glycine max
  unsure (1)..(436): unsure at all n locations
tgacactatanaagagctatgacatggactgctaccttacctcatccctcagttcgagtccaatcccacatcatcctcatacattgtcgctacaacttgggcttgtggacaatgttacattggcgacgaattaaggctcatctgtaccctacgaaatgagatcaggattcctagcagagagagaatcacacagtgtcacgcaatgaggaggcactgcacgaccatagcataatgcgggttgtatcatgcattaataagacctatacagaatcctaaataccttgtatcgcaattctgtcaggctatccagctccgcacttctgctatattatgcagcacacttagacatatgtgggcgtggctttcatgttatctcttcagaactgtcctgaacccaagctgatggagacccgacttccttgatatgcccaactcg

SEQ ID NO: 64535 - DNA, 225 bp, Glycine max
gggattttgtcaccagttggtcctcgtggaaggctcttgaggagattgctttcttggataggacttattccacctatgccagaaacaccttttgaggttcacaatgataataacgctccttgaaccattcctaaggcctacttttttatcaaggatatcactaagtgatatatggagacctgcatcaaggaaatactgcagaaatgatacttggaaaatgttgaa

SEQ ID NO: 64536 - DNA, 247 bp, Glycine max
aagaaacataccgaaggagaacatcatggtggtgctaaagcggtgtcaggtgctactgttgctcgtggtgggagcttctcgcaccgacctgagcgctgagcaaacgtgaccatgctcataggaagggatcatgatgagcacccaaaaccatgctgagacctcatgaatgtgctctcgctaatggcctcataaaagcactggcgaagttatacggcgaaattcatgcaatctacattgtaaaagctgt

SEQ ID NO: 64537 - DNA, 99 bp, Glycine max
aaataacatgtgagcaaaatgccatcaaaaggcgaggaacgccttatatgaggagggggtgtcatttggaatatacttcacacccctgaccaggattat

SEQ ID NO: 64538 - DNA, 165 bp, Glycine max
taaaattcttccaccaagttatgggtttccttgtgttgctggttttctcctcttaggtctctcttctagttccagcatatcaactcatgttccatattggaccttgacctaaccaagtttaccacacagaaacaggtgtcttcactgttccaactatggaagagt

SEQ ID NO: 64539 - DNA, 93 bp, Glycine max
  unsure (1)..(93): unsure at all n locations
tatagaagatctatgacgtctcatgcaggtcgtacgtagctgngaaataacatttgagctaaatgtcagtttaaggccaggatccgtaaaaag

SEQ ID NO: 64540 - DNA, 216 bp, Glycine max
acaaaaaccttaatatatttacacaagaaaataaatatacgggatagccaaaataatactctagaaatttaaaaaacccataaattctttccacccgttactctctccttctcgtgtttcccttttaatagggcgcccccccccttttggccctcttgcccccggttttttttccggccccgtcccttttggcttcccatttttccctttttgggg

SEQ ID NO: 64541 - DNA, 229 bp, Glycine max
actatagatatgactatgacatgcactccacccttacctaagcattcaattcgagtttagaccagccatagcatagcttgaggcggaagagtgatactatatcagcccgagagaaaggtagtacaccaatggcgcaaggccaaacatggctgcaacttcaggtattgtaacagccacaggtccagattaccctatatgtgaatgaactcaatatggtgatgtgaacaaa

SEQ ID NO: 64542 - DNA, 373 bp, Glycine max
ttacgtgacactatcacaatagctatgacttcacatgcactcctacctaagctcggcattccgatcgcggtcctactggcataccaacaatcaggtctagtacccacgaatagaaccgtgtgcaaatggtcagcaatagggccggatcgcgtgaacgggctatatgctgacttctagccataggttccgatccggtgacctgtatctcaaatatcgacgctctatgatatatgtggctaaagcacgacaacgactcttaggactctctgtcgcatttcctgtgagcatgctagtacgctcatatgtattgacgcttccgattacgcgttacctgagtctgtatatgcctttggcaagctattagctatcccat

SEQ ID NO: 64543 - DNA, 216 bp, Glycine max
acgcttccttgcctgcaacttgactttagaagatcccttcagggaacaacaatatcatattttcaagtaaataatgaggcaatggtggacacttatcaattggagcgcttagatttcttactagaactatatttgcacaatccataataagctcggcaactctcaaggaaagctctttcctcattttcaagacttcaggaagcataaatgcctacc

SEQ ID NO: 64544 - DNA, 405 bp, Glycine max
ctcgagccgaatcggctcgaggctatgaaaacatacttggagctttagcctggcgcagtaatttttacaatccttcaaaaattttgtttctttgtgtgtgtatggtgatgataacttaattagtgttcatgaatacgtcaagccttactttagtggttctaaattgaaaagctttctagctggtcataatatcaccattactgatggtattgacaagactagtgcaactttgcaatttagaaagttagcagattgtgattttctcaagagaaactttaagcagatgtctaatgttttgtgggtagctcctgaggacaaggcgagtttatggtcacaacttcattatgtttcgtgtaataatctggaaatgcaagaagcttatcttgtcaatctcgtaaatgtgtt

SEQ ID NO: 64545 - DNA, 99 bp, Glycine max
aaattaggcatgaccctcttgttgagtatgctctgcctatttgaaaatttccacacctcttttaattgtcgtaatgatgtgtgaagtgtgtgttatttt

SEQ ID NO: 64546 - DNA, 333 bp, Glycine max
aaaaaaaaaaaaaaaaaaaaaaaaaaaaaaaaaaaaaaaaagggaaaaaaaaaaaaaaaaaaagggaaaaaaaaaaaataaaaaaaaaaaaaaaaaaaaaaaaaaaaaaaaaaaaaaaaaaaaaaaaaaaaaggggcggcccccatttaggggccttttaaccccgggaataaatccgggcccggtccctgtgggggtccaaattttccttatagggggccgttttaaaccttggcaaaacaagggcaaaaactgttccctggggaaaatggttttccgttaaaaattcccaaaaatttccaacccggaaccttaaggtttaaacccgggggg

SEQ ID NO: 64547 - DNA, 155 bp, Glycine max
attgatgttgtgccaaaaaaaaaaaaaaaaaaaaaaagaagggaaaaaaaaaaaaaaagaaaggaaaaaaaaaaaaagacggccaaatacataagagactaaaagaccagaagataaatcccggtccggttccgcgaaggcgtacctcctttccc

SEQ ID NO: 64548 - DNA, 392 bp, Glycine max
aagcttttcatgaaaaatagaattatgtattttaacatataaatcaatcaaatcaaaataattttttttgttaatttattatgcaaataaaagatatttctatttttaaaaaaattttaaattcttttctattgatatcaacttttttttactcaatttacatatcaacttatttaattattgatatatatagttaccccaaattaaattatcttcgaagatacattcttttgtcattttttgtttccttgatcgccttctattatccaactctctttgaatcataaactagagaggataaaatacaaacacttctttacaattaattgttatttttcgtttgttgtagttgctttttttttttatatttaaaataaatttgcaacaccgac

SEQ ID NO: 64549 - DNA, 188 bp, Glycine max
aaaaaaaaattaaaaaaaaaaaaaaaaaaaaaaaaaaggaaaaaaaaaaaaaaaaggaagaaaaaaaaaaaaaaaaaaaaaaaaaaaaaaaaaaaaaaaaaaaaaaaaaaaaaaaaaaaaaaaaaaaaaaaaaaaaaaaaaaaaaaaaaaaaaaaaaataaaaaaaaaataaaaaaaaataaaaaaaa

SEQ ID NO: 64550 - DNA, 405 bp, Glycine max
aattgattcaatagttcttagagttcatgtgtgctttaagaacaaacgtctgtgcaagcgaaatacgaacatatatctcagattaaatgtaaaataattggtgggatatcagaagagaatgcttgcttcactgcaccctttacgaattgtgagtgctaaattggaaaagtagatcaaatgtgaaccaacggccagtactataaactcgcgagtttctaaaaatcaagacaaaacaagaaactcacaagttctgccatggtagacagagatagatgtttggaaaattgtgattccactgggtttagagcactggctattttgtcaggcacagtctacaagcttgtcatgtttatattcctcctctttagtttacaacgatcctttacattgaactttgtatacagt

SEQ ID NO: 64551 - DNA, 281 bp, Glycine max
aaaaaaaattaaaaaaaataatagtttaaattatacaataggcatattaatacaaaaagggagtacctaaaataattaatcaatttttaaataaatctattataatattgtggcgtccgttttcttttcagtttctttccccgtaatttaattggggcccggtcccttttgggttcctcaccttcccttttttttgttccgtcctggaccttggggtcttcctgctttttcctttttcgggtggttaatggtttggggttattatttccctatttttttcc

SEQ ID NO: 64552 - DNA, 399 bp, Glycine max
tcggggaattccaattccacattttcaagaaataaggaggcaaaaatgttcatatatgaattggaattatttgttttcttattaggcctatcctgaagccaaaggaaatgagatcggaattcctcggggaattccaattccacattttcaagaaataaggaggcaaaaatgttcatatatgaattggaattatttgttttcttattaggcctatcctgaagccaaaggaaatgagatcggaattcctcggggaattccaattccacattttcaagaaataaggaggcaaaaatgttcatatatgaattggaattatttgttttcttattaggcctatcctgaagccaaaggaaatgagatcggaattcctcggggaattccaattccacattttcaaga

SEQ ID NO: 64553 - DNA, 352 bp, Glycine max
aagaaagtcttccatagccccccaaaaatgaagagcaccatcttctttgctctctttctcttttgtgccttcaccacctcatacctaccttcagccatcgcgatttcgtgctcgataatgaaggtaaccctcttgaaaatggtggcacatattatatcttgtcagacataacagcatttggtggaataagagcagccccaacgggaaatgaaagatgccctctcactgtggtgcaatctcgcaatgagctcgacaaagggattggaacaatcatctcgtccccatatcgaatcccgtttatcgccgaaggccatcctttgagccttaagttcgattcatttgcagttataat

SEQ ID NO: 64554 - DNA, 371 bp, Glycine max
gtcttccatagccccccaaaaatgaagagcaccatcttctttgctctctttctcttttgtgccttcaccacctcatacctaccttcagcatcgctgatttcgtgctcgataatgaaggtaaccctcttgaaaatggtggcacatattatatcttgtcagacataacagcatttggtggaataagagcagccccaacgggaaatgaaagatgccctctcactgtggtgcaatctcgcaatgagctcgacaaagggattggaacaatcatctcgtccccatatcgaatccgttttatcgccgaaggccatcctttgagccttaagttcgattcatttgcagttataatgctgtgtgttggaatttctaccgag

SEQ ID NO: 64555 - DNA, 397 bp, Glycine max
ggaaaaagttgtattgaaattttcacaagaggaatttcttacagcttggtcaactcaggtgcgtcctgcaacaactctgttggctgatgggttccatatttgtatgctatggtgcatgatagttcagtgtctacaataccaggtgattttgtcattggtgttaagttgacaaccataaacaatatgtgtgcatatgggctcaatcctggtatttcaggttctcgtcttttgggcaccattcctcagtctatttcacagcaaactgtttggaatcaaatggcaacagtgagaacaccattgaattttgatcctagcaagcagagcttttgtcaattttctattgaccttcttggtggaggaattttagtggacaaaactggagattggatcacactta

SEQ ID NO: 64556 - DNA, 146 bp, Glycine max
caaacttccagagcgtttatcactcaccaaatatgcaagaacaaggggcgagacacaaaaatatcatctgctaattccatgcaatttaataaattgtggaattaatgatcaatcggctaataaatttgatgttttgtagtccaaaa

SEQ ID NO: 64557 - DNA, 92 bp, Glycine max
gaaagacctatggtttgatacataaaaaattcatgttaataagaaaaatttttataaatatattacaagaacaagagatcaaaaaataacag

SEQ ID NO: 64558 - DNA, 139 bp, Glycine max
agaagggggttcttttgtgtgattgtatcttgaagaaaaggagaggttttttttaaagtgaggtctggccatgatttcatgcatctaattggagtgactgtatagcctagatcactattgtgataaaccccatttcacc

SEQ ID NO: 64559 - DNA, 270 bp, Glycine max
accgacgcgtccggtcaggaagacccgtcgctatgagctttgttatccacgcacataacactatctcctgatcgtttttcaatgcacaggtgaaggaccgtaaatgagcaccgctcttaggcacacgcttattatctgagatgctcagctacatcaacgtcatcttcaccgacatactccaacagccagtccacatatctaccctcatcacactcaacttcccagatctgtatctgactaagaagcatacacagctgtatcattaccaac

SEQ ID NO: 64560 - DNA, 292 bp, Glycine max
aaaaatcaaatctctaatataaggacgggttttaattaaaaggtgggctggccaatattccatgcattatgttcgagtgactgacgggcctatatcactgttgtgataaaccctatttcaccccgttacgttttatttacacatacacatactgtacttatttataatacattattaactctctcttctccttgaattttaacatccatataggtttatctctactatatcatttcccatttattaatcaaatgtactcacataaccctaacactgtcttttatatttatat

SEQ ID NO: 64561 - DNA, 238 bp, Glycine max
ctgttatatttaatcgattctcatgccaactattaacttgaaacaaagaaattgatcaccttaatacacctcctctgctaataaacacccccaaattattcaccttctaccactataactctcatatcaagacacaatcttttcaacaaacataatacctcaattattacatttacattttcatgatccaagaacttttctttcctcatgtatattcctctgtttatacttaaattca

SEQ ID NO: 64562 - DNA, 309 bp, Glycine max
gacagcaaaaacaattaataaagatgagtgtgaagaacaacatggtggtgctaaaggtgtgtttgttgcttcttttccttgtgggggttacagctgcacgcatggaactgagcttcttcaaaagtgatcagtcatcaagttatgatgatgatgagtattcaaaaccatgctgtgatctctgcatgtgcacacgctcaatgcctcctcaatgcagctgtgaagatattaggctgaattcatgccactcagatttgtagagctgtatgtgcacacgctcacagccaggacagtggtcgtgtcttgacacca

SEQ ID NO: 64563 - DNA, 422 bp, Glycine max
gaattaccgggccgaccgacgcgtccgggcagtcatgcgctgactcagcagatttttttcaaggccgggctctatttccagcaggcagggttgtttctgaagcgtggggaccaagactacatacactgtcatatagacggactgttaatccaactatgaagtccaaacaaacaaagtgatcacctgaagacacatcatatgttaacaaacatccacaaagtgctcaactccagacactacatctattacaacaagagacaatccttcacacgatacacacacactcaatgatgacatatagattcacatgagccaagaactgtatgctacctaaagcggatctctatgtttgtacttaaattcatgtgacacatattcatttcctactatggatattcttattaatgcactcatatcataat

SEQ ID NO: 64564 - DNA, 307 bp, Glycine max
tcccgatcgacccggcgtcctcttctgcaggattctggaaaatgccagttttccttttccgcccttgttttccataaaacatgtttggatattgtgatgaggagtactgtctgaacagtacttcgtatttttttttaattgccttgtttgccttcaacttccttgattttcatagtttacatgggtgtgtgtaggggtgtgtgtgtgtatgtgtgtgggttagggcttttttcgttgcatgttatggttctgttgacatatgatccccacaaactgttgtagtgattggccaggccttgcttttttt

SEQ ID NO: 64565 - DNA, 111 bp, Glycine max
agcatctaactaatgtcaacactttttggcaacccaatttacatatttgtaatttacatgatatttctttcaaaagaaatatgatagcaaagaaatctctcattcccaaaa

SEQ ID NO: 64566 - DNA, 251 bp, Glycine max
ctcaataacccaagcatattacatacattgagagaggcatgattcattggtcccatatatgatacccaccttgttattcacaacagacctgactaaatactaatacattatatatccaacatgtcccacttccattcaaactcacaccttgaatataaatgttctcaatcctaaccactattccaaacattaatctctacttgataattcactatcttatcattcttaacattactttctccaaataatat

SEQ ID NO: 64567 - DNA, 95 bp, Glycine max
tgatacctttaattcacatttctctagtttactcattctctcaccaatctttgggccaggtttcttactacaatggccctaacattccaccaacc

SEQ ID NO: 64568 - DNA, 62 bp, Glycine max
acccacacgtcccgtcactcaaagatttaatcaccataacttttataatttccttcacttaa

SEQ ID NO: 64569 - DNA, 193 bp, Glycine max
ctccacctacatctctctgactacattcaattatctattatcctttacatcctgatctaacacttaattgactcattttctacctataacttaatcaccaacacttcaataaccacctatatgtatcctataaattcacttattcaaacctaaatacatatatccatacacacattttaacttatatcttctc

SEQ ID NO: 64570 - DNA, 289 bp, Glycine max
cccggtttgcgcttccctccgggcacgatatgattggagccagtccgagccccggccctagcgagatcgtcgccatgtggcgcccagaccccgacccctacccggacccctagcctgcctgcggctcccttacttaccccgcattccccagactcctagccctgttgacgattcgtacttacctctgctctctcaaacgccgtcttctgctgtcccaatcgtgtctctcaatcatcactcatatctgctatgcagtgtcctcagcatctaccttccttacagtgcctct

SEQ ID NO: 64571 - DNA, 275 bp, Glycine max
gattcacacaactaactaagaaagtcttccatagcgccccaaaaatgaagagcaccatcttctttgctctctttctcttttgtgccttcaccacctcatacctaccttcagccatcgctgatttcgtgctcgataatgaaggtaaccctcttgaaaatggtggcacatattatatcttgtcagacataacagcatttggtggaataagagcagccccaacgggaaatgaaagatgccctctcactgtggtgcaatctcgcaatgagctcgacaaa

SEQ ID NO: 64572 - DNA, 361 bp, Glycine max
gacagcaaaaacaattaataaagatgagtttgaagagcaacatggtggtgctaaaggtgtgtttgttgcttcttttccttgtgggggttacagctgcacgcatggaactgagcttcttcaaaagtgatcagtcatcaagttatgatgatgatgagtattcaaaaccatgctgtgatctctgcatgtgcacacgctcaatgcctcctcaatgcagctgtgaagatattaggctgaattcatgccactcagattgtaagagctgtatgtgcacacgctcacagccaggacagtgtccgtgtcttgacaccaacgacttctgctacaaaccttgcaagtccaaagatgactagaaaaactaata

SEQ ID NO: 64573 - DNA, 347 bp, Glycine max
acagaaggggacagcaaaaacaattaataaagatgagtttgaagaacaacatggtggtgctagaggtgtgtttgttgcttcttttccttgtgggggttacagctgcacgcatggaactgagcttcttcaaaagtgatcagtcatcaagttatgatgatgatgagtattcaaaaccatgctgtgatctctgcatgtgcacacgctcaatgcctgctcaatgcagctgtgaagatattaggctgaattcatgccactcagattgtaagagctgtatgtgcacacgctcacagccaggacagtgtcggtgtcttgacacccacgacttctgctacaaacctttcaagtcc

SEQ ID NO: 64574 - DNA, 225 bp, Glycine max
ggttctagtgtgtgattgtttggggttgtaactcgttcttcttcttttgttgttctgtgtttgtgtttgttttttctctcacctgaaaatgtcttgctgcggtggtaactgtggttgcggaagctcctgcaagtgcggcaacggctgcggaggctgcaagatgtgcccagacttgagctacactgagtcaaccaccaccgagaccttggtcattggagtggcacc

SEQ ID NO: 64575 - DNA, 294 bp, Glycine max
cacgcctcctgaagaattttatataccttacgcatcgtcgaatcaacagagcatgtgtgatttcatagtgcgggtggtcacaaaaatttaacacacacaacgtgatagagatacaaatcttcgctctatgtcaatgtcacgaagcaagtgtttttacacaacttagcaaccactccatatattagaaaagtcagtttatttggcgtcatatttgctaaaagtcgtttcgtaactataccctctaattcaagactgaacaaacaacgatgggattgacatataaatagtacaatt

SEQ ID NO: 64576 - DNA, 237 bp, Glycine max
agaaggggacattactaatgtgggatatgccggccaacatgacatgaatggtttaatagtttttaaatgggatttgacaatattggttaatcattcttatatgcatgatttaaaaaagaatatcacaaaaataaaaatgaaaaaacataattaaaattttgtttactgtttaatatttataaacttatgaactcaagagaaaccatgaatgatgagaagagaaaaggtagcaagttg

SEQ ID NO: 64577 - DNA, 68 bp, Glycine max
gggaaaaaagaaatggaaaaacttttgataaaaataaagaaaaaaagcggccgctcgaattacgacag

SEQ ID NO: 64578 - DNA, 388 bp, Glycine max
gacagcaaaaacaattaataaagatgagtgtgaagaacaacatggtggtgctaaaggtgtgtttgttgcttcttttccttgtgggggttacagctgcacgcatggaactgagcttcttcaaaagtgatcagtcatcaagttatgatgatgatgagtattcaaaaccatgctgtgatctctgcatgtgcacacgctcaatgcctcctcaatgcagctgtgaagatattaggctgaattcatgccactcagattgtaagagctgtatgtgcacacgctcacagccaggacagtgtcgttgtcttgacaccaacgacttctgctacaaaccttgcaagtccagagatgactagaaaaactaatagctctctcaaatggacgaagccccttt

SEQ ID NO: 64579 - DNA, 292 bp, Glycine max
gacggcaaaaacaattaatagagatgagtttgaagaacaacatggtggtgctaaaggtgtgtttgttgcttcttttccttgtgggggttacagctgcacgcatggaactgagcttcttcaaaagtgatcagtcatcaagttatgatgatgatgagtattcaaaaccatgctgtgatctctgcatgtgcacacgctcaatgcctcctcaatgcagctgtgaagatattaggctgaattcatgccactcagattgtaagagctgtatgtgcacacgctcacagccaggacagtg

SEQ ID NO: 64580 - DNA, 64 bp, Glycine max
caggatggcggagttggaaggagattaggtgtccattgtaaaaataaaataaaattcctatggc

SEQ ID NO: 64581 - DNA, 408 bp, Glycine max
gacagcaaaaacaattaataaagatgagtgggaagaacaacatggtggtgctaaaggtgtgtttgttgcttcttttccttgtgggggttacagctgcacgcatggaactgagcttcttcaaaagtgatcagtcatcaagttatgatgatgatgagtattcaaaaccatgctgtgatctctgcatgtgcacacgctcaatgcctcctcaatgcagctgtgaagatattaggctgaattcatgccactcagattgtaagagctgtatgtgcacacgctcacagccaggacagtgtcgttgtcttgacaccaacgacttctgctacaaaccttgcaagtccagagatgactagaaaaactaatagctctctcaaatggacgaagcccctttagggctttgttggtatgtta

SEQ ID NO: 64582 - DNA, 399 bp, Glycine max
gataccaaaaacaaaacacaagccaagtgagggtgagaaaaaataaaaatcaaagagcataatgtcagggatcattcacaagattggggagacccttcatgtgggagggcacaagaaggaggaggagcataagggtgagcaccatgctggagaatacaaaggggagcaccatggtgaacacagtagtgagtacaaaggagagcatcatggtgaacacaaagctggagagtaccatggtgagcacaagccagagcacaaagaggggttcctagacaaagtcaaggacaagatccatggtgagggcggcgccgccgagggcgagaagaagaagaaggagaagaagaagaaggagcatggccatgagcatggccatgacagcagcagcagcagtgacagtga

SEQ ID NO: 64583 - DNA, 100 bp, Glycine max
atcattaaaaattacttacaaaaattatcatacaaattattttactgcaaaataagaactaaaaaaaaaatttacttcaaagctgaaatttacttttaat

SEQ ID NO: 64584 - DNA, 157 bp, Glycine max
tgtgacagtacaaacattttatcaagatgagtttgaagaacaacatggtggtgctaaaggtgtgtatgatgcttcttttccttgtgggggttacagctgcacgcatggaactgaacttcttaaaagtgatcagtcgtcaagttatgatgatgatgag

SEQ ID NO: 64585 - DNA, 192 bp, Glycine max
gacagcaaaaacaattaataaagatgagtttgaagaacaacatggtggtgctaaaggtgtgtttgttgcttcttttccttgtgggggttacagctgcacgcatggaactgagcttcttcaaaagtgataagtcatcaagttatgatgatgatgagtattcaaaaccatgctgtgatctctgcatgtgcacac

SEQ ID NO: 64586 - DNA, 179 bp, Glycine max
gaattcattttttggtcgtgtcttgtgtaaattaataaaaacactatagggctcctcggtttatactttatatgcatctattgtctgtgaaatagtgtgcaaatgagattcgttgtaattttggtttttaataaatttgttggagagttataaattaaaaaataaaaagaattgtgcac

SEQ ID NO: 64587 - DNA, 186 bp, Glycine max
gatgattttgatccagaagatgccctctgatctttgctagtataaagtacttttataatcccccctcccaaattaacaaaaggaaaaaaaaaacactcctgttttctgtgtaatggttacccctaaaaaattctggtctttctgtgctttggctactgatttgattcctaagtatttacatctccc

SEQ ID NO: 64588 - DNA, 396 bp, Glycine max
gattcacacaactaactaagaaagtcttccatagccccccaaaaatgaagagcaccatcttctttgctctctttctcttttgtgccttcaccacctcatacctaccttcagccatcgctgatttcgtgctcgataatgaaggtaaccctcttgaaaatggtggcacatattatatcttgtcagacataacagcatttggtggaataagagcagccccaacgggaaatgaaagatgccctctcactgtggtgcaatctcgcaatgagctcgacaaagggattggaacaatcatctcgtccccatatcgaatccgttttatcgccgaaggccatcctttgagccttaagttcgattcatttgcagttataatgctgtgtgttggaattcctaccgagt

SEQ ID NO: 64589 - DNA, 58 bp, Glycine max
gagaggaagagaagagaaagaggagcacataataaccctcaaactccatttcactcgc

SEQ ID NO: 64590 - DNA, 408 bp, Glycine max
gacagcaaaaacaattaataaagatgagtgggaggaacaacatggtggtgctaaaggtgtgtttgttgcttcttttccttgtgggggttacagctgcacgcatggaactgagcttcttcaaaagtgatcagtcatcaagttatgatgatgatgagtattcaaaaccatgctgtgatctctgcatgtgcacacgctcaatgcctcctcaatgcagctgtgaagatattaggctgaattcatgccactcagattgtaagagctgtatgtgcacacgctcacagccaggacagtgtcgttgtcttgacaccaacgacttctgctacaaaccttgcaagtccagagatgactagaaaaactaatagctctctcaaatggacgaagcccctttaggctttgtttgttatgtta

SEQ ID NO: 64591 - DNA, 293 bp, Glycine max
  unsure (1)..(293): unsure at all n locations
gacagcaaaaacagttagtaaagatgagtttgaagaacaacatggtggtgctaaaggtgtgtttgttgcttcttttccttgtgggggttacagctgcacgcatggaactgagcttcttcaaaagtgatcagtcatcaagttatgatgatgatgagtattcaaaaccatgctgtgatctctacatgtgcacacgctcaatgcctnctcaatgcagctgtgaagatattaggctgaattcatgccactcagattgtaagagctgtatgtgcacacgctcacaaccaggacagtgt

SEQ ID NO: 64592 - DNA, 96 bp, Glycine max
gacataacataagaaaaacacacacacaagcgaccctttgagttcattaacctcttcagaaaaaacaacaacaacaacaaaaaaaaacatcatcat

SEQ ID NO: 64593 - DNA, 388 bp, Glycine max
gacagcaaaaacaattaataaagatgagttggaagaacaacatggtggtgctaaaggtgtgtttgttgcttcttttccttgtgggggttacagctgcacgcatggaactgagcttcttcaaaagtgatcagtcatcaagttatgatgatgatgagtattcaaaaccatgctgtgatctctgcatgtgcacacgctcaatgcctcctcaatgcagctgtgaagatattaggctgaattcatgccactcagattgtaagagcagtatgtgcacacgctcacagccaggacagtgtcgttgtcttgacaccaacgacttctgctacaaaccttgcaagtccagagatgactagaaaaactaatagctctctcaaatggacgaagccccttt

SEQ ID NO: 64594 - DNA, 317 bp, Glycine max
gacagcaaaaacaattaataaagatgagtgtgaagaacaacatggtggtgctaaaggtgtgtttgttgcttcttttccttgtgggggttacagctgcacgcatggaactgagcttcttcaaaagtgatcagtcatcaagttatgatgatgatgagtattcaaaaccatgctgtgatctctgcatgtgcacacgctcaatgccttctcaatgcagctgtgaagatattaggctgaattcatgccgctcagattgtaagagcttgatgtgcacacgctcacagccaggacagtgtcgttgtcttgacaccaacgacttc

SEQ ID NO: 64595 - DNA, 402 bp, Glycine max
gattcacacaactaactaagaaagtctgccgtagccccccaaaaatgaagagcaccatcttctttgctctctttctcttttgtgccttcaccacctcatacctaccttcagccatcgctgatttcgtgctcgataatgaaggtaaccctcttgaaaatggtggcacatattatatcttgtcagacataacagcatttggtggaataagatcagtcccaacgggaaatgaaagatgccctctcactgtggagcaatctcgcaatgagctcgacaaagggattggaacaatcatctcgtccccatatcgaatccgttttatcgccgaaggccatcctttgagccttaagttcgattcatttgcagttataatgctgtgtgttggaattcctaccgagtggtctg

SEQ ID NO: 64596 - DNA, 251 bp, Glycine max
gagttggattccaatatattccattctctctgtgtatttccctacctctcccttcaagatgcagatcttcgtcaagaccctcaccggcaagaccatcacccttgaggtggaaagctctgacaccatcgacaacgtcaaggccaagatccaagacaaggaaggaatccccccggaccagcaacgtctcattttcgccggaaagcaacttgaggacgggcgtacccttgctgactacaacattcagaaggaga

SEQ ID NO: 64597 - DNA, 237 bp, Glycine max
gcaacacagaaccttcacataaagtatctgaaagttttaatcccccaaaaaggtcaaaacaaatcaaaagaaaaaaaagaaatatatatatcactgtctctcactcttccaatctacaacctcccattttttttccttcctttcacacagtgttttctcttcaatcattctgctaaaagtaggagacttgagcaacacagaaccttcacataaagtatcttaaatttttaatcccct

SEQ ID NO: 64598 - DNA, 77 bp, Glycine max
aggggtgctatttgtattgtatgcacgtcaaagaacgcaaaaaaataatagcgtgaactggttccatcgaatcagac

SEQ ID NO: 64599 - DNA, 200 bp, Glycine max
ggaatccaaccaagtaaacaaaatccactcaaggttggagggtaatcagcttcaatttctttccattttcattttgccctaatacccaaaaaaaaaaaaaaaaaaaaaaaaaaaaagcggcccgtttaaaagatccaaacttacctacccctgcattccaactcataacttttctataagggcacctaaaatcaattcaa

SEQ ID NO: 64600 - DNA, 388 bp, Glycine max
gacagcaaaaacaattaataaagatgagtgggaagaacaacatggtggtgctaaaggtgtgtttgttgcttcttttccttgtgggggttacagctgcacgcatggaactgagcttcttcaaaagtgatcagtcatcaagttatgatgatgatgagtattcaaaaccatgctgtgatctctgcatgtgcacacgctcaatgcctcctcaatgcagctgtgaagatattaggctgaattcatgccactcagattgtaagagctgtatgtgcacacgctcacagccaggacagtgtcgttgtcttgacaccaacgacttctgctacaaaccttgcaagtccagagatgactagaaaaactaatagctctctcaaatggacgaagccccttt

SEQ ID NO: 64601 - DNA, 391 bp, Glycine max
gattcacacaactaactaagaaagtcttccgtagccccccaaaaatgaagagcaccatcttctttgctctctttctcttttgtgccttcaccacctcatacctaccttcagccatcgctgatttcgtgctcgataatgaaggtaaccctcttgaaaatggtggcacatattatatcttgtcagacataacagcatttggtggaataagagcagccccaacgggaaatgaaagatgccctctcactgtggtgcaatctcgcaatgagctcgacaaagggattggaacaatcatctcgtccccatatcgaatcccgtttatcgccgaaggccatcctttgagccttaagttcgattcatttgcagttataatgctgtgtgttggaatttctac

SEQ ID NO: 64602 - DNA, 264 bp, Glycine max
ggagataagaataatcagttgaaggggttgatggctggtaggttgcctggtgttgggttgctagcatggaagagaacataccagaaccatcgatatgatcactaacaccatgcctcatgccgacaattctatcagctcggagaatcatcattggaaccaccatggatacctctcactgccttagatgaaactgttgtcaaagatagacatatgcttcactagaagcttggacactagttttgctcatacaggtcttgtgagaat

SEQ ID NO: 64603 - DNA, 315 bp, Glycine max
gacagcataaacaattaataaagatgagtgtgaagaacaacatggtggtgctaaaggtgtgtttgttgcttcttttccttgtgggggttacagctgcacgcatggaactgagcttcttcaaaagtgatcagtcatcaagttatgatgatgatgagtattcaaaaccatgctgtgatctctgcatgtgcacacgctcaatgccttctcaatgcagctgtgaagatattaggctgaattcatgccactcagattgtaagagctgtatgtgcacacgctcacagccaagacagtgtcgctgtcttgacaccaacgact

SEQ ID NO: 64604 - DNA, 318 bp, Glycine max
ggcgacaagtgagtttgttgatcgagataactagaaacagtgtgatgaaaatgaaggtccttgttttcttcgttgctacaattttggtagcatggcaatgccatgcgtacgatatgttccctctccgaatgaacactggctatggtgcccgtactccggaggtgaaatgcgcaagttggaggcttgctgtggaagcacacaacatctttggctttgagaccattcctgaagagtgcgttgaagcaacaaaggaatacattcatggcgaacaatatagatcagactccaaaacagttaaccaacaagcttacttttatg

SEQ ID NO: 64605 - DNA, 96 bp, Glycine max
gcctgaaaccagtgaagccaagtgaaacaactgatggcataactgaagctgccgatctagatcattctagaggatgcacgcttacattcgcctgca

SEQ ID NO: 64606 - DNA, 337 bp, Glycine max
cactcatgcgacgacgccacaagactacagaatccatttacatgattaacatcacctcaacagccaggttaatacaccaatctgatcgcacaaatctctctcttaacccctctaacgccaaatctgcaccatacttcctgccctctccaacctcagagaaataacactttataactgacgactacacactaaaaatcaccttatcatagacaatatgatactacaatatgcttccactacataacatcacacaccccttactctccacagtgaaaagaacacacacatctgcactgaaagcccatataatctatactctatttaaaatgcacaaaaa

SEQ ID NO: 64607 - DNA, 65 bp, Glycine max
aaagatcgaacgaacagaaaaaaaaaaaaaaaaaaaaaaaaaaaaacgggggcgctatagaatat

SEQ ID NO: 64608 - DNA, 63 bp, Glycine max
tattgggaagaaggaagatcaccgtgacgggggctggcttcgaacttaagcggcctctctaga

SEQ ID NO: 64609 - DNA, 80 bp, Glycine max
aaagatcgaacgaacagaaaaaaaaaaaaaaaaaaaaaaaaaaaaacgggggcgctatagaagtataactcatatatgcg

SEQ ID NO: 64610 - DNA, 303 bp, Glycine max
agggacacaactaactaagaaagtcttccatagccccccaaaaatggagagcaccatcttctttgctctctttctcttttgtgccttcaggagctcatacctaccttcagccatcgctgatttcgtgctcgataatgaaggtaaccctcttgaaaatggtggcacatattatatcttgtcagacataacagcatttggtggaataagagcagccccaaccggaaatgaaagatgccctctcactgtggtgcaatctcgcaatgagctcgacaaatggattggaacaatcatctcgttcccata

SEQ ID NO: 64611 - DNA, 269 bp, Glycine max
gattcacacaactaactaagaaagtcttccatagccccccaaaaatgaagagcaccatcttctttgctctctttctcttttgtgccttgaggaggtcagacctaccttcagccatcgctgatttcgtgctcgataatgaaggtaaccctcttgaaaatggtggcacatattagacctggtcagacataacagcatttggtggaataagagcagccccaacgggaaatgaaagatgccctctcactgtggggcaatctgccatgagcccg

SEQ ID NO: 64612 - DNA, 80 bp, Glycine max
tacagcaaaaacacttaataaagatgagtttgaagaacaacatcgtcgtgctaaacgtgtgtctgttgcttcttttccct

SEQ ID NO: 64613 - DNA, 364 bp, Glycine max
ggtaattcagagtttctaacatttcatttcaattatacatccatagataggaagaaagaaacaagtatgaaaacacttcactctctcgcgatgttccagattccatgacattagaaaattattaaaagaaaaatcgagaatcacgacaaaacgaaaaaatttgaacaattcgaaaaaattaaggataaagttcaataaggtaacaaccgcgctatctcaaacaaaaagggggcggctctaaaggttcaagctttagttagcctgcatggcaagttatagctcttccataatgtcccccaaattcaattccatgggcgttggttttaaaacgttctgactgggaaaaacctgggggttccccaac

SEQ ID NO: 64614 - DNA, 258 bp, Glycine max
gaagaagaagaaggagcatggccatgagcatggccatgacagcagcagcagcagtgacagtgattaaactgctgcatcacctatatatggaaaaggtttatgggaccatagtagcgagggctgtgccttaatttctctctctctctctctctctctctctctctctctctctctctctttttcctttttccctatcttgtgatccacttatgagtgagacatacaaaagtcagaaactgtgcctgtacccggttgcta

SEQ ID NO: 64615 - DNA, 102 bp, Glycine max
atcattactatcgatgatgtttgaaattctggaaccgtgtagagttcttcgtttaggaacatcgtccaaaagtatatatgtaaaatagacaaaagaatcatg

SEQ ID NO: 64616 - DNA, 391 bp, Glycine max
gacacaactaactaagaaagtcttccatagccccccaaaaatgaagagcaccatcttctttgctctctttctcttttgtgccttcacgggctcagacctaccttcagccatcgctgatttcgtgctcgataatgaaggtaaccctcttgaaaatggtggcacatattatatcttgtcagacataacagcatttggtggaataagagcagccccaacgggaaatgaaagatgccctctcactgtggtgcaatctcgcaatgagctcgacaaagggattggaacaatcatctcgtccccatatcgaatccgttttatcgccgaaggccatcctttgagccttaagttcgattcatttgcagttataatgctgtgtgttggaattcctaccgag

SEQ ID NO: 64617 - DNA, 55 bp, Glycine max
ccgtacagcgaaaagacgacagaagggggagcgaagaagatattagggtttttga

SEQ ID NO: 64618 - DNA, 132 bp, Glycine max
cttggggccgagcctcgtcctagctatctttttctctgtctgcttcacacatatttagactgagagaaagagaatcacctactatactcctagacaaccagcacgacactgtgttctgtctgctcgtgtgtc

SEQ ID NO: 64619 - DNA, 323 bp, Glycine max
gacagcaaaaacaattaataaagatgagtttgaagaacaacatggtggtgctaaaggtgtgtttgttgcttcttttccttgtgggggttacagctgcacgcatggaactgagcttcttcaaaagtgatcagtcatcaagttatgatgatgatgagtattcaaaaccatgctgtgatctctgcatgtgcacacgctcaatgcctcctcaatgcagctgtgaagatattaggctgaattcatgccactcagattgtaagagctgtatgtgcacacgctcacagccaggacagtgtcgttgtcttgacaccaacgacttctgctac

SEQ ID NO: 64620 - DNA, 222 bp, Glycine max
gacccatcaatagcaaaatgaccaagttcacaatcctcctcatctctcttctcttctgcatcgcccacacttgcagcgcctcgaaatggcagcaccagcaagatagctgccgcaagcagctccagggggtgaacctcacgccctgcgagaagcacatcatggagaagatccaaggccgcggcgatgacgatgatgatgatgacgacgacaatcacattctca

SEQ ID NO: 64621 - DNA, 121 bp, Glycine max
gacagcacaaacaactaatacagatgagtttgaagaacaacatggtggtgctaaaggtgtgtttgttgcttcttttccttgtgggggttacagctgcacgaatgaaactaaccttcttcaa

SEQ ID NO: 64622 - DNA, 117 bp, Glycine max
gaatccaaatcaaaccagcgatctcaaaaaaaaaaaccggcggcccaaaagaatcaaacctacgttagccttccatgcaacttcggacggctccaagattgccaccaaaatccaatt

SEQ ID NO: 64623 - DNA, 69 bp, Glycine max
cagacaggggggaaatactgactgagttgttgctccatcgccacacctctctgtcaccaacggtaaccc

SEQ ID NO: 64624 - DNA, 144 bp, Glycine max
gacagccaacacaattagtaaagatgagttcgaagagcaacacggtgctgcgataggtctgtttgttgcttcttttccctattcgtgtggcaacggtacccgtggatctgaccttcttcagatttgatgagtcatccagtgttg

SEQ ID NO: 64625 - DNA, 255 bp, Glycine max
ggcagcttctgaaacctttgacactttcatcattgtttagggttttctctcgatcgtaatttctgcaacaatgggaagaagaagaagaagagaaacgtttccacacgaagaagatgagcgagagaaaatcagaaagaaaggaaaaatcaaagaatctgttaccttcgaagttgacgacgacgacgaggaagacttggatgtttttgagaatgatgggtttattgttgatgatgccgaagatgatcaggaggaaga

SEQ ID NO: 64626 - DNA, 87 bp, Glycine max
ggcaccacccatggttctcaaaactgaactatgcccactcactggtgccaagatctactggggagagggcatcagatttgttcgttg

SEQ ID NO: 64627 - DNA, 100 bp, Glycine max
aacacatcattactcctgcagacaatgagataatattatccttttttattttacaatgtatagtagtgacgtcacaaaacaaaacaaaaactgttacaag

SEQ ID NO: 64628 - DNA, 75 bp, Glycine max
tgcaggatcaaaggatacatactcatgtatgcgaggtcaggacgtttcaatactgtcatctaatcatcaattaat

SEQ ID NO: 64629 - DNA, 402 bp, Glycine max
gattcacacaactaactaagaaagtcttccatagccccccaaaaatgaagagcaccatcttctttgctctctttctcttttgtgccttgaccagctcatacctaccttcagccatcgctgatttcgtgctcgataatgaaggtaaccctcttgaaaatggtggcacatattatatcttgtcagacataacagcatttggtggaataagagcagccccaacgggaaatgaaagatgccctctcactgtggtgcaatctcgcaatgagctcgacaaagggattggaacaatcatctcgtccccatatcgaatccgttttatcgccgaaggccatcctttgagccttaagttcgattcatttgcagttataatgctgtgtgtttgaattccctacgagtggtctg

SEQ ID NO: 64630 - DNA, 85 bp, Glycine max
tgggacagcaaaaacaattaataaacatcagtttgaacaacaacatggtcgtgctaaacgtctctttgttgcttcttttccttct

SEQ ID NO: 64631 - DNA, 81 bp, Glycine max
ttgggacagctctaacaattaataaacatgagtttgactaacaacatggttgtgctccacgtgtgtttgttgcttcctttc

SEQ ID NO: 64632 - DNA, 252 bp, Glycine max
ggcgatcgagcgtgatggatttggaaccctgggaagcacttgacgtggatgacaccaatctctccgccttcctccgcccttgcaactctaagggcgattcctcttccctcattcccggtcctgccggcgccgtccaggccgtgatgaggaaccggcgccaccatgaccccctctccactcaagaatttctaaagcgagttgagcgccaaagtgaccgcgatttcaacagcaatccctggctctgtgccctcc

SEQ ID NO: 64633 - DNA, 117 bp, Glycine max
cgggacagcacaaccaactactaaagatgagtttgaagaacaacatggtggtgctaaaggtgtgtttgttgcctcctttccttgtggggttacagctgcacgcatggaactgagctt

SEQ ID NO: 64634 - DNA, 357 bp, Glycine max
gattcacacaactaactaagaaagtcttccatagccccccaaaaatgaagagcaccatcttctttgctctctttctcttttgtgccttcacgacctcatacctaccttcagccatcgctgatttcgtgctcgataatgaaggtaaccctcttgaaaatggtggcacatattatatcttgtcagacataacagcatttggtggaataagagcagtctcaacgggaaatgaaagatgccctctcactgtggtgcaatctcgcaatgagctcgacaaagggattggaacaatcatctcgtcgccatatcgaatccgttttatcgccgaagggcatcctttgagccttaagtttcaatcat

SEQ ID NO: 64635 - DNA, 125 bp, Glycine max
ggaacacaagcatgtagcaaaagaaactgaagaataaaggagaacaagctaaaagaaaacagcaaagtcagccaagagcaaaaaaccacgtaatcaaacaccagacaaccaaaaaaaaaacaaat

SEQ ID NO: 64636 - DNA, 80 bp, Glycine max
tacagctgcgagactactacacaacggtaccgctgccagaacacgacacaatggtacagctgctacaacactacacaacg

SEQ ID NO: 64637 - DNA, 282 bp, Glycine max
cgggaacaaaaccacttgttcacccattaagctttcaagagacaaactgctttgacaaatgggatccactgttcttgcggcggttgtcgttctcctctccatcaacattcttttcatttccatggtcacgtccagcagccactactatccacagccccaatcttcttacgtcactgcacttagtatacgacctatttgtctggatctgagtatttgcctcaatatttgacgctggtcactaggaaccgtggatgatggttgtgccctcagcggtggtcatgg

SEQ ID NO: 64638 - DNA, 53 bp, Glycine max
agggatgcttcgggggaaactgacgctgaatattatactgtacacacacctgc

SEQ ID NO: 64639 - DNA, 123 bp, Glycine max
gaggataatttgagaaaagagagggcaatttccctttttcttttccgaccacgtctctccacgtaggtcagtactagccacactatcctctttcataagaggaattgcagttaattcaccttc

SEQ ID NO: 64640 - DNA, 332 bp, Glycine max
gacagcaaaaacaattaataaagatgagtttgaagaacaacatggtggtgctaaaggtgtgtttgttgcttcttttccttgtgggggttacagctgcacgcatggaactgagcttcttcaaaagtgatcagtcatcaagttatgatgatgatgagtattcaaaaccatgctgtgatctctgcatgtgcacacgctcaatgcctcctcaatgcagctgtgaagatattacgctgaattcatgccactcagattgtaagagctgtatgtgcacacgctcacagccaggacagtctccttgtcttgacacccacgacttcctgcacaaaccttgc

SEQ ID NO: 64641 - DNA, 401 bp, Glycine max
gacagcaaaaacaattaataaagatgagtttgaagaacaacatggtggtgctaaaggtgtgtttgttgcttcttttccttgtgggggttacagctgcacgcatggaactgagcttcttcaaaagtgatcagtcatcaagttatgatgatgatgagtattcaaaaccatgctgtgatctctgcatgtgcacacgctcaatgcctcctcaatgcagctgtgaagatattaggctgaattcatgccactcagattgtaagagctgtatgtgcacacgctcacagccaggacagtgtcgttgtcttgacaccaacgacttctgctacaaaccttgcaagttcagagattactacaaaaactaatagctctctcaaatggaccaagcccctttaggctttgtttgt

SEQ ID NO: 64642 - DNA, 203 bp, Glycine max
gaaggagaagataatctcataaaaaacagacaaaggagtgaaaaagagagacccttttgaatggagtctgttctaagccacgttggtgcaggtttcgtcaatggcatgatcccaaggggagttttaggtacccatttcaaggttacttcctttgttggtgttcatggtgggaggccaaggcgtgtagtgttggtgaacgctga

SEQ ID NO: 64643 - DNA, 61 bp, Glycine max
aatctttggaagttctgggctaatgacttctggatctccatctcgtctctttctcatcatt

SEQ ID NO: 64644 - DNA, 96 bp, Glycine max
atgcgtacggaagacgacagaaggggatctgaacttgcgagagtgaataaatgtcgcatgagttggcattggatttggacgagctgcgcctcctcg

SEQ ID NO: 64645 - DNA, 95 bp, Glycine max
ctgggggtgatgaatactttctatccgtgacactactatctctgtcccaaacacgcatccctgccccccaccaccacaccggccgctctagagga

SEQ ID NO: 64646 - DNA, 143 bp, Glycine max
cggggccgcgtgagcgcccttgtctcctcggatccacacgagacaagcatgctaagacagcgtgccaaccaggttcatcacgaaaagacagcgacctagccggagtccgagcgtcacatcaactacagaacgaatttaactac

SEQ ID NO: 64647 - DNA, 187 bp, Glycine max
gacggcaaaaacaattaataaagatgagtttgaagaacaacatggtcgtgctgggggtgtgtttgttgcttcttttccttgtgggggttacagctgcacgcatggaactgagcttcttcactagtgatcagtcctcaccttcttatcatgaccagtattcctaaccctgctgtcatctctgcatctc

SEQ ID NO: 64648 - DNA, 90 bp, Glycine max
ctttcaaatgtttctttgtgaaagattggaatgtattcatagtgtagagcataatttttatttttttcatttttttgcttctttttcttt

SEQ ID NO: 64649 - DNA, 349 bp, Glycine max
cgaaggggtccttccttaaaacctcaattgttaaccgtggaaaacagttggaagacaatcctttggaatttgaagttgcctcctccaaattaaacctcaactcaaccctgttgccccacaatgccacatgttcacgttcctgaatgtcctaaccttatagccttaataccttttgaaattaaccactttcaattaaccagtaacttccaaaaccttcaataataataataggtgatgaaatatttaattaagttcgccaaaaacaagacaaactcccacgacacaaaaagcgggcgctccaaaagattcaaccttacgttcgcctgcatgccaagttacagctcctcca

SEQ ID NO: 64650 - DNA, 121 bp, Glycine max
aggcagtgattcagtctctcagtatattaattcatcacccacagtttctcacttttccttcttagttcttcccttttcctttgtttctaccaaaacagcaaatcaaaacaaaccccttttg

SEQ ID NO: 64651 - DNA, 400 bp, Glycine max
gacagcaaaaacaattaataaagatgagtttgaagaacaacatggtggtgctaaaggtgtgtttgttgcttcttttccttgtgggggttacagctgcacgcatggaactgagcttcttcaaaagtgatcagtcatcaagttatgatgatgatgagtattcaaaaccatgctgtgatctctgcatgtgcacacgctcaatgcctcctcaatgcagctgtgaagatattaggctgaattcatgccactcagattgtaagagctgtatgtgcgcacgctcacagccaggacagtgtcgttgtcttgacaccaacgacttctgctacagaccttgcaagtccagagatgactagaacaactaatagctctctcaaatggacgaagcccctttaggctttgtttg

SEQ ID NO: 64652 - DNA, 368 bp, Glycine max
acgcgtccgcagcgagaagacaacagaaggggattcacatagttactactgtcagtggcagagagagagaaagacgtggagtgtgtgagtgaagaagctctctgttgatgtttacctcttccagtccaacctttgaatctgtaggcttcagttgtgctatttaacagtgtagggcattgtgtgcttaggaaatagtaagtttgtataattactgtaaataaaatcagtatgggtgaggaagaatcactgaatgaagtttcagagactgattcaaatggaaagagctttcaggagaaaactttggatgaaattactgagatcaaggacttggaaactgatggacgagaagtcttggagagcaatggtat

SEQ ID NO: 64653 - DNA, 188 bp, Glycine max
ggttctagtgtgtgattgtttgttgttgtaactcgttcttcttcttttgttgttctgtgtttgtgtttgttttttctctcaggtgaaggtctcgtgctgctgtggtaactgtggttgcggaggctcccgcaagtgcggcaactgctgctgaggctgcaagatgtacccagacttcagctacactgagt

SEQ ID NO: 64654 - DNA, 169 bp, Glycine max
gatctaattagatattattcaggatttcaattttgatttcatatttagggatgttattttgaatttatggtaattagtctgcattatcttattcaggatttggttggaatttgatttacctttatctttatcttatgtttaggaatttcatctttacttttgttgtttc

SEQ ID NO: 64655 - DNA, 77 bp, Glycine max
  unsure (1)..(77): unsure at all n locations
aagcatatcaataagcggacaaaacagaaaaatgcccantaaaaaaaaaaaagcggccgctctagaggatccaagct

SEQ ID NO: 64656 - DNA, 135 bp, Glycine max
cggggtaaaggaaaaccatcaataccaagaataatgcagtcttccacagaaccagcggccactgcgagaggatccacgagtgaatctcgcgttcacgctacgtcaaacgtcttcgcgggtgtcacctaaacccac

SEQ ID NO: 64657 - DNA, 63 bp, Glycine max
ggggccttcactctgaaccaaataccatagtcttctctttgtccgtgacaaaacagttcccgc

SEQ ID NO: 64658 - DNA, 417 bp, Glycine max
gatctcactcttcaattcaaatccctaatgtctaccactctctcgaaccttcctaacgcctcctcttttcttcctaaacctaaacctaaaccctctcttcctcacccacaaacccctctcactcactccgcagtacttttatctcggtcaatttgcttgaggaatctgttgccaaaggcaacgtcttctgaagagcgatccactggaggaagtcaatttttcaatgagaaacgcgatggtgtcataatcctggagaatgttaaagaggataataagaatgatttcgataaaacggtgattgaagacacaatagaagaagagttgtctgatgatggacagggtctgtcatttgatttgatggataagctcaattttgatacagatgacacttgttctattggcctgtatgggggttgt

SEQ ID NO: 64659 - DNA, 317 bp, Glycine max
gattcacacaactaactaagaaagtcttccatagccccccaaaaatgaagagcaccatcttctttgctctctttctcttttgtgccttcaccacctcatacctaccttcagccatcgctgatttcgtgctcgataatgaaggtaaccctcttgaaaatggtggcacatattatatcttgtcagacataacagcatttggtggaataagagcagccccaacgggaaatgaaagatgccctctcactgtggtgcaatctcgcaatgagctcgacaaagggattggaacaatcatctcgtccccatatcgaatccgtttt

SEQ ID NO: 64660 - DNA, 373 bp, Glycine max
gacagcaaaaacaattaataaagatgagtttgaagaacaacatggtggtgctaaaggtgtgtttgttgcttcttttccttgtgggggttacagctgcacgcatggaactgagcttcttcaaaagtgatcagtcatcaagttatgatgatgatgagtattcaaaaccatgctgtgatctctgcatgtgcacacgctcaatgcctcctcaatgcagctgtgaagatattaggctgaattcatgccactcagattgtaagagctgtatgtgcacacgctcacagccaggacagtgtcgttgtcttgacaccaacgacttctgctacaaaccttgcaagtccagagatgactagaacaactaatagctctctcaaat

SEQ ID NO: 64661 - DNA, 199 bp, Glycine max
ggaaaaccctaaatctcagtttttcttatacagccactctttcattctcattgccgtcacacagagagagaagagacaatgaagtttaacccaagggttccctcaagccgtcaaaagacccgcagggtacatttaagggccctttaaagtgtgtctcgtgtcgagaaaagcgcctctctcgagagatatcccggcgaaa

SEQ ID NO: 64662 - DNA, 387 bp, Glycine max
gacagcaaaaacaattaataaagatgagtttgaagaacaacatggtggtgctaaaggtgtgttcgttgcttcttttccttgtgggggttacagctgcacgcatggaactgagcttcttcaaaagtgatcagtcatcaagttatgatgatgatgagtattcaaaaccatgctgtgatctctgcatgtgcacacgctcaatgcctcctcaatgcagctgtgaagatattaggctgaattcatgccactcagattgtaagagctgtatgtgcacacgctcacagccaggacagtgtcgttgtcttgacaccaacgacttctgctacaaaccttgcaagtccagagatgactagaaaaactaatagctctctcaaatggacgaagcccctt

SEQ ID NO: 64663 - DNA, 312 bp, Glycine max
  unsure (1)..(312): unsure at all n locations
gacagcanaaacaattaataaagatgagtttgaagaacaacatggtggtgctaaaggtgtgtttgttgcttcctttccttgtgggggttacagctgcacgcatggaactgagcttcttcaaaagtgatcagtcatcaagttatgatgatgatgagtattcacaaccatgctgtgatctctgcatgtgcacacgctcaatgcctccccaatgcagctgtgaagatattaggctgaattcatgccactcacattgtaagagctgtatgtgcacacgctcacaagcaggacactgtccttgtcctgacaccaaac

SEQ ID NO: 64664 - DNA, 412 bp, Glycine max
gacagcaaaaacaattaataaagatgagtttgaagaacaacatggtggtgctaaaggtgtgtttgttgcttcttttccttgtgggggttacagctgcacgcatggaactgagcttcttcaaaagtgatcagtcatcaagttatgatgatgatgagtattcaaaaccatgctgtgatctctgcatgtgcacacgctcaatgcctcctcaatgcagctgtgaagatattaggctgaattcatgccactcagattgtaagagctgtatgtgcacacgctcacagccaggacagtgtcgttgtcttgacaccaacgacttctgctacaaaccttgcaagtccagagatgactagaaaaactaatagctctctcaaatggacgaagcccctttaagctttgtttgttatgttaaggg

SEQ ID NO: 64665 - DNA, 333 bp, Glycine max
gacagcaaaaacaattaataaagatgagtttgaagaacaacatggtggtgctaaaggtgtgtttgttgcttcttttccttgtgggggttacagctgcacgcatggaactgagcttcttcaaaagtgatcagtcatcaagttatgatgatgatgagtattcaaaaccatgctgtgatctctgcatgtgcacacgctcaatgcctcctcaatgcagctgtgaagatattaggctgaattcatgccactcagattgtaagagctgtatgtgcacacgctcacagccaggacagtgtcgttgtcttgacaccaacgacttctgctacaaaccttgca

SEQ ID NO: 64666 - DNA, 372 bp, Glycine max
gacagcaaaaacaattaataaagatgagtttgaagaacaacatggtggtgctaaaggtgtgtttgttgcttcttttccttgtgggggttacagctgcgcgcatggaactgagcttcttcaaaagtgatcagtcatcaagttatgatgatgatgagtattcaaaaccatgctgtgatctctgcatgtgcacacgctcaatgcctcctcaatgcagctgtgaagatattaggctgaattcatgccactcagattgtaagagctgtatgtgcacacgctcacagccaggacagtgtcgttgtcttgacaccaacgacttctgctacaaaccttgcaagtccagagatgactagaaaaactaatagctctctcaaa

SEQ ID NO: 64667 - DNA, 272 bp, Glycine max
tctttcaactaatcaactctccaaatcacatgtggttgaaatggttagggtcctgaatggtccggaaaaggataatgtatttcgaggatttacaccagtagattgcaccatctgacctgttgaaagcttccacagcacactacttgctccacaacaaggcacaattcactggccgtcgttttaaaaaatacctgactctcaaaaggatgcaatcttacatattcatccatgtgaagtaaaacctcttctatactgtcagctaaattcaattc

SEQ ID NO: 64668 - DNA, 402 bp, Glycine max
gacagcaaaaacaattaataaagatgagtttgaagaacaacatggtggtgctaaaggtgtgtttgttgcttcttttccttgtgggggttacagctgcacgcatggaactgagcttcttcaaaagtgatcagtcatcaagtcatgatgatgatgagtattcaaaaccatgctgtgatctctgcatgtgcacacgctcaatgcctcctcaatgcagctgtgaagatattaggctgaattcatgccactcagattgtaagagctgtatgtgcacacgctcacagccaggacagtgtcgttgtcttgacaccaacgacttctgctacaaaccttgcaagtccagagatgactagaaaaactaatagctctctcaaatggacgaaacccctttaagctttgtttgtt

SEQ ID NO: 64669 - DNA, 373 bp, Glycine max
  unsure (1)..(373): unsure at all n locations
agggacagcacanacaattaatacagatgagtttgaagaacaacatggtggtgctaaaggtgtgcttgttgcttcctttccttgtgggggttacagctgcacgcatggaactgagcttcttcanaagtgatcagtcatcaagttatgatgatgatgagtattcaaaaccatgctgtgatctctgcatgtgcacacgctcaatgcctcctcaatgcagctgtgaagatattaggctgaattcatgccactcagattgtaagagctgtatgtgcacacgctcacagccaggacagtgtcgttgtcctgacaccaacgacttctgctacaaaccttgcaagtccagagatgactagaaaaactaatagctctctca

SEQ ID NO: 64670 - DNA, 402 bp, Glycine max
ggttctagtgtatgtgattgttgtgactcgttcttcttcgtcgttatcttcttcttttgttgtttgtgtgtttgttttttctctcacctgaaaatgtcttgctgcggtggtaactgtggttgcggaagcgcctgcaagtgcggcaacggctgcggaggctgcaagatgtacccagacttgagctacaccgagtcaaccaccaccgagaccttggtcatgggagtggcaccagttaaggctcaattcgagagtgctgaaatgggtgttcccgcagagaacgatggctgcaaatgtggagctaactgcacctgcaacccctgcacttgcaagtgaagtgttggagagctaaagcttcaagcagaaatggcccttagaaatactgataaaaactatatgtagttt

SEQ ID NO: 64671 - DNA, 377 bp, Glycine max
gattcacacaactaactaagaaagtcttccatagccccccaaaaatgaagagcaccatcttctttgctctctttctcttttgtgccttcaccacctcatacctaccttcagccatcgctgatttcgtgctcgataatgaaggtaaccctcttgaaaatggtggcacatattatatcttgtcagacataacagcatttggtggaataagagcagccccaacgggaaatgaaagatgccctctcactgtggtgcaatctcgcaatgagctcgacaaagggattggaacaatcatctcgtccccatatcgaatccgttttatcgccgaaggccatcctttgagccttaagttcgattcatttgcagttataatgctgtgt

SEQ ID NO: 64672 - DNA, 400 bp, Glycine max
gacagcaaaaacaattaataaagatgagtttgaagaacaacatggtggtgctaaaggtgtgtttgttgcttcttttccttgtgggggttacagctgcacgcatggaactgagcttcttcaaaagtgatcagtcatcaagttatgatgatgatgagtattcaaaaccatgctgtgatctctgcatgtgcacacgctcaatgcctcctcaatgcagctgtgaagatattaggctgaattcatgccactcagattgtaagagctgtatgtgcacacgctcacagccaggacagtgtcgttgtcttgacaccagcgacttctgctacaaaccttgcaagtccagagatgactagaaaaactaatagctctctcaaatggacgaagcccctttaggctttgtttg

SEQ ID NO: 64673 - DNA, 131 bp, Glycine max
gactttgagttcgaactaaacaattcaattcaatctgcctcgatcatggagaggaaaacatttgggtttttgtccttgcccctcctggccttacctccggatttgccggtgaaaaaacaaaaggcaaagaa

SEQ ID NO: 64674 - DNA, 288 bp, Glycine max
gagagcgagagagagagttacttcccgcagaaggttctgtgtggaatctataaaacaaagatggggaaaggagaaaaaaaatactatagaaagagagagaggaagaaagagaaacggtttaattttaaattattagtgattagtgattgatttctaagaaatcatcaaagggggtttcgtgacatccttgttcttctgcttagccgagattctggaaaatcaaaatctccacgtaatctacttgtaaccatcttcttctccaagattttcgccttacccttttcccac

SEQ ID NO: 64675 - DNA, 400 bp, Glycine max
  unsure (1)..(400): unsure at all n locations
gacagcanaaacaattaataaagatgggtttgaagaacaacatggtggtgctaaaggtgtgtttgttgcttcttttccttgtgggggttacagctgcacgcatggaactgagcttcttcaaaagtgatcagtcatcaagttatgatgatgatgagtattcaaaaccatgctgtgatctctgcatgtgcacacgctcaatgcctcctcaatgcagctgtgaagatattaggctgaattcatgccactcagattgtaagagctgtatgtgcacacgctcacagccaggacagtgtcgttgtcttgacaccaacgacttctgctacaaaccttgcaagtccagagatgactagaaaaactaatagctctctcaaatggacgaagcccctttaggctttgtttg

SEQ ID NO: 64676 - DNA, 332 bp, Glycine max
gacagcaaaaacaattaataaagatgagtttgaagaacaacatggtggtgctaaaggtgtgtttgttgcttcttttccttgtgggggttacagctgcacgcatggaactgagcttcttcaaaagtgatcagtcatcaagttatgatgatgatgactattcaaaaccatgctgtgatctctgcatgtgcacacgctcaatgcctcctcaatgcagctgtgaagatattacgctgaattcatgccactcagattgtaagagctgtatgtgcacacgctcacagccaggacagtgtctttgtcttgacactaacgatttctgctacaaaccttgc

SEQ ID NO: 64677 - DNA, 364 bp, Glycine max
gacagcaaaaacaattaataaagatgggtttgaagaacaacatggtggtgctaaaggtgtgtttgttgcttcttttccttgtgggggttacagctgcacgcatggaactgagcttcttcaaaagtgatcagtcatcaagttatgatgatgatgagtattcaaaaccatgctgtgatctctgcatgtgcacacgctcaatgcctcctcaatgcagctgtgaagatattaggctgaattcatgccactcagattgtaagagctgtgtgtgcacacgctcacagccaggacagtgtcgttgtcttgacaccaacgacttctgctacaaaccttgcaagtccagaaatgactaaaaaaactaatagct

SEQ ID NO: 64678 - DNA, 396 bp, Glycine max
gacagcaaaaacaattaataaagatgagtttgaagaacaacatggtggtgctaaaggtgtgtttgttgcttcttttccttgtgggggttacagctgcacgcatggaactgagcttcttcaaaagtgatcagtcatcaagttatgatgatgatgagtattcaaaaccatgctgtgatctctgcatgtgcacacgctcaatgcctcctcaatgcagctgtggagatattaggctgaattcatgccactcagattgtaagagctgtatgtgcacacgctcacagccaggacagtgtcgttgtcttggcaccaacgacttctgctacaaaccttgcaagtccagagatgactagaaaaactaatagctctctcaaatggacgaagcccctttaggctttg

SEQ ID NO: 64679 - DNA, 176 bp, Glycine max
gattgcctttttggttaattataattgtaattttattttttaaaaaacacatccaccatgtcacataatgccacataagacaaataagacacgtaatcatctattcaactaagttacttatttcacaggcaattaacaattgaccttatttgcatttttaaaaaaaactaagggct

SEQ ID NO: 64680 - DNA, 76 bp, Glycine max
gatagcagcatcatacaaagcattgaattcaaaaacttaagttcattccttgtgttttgctttcttcctcaaaacc

SEQ ID NO: 64681 - DNA, 178 bp, Glycine max
gcgggttaaggttgtcatcataattatgcagacaatgtggaaattttgtttgttggattttagtgcagattctggttcttatatgaaaaacagcatctcttttagcaaaaagagaaaaaaaaaaaaaaaaaagaaagcggcagcacaagatgattcaagggtaccgacgcgggaattc

SEQ ID NO: 64682 - DNA, 376 bp, Glycine max
gacacaactaactaagaaagtcttccatagccccccaaaaatgaagagcaccatcttctttgctctctttctcttttgtgccttcaccacctcatacctaccttcagccatcgctgatttcgtgctcgataatgaaggtaaccctcttgaaaatggtggcacatattatatcttgtcagacataacagcatttggtggaataagagcagccccaacgggaaatgaaagatgccctctcactgtggtgcaatctcgcaatgagctcgacaaggggattggaacaatcatctcgtccccatatcgaatccgttttatcgccgaaggccatcctttgagccttaagttcgattcatttgcagttataatgctgtgtgtt

SEQ ID NO: 64683 - DNA, 409 bp, Glycine max
  unsure (1)..(409): unsure at all n locations
catgcatagcttaaagtatgcccgagtcattcatccctatgaaaggttgttgaagtattggtgatcagaattatcattccttggattataggattgaactaagctcatgctttttcgaaaaaagttcatcaagtcaagttgaagtatggaagtaaccatcttgcaaaaattggggcaaaagatgaatcgagttacatcactgcttcgtctactgccaaacacatttaggattgttgatgtccttgttacttccagtttcaccttgaccaagatgtcatgaaccatgttgaaaaatctaaattgattcaaccccatgtcctgcgtaaaaattcacaatacttcaactgtgcatcattcgcatacatccatgcttttcattggttgcattgctcattgcattcntttcttg

SEQ ID NO: 64684 - DNA, 83 bp, Glycine max
cgggaaaaaaattaatgtataaaacacactccacctcatcgcacccaccaaaaaaaccggccgctctacacgatccaagctta

SEQ ID NO: 64685 - DNA, 79 bp, Glycine max
tcacgcatgataccgacacctagttgctcctgccttgcattttcaacacgcagccgcccttgacgatcaagcatacgtc

SEQ ID NO: 64686 - DNA, 374 bp, Glycine max
gacacaactaactaagaaagtcttccatagccccccaaaaatgaagagcaccatcttctttgctctctttctcttttgtgccttcaccacctcatacctaccttcagccatcgctgatttcgtgctcgataatgaaggtaaccctcttgaaaatggtggcacatattatatcttgtcagacatagcagcatttggtggaataagagcagccccaacgggaaatgaaagatgccctctcactgtggtgcaatctcgcaatgagctcgacaaagggattggaacaatcatctcgtccccatatcgaatccgttttatcgccgaaggccatcctttgagccttaagttcgattcatttgcagttataatgctgtgtg

SEQ ID NO: 64687 - DNA, 315 bp, Glycine max
gacagcaaaaacaattaataaagatgagtttgaagaacaacatggtggtgctaaaggtgtgtttgttgcttcttttccttgtgggggttacagctgcacgcatggaactgagcttcttcaaaagtgatcagtcatcaagttatgatgatgatgagtattcaaaaccatgctgtgatctctgcatgtgcacacgctcaatgcctcctcaatacagctgtgaagatattaggctgaattcatgccactcagattgtaagagctgtatgtgcacacgctcacagccaggacagtgtcgttgtcttgacaccaacgact

SEQ ID NO: 64688 - DNA, 391 bp, Glycine max
  unsure (1)..(391): unsure at all n locations
gacagcanaaacaattaataaagatgagtttgaagaacaacatggtggtgctaaaagtgtgtttgctgcttcttttccttgtgggggttacagctgcacgcatggaactgagcttcttcaaaagtgatcagtcatcaagttatgatgatgatgagtattcaaaaccatgctgtgatctctgcatgtgcacacgctcaatgcctcctcaatgcagctgtgaagatattacgctgaattcatgccactcagattgtaagagctgtatgtgcacacgctcacagccaggacagtgtcgttgtcctgacaacaacgacttctgctacaaaccttgcaagtccagagatgactagaaaaactaatagctctctcaaatgtgacaaacccctttaag

SEQ ID NO: 64689 - DNA, 411 bp, Glycine max
gacagcaaaaacaattaataaagatgagtttgaagaacaacatggtggtgctaaaggtgtgtttgttgcttcttttccttgtgggggttacagctgcacgcatggaactgagcttcttcaaaagtgatcagtcatcaagttatgatgatgatgagtattcaaaaccatgctgtgatctctgcatgtgcacacgctcaatgcctcctcaatgcagctgtgaagatattaggctgaattcatgccactcagattgtaagagctgtatgtgcacacgctcacagccaggacagtgtcgttgtcttgacaccaacgacttctgctacaaaccttgcaagttcagagatgactagaaaaactaatagctctctcaaatggacgaacccctttaagctttgtttgttatgttggggg

SEQ ID NO: 64690 - DNA, 397 bp, Glycine max
gcacacaactaactaagaaagtcttccatagccccccaaaaatgaagagcaccatcttctttgctctctttctcttttgtgccttcaccacctcatacctaccttcagccatcgctgatttcgtgctcgataatgaaggtaaccctcttgaaaatggtggcacatattatatcttgtcagacataacagcatttggtggaataagagtagccccaacgggaaatgaaagatgccctctcactgtggtgcaatctcgcaatgagctcgacaaagggattggaacaatcatctcgtccccatatcgaatccgttttatcgccgaaggccatcctttgagccttaagttcgattcatttgcagtttatatgctgtgtgttggaattcctaccgagtggtc

SEQ ID NO: 64691 - DNA, 167 bp, Glycine max
gatagctgtccatttatgaaacccaggtttccgtgcaggataagttaatatggaacaccagcgtgttcgcgatctctctactgtgtgcgctcaggggatagggtgagtctgtttctgtctaaatgtgggctacgttttatgggtatttccgtcgtgcacggtgtcac

SEQ ID NO: 64692 - DNA, 309 bp, Glycine max
gacagcaaaaacaattaataaagatgagtttgaagaacaacatggtggtgctaaaggtgtgtttgttgcttcttttccttgtgggggttacagctgcacgcatggaactgagcttcttcaaaagtgatcagtcatcaagttatgatgatgatgagtattcaaaaccatgctgtgatctctgcatgtgcacacgctcaatgcctcctcaatgcagctgtgaagatattaggctgaattcatgccactcagattgtaagagctgtatgtgcacacgctcacagccaggacagtgtcgttgtcttgacacca

SEQ ID NO: 64693 - DNA, 75 bp, Glycine max
tgggaccagtcaaattctttgtagtaataactaccataaaataaattcttttttaaaaattcacataatacttta

SEQ ID NO: 64694 - DNA, 405 bp, Glycine max
gattcacacaactaactaagaaagtcttccatagccccccaaaaatgaagagcaccatcttctttgctctctttctcttttgtgccttcaccacctcatacctaccttcagccatcgctgatttcgtgctcgataatgaaggtaaccctcttgaaaatggtggcacatattatatcttgtcagacataacagcatttggtggaataagagcagccccaacgggaaatgaaagatgccctctcactgtggtgcaatctcgcaatgagctcgacaaagggattggaacaatcatctcgtccccatatcgaatccgttttatcgccgaaggccatcctttgagccttaagttcgattcatttgcagttataatgctgtgtgttggaattcctaccgagtggtctgttg

SEQ ID NO: 64695 - DNA, 412 bp, Glycine max
gacagcaaaaacaattaataaagatgagtttgaagaacaacatggtggtgctaaaggtgtgtttgttgcttcttttccttgtgggggttacagctgcacgcatggaactgagcttcttcaaaagtgatcagtcatcaagttatgatgatgatgagtattcaaaaccatgctgtgatctctgcatgtgcacacgctcaatgcctcctcaatgcagctgtgaagatattaggctgaattcatgccactcagattgtaagagctgtatgtgcacacgctcacagccaggacagtgtcgttgtcttgacaccaacgacttctgctacaaaccttgcaagtccagagatgactagaaaaactaatagctctctcaaatggacgaagcccctttaggctttgtttgttatgttagggg

SEQ ID NO: 64696 - DNA, 405 bp, Glycine max
gacagcaaaaacaattaataaagatgagtttgaagaacaacatggtggtgctaaaggtgtgtttgttgcttcttttccttgtgggggttacagctgcatgcatggaactgagcttcttcaaaagtgatcagtcatcaagttatgatgatgatgagtattcaaaaccatgctgtgatctctgcatgtgcacacgctcaatgcctcctcaatgcagctgtgaagatattaggctgaattcatgccactcagattgtaagagctgtatgtgcacacgctcacagccagggcagtgtcgttgtcttgacaccaacgacttctgctacaaaccttgcaagtccagagatgactagaaaaactaatagctctctcaaatggacgaagcccctttaagctttgtttgttatg

SEQ ID NO: 64697 - DNA, 401 bp, Glycine max
gacagcaaaaacaattaataaagatgagtttgaagaacaacatggtggtgctaaaggtgtgtttgttgcttcttttccttgtgggggttacagctgcacgcatggaactgagcttcttcaaaagtgatcagtcatcaagttatgatgatgatgagtattcaaaaccatgctgtgatctctgcatgtgcacacgctcaatgcctcctcaatgcagctgtgaagatattaggctgaattcatgccactcagattgtaagagctgtatgtgcacacgctcacagccaggacagtgtcgttgtcttgacaccaacgacttctgctacaaaccttgcaagtccagagatgactagaaaaactaatagctctctcaaatggacgaagcccctttaagctttgtttgt

SEQ ID NO: 64698 - DNA, 290 bp, Glycine max
gacagcaaaaacaattaataaagatgagtttgaagaacaacatggtggtgctaaaggtgtgtttgttgcttcttttccttgtgggggttacagctgcacgcatggaactgagcttcttcaaaagtgatcagtcatcaagctatgatgatgatgagtattcaaaaccatgctgtgatctctgcatgtgcacacgctcaatgtctcctcaatgcagctgtgaagatattacgctgaattcatgccactcagattgttagagctgtatgtgcacacgcccacagccaggacag

SEQ ID NO: 64699 - DNA, 386 bp, Glycine max
gacagcaaaaacaattaataaagatgagtttgaagaacaacatggtggtgctaaaggtgtgtttgttgcttcttttccttgtgggggttacagctgcacgcatggaactgagcttcttcaaaagtgatcagtcatcaagttatgatgatgatgagtattcaaaaccatgctgtgatctctgcatgtgcacacgctcaatgcctcctcaatgcagctgtgaagatattaggctgaattcatgccactcagattgtaagagctgtatgtgcacacgctcacagccaggacagtgtcgttgtcttgacaccaacgacttctgctacaaaccttgcaagtccagagatgactagaaaaactaatagctctctcaaattgacgaagcccct

SEQ ID NO: 64700 - DNA, 360 bp, Glycine max
gacagcaaaaacaattaataaagatgagtttgaagaacaacatggtggtgctaaaggtgtgtttgttgcttcttttccttgtgggggttacagctgcacgcatggaactgagcttcttcaaaagtgatcagtcatcaagttatgatgatgatgagtattcaaaaccatgctgtgatctctgcatgtgcacacgctcaatgcctcctcaatgcagctgtgaagatattaggctgaattcatgccactcagattgtaagagctgtatgtgcacacgctcacagccaggacagtgtcgttgtcttgacaccaacgacttctgctacaaaccttgcaagtccagagatgactagaaaaactaat

SEQ ID NO: 64701 - DNA, 405 bp, Glycine max
gacagcaaaaacaattaataaagatgagtttgaagaacaacatggtggtgctaaaggtgtgtttgttgcttcttttccttgtgggggttacagctgcacgcatggaactgagcttcttcaaaagtgatcagtcatcaagttatgatgatgatgagtattcaaaaccatgctgtgatctctgcatgtgcacacgctcaatgcctcctcaatgcagctgtgaagatattaggctgaattcatgccactcagattgtaagagctgtatgtgcacacgctcacagccaggacagtgtcgttgtcttgacaccaacgacttctgctacaaaccttgcaagtccagagacgactagaaaaactaatagctctctcaaatggacgaagcccctttaggctttgtttgttatg

SEQ ID NO: 64702 - DNA, 182 bp, Glycine max
tacggctaccaaatggtaacgctccggtactgctgctagatgtttacgttccggtacggcttctataggttacggcttcgctattgctgccatcacgttgaggttgggggacaacaaccttacgttactgcggtgagtttgccactcaccgtcatcgttcttactctatgatagctgcttcc

SEQ ID NO: 64703 - DNA, 404 bp, Glycine max
gacagcaaaaacaattaataaagatgagtttgaagaacaacatggtggtgctaaaggtgtgtttgttgcttcttttccttgtgggggttacagctgcacgcatggaactgagcttcttcaaaagtgatcagtcatcaagttatgatgatgatgagtattcaaaaccatgctgtgatctctgcatgtgcacacgctcaatgcctcctcaatgcagctgtgaagatattaggctgaattcatgccactcagattgtaagagctgtatgtgcacacgctcacagccaggacagtgtcgttgtcttgacaccaacgacttctgctacaaaccttgcaagtccagagatgactagaaaaactaatagctctctcaaatggacgaagcccctttaggctttgtttgttat

SEQ ID NO: 64704 - DNA, 300 bp, Glycine max
taccgctgctacaatacgacagaatgggacagcaacaacagttaataacgatgactttgatgatcaacatggtggtgctaaaggtgtgtttgttgcatcttttccctgtgggggttacatctgcacgcatggaactgagcttcttcaaaactgatcagtcatcaagttatgatgatgatgagtattcagaaccatgctgtgatctctgcatgtgcacacgctcaatgcctcctcactgcagctgtgaagatactacgctgaattcatgccactcagattgtaagagctgtatgtgcacac

SEQ ID NO: 64705 - DNA, 407 bp, Glycine max
gattcacacaactaactaagaaagtcttccatagccccccaaaaatgaagagcaccatcttctttgctctctttctcttttgtgccttcaccacctcatacctaccttcagccatcgctgatttcgtgctcgataatgaaggtaaccctcttgaaaatggtggcacatattatatcttgtcagacataacagcatttggtggaataagagcagccccaacgggaaatgaaagatgccctctcactgtggtgcaatctcgcaatgagctcgacaaagggattggaacaatcatctcgtccccatatcgaatccgttttatcgccgaaggccatcctttgagccttaagttcgattcatttgcagttataatgctgtgtgttggaattcctaccgagtggtctgttgtg

SEQ ID NO: 64706 - DNA, 315 bp, Glycine max
gacagcaaaaacaattaataaagatgagtttgaagaacaacatggtggtgctaaaggtgtgtttgttgcttcttttccttgtgggggttacagctgcacgcatggaactgagcttcttcaaaagtgatcagtcatcaagttatgatgatgatgagtattcaaaaccatgctgtgatctctgcatgtgcacacgctcaatgcctcctcaatgcagctgtgaagatattaggctgaattcatgccactcagattgtaagagctgtatgtgcacacgctcacagccaggacagtgtcgttgtcttgacaccaacgact

SEQ ID NO: 64707 - DNA, 359 bp, Glycine max
gacagcaaaaacaattaataaagatgagtttgaagaacaacatggtggtgctaaaggtgtgtttgttgcttcttttccttgtgggggttacagctgcacgcatggaactgagcttcttcaaaagtgatcagtcatcaagttatgatgatgatgagtattcaaaaccatgctgtgatctctgcatgtgcacacgctcaatgcctcctcaatgcagctgtgaagatattaggctgaattcatgccactcagattgtaagagctgtatgtgcacacgctcacagccaggacagtgtcgttgtcttgacaccaacgacttctgctacaaaccttgcaagtccagagatgactagaaaaactaa

SEQ ID NO: 64708 - DNA, 395 bp, Glycine max
gattcacacaactaactaagaaagtcttccatagccccccaaaaatgaagagcaccatcttctttgctctctttctcttttgtgccttcaccacctcatacctaccttcagccatcgctgatttcgtgctcgataatgaaggtaaccctcttgaaaatggtggcacatattatatcttgtcagacataacagcatttggtggaataagagcagccccaacgggaaatgaaagatgccctctcactgtggtgcaatctcgcaatgagctcgacaaagggattggaacaatcatctcgtccccatatcgaatccgttttatcgccgaaggccatcctttgagccttaagttcgattcatttgcagttataatgctgtgtgttggaattcccaccgag

SEQ ID NO: 64709 - DNA, 387 bp, Glycine max
gacagcaaaaacaattaataaagatgagtttgaagaacaacatggtggtgctaaaggtgtgtttgttgcttcttttccttgtgggggttacagctgcacgcatggaactgagcttcttcaaaagtgatcagtcatcaagttatgatgatgatgagtattcaaaaccatgctgtgatctctgcatgtgcacacgctcaatgcctcctcaatgcagctgtgaagatattaggttgaattcatgccactcagattgtaagagctgtatgtgcacacgctcacagccaggacagtgtcgttgtcttgacaccaacgacttctgctacaaaccttgcaagtccagagatgactagaaaaactaatagctctctcaaatggacgaagcccctt

SEQ ID NO: 64710 - DNA, 140 bp, Glycine max
tccacacaagggtatctagcccaaccagcatacgacgccttgggacaacatagacaattgcggccgctctatatgatccaagcttaggtacgtgtgcatgtgacggggtagcgcgcctaccttgtcacggaaattcaatt

SEQ ID NO: 64711 - DNA, 339 bp, Glycine max
ggttctactgtgtgaatgtttgttgttgtaactcgttcatcttcttttgttgttctgtgtttgtgtttgttttttctctcagctgaaaatgtcttgctgcggtggtaactgtggttgcggaagctcctgtaagtgaggaaacagctgcagaggctgcaagatgtacccagacttgagctacactgagtcaaccaccaccgagaccttggtcatgggagtggcacctgttaatgctcaatttgagggtgctgaaatgggtgtgcacgctgagaaagatggctgcaaatgtggagcaaactgctcctgcaatccctgcacgtgcaagtgacgtgttgggag

SEQ ID NO: 64712 - DNA, 440 bp, Glycine max
gacagcaaaaacaattaataaagatgagtttgaagaacaacatggtggtgctaaaggtgtgtttgttgcttcttttccttgcgggggttacagctgcacgcatggaactgagcttcttcaaaagtgatcagtcatcaagttatgatgatgatgagtattcaaaaccatgctgtgatctctgcatgtgcacacgctcaatgcctcctcaatgcagctgtgaagatattaggctgaattcatgccactcagattgtaagagctgtatgtgcacacgctcacagccaggacagtgtcgttgtcttgacaccaacgacttctgctacaaaccttgcaagtccagagatgactagaaaaactaatagctctctcaaatggacgaagcccctttaggctttgtttgctatgttaggggagacaaataaaacaagaaataaaagctc

SEQ ID NO: 64713 - DNA, 262 bp, Glycine max
cagaacgggaccgcactccttttccttctcgttctggtttatggatctttcccaacgatgtttacagcgctcaaccacatattcgggaccacgggggacaggtcacttaactttacattcctacgcagtgctccctcacatacacattgactatcgctaatgaacatgcttcggttcacattaacattgcgcatgtcgatcacaatggcgtctacaactggtcatttctccatttttgccccctgcggattcatccgtgctc

SEQ ID NO: 64714 - DNA, 83 bp, Glycine max
gatggaaaaagattaatagatccaaaaatgccattagacacttagtaggagagggaaaaaatatataatttattatgtaatag

SEQ ID NO: 64715 - DNA, 306 bp, Glycine max
gacagcaaaaacaattaataaagatgagtttgaagaacaacatggtggtgctaaaggtgtgtttgttgcttcttttccttgtgggggttacagctgcacgcatggaactgagcttcttcaaaagtgatcagtcatcaagttatgatgatgatgagtattcaaaaccatgctgtgatctctgcatgtgcacacgctcaatgcctcctcaatgcagctgtgaagatattaggctgaattcatgccactcagattgtaagagctgtatgtgcacacgctcacagccaggacagtgtcgttgtcttgaca

SEQ ID NO: 64716 - DNA, 84 bp, Glycine max
  unsure (1)..(84): unsure at all n locations
gtgcgtggctaatggataaagaattaaaataaaaaaaatttcataagaatttataattttattatcttaacanaaaaaaaagaa

SEQ ID NO: 64717 - DNA, 164 bp, Glycine max
tacggctgccacaacaccacacaaggggggggacaacccctccccatcacaaaactcaccaagcggccgctccacaggactcaagcttagatacccgttcacgcaacctcacacctcatctaaagcgtcacctaaactcaattcaccggtcatctttttacaac

SEQ ID NO: 64718 - DNA, 203 bp, Glycine max
  unsure (1)..(203): unsure at all n locations
aggtaccagagatgcctgccacaaatgacaacaaaagaaaatggaggacagaaaccttattcagtttcctatattcccttaggttgcttccaatagcataggcagtagcatagcagcagattaaaaaaaaagagagggtaaaattacaacataagagcttttcttttttcaatattttggaaaaaatgaaaagagaananggg

SEQ ID NO: 64719 - DNA, 435 bp, Glycine max
gacagcaaaaacaattaataaagatgagtttgaagaacaacatggtggtgctaaaggtgtgtttgttgcttcttttccttgtgggggttacagctgcacgcatggaactgagcttcttcaaaagtgatcagtcatcaagttatgatgatgatgagtattcaaaaccatgctgtgatctctgcatgtgcacacgctcaatgcctcctcaatgcagctgtgaagatattaggctgaattcatgccactcagattgtaagagctgtatgtgcacacgctcacagccaggacagtgtcgttgtcttgacaccaacgacttctgctacaaaccttgcaagtccagagatgactagaaaaactaatagctctctcaaatggacgaaacccctttaggctttgtttgttatgttaggggagacaaataaaacaagaattaaa

SEQ ID NO: 64720 - DNA, 399 bp, Glycine max
gacagcaaaaacaattaataaagatgagtttgaagaacaacatggtggtgctaaaggtgtgtttgttgcttcttttccttgtgggggttacagctgcacgcatggaactgagcttcttcaaaagtgatcagtcatcaagttatgatgatgatgagtattcaaaaccatgctgtgatctctgcatgtgcacacgctcaatgcctcctcaatgcagctgtgaagatattaggctgaattcatgccactcagattgtaagagctgtatgtgcacacgctcacagccaggacagtgtcgttgtcttgacaccaacgacttctgctacaaaccttgcaagtccagagatgactagaaaaactaatagctctctcaaatggacgaagccctttaaggcttgtttg

SEQ ID NO: 64721 - DNA, 301 bp, Glycine max
gattcacacaactaactaagaaagtcttccatatccccccaaaaatgaaccaggagcatcttgggttgctctctttctcttttgtgccttcaccacctcatacctaccttcagccatcgctgatttcgtgctcgataatgaaggtaaccctcttgaaaatggtggcacatattatatcttgtcacacataacagcatttggtggaataagagcacccccaacgggaaatgaaagatgccctctcactgtggtgcgatctcgcaatgagctcgacaaagggattggaacaatcatctcttcc

SEQ ID NO: 64722 - DNA, 386 bp, Glycine max
gacagcaaaaacaattaataaagatgagtttgaagaacaacatggtggtgctaaaggtgtgtttgttgcttcttttccttgtgggggttacagctgcacgcatggaactgagcttcttcaaaagtgatcagtcatcaagttatgatgatgatgagtattcaaaaccatgctgtgatctctgcatgtgcacacgctcaatgcctcctcaatgcagctgtgaagatattaggctgaattcatgccactcagattgtaagagctgtatgtgcacacgctcacagccaggacagtttcgttgtcttgacaccaacgacttctgccacaaaccttgcaagtccagagatgactagaaaaactaatagctctctcaaatggaacaaaccccc

SEQ ID NO: 64723 - DNA, 385 bp, Glycine max
gacagcaaaaacaattaataaagatgagtttgaagaacaacatggtggtgctaaaggtgtgtttgttgcttcttttccttgtgggggttacagctgcacgcatggaactgagcttcttcaaaagtgatcagtcatcatcttatgattattatgagtactcaaaaccatgctgtgatctctgcatgtgcacacgctcaacgcctcctcaatgcagctgtgaagatattacgctgaattcatgccactcagattgtaagagctgtatgtgcacacgctcacagccaggacagtgtcgttgtcctgacaccaacgacttctgctacaaaccttgcaagtccagagatgactaaaaaaactaatagctctctcaaatggaccaagcccc

SEQ ID NO: 64724 - DNA, 415 bp, Glycine max
gacagcaaaaacaattaataaagatgagtttgaagaacaacatggtggtgctaaaggtgtgtttgttgcttcttttccttgtgggggttacagctgcacgcatggaactgagcttcttcaaaagtgatcagtcatcaagttatgatgatgatgagtattcaaaaccatgctgtgatctctgcatgtgcacacgctcaatgcctcctcaatgcagctgtgaagatattaggctgaattcatgccactcagattgtaagagctgtatgtgcacacgctcacagccaggacagtgtcgttgtcttgacaccaacgacttctgctacaaaccttgcaagtccagagatgactaaaaaaactaatagctctctcaaattggacaaaccctttaggctttttttgttatgttagggagaca

SEQ ID NO: 64725 - DNA, 62 bp, Glycine max
tctcttctttctcgcctcatttttttttttatctcttctctcctaaaaacaatgaccaaatt

SEQ ID NO: 64726 - DNA, 346 bp, Glycine max
gattcacacaactaactaagaaagtcttccatagccccccaaaaatgaagagcaccatcttctttgctctctttctcttttgtgccttcaccacctcatacctaccttcagccatcgctgatttcgtgctcgataatgaaggtaaccctcttgaaaatggtggcacatattatatcttgtcagacataacagcatttggtggaataagagcagccccaacgggaaatgaaagatgccctctcactgtggtgcaatctcgcaatgagctcgacaaagggattggaacaatcatctcgtccccatatcgaatccgttttatcgccgaagggcatcctttgagccttaa

SEQ ID NO: 64727 - DNA, 379 bp, Glycine max
ggttcacacaactaactaagaaagtcttccatagccccccaaaaatgaagagcaccatcttctttgctctctttctcttttgtgccttcaccacctcatacctaccttcagccatcgctgatttcgtgctcgataatgaaggtaaccctcttgaaaatggtggcacatattatatcttgtcagacataacagcatttggtggaataagagcagccccaacgggaaatgaaagatgccctctcactgtggtgcaatctcgcaatgagctcgacaaagggattggaacaatcatctcgtccccatatccaatccgttttatcgcccgaaggcatcctttgagccttaaattcgattcatttgcagttataatgctgtgtgt

SEQ ID NO: 64728 - DNA, 374 bp, Glycine max
gattcacacaactaactaagaaagtcttccatagccccccaaaaatgaagagcaccatcttctttgctctctttctcttttgtgccttcaccacctcatacctaccttcagccatcgctgatttcgtgctcgataatgaaggtaaccctcttgaaaatggtggcacatattatatcttgtcagacataacagcatttggtggaataagagcagccccaacgggaaatgaaagatgccctctcactgtggtgcaatctcgcaatgagctcgacaaagggattggaacaatcatctcgtccccatatcgaatccgttttatcgccgaaggccatcctttgagccttaagttcgattcatttgcagttataatgctg

SEQ ID NO: 64729 - DNA, 319 bp, Glycine max
gattcacacaactaactaagaaagtcttccatagccccccaaaaatgaagagcaccatcttctttgctctctttctcttttgtgccttcaccacctcatacctaccttcagccatcgctgatttcgtgctcgataatgaaggtaaccctcttgaaaatggtggcacatattatatcttgtcagacataacagcatttggtggaataagagcagccccaacgggaaatgaaagatgccctctcactgtggtgcaatctcgcaatgagctcgacaaagggattggaacaatcatcccgtccccatatcgaatccgttttat

SEQ ID NO: 64730 - DNA, 142 bp, Glycine max
gaggcaaaattgggcttagcgtgagtgtcacgctaagcactgttggaatgaaaaaagcctcaaagagcgagactaatttaagtgtgctcgctaagcgcggatggtcggcttagcgagttcatctaatcccaaacaaacgaaa

SEQ ID NO: 64731 - DNA, 213 bp, Glycine max
ggaaccaaaccacaaacacttagtttctcaactcatcatttcgaattctacctcttttctcttgggcgtaacagtccaagatgaataccaataacgagaccgagtctgagcaatcatttcgagaagcacatcggagatcttgatcatcatcttctccagccaatgttgggactgagaattggggaactcacataatgggcacccctcgctgtt

SEQ ID NO: 64732 - DNA, 300 bp, Glycine max
cacgacaacagagtacgcaagtaatgacattcacgaacattccaccttcacgtaaaggatgattgtggcgacattacggatctggagtctctgtggcacatctgaggactgagcttcctcaaaaggtattcatccacattctgaggagtcacgaggtatgcacactcgtaccattgtctcagcatgcgcacacgctgaatgcatcttcactacacttgtgaatatcggaagctgaactcggactggtcaaacttccacagctgtctgtgcacactctcacatacacgacggtctcattgt

SEQ ID NO: 64733 - DNA, 418 bp, Glycine max
gattcacacaactaactaagaaagtcttccatagccccccaaaaatgaagagcaccatcttctttgctctctttctcttttgtgccttcaccacctcatacctaccttcagccatcgctgatttcgtgctcgataatgaaggtaaccctcttgaaaatggtggcacatattatatcttgtcagacataacagcatttggtggaataagagcagccccaacgggaaatgaaagatgccctctcactgtggtgcaatctcgcaatgagctcgacaaagggattggaacaatcatctcgtccccatatcgaatccgttttatcgccgaaggccattctttgagccttaagttcgattcatttgcagttataatgctgtgtgttggaattcctaccgagtggtctgttgtggaggattctac

SEQ ID NO: 64734 - DNA, 370 bp, Glycine max
gacagcaaaaacaattaataaagatgggtttgaagaacaacatggtggtgctaaaggtgtgtttgttgcttcttttccttgtgggggttacagctgcacgcatggaactgagcttcttcaaaagtgatcagtcatcaagttatggtgatgatgagtattcaaaaccatgctgtgatctctgcatgtgcacacgctcaatgcctcctcaatgcagctgtgaagatattaggctgaattcatgccactcagattgtaagagctgtatgtgcacacgctcacagccaggacagtgtcgttgtcttgacaccaacgacttctgctacaaaccttgcaagttcagagatgactagaaaaactaatagctctctca

SEQ ID NO: 64735 - DNA, 193 bp, Glycine max
gggatgaattggcaaatgaatcatgactaggattttccttagttctctctatgtaactagttgtatatatagataatgggtacatcttcgtactctagatcgcaaattaaatataaaattaatgttgagaaaacgtgccattggcctattgctctacttagagttttcagtgtgccaaccacatattttgctg

SEQ ID NO: 64736 - DNA, 379 bp, Glycine max
gacagcataaacaattaataaagatgagtttgaagaacagcatggtggtgctaaaggtgtgtttgttgcttcttttccttgtgggggttacagctgcacgcatggaactgagcttcttcaaaagtgatcagtcatcaagttatgatgatgatgagtattcaaaaccatgctgtgatctctgcatgtgcacacgctcaatgcctcctcaatgcagctgtgaagatattaggctgaattcatgccactcagattgtaatagctgtatgtgcacacgctcacagccaggacagtgtcgttgtcctgaaaccaacgacttctgctacaaaccttgcaagtccagagataactagagagaactaatagctctctcaaatggacg

SEQ ID NO: 64737 - DNA, 74 bp, Glycine max
gatacaactgagaacgttacagctaccatttccataacaacctgataagtctcactgatatctgacttgttcgc

SEQ ID NO: 64738 - DNA, 312 bp, Glycine max
ggaaataggagagcgggaaaggcatttggagagtggagagagcaattggaagcgaagaaggcaatgggttccaaagacagttgcagaaccgaacttcgcattgccatccgccaactcagcgatcgatgcctctactctgcttctaaatgggcagcagaacagttggtgggtattgaggaagaccctgccaagttcactccttcgaatacgaggttccagcgtgggagttcgagaattttccgcaagtctaggactcatgagactgctgcggtgatcaccccggtcgtgggtgttttgtatgacgccacacct

SEQ ID NO: 64739 - DNA, 376 bp, Glycine max
  unsure (1)..(376): unsure at all n locations
gcacacaactaactaagaaagtcttccatagccccccaaaaatgaagagcaccatcttctttgctctctttctcttttgtgccttcaccacctcatacctaccttcagccatcgctgatttcgtgctcgataatgaaggtaaccctcttgaaaatggtggcacatattatatcttgtcagacataacagcatttggtggaataagagcagccccaacgggaaatgaaagatgccctctcactgtggtgcaatctcgcaatgagctcgacaaagggattggaacaatcatctcgtcnccatatcgaatccgttttatcgccgaaggccatcctttgagccttaagttcgattcatttgcagttataatgctgtgtgt

SEQ ID NO: 64740 - DNA, 400 bp, Glycine max
gacagcaaaaacaattaataaagatgagtttgaagaacaacatggtggtgctaaaggtgtgtttgttgcttcttttccttgtgggggttacaactgcacgcatggaactgagcttcttcaaaagtgatcagtcatcaagttatgatgatgatgagtattcaaaaccatgctgtgatctctgcatgtgcacacgctcaatgcctcctcaatgcagctgtgaagatattaggctgaattcatgccactcagattgtaagagctgtatgtgcacacgctcacagccaggacagtgtcgttgtcttgacaccaacgacttctgctacaaaccttgcaagtccagagatgactagaaaaactaatagctctctcaaatggacgaagcccctttatgctttgtttg

SEQ ID NO: 64741 - DNA, 246 bp, Glycine max
gacagcaaaaacaattaataaagatgagtttgaagaacaacatggtggtgctaaaggtgtgtttgttgcttcttttccttgtgggggttacagctgcacgcatggaactgagcttcttcaaaagtgatcagtcatcaagttatgatgatgatgagtattcaaaaccatgctgtgatctctgcatgtgcacacgctcaatgcctcctcaatgcagctgtgaagatattaggctgaattcatgccact

SEQ ID NO: 64742 - DNA, 400 bp, Glycine max
gacacacaggggaaatgatttgaaggtcggagagagagagagagtgagttggggattctacttcgatctatcatctaaactaagtcaataagatgactcagggaaagatagttgaagctgcagaagctcataaaacacttgaggatttcgatcctccaaagaagcgcaaaaggaacaagtatgcttttgcttgtgctgtgctggcctccatgacttccatcttgcttggctacggagaaactaacatagtcaatgatggaccgaagttcagttgaggggtgcacctgactttgagcgaaatacaagagtatatactagtgcgttcttatttttggcacctcctatttttataatttaatcccgttgccttcaatttattacttagtgtcaatttttatct

SEQ ID NO: 64743 - DNA, 403 bp, Glycine max
gattcacacaactaactaagaaagtcttccatagccccccaaaaatgaagagcaccatcttctttgctctctttctcttttgtgccttcaccacctcatacctaccttcagccatcgctgatttcgtgctcgataatgaaggtaaccctcttgaaaatggtggcacatattatatcttgtcagacataacagcatttggtggaataagagcagccccaacgggaaatgaaagatgccctctcactgtggtgcaatctcgcaatgagctcgacaaagggattggaacaatcatctcgtccccatatcgaatccgttttatcgccgaatgccatcctttgagccttaagttcgattcatttgcagttataatgctgtgtgttggaattcctaccgagtggtctgt

SEQ ID NO: 64744 - DNA, 126 bp, Glycine max
tggtgacggcgctaaaagatgataaagatgagtttgaacgacattatgatcatgcgatacgtctgtttgttgactcttttccgtgaaggggttaggggtgcatgcatcgccctgatattctccagg

SEQ ID NO: 64745 - DNA, 410 bp, Glycine max
gagtgtatgtgattgttgtgactcgttcttcttcgtcgttatcttcttcttttgttgtttgtgtgtttgttttttctctcacctgaaaatgtcttgctgcggtggtaactgtggttgcggaagcgcctgcaagtgcggcaacggctgcggaggctgcaagatgtacccagacttgagctacaccgagtcaaccaccaccgagaccttggtcatgggagtggcaccagttaacgctcaattcgagagtgctgaaatgggtgttcccgctgagaacgatggctgcaaatgtggagctaactgcacctgcaacccctgcacttgcaagtgaggtgttggagagctaaagcttcaagcagaaatggcccttacaaataatgataaaaactatatgtaatttcagaacttcaaaa

SEQ ID NO: 64746 - DNA, 406 bp, Glycine max
ggacagcaaaaacaattaataaagatgagtttgaagaacaacatggtggtgctaaaggtgtgtttgttgcttcttttccttgtgggggttacagctgcacgcatggaactgagcttcttcaaaagtgatcagtcatcaagttatgatgatgatgagtattcaaaaccatgctgtgatctctgcatgtgcacacgctcaatgcctcctcaatgcagctgtgaagatattaggctgaattcatgccactcagattgtaagagctgtatgtgcacacgctcacagccaggacagtgtcgttgtcttgacaccaacgacttctgctacaaaccttgcaagtccagagatgattagaaaaactaatagctctctcaaatggacgaagcccctttaagctttgtttgttatg

SEQ ID NO: 64747 - DNA, 315 bp, Glycine max
gcgtccgtacagcattcagagcgaccactccgtggcactggggttcgaccactttccgcggactcactctgcgttgctccagatcgatccacgtctacttcatcctacatgccacgtcagatctctcgtgtgggggtctcctactttcttgtgactgcacgtcattttaacatttcgggactgcgtaaatcctgctcttattcaacttcatcccgtttcggcacagctccatttcctcagttgtgctagtaacaagaaggaccggtgggttctcccttcccaccagtttcggaacctgtttttctactagcactg

SEQ ID NO: 64748 - DNA, 170 bp, Glycine max
ccgtaatgcttcgaaaatactacaaattgcggaaacagtgttgtcctgatggtagaccttcacatacatgtgaataatctatcatgaccatggaagaggcaccagcatccacgtgcaatccagaccacctcggaggggtcagaacgcgacgcacttcgacacgatctcca

SEQ ID NO: 64749 - DNA, 301 bp, Glycine max
gagaacgcttttcatcacacataagaagaaaaagaacaataactaaacaaaaaccataatttttttaaaacctctctcttcgttcttttcatccgccgccggagaatgaacattccggcgacccaaacttccccgtcaatgaacaatgctcgtctctccgacaaccgtcgcaacttgttcaacgaaaccactcacctcaaaaaaaccttcaagcggggaggctaaaagaaagaaaaaaaaaaacccgttaataactaaataaaaaccccctttacttaatttttcctttttcccctttttt

SEQ ID NO: 64750 - DNA, 405 bp, Glycine max
attcacacaactaactaagaaagtcttccatagccccccaaaaatgaagagcaccatcttctttgctctctttctcttttgtgccttcaccacctcatacctaccttcagccatcgctgatttcgtgctcgataatgaaggtaaccctcttgaaaatggtggcacatattatatcttgtcagacataacagcatttggtggaataagagcagccccaacgggaaatgaaagatgccctctcactgtggtgcaatctcgcaatgagctcgacaaagggattggaacaatcatctcgtccccatatcgaatccgttttatcgccgaaggccatcctttgagccttaagttcgattcatttgcagttataatgctgtgtgttggaattcctaccgagtggtctgttgt

SEQ ID NO: 64751 - DNA, 89 bp, Glycine max
gaatcaagcaacttctgaagcagacattgaattgttgtcacattcaggacctacaacttcaagcatggttgcaagttcatctctggcac

SEQ ID NO: 64752 - DNA, 402 bp, Glycine max
ggcagcaaaaacaattaataaagatgagtttgaagaacaacatggtggtgctaaaggtgtgtttgttgcttcttttccttgtgggggttacagctgcacgcatggaactgagcttcttcaaaagtgatcagtcatcaagttatgatgatgatgagtattcaaaaccatgctgtgatctctgcatgtgcacacgctcaatgcctcctcaatgcagctgtgaagatattaggctgaattcatgccactcagattgtaagagctgtatgtgcacacgctcacagccaggacagtgtcgttgtcttgacaccaacgacttctgctacaaaccttgcaagtccagagatgactagaaaaactaatagctctctcaaatggacgaagcccctttaggctttgtttgtt

SEQ ID NO: 64753 - DNA, 361 bp, Glycine max
aagacgacagaagggattcacacaactaactaagaaagtcttccatagccccccaaaaatgaagagcaccatcttctttgctctctttctcttttgtgccttcaccacctcatacctaccttcagccatcgctgatttcgtgctcgataatgaaggtaaccctcttgaaaatggtggcacatattatatcttgtcagacataacagcatttggtggaataagagcagccccaacgggaaatgaaagatgccctctcactgtggtgcaatctcgcaatgagctcgacaaagggattggaacaatcatctcgtccccatatcgaatccgttttatcgccgaaggccatcctttgagccttaag

SEQ ID NO: 64754 - DNA, 223 bp, Glycine max
tcccgggtcgagtcacacatcggatcagtcgtgcgtccagatgggaaaagaaggggatccggttgagttgttagaagacgaccatttcgataccggcggtaagatcatagggtacagatcttgttcgcgatgcattcgaccttgtacctcctccacatagccaccttccgtcactgcacaggacgtcgttttcatggatggcgatgggaacagaccggcgttc

SEQ ID NO: 64755 - DNA, 387 bp, Glycine max
gacagcaaaaacaattaataaagatgagtttgaagaacaacatggtggtgctaaaggtgtgtttgttgcttcttttccttgtgggggttacagctgcacgcatggaactgagcttcttcaaaagtgatcagtcatcaagttatgatgatgatgagtattcaaaaccatgctgtgatctctgcatgtgcacacgctcaatgcctcctcaatgcagctgtgaagatattaggctgaattcatgccactcagattgtaagagctgtatgtgcacacgctcacagccaggacagtgtcgttgtcttgacaccaacgacttctgctacaaaccttgcaagtccagagatgactacaaaaactaatagctctctcaaatggacgaagcccctt

SEQ ID NO: 64756 - DNA, 317 bp, Glycine max
aggggaagcccaatctcttgatcagaatcttcaggccacgccaggtaatcacaaccaaatcaacatcccaaatggcttcagcttctgtactcatggggtagtcactgaccactgttaccaacaataacaacccttcatccgaagccttcatcatgccactacccctacgccaaccaaagcggattctcttcactactattgcagtgtcaaactccaatcctcatatcaatgcacctttgtaggacaatgcagttgccggactcacaacagcttctgtgacagcatcatatgtggctcccgaagtggctcatgctgct

SEQ ID NO: 64757 - DNA, 279 bp, Glycine max
ggaggaacacactgctggtgacgtggttgctacagaggcgccactccagatgcttcgtcctcgccttctgccgcttcctcgcgtggatcgcggtcgcgctgcagcgcgcgtcctactcgtacgcgccgcctctctcctcgcacatagagatcagggcgaatctcgtcaggttcgacgcgttcgaggtcgctacggacacgcgcggttggatcctcgcagctatcgcgtctcgcacgcgcgatctgggatctcacgtggagcagtgacctctgcgtcgct

SEQ ID NO: 64758 - DNA, 376 bp, Glycine max
gcttcacagcaaaaacaattaataaagatgagtttgaagaacaacatggtggtgctaaaggtgtgtttgttgcttcttttccttgtgggggttacagctgcacgcatggaactgagcttcttcaaaagtgatcagtcatcaagttatgatgatgatgagtattcaaaaccatgctgtgatctctgcatgtgcacacgctcaatgcctcctcaatgcagctgtgaagatattatgctgaattcatgccactcagattgtaagagccgtatgtgcacacgctcacagccaggacagtgtcgttgtcttgacaccaacgacttctgctacaaaccttgcaagtccagagatgactagaaaaactaatagctctctcaaa

SEQ ID NO: 64759 - DNA, 63 bp, Glycine max
  unsure (1)..(63): unsure at all n locations
cccacgcngtccgcacacgcaatccgcgtgacacagtgagcaggacagcgtggagacggacgc

SEQ ID NO: 64760 - DNA, 236 bp, Glycine max
gagacacgattcaagttatcacatgtctcatccccacactagtacagacactagattaccaggtcagcagtccataccttcattttcacacaaccgggaaagatacatacacacatagaatgtgacagtgagagaggtacggggaatcacaggtttaagttatcaggtgtgaatccgtatgcctggttttactacactgaagtacatggctacgggaacattttcaagggagctgg

SEQ ID NO: 64761 - DNA, 342 bp, Glycine max
gttgttacagaagacataagcaagctctttgtaaaaaaacaacactaacattcatataacgttagaagtttgcatattaaaattaatgatgggtaagaaatgtaaacccgaagatgtggcacttctcctgcttgaaagtgcttgctatcgtagaaagtgtacttgtttaacttttaagtttgtttacccgtaagtagtacttcgtctagttgatcatattacgttgttaacttacagcttagccaagtaaaaaaaaatggagcagaaacccgacgggtgatttgcttcaacgcatatttattggatttgcagttacgatttaggattcttgagaatactatg

SEQ ID NO: 64762 - DNA, 399 bp, Glycine max
gacagcaaaaacaattaataaagatgagtttgaagaacaacatggtggtgctaaaggtgtgtttgttgcttcttttccttgtgggggttacagctgcacgcatggaactgagcttcttcaaaagtgatcagtcatcaagttatgatgatgatgagtattcaaaaccatgctgtgatctctgcatgtgcacacgctcaatgcctcctcaatgcagctgtgaagatattaggctgaattcatgccactcagattgtaagagctgtatgtgcacacgctcacagccaggacagtgtcgttgtcttgacaccaacgacttctgctacaaaccttgcaagtctagagatgactagaaaaactaatagctctctcaaatggacgaagcccctttaggctttgttt

SEQ ID NO: 64763 - DNA, 240 bp, Glycine max
taccgctgcttgatgactacagtcggggattcttctcacttgttgttacgttcattaacaacatgaatctgattacgccctttattttgcgttgttttctgtatggggtgatcctcatccctgttgtggtcgttgataagccaccgtacgatgaggaaaacggaacaactggaattcaccaattgtttaatgactgcgattacgtgcagggaaccctttctagcggattgaaattccaac

SEQ ID NO: 64764 - DNA, 400 bp, Glycine max
gacagcaaaaacaattaataaagatgagtttgaagaacaacatggtggtgctaaaggtgtgtttgttgcttcttttccttgtgggggttacagctgcacgcatggaactgagcttcttcaaaagtgatcagtcatcaagttatgatgatgatgagtattcaaaaccatgctgtgatctctgcatgtgcacacgctcaatgcctcctcaatgcagctgtgaagatattaggctgaattcatgccactcagattgtaagagctgtatgtgcacacgctcacagccaggacagtgtcgttgtcttgacaccaacgacttctgctacaaaccttgcaagtccagagatgactagaaaaactaatagctctctcaaatggacgaagcccctttaggctttgtttg

SEQ ID NO: 64765 - DNA, 85 bp, Glycine max
gattcacacaactaactaatatagtcttccatagccccctaataatgaacagcatcatcttctttgctctcttcctcttttgtcc

SEQ ID NO: 64766 - DNA, 189 bp, Glycine max
cgggattcacacaactaactaagaaagtcttccatagccccccaaaaactaagagggccatcttctttgctctctttctcttttgtgcggtcaccacctcatacctaccttcagccatcgctgatttcgtgctcgatacacaaggtaaccctcttgaaaatggtggcacatattatatcctgtcatatc

SEQ ID NO: 64767 - DNA, 66 bp, Glycine max
ggttctagtgtatgtgattgctttgactcgttcttcttcgtcgttatcttcatcttttgttctttg

SEQ ID NO: 64768 - DNA, 56 bp, Glycine max
cactaatcactcacgctttactcaatcttcttctctttcatcttcatacttcccac

SEQ ID NO: 64769 - DNA, 128 bp, Glycine max
ggcacaagtgagtttgttgatcgagataactagaaacagtctgatgaaaatgaaggtccttgttttcttcgttgctacaattttggtggcatggcaatgccatgcctacgatatgttccctctctgaa

SEQ ID NO: 64770 - DNA, 62 bp, Glycine max
tgtgcacgagtttgttgtgagctataagctagtttatcctgaggagactatgaacttctttg

SEQ ID NO: 64771 - DNA, 58 bp, Glycine max
ggacgacgaggccattacggttggacgatcgaaccacagtcatgccacccacgacctt

SEQ ID NO: 64772 - DNA, 72 bp, Glycine max
ggaaatgcagaacattacctcatcaccaccatccccaactagagtaacctcagcccacaacctctttgcatc

SEQ ID NO: 64773 - DNA, 62 bp, Glycine max
cgggaaacaccaaccatcacacagccccgcgccatcacgcgaaacccgcggccgccgctctt

SEQ ID NO: 64774 - DNA, 120 bp, Glycine max
gacagcaacaacaattaataaagatgagtttgaagaacaacatggtggtgctaaaggtgtgtttgttgcttcctgtgcttgtgggggttacagctgcacgcaaagaactgagcttcttca

SEQ ID NO: 64775 - DNA, 211 bp, Glycine max
gcttcacagcaaaaacaattaataaagatgggtttgaagaacaacatggtggtgctaaaggtgtgtttgttgcttcttttccttgtgggggttacagctgcacgcatggaactgagcttcttcaaaagtgatcagtcatcaagttttgatgatgatgagtattcaaaatcatgctgtgatttccgcatgtgcacaagctcaatgcctcctc

SEQ ID NO: 64776 - DNA, 178 bp, Glycine max
gacagcagtaaaaatttggaaagattagtttgcacaccaacactagcggtccaaaaagtgtatttgcagcatctattcccacttgaagctggagcttcacgctctacaatacagcttaatacacgggttatcagtcatcaaattatgattatcatgactttctctgatcatgctgtga

SEQ ID NO: 64777 - DNA, 378 bp, Glycine max
gacagcaaaaacaattaataaagatgagtttgaagaacaacatggtggtgctaaaggtgtgtttgttgcttcttttccttgtgggggttacagctgtacgcatggaactgagcttcttcaaaagtgatcagtcatcaagttatgatgatgatgagtattcaaaaccatgctgtgatctctgcatgtgcacacgctcaatgcctcctcaatgcagctgtgaagatattaggctgaattcatgccactcagattgtaagagctgtatgtgcacacgctcacagccaggacagtgtcgttgtcttgacaccaacgacttctgctacaaaccttgcaagtccagagatgactagaagaactaatagctctctcaaatggacg

SEQ ID NO: 64778 - DNA, 386 bp, Glycine max
gatagcagcaacatacagagcattgggttcagctgcttaagttcaatccatgggtattgctttcatcctcagaaccaaagatgtcgaacacatacggcaactgcgactgacgctgacaagactatctgcaccaaaggaaacagctatggtgttattgtcgagacggataagagttacatcgagaccgttgtcatggaagttccaccagctgagcatgatgcgaagtgcaaatttggcactcactgcacttgcacggactgcacctgttgccattaaggaataattacgacaatgtcactgccacatgtttggcactacacatctcctaataatgtaatcttcgtacgaataaatctgtgtgctgtaaccctaaatgcacacgctca

SEQ ID NO: 64779 - DNA, 134 bp, Glycine max
acagcgtcagcacacgactcagtggtgctgctacaagacgacgacagggtgctgctgctacaagacgacaacagggtggtgctgctacaagacgacaacagggtgctgctgcggcaagacgacaacagggtgct

SEQ ID NO: 64780 - DNA, 310 bp, Glycine max
gattcacacaactaactaagaaagtcttccatagccccccaaaaatgaagagcaccatcttctttgctctctttctcttttgtgccttcaccacctcatacctaccttcagccatcgctgatttcgtgctcgataatgaaggtagccctcttgaaaatggtggcacatattatatcttgtcagacataacagcatttggtggaataagagcagccccaacgggaaatgaaagatgccctctcactgtggtgcaatctcgcaatgagctcgacagagggattggaacaatcatctcgtccccatatcgaat

SEQ ID NO: 64781 - DNA, 122 bp, Glycine max
ggaatttggatttacagtttgcagtaaatataaaaaaaaaaaaaatcggccgctcgagacgatacaggattacatcttccttcatcctaggtgctagctcttctatcttctcacctatcacc

SEQ ID NO: 64782 - DNA, 148 bp, Glycine max
gaaaaaaaagaaattaataataaattaagaataaagccgaaaaaaaaaaaaaaaaaaaaaaaaaaaagcgggggcgctctaggatatacgcgcacatatacgtgtacacgacatctcatatctcctctagagtcacacatattcacat

SEQ ID NO: 64783 - DNA, 420 bp, Glycine max
gacagcaaaaacaattaataaagatgagtttgaagaacaacatggtggtgctaaaggtgtgtttgttgcttcttttccttgtgggggttacagctgcacgcatggaactgagcttcttcaaaagtgatcagtcatcaagttatgatgatgatgagtattcaaaaccatgctgtgatctctgcatgtgcacacgctcaatgcctcctcaatgcagctgtgaagatattaggctgaattcatgccactcagattgtaagagctgtatgtgcacacgctcacagccaggacagtgtcgttgtcttgacaccaacgacttctgctacaaaccttgcaagtccagagatgactagaaaaactaatagctctctcaaatggacgaagcccctttaggctttgtttgttatgttaggggggacaaat

SEQ ID NO: 64784 - DNA, 212 bp, Glycine max
ggagtttcggttgagacatatcaaaaaaaaaaaacaaacaaaaaaaaaaaaacgggcgccccaaaaggttcaagcctaacttccccttccatccaacttcaaacccctccaaaatggcccccaaattccattccatggcccttcgtttaacaccttcttaacgggaaaaccccggcgtttacccaccttatcccccttgacaaaacccccct

SEQ ID NO: 64785 - DNA, 151 bp, Glycine max
taccgctgctataagacgacatatgggtacggctgctagaatactattgaacggtacggttgcaacaatatgtcacccagcgagacccgaggagcaaccttttatcctgcaactgtaataattgactgccgttctaaaagctccatgctta

SEQ ID NO: 64786 - DNA, 176 bp, Glycine max
ggcggcagaaaatctttcaatatataggacaactccaaaagaagcagtcgcaatcaccacgatcaaactcactcgttacataagtatagcaaaaccatacaccaaaaccccatacctaacagcaaattattgaaaccaaaataaataaacaaaataacccacataaggggaaggac

SEQ ID NO: 64787 - DNA, 199 bp, Glycine max
gtcacacaactaactaagaaagtcttccatagccccccaaacatgaagagcaccatcttctttgctctctttctcttttgtgccttcatcagctcatacctaccttcagccatcgctgatttcgtgctcgataatgaaggtaaccctcttgaaaatggtggcacatattacatcttgtcagacataacaccatttcgtg

SEQ ID NO: 64788 - DNA, 309 bp, Glycine max
gacagcaaaaacaattaataaagatgagtttgaagaacaacatggtggtgctaaaggtgtgtttgttgcggctttgccttgtgggggttacagctgcacgcatggaactgagcttcttcaaaagtgatcagtcatcaagttatgatgatgatgagtattcataaccatgctgtgatctctgcatgtgcacacgctcaatgcctcctcaatgcagctgtgaagatcttacgctgaattcatgccactcagattgtaagagctgtacgtgcacacgctcacagccaggacagtgtcgttgtcctgacacca

SEQ ID NO: 64789 - DNA, 145 bp, Glycine max
ccaccggaggggagacgctgcgcgaagcagacacactgggggggtacacaaaaaaaaaaaaaaccggccgctcttaaagatccaggcctaccttacccttgcatgcaacgttctacctcttccaaagtgtcccctaaattcaatt

SEQ ID NO: 64790 - DNA, 213 bp, Glycine max
gacagcaaaaacaattaataaagatgagtttgaagaacaacatggtggtgctaaacgtgtgtttgttgcttcttttccttgtgggggtgacagctgcacgcatggaagtgaccttctgcggggagtgatcagtcatcaagttatgattatgatgagtattcaaaaccatgctgtcatctctgcacgtgcacacgctcaatgcctcgtcaatgc

SEQ ID NO: 64791 - DNA, 336 bp, Glycine max
cacgtctctatacgctgcgagaacaccacagagggagaactcatcctatctaagcaacttatttcacattctgtttgaccttccttcattccccgttctgtatatatcttcacactaatgtggctatcagccccttcaacacctcaaaaatctctctctctacaccattctctacatctgtagaatcccaccataaacgtaccaatttcttccgtacaacatctgtaaattccaatcctatctgactagtttgatgtatcggggaatgcctattccattctctcgaactgatgatccaacacgttttctagaactgatatccaatacgggtccttg

SEQ ID NO: 64792 - DNA, 251 bp, Glycine max
cagaaggggacacaactaactaagaaagtcttccatagccccccataagtgatgagcaccatcttctttgctctctttctcttttgtgccttcaccatctcgggggggggcttcagccatcgctgatttcgtgctggatagtgaacgtaatcctcttgaaaatggtggcacatattatatcttgtcagagataacagcatttggtggaataagagctgtcccaacggcgaaatcagacatgtcctctcact

SEQ ID NO: 64793 - DNA, 201 bp, Glycine max
tgctagaatactatagtaagggatgcaactgaatatttaacaaaagccatttccatagcagcctaagactatcaatatcactagcgctgtgcgctatctttccactttacgccttcagctcatacctaacttctgccaccgctcagcatgtgctcgacttctattgtcatccgattctgataagtttcatagactacgttt

SEQ ID NO: 64794 - DNA, 71 bp, Glycine max
tacaggatgcaagcttacgtactcgtggaggcgacgtcataacacttctacaatatcacctaaattcaatt

SEQ ID NO: 64795 - DNA, 321 bp, Glycine max
gacagcaggggcaattaataaagatgagtttgaagaacaacatggtggtgctaaaggtgtgtttgttgcttcttttccttgtgggggttacagctgcacgcatggaactgagcttcttcaaaagtgatcagtcatcaagttatgatgatgatgagtattcaaaaccatgctgtgatctctgcatgtgcacacgctcaatgcctcctcaatgcagctgtgaagatattaggctgaattcatgccactcagattgtaagagctgtatgtgcacacgctcacagccaggacagtgtccttgtcctgacaccaacgacttctgct

SEQ ID NO: 64796 - DNA, 353 bp, Glycine max
gacagcaaaaacaattaataaagatgagtttgaagaacaacatggtggtgctaaaggtgtgtttgttgcttcttttccttgtgggggttacagctgcacgcatggaactgagcttcttcaaaagtgatcagtcatcaagttatgatgatgatgagtattcaaaaccatgctgtgatctctgcatgtgcacacgctcaatgcctcctcaatgcagctgtgaagatattaggctgaattcatgccactcagattgtaagagctgtatgtgcacacgctcacagccaggacagtgtcgtcgtcttgacaccaacgacttctgctacaaaccttgcaagtccagagatgactaagag

SEQ ID NO: 64797 - DNA, 243 bp, Glycine max
gattgtatatcatttacaatttcaatctctctctctctctatctctctctctctctagacttacattttgtgaagcgctcaagtggaacagggacaggtcaacagcgtggagaccttttatgagtgcactctgctactccagaatgttgaatactccaacaaactgattgtcgtggattttactgcttcctggtgctgtccatgccctttttatcgcgccagtttcttgcaccactatctctc

SEQ ID NO: 64798 - DNA, 51 bp, Glycine max
gaacccccttcataaaaaaaatttctgtatataatatacagcaccctttcc

SEQ ID NO: 64799 - DNA, 109 bp, Glycine max
ccaagcgtccgaacaagcgtccgaacgctgccaaaaggcgacacaaaggggaataaagattaattcaaataatcaatggcaacaatcaataaacgggtttaaggtacct

SEQ ID NO: 64800 - DNA, 422 bp, Glycine max
agttttggataattgtgtcttcctgcgtttattttattgccaaagaaaaaggaatttttacgaataatgaaatggaagatgatgaataaagagatatccagttaatccaccaggccacggcatattgaaagcagtttatggttaattacttaatttaatcattggttttgtgaaaactaaaaataatggctattattacggtttgcccataacgagacaagcagcaccgttttcttacaaaagtttttcaaggccactttggttggttggctcttgtgcaaatactgagaatcatataagttcttgcacttgcctttttgaaatgaccctaattgtgaaggggaagaaaatattatcaactttcatttttctgtgtaataatatataataatatatgctctctctctttttttttttttttt

SEQ ID NO: 64801 - DNA, 116 bp, Glycine max
ggagaccgaactcgaacattcgaaccccaaagtccacgttacaaatagcgcactgcatctgcaactgcaaactgcgaagcgaagccaactcccaaaaagtaaagcacaatttcaac

SEQ ID NO: 64802 - DNA, 179 bp, Glycine max
gctgcgacaagaggagagaacgatatcgatgcttcaagtcgacaagtcgataccgcagctagctcactgcatctgcgtgatcaaagtgcacttctaatccaactccggggggagggaagcacagtttcagcactacaatacaagcgtgcatacgcctacaatgcggacgctcaacacga

SEQ ID NO: 64803 - DNA, 372 bp, Glycine max
ggcatcaaattcaggagcgtgattcaacccaactcaagaacagtttgtcaggatcgaatttagagtgcaagaacccaagcttggagttcacattaggaagaccggactggaatggcaaagggcaagcctaattttcattggttccctttattgtctctagctagtttgcttaattagtttaattacaacccggtaacatgtgacaaacttcataatctttcctgaaatagaaaggtggtactatatataaaaatatatattcaggcagaaaaagtaaaagccctatatagttccgctaagtttatccttttttggaagttttatgacttcatgaacaattttgtttagcctttttcttgtatttaacatttt

SEQ ID NO: 64804 - DNA, 403 bp, Glycine max
gattcacacaactaactaagaaagtcttccatagccccccaaaaatgaagagcaccatcttctttgctctctttctcttttgtgccttcaccacctcatacctaccttcagccatcgctgatttcgtgctcgataatgaaggtaaccctcttgaaaatggtggcacatattatatcttgtcagacataacagcatttggtggaataagagcagccccaacgggaaatgaaagatgccctctcactgtggtgcaatctcgcaatgagctcgacaaagggattggaacaatcatctcgtccccatatcgaatccgttttatcgccgaaggccatcctttgagccttaagttcgattcatttgcagttataatgctgtgtgttggaattcctaccgagtggtctgt

SEQ ID NO: 64805 - DNA, 234 bp, Glycine max
gatgcgagaactacatgagggtacagttgccataacactacataacgggcttttgatcatacacagtcagcgcattccataccccatattgcattcattcggctatagagctatcgcgttgctaaactttgccgtaaacagtcaggcgcatatctgcgcatggcttctgtatccggcgacttcaataccccactcactctggacacgtccaggttttgaacatcaactggtttc

SEQ ID NO: 64806 - DNA, 407 bp, Glycine max
gattcacacaactaactaagaaagtcttccatagccccccaaaaatgaagagcaccatcttctttgctctctttctcttttgtgccttcaccacctcatacctaccttcagccatcgctgatttcgtgctcgataatgaaggtaaccctcttgaaaatggtggcacatattatatcttgtcagacataacagcatttggtggaataagagcagccccaacgggaaatgaaagatgccctctcactgtggtgcaatctcgcaatgagctcgacaaagggattggaacaatcatctcgtccccatatcgaatccgttttatcgccgaaagccatcctttgagccttaagttcgattcatttgcagttataatgctgtgtgttggaattcctaccgagtggtctgttgtg

SEQ ID NO: 64807 - DNA, 255 bp, Glycine max
gacagcaaaaacaattaataaagatgagtttgaagaacaacatggtggtgctaaaggtgtgtttgttgcttcttttccttgtgggggttacagctgcacgcatggaactgagcttcttcaaaagtgatcagtcatcaagttatgatgatgatgagtattcaaaaccatgctgtgatctctgcatgtgcacacgctcaatgcctcctcaatgcagctgtgaagatattaggctgaattcatgccactcagattgta

SEQ ID NO: 64808 - DNA, 377 bp, Glycine max
gacacaactaactaagaaagtcttccatagccccccaaaaatgaagagcaccatcttctttgctctctttctcttttgtgccttcaccacctcatacctaccttcagccatcgccgatttcgtgctcgataatgaaggtaaccctcttgaaaatggtggcacatattatatcttgtcagacacaacagcatttggtggaataagagcagccccaacgggaaatgaaagatgccctctcactgtggtgcaatctcgcaatgagctcgacaaagggattggaacaatcatctcgtccccatatcgaatccgttttatcgccgaaggccatcctttgagccttaagttcgattcatttgcagttataatgttgtgtgttg

SEQ ID NO: 64809 - DNA, 402 bp, Glycine max
ggttacatgagagaaaaaaagaaaaagataggagagttcaaattaaaggtaaaatctttttaaaaaatggatttgcacgtctttggaattttatgcattgttttggtcctgacttcaggagcagtaacatgtctggatgatgatccggaggatctgttttgtttaagaccatgctcaccattttgcaaccatgactgcattgtccgtggctataaatacggaggcgcctgtttcgcatatattatgtgttgttgtaagaagaattgatcatgactaccaccaatttgcaaccaagcaagaataatgcaacaacagatgatataagaaaaaagtgcatgcttctatggaatttgatgtgttttaatttgttgtaagaataattgaatattttgtacctctatc

SEQ ID NO: 64810 - DNA, 405 bp, Glycine max
gacagcaaaaacaattaataaagatgagtttgaagaacaacatggtggtgctaaaggtgtgtttgttgcttcttttccttgtgggggttacagctgcacgcatggaactgagcttcttcaaaagtgatcagtcatcaagttatgatgatgatgagtattcaaaaccatgctgtgatctctgcatgtgcacacgctcaatgcctcctcaatgcagctgtgaagatattaggctgaattcatgccactcagattgtaagagctgtatgtgcacacgctcacagccaggacagtgtcgttgtcttgacaccaacgacttctgctacaaaccttgcaagtccagagatgactagaaaaactaatagctctctcaaatggacgaagcccctttaggctttgtttgttatg

SEQ ID NO: 64811 - DNA, 404 bp, Glycine max
gacattacacaagtttatgaccatcagtgggcgagttggtgaagcaaagtcaactcactggaaactcggttgaactcggtgtgtgtagaaatggcgaaacttgaagccaagctagggatgatcttggactcggtgggtcagttcttctccggcaaggaccatcttccttattgtgactctgacgtcgtagctggatgtgaaagagaggtcttggaggcagaaaagcaatcatctcaagagtatatgcaagactgtctcctgcgtttatcatgggctcttgttcactccaaacacccacaagatgtgcacccatctttgcctgctacagaggacccactgcagcaaagggagaagctttatcttctggctgttggatactatagaaatgctgattattcaaggag

SEQ ID NO: 64812 - DNA, 411 bp, Glycine max
gattcacacaactaactaagaaagtcttccatagccccccaaaaatgaagagcaccatcttctttgctctctttctcttttgtgccttcaccacctcatacctaccttcagccatcgctgatttcgtgctcgataatgaaggtaaccctcttgaaaatggtggcacatattatatcttgtcagacataacagcatttggtggaataagagcagccccaacgggaaatgaaagatgccctctcactgtggtgcaatctcgcaatgagctcgacaaagggattggaacaatcatctcgtccccatatcgaatccgttttatcgccgaaggccatcctttgagccttaagttcgattcatttgcagttataatgctgtgtgttggaattcctaccgagtggtctgttgtggagg

SEQ ID NO: 64813 - DNA, 276 bp, Glycine max
gacagcacacacaattaataaagatgagtttgaagaacaacatggtggtgctaaacgtgtgtttgttgcttcttttccttgtgggggttacagctgcacgcatggaactgagcttcttcaaaagtgataagtcatcaagttatgatgatgatgagtattcaaaacaatgctgtgatctctgcatgtgcaaacgctcaatgcctcctcaatgcagctgtgaacatattaggctgaattcatgccactcagattgtaaaagctgtatgtgcacacgct

SEQ ID NO: 64814 - DNA, 372 bp, Glycine max
gacagcaaaaacaattaataaagatgagtttgaagaacaacatggtggtgctaaaggtgtgtttgttgcttcttttccttgtgggggttacagctgcacgcatggaactgagcttcttcaaaagtgatcagtcagcaagttatgatgatgatgagtattcaaaaccatgctgtgatctctgcatgtgcacacgctcaatgcctcctcaatgcagctgtgaagatattaggctgaattcatgccactcagattgtaagagctgtatgtgcacacgctcacagccaggacagtgtcgttgtcttgacaccaacgacttctgctacaaaccttgcaagtccagagatgactagaaaaactaatagctctctcaaa

SEQ ID NO: 64815 - DNA, 63 bp, Glycine max
tgaggacgaacacacccaaaataaatgcctaacacgaataaaaaaaaaaccggccgccctaaa

SEQ ID NO: 64816 - DNA, 233 bp, Glycine max
gatgcgacaacacgacgggacgggacccatcattagcaaagttgcgttgttcacaataccacggcagctgtcatcgcgtctgtgttgcctcatttccatgtcctcgttatggctgcacgcataggactgatgttcctcgcagctccataggttgcaacttatgcacagtgataagtattccatggcaagcattgatcgctgcagctatacacacgcagtgcatcatcactaca

SEQ ID NO: 64817 - DNA, 131 bp, Glycine max
ggtaaacaaaaaccatcaccaaaaaaaaaaaaaaaaaaaaaaaaaaaaaagcggccgccctaaaggttcaaaccttacttacccttgcaggcaacttcatacctcttcaaaattttcacctaaattcaatt

SEQ ID NO: 64818 - DNA, 55 bp, Glycine max
taccgctccgacaacatcagggaatggttccgatgcgtgatcacgacctactggt

SEQ ID NO: 64819 - DNA, 405 bp, Glycine max
gacagcaaaaacaattaataaagatgagtttgaagaacaacatggtggtgctaaaggtgtgtttgttgcttcttttccttgtgggggttacagctgcacgcatggaactgagcttcttcaaaagtgatcagtcatcaagttatgatgatgatgagtattcaaaaccatgctgtgatctctgcatgtgcacacgctcaatgcctcctcaatgcagctgtgaagatattaggctgaattcatgccactcagattgtaagagctgtatgtgcacacgctcacagccaggacagtgtcgttgtcttgacaccaacgacttctgctacaaaccttgcaagtccagagatgactagaaaaactaatagctctctcaaatggacgaagcccctttaagctttgtttgttatg

SEQ ID NO: 64820 - DNA, 83 bp, Glycine max
ggaccttaatgaatcaatcacttcaacaaggataaaaaaaattttaagaagaatttaacgagagattaaattctcctcattag

SEQ ID NO: 64821 - DNA, 395 bp, Glycine max
gattcacacaactaactaagaaagtcttccatagccccccaaaaatgaagagcaccatcttctttgctccctttctcttttgtgccttcaccacctcatacctaccttcagccatcgctgatttcgtgctcgataatgaaggtaaccctcttgaaaatggtggcacatattatatcttgtcagacataacagcatttggtggaataagagcagccccaacgggaaatgaaagatgccctctcactgtggtgcaatctcgcaatgagctcgacaaagggattggaacaatcatctcgtccccatatcgaatccgttttatcgccgaagggcatcctttgagccttaagttcgattcatttgcagttataatgctgtgtgttggaattcctaccgag

SEQ ID NO: 64822 - DNA, 409 bp, Glycine max
gcacacaactaactaagaaagtcttccatagccccccaaaaatgaagagcaccatcttctttgctctctttctcttttgtgccttcaccacctcatacctaccttcagccatcgctgatttcgtgctcgataatgaaggtaaccctcttgaaaatggtggcacatattatatcttgtcagacataacagcatttggtggaataagagcagccccaacgggaaatgaaagatgccctctcactgtggtgcaatctcgcaatgagctcgacaaagggattggaacaatcatctcgtccccatatcgaatccgttttatcgccgaaggccatcctttgagccttaagttcgattcatttgcagttataatgctgtgtgttggaattcctaccgagtggtctgttgtggagga

SEQ ID NO: 64823 - DNA, 404 bp, Glycine max
gacagcaaaaacaattaataaagatgagtttgaagaacaacatggtggtgctaaaggtgtgtttgttgcttcttttccttgtgggggttacagctgcacgcatggaactgagcttcttcaaaagtgatcagtcatcaagttatgatgatgatgagtattcaaaaccatgctgtgatctctgcatgtgcacacgctcaatgcctcctcaatgcagctgtgaagatattaggctgaattcatgccactcagattgtaagagctgtatgtgcacacgctcacagccaggacagtgtcgtcgtcttgacaccaacgacttctgctacaaaccttgcaagtccagagatgactggaaaaactaatagctctctcaaatggacgaagccctttaagctttgtttgttatg

SEQ ID NO: 64824 - DNA, 317 bp, Glycine max
gattcacacaactaactaagaaagtcttccatagccccccaaaaatgaagagcaccatcttctttgctctctttctcttttgtgccgtcaccagctcatacctaccttcagccatcgctgatttcgtgctcgataatgaaggtaaccctcttgacaatggtgggacatattatatcttgtcagacataacagcatttggtggaataagagcagccccaacgggaaatgaaagatgccctctcactgtggtgcaatctcgcaatgagctcgacaaagggattggaacaatcatctcgtccccatatcgaatccgtttt

SEQ ID NO: 64825 - DNA, 406 bp, Glycine max
ggttctagcgtgtgattgtttgttgttgtaactcgttcttcttcttttgttgttctgtgtttgtgtttgttttttctctcacctgaaaatgtcttgctgcggtggtaactgtggttgcggaagctcctgcaagtgcggcaacggctgcggaggctgcaagatgtacccagacttgagctacactgagtcaaccaccaccgagaccttggtcatgggagtggcacctgttaaggctcaatttgagggtgctgaaatgggtgtgcccgctgagaacgatggctgcaaatgtggaccaaactgctcctgcaacccctgcacttgcaagtgacgtgttgggagagcaagcttcaagcagagatagcccttaattatgaaaaatgataactattaatgtgtagctaaaaac

SEQ ID NO: 64826 - DNA, 388 bp, Glycine max
gggttcaagtggttgaattgttgttgttgtaactcgttcttcttcttttgttgttctgtgtttgtgtttgttttttctctcacctgaaaatgtcttgctgcggtggtaactgtggttgcggaagctcctgcaagtgcggcaacggctgcggaggctgcaagatgtacccagacttgagctacactgagtcaaccaccaccgagaccttggtcatgggagtggcacctgttaaggctcaatttgagggtgctgaaatgggtgtgcccgctgagaacgatggctgcaaatgtggaccaaactgctcctgcaacccctgcacttgcaagtgacgtgttgggagagcaagcttcaagcagagataaccccttagtaagaataatgaataact

SEQ ID NO: 64827 - DNA, 401 bp, Glycine max
gacacaactaactaagaaagtcttccatagccccccaaaaatgaagagcaccatcttctttgctctctttctcttttgtgccttcaccacctcatacctaccttcagccatcgctgatttcgtgctcgataatgaaggtaaccctcttgaaaatggtggtacatattatatcttgtcagacataacagcatttggtggaataagagcagccccaacgggaaatgaaagatgccctctcactgtggtgcaatctcgcaatgagctcgacaaagggattggaacaatcatctcgtccccatatcgaatccgttttatcgccgaaggccatcctttgagccttaagttcgattcatttgcagttataatgctgtgtgttggaattcctaccgagtggtctgttg

SEQ ID NO: 64828 - DNA, 405 bp, Glycine max
gacagcaaaaacaattaataaagatgagtttgaagaacaacatggtggtgctaaaggtgtgtttgttgcttcttttccttgtgggggttacagctgcacgcatggaactgagcttcttcaaaagtgatcagtcatcaagttatgatgatgatgagtattcaaaaccacgctgtgatctctgcatgtgcacacgctcaatgcctcctcaatgcagctgtgaagatattaggctgaattcatgccactcagattgtaagagctgtatgtgcacacgctcacagccaggacagtgtcgttgtcttgacaccaacgacttctgctacaaaccttgcaagtccagagatgactagaaaaactaatagctctctcaaatggacgaagcccctttaagctttgtttgttatg

SEQ ID NO: 64829 - DNA, 405 bp, Glycine max
gacagcaaaaacaattaataaggatgagtttgaagaacaacatggtggtgctaaaggtgtgtttgttgcttcttttccttgtgggggttacagctgcacgcatggaactgagcttcttcaaaagtgatcagtcatcaagttatgatgatgatgagtattcaaaaccatgctgtgatctctgcatgtgcacacgctcaatgcctcctcaatgcagctgtgaagatattaggctgaattcatgccactcagattgtaagagctgtatgtgcacacgctcacagccaggacagtgtcgttgtcttgacaccaacgacttctgctacaaaccttgcaagtccagagatgactagaaaaactaatagctctctcaaatggacgaagcccctttaggctttgtttgttatg

SEQ ID NO: 64830 - DNA, 408 bp, Glycine max
gattcacacaactaactaagaaagtcttccatagccccccaaaaatgaagagcaccatcttctttgctctctttctcttttgtgccttcaccacctcatacctaccttcagccatcgctgatttcgtgctcgataatgaaggtaaccctcttgaaaatggtggcacatattatatcttgtcagacataacagcatttggtggaataagagcagccccaacgggaaatgaaagatgccctctcactgtggtgcaatctcgcaatgagctcgacaaagggattggaacaatcatctcgtccccatatcgaatccgttttatcgccgaaggccatcctttgagccttaagttcgattcatttgcagttataatgctgtgtgttggaattcctaccgagtggtctgttgtgg

SEQ ID NO: 64831 - DNA, 230 bp, Glycine max
ggcacaagtgagtttgttgatcgagataactagaaacagtgtgatgaaaatgaaggtccttgttttcttcgttgctacaattttggtagcatggcaatgccatgcgtacgatatgttccctcggcgaatgaacactggctatggtgcccgtactccggaggtgaaatgcccaagttggaggcttcctgtggaagcacacagcatctttggctttgagaccagtcctgaag

SEQ ID NO: 64832 - DNA, 71 bp, Glycine max
caaaggattcaagcttaagtacgcctgcatgcgaagtcaaaactcctccaaaatgtcacccaaattcaatt

SEQ ID NO: 64833 - DNA, 130 bp, Glycine max
gaaaaacagaaacacacgaaaacaaaaaaacaaaaaaaccaacaccattctgccgctctaaacgatccaaccttacttacgcttgcaggggaggtggggggcccttctatcctatcaactaaattcaatt

SEQ ID NO: 64834 - DNA, 254 bp, Glycine max
gattcacacaactaactaagaaagtcttccatagccccccaaaaatgaagagcaccatcttctttgctctctttctctttggtggggtgaccacctcatacctaccttcagccggcgctgatttcgtgctcgataatgaaggtaaccctcttgaaaatggtggcacatattatatcttgtcagacataacagcatttggtggaataagagcagccccaacgggaaatgaaagatgccctctcactgtggtgcac

SEQ ID NO: 64835 - DNA, 95 bp, Glycine max
acagaaggggacaacataaacattctctccattgtctttgaacactcatcaccatatcaaaccttcttctttccatttatttccttcatttcact

SEQ ID NO: 64836 - DNA, 157 bp, Glycine max
ggcacaagtgagtttgttgatccacataaccacacacagtctcactaacacccaacctcggtggggggggggggtcctaccctcctcctaccatccggattccccccctaccatccctatcccctcccatctaaccatcctctcttctcccccctcc

SEQ ID NO: 64837 - DNA, 168 bp, Glycine max
  unsure (1)..(168): unsure at all n locations
acgacagaacgggacaacacagaacaaaaacaacgaacaaaaaaaacccttagccaacacaaccatcatggccacctccgctattcagcaatcancattcactcgtcaagcggcgcggaggcagctcaatcacttcatccccaacgaccccttcccctgcaaacgtct

SEQ ID NO: 64838 - DNA, 501 bp, Glycine max
gtccctaccgcttccaccttactactgcctgtccacttcttctcctcttcttccccacccttctttccccctctcctcttctcttcctttcccctcccctttcccctgggcgggggtgctttctttcctttcccacttttcttgttcccctctctcctctccctctctttccccttctctccccttcctctcctcttcctttttcctccctcttcctcctccttcttcctctctctttcccccctttttcttccccgcgcttcctctcctctttctctctctctctctcttttcctccttctctctccctctttcttcctccctccccccttcctcttctctccattcttatccatcttctcctgtccttcttatctctctcatccctctcgctctctcttgtcttctcgccttttctcctctctccctctttctctttctctctccctctctctcctcccttcctttcacctcttgcttctcaccttctctgctctcttc

SEQ ID NO: 64839 - DNA, 89 bp, Glycine max
gacagcaaaaacaattaataaagatgagtttgaagaacaacatggtggtgctaaaggtgtgtttgttacctcttttccttgtgggggtg

SEQ ID NO: 64840 - DNA, 209 bp, Glycine max
ggcagttcaattccaatatattccattctctctgtgtatttccctacctctcccttcaagatgcacatcttcgtcaagaccctcaccggcgggagggagggccgttgacgttgacacctctgacaccatccacaacctcaaggccaagatccacgataacgaacgaaccccccccgaccccacattctcatttttcccggacacgaact

SEQ ID NO: 64841 - DNA, 81 bp, Glycine max
gactttccttctgcccacacctcacagacagggcaatgtcttccttggcacctgccgctctaaagaatacgatctggggtg

SEQ ID NO: 64842 - DNA, 187 bp, Glycine max
gcttaccaaatagtgaaaggaacatttcacctagtaaaagaagttacaaactaactcaaatatcttgttgaagaggggaggggtgagttaattctaacaacacatcgtgtgttattcattgaaattcacaaaaaattacaactttacatcgctctcatttctcatttaacgctcaccctcttacctt

SEQ ID NO: 64843 - DNA, 83 bp, Glycine max
ggcactgagtgcaaagtgcaaataaaataacaatcaagatgagtactaccaccattaaccttaccttctataccccttcctcg

SEQ ID NO: 64844 - DNA, 120 bp, Glycine max
gacagcaaaaacaattaataaagatgagtttgaacaacaacatcgtggtgccaaaagtctcttgtggggcggcgggtccatatcccccttacacctccgcgggttcacctcatcttcttc

SEQ ID NO: 64845 - DNA, 329 bp, Glycine max
gttttcttctaattaaaacaaaaattataaaaaattttctcgtatcccctcctatatcacccacaaaatcctccactctccctctctagaggatggaggcttacttatccctccatacaacctcactatcctcttcacactctctccaaacttcacttcactacccgtccttttacatcctccttactacccaaattcctccctttctccacccctattacccttgcccacacccctcccctcttcatcaccccctactttccctaaccccccccccccacttcccctcaccttcctccatcttcttctcttctcacctcttctccctc

SEQ ID NO: 64846 - DNA, 136 bp, Glycine max
gttgattttatgtttattttgttctattcgcatcaatctgcagcatgacaaccgaggaagactcgtctgtttttgttttgttcaggagtcggaggggggctcttaacacacaccttacatcggcgtttctctctcc

SEQ ID NO: 64847 - DNA, 86 bp, Glycine max
gttttatctttttccttaattaaaactctcaaacctttaaaattcattcccataacagaatccttattatcgatcacataaatccg

SEQ ID NO: 64848 - DNA, 87 bp, Glycine max
gacacttactactagtaagcatggagtcctcaaagatctatgcttacctcttcctctgcatgatctttctctcttccgccactccca

SEQ ID NO: 64849 - DNA, 79 bp, Glycine max
gacagcaaaaacaattaataaagatgagtttgaagaacaacatggtggtgctaaaggtgtgtttgttgcttcttttcct

SEQ ID NO: 64850 - DNA, 116 bp, Glycine max
gatagcaaacacaattaataaagatgagtttggggagggggtggtggttccaacagtatctttgttgcttcctttccttgtaggggttacaactgctaccctggaacctaccttct

SEQ ID NO: 64851 - DNA, 210 bp, Glycine max
ggaaaaaacactcccatggaccgtcgtaaatataaaaatgctccatcgttatcgctgtcgcaatttgccgactgggatcacatggggcgggtgcgggagcccccacttcatttctcaaagatccgggaaactactgaactaccacatccttgccttttccacagctactcctttcccatccccaaccaatcttgtattcctcctcccccc

SEQ ID NO: 64852 - DNA, 272 bp, Glycine max
cggtcgaaatccggggcgaccaagcctccggccaaacctccgttacggtgcgaaaagaccacaaaaagggaaaatttggaccaactccgggaaaaagagaaaaagagaaaaaaaaattggtgatacaagttggggggaatcattagaccgtgggaaaatgtgaccagcaatgcaaatgcacagttccatgcaccggtgggtccacattcatgtgcacaaatgtccgcaatacaactggacgcgggggttaccttacatgccccctccggaaa

SEQ ID NO: 64853 - DNA, 156 bp, Glycine max
tcgggactcgcagttgtgctgttgaccacgggtttcgctgtctgcctcttcaccttctctcgggtcactctgctagcataccccatcatgggcctggcttgcctcagcgacttcacctttccgttgcctgggaccactgtcgaggtactgctgctt

SEQ ID NO: 64854 - DNA, 201 bp, Glycine max
gagggggtgggctttgtcctgttgtcactgctctttccctaggggctcccagctctgcaccgcattatcttgtcacggagcattcacatttgaggggagacggtcgcacgctcttctcgcaccgcacgaggcatacgcgagctggttggtcaatcacgttcggccagctttcagaatggacgttttgcccgtttgccggtg

SEQ ID NO: 64855 - DNA, 231 bp, Glycine max
ggccttcagcacttgaagttgacaccttgctgatccccatcatgggaaccatttttcctcatcactctctctctccactcctcactaggggggcgtcaggctcatgaattctcttggctctctctctccagcccaagtcaaattctctcttttgcgccagccccattgattcaagtctcaacaagatcgatacttcatctcgtacagcttcatcgggcacaagttggttgg

SEQ ID NO: 64856 - DNA, 365 bp, Glycine max
  unsure (1)..(365): unsure at all n locations
gattcatatgatagatattggtaatgactattttcttgtatactttcctcatccggaggacaaagaaaaagctcaatcagagggtccttggtttgtgtatgaccattacttggttgtgagagactagaaccctaattttcactcggatttggaggccattgagaaagtggcagtgtgggtgcgattttcaggattacctattgagtactatgactacaaagtgtttgttaccaatggagaccacattgggagaacagtgagagtggatagaaatatgttatcgcaactttctgttacttctcattccaaatatcanatttcaatccattcgttcaaacattctgacccattatatcatccgaaca

SEQ ID NO: 64857 - DNA, 307 bp, Glycine max
gagggaccaaactcagaacatgccacatgacacagagaagataggtcacagacactgtcagggatcactcacacgattgaggagacacttcatgtgggatgccataagacagaggaggattacaacggtgagcagcaccatggtggcgaatacaaaggggagcatcatggtgaacacactactgtatacacatgtgagcatcatgttggtgagcacaagccggatcaccattgacgacaaaatcacatacaggggttcctatacactatcaagggcattatccacagtcatcgacggtggcaccacc

SEQ ID NO: 64858 - DNA, 134 bp, Glycine max
tggggcacaccaccattgacgttgcgcaggatattcacagcaaggcacatgatactctggatgtagctgcactgcatgcacgggatgcaactccactggatgccatggaacctgctgcatcggatgcatatgtc

SEQ ID NO: 64859 - DNA, 162 bp, Glycine max
cacgcgtaaagcatgccgtccgttacgctgcggtactgctgcggaaagggaatcgcacggttcagtttgaatctcgtcaatcaccgggaggtaccgacacgcatgctcttctgtgctctccctcgcgtgggtgacatcaccatttcctcctacagattctcc

SEQ ID NO: 64860 - DNA, 384 bp, Glycine max
gatcaacgaaaatgaaaaaaagagaaaacaaaagtgtaagaaagagagtgaatagagaagatggaggtggagcgttcttcgccgtgcaactgcgtggagcttctcgacgatggtcgccacgaccaggccattcgcctccaagagtacttgtctgatccacaaactcttctccaactcaaaaacgattccgaacacaagctgtccatcaccgattaccaacttcgtctcgccaaactcaaatctcaactctacgttgcttctgctggttccttccttcttaatcatgcaaataatttaatgataaattgattgataaactttacaacttaatcatgtaatcaatttgtaccttttagtttagatatcaatttgtcagatcatcac

SEQ ID NO: 64861 - DNA, 401 bp, Glycine max
gacagcaaaaacaattaataaagatgagtttgaagaacaacatggtggtgcaaaaggtgtgtttgttgcttcttttccttgtgggggttacagctgcacgcatggaactgagcttcttcaaaagtgatcagtcatcaagttatgatgatgatgagtattcaaaaccatgctgtgatctctgcatgtgcacacgctcaatgcctcctcaatgcagctgtgaagatattaggctgaattcatgccactcagattgtaagggctgtatgtgcacacgctcacagccaggacagtgtcgttgtcttgacaccaacgacttctgctacaaaccttgcaagtccagagatggctagaaaaactaatagctctctcaaatggacgaagcccctttaggctttgtttgt

SEQ ID NO: 64862 - DNA, 309 bp, Glycine max
tacagctgctacaagacgtcactccggtacagctgcaacacgaccacacaaaggtacagctgctactcgacgccctgacggtactgcatcagagaggatcacatcctgtgaacttcacaccatttcacaattccgagtttggatactccatctgcagattgaaaaactgtcctaatgttcagtaacattcctggtttttaacgatacgaaataaccatcgtcactcctgatcttccaaaccctccccagacattaccttcctcatagggaatcccttactagcattttcacaccatgatatccaagttt

SEQ ID NO: 64863 - DNA, 326 bp, Glycine max
gaaggtatcaaaaacaaacaaaaatcctaaccgcaaaaggaaaagaagagaatgataacaatgagaataattgcgtatcgattccgagttcaaattcaaaatcaaagacttctattagcttgggtttgggaaatccccaattgttcacatcagtttcagtaaaggtatccgtgaacgtgaatggtccgggaagaaacacaggtttgagttgcaacgccatgttcggtctgggcgtgcctgaactggtccttaatgccggcgtggccgccctcgtttttgggcccaagaaattgcctgaagtcggccgcaacatcggcaaaactgtc

SEQ ID NO: 64864 - DNA, 53 bp, Glycine max
tacggctgctacaacactacagaacggtactgctgctagaataccacctaacg

SEQ ID NO: 64865 - DNA, 118 bp, Glycine max
ggttctagtgtaggtgattgatgtgaatcgatcgtcgtcgtcgttaacatcctcctttgttgtttgtgtgtttgttttttctcccacctgagaatgtcttgctgccgtgggaaatgtt

SEQ ID NO: 64866 - DNA, 100 bp, Glycine max
ggctcgatttgtggatgttccctttgttattgcagatgcaacttcactcactcaggcaagtttgtgagctttattcttgttttctgattttccatctccc

SEQ ID NO: 64867 - DNA, 324 bp, Glycine max
ccacgcgtccgtcagggcgtccgtcgggtgctaggtatcgacaaaaaggtaaggctgctaatagaccatattaaggtactgatgctataatatgatgagagggttctgctgattaaagtcgactggtatggtttgtcctgaaaacactatctatcggtattggtactacttaatgatattaggggaccgtctgtcataagaatatactccgaggttgcaatatctataaagtatcccactatcaataggtattgccattcacttcgctggctccttatcgtacaactcttcaatgatttctcataatgtcaatttcctcgactt

SEQ ID NO: 64868 - DNA, 131 bp, Glycine max
ctctttccaatgaaattatagaattttccaatgttgtcacccttgtattcgcagctgctctaaaggatccaaccttacctactctttcatgccacgtcacagctcttccacaatctcacttcaattcaatt

SEQ ID NO: 64869 - DNA, 111 bp, Glycine max
gtattcggccttagcggaaggcatatataagctttgattattttatttagtgtaatgatttcgtacaaccagggcatttatttagtactctcacacttgtgtctcactcat

SEQ ID NO: 64870 - DNA, 406 bp, Glycine max
caagaaaaacgttgtaacctctcactagtctatctaaggattggggtgtgaaaaaaaaaaaaagccggttcaatcgaattagtttatttttataaaatcaatagtttaaaaattagtttgaaaactaaattaaaaatgacttcaatcttaaaataagttaaaaactaattcaatttagaattggttttttaaaatcagtttgatttcaaactaatttttaaattaatttaattatttagatataaaactaaatgaaacaaattcaatttagttttttacctcacacccctacctatcgtaatggcacatacacgtgtgattatttaattaccagttagtatctactagtgcttatttttggctcttaatttgtttggggcttgttaagaaagaagaaaagaaagct

SEQ ID NO: 64871 - DNA, 374 bp, Glycine max
gcttcacagcaaaaacgattaataaagatgagtttgaagaacaacatggtggtgctaaaggtgtgtttgttgcttcttttccttgtgggggttacagctgcacgcatggaactgagcttcttcaaaagtgatcagtcatcaagttatgatgatgatgagtattcaaaaccatgctgtgatctctgcatgtgcacacgctcaatgcctcctcaatgcagctgtgaagatattaggctgaattcatgccactcagattgtaagagctgtatgtgcacacgctcacagccaggacagtgtcgttgtcttgacaccaacgacttctgctacaaaccttgcaagtccagagatgactagaaaaactaatagctctctca

SEQ ID NO: 64872 - DNA, 215 bp, Glycine max
ggtgtgttgaaggagtatcagtccagaatgtgatgcacaaaagtggccgctccaaaggatccatgcttaggtgcgcatggatgagaggtcacaactcttctacactgtcacatgagatcagttcactgctcttccttttagaacttcatacctgggaaaagcttggcgttactcaacagaatcacgttgtctcagatcaccctttccccatctgg

SEQ ID NO: 64873 - DNA, 290 bp, Glycine max
  unsure (1)..(290): unsure at all n locations
caacagaaggggacagcacaaccaattaataaagatgagtttgaagaacaacatggtggtgctaaacgtgtgtttgttgcttcttttccttgtgggggttacagctgcacgcatggaactgagcttcttcanaagtgatcagtcatcaagttatgatgatgatgagtattcagaaccatgctgtgatctctgcatgtgcacacgctcaatgcctcctcaatgcagctgtgaagatattaggctgaattcatgccactcaaattgttagagctgtatgtgcacacgctcac

SEQ ID NO: 64874 - DNA, 391 bp, Glycine max
gatggggagttataaaaacaacgaagcctgatagacacaagagatggattgcagggtgcagatgagaatttcgctgcgcaggatacttcagattctccgagtccttacgtactcaaactctgccaagagaacctcgcttgcgaagagtaccgttctacgcttagacaagctacagctcgcactggaaactgtcaagagacaatatgacaacctattagccacgagaagagagtgcgttaggctattgagccatgtcaaagagagcaaggatgtcagaatagagaaggtaagggcaggaacttttatggtgagggtcacatgtgagaaagggggtgacaatctggttgctatattaaatgcatttgatgagatgttcctggatgttcaacaa

SEQ ID NO: 64875 - DNA, 98 bp, Glycine max
atcaaaaaaaaaaaaaaaaaaaaaaaaaaaaaaaaaaaaaaaaaaaaaaaaacaaaaaaaaacaaaattaaaaaaaaatatacataaaaccccaaaac

SEQ ID NO: 64876 - DNA, 392 bp, Glycine max
gacagcaaaaacaattaataaagatgagtttgaagaacaacatggtggtgctaaaggtgtgtttgttgcttcttttccttgtgggggttacagctgcacgcatggaactgagcttcttcaaaagtgatcagtcatcaagttatgatgatgagtattcaaaaccatgctgtgatctctgcatgtgcacacgctcaatgcctcctcaatgcagctgtgaagatattaggctgaattcatgccactcagattgtaagagctgtatgtgcacacgctcacagccaggacagtgtcgttgtcttgacaccaacgacttctgctacaaaccttgcaagtccagagatgactagaaaaactaatagctctctcaaatggacgaagccctttaagctttg

SEQ ID NO: 64877 - DNA, 368 bp, Glycine max
  unsure (1)..(368): unsure at all n locations
gacagcanaaacaattaataaagatgagtttgaagaacaacatggtggtgctaaaggtgtgtttgttgcttcttttccttgtgggggttacagctgcacgcatggaactgagcttcttcaaaagtgatcagtcatcaagttatgatgatgatgagtattcaaaaccatgctgtgatctctgcatgtgcacacgctcaatgcctcctcaatgcagctgtgaagatattaggctgaattcatgccactcagattgtaagagctgtatgtgcacacgctcacagccaggacagtgtcgttgtcttgacaccaacgacttctgctacaaaccttgcaagtccagagatgactagaaaaactaatagctctct

SEQ ID NO: 64878 - DNA, 404 bp, Glycine max
  unsure (1)..(404): unsure at all n locations
gacagcaaaaacaattaataaagatgagtttgaagaacaacatggtggtgctaaaggtgtgtttgttgcttcttttccttgtgggggttacagctgcacgcatggaactgagcttcttcaaaagtgatcagccatcaagttatgatgatgatgagtattcaaaaccatgctgtgatctctgcatgtgcacacgctcaatgcctcctcaatgcagctgtgaagatattaggctgaattcatgccactcagattgtaagagctgtatgtgcacacgctcacagccaggacagtgtcgttgtcttgacaccaacgacttctgctacaaaccttgcaagtccagagatgactagaaaaactaatagctctctcaaatggacgaagcncctttaggctttgtttgttat

SEQ ID NO: 64879 - DNA, 324 bp, Glycine max
gattcacacaactaactaagaaagtcttccatagccccccaaaaatgaagagcaccatcttctttgctctctttctcttttgtgccttcacgacctcatacctaccttcagccatcgctgatttcgtgctcgataatgaaggtaaccctcttgaaaatggcggcacatattatatcttgtcagacataacagcatttggtggaataagagcagccccaacgggaaatgaaagatgccctctcactgtggtgcaatctcgcaatgagctcgacaaagggattggaacaatcatctcgtccccatatcgaatccgttttatcgccg

SEQ ID NO: 64880 - DNA, 92 bp, Glycine max
cggtccgagaaatccggggcgcagcacgcgtccgcccacgagtccgagacgacagaaggggaaaataaaaaaagaaagatagcaagagagag

SEQ ID NO: 64881 - DNA, 196 bp, Glycine max
atctgtaaatacaagatctagggaaaatatttaaaaaaacaaaaaaatatttttttgttttttttcattgattccattttcaatcgatttgtcaataacaaaaagattgctcgtaatctgtgtcgatctcacaaaagtgcatatcgatatagatatcaatcaatatatacaaaaatccgcctctttcatttacagc

SEQ ID NO: 64882 - DNA, 245 bp, Glycine max
gaacgaaaaagagaacaaaaaccagaaaccctttccccgtgaaaacatctacctcaaacctcaaaccctcatcactctcattcattcatcatactaatcctcgttcctttcacttttctatataccccaaagcaaaaaaagaaaaaaaagtcacataaacctcacttcctcaacctcaatccaacacaacaacaaaaaaaatcaaaaacaaaaaacctcactttgatcacacagatcacacacac

SEQ ID NO: 64883 - DNA, 406 bp, Glycine max
  unsure (1)..(406): unsure at all n locations
gattcacacaactaactaagaaagtcttccatagccccccaaaaatgaagagcaccatcttctttgctctctttctcttttgtgccttcaccacctcatacctaccttcagccatcgctgatttcgtgctcgataatgaaggtaaccctcttgaaaatggtggcacatattatatcttgtcagacataacagcatttggtggaataagagcagccccaacgggaaatgaaagatgccctctcactgtggtgcaatctcgcaatgagctcgacaaagggattggaacaatcatctcgtcnccatatcgaatccgttttatcgccgaaggccatcctttgagccttaagttcgattcatttgcagttataatgctgtgtgttggaattcctaccgagtggtctgttgt

SEQ ID NO: 64884 - DNA, 398 bp, Glycine max
gactctgctcaatttgtgagattccaaagcaattctttgctgccaacacaatggattcaagagcttacatccttagagtcaccattgcaattctttgcatctcaatgctagcttccactcttttccctgtgtgtgatgctataaatcatggaagagcaataaggggtcacaaaatccgtagaagctccccaatcaaatctttaaagaaactgaaaataaaatctttaagacatttaaacaagtacacaccatttgattcatttgggtactcagactttgattcatatgggtactcaaactttgatgattcatatggctctccctcttccctacccttatcacctttcaattcactagcaacacatccacaacctacaacatcaagtttcattgctcct

SEQ ID NO: 64885 - DNA, 322 bp, Glycine max
cgcgtcagtaaggcactagacgacagcaggggggagcacgctagacatttggaaattcctcctctgcgtaacatcatggtggtgcacaccgtatgtttgttgcttcatttccttcaagcgatcagtgttgcactcatcgcacgtacctccttcacgtctgatctcatcatcatcttattatgatgatgtactctcttagctatgccatgatgtcttcacatgcacacgcccactccctcctctttgctcctgtgataatattacgccgagcttcaagctaatcacatcgtcccagctgtcagtgctcacgctcatgtccagg

SEQ ID NO: 64886 - DNA, 351 bp, Glycine max
gacagcaaaaacaattaataaagatgagtttgaagaacaacatggtggtgctaaaggtgtgtttgttgcttcttttccttgtgggggttacagctgcacgcatggaactgagcttcttcaaaagtgatcagtcatcaagttatgatgatgatgagtattcaaaaccatgctgtgatctctgcatgtgcacacgctcaatgcctcctcaatgcagctgtgaagatattaggctgaattcatgccactcagattgtaagagctgtatgtgcacacgctcacagccaggacagtgtcgttgtcttgacaccaacgacttctgctacaaaccttgcaagtcgggggatgactaga

SEQ ID NO: 64887 - DNA, 291 bp, Glycine max
aggaggataaaagggaatgagcgcttaagagctttttattaaccgcacttgcactgtttttacagctgtgttccgcaacccttcacgagaagtgttgtaaaattttgttcatttgtaccagaatagttagaatacgttttattgtgtatggaattactgtataacaagtattgtccatgccgatgatccaatttgctatcctattttttccctcacccttgtggacttcgaaatcttttcgattgttggattagtatgtgtgtataattaaaaaaagaacagtgaagtcgc

SEQ ID NO: 64888 - DNA, 220 bp, Glycine max
gacacttactattagtaagcatggagtcctcatatatcgatgcgcatctcttcctctgcatgatctttctctcttccgctactcccattcgaggttgcggccattgtggaattttccccaactctgtgactcttgctaattatattctatggacctattgtacccgttgttaagctatcattcaccatctcctcgcactaatgttcctcccgttgttctt

SEQ ID NO: 64889 - DNA, 323 bp, Glycine max
gagattccttttgacagcttcctccaatttctttttttggtctccttctcttcataggactaaaaaccatgcagtttactcttttcactggtgcttcctgggacttcctttgaacatgtctaaactaccttaacccattttttttaccacacatctattttagcattttcatttctaccgctctcacatttttaatgcccaacatctagtattatagagtacaggcagatatgatgtaacagtaaaataaaatttgcctgagcttggtaggtaataataggtattttgtgatcataaatcctttcttcattttagctgctaag

SEQ ID NO: 64890 - DNA, 358 bp, Glycine max
gacagcaaaaacaattaataaagatgagcttgaagaacaacatggtggtgctaaaggtgtgtttgttgcttcttttccttgtgggggttacagctgcacgcatggaactgagcttcttcaaaagtgatcagtcatcaagttatgatgatgatgagtattcaaaaccatgctgtgatctctgcatgtgcacacgctcaatgcctcctcaatgcagctgtgaagatattaggctgaattcatgccactcagattgtaagagctgtatgtgcacacgctcacagccaggacagtgtcgttgtcttgacaccaacgacttctgctacaaaccttgcaagtccagagatgactagaaaaacta

SEQ ID NO: 64891 - DNA, 377 bp, Glycine max
gacagcaaaaacaattaataaagatgagtttgaagaacaacatggtggtgctaaaggtgtgtttgttgcttcttttccttgtgggggttacagctgcacgcatggaactgagcttcttcaaaagtgatcagtcatcaagttatgatgatgatgagtattcaaaaccatgctgtgatctctgcatgtgcacacgctcaatgcctcctcaatgcagctgtgaagatattaggctgaattcatgccacccagattgtaagagctgtatgtgcacacgctcacagccaggacagtgtcgttgtcctgacaccaacgacttctgctacaaaccttgcaagtccagagatgactagaaaaactaatagctctctcaaatggac

SEQ ID NO: 64892 - DNA, 379 bp, Glycine max
gattcacacaactaactaagaaagtcttccatagccccccaaaaatgaagagcaccatcttctttgctctctttctcttttgtgccttcaccacctcatacctaccttcagccatcgctgatttcgtgctcgataatgaaggtaaccctcttgaaaatggtggcacatattatatcttgtcagacataacagcatttggtggaataagagcagccccaacgggaaatgaaagatgccctctcactgtggtgcaatctcgcaatgagctcgacaaagggattggaacaatcatctcgtccccatatcgaatccgttttatcgccgaaggccatcctttgagccttaagttcgattcatttgcagttataatgctgtgtgt

SEQ ID NO: 64893 - DNA, 404 bp, Glycine max
gacagcaaaaacaattaataaagatgagtttgaagaacaacatggtggtgctaaaggtgtgtttgttgcttcttttccttgtgggggttacagctgcacgcatggaactgagcttcttcaaaagtgatcagtcatcaagttatgatgatgatgagtattcaaaaccatgctgtgatctctgcatgtgcacacgctcaatgcctcctcaatgcagctgtgaagatattaggctgaattcatgccactcagattgtaagagctgtatgtgcacacgctcacagccaggacagtgtcgttgtcttgacaccaacgacttctgctacaaaccttgcaagtccagagatgactagaaaaactaatagctctctcaaatggacgaagcccctttaagctttgtttgttat

SEQ ID NO: 64894 - DNA, 436 bp, Glycine max
ggcacaagtgagtttgttgatcgagataactagaaacagtgtgatgaaaatgaaggtccttgttttcttcgttgctacaattttggtagcatggcaatgccatgcgtacgatatgttccctctccgaatgaacactggctatggtgcccgtactccggaggtgaaatgcgcaagttggaggcttgctgtggaagcacacaacatctttggctttgagaccattcctgaagagtgcgttgaagcaacaaaggaatacatccatggcgaacaatatagatcagactccaaaacagttaaccaacaagcttacttttatgccagagacctcgaagtccatcccaaggacacatttgtgttcagtatagatggcaccgtactctctaatattccatactacataaaacatggataatggggtggagaaatttaactcgac

SEQ ID NO: 64895 - DNA, 268 bp, Glycine max
gaaacgtgagagtgatataaaaaaacaagaaagaaaaaaaaagcggacgcgctacacgataggatctaagctaaccttgcattgcatgtcatatcacatctatactgtcatgtaaattcaattcaatggacgtcgcgtcagattataatgactggaatgggactgccctgacgtaacttaatctacttgcattacatcacattttcgttacgtgacctggtatcaaagaggccaggaccgatcggacttcccatcacatgagtagccc

SEQ ID NO: 64896 - DNA, 213 bp, Glycine max
gacagcacaaacaattaataaagatgagtttgaagaacaacatggtggtgctaaaggtgtgtttgttgcttcttttccttgtgggggttacagttgcacgcatggaactgagcttcttcaaaagtgatcagtcatcaagttatgatgatgatgagtattcaaaaccatgctgtgatctccgcatgtgcacacgctcaatgactctttaatgca

SEQ ID NO: 64897 - DNA, 60 bp, Glycine max
gcgtccgtaaggaagccagtagaggagagaaggggacacataatggtgatcatcattagc

SEQ ID NO: 64898 - DNA, 138 bp, Glycine max
gaaatagattttgaaaacagccacatagacaggcttccgtaactgcatcgtgtagtgaatgaatgtcgtcgcttacatcttccgagtcggtggcttgactctctcagggatatttccgctacatagttcattcgacaa

SEQ ID NO: 64899 - DNA, 252 bp, Glycine max
caatgggtacggctgtcattcaatctcattacggtcatgctgctacacaacgactgattgggatatcgtctccatattgatcatgacgggccattccgcgaattgatcattctctaccacagcggtcgctctacacgttccaatcttacatattcgttcatgccatgtctttgctcttcgattgtgtcatctaatttcatctcattggccctcattttaaagtttcttgcctgggacaaccctgccattacc

SEQ ID NO: 64900 - DNA, 199 bp, Glycine max
ggaagagacgagtaaagaaataaaacaactaattggaaaaaaaaaaaaaaaaaccaaagcataagttaaatacggagtgagatcctcaatacagaagccaaattcgcaaactgactcgtgtagattccaaaaaattgcatatacacgtgtttaaatgcaactaagaaatttaggctttgggatgattgtcataatgaat

SEQ ID NO: 64901 - DNA, 231 bp, Glycine max
ccactagggggggaagacgctactgagctgttttcaaactactatcatcttgtacatataccactgatttatgtcggggaggacttatgcagacgaacaatctgccatgaccgacgtatgctgtttccggtttcatcttgttatgatcgtgtcactcttctccattctcattctcattctctgtcgctcatcgctatcaatcacgtcctctcgcttagctgactgccatgt

SEQ ID NO: 64902 - DNA, 394 bp, Glycine max
ggcacaagtgagtttgttgatcgagataactagaaacagtgtgatgaaaatgaaggtccttgttttcttcgttgctacaattttggtagcatggcaatgccatgcgtacgatatgttccctctccgaatgaacactggctatggtgcccgtactccggaggtgaaatgcgcaagttggaggcttgctgtggaagcacacaacatctttggctttgagaccattcctgaagagtgcgttgaagcaacaaaggaatacatccatggcgaacaatatagatcagactccaaaacagttaaccaacaagcttacttttatgccagagacctcgaagtccatcccaaggacatatttgtgttcagtatagatggcaccgtactctctaatatccatact

SEQ ID NO: 64903 - DNA, 378 bp, Glycine max
  unsure (1)..(378): unsure at all n locations
gacagcanaaacaattaataaagatgagtttgaagaacaacatggtggtgctaaaggtgtgtttgttgcttcttttccttgtgggggttacagctgcacgcatggaactgagcttcttcaaaagtgatcagtcatcaagttatgatgatgatgagtattcaaaaccatgctgtgatctctgcatgtgcacacgctcaatgcctcctcaatgcagctgtgaagatattaggctgaattcatgccactcagattgtaagagctgtatgtgcacacgctcacagccaggacagtgtcgttgtcttgacnacaacgacttctgctacaaaccttgcaagtccagagatgactagaaaaactaatagctctctcaaatggacg

SEQ ID NO: 64904 - DNA, 430 bp, Glycine max
gatcctctgtctcaatcttataacttggccatggtcaatgtatcttcataacgattttttggataagaattgtgtgtgtgagagacataattaacagtagacagtaggactcaaagtttatacctacaccaaattggtaaattctatctctctattctaccttaatctaaagatcaagattttatcattaaattaagatgacttgtttctcctctttcctctctgcccattaaacatcaaaaaagcctttctttgtttgtttttttttaatgatttcattgagcataagcattaactagagattctcacaattatcagtctcaacctcttattccgattcaaaaacaaactgaaaaacattatcaagaaaatgcacaataaaattatactacaattgtctgtagtcctcactcctcaagaaaaactgaag

SEQ ID NO: 64905 - DNA, 420 bp, Glycine max
gattcacacaactaactaagaaagtcttccatagccccccaaaaatgaagagcaccatcttctttgctctctttctcttttgtgccttcaccacctcatacctaccttcagccatcgctgatttcgtgctcgataatgaaggtaaccctcttgaaaatggtggcacatattatatcttgtcagacataacagcatttggtggaataagagcagccccaacgggaaatgaaagatgccctctcactgtggtgcaatctcgcaatgagctcgacaaagggattggaacaatcatctcgtccccatatcgaatccgttttatcgccgaaggccatcctttgagccttaagttcgattcatttgcagttataatgctgtgtgttggaattcctaccgagtggtctgttgtggaggatctaccag

SEQ ID NO: 64906 - DNA, 310 bp, Glycine max
gtcgtaggctgcgagagggaacatatgcgtctttgggatgtaatgctcttaccacaatgggtttcataggccgtccgaacactttgtcgggttgggccatcgctagagcagacgtgcagctcaccattatagttggtggtcatgtcgtcagctggagatgaaccaacaactggatgtacagggcacgggctctcagcagtgaaggacccgcggatctcgtataaaaggatgtacgtatcacctccagcgggaaccagaatcttatctttaactactagacggggggaatattgtataatgtcatcaacag

SEQ ID NO: 64907 - DNA, 268 bp, Glycine max
ctctgtccataatgtaacattggatgagatgtaaagagggatggtctagtattacatgtttgacctgatattaggttcttaaatactaatgaattaagatgttacggacgttcaataactacattgtatactcatgttggatttacactcgattgtttatgtcgaagtcacctctatgaatcctacaagcctaaaacacagtaaaatgcaattatgagaacatttggatcacccgaacaaaacccgcactattcactacgcggccgcc

SEQ ID NO: 64908 - DNA, 183 bp, Glycine max
tgctagaatacgacaaaaggcatattcgaagatatgaacatagttctgtttactccataggaatggcagccccaacgggaacataggctgcttgagacctctcttgtgcaaatctccaccgaacagtttcagtcactgatcatatcttccgcttctacttcaccgaaaactatttcttctgaa

SEQ ID NO: 64909 - DNA, 245 bp, Glycine max
cacaaggctactttggcatgtaatgctcttatcacaatgggtttcattggccgtccgaacactttgttgggttgggacttcgctggagcagataggcaccttaccattatagttggttgcgtcatgtcgtaccgctgaagacgcaaccacccactggatgtactgggcaggtgttgtcagcaatagaactctcgcggatcctatataaaaggatgtacgtatcgcctccagcgggaaccagaatc

SEQ ID NO: 64910 - DNA, 191 bp, Glycine max
cccggggcgcccatgcatcagtaaagccgtcagatgagaaaacaatgcatcttgggattgaaattctcttttcacaatgcgtacattaggccgtacgaatgtcttagttcgatcttcattgctctcgttgtcttttgtagcgtcatgattgcattggttccttaagtcatcgctgattttgtaatcaacat

SEQ ID NO: 64911 - DNA, 185 bp, Glycine max
aggggcacacaatagtctcgtcgcttaatcaagaaagaagggtacgggtgttagaagacgaacgagcgatactgcagcatcaaaaccttcgtagggttctgctgcgcatcatcaatcttcgggttcggctgctaaatcacaatagaagggtatcgctgctcaatgtccacacaggggtaccgctg

SEQ ID NO: 64912 - DNA, 163 bp, Glycine max
cccgggtgcccccacgagtccgtaaaggcgtcagctgagacaacagggcagaatgggctacagacgttttcctatcaagatcgtggattcaggggtttgtttgttgaactctattctctttgcaggcttgctcttcggtgcattcaccagggtatggtcacat

SEQ ID NO: 64913 - DNA, 347 bp, Glycine max
aacagcggagattactctacagatgttttccgatcaacatggtggagtcaagggtgtgtttgttgcactcttttccttgtacaggtaagtgcttcacgtctgtaactagggtatcgatcacacctcataattcatcattttatcacaaaggtggtgattcaacaccatgtggtcatatctacaagtacacacgctcaatccgtcatatctgcatctacaaatatattctgcagacttcatgcaactcagatcatgctagctgtatgtccattagctcacagcctgtagtatgtccttgcaataacaccaacaacttccgctacagttcttgtggatccattcaagtc

SEQ ID NO: 64914 - DNA, 274 bp, Glycine max
agggggcaaacaaggggactctcaccacatcaatctaaatcacttttgggtaacagtcttgagtcgccgcccctacaaatataaacctaattggggccttggtgggatctcctaacacccttcctaatcggacccaaactcaaatcaacggcgctcgcttttcaagttctctaccgggaaaaacactgcgtttaccccttaatcccccttgtgaaaatcacccctgctgccactattggcatcacaaccttgctcccgtccggtttccccccca

SEQ ID NO: 64915 - DNA, 113 bp, Glycine max
tgggacagcaaaaacaattaataaagatgagtttgaagaacaacatggtggtgctaaaggtgtgtttgttgcttcttttccttgtgggggttacagctgcacgcatggaactg

SEQ ID NO: 64916 - DNA, 196 bp, Glycine max
gtacagcggggaagaatctaccgaagagtttcaggtacatggtattgatgcagaggttttggaagaggattatcctcgttgtacaggtatgtgcgtcgcttcattatccatgggtatcgttacacctgcacttctgcctctgactctcatcagtggtgttcagacaaccagttgtctctcccacgattagacacat

SEQ ID NO: 64917 - DNA, 238 bp, Glycine max
ggaagaagctagcgaaaatatcaggtcatggtacgtggaggcaaaggtttgggaaagggaagaaccactatgcacatgtatgcgtctcgtgtcattatccagtggatcaccaaacccccaattcggggtttggctctcaaaggtagtgataattgaatctgttgtctcatcgacaatgaggaacgtctcatcctcaatatcttcttctataccatatttctcgacgctgttacattca

SEQ ID NO: 64918 - DNA, 358 bp, Glycine max
gagagcaaaaacaattaataaagatgagtttgaagaacaacatggtggcgctaaaggtgtgtttgttgcttcttttccttgtgggggttacagctgcacgcatggaactgagcttcctcaaaagtgatcagtcatcaagttatgatgatgatgagtattcaaaaccatgctgtgatctctgcatgtgcacacgctcaatgcctcctcaatgcagctgtgaagatattaggctgaattcatgccactcagattgtaagagctgtatgtgcacacgctcacagccaggacagtgtcgttgtcttgacaccaaccacttctgctacaaaccttgcaagtccatagatgactagaaaaacta

SEQ ID NO: 64919 - DNA, 283 bp, Glycine max
gacagcagaaacaattagtaacgatgagtttgaagaacaacatggtggtgctaaaggtgtgtttgttgcttcttttccttgtgggggttacagctgcacgcatggaactgaccttcttcaaaagtgatcagtcaccaagttatgatgatgatgactattcaaaaccatgctgtgatctctgcatgtgcacacactcaatgcctcctcaatgcagctgtgaagatattaagctgaattcatgccactcagattgtaatagctgtatgtgcacacgctcacagcc

SEQ ID NO: 64920 - DNA, 225 bp, Glycine max
ggagggaaaaatcattaaatccattgacttgttcggctagatggatgagcaggtatggcctgtggcaatggactttaactagggcgatcatctcaagattatcgtcgacggcgtctcataatctgatctaatattctcgggatccgatttcttcaagtgttaccacaatgatttctgactgagactgataagaaacaaaaggcctttcatcttcatgggtattcg

SEQ ID NO: 64921 - DNA, 232 bp, Glycine max
gataccggggagggatgggtctccttaatttacgggcgtgtcctgcgagattcatcagactgtacgttgcatcttatcagatgtggttgacgtcggtgctggcttcaatttggccttcggcgtctatactccgacagattccaatggtcctgtttcttcaaagctttccagtagtatctctatgtgaacactcacaatgggtacgccttccatctgccgccgtattcgaggg

SEQ ID NO: 64922 - DNA, 246 bp, Glycine max
gtggctagtacagttaaccagctccacgctgccctataagattgctttgtacgtggccgctctatgggatgtcatcttacttccccgtcgatgcgatgtcacacctcatcggcagtcttatcaaaacttagttcatgggaagtccctttaaaattccattctagggacatcgctgtagatccccatttcaggcgccgtgctgcacatccccctgtcgccagctgtggtacttaccaacagttccgc

SEQ ID NO: 64923 - DNA, 252 bp, Glycine max
taatggtactgctgcaaggaagattaacagaaaggcaccactattttgcctttttttcttccttattcattggcataaggcatcaatgttatcatactgagagataagagatctacggagggaaatttgtggttgttgttgcaatgacatttatgaacgtctgaaacaaaaacaattttcatattccaaattattacacattgttccattctgaaattgtcaaatgaaaaactgccccttaataatttcatg

SEQ ID NO: 64924 - DNA, 288 bp, Glycine max
gacagcaaaaacaattaataaagatgagtttgaagaacaacatggtggtgctaaaggtgtgtttgttgcttcttttccttgtgggggttacagctgcacgcatggaactgagcttcttcaaaagtgatcagtcatcaagttatgatgatgatgagtattcaaaaccatgctgtgatctctgcatgtgcacacgctcaatgcctcctcaatgcagctgtgaagatattaggctgaattcatgccactcagattgtaagagctgtatgtgcacacgctcacagccaggac

SEQ ID NO: 64925 - DNA, 304 bp, Glycine max
  unsure (1)..(304): unsure at all n locations
gaggtgagtcagtatgatgatgtatgtacatcttacaggaagcagagaagcagcaattaccattcatcaatgagtgctanagccgccacaagatgagagcatctaattaccttttcatccaatattttggattccaggatcttagactagctcagttagctttgtctttattaatgtttctttgaatgactgtagttgagctgatacttttgtttgttatttgcctatggtccaatgtgccttttcagctgaaatcatggatttgatgtatcattccttgaccaaaactgaatattccataaac

SEQ ID NO: 64926 - DNA, 321 bp, Glycine max
acgcatccgtaaggcggcaaaaaaacgacgcaaggggatgcagctgaaaaactaatacaagccatttctatagcagcctaagaaaatgaaaagcactatcgtgttcgcaacccttcgacgttgcggggtcagcgcagagctaacctccgccatcgcacaggatgtactctacgttgatggccatccgaatcggaaccgttccatatactacgttctgcctgcaaaaggaggaaacggtggccgtatacaactagccgcacctttgaaagacacttgccctatctctgttagtgcagacttccactccacaatccaaggggt

SEQ ID NO: 64927 - DNA, 194 bp, Glycine max
aaaagggtacagcagggcaaaacacaacataaaggtattgctgctagataactacacaatggcactgctgctaaaactctttgtaaaggtacagatgtgagaaaaccatattgtggtacggctgccaaagggaaacagaatgtgacacttactattattgcacatggagtcctcaaagatctatgcttacctct

SEQ ID NO: 64928 - DNA, 109 bp, Glycine max
tcactaagaatatgtgcctcttctttaccttgttcctgttacaacatgcgcccgctcaagaggatctaatcttacgtactcctgcatgcgatgtcatacctcttctata

SEQ ID NO: 64929 - DNA, 159 bp, Glycine max
tgacacttactagtattacgcatggactcctcaaagatctatgcttacctcttcctctccatgatctttctctcttctgccactcccattctcggttgtggctactgtggcaaaccccccaaaaagcacaagcctggttaaacaccaaagacacccacc

SEQ ID NO: 64930 - DNA, 272 bp, Glycine max
gctatgctgaagatggagaatttcgtgatggatatgttcacaatgtcaatgtagataaagctctttgtaaaggtacagatttgtgaaagccattttgtcgtacgagagacaaagggaaataaaatgtgtcaccttcaattattgcacacctcatcatcatggatgtatacataccgcggtcgccccagaggatacaatctcatgtacccctgcatgtcacgtctgagctcttcgagattgtcacccaaagtcacttcatcgggcgtcgattt

SEQ ID NO: 64931 - DNA, 323 bp, Glycine max
ggagggatcaccctctcaatttcgctctgcacgccttcatgccaggtcagacattaagttgctttgctaccaccataccatcagggggacatcatagcacccaattttgctgccatcgctaactacctccacatatgggtctcgaaatcccatacgaatttcggccaattatgcgcatcctaacagttcatgttcctaaggttacaaccttcagccaatgctcggagctggtagaggcctcaccaagtgaagagatgctgctgcaagagtgccacacgcccacgtcaacatcaacagtggctcaaacgttgttggtttgtcca

SEQ ID NO: 64932 - DNA, 87 bp, Glycine max
gtcccgctgcgagaacactacacaatggttctgtcgcgacaactcgatacactggtaccgcttcgatacctctactctccgctcctc

SEQ ID NO: 64933 - DNA, 277 bp, Glycine max
gacagcaaacacaattaataaagatgagtttgaagaacaacatggtggtgctaaaggtgtgtttgttgcttcttttccttgtgggggttacagctgcacacatggaactgagcttcttcaaaagtgatcagtcatcaagttatgatgatgatgattagtcaaaaccatgctgtgatctctgcatgtgcacacgcgcaatgcctcctcaatgcagctgtgaagatattacgctgaactcatgccactcagattgtaagagctgtatgtgcacacgctc

SEQ ID NO: 64934 - DNA, 292 bp, Glycine max
gacaaggtactgatgtaataaatctacatttgggtaccgatatgataatacgacaggtgtgtttggtgcctcatttccttataggggttacggcgccacacatcgacctgaggcgcttgcaatgtgttcagtcatcacggtttggatttttcgtagtagtcaataccatgctgtgatcactgcatgtgcgctctcgcagatgccacctcacctcagctgtgatgatattacgctcatctcctacgatgctaattatattcaattctatggcacacgctcaacaacatcataa

SEQ ID NO: 64935 - DNA, 294 bp, Glycine max
gatagcacactcaattactaaatatgagtttgaataacaacatggtggtgctaaaggtgtgtttgttgcatcttttccttgtgggggttacagctgcacacatggaactgagcttcttcaaaagtgatcagtcatcaagttatgatgatgatgattagtcaaaaccatgctgtgatctctgcatgtgcacacgcgcaatgcctcctcaatgcagctgtgaagatattaagctgaattcatgccactcagattgtaagagctgtatgtgcacacgctcacagccaggacagtgtc

SEQ ID NO: 64936 - DNA, 244 bp, Glycine max
cgtccgtacagacgtcaggggggcagtgattgtatgtgtcaaggggagatataaataggatcatggttgtgagcaaggactttcaacattcccactactaacactggtttgcttcgcggccgggcatcatgtgccgcctgaatagtcgtaccctctctcgtcggctgtgcactttataccccctgttcctctaagcaccctgctccattcccttgcatcagcctttccagtgggagcagtttaa

SEQ ID NO: 64937 - DNA, 207 bp, Glycine max
gacagcaaaaacaattaataaagatgagtttgaagaacaacatggtggtgctaaaggtgtgtttgctgcttcttttccttgtgggggttacagctgcacgcatggaactgagcttcttcaaaagtggtcagtcatcaagttatgatgatgaagagtattcaaaaccatgctgtgatctctgcatgtgcacacgctcaatgcctcctc

SEQ ID NO: 64938 - DNA, 168 bp, Glycine max
taatggtaccgctgctacaattccacaatatggttttgctgcgaaacatactactactgggagggtctcagctgcgtcatttctgtatccgcgtaaccactgctttcataaaatccaaccttcacaaatctgttcacttcacacttttgctcttagataatttatctc

SEQ ID NO: 64939 - DNA, 204 bp, Glycine max
ctgggagcgcaaaaatcattgctcagtgttagtttgagtgacaacaacaaggggcgaattgaattgggagatgtcattctcttatccatgttggggtaacagctgcacgaatagaactgaccgtctgcatctatgctcactcaccacgttagcaagaaaatcattatccatggggatgcctggtatcttcacacctacatacag

SEQ ID NO: 64940 - DNA, 370 bp, Glycine max
gacagcaaaaacaattaataaagatgagtttgaagaacaacatggtggtgctaaaggtgtgtttgttgcttcttttccttgtgggggttacagctgcacgcatggaactgagtttcttcaaaagtgatcagtcatcaagttatgatgatgatgagtattcaaaaccatgctgtgatctctgcatgtgcacacgctcaatgcctcctcaatgcagctgtgaagatattaagctgaattcatgccactcagattgtaagagctgtatgtgcacacgctcccagccaggacagtgtcgttgtcttgacaccaacgacttctgctacaaaccttgcaagtccagagatgactagaaaaactaatagctctctca

SEQ ID NO: 64941 - DNA, 253 bp, Glycine max
gatggaaagatctagaacaacgatgcatctggcgtggcagtaaacaatccacagtggtaacattaatactattaacattttggtgtacaagaacccgaaggtggacaaaaaacgggattactctaacctgtattcatattcggcagcctttgacttgctgttcactccgtttttcccccatctggagttcatcttcgtaatcacattgttttccacatgacctcaattctcaaagctgtggtccactgaactg

SEQ ID NO: 64942 - DNA, 363 bp, Glycine max
gattcacacaactaactaagaaagtcttccatagccccccaaaaatgaagagcaccatcttctttgctctccttctcttttgtgccttcaccacctcatacctaccttcagccatcgctgatttcgtgctcgataatgaaggtaaccctcttgaaaatggtggcacatattatatcttgtcagacataacagcatttggtggaataagagcagccccaacgggaaatgaaagatgccctctcactgtggtgcaatctcgcaatgagctcgacaaagggattggaacaatcatctcgtccccatatcgaatccgttttatcgccgaaggccatcctttgagccttaagttccattcatttgcag

SEQ ID NO: 64943 - DNA, 344 bp, Glycine max
gatgatctgaaatgtctttaaaagaaagtaaagataaaaaaaaaaaagtaaaataattacaaaataaagagtttcagaaatcaaaagatccggacttgttaaaaatattaacgtctgataaccataattaaaaaaagaaagaaagaaaatttgcttcacaacacttttttcaccctctttatatttccccgaaaaaaatgtcaaattcttaaacatttttatcgcgaatgtaaaattaaacatgaaaataaaagtgatcaaaaattactgtatggctcaagaccattaagtggccaatctttttatagcacgttaatatttcttaactttaaaaaaaaattata

SEQ ID NO: 64944 - DNA, 315 bp, Glycine max
cacacatccgtaaaagagtccgacgagaagggaagcgactgggaaaatctgaactgtcatttccagaacatcctgagaaaatgaagaacgttagcttgttcgctatcattcgtttttgcggcctcagcagcgggggttgttccgccaacgaccgtcagatgctcatccttgatggaggtacgaatcaagatttgcttcacaaaacttttttcgcccgctttataattccccggtggcggtgtcaaattctcagccatctttaacgcaactgttcccttcaccgtgatggtaacactcatcccaaactactgtggg

SEQ ID NO: 64945 - DNA, 335 bp, Glycine max
cagcctcaaccacacgtccgtggcgctgcgacaagacaactctgcgtgatgatgttgaaagagcatggtcatgagcatggacatgacagcagctagaggtacttatgtcattagcctgctgcatcagctatatatttaaaaggtttatcggaccattcatttccagggctgtgccatactttctctctctctctctctctctctctctctccctctctttttccattttccccaccttgtgatcgatctatgaatgcctaaacaaaaagctcatagactgtgtgtgtatccgtctgctagctcgagtgctatcaccaccatggtttggttggttt

SEQ ID NO: 64946 - DNA, 148 bp, Glycine max
gacagcaaatgtagagaatgccgagttgtctgaaacacatcatagcggaacactgggcgctctagaggattcatgtttattgttggcggtcagggcaggtcacaggtcttcgaaagtgtcaacgagtgtcaattcactggccttcgtt

SEQ ID NO: 64947 - DNA, 76 bp, Glycine max
ggcagatactttactcactaactcagtgtctcagcaaatacttagaataatgctcgacgccggaaagaaccacaac

SEQ ID NO: 64948 - DNA, 308 bp, Glycine max
gacagcaaaaacaattaataaagatgagtttgaagaacaacatggtggtgctaaaggtgtgtttgttgcttcttttccgtggggggggtacagctgcacgcatggaactgagcttcttcaaaagtgatcagtcatcaagttatgacgatgatgagtattcaaaaccatgctgtgatctctgcatgtgcacacgctcaatgcctcctcaatgcagctgtgaagatattaggctgaattcatgccactcagattgtaagagctgtatatgcacacgctcacaacccaagacagtgtctttgtcttgacac

SEQ ID NO: 64949 - DNA, 210 bp, Glycine max
taagtaaggatgcgaggggatgccagtgggggattcacacaactcagtttcatagtcttccatagacctgcagaactgaagcgcactaccctccttgctcactttcgcttttgaggcatcaccacctgatacgtaccttcaggaagcgctgatttcgtgctcgaatatgaacgggaaccgcttgataatggaggtatatgccatatcttg

SEQ ID NO: 64950 - DNA, 61 bp, Glycine max
cccttcgttaacgtgtaaataaataaaaatgaagaaaaattatgaatatttcttctaacag

SEQ ID NO: 64951 - DNA, 409 bp, Glycine max
gattcacacaactaactaagaaagtcttccatagccccccaaaaatgaagagcaccatcttctttgctctctttctcttttgtgccttcaccacctcatacctaccttcagccatcgctgatttcgtgctcgataatgaaggtaaccctcttgaaaatggtggcacatattatatcttgtcagacataacagcatttggtggaataagagcagccccaacgggaaatgaaagatgccctctcactgtggtgcaatctcgcaatgagctcgacaaagggattggaacaatcatctcgtccccatatcgaatccgttttatcgccgaaggccatcctttgagccttaagttcgattcatttgcagttataatgctgtgtgttggaattcctaccgagtggtctgttgtgga

SEQ ID NO: 64952 - DNA, 372 bp, Glycine max
gacagcaaaaacaattaataaagatgagtttgaagaacaacatggtggtgctaaaggtgtgtttgttgcttcttttccttgtgggggttacagctgcacgcatggaactgagcttcttcaaaagtgatcagtcatcaagttatgatgatgatgagtattcaaaaccatgctgtgatctctgcatgtgcacacgctcaatgcctcctcaatgcagctgtgaagatattaggctgaattcatgccactcagattgtaagagctgtatgtgcacacgctcacagccaggacagtgtcgttgtcttgacaccaacgacttctgctacaaaccttgcaagttcagagatgactagaaaaactaatagctctctcaaa

SEQ ID NO: 64953 - DNA, 372 bp, Glycine max
gacagcaaaaacaattaataaagatgagtttgaagaacaacatggtggtgctaaaggtgtgtttgttgcttcttttccttgtgggggttacagctgcacgcatggaactgagcttcttcaaaagtgatcagtcatcaagttatgatgatgatgatgagtattcaaaaccatgctgtgatctctgcatgtgcacacgctcaatgcctcctcaatgcagctgtgaagatattaggctgaattcatgccactcagattgtaagagctgtatgtgcacacgctcacagccaggacagtgtcgttgtcttgacaccaacgacttctgctacaaaccttgcaagtccagagatgactagaaaaactaatagctctctc

SEQ ID NO: 64954 - DNA, 302 bp, Glycine max
  unsure (1)..(302): unsure at all n locations
gtccgaanggtggcgagaggacgacggagggggactacgtaaatggtttaaaataagcggcttttctattagatccaagccttgatccgcgtgtatgctacatcataacgcggcaaggggtgggcggtcgctcaaaaggatcgacgctctattttatcctgtctgcaccgggaaaaccctgccataacgccacttaaactcatttcagcggaggtcgctttcgccagttgggatggggacaaccatgccgttacccatgttactccccctgaattacatcgccctttctgcaactgggatac

SEQ ID NO: 64955 - DNA, 60 bp, Glycine max
accacgcgtccgcccacgcgtccgcccacgcgtccgcccacgcgtccgcccacgcgtccg

SEQ ID NO: 64956 - DNA, 188 bp, Glycine max
gtctcaaaatgcgatgattgaatggtgtcagttctgaaaaagtgcagtgaaattcggcacagacctgtttaaatggataaaagccagaatccaaccaatgcactgtgtttctcgcaagtttatagcgtgcggtccatgaactcgttaacgcaagcccgaacatctcgtcagcgattttcgctcgttgt

SEQ ID NO: 64957 - DNA, 227 bp, Glycine max
gtccgtacaactgtcagtacaccacctaatggtactgctgcaagaacactacatattggtaccgctcctacaacaccacacaacgtgttatacatcatctatacattacatggagttcggggggcgggtgctctacactatccaaacttcttttctcttccatcctacttcatcactcttctatcctttctcctactttcaattctcttcccttcgtttttcaactt

SEQ ID NO: 64958 - DNA, 221 bp, Glycine max
  unsure (1)..(221): unsure at all n locations
gaaaaaattgtcctccananaaaaaaaaaaaaaaaaaaaaaaaaagcgggcgctccaaaagatataaacctaagtaagcctgcaagccaagtcaaaactcctccaaaatggcacctaaaatcaattcaatggccgtccttttaaaaactcctgaatgggaaaaacctggcgttaaccaacttaaaccccttggaacacaaccccctttccccaactggggt

SEQ ID NO: 64959 - DNA, 106 bp, Glycine max
  unsure (1)..(106): unsure at all n locations
tggaataaaaaaaattaccttctttattttttatgtaagcatctgagaatgaaaaaataaaaaaataaagtggtgtgtttataataaaaaattcttaattcanaag

SEQ ID NO: 64960 - DNA, 139 bp, Glycine max
gaaaaaaatgacccaaatttgctaaaataagaataataaaaatgaccaaatttgctaaaagcaaattgggggagtttgagtattcaaatcttggaaaaatggtacctcctttgctcgtttggggtgattttctttctga

SEQ ID NO: 64961 - DNA, 368 bp, Glycine max
ttgtgtatatattagaaaaaaaaaaaaaaaaaaaaaaaaaaaaaaaaaaaaaaaaaaaaaaaaaaaaaaaaaggaaaaaaaaaaaaaaaccaaaaaaaaaaaaaaaaaaaaaaaaaaaacgggggccgcccaaaaggatcaaacctaacgtacgggggaaggcaacgccaaacccctccaaaagggcccccaaaatccaatccaggggcggtcgtttaaaaaggccgggaggggaaaaccccgggggtaaccaaattaaaccccctggaaaaaaacccccttttcccaagggggggaaaaagcaaaagggcccgcaccattccccctcccaaaaatttgcccacccgaaagggcaaagggaacccccc

SEQ ID NO: 64962 - DNA, 224 bp, Glycine max
gaagaagaaggagaagaagaagaaggagcatggccatgagcatggccatgacagcagcagcagcagtgacagtgattaaactgctgcatcacctatatatttaaaaggtttatgggaccatagtagcgagggctgtgccttaatttctctctctctctctctctctctctctctctctctctttttcctttttccctatcttgtgatccacttatgagtgagaa

SEQ ID NO: 64963 - DNA, 301 bp, Glycine max
tttctttagtttctgaacatatatcacctcttcaaacaacatctctttttctaccattatgatatcatgcctatcaaacctcggcggcgatgggctgaaggtaccatctatgtttccaacaccagccataggaaacctcattcgcaccatatcatgacatatcacacatctctttctattgataacagactcttcctccctatcctaggttaaacctctttagttatcggtatttagtttgctcattgatacccctcttcgtttgtttgtaatctttaaccctcacttaggtcattatgtt

SEQ ID NO: 64964 - DNA, 70 bp, Glycine max
agaggctccaagcttacgtccgccttcatgctacatcatacctcttctatcgtgtcacctaacttcaatt

SEQ ID NO: 64965 - DNA, 339 bp, Glycine max
cgtccgaacagacgtcagaagacgacacaatggttatacgggttgatctgtgcgtgttgtcattgatgacatatatgtttggagagccgggaaagtcagtacaatgtgaatggtcctttggggtgagtttcaacatgaatggtattattctctcatacatgataatactaaacgtatatttagtactcggttgccctataggatgcaagcttatgtacaccttcatgctacgtcatagtgcttcgatcatgtcacctaatttcaattcacacgcagtcgttttaaacggtcttgtatggtaaaaccctgacgttaaccatattaatctccttgcaccac

SEQ ID NO: 64966 - DNA, 125 bp, Glycine max
ttgggaataaaaacacagacatctcgtttgttagctccgacttgatcaatggctcaatcatattccttgctcttcctctagaggtgtgcaggctcttccttctcatttcatccatcacaacagcc

SEQ ID NO: 64967 - DNA, 412 bp, Glycine max
gattcacacaactaactaagaaagtcttccatagccccccaaaaatgaagagcaccatcttctttgctctctttctcttttgtgccttcaccacctcatacctaccttcagccatcgctgatttcgtgctcgataatgaaggtaaccctcttgaaaatggtggcacatattatatcttgtcagacataacagcatttggtggaataagagcagccccaacgggaaatgaaagatgccctctcactgtggtgcaatctcgcaatgagctcgacaaagggattggaacaatcatctcgtccccatatcgaatccgttttatcgccgaaggccatcctttgagccttaagttcgattcatttgcagttataatgctgtgtgttggaattcctaccgagtggtcggttgtggggga

SEQ ID NO: 64968 - DNA, 121 bp, Glycine max
gattacataaacaactactaaacatgagtttggggaacatcatggtggtgctaaacgtgtgtttgttgcttcttttccttgtgggggttacagctgcacgcatggtaactgaccttcttca

SEQ ID NO: 64969 - DNA, 398 bp, Glycine max
gacagcaaaaacaattaataaagatgagtttgaagaacaacatggtggtgctaaaggtgtgtttgttgcttcttttccttgtgggggttacagctgcacgcatggaactgagcttcttcaaaagtgatcagtcatcaagttatgatgatgatgagtattcaaaaccatgctgtgatctctgcatgtgcacacgctcaatgcctcctcaatgcagctgtgaagatattaggctgaattcatgccactcagattgtaagagctgtatgtgcacacgctcacagccaggacagtgtcgttgtcttgacaccaacgacttctgctacaaaccttgcaagtccagagatgactagaaaaactaatagctctctcaaatggacgaagcccctttaagctttgtt

SEQ ID NO: 64970 - DNA, 404 bp, Glycine max
  unsure (1)..(404): unsure at all n locations
gaattgcttaaacttttttcagactcattcatctcaatgaaatttgaagaaaatggagtagcctcatgggagaagagcaccagcaccaatgccatctcaaatatctccaacaagaaggtgtgtgtagagaggcaggtcctatacaaggacgccaaggagagcaagagcgtggtagagcatggcaagtcaaataacgcgtttagatggcgaaagcgtattggccgtttggtccactttatcccatggaagaggtctaataagggtgggggtgtgggtcacgttgaacgagtgaaagttaatagaaagggttggatgagaacgctgacaaagaggaagaccgtggaacacaatggttaacaaagaaagtcacaccaacacttgcgtttctctcnctctcacccttt

SEQ ID NO: 64971 - DNA, 145 bp, Glycine max
tgggaattgcttagacttttttcagactcattcatctcaatgagttttgacgaaaatggcgtatcctcatgggagagtatcaccagcaccagtgcgatctcaaatatctccaccatcaacgtgtgtgtcgataggcacgtcctat

SEQ ID NO: 64972 - DNA, 100 bp, Glycine max
  unsure (1)..(100): unsure at all n locations
agncgtcagtagagctgcgaaaggtccagatgcggggaccaaattgattgatattgcttctatattccgacagaagggtaccgctgccatcatacgacat

SEQ ID NO: 64973 - DNA, 403 bp, Glycine max
gacagcaaaaacaattaataaagatgagtttgaagaacaacatggtggtgctaaaggtgtgtttgttgcttcttttccttgtgggggttacagctgcacgcatggaactgagcttcttcaaaagtgatcagtcatcaagttatgatgatgatgagtattcaaaaccatgctgtgatctctgcatgtgcacacgctcaatgcctcctcaatgcagctgtgaagatattaggctgaattcatgccactcagattgtaagagctgtatgtgcacacgctcacagccaggacagtgtcgttgtcttgacaccaacgacttctgctacaaaccttgcaagtccagagatgactagaaaaactaatagctctctcaaatggacgaagcccctttaagctttgtttgtta

SEQ ID NO: 64974 - DNA, 145 bp, Glycine max
gaacgcacccaagagaagaaaatcctcacgcattttcttcgtagccaagcactctgaaattcgcagtgatgtcgtggcaagcgtatgtggatgatgaccgactgtgtgaaatcgagggtaaggacctcactcacggcgctagcat

SEQ ID NO: 64975 - DNA, 416 bp, Glycine max
  unsure (1)..(416): unsure at all n locations
gacagcaaaaacaattaataaagatgagtttgaagaacaacatggtggtgctaaaggtgtgtttgttgcttcttttccttgtgggggttacagctgcacgcgtggaactgagcttcttcaaaagtgatcagtcatcaagttatgatgatgatgagtattcaaaaccatgctgtgatctctgcatgtgcacacgctcaatgcctcctcaatgcagctgtgaagatattaggctgaattcatgccactcagattgtaagagctgtatgtgcacacgctcacagccaggacagtgtcgttgtcttgacnacaacgacttctgctacaaaccttgcaagtccagagatgactagaaaaactaatagctctctcaaatggacgaacccccttaggctttgtttgtaagttagggggacaaa

SEQ ID NO: 64976 - DNA, 313 bp, Glycine max
taggtacggctgcgcgacacctacagagagggacaacacaattaattaatatcaatgagtttgatcaccaacatgctcgtgctgaacgtgtgtttgttgcttcctttccttgtgtgggatacacctgcatgcaactcaccttccttcttcatgattaactcagtcatcaagttatgagcatgatgagtattcccaaccatacatttctccctgcacatacacacatctcactccctcctccatgcttctgtgaccatagtaggcttaattcataccactcacattgtcctatctgtatgtacacacactcaca

SEQ ID NO: 64977 - DNA, 289 bp, Glycine max
gacagcacaaacaattaataaagatgagtttgaagaacaacatggtggtgctaaaggtgtgtttgttgcttcttttccttgtgggggttacagctgcacgcatggaactgagcttcttcaaaagtgatcagtcatcaagttatgatgatgatgagtattcaaaaccatgctgtgatctctgcatgtgcagacgctcaatgcctcctcaatgcaactgtgaagatattatgctgaattcatgccactcagattgtaagagctgtatgtgcacacgctcacagccaggaca

SEQ ID NO: 64978 - DNA, 248 bp, Glycine max
gacagcaaaaacaattaataaagatgagtttgaagaacaacatggtggtgctaaaggtgtgtttgttgcttcttttccttgtgggggttacagctgcacgcatggaactgagcttcttcaaaagtgatcagtcatcaagttatgatgatgatgagtattcaaaaccatgctgtgatctctgcatgtgcagacgctcaatgcctcctcaatgcagctgtgaagatattacgctgaattcatgccactca

SEQ ID NO: 64979 - DNA, 264 bp, Glycine max
caacggtactgctgcgcgcacacgacaatccggtaccgcttccacaagcttacaccgtggtactgctgcgacaatatcacataatggtacggctgcgacaatccgatataatgggacccacttgcaatctcccatccatgctccagaatagacaccgagaaacacatcggacgtccttgattcggtgttctatccgttgagagagctcccatcggacatcctaaggctcgtgcagccctgccacgaacccgctcgcgaactgtt

SEQ ID NO: 64980 - DNA, 170 bp, Glycine max
tcaatgcggtagctgtatggctatatcattggaactatgatacgggacaatgcgccggtttcacatcatgactgagaatggggaattgctgtgggtgtgagacacggcatcggcagcatgaagactgcagaagcatgaggcatgggggaggcgataaacccgttgctcat

SEQ ID NO: 64981 - DNA, 121 bp, Glycine max
gacagttgcataatctcaacagtacgttctaagtcgtcgtattctatcctcgcttatggctcgtacagacatacttgttctctcaatggcatcaccagatttagaacaacctcacgcttct

SEQ ID NO: 64982 - DNA, 396 bp, Glycine max
cgcagaaggggttgactaattgtgtacttttgtctggacaggtttatcagaatggaggtttgcaaattggaagttctcgtgttgttgaccaaccaaagtgcttacacaattgcattggtgacgttattaggataaaacaacttggaaatgagaggtttggaattattaaacgatttgataaatattcccgaaaacactcgatcatgtttgaggatggttgtgttgaaatttatgacatgtcaaaagaggactgggaacttgtgagatagtgatgcaactgttggttgctgaagatctgatcaacagaatatgaagcggaatagatcaacataactcttactgattgaagataataagttcctttttccactaacagactgtattatcgtttaaaca

SEQ ID NO: 64983 - DNA, 375 bp, Glycine max
attcacacaactaactaagaaagtcttccatagccccccaaaaatgaagagcaccatcttctttgctctctttctcttttgtgccttcaccacctcatacctaccttcagccatcgctgatttcgtgctcgataatgaaggtaaccctcttgaaaatggtggcacatattatatcttgtcagacataacagcatttggtggaataagagcagccccaacgggaaatgaaagatgccctctcactgtggtgcaatctcgcaatgagctcgacaaagggattgggacaatcatctcgtccccatatcgaatccgttttatcgccgaaggccatcctttgagccttaagttcgattcatttgcagttataatgctgtg

SEQ ID NO: 64984 - DNA, 378 bp, Glycine max
gattcacacaactaactaagaaagtcttccatagccccccaaaaatgaagagcaccatcttctttgctctctttctcttttgtgccttcaccacctcatacctaccttcagccatcgctgatttcgtgctcgataatgaaggtaaccctcttgaaaatggtggcacatattatatcttgtcagacataacagcatttggtggaataagagcagccccaacgggaaatgaaagatgccctctcactgtggtgcaatctcgcaatgagctcgacaaagggattggaacaatcatctcgtccccatatcgaatccgttttatcgccgaaaggcatcctttgagccttaaattcgattcatttgcagttataatgctgtgtg

SEQ ID NO: 64985 - DNA, 125 bp, Glycine max
ttaataaagatgagtttgaagaacaacatggtggtgctaaaagtgtgtttgttgcttcctttccttgtgggggtgacagctgcacccatggaactgaacttcttcaagagtgatgagtcatcaaa

SEQ ID NO: 64986 - DNA, 412 bp, Glycine max
gacagcaaaaacaattaataaagatgagtttgaagaacaacatggtggtgctaaaggtgtgtttgttgcttcttttccttgtgggggttacagctgcacgcatggaaccgagcttcttcaaaagtgatcagtcatcaagttatgatgatgatgagtattcaaaaccatgctgtgatctctgcatgtgcacacgctcaatgcctcctcaatgcagctgtgaagatattaggctgaattcatgccactcagattgtaagagctgtatgtgcacacgctcacagccaggacagtgtcgttgtcttgacaccaacgacttctgctacaaaccttgcaagtccagagatgactagaaaaactaatagctctctcaaatgtgacaaacccccttatgctttgtttgttatgttaaggg

SEQ ID NO: 64987 - DNA, 367 bp, Glycine max
atttcaattttaacacagattaatttgggtttggctatcgatacagttgtcagtttttaaaaagtgtaaccgacagaaatgcatatatctaaacaagtgaaaatcgtaaaatgcatgtgatacatacattcatgcagatacacatttttatgtatgtctatttatttgtttctccttgccatatatattaatggatagatagtctgattgctttggctacattgtcttttctatgtttctttgcttttttttgatggggaatatttcttctgtcttttctacattgttttttaatgaagttattagaaatacgaagaaatatcagcgcataaggatggaagataatgaatcctcagacccgataagg

SEQ ID NO: 64988 - DNA, 177 bp, Glycine max
tacagcagcgacaattcaacatgatggtattgcagctatatatagagatactaatcgtgttgctagagcatcatatcattgtaggggttacagctgaccacataagggtgtgcttcgacaagactagtgaatcatcatgttacgataacactacatattgataccgctgctgtaata

SEQ ID NO: 64989 - DNA, 78 bp, Glycine max
tacagctgccataagacgacatcatggggaacaaaatatgaaaactgtatgtgcacacgctcaaaaccagcagccgct

SEQ ID NO: 64990 - DNA, 399 bp, Glycine max
acagcaaaaacaattaataaagatgagtttgaagaataacatggtggtgctaaaggtgtgtttgttgcttcttttccttgtgggggttacagctgcacgcatggaactgagcttcttcaaaagtgatcagtcatcaagttatgatgatgatgagtattcaaaaccatgctgtgatctctgcatgtgcacacgctcaatgcctcctcaatgcagctgtgaagatattaggctgaattcatgccactcagattgtaagagctgtatgtgcacacgctcacagccaggacagtgtcgttgtcttgacaccaacgacttctgctacaaaccttgcaagtccagagatgactagaaaaactaatagctctctcaaatggacgaagcccctttaggctttgtttg

SEQ ID NO: 64991 - DNA, 373 bp, Glycine max
attccgagtccgaccaaggcttcgtaccgctgctaagatacggctgcaagagacgacggagtggggtagtactgtgtttctcttcatggcgttctctgcgactcgatcctagatctcattcacttgcacttccgcgtttcgcgccacactttggcactacgatgtggtcatttcactccgattcatggagtgtaatgtggtcacgccgtgacaggcaagagcgtgaagagtgccaggtcatctgctgcgcagtctacaagtgctgctgcacctagagtcaaaacgcccgtcgatgcgttgatggcccgtcagattgttagggtggccatggtgaggtatccgaatagcgtcaggtagcggtctgttgggcagg

SEQ ID NO: 64992 - DNA, 60 bp, Glycine max
caacgggatcccatccgtagaccatcatttcctctctgcctgcatccaacatccgccgct

SEQ ID NO: 64993 - DNA, 180 bp, Glycine max
gacagcacaaacaattaatacagatgagtttgaagaacaacatggtggtgctaaacgtgtgtttgatgcttcttttccttgtgggggttacagctgcacacatggaactgagcttcttcaagagtgatcagtcatcaagttatcatgataatgattattcaaaaccatgctgtgatctct

SEQ ID NO: 64994 - DNA, 377 bp, Glycine max
gcttcacagcaaaaacaattaataaagatgagtttgaagaacaacatggtggtgctaaaggtgtgtttgttgcttcttttccttgtgggggttacagctgcacgcatggaactgagcttcttcaaaagtgatcagtcatcaagttatgatgatgatgagtattcaaaaccatgctgtgatctctgcatgtgcacacgctcaatgcctcctcaatgcagctgtgaagatattaggctgaattcatgccactcagattgtaagagctgtatgtgcacacgctcacagccaggacagtgtcgttgtcttgacaccaacgacttctgctacaaaccttgcaagtccagagatgactagaaaaactaatagctctctcaaat

SEQ ID NO: 64995 - DNA, 217 bp, Glycine max
gacagcaaaaacaattaataaagatgagtttgaagaacaacatggtggtgctaaaggtgtgtttgttgcttcttttccttgtgggggttacagctgcacgcatggaactgagcttcttcaaaagtgatcagtcatcaagttatgatgatgatgagtattcaaaaccatgctgtgatctctgcatgtgcacacgctcaatgcctcctcaatgcagctg

SEQ ID NO: 64996 - DNA, 379 bp, Glycine max
  unsure (1)..(379): unsure at all n locations
ctgcaaaaaaacaacagaaggggacagcaaaaacaattaataaagatgagtttgaagaacaacatggtggtgctaaaggtgtgtttgttgcttcttttccttgtgggggttacagctgcacgcatggaactgagcttcttcaaaagtgatcagtcatcaagttatgatgatgatgagtattcaaaaccatgctgtgatctctgcatgtgcacacgctcaatgcctcctcaatgcagctgtgaagatattaggctgaattcatgccactcagattgtaagagctgtatgtgcacacgctcacagccaggacagtgtcgttgtcttgacnacaacgacttctgctacaaaccttgcaagttcagagatgactagaaaaact

SEQ ID NO: 64997 - DNA, 405 bp, Glycine max
agacgacagaaggggataacatctgtaaacttggtaggagcaccccaatataaaggctgagtctcaatttgcctcatctgatctgagttgttgctaactggaatgatatcattgaagttgtgaacgcaaatggtgaaattgcgtgtgctaagtctttacagacggaacaaagctatcaattacattgcaaatcgttgaaaatgctttgcatttcctccttcaacaaataggtggttctgttggtttggaatttgtgatacatatgatgctagcacatattttattatactaataaaaattccctctatttcagttctataacgataaactttttgtggcagaggcacatgaaaaaattggtaaaattgtatgaaggctgaaaaaagaaaacgtgcaggttttaag

SEQ ID NO: 64998 - DNA, 284 bp, Glycine max
gacagcaaaaacaattaataaagatgagtttgaagaacaacatggtggtgctaaaggtgtgtttgttgcttcttttccttgtgggggttacagctgcacgcatggaactgagcttcttcaaaagtgatcagtcatcaagttatgatgatgatgagtattcaaaaccatgctgtgatttctgcatgtgcacacgctcagtgcctcctcaatgcagctgtgaagatattaggctgaattcatgccactcagattgtaagagctgtatgtgcacacgctcacagcca

SEQ ID NO: 64999 - DNA, 249 bp, Glycine max
gacagcaaaaacaattaataatgatgagtttgaagaacaacatggtggtgctaaaggtgtgtttgttgcttcttttccttgtgggggttacagctgcacgcatggaactgagcttcttcaaaagtgatcagtcatcaagttatgatgatgatgagtattcaaaaccatgctgtgatctctgcatgtgcacacgctcaatgcctcctcaatgcagctgtgaagatattaggctgaattcatgccactcag

SEQ ID NO: 65000 - DNA, 165 bp, Glycine max
  unsure (1)..(165): unsure at all n locations
gacagcaaaaacaattaataaagatgagtttgaagaacaacatggtggtgctaaaggtgtgtttgttgcctcctttcccttgtggggtttnaagctgcacgcatggaactgagcttcttcaaaagtgatcagtcatcaagttatgatgatgatgagtattcaaaa

SEQ ID NO: 65001 - DNA, 390 bp, Glycine max
cgacagaaggggattcacacaactaactaagaaagtcttccatagccccccaaaaatgaagagcaccatcttctttgctctctttctcttttgtgccttcaccacctcatacctaccttcagccatcgctgatttcgtgctcgataatgaaggtaaccctcttgaaaatggtggcacatattatatcttgtcagacataacagcatttggtggaataagagcagccccaacgggaaatgaaagatgccctctcactgtggtgcaatctcgcaatgagctcgacaaagggattggaacaatcatctcgtccccatatcgaatccgttttatcgccgaagggcatcctttgagccttaagttcgattcatttgcagtttataagctgtgtgt

SEQ ID NO: 65002 - DNA, 384 bp, Glycine max
gacagcaaaaacaattaataaagatgagtttgaagaacaacatggtggtgctaaaggtgtgtttgttgcttcttttccttgtgggggttacagctgcacgcatggaactgagcttcttcaaaagtgatcagtcatcaagttatgatgatgatgagtattcaaaaccatgctgtgatctctgcatgtgcacacgctcaatgcctcctcaatgcagctgtgaagatattaggctgaattcatgccactcagattgtaagagctgtatgtgcacacgctcacagccaggacagtgtcgttgtcttgacaccaacgacttctgctacaaaccttgcaagtccagaaatgactataaaaactaatagctctctcaaatggacgaacccc

SEQ ID NO: 65003 - DNA, 374 bp, Glycine max
gacacaactaactaagaaagtcttccatagccccccaaaaatgaagagcaccatcttctttgctctctttctcttttgtgccttcaccacctcatacctaccttcagccatcgctgatttcgtgctcgataatgaaggtaaccctcttgaaaatggtggcacatattatatcttgtcagacataacagcatttggtggaataagagcagccccaacgggaaatgaaagatgccctctcactgtggtgcaatctcgcaatgagctcgacaaagggattggaacaatcatctcgtccccatatcgaatccgttttatcgccgaaggccatcctttgagccttaagttcgattcatttgcagttataatgctgtgtg

SEQ ID NO: 65004 - DNA, 371 bp, Glycine max
gacagcaaaaacaattaataaagatgagtttgaagaacaacatggtggtgctaaaggtgtgtttgttgcttcttttccttgtgggggttacagctgcacgcatggaactgagcttcttcaaagtgatcagtcatcaagttatgatgatgatgagtattcaaaaccatgctgtgatctctgcatgtgcacacgctcaatgcctcctcaatgcagctgtgaagatattaggctgaattcatgccactcagattgtaagagctgtatgtgcacacgctcacagccaggacagtgtcgttgtcttgacaccaacgacttctgctacaaaccttgcaagtccagagatgactagaaaaactaatagctctctcaaa

SEQ ID NO: 65005 - DNA, 279 bp, Glycine max
ccacatttaataaaaaactcgtggtgtattcaatgaaagacaagagagacaaaaaatttaaaatctaataaccatgtaaatactaaagagttttgtcttgttgctctcgttcgcccaaaatttggggtgccatcatttgaagctatggttatgtacctattcccatcacactggggtgccttaatttagggttagttacaatttacgttgacatgtgagattgctaacattacagtctctaatacattatctattgcttaaatttatcagaagcttcga

SEQ ID NO: 65006 - DNA, 72 bp, Glycine max
gagaggaaagaccgagaaaaaaaaagaaggaattttgatggtaaactaatatttctaatatcagaattcgag

SEQ ID NO: 65007 - DNA, 80 bp, Glycine max
  unsure (1)..(80): unsure at all n locations
gaagaagggttcgtaaacagcccgaaagaaggtcctctcttcgtattctatagaaagacgaantancanatcaaaacaaa

SEQ ID NO: 65008 - DNA, 327 bp, Glycine max
gacagcaaaaacaattaataaagatgattttgaaaaaaaacatggtggtgctaaaggtgtgtttgttgcttcttttccttgtgggggttacagctgcacgcatggaactgagcttcttcaaaagtgatcagtcatcaagttatgatgatgatgagtattcaaaaccatgctgtgatctctgcatgtgcacacgctcaatgcctcctcaatgcagctgtgaagatattaggctgaattcatgccactcagattgtaagagctgtatgtgcacacgctcacagccaggacagtgtcgttgtcttgacaccaacgacttctgctacaaac

SEQ ID NO: 65009 - DNA, 254 bp, Glycine max
gacagcaaaaacaattaataaagatgagtttgaagaacaacatggtggtgctaaaggtgtgtttgttgcttcttttccttgtgggggttacagctgcacgcatggaactgagcttcttcaaaagtgatcagtcatcaagttatgatgatgatgagtattcaaaaccatgctgtgatctctgcatgtgcacacgcccaatgcctcctcaatgcagctgtgaagatattatgctgaattcatgccactcagattgt

SEQ ID NO: 65010 - DNA, 350 bp, Glycine max
aagaaggaagctgaagtcatagaggagaagaaggaagtggaagtgacggaagagaagaaggaaattgaagtaacagaagagaagaaggaagctgaagtcatagaagagaagaaggaagtggaagtgacggaagagaagaaggaaattgaagtaacagaagagaagaaggaagcagaagtgaaagaagagaagaaggaaggggaagtgacggaagagaagaaggaagttgaagtgacggaagagaagaaggaagcggcagtgatagtagaagagaagaatgaagttgaagtgaccgaaagagaacaatgaagtggaagtgaccgacggaaagaaagaagtggaagtgatcg

SEQ ID NO: 65011 - DNA, 231 bp, Glycine max
ccacgcatccgaccacgcgtccgtgcgacatgacgacagaaagggacagcaagggtaaaagtgttgtcccaaaaaaagtgcatctttctcctttctttcatcaccgttggaatagactgatatgggctcagaaaccaatacttttacctttgaggaggtggctatccacagtcacaggaaggattgctggcttatagtcaacgggaatgtgtatgatgtcatcccattttt

SEQ ID NO: 65012 - DNA, 272 bp, Glycine max
gacagcaaaaacaattaataaagatgagtttgaagaacaacatggtggtgctaaaggtgtgtttgttgcttcttttccttgtgggggttacagctgcacgcatggaactgagcttcttcaaaagtgatcagtcatcaagttatgatgatgatgagtattcaaaaccatgctgtgatctctgcatgtgcacacgctcaatgcctcctcaatgcaactgtgaagatattaggctgaattcatgccactcagattgtaagaactgtatgtgcaca

SEQ ID NO: 65013 - DNA, 209 bp, Glycine max
gacagcaaaaacaattaataaagatgagtttgaagaacaacatgatggtgctaaaggtgtgtttgttgcttcttttccttgtgggggttacagctgcacgcatggaactgagcttcttcaaaagtgatcagtcatcaagttatgatgatgatgagtattcaaaaccatgctgtgatctctgcatgtgcacacgctcaatgcctcctcaa

SEQ ID NO: 65014 - DNA, 319 bp, Glycine max
aataggacgacagaattggaaaggtccaaggagtaattgacacagttcagaacacagccatccacgagaaaagggacttcatcaatgcaccaatgttctgttctccgaaatattctcaaatctcatgcatgggattcaaggctttgactcagcactgtctacgtttttgacttcagtgcttttggacatggccgtggtgttcatcagagaagaactagcactagcattatgtgagacagctttgggaattaaacttagggtttctaatgctctcaacaagcaactagctatagtgttggagcatctttgtttctcttgg

SEQ ID NO: 65015 - DNA, 251 bp, Glycine max
gatccatacacaggttcacatccataacccataccgccgcacaacattatgactttggaacaaaaatagagtttccgccaaggagacatatgccctaccacattaatggcaccaagaccctaaactcgttacgcatcaataacggtctgcaatcgtcgagacagacacgtccaatgatgggcgatacgactgcgttctcagtgtttccacacgaagtatgccaaacaggtggttgggaaccccagcaggca

SEQ ID NO: 65016 - DNA, 357 bp, Glycine max
gacagcaaaaacaattaataaagatgagtttgaagaacaacatggtggtgctaaaggtgtgtttgttgcttcttttccttgtgggggttacagctgcacgcatggaactgagcttcttcaaaagtgatcagtcatcaagttatgatgatgatgagtattcaaaaccatgctgtgatctctgcatgtgcacacgctcaatgcctcctcaatgcagctgtgaagatattacgctgaattcatgccactcagattgtaagagctgtatgtgcacacgctcacagccagcacagtgtcgttgtcttgacaccaacgacttctgctacaaaccttgcaagtccaaagattactagaaaaact

SEQ ID NO: 65017 - DNA, 231 bp, Glycine max
ggatacattaagcatttatggttaggattttgggaactaatagtagcggtgaaaacgtgagtgcatgtcttctgcaccttatgatgacgatcactgtgctggtcgctataaacttcagtaaacgaaacatctactcacttaattgtgcccatgattacctcgtcaccagcattgctaccgtcagatacgcatcatcacctgaacctcattgcatgcagttctaggttcatg

SEQ ID NO: 65018 - DNA, 96 bp, Glycine max
gaaaggtaacgctacgagaacacaacagtatgttactgatgtcactttcttctatatcgctcaggttccaaaaatatgttagtagggtcatgtcgc

SEQ ID NO: 65019 - DNA, 158 bp, Glycine max
ggagagacagtgagacagacttacagatcattttccaacacgattacacgaccgcatcaaacctctcattctctccgaacctgctttcaacatcgtattggccttcgattggtctcctctttaccacataatggtctctcctcgatttgatggaacag

SEQ ID NO: 65020 - DNA, 407 bp, Glycine max
agggggttggaattttcccctctgtcctgtttcaattgttggtctcttttttatctgatttatttttacccatagtttaatatagtttgatgcaagatatgcttgacgtacatgctgctaataaacaatcattgtacggttgccaaatccgtagggaaagtgctcatggagaaagtgtgtgttgcaacaatgtgagagctctttttgatgagctcccaacaccccatatcattgtggaaatcacaccttttcccgctggaccccttaatgacaatgagtacattaaagctgagaagcttgagaaggttctcagatctagtccttctgtttgatctgtctatgtatggtgtttcatgctttcacgtacatattctttgctaccttgtaaatattgacctctgttggga

SEQ ID NO: 65021 - DNA, 256 bp, Glycine max
agggacagcaaaaacaattaataaagatgagtttgcagaacaacgtggtggtgctaaatgtgtgtttgttgcttcatttccttgcgggggttacagctgcacgcatggcactgagcttcttcaaaagtgatcagtcatcaagttatgacgatgatgaatattcacaaccatgctgtgatctctgcatgtgcacacgctcaatgtctcctcaatgcagttgtgaatatattatgctgaattcataccactcagattg

SEQ ID NO: 65022 - DNA, 370 bp, Glycine max
gacagcaaaaacaattaataaagatgagtttgaagaacaacatggtggtgctaaaggtgtgtttgttgcttcttttccttgtgggggttacagctgcacgcatggaactgagcttcttcaaaagtgatcagtcatcaagttatgatgatgatgagtattcaaaaccatgctgtgatctctgcatgtgcacacgctcaatgcctcctcaatgcagctgtgaagatattaggctgaattcatgccactcagattgtaagagctgtatgtgcacacgctcacagccaggacagtgtcgttgtcttgacaccaacgacttctgctacaaaccttgcaagtccagagatgactagaaaaactaatagctctctca

SEQ ID NO: 65023 - DNA, 394 bp, Glycine max
ggttctagtgtgtgattgtttgttgttgtaactcgttcttcttctttcgttgttctgtgtttgtgtttgttttttctctcacctgaaaatgtcttgctgcggtggtaactgtggttgcggaagctcctgcaagtgcggcaacggctgcggaggctgcaagatgtacccagacttgagctacactgagtcaaccaccaccgagaccttggtcatgggagtggcacctgttaaggctcaatttgagggtgctgaaatgggtgtgcccgctgagaacgatggctgcaaatgtggaccaaactgctcccgcaacccctgcacttgcaagtgaggtgttgggagagcaagcttcaagcagagatagcccttaattaggaataatgataaactattaatg

SEQ ID NO: 65024 - DNA, 51 bp, Glycine max
gacagtgaagaagtaactaaaccaaactgcgaaacgctgaacatttgaagc

SEQ ID NO: 65025 - DNA, 333 bp, Glycine max
gacagcaaaaacaattaataaagatgagtttgaagaacaacatggtggtgctaaaggtgtgtttgttgcttcttttccttgtgggggttacagctgcacgcatggaactgagcttcttcaaaagtgatcagtcatcaagttatgatgatgatgagtattcaaaaccatgctgtgatctctgcatgtgcacacgctcaatgcctcctcaatgcagctgtgaagatattatgctgaattcatgccactcagattgtaagagctgtatgtgcacacgctcacagccaggacagtgtcgttgtcttgacaccaacgacttctgctaacaaacttgca

SEQ ID NO: 65026 - DNA, 405 bp, Glycine max
  unsure (1)..(405): unsure at all n locations
gacagcanaaacaattaataaagatgagtttgaagaacaacatggtggtgctaaaggtgtgtttgttgcttcttttccttgtgggggttacagctgcacgcatggaactgagcttcttcaaaagtgatcagtcatcaagttatgatgatgatgagtattcaaaaccatgctgtgatctctgcatgtgcacacgctcaatgcctcctcaatgcagctgtgaagatattaggctgaattcatgccactcagattgtaagagctgtatgtgcacacgctcacagccaggacagtgtcgttgtcttgacaccaacgacttctgctacaaaccttgcaagtccagagatgactagaaaaactaatagctctctcaaatggacgaagcccctttaagctttgtttgttatg

SEQ ID NO: 65027 - DNA, 166 bp, Glycine max
gcacacaactaactaagaaagtcttccatagccccccaaaaatgaagagcaccatcttctttgctctctttctcttttgtgccttcaccacctcatacctaccttcagccatcgctgatttcgtgctcgataatgaacgtaaccctcttgaaaatgggggcacata

SEQ ID NO: 65028 - DNA, 340 bp, Glycine max
gacagcaaaaacaattaataaagatgagtttgaagaacaacatggtggtgctaaaggtgtgtttgttgcttcttttccttgtgggggttacagctgcacgcatggaactgagcttcttcaaaagtgatcagtcatcaagttatgatgatgagtattcaaaaccatgctgtgatctctgcatgtgcacacgctcaatgcctcctcaatgcagctgtgaagatattaggctgaattcatgccactcagattgtaagagctgtatgtgcacacgctcacagccaggacagtgtcgttgtcttgacaccaacgacttctgctacaaaccttgcaagtccagaga

SEQ ID NO: 65029 - DNA, 379 bp, Glycine max
gattcacacaactaactaagaaagtcttccatagccccccaaaaatgaagagcaccatcttctttgctctctttctcttttgtgccttcaccacctcatacctaccttcagccatcgctgatttcgtgctcgataatgaaggtaaccctcttgaaaatggtggcacatattatatcttgtcagacataacagcatttggtggaataagagcagccccaacgggaaatgaaagatgccctctcactgtggtgcaatctcgcaatgagctcgacaaaggggttggaacaatcatctcgtccccatatcgaatccgttttatcgccgaaggccatcctttgagccttaagttcgattcatttgcagttataatgctgtgtgt

SEQ ID NO: 65030 - DNA, 386 bp, Glycine max
gacagcaaaaacaattaataaagatgagtttgaagaacaacatggtggtgctaaaggtgtgtttgttgcttcttttccttgtgggggttacagctgcacgcatggaactgagcttcttcaaaagtgatcagtcatcaagttatgatgatgatgagtattcaaaaccatgctgtgatctctgcatgtgcacacgctcaatgcctcctcaatgcagctgtgaagatattatgctgaattcatgccactcagattgtaagagctgtatgtgcacacgctcacagccaggacagtgtcgttgtcttgacatcaacgacttctgctacaaaccttgcaagtccagagatgactagaaaaactaatagctctctcaaatggacgaagcccct

SEQ ID NO: 65031 - DNA, 262 bp, Glycine max
aggcgtcagtacaggtgagaaagagaacagaacgggattcacataaataactaataaagtcttccatagcccctcataaatgaggagattatcatctgtgctctcgtactcattatgtgacttcataagcacacaagaatgttcagccaacgctgaatgcgtgcgccataatgatggtggtactcatgataacggggtaagacagtagatcttgtgtggcataacagcatttggtggaataagagcaactgagctggaaatg

SEQ ID NO: 65032 - DNA, 440 bp, Glycine max
actgcgagacgacgaggggggatgcacaagtgaatttggtgatgcagataacgagtaacactgtgatcaagatgatggtccttgctttcttcgttgctacaattttggtagcatggcaatgcgatgcgtgcgatatgttccctctccgaatgaacactggctagtggtgcccgtacgccggaggtgaaatgcgcaagttggaggcttgctgtggaagcacacaagatctttggctttgagatcattcctgaagagtgcgttgaggcaccaaaggaatacatccatggcgagcaatatagatcagactccaagacagttaaccaacaagcttacttttatgccagagacctcgaagtccatcccaatgacacatttgtgttcagtatagatggcaccgtactctctaatattccatactacagaaaacatggatatggggt

SEQ ID NO: 65033 - DNA, 364 bp, Glycine max
gacagcaaaaacaattaataaagatgagtttgaagaacaacatggtggtgctaaaggtgtgtttgttgcttcttttccttgtgggggttacagctgcacgcatggaactgagcttcttcaaaagtgatcagtcatcaagttatgatgatgatgagtattcaaaaccatgctgtgatctctgcatgtgcacacgctcaatgcctcctcaatgcagctgtgaagatattaggctgaattcatgccactcagattgtaagagctgtatgtgcacacgctcacagccaggacagtgtcgttgtcttgacaccaacgacttctgctacaaaccttgcaagtccagagatgactagaaaaactaatagct

SEQ ID NO: 65034 - DNA, 166 bp, Glycine max
cgatatcgctgctacaagaccagagaaggatactgctgccacaacagcacacgagggtgctgctgctataatacgacagaacggtagtgctacgagtaagactacacaatggtactgctgcgataacatcacgaaatggtactgctgccgagaactacaccgaatg

SEQ ID NO: 65035 - DNA, 376 bp, Glycine max
gattcacacaactaactaagaaagtcttccatagccccccaaaaatgaagagcaccatcttctttgctctctttctcttttgtgccttcaccacctcatacctaccttcagccatcgctgatttcgtgctcgataatgaaggtaaccctcttgaaaatggtggtacatattatatcttgtcagacataacagcatttggtggaataagagcagccccaacgggaaatgaaagatgccctctcactgtggtgcaatctcgcaatgagctcgacaaagggattggaacaatcatctcgtccccatatcgaatccgttttatcgccgaaaggcatcctttgagccttaagttcgattcatttgcagttaaaatgctgtg

SEQ ID NO: 65036 - DNA, 378 bp, Glycine max
gattcacacaactaactaagaaagtcttccatagccccccaaaaatgaagagcaccatcttctttgctctctttctcttttgtgccttcaccacctcatacctaccttcagccatcgctgatttcgtgctcgataatgaaggtaaccctcttgaaaatggtggcacatattatatcttgtcagacataacagcatttggtggaataagagcagccccgacgggaaatgaaagatgccctctcactgtggtgcaatctcgcaatgagctcgacaaagggattggaacaatcatctcgtccccatatcgaatccgttttatcgccgaaggccatcctttgagccttaagttcgattcatttgcagttataatgctgtgtg

SEQ ID NO: 65037 - DNA, 389 bp, Glycine max
gattcacacaactaactaagaaagtcttccatagccccccaaaaatgaagagcaccatcttctttgctctctttctcttttgtgccttcaccacctcatacctaccttcagccatcgctgatttcgtgctcgataatgaaggtaaccctcttgaaaatggtggcacatattatatcttgtcagacataacagcatttggtggaataagagcagccccaacgggaaatgaaagatgccctctcactgtggcgcaatctcgcaatgagctcgacaaagggattggaacaatcatctcgtccccatatcgaatccgttttatcgccgaaagccatcctttgagccttaagttcgattcatttgcagtttaaatgctgtgtgttgggattcct

SEQ ID NO: 65038 - DNA, 345 bp, Glycine max
gcacacaactaactaagaaagtcttccatagccccccaaaaatgaagagcaccatcttctttgctctctttctcttttgtgccttcaccacctcatacctaccttcagccatcgctgatttcgtgctcgataatgaaggtaaccctcttgaaaatggtggcacatattatatcttgtcagacataacagcatttggtggaataagagcagccccaacgggaaatgaaagatgccctctcactgtggtgcaatctcgcaatgagctcgacaaagggattggaacaatcatctcgtccccatatcgaatccgttttatcgccgaacgtcatcctttgagccttaagt

SEQ ID NO: 65039 - DNA, 205 bp, Glycine max
aaatcaataagatcagaaaataaaccaaagtgccgctctaaaggatggacgctcaataagatccacacttacgtgtgcgtgccttcaacagcataaccctactataatgcaacggaaattcaattcaacggccgtcattttgaactctcttgcatgagaaaacctagccgctgctcatcttaccccccttgcatcacatgcccct

SEQ ID NO: 65040 - DNA, 344 bp, Glycine max
ggacacaactaactaagaaagtcttccatagccccccaaaaatgaagagcaccatcttctttgctctctttctcttttgtgccttcaccacctcatacctaccttcagccatcgctgatttcgtgctcgataatgaaggtaaccctcttgaaaatggtggcacatattatatcttgtcagacataacagcatttggtggaataagagcagccccaacgggaaatgaaagatgccctctcactgtggtgcaatctcgcaatgagctcgacaaagggattggaacaatcatctcgtccccatatcgaatccgttttatcgccgaaggccatcctttgagccttaag

SEQ ID NO: 65041 - DNA, 237 bp, Glycine max
ggggtccactgtgttcacacgcaccgctgaaagacgcaattcgagatgctccttcacttgcgctctcagacgttcatccagtcagaaatgcgtgtattcggagccagtatctgtcattcgcagagcactttcgagaaccagaagttcatatttgcaatcctttgggatctttccgaggagggcgtggtgaatttgcggacgaccttcattgcgtcctagatgtttgacgcgcagata

SEQ ID NO: 65042 - DNA, 317 bp, Glycine max
  unsure (1)..(317): unsure at all n locations
gattcacacaactaactaagaaagtcttccatagccccccaaaaatgaagagcaccatcttctttgctctctttctcttttgtgccttcaccacctcatacctaccttcagccatcgctgatttcgtgctcgataatgaaggtaaccctcttgaaaatggtggcacatattatatcttgtcagacataacagcatttggtggaataagagcagccccaacgggaaatgaaagatgccctctcactgtggtgcaatctcgcaatgagctcgacaaagggattggnacaatcatctcgtccccatatcgaatccgtttt

SEQ ID NO: 65043 - DNA, 369 bp, Glycine max
gacagcacaaacaattaataaagatgagtttgaagaacaacatggtggtgctaaaggtgtgtttgttgcttcttttccttgtgggggttacagctgcacgcatggaactgagcttcttcaaaagtgatcagtcatcaagttatgatgatgatgagtattcaaaaccatgctgtgatctctgcatgtgcacacgctcaatgcctcctcaatgcagctgtgaagatattaggctgaattcatgccactcagattgtaagagctgtatgtgcacacgctcacagccaggacagtgtcgttgtcttgacaccaacgacttctgctacaaaccttgcaagtccagagatgactagaacaactaatagctctctc

SEQ ID NO: 65044 - DNA, 64 bp, Glycine max
  unsure (1)..(64): unsure at all n locations
ggtgaagagaaaatacggaaaaagttttgattcatttcaactctgagagcaaaannnannnnnn

SEQ ID NO: 65045 - DNA, 82 bp, Glycine max
aacattgaaaagcctaatggaaatggcaatggcatcggccaaaaaaatgaaaaagagatgacaaccaccaaaaaaataaaaa

SEQ ID NO: 65046 - DNA, 379 bp, Glycine max
  unsure (1)..(379): unsure at all n locations
gattcacacaactaactaagaaagtcttccatagccccccaaaaatgaagagcaccatcttctttgctctctttctcttttgtgccttcaccacctcatacctaccttcaaccatcgctgatttcgtgctcgataatgaaggtaaccctcttgaaaatggtggcacatattatatcttgtcagacataacagcatttggtggaataagagcagccccaacgggaaatgaaagatgccctctcactgtggtgcaatctcgcaatgagctcgacaaagggattggaacaatcatctcgtcnccatatcgaatccgttttatcgccgaaggccatcctttgagccttaagttcgattcatttgcagttataatgctgtgtgt

SEQ ID NO: 65047 - DNA, 430 bp, Glycine max
acgggtacagctgcgaaaggtccagatgcgggtacagctgcgagaggtccagctgcgggtacagctgcgagaggtccagatacggggacaccatttttgggttaggctgtgtaaacataacaaaaagttacgggagcgaatgacatcaacacgattcggcttctaaataacatcatgccgatactgatggtacgcacacgactaataggtacaagtcctccatttgtccaagttgggtcaagcagtgagactactacacttacgtgtcgatacgcatgcacagtacaatgtacagctttaacaccaattaaaccatggtctgacacatgtgtacaacaatgcgcttcagattctaaacatcaactgtccgttgctaatgattgctttactagttgtgccttaatcaagtccattaacatcatcaatgata

SEQ ID NO: 65048 - DNA, 410 bp, Glycine max
ggttctagtgtgtgattgtttgttgttgtaactcgttcttcttcttttgttgttctgtgtttgtgtttgttttttctctcacctgaaaatgtcttgctgcggtggtaactgtggttgcggaagctcctgcaagtgcggcaacggctgcggaggctgcaagatgtacccagacttgagctacactgagtcaaccaccaccgagaccttggtcacgggagtggcacctgttaaggctcaatttgagggtgctgaaatgggtgtgcccgctgagaacgatggctgcaaatgtggaccaaactgctcctgcaacccctgcacttgcaagtgaggtgttgggagagcaagcttcaagcagagatagcccttaattaggaataatgataaactattaatgtgtagctaaaacttat

SEQ ID NO: 65049 - DNA, 376 bp, Glycine max
  unsure (1)..(376): unsure at all n locations
gacagcaaaaacaattaataaagatgagtttgaagaacaacatggtggtgctaaaggtgtgtttgttgcttcttttccttgtgggggttacagctgcacgcatggaactgagcttcttcaaaagtgatcagtcatcaagttatgatgatgatgagtattcaaaaccatgctgtgatctctgcatgtacacacgctcaatgcctcctcaatgcagctgtgaagatattaggctgaattcatgccactcagattgtaagagctgtatgtgcacacgctcacagccaggacagtgtcgttgtcttgacnacaacgacttctgctacaaaccttgcaagtccagagatgactagaanaactaatagctctctcaaatgga

SEQ ID NO: 65050 - DNA, 160 bp, Glycine max
  unsure (1)..(160): unsure at all n locations
tggatgaaatttttaatggaccttcaaaatacatatctcctattaatatggaacagttactggccatttgaattggcanataaattagtcacttagtcctttgtaatgtgctttccttttttgtggggttacttgttatcaagcaacacactggaaccca

SEQ ID NO: 65051 - DNA, 169 bp, Glycine max
cgggctgcagcagttgggaggaggcactgtggcacaagtcttaggagtgtaaatcagagacgcaaaatgaggaggagtcgatcgtccgagaccatgaatattcccgacggtgtgagcatcaaggttcatgccaatgttatcgaggttgagggccctcgtggaaaatcca

SEQ ID NO: 65052 - DNA, 368 bp, Glycine max
gacagcaaaaacaattaataaagatgagtttgaagaacaacatggtggtgctaaaggtgtgtttgttgcttcttttccttgtgggggttacagctgcacgcatggaactgagcttcttcaaaagtgatcagtcatcaagttatgatgatgatgagtattcaaaaccatgctgtgatctctgcatgtgcacacgctcaatgcctcctcaatgcagctgtgaagatattaggctgaattcatgccactcagattgtaagagctgtatgtgcacacgctcacagccaggacagtgtcgttgtcttgacaccgacgacttctgctacaaaccttgcaagtccagagatgactagaaaaactaatagctctct

SEQ ID NO: 65053 - DNA, 237 bp, Glycine max
acctccgaatcagagaaagggagataccgaactaagaaaatcctccacagccccccatgccacaagacgacacaatgggacgatgagtcgacttgataactaagatattgttactcctccagggtgatcgagtttgacatcatccacatctaatttataacactgttccattacttaacgatcacagatttatcatctctacgggattaaatcccgagttttctattggaaacttaa

SEQ ID NO: 65054 - DNA, 266 bp, Glycine max
gattcacacaactaactaagaaagtcttccatagccccccaaaaatgaagagcaccatcttctttgctctctttctcttttgtgccttcaccacctcatacctaccttcagccatcgctgatttcgtgctcgataatgaaggtaacccttttgaaaatggtggcacatattatatcttgtcagacataacagcatttggtggaataagagcagccccaacgggaaatgaaagatgccctctcactgtggtgcaatctcgcaatgag

SEQ ID NO: 65055 - DNA, 408 bp, Glycine max
acagaaggggacacaactaactaagaaagtcctccatagccccccaaaaatgaagagcaccatcttctttgctctctttctcttttgtgccttcaccacctcatacctaccttcagccatcgctgatttcgtgctcgataatgaaggtaaccctcttgaaaatggtggcacatattatatcttgtcagacataacagcatttggtggaataagagcagccccaacgggaaatgaaagatgccctctcactgtggtgcaatctcgcaatgagttcgacaaagggattggaacaatcatctcgtccccatatcgaatccgttttatcgccgaaggccatcctttgagccttaagttcgattcatttgcagttataatgctgtgtgttggaattcctaccgagtggtctgt

SEQ ID NO: 65056 - DNA, 210 bp, Glycine max
aatagatacggggatacgaaaaaatgataaagctgctcctacataacttcccggtacggaatgtgacagacaacagtgcgctcctgctcgtcatatgcctacactaggttaaagctgccagatgccaactcacaggtcgtgctctattaattcagcaatcgtcattaaactggttctaacaaattacatcttgtcatacccaaccgctct

SEQ ID NO: 65057 - DNA, 369 bp, Glycine max
gacagcaaaaacaattaataaagatgagtttgaagaacaacatggtggtgctaaaggtgtgtttgttgcttcttttccttgtgggggttacagctgcacgcatggaactgagcttcttcaaaagtgatcagtcatcaagttatgatgatgatgagtattcaaaaccatgctgtgatctctgcatgtgcacacgctcaatgcctcctcaatgcagctgtgaagatattaggctgaattcatgccactcagattgtaagagctgtatgtgcacacgctcacagccaggacagtgtcgttgtcttgacaccaacgacttctgctacaaaccttgcaagtccagagatgactagaaaaactaatagctctctc

SEQ ID NO: 65058 - DNA, 192 bp, Glycine max
gactgcttttaaagtagtttataagatgaaccctcacagcctcttggcttctgcagcgatagacataggcttggccttggtgacgctgcctccgttctccgtgctcaagaagcagccttccaacgctcccatctactacgctcgtcctctctctcgccgcgaccaactcgctttccatgagtcgtcttcttc

SEQ ID NO: 65059 - DNA, 147 bp, Glycine max
accaaagaaggggatttctgaaactaacaacaacacaatggaatcatcatggcaactgcctccccaatgctaatccaactacaagtttaccttcagggagggggctggtaacacccaatgtcctctctgccccctcagcacattaac

SEQ ID NO: 65060 - DNA, 226 bp, Glycine max
  unsure (1)..(226): unsure at all n locations
agggaatgatgaggaagctaccctctgaggaatctgcaccataacaaaatcagcaacaaatatccaaaaaaaaagaagaaggagatttctgttgaatgatgaggaagctaccctcttgcgctgattgaggataagaaccagaacaggttgcagttaaaaaaaaaaaccataacttgatgcaaagaggagtagcagaaccatgtaacaaaccnnnnnnnannnnnnn

SEQ ID NO: 65061 - DNA, 191 bp, Glycine max
gacagcaaaaacaattaataaagatgagtttgaagaacaacatggtggtgctaaaggtgtgtttgttgcttcttttccttgtgggggttacagctgcacgcatggaactgagcttcttcaaaagtgatcagtcatcaagttatgatgatggtgagtattcaaaaccatgctgtgatctctgcatgtgcaca

SEQ ID NO: 65062 - DNA, 359 bp, Glycine max
  unsure (1)..(359): unsure at all n locations
gaaagcaaaaacaattaataaagatgagtttgaagaacaacatggtggtgctaaaggtgtgtttgttgcttcttttccttgtgggggttacagctgcacgcatggaactgagcttcttcaaaagtgatcagtcatcaagttatgatgatgatgagtattcaaaaccatgctgtgatctctgcatgtgcacacgctcaatgcctcctcaatgcagctgtgaagatattaggctgaattcatgccactcagattgtaagagctgtatgtgcacacgctcacagccaggacagtgtcgttgtcttgacaccaacgacttctgctacaaancttgcangtccagagatgactagaaaaactaa

SEQ ID NO: 65063 - DNA, 142 bp, Glycine max
aagggtcacacaacgggaccgtaaagtcttccctcccccacccaaaatggcaaacagcatcttcattgctctcattcaagatggatggctgagcaaatcatcatcatgattaagccacattgcgttcatagacgacttattg

SEQ ID NO: 65064 - DNA, 128 bp, Glycine max
gacagtcacatttaccaaagaagaaaaaaaaactcaaacaccttcagcggccgctctcgatgattgaaacttacgtactcgtgcatgtttacatcacatctcatctatagagtcatcaatattcacct

SEQ ID NO: 65065 - DNA, 82 bp, Glycine max
  unsure (1)..(82): unsure at all n locations
cccggtcnacctacaagtctatacggctgcgacaacgacagcaaggggctgctgtttcactatgtctattctattccgcggc

SEQ ID NO: 65066 - DNA, 400 bp, Glycine max
gacagcaaaaacaattaataaagatgagtttgaagaacaacatggtggtgctaaaggtgtgtttgttgcttcttttccttgtgggggttacagctgcacgcatggaactgagcttcttcaaaagtgatcagtcatcaagttatgatgatgatgagtattcaaaaccatgctgtgatctctgcatgtgcacacgctcaatgcctcctcaatgcagctgtgaagatattaggctgaattcatgccactcagattgtaagagctgtatgtgcacacgctcacagccaggacagtgtcgttgtcttgacaccaacgacttctgctacaaaccttgcaagtccagagatgactagaaaaactaatagctctctcaaatggacgaagcccctttaagctttgtttg

SEQ ID NO: 65067 - DNA, 370 bp, Glycine max
agcaaaaacaattaataaagatgagtttgaagaacaacatggtggtgctaaaggtgtgtttgttgcttcttttccttgtgggggttacagctgcacgcatggaactgagcttcttcaaaagtgatcagtcatcaagttatgatgatgatgagtattcaaaaccatgctgtgatctctgcatgtgcacacgctcaatgcctcctcaatgcagctgtgaagatattaggctgaattcatgccactcagattgtaagagctgtatgtgcacacgctcacagccaggacagtgtcgttgtcttgacaccaacgacttctgctacaaaccttgcaagtccagagatgactagaaaaactaatagctctctcaaat

SEQ ID NO: 65068 - DNA, 277 bp, Glycine max
  unsure (1)..(277): unsure at all n locations
gaaattaaacanagcaaaaggccatataatttttttttatttgaaataatgtccgggatcatccacaagattgaggagaccctccatgtgggagggcacaagaaagaggagcacaaaggagaacaccatggtgagcacaaaggtgaacacaaaggagaacaccatggtgagcacaaaggtgaacacaaaggagaacaacaccatggggagcacaaggagggacttgtggataagatcaaggacaagatccatggtgatggccatgacaagggtgaga

SEQ ID NO: 65069 - DNA, 381 bp, Glycine max
gattcacacaactaactaagaaagtcttccatagccccccaaaaatgaagagcaccatcttctttgctctctttctcttttgtgccttcaccacctcatacctaccttcagccatcgctgatttcgtgctcgataatgaaggtaaccctcttgaaaatggtggcacatattatatcttgtcagacataacagcatttggtggaataagagcagccccaacgggaaatgaaagatgccctctcactgtggtgcaatctcgcaatgagctcgacaaagggattggaacaatcatctcgtccccatatcgaatccgttttatcgccgaaggccatcctttgagccttaagttcgattcatttgcagttataatgctgtgtgttg

SEQ ID NO: 65070 - DNA, 217 bp, Glycine max
gacagcaaaaacaattaataaagatgagtttgaagaacaacatggtggtgctaaaggtgtgtttgttgcctcctttccttgtgggggttacagctgcacgcatggaactgagcttcttcaaaagtgatcagtcatcaagttatgatgatgatgagtattcaaaaccatgctgtgatctctgcatgtgcacacgctcaatgcctcctcaatgcagctg

SEQ ID NO: 65071 - DNA, 130 bp, Glycine max
gccatggtgtttcaattcaaaagtttgaagtttctttgtctttgatttcatgtttaattttgttagcctgattgatatcatattttttttcttatttaacaattgaaataatacgtgctgcctttctttc

SEQ ID NO: 65072 - DNA, 289 bp, Glycine max
gacagcaaaaacaattaataaagatgagtttgaagaacaacatggtggtgctaaaggtgtgtttgttgcttcttttccttgtgggggttacagctgcacgcatggaactgagcttcttcaaaagtgatcagtcatcaagttatgatgatgatgagtattcaaaaccatgctgtgatctctgcatgtgcacacgctcaatgcctcctcaatgcagctgtgaagatattaggctgaattcatgccactcagattgtaagagctgtatgtgcacacgctcacaaccaggaca

SEQ ID NO: 65073 - DNA, 292 bp, Glycine max
aaacaaaaaaaggggctcaaaacaaaacattataaagatgatttgaaaacaacaatggggggcaaaagggtgtttgtttgcttcttttcccttgtgggggttacagctgcacgcatggaactgagcttcttcaaaagtgatcagtcatcaagttatgatgatgatgagtattcaaaaccatgctgtgatctctgcatgtgcacacgctcaatgcctcctcaatgcagctgtgaagatattaggctgaattcatgccactcagattgttagagctgtatgtgcacacgctcac

SEQ ID NO: 65074 - DNA, 374 bp, Glycine max
gacacaactaactaagaaagtcttccatagccccccaaaaatgaagagcaccatcttctttgctctctttctcttttgtgccttcaccacctcatacctaccttcagccatcgctgatttcgtgctcgataatgaaggtaaccctcttgaaaatggtggcacatattatatcttgtcagacatagcagcatttggtggaataagagcagccccaacgggaaatgaaagatgccctctcactgtggtgcaatctcgcaatgagctcgacaaagggattggaacaatcatctcgtccccatatcgaatccgttttatcgccgaagggcatcctttgagccttaagttcgattcatttgcagttataatgttgtgtg

SEQ ID NO: 65075 - DNA, 217 bp, Glycine max
gacagcaaaaacaattaataaagatgagtttgaagaacaacatggtggtgctaaaggcgtgtttgttgcttcttttccttgtgggggttacagctgcacgcatggaactgagcttcttcaaaagtgatcagtcatcaagttatgatgatgatgagtattcaaaaccatgctgtgatctctgcatgtgcacacgctcaatgcctccccaatgcagctg

SEQ ID NO: 65076 - DNA, 335 bp, Glycine max
gacgaccaaaactatgccattacaggcaagacctaaagtttgaagaagcacagcgcaccaaaacctaggtagagagaatcaactagtgtactacagtactagctagctcctctcaggtcctaacacaagatagagacaaaaaaaaaacgccacaaatcacaaaacacaaaaaaatcagttttttcttgaagatgccgaggcccggccctagaccttacgagtgcatgaggcgagcttggcacagcgagcggcaccaaccccatgagaggttccatcattcggcaaatttttagggtcgtcgcggaagctcactccgcgggtactaagagcaacaa

SEQ ID NO: 65077 - DNA, 348 bp, Glycine max
gacagcaaaaacaattaataaagatgagtttgaagaacaacatggtggtgctaaaggtgtgtttgttgcttcttttccttgtgggggttacagctgcacgcatggaactgagcttcttcaaaagtgatcagtcatcaagttatgatgatgatgagtattcagaaccatgctgtgatctctgcatgtgcacacgcccaatgcctcctcaatgcagctgtgaagatattaggctgaattcatgccactcagattgtaagagctgtatgtgcacacgctcacagccaggacagtgtcgttgtcttgacaccaacgacttctgctacaaaacttgcaagtccagagatgact

SEQ ID NO: 65078 - DNA, 339 bp, Glycine max
  unsure (1)..(339): unsure at all n locations
gaaagaacaaaaaaaggggaaacaaaaactaaactaanagaaagttccttccaataagcnncccccacaaaaatgaaagagcaacatcctccttgccccccttcccctttgtgccttcacaactcatacctaccttcagccatcgctgatttcgtgctcgataatgaaggtaacctcttggaaatggtggcacatattatatcttgtcagacataacagcatttggtggaataagagcagccccaacgggaaatgaaagatgccctctcactgtggtgcaatctcgcaatgagctcgacaaagggattggaacaatcatctcggtcccatatcgaatcc

SEQ ID NO: 65079 - DNA, 358 bp, Glycine max
gacagcaaaaacaattaataaagatgagtttgaagaacaacatggtggtgctaaaggtgtgtttgttgcttcttttccttgtgggggttacagctgcacgcatggaactgagcttcttcaaaagtgatcagtcatcaagttatgatgatgatgagtattcaaaaccatgctgtgatctctgcatgtgcacacgctcaatgcctcctcaatgcagctgtgaagatattaggctgaattcatgccactcagattgtaagagctgtatgtgcacacgctcacagccaggacagtgtcgttgtcttgacaccaacgacttctgctacaaaccttgcaagtccagagatgactagaaaaacta

SEQ ID NO: 65080 - DNA, 368 bp, Glycine max
gacagcaaaaacaattaataaagatgagtttgaagaacaacatggtggtgctaaaggtgtgtttgttgcttcttttccttgtgggggttacagctgcacgcatggaactgagcttcttcaaaagtgatcagtcatcaagttatgatgatgatgagtattcaaaaccatgctgtgatctctgcatgtgcacacgctcaatgccacctcaatgcagctgtgaagatattaggctgaattcatgccactcagattgtaagagctgtatgtgcacacgctcacagccaggacagtgtcgttgtcttgacaccaacgacttctgctacaaaccttggcaatccagagatgactagaaaaactaatagctctct

SEQ ID NO: 65081 - DNA, 316 bp, Glycine max
gattcacacaactaactaagaaagtcttccatagccccccaaaaatgaagagcaccatcttctttgctctctttctcttttgtgccttcaccacctcatacctaccttcagccatcgctgatttcgtgctcgataatgaaggtaaccctcttgaaattggtgcacatattatatcttgtcagacataaaagcatttggtggaataagagcagccccaccgggaattgaaaaatgccctctcactgtggtgcaatctcgcaatgagctcgacaaagggattggaacaatcatctcgtcccaatatcgaatccttttt

SEQ ID NO: 65082 - DNA, 402 bp, Glycine max
gacacaactaactaagaaagtcttccatagccccccaaaaatgaagagcaccatcttctttgctctctttctcttttgtgccttcaccacctcatacctaccttcagccatcgctgatttcgtgctcgataatgaaggtaaccctcttgaaaatggtggcacatattatatcttgtcagacataacagcatttggtggaataagagcagccccaacgggaaatgaaagatgccctctcactgtggtgcaatctcgcaatgagctcgacaaagggattggaacaatcatctcgtccccatatcgaatccgttttatcgccgaaggccatcctttgagccttaagttcgattcatttgcagttataatgctgtgtgttggaattcctaccgagtggtctgttgt

SEQ ID NO: 65083 - DNA, 140 bp, Glycine max
acagtatgggattcagacaactaacttaggaagtcttgcataaccccccaaaagtgaagaggaagatcttctctgctctctttctcttttggggcctcagcagcctcaggacctagcttcagccatcgctgatttcgtgg

SEQ ID NO: 65084 - DNA, 367 bp, Glycine max
gattcacacaactaactaagaaagtcttccatagccccccaaaaatgaagagcaccatcttctttgctctctttctcttttgtgccttcaccacctcatacctaccttcagccatcgctgatttcgtgctcgataatgaaggtaaccctcttgaaaatggtggcacatattatatcttgtcagacataacagcatttggtggaataagagcagccccaacgggaaatgaaagatgccctctcactgtggtgcaatctcgcaatgagctcgacaaagggattggaacaatcatctcgtccccatatcgaatccgttttatcgccgaaggccatcctttgagccttaagttcgattcatttgcagttat

SEQ ID NO: 65085 - DNA, 373 bp, Glycine max
gacagcaaaaacaattaataaagatgagtttgaagaacaacatggtggtgctaaaggtgtgtttgttgcttcttttccttgtgggggttacagctgcacgcatggaactgagcttcttcaaaagtgatcagtcatcaagttatgatgatgatgagtattcaaaaccatgctgtgatctctgcatgtgcacacgctcaatgcctcctcaatgcagctgtgaagatattaggctgaattcatgccactcagattgtaagagctgtatgtgcacacgctcacagccaggacagtgtcgttgtcttgacaccaacgacttctgctacaaaccttgcaagtccagagatgactagaaaaacaaaaacctctctcaaat

SEQ ID NO: 65086 - DNA, 276 bp, Glycine max
cacgtcagtacagctggggaatcacaccactagggggaagcatcttccactacctcttaaagataaacacgcatggtcgtcattggtcgcggtcacgttttgacattcgtggtcacatgtgttactatcatgcatctgtagatttccagcgcacaggtggttcgtcactgctcgtgaacatgttctggcacagtaacacgtgggggtgatcacatgacttggtcgtatagcgaccaccgtagttgtaattcatggacacgctcccactgtgctgca

SEQ ID NO: 65087 - DNA, 365 bp, Glycine max
gacagcaaaaacaattaataaagatgagtttgaagaacaacatggtggtgctaaaggtgtgtttgttgcttcttttccttgtgggggttacagctgcacgcatggaactgagcttcttcaaaagtgatcagtcatcaagttatgatgatgatgagtattcaaaaccatgctgtgatctctgcatgtgcacacgctcaatgcctcctcaatgcagctgtgaagatattaggctgaattcatgccactcagattgtaagagctgtatgtgcacacgctcacagccaggacagtgtcgttgtcttgacaccaacgacttctgctacaaaccttgcaagtccagagatgactagaaaaactaatagctc

SEQ ID NO: 65088 - DNA, 164 bp, Glycine max
  unsure (1)..(164): unsure at all n locations
gacagcanaaacaattaataaagatgagtttgaagaacaacatggtggtgccaaacgtgtgtttgttgcctcttttccttgtgggggttacagctgcacgcatggaactgagcctcttcaaaattgatcagtcaccaagttatgataatgatgagtattcaaaa

SEQ ID NO: 65089 - DNA, 370 bp, Glycine max
gacagcaaaaacaattaataaagatgagtttggagaacaacatggtggtgctaaaggtgtgtttgttgcttcttttccttgtgggggttacagctgcacgcatggaactgagcttcttcaaaagtgatcagtcatcaagttatgatgatgatgagtattcaaaaccatgctgtgatctctgcatgtgcacacgctcaatgcctcctcaatgcagctgtgaagatattaggctgaattcatgccactcagattgtaagagctgtatgtgcacacgctcgcagccaggacagtgtcgttgtcttgacaccaacgacttctgctacaaaccttgcaagtccagagatgactagaaaaactaatagctctctca

SEQ ID NO: 65090 - DNA, 327 bp, Glycine max
ggagagagaaagctgtctcgtgaagcagcaggtgaagctcaagcaaaagaaaataaaagctcacctctttcatcctttctttctttctttctcttccttcttctctcgattttctctctctctctgcatagctttcaacacttcacaacacaacacaccccattttctctctctaacaattcattcctcactttcacgagatccccatcaccgcttgtgacattgctgctgcaaattcacagagagagacagaaagaaagaaaaagtattcatagatttatcacatcatagagattttagtttttaagatacccttcctgtggtttc

SEQ ID NO: 65091 - DNA, 404 bp, Glycine max
  unsure (1)..(404): unsure at all n locations
gacagcanaaacaattaataaagatgagtttgaagaacaacatggtggtactaaaggtgtgtttgttacttcttttccttgtgggggttacagctgcacgcatggaactgagcttcttcaaaagtgatcagtcatcaagttatgatgatgatgagtattcaaaaccatgctgtgatctctgcatgtgcacacgctcaatgcctcctcaatgcagctgtgaagatattaggctgaattcatgccactcagattgtaagagctgtatgtgcacacgctcacagccaggacagtgtcgttgtcttgacaccaacgacttctgctacaaaccttgcaagtccagagatgactagaaaaactaatagctctctcaaatggacgaagcccctttaagctttgtttgttat

SEQ ID NO: 65092 - DNA, 208 bp, Glycine max
tgggacaggtgtttgcagtactatcgatagctgataaaagagatatcaacatgattagtagataagaggagttgagattccctttgaggggaagatggcatcccatatgcaaagctattaagctggtcaaactaagggccgaactgaggaaaagatgaaccagatgatgggcactattggtgataacgctcaagctgcataggagaag

SEQ ID NO: 65093 - DNA, 56 bp, Glycine max
agttactgctgccatatgacgacaaagcggtacggctgctacaataccatataagg

SEQ ID NO: 65094 - DNA, 332 bp, Glycine max
  unsure (1)..(332): unsure at all n locations
gacacaactaactaagaaagtcttccatagccccccaaaaatgaagagcaccatcttctttgctctctttctcttttgtgccttcaccacctcatacctaccttcagccatcgctgatttcgtgctcgataatgaaggtaaccctcttgaaaatggtggcacatattatatcttgtcagacataacagcatttggtggaataagagcagccccaacgggaaatgaaagatgccctctcactgtggtgcaatctcgcaatgagctcgacaaagggattggaacaatcatctcgtcnccatatcgaatccgttttatcgccgaaggccatcctt

SEQ ID NO: 65095 - DNA, 237 bp, Glycine max
gggtccagcacgcgtccgaacagaagagagaggggaattaagtttttagggtttacaccgagcagccatacggccggtctcaacgatggatcccaacatagacgtatatgcaatcactgatgtcatcatctatgcaacatagggcaacatcattggacgtcgtgatacacaggctttcctgtgagcaccctgacgttatacgacgtaatcccattgtagcatatcacccttacagca

SEQ ID NO: 65096 - DNA, 275 bp, Glycine max
ggcacaagtgagtttgttgatcgagataactagaaacagtgtgatgaaaatgaaggtccttgttttcttcgttgctacaattttggtagcatggcaatgccatgcgtacgatatgttccctctccgaatgaacactggctatggtgcccgtactcccgaggtgaaatgcgcaagttggaggcttgctgtggaagcacacaacatctttggctttgagaccattcctgaagagtgcgtttaagcaacacaggagtatatccatagggaaaaatata

SEQ ID NO: 65097 - DNA, 111 bp, Glycine max
cattgtaaataagagacagatgtatatctataattagtttttaatgtgtaagtaatagaatcactttgtatcttcctcccttttttattctattaattaaattgatttccc

SEQ ID NO: 65098 - DNA, 188 bp, Glycine max
gaagtccaagagaaaacgaaaaatttgagagaaaaggaaaggcttaacaacgcacaaaatgtcctctaatccagtaatactgcagagtgagaacttgaccaagtatatactggagaccagcgtttacccacgagaagaagagactctcaaagacctaaggaatgccactgcaagccaatcctggggct

SEQ ID NO: 65099 - DNA, 107 bp, Glycine max
cgtccaagagaaaacgacagaagggggagagagagagaaggcaagatgtccacgagaggacgcggtggttcggcggggaacaagttccggatgtccctgggtctgcc

SEQ ID NO: 65100 - DNA, 81 bp, Glycine max
ggacaacattagacgttgaattgaattttgatggcgcaacaatcgtcacctccacggcggcaaactcctccgccatcgcag

SEQ ID NO: 65101 - DNA, 197 bp, Glycine max
ccctgcctgatgggtttctgcacggataaaacttttaacattacccatcttattattatactcacagtgatgacaattccttgccaaaagaaaaaaatataaaatggccgctcatagcaggctctctacaagatccaagcttaattacacgtgcatgctacgtcatagcgcctccaaaatgtcacccaaattcagtt

SEQ ID NO: 65102 - DNA, 368 bp, Glycine max
  unsure (1)..(368): unsure at all n locations
gacagcaaaaacaattaataaagatgagtttgaagaacaacatggtggtgctaaaggtgtgtttgttgcttcttttccttgtgggggttacagctgcacgcatggaactgagcttcttcaaaagtgatcagtcatcaagttatgatgatgatgagtattcaaaaccatgctgtgatctctgcatgtgcacacgctcaatgcctcctcaatgcagctgtgaagatattaggctgaattcatgccactcagattgtaagagctgtatgtgcacacgctcacagccaggacagtgtcgttgtcttgacaccaacgacttctgctacaaaccttgcaagtccagagatgactagaanaactaatagctctct

SEQ ID NO: 65103 - DNA, 225 bp, Glycine max
gacagcaacaacaattaatagagatgagtttgaagaacaacatggtggtgctaaaggtgtgtttgttgcttcttttccttgtgggggttacagctgcacgcatggaactgagcttcttcaaaagtgatcagtcatcatgttatgatgatgatgagtattcaaaaccatgctgtgatctctgcacgtgcacacgctcaatgcctcctcaatgcaactgtcaagata

SEQ ID NO: 65104 - DNA, 390 bp, Glycine max
ggttctagtgtgtgattgtttgttgttgtaactcgttcttcttcttttgttgttctgtgtttgtgtttgttttttctctcacctgaaaatgtcttgctgcggtggtaactgtggttgcggaagctcctgcaagtgcggcaacggctgcggatgctgcaagatgtacccagacttgagctacactgagtcaaccaccatcgagaccttggtcatgggagtggcacctgttaaggctcaatttgagggtgctgaaatgggtgtgcccgctgagaacgatggctgcaaatgtggaccaaactgctcctgcaacctctgcacttgcaattgatgttttgggagaacaagcttcaatcagagatagcccttaattatgaataatgattaactatt

SEQ ID NO: 65105 - DNA, 193 bp, Glycine max
aatgtggtcactctacaatgtctctcttcaacatcttccccttcttgtgaggggttttcatgggaaggggttgtcgcatccaacaacatgtaatgtcttcttcgtttaagccataaaaaaaaaatgaaaaagtatgtcagcaatccatcataataatcaattatatttaactaagagaataaaataacattac

SEQ ID NO: 65106 - DNA, 303 bp, Glycine max
gacagaagggggaactaaacaattcaattcaatctgcctcgatcatggagaggaaaacatttgggtttttgttcttgctcctccttgtcttagcttctggtaagatacatatttatagttccgtgttattcatttggggcacataattaaattatttttcacgtatggtatttgattttttaacttaatattaattgtttttttattaataccttaattaatttttttaatctaatattgatattattttttcatttatttaataattattttggggggaagataggaatatctttaccatat

SEQ ID NO: 65107 - DNA, 164 bp, Glycine max
gatcgagaactagttcaatatcctagtataccttaataaataatttaagatactatgatgagagcacggttcccattactgttgctgggacttgttttcctggcttcagtttctgtctcatttggcattgcttactgggaaaaagagaacccaaacacaacaag

SEQ ID NO: 65108 - DNA, 247 bp, Glycine max
gacagcaaaaacaattaataaagatgagtttgaagaacaacatggtggtgctaaaggtgtgtttgttgcttcttttccttgtgggggttacaactgcacgcatggaactgagcttcttcaaaagtgatcagtcatcaagttatgatgatgatgagtattcaaaaccatgctgtgatctctgcatgtgcacacgctcaatgcctcctcaatgcagttgtgaagatattaagctgaattcatgccactc

SEQ ID NO: 65109 - DNA, 277 bp, Glycine max
gacagcaaaaacaattaataaagatgagtttgaagaacaacatggtggtgctaaaggtgtgtttgttgcttcttttccttgtgggggttacagctgcacgcatggaactgagcttcttcaaaagtgatcagtcatcaagttatgatgatgatgagtattcacaaccatgctgtgatctctgcatgtgcacacgctcaatgcctcctcaatgcagctgtgaagatattaggctgaattcatgccactcagattgtaagagctgtatgtgcacacgctc

SEQ ID NO: 65110 - DNA, 349 bp, Glycine max
ggacagcaaaaacaattaataaagatgagtttgaagaacaacatggtggtgctaaaggtgtgtttgttgcttcttttccttgtgggggttacagctgcacgcatggaactgagcttcttcaaaagtgatcagtcatcaagttatgatgatgatgagtattcaaaaccatgctgtgatctctgcatgtgcacacgctcaatgcctcctcaatgtagctgtgaagatattaggctgaattcatgccactcagattgtaagagctgtatgtgcacacgctcacagccaggacagtgtcgttgtcttgacaccaacgacttctgctacaaaccttgcaagtccagagatgact

SEQ ID NO: 65111 - DNA, 107 bp, Glycine max
tatacttgacattttcatcaatctttcactcccaaatgatgctatttgtcaaaaaaataataacgtacgaccaatccttactttatggactaagaacatttctgtac

SEQ ID NO: 65112 - DNA, 321 bp, Glycine max
gattcacacaactaactaagaaagtcttccatagccccccaaaaatgaagagcaccatcttctttgctctctttctcttttgtgccttcaccacctcatacctaccttcagccatcgctgatttcgtgctcgataatgaaggtaaccctcttgaaaatggtggcacatattatatcttgtcagacataacagcatttggtggaataagagcagccccaacgggaaatgaaagatgccctctcactgtggtgcaatctcgcaatgagctccacaaagggattggaacaatcatctcgtccccatatcgaatccgtgttatcg

SEQ ID NO: 65113 - DNA, 69 bp, Glycine max
gagtgttggtacatattaacacttcatacacaacacaacacaacacaacaccacgacgctattcaacgc

SEQ ID NO: 65114 - DNA, 312 bp, Glycine max
  unsure (1)..(312): unsure at all n locations
gacagcanaaacaattaataaagatgagtttgaagaacaacatggtggtgctaaaggtgtgtttgttgcttcttttccttgtgggggttacagctgcacgcatggaactgagcttcttcaaaagtgatcagtcatcaagttatgatgatgatgagtattcaaaaccatgctgtgatctctgcatgtgcacacgctcaatgcctcctcaatgcagctgtgaagatattaggctgaattcatgccactcagattgttagagctgtatgtgcacacgctcacagccaggacagtgtccttgtcntgacaccaacg

SEQ ID NO: 65115 - DNA, 407 bp, Glycine max
gattcacacaactaactaagaaagtcttccatagccccccaaaaatgaagagcaccatcttctttgctctctttctcttttgtgccttcaccacctcatacctaccttcagccatcgctgatttcgtgctcgataatgaaggtaaccctcttgaaaatggtggcacatattatatcttgtcagacataacagcatttggtggaataagagcatgcccaacgggaaatgaaagatgccctctcactgtggtgcaatctcgcaatgagctcgacaaagggattggaacaatcatctcgtcaccatatcgaatccgttttatcgccgaacgccatcgtttgagccttaagttcgattcatttgcagttataatgctgtgtgttgggattcctacggagtggtccgttgtg

SEQ ID NO: 65116 - DNA, 169 bp, Glycine max
acataaagggacagcaaatacacttactaaagatgagtttgacgaacaacatggtggtgctaaacgtgtgtttgttgcttcttttccttgtgggggttacagctgcacgcatggaactgagcttcttcaaaagtgatcagtcatcatcttatgatgatgatgactattc

SEQ ID NO: 65117 - DNA, 412 bp, Glycine max
  unsure (1)..(412): unsure at all n locations
gattcacacaactaactaagaaagtcttccatagccccccaaaaatgaagagcaccatcttctttgctctctttctcttttgtgccttcaccacctcatacctaccttcagccatcgctgatttcgtgctcgataatgaaggtaaccctcttgaaaatggtggcacatattatatcttgtcagacataacagcatttggtggaataagagcagccccaacgggaaatgaaagatgccctctcactgtggtgcaatctcgcaatgagctcgacaaagggattggaacaatcatctcgtcnccatatcgaatccgttttatcgccgaaggccatcctttgagccttaagttcgattcatttgcagttataatgctgtgtgttggaattcctaccgagtggtctgttgtggagga

SEQ ID NO: 65118 - DNA, 127 bp, Glycine max
gacgataaacatcacgcaggccaagcaaaaaaaaaaaaaaaaaaaaaaagcggacacccgacacgctacaggatcacatcttacgtacgcctacatgctacgtcatagatcttctaaactgtcacca

SEQ ID NO: 65119 - DNA, 57 bp, Glycine max
gcgagaaaaattagtctatgacctaatgggttgaaagatactcataatctctaatcc

SEQ ID NO: 65120 - DNA, 399 bp, Glycine max
gatgattaatcaccagaccaaatgtgcctggtcaattaggggaccgaatttcataactgagtgctttaggggaagaagaagcgaaacacagtgtcagtatctgagttttttcttcaaactcaaaccctaacaaacaaaaaccatgtatcgttttttctcttccattcgccatggccgtggatcttccctcgcatctcttctcgcgccgaaaactgcacttccattcaacgccgctctacgaactcgccgtttacctcaaaacgaccgtacacttcagattcctctgcctttatttccagcgtttccgaaatgggaaaaaaaatttagtttgattgcgtcctttccatgtgtggatttcattgctctaaactggtggaatacaaaatcgtgtaggtttgt

SEQ ID NO: 65121 - DNA, 152 bp, Glycine max
aagacgacagaaagggatagcacggggaattcagaaagatgagtttgaagaacaatatggtggtgctaaccgtgtgtttgttgcgtcctttccctgtcgcggtgacaactggacgcatggaactgaccttcttcaaacgtgatcagtcatca

SEQ ID NO: 65122 - DNA, 311 bp, Glycine max
gacagcaaaaacaattaataaagatgagtttgaagaacaacacggtggtgctaaaggtgtgtttgttgcctcttttccttgtgggggttacagctgcacgcatggaactgagcttcttcaaaagtgatcagtcatcaagttatgatgatgatgagtattcaaaaccatgctgtgatctctgcatgtgcacacgctcaatgcctcctcaatgcagctgtgaagatattacgctgaattcatgccactcacattgtaacagctgtatgtgcacacgctcacaggcacgacagtgtccttgtcttgacaccaac

SEQ ID NO: 65123 - DNA, 113 bp, Glycine max
tagtggtccacattgtgtttcgtgcatttttattctcgttttgtttactttttataccccctctagctaaatccttggaaaactaattgtagatcagtttaacatcatcttgt

SEQ ID NO: 65124 - DNA, 133 bp, Glycine max
gtgcattacattaatataaagaacggtttggctaacaaatgtatttaacacattggttaaaaaattaaaaaaatatttattgtgaaaattatagaaaaatgtaaaaaaaatcacaaacattataatgttttac

SEQ ID NO: 65125 - DNA, 349 bp, Glycine max
ggcacaagtgagtttgttgatcgagataactagaaacagtgtgatgaaaatgaaggtccttgttttcttcgttgctacaattttggtagcatggcaatgccatgcgtacgatatgttccctctccgaatgaacactggctatggtgcccgtactccggaggtgaaatgcgcaagttggaggcttgctgtggaagcacacaacatctttggctttgagaccattcctgaagagtgcgttgaagcaacaaaggaatacatccatggcgaacaatgtagatcagacttcaaaacagttaaccaacaagcttacttttatgccagagacctcgaagtccatcccaaggacaca

SEQ ID NO: 65126 - DNA, 255 bp, Glycine max
ttttggggagaaaaatggcgaagctgatgtgtatattgtatgtgtcatatccctatgttggtagcaacaggactaattaatgtagcaaatcacttggaagatcatgtatctagtttctcaactggcttatctgagtgtggataaccattatcacgccttatgagtaggacaacgagtactgtttgtgatgcctgtccatggtttaagaaatccgtccttacacaacttgtgtgctttgttattcaattctcatca

SEQ ID NO: 65127 - DNA, 288 bp, Glycine max
gacagcaaaaacaattaataaagatgagtttgaagaacaacatggtggtgctaaaggtgtgtttgttgcttcttttccttgtgggggttacagctgcacgcatggaactgagcttcttcaaaagtgatcagtcatcaagttatgatgatgatgagtattcaaaaccatgctgtgatctctgcatgtgcacacgctcaatgcctcctcaatgcagctgtgaagatattaggctgaattcatgccactcagattgttagagctgtatgtgcacacgctcacagccaggac

SEQ ID NO: 65128 - DNA, 326 bp, Glycine max
gacagcaaaaacaattaataaagatgagtttgaagaacaacatggtggtgctaaaggtgtgtttgttgcttcttttccttgtgggggttacagctgcacgcatggaactgagcttcttcaaaagtgatcagtcatcaagttatgatgatgatgagtattcaaaaccatgctgtgatctctgcatgtgcacacgctcaatgcctcctcaatgcagctgtgaagatattaggctgaattcatgccactcagattgtaagagctgtatgtgcacacgctcacagccaggacagtgtctttgtctccgacacaacgactttctgcacaaa

SEQ ID NO: 65129 - DNA, 374 bp, Glycine max
gacagcaaaaacaattaataaagatgagtttgaagaacaacatggtggtgctaaaggtgtgtttgttgcttcttttccttgtggggttacagctgcacgcatggaactgagcttcttcaaaagtgatcagtcatcaagttatgatgatgatgagtattcaaaaccatgctgtgatctctgcatgtgcacacgctcaatgcctcctcaatgcagctgtgaagatattaggctgaattcatgccactcagattgtaagagctgtatgtgcacacgctcacagccaggacagtgtccttgtcttgacaccaacgacttctgctacaaaccttgcaagttcacaagatgactacaaaaactaatacctctctcaaaat

SEQ ID NO: 65130 - DNA, 226 bp, Glycine max
ccacgcccccgtacggcgggaaaagacgaccacaagggacagcaagatctggttgtcctcatcagtttgaatggaaacgtggcggtgcgaaacgcgtgtgttgttgcctccttcccatgtgaaggtcggaacggggcacttggggctgaggctcctcatgggtgatcactcctcatgttatgcagatgagtcgtattcagaatcaagctgtgatatccgcatgtgc

SEQ ID NO: 65131 - DNA, 257 bp, Glycine max
gactagcaaccccactctacaatggccaagcccgctgccatccacacaccaatactgacagaagcagattacgagaggtatttcgctgatttgagtcatccaatgcatggagagaaaacaaagaataaagagaaaaagaaataaaaatcctcctcctcctgatgtttcttgtttatccgtttaccttgctcattggcatttatgtatatacctttttgtacaattctttaaacattacatgattttgagaaaggatg

SEQ ID NO: 65132 - DNA, 211 bp, Glycine max
aacccaagatttggtgcagagaagagactagttccctctggaccaaacccacttcacaactgattatactggtttcaccaccattagcaccctttggtatatctatttaccttaattccagaacgggcaacaacaactcaaaaaatcatttccttcacaaaaccctttggaattagttcaaacgttttgcttccttctcatggtcaaactt

SEQ ID NO: 65133 - DNA, 94 bp, Glycine max
atataattaactagcggacgtcctaaaggatccacgcttacgtacacgtgcatgctatgtgatcgctctcccatatgggcagccacgttcactt

SEQ ID NO: 65134 - DNA, 338 bp, Glycine max
tactgctgccaaaagactacagaatgcggcatgaataagaaacaatctcaaaatccctttcttgtgttctatgatatattgccttcacaccatagtctgagtcctctgagactttccttcaatccttcaccttctgtctctctaagcgcaaaacctcatattgtttgtggcggctaaggatgtcagggaaaggggctaacgggttgatcacaagcataaactccggcgccaataataaatactatgacatgaagaaacccatctcgcgttcttcacattccggccttcacttcccaatttgccgtatccaccggcttttgatgtcaatgacaaccgcc

SEQ ID NO: 65135 - DNA, 246 bp, Glycine max
gaaatatgcaacgtgtcaattatgacacgtgtcgagctatggtgcatccagcgtattataactacttgctcgcatggtcacgtcatgctcgtgttctgttcggacggtggggatgactttattcgggagtgggagctgtatcattgtgacatagtcttatttttttttttttagcgtttctctctgtacttttttttataattttaatttgagtatgatgtttttcaccttagaaaaaaaaagaga

SEQ ID NO: 65136 - DNA, 284 bp, Glycine max
ggaaccagaaaaggtgaatgcaaatgcattaggggcagttttgtttcttgatcaatgatcacgagtcatttcctgcccaaagaaaaccaggaaggagcagcgcaaccccacaatgccaccacatattttcacccttccatcgtcagaaagtcatgagatcatttaccaaacaaggaacggagaacactttgtctggaacaaaactaattgcagtagtggtccatcgatccttcacgaatattatgagggaaagcctacgatgggatttgcaagtggttaatgtg

SEQ ID NO: 65137 - DNA, 202 bp, Glycine max
cggggagaacaagaacaagaaactaggtgaggttgcgctccatatgatcggaacatacgtccacttgcatgcggcatcacatctcatcaatagagtcacctagattcaactcagcgtccgtcgtttgacaccttctctgcaggtaacattccagagttccacaacattcaccacttgcaacaaatccacatttcgccaactg

SEQ ID NO: 65138 - DNA, 316 bp, Glycine max
gacagcaaaaacaattaataaagatgagtttgaagaacaacatggtggtgctaaaggtgtgtttgttgcttcttttccttgtgggggttacagctgcacgcatggaactgagcttcttcaaaagtgatcagtcatcaagttatgatgatgagtattcaaaaccatgctgtgatctctgcatgtgcacacgctcaatgcctcctcaatgcagctgtgaagatattaggctgaattcatgccactcagattgtaagagctgtatgtgcacacgctcacagccaggacagtgtcgttgtcttgacaccaacgacttctg

SEQ ID NO: 65139 - DNA, 135 bp, Glycine max
gagaagaaaaaggaaaagaaggataaagatgaagaaacagacacattaaaggaaaagggaaaaaatgatggaggtgaggatgatgaaggaaataagaaaaagaaaaaggataagaaggagaaagagaaggatcac

SEQ ID NO: 65140 - DNA, 120 bp, Glycine max
gaaaaacagaacttaatattaatttatgaataacactaggagaaaatgaataaagtaagagaaaaccctccaaggaaaaaggaaagaacgggggagaaaagcggccgcccgacaagatgc

SEQ ID NO: 65141 - DNA, 197 bp, Glycine max
gacagcatcgccaattaatcccaatcactttgaagcacagcatggtggtgcaataggtgcgtgtgcagcatcgtctccgtgtggaggctatcccgtcatacatgtgactgagtttcttcaaatttgattcttcatccagttagctacatgatcagtatctcatcagatgctctgctctctacaggtgctacacatcc

SEQ ID NO: 65142 - DNA, 644 bp, Glycine max
gggggggtgggggggggaggggagggggggggggtggaggggggggggggggggggggggggggggggggggggggggggctccgtcggggggggtggggggagtgcgggggggcgggtagggggagggagggggggaggggagggaggggggggggaggggagggagggggggaggggggcgggggggagggggaggagaggaggggggggggggggggagggggggcggggggggagggggggggggggggggggggggaggggggggggggggggaggggggagggaggagggggggggagggggggggggggggaggagggagggagggggggggggggggggggggggggggggggggggggggggggggggggggggggggggggcggggggaggggggggggcgggggggaggtgggggggggggcggggggggggagggggggagggggggggagggggtggggggggggggggggtggggggggggggtggggggagggggaggggggggggggggggggggggggggggggtgggggggagggggaggggggggaggggggaggggggggggggggggggggggggggggggggggggggggggaggggtggggggaggtgggtgggggggggg

SEQ ID NO: 65143 - DNA, 117 bp, Glycine max
gatgaaagtccaaatccaaaggtcttttcaaggaagaagaaaaatgagaaaggaggaaagcagaagattgatgatagtgatgaaagtccaaatccaaaggtattttcaaggaagaag

SEQ ID NO: 65144 - DNA, 394 bp, Glycine max
ggcactttctagaaaccaaagcaaagttccctgtttcactttctgttctgttttggatatttctcaacataaccaaaccaaagcgttttactattttgttttctagtttcctccatctccctcccatactcaccttctctctggtcagttttccttcttttccacctttttcagtttttattttcaaacaaaacaaacacgccaacacgggtttctgttacaagagttttttaaaaaaagaaaaaaaaaaatggaaaataaatttattgttcccttgttttctttctccatatgcttgtctttcgtttcttttagtttttagcgtgtccttgtttctggacttcgttttgttggtttaaggttaaagcctcaacgtgttgtccttccctaaatg

SEQ ID NO: 65145 - DNA, 403 bp, Glycine max
caatgttcagcagacaatatggcctcgagctgctgcagctgcagaacgcttatggagtcagagagattctacctcacaaaatattaccttaattgcattgccccggttgctaaacttcagatgtctattgaatagactaggggttccagctgctcctgtcacaaattattatgctagaagggcacctgttggtccagggtcatgttatgaccaataatccttgtaatgattcacatgttcaggtgtaacctggtatgcaagtaactgatgtttcatctactttacctggttgatgagctagaatcattatttgagctcaactccatggcagatatggttgttgatgtcagaactctttaatgaactggcaacagccatgttgcaatgtaatttagtgttgagt

SEQ ID NO: 65146 - DNA, 279 bp, Glycine max
cgggacagcaaaaacaattaatagagattagtttgaagaacaacatggtggtgcgaaaggtgtgtttgttgcttcctttccttgtgggggttacagctgcacgcatggaactgagcttcctcaaaagtgatcagtcatcaagttatgatgacgatgagtattcaaaaccatgctgtgatctctgcatgtgcacacgctcaatgcctcctcaatgcatctgtgaagatattaagctgaattcatgccactcagattgtaagagctgtatgtacacacact

SEQ ID NO: 65147 - DNA, 386 bp, Glycine max
gacagcaaaaacaattaataaagatgagtttgaagaacaacatggtggtgctaaaggtgtgtttgttgcttcttttccttgtgggggttacagctgcacgcatggaactgagcttcttcaaaagtgatcagtcatcaagttatgatgatgatgagtattcaaaaccatgctgtgatctctgcatgtgcacacgctcaatgcctcctcaatgcagctgtgaagatattaggctgaattcatgccactcagattgtaagagctgtatgtgcacacgctcacagccaggacagtgtcgttgtcttgacaccaacgacttctgctacaaaccttgcaagtccagagatgactagaaaaactaatagctctctcaaatggacgaagcccct

SEQ ID NO: 65148 - DNA, 325 bp, Glycine max
gacagcaaagacaattaataaagatgagtttgaagaacaacatggtggtgctaaaggtgtgtttgttgcttcttttccttgtgggggttacagctgcacgcatggaactgagcttcttcaaaagtgatcagtcatcaagttatgatgatgatgagtattcaaaaccatgctgtgatctctgcatgtgcacacgctcaatgcctcctcaatgcagctgtgaagatattacgctgaattcatgccactcagattgtaagagctgtatgtgcacacgctcacatccaagacagtgtcgttgtcctgacatcaactacttctgctacaa

SEQ ID NO: 65149 - DNA, 279 bp, Glycine max
gacagcaaaaacaattaataaagatgagtttgaagaacaacatggtggtgctaaaggtgtgtttgttgcgtcttttccttgtgggggttacagctgcacgcatggaactgagcttcttcaaaagtgatcagtcatcaagttatgatgatgatgagtattcaaaaccatgctgtgatctctgcatgtgcagaggctgaatgcctcgtcaatgcagctgtgaggatagtacgctgaattcatgccactcagattgttagagcggtatgttgacacgctcac

SEQ ID NO: 65150 - DNA, 178 bp, Glycine max
ccaggtacacgtacgaatacgaatcgctaccgctgcaacaaacaacggaaaggggatatagttttcattagactatcatcgttgttgagcaaaaaacattatcatactataggtgtattagttgctactctaccttgtggaagttaccactacatccatggccctgagcatcggttta

SEQ ID NO: 65151 - DNA, 138 bp, Glycine max
gaacacttggtttagcaagagaaaaaataccaaccatggcaaccatttctactgatcaaccaagaggatcctacgcctatggaacctcctatggagcaccctatggaaccacctattagaccaacaagaacattaaaa

SEQ ID NO: 65152 - DNA, 232 bp, Glycine max
gacagcaaaaacaattaataaagatgagtttgacgaacaacatggtggtgctaaaggtgtgtttgttgcttcttttccttgtgggggttacagctgcacgcatggaactgagcttcttcaaaagtgctcagtcatcacgttatgatgatgatgagtactcaaaaccatgctgtgatctctgcatgtgcacacgctcaatgcctcctcaatgcagctgtgaagatattaggct

SEQ ID NO: 65153 - DNA, 54 bp, Glycine max
cccgggtccacccacgcatccgaggacgcgtgggcggcagaagacgacagaagg

SEQ ID NO: 65154 - DNA, 164 bp, Glycine max
tgatgctcataaaacaccacagataggtacagttgcaacataattaaaaatctgtatgatgcttaaatatacaccctgtgtcctgctgctactaaacaacacaaaggtacagtcacgtttcaattacatccaggtcaactattagatgttaatatcattcacac

SEQ ID NO: 65155 - DNA, 177 bp, Glycine max
tgggagtcacataacaatcgataaatgtctgctgtagcgccacaatggtggagatcaacatctggtttgcgctccttctcctttgtgccgtctacacctcataccatggattcagccattcctgaattcgtgctctcttctgattgtaaccgtcatgagtatggtggcacatactat

SEQ ID NO: 65156 - DNA, 332 bp, Glycine max
ggttcaccaattaagtctttgaagagaaagagtaattggaaaatggcttcagagagtgtttcagctgttgccctaattctggtctcccttaacctccttttcttctccatggttagctccaatcccctaatgacccctgcccttgtctcatcaataatatctaacagaaagtgccccgagttacatgtgtgcgccactattttgcctcgccatcacaagcgagacaaaggttgctgccccctcatcgccggtctgagttgatcgggaatgcgccgtgtgcctctgcgccgtactcaagctcgacctccgtcgaatgatctccattccccttg

SEQ ID NO: 65157 - DNA, 575 bp, Glycine max
  unsure (1)..(575): unsure at all n locations
ggggggggagggagatgaggggggggaggggaggggggggggggaaggggggagggggaggggggtgactacgtcgtgggggtaaggnggggcggggagggggaggaggnagggggggggggggggggggggggggggaggggggagaggggggggggagggggggggggggggggggggggaggaggggggggggggaggagggggggggggggggggggggggggggggggggaggggggggaggggagggatgggggggggggggggggggggggggaggggggggggggaggggggggaggggggggggggggggggggggggaggagggggggggggggggagaggaggggggggaggggagaggggggggggggagggggagggggggggggggggggagggaggggggggggggaggagggggggggagggggaggggaggaggggggggggagggggggggagggggggaggggaggggggagggggggggggaggaggggggaggggagggaggggagagggggggggggggaggggggagggggggggggagggggggggggggg

SEQ ID NO: 65158 - DNA, 172 bp, Glycine max
gattcacacaactaactaataaagtcttccatagccgcccaaaaatgaagagcagcagcttcttggcgctctttctcttttgtggcgtcggcacctcgtacctaccttcagccatcgctgatttcgtgctcgataatgaatgtaatcctcttggaaatggtggcacacatta

SEQ ID NO: 65159 - DNA, 202 bp, Glycine max
ccaacggtcccgctcctacaagactacataagggtacagctgccatcataccacatcaaggtactgatgcaagatcactacactagggttcggttgcgagacgactacactaggataacgctgccataacgcgattgacgtcgtcttgctgcgaaaagaccattcaccggcgcggctgctagaaaacaacaccacggtactg

SEQ ID NO: 65160 - DNA, 168 bp, Glycine max
aatggagtagagacatgaggggacagcagagacaattaataaagatgagtttgatgaacaacatggtggtgctgaaggtgtgtttgagtgttcttttccttgtggtggttagagctgctggcatggaactgagcttcttcacaagtgatcagtcatcacgttatgatg

SEQ ID NO: 65161 - DNA, 164 bp, Glycine max
gacagcataaacaattaatacagatcactttgttgataaagatagtggtgcgaaaagtatgtttagttgttcttttcctatgattgcgttagatcatgacacatagaactcagcttcagcaaaagtgatcattcatcaatttataatgatgaggattattcaaa

SEQ ID NO: 65162 - DNA, 246 bp, Glycine max
gacagcaaaaacagttaataaagatgagtttgaagaacaacatggtggtgctaaaggtgtgtttgttgcttcttttccttgtgggggttacagctgcacgcatggaactgagcttcttcaaaagtgatcagtcatcaagttatgatgatgatgagtagtcaaaaccatgctgtggtctggggagtgtcacacgctcaatgccgcctgaatgcagctgtcgatgtattaggctgaagtcatgccact

SEQ ID NO: 65163 - DNA, 287 bp, Glycine max
ggggacttttatagcctgtgcggatctcagcaatgtctctgaaactcacgacgcttatgcagaccccttgggcttcaacggtcaatgagcgtccccatgtaaaggcttggtgggaagatatctcttctaggcctgcgttcactaaggttgggggaggaatgacgtttgggcaggatgaggaagaatgactagtattttgtgacgttcaattggtacggaatttgttgcagtgtctagtgcgagcaaggactggaatctagtgatgggtgttccggaaaacttgtttc

SEQ ID NO: 65164 - DNA, 102 bp, Glycine max
gacagcacaaacaattaatgaagatgagtttggggaacaacatggtggtgctaaatgtgtcgttcgtgcttcctttccttgggggggttacagctgcacgca

SEQ ID NO: 65165 - DNA, 217 bp, Glycine max
gacagcaaaaacaattaataaagatgagtttgaggaacaacatggtggtgctaaaggtgtgtttggtgcttcttttccttgtgggggttacagctgcacgcgtggaactgagcttcttcaaaagtgatcagtcgtcaagttatgagggggaggagtagtcaaaaccatgctgtgatctctgcatgtgcacacgctgaatgcctcctcagtgcaactg

SEQ ID NO: 65166 - DNA, 146 bp, Glycine max
gacggcaaaaacaattaataaagatgagtttgaagaacaacatggtggtgctaaaggtgtgtttgttgcttcgtttccttgtggcggttacagctgcacgcatggaactgagcttcttcaaaagtgatcagtcatcatgttatgat

SEQ ID NO: 65167 - DNA, 247 bp, Glycine max
gacagcaaaaacaattaataaagatgagtttgaagaacaacatggtggtgctaaaggtgtgtttagtgcctcttttccttgtgggggttacagctgcacgcatggaactgagcttcttcaaaagtgatcagtcatcaagttatgatgatggtgagtattcaagagcatgctgtgatgggggcgggggcgcgcgggcaatgcctcctgaatgcagcttggaagagattgagctgaattcatgccactc

SEQ ID NO: 65168 - DNA, 253 bp, Glycine max
tggaacctttgggctgatttatgtgcttgcatggtcgtgagtagatgatagaacgccacctatataatcaatcaacaaagctccttgcagttttttaaaatcgaagagtattactcctctcgtctctccctctccccgagttcctattattctacattcattcctcattactgccgaccctttctctgactacgaatgcaatttctccgtaaacggcagtttacaccacacctcgctatataccatacttccc

SEQ ID NO: 65169 - DNA, 257 bp, Glycine max
agtgctgctggtcgtgagaagatgatagaaggggcccctactaatatactgccaattaaaaaaagacgagttggacaaaaaaagtggatgtgctcagaggactgtggttcactcatatgacttaagtccatgcatgtgcgtacgtgatgctacactcacctcacagagcgattcaaacctaacatatcggttgacgccacataatgctgtgatcgggaaaatatcggtgccatttaatccaactgctccgtagtata

SEQ ID NO: 65170 - DNA, 267 bp, Glycine max
ttggggtgattgatgtgcttgcatggtcgagataagtcatagagccgctcgtcgtgtgaagatgatcaaacgcgcagtgggcgtacacaagatgatagaggggcgtcgtccttacaagatgatagaagggggaaaaataaagttattcgtgtcaaatacaacctaaaaacgactaactactgtggctctctcacaggacttaagtccattcatgtgcgtacgtcatgctccagtctctttacagcgctattcaaacctaacctatcg

SEQ ID NO: 65171 - DNA, 329 bp, Glycine max
tggatggaacctttgggctgatttatgtgcttgcatggtcgtgagaagatgatagaagcgcgaagaaagaaagtgagaaaataagaagcagggagaagaacggagagaacggaggaaaaggtaaaagtcgagtagaagaagacaggcacgattgagatccggccgaagaagtattgctcctcccataacggagttatcaggtatttctccaccaccagtacctgtgacggtattactaatatcgtccttcctaaaatacggtctgtataggaccatccgcctgcctgggtgcccgctttacccgcggtcagcgcgtcgacaaaagtgcg

SEQ ID NO: 65172 - DNA, 292 bp, Glycine max
tccctgcccgccggcgtcctctcagccttccaaatctctcgccttaaaacttccagaaaaggcaaaaaacccacaaaaaaaaaaaaaccaaaaacggcggccgcggccctttaagaaaacgccgcggtaccggccctctgcattggcagggagccgtaatgccacagaaaaggctgctgttaagccgcgggacgtacattgcatagacccaagaccggggagaagatccgtccggacgccctcgacgaaccggaagcctcggccaccagcctctagaaaggaaaaaggacgt

SEQ ID NO: 65173 - DNA, 371 bp, Glycine max
tggaacctttgggctgatttatgtgcttgcatggtcgtgagaagatgaagaagggtatggtcgtgagaagatgatagaagggcatggtcgggagaagatgatagaagggcatggtcgtgagaagatgatagaagggcatggtcgtgagaagatgatagaagggcatggtcgtgagaagatgatagagggaccatagccgttcacgttggatcacgtccgccccgctcccatactcccgttgagcgtctctaactaaccattcctcctgggagaatcatcgaaatcgaagaataagatattactactcaaccgcaatacaatcatctacccctgtcaccgcacgctccttttgctaagaacaaactactccc

SEQ ID NO: 65174 - DNA, 53 bp, Glycine max
  unsure (1)..(53): unsure at all n locations
tggaacntttgggctgattgatgtgcttgcatggtcgtgagaagatgatagaa

SEQ ID NO: 65175 - DNA, 389 bp, Glycine max
  unsure (1)..(389): unsure at all n locations
ggaantttgggctgattgatgtgcttgcatggtcgtgagaagatgatagaaggccgtataaaataaagtcaaacctaattaatagtagagtgtatacccctaccctggacgacattttctcgtgtagaagattctagaaaacaccctgacggtgggaatttcaaactctatgttctttattggcgttggtaggatctcttggttcttgcctaggactctaacctgggtacctatggtgatggtgactgacctttggtgagtggtgagttctcacgaggcgccttggactaagtagaatgtccttgtggcggagacaaagctggtacattcgaattccgtgaaggcgcactatttcgacctggtgtcttgctcgctggaactggatgaat

SEQ ID NO: 65176 - DNA, 374 bp, Glycine max
tggttggaatttggctgtttagtgctgcaggtcggaagatgaagagggctggtcgtgagagatgatgagggctggtcgtgagagagatgatagagggcatggtcgtgagaagatgatagaaggggcttggatcatcacgtgaactaaagcagaagaacgactaggaataataaaagaacaaattaaaaaacaagtcccgcaagaaccataaagacaatatattcgccacgacaaaaactgccgtccccttcgagacaaaaactaaagtcccagctccgcttgggtccccacgtgaaataaagcagcagaaggacgaggaatatttaaataacaaattaaaaaaaaccaagtcccgaaagaatcataaagaaaat

SEQ ID NO: 65177 - DNA, 450 bp, Glycine max
  unsure (1)..(450): unsure at all n locations
tggttggaacctttgggctgatttatgtgcttgcagtcgtgagaagatgatagaaggggtcttaatccacgaagataaggacggcgatcggacgtccgccggagacgccttacggaatacgcccgcacttcttcgtaagaggtcgaagacaactaaaggactagaagtaaagggcccgggccgcccgcgattaataaaatccataaaagtaaaagtaagacagctacgagactcctagagataaacatttcccgcgccgcgtaagtaagcatacggcgccccacgagaatctacacacagcccaccacaggaaaacagacgaacacacacacatatgccacccccctcccaccaaccctaatagaggtggtcccgaggctcgtccctcaaaccacacgcaacaccttctctaaaaagaaagaggaaggaaacaccaggaaagccnacctt

SEQ ID NO: 65178 - DNA, 417 bp, Glycine max
tggttggactttggctgtttatgtgctgctggtcgtgagaagatgatagaaggggatatctaaaatgaaataaagaagaaaaaaaaaatctaaatattcctaagaatccgcactccctcccgccagcacccgccatcataaccccatacctcccctactctcatacaccctaccagctacggtattctaagtagcccttcctaagcttcctgttgccgtctccaccgcggtgtcccctcctcttgttcttgtctcggatccagccctggggtagctgttggcgttggtgttggtgttggtattagacgttggagtagtcggacttgcgctgagtctggctgttacgaccggagtccttgccgcgaccctaccgtctgttactcctaagtatcgaaaaacaactcgacgacggactga

SEQ ID NO: 65179 - DNA, 403 bp, Glycine max
ggttggaacctttgggctgatttatgtgcttgcatggtcgtgagaagatgatagaagggggcctcgagaccgagtctacgccgggcgcgggcgagaaagaatctataacagagaataataatataaccttacggtcgaccccgatctaatccacagcttcttcctcttctcccgtgtcttctccccctcctattttttctttaccgggctttgatgattattattataataattccgctattgttgatatgtttttcttcttgataattctccttagcgctcctccccctgatgacacctaaacctagtagaccgatcttttgcccatcaactatgacctactgtttatctacttattaattattccgtagggcgggtagaattcaccaccaaaaggtgaaac

SEQ ID NO: 65180 - DNA, 399 bp, Glycine max
ggttggaacttggctgattagtgctgcatggtcgtgagagatgataggagggggaccgtcaaataaaaagaagtacgctcaactactagtatgcagcctagattctgttattgaaatcacctggccctttatcaatagagtaggaggaaccgaacctagacgtagaaagaaaacatgaggccggagaggatagaaaacctagacgttatcatcgtaaatgagcacctggaaatctctaggttccagggggttattaaaatgtttataagaaagagtgctagagggtgaggtgcccttaaacttatatctacagatgtcttaccgcagtattactcctcgtcctcgcctctaatctatacgtaacaacaagactagcattcctagccataggcatcatgt

SEQ ID NO: 65181 - DNA, 83 bp, Glycine max
tggaacctttgggctgatttatgtgcttgcatcgtcctcacaagatcatagaagccccatactaaaaataaccaacaaacacg

SEQ ID NO: 65182 - DNA, 459 bp, Glycine max
tggttggaacctttgggctgatttatgtgcttgcatggtcgtgagaagatgatagaaggggagagcgagaaagagagagagagagagagaaatcgagagaaacctgtaaatttcaaccctggaaagactggtgacggtcgttcttaaggactgtgagaatcctgctcatactgttaagtctgttgaataggttgagtgacatgaagagacggcggaactaacgaagaatgccgtgaactctgatgccgaatcgatcgcggaggagtggaacccatccctcgccgggcataagaacgcgaccggcgtctggagagtactgcggaggacttcgctccttaccgagtaaaaggaagaaataaaagggaatgagccgaacgtgaagtggaccaaagagcataggtagaaagccgaaccggagtccctaaatactcgcaacgacgccacgatagcgaacgacga

SEQ ID NO: 65183 - DNA, 326 bp, Glycine max
tggaacctttgggctgatttatgtgcttgcatggtcgtgagatgatgatagaacgccctcgtcgtaagatgatgatagatggtcgtggtcgtcagatgatgatagagggtcgtcgtcgtaagatgataatagaaggtcgtcgtcgtcagatgataatagaacgtcgtcgtcgtaagatgatgatacagcgtcatcgtcgtaagatgataatagaaggtcgtcgtcgtgagatgatgatagaacgtcatcgtcgtgagatgattatagaaggggccacagcgacactcccaacaaccagcgccaagaatcgtcatcaacctgcaaaa

SEQ ID NO: 65184 - DNA, 445 bp, Glycine max
  unsure (1)..(445): unsure at all n locations
gttggaacctttgggctgatttatgtgcttgcatggtcgtgagagtgattagagggggatagtananataaccaacaaagacgagcccgaagagtaatacggcggcgtcaaaggcgcgcccgccgtcctccccttccgcgggggccatagtcgtatgtacggaatcgagtcctcctaaaagcgactagctactaagccacgacgacgacgagcacctaaaattacgtcgcgactctcgtacgcgtatatgtctaacgttcttctaacgtagtcgcgaagacaccaggtcgaacctacgttatctagaccgcaagagtcgcacgcgtatatgtctatagttaggatagcgctgccgctccgatattaatgatcctcgtcataaattccgtaagcttagagacgatcagaaaaatcaacagtctctctaaacggatgaagttttccc

SEQ ID NO: 65185 - DNA, 367 bp, Glycine max
  unsure (1)..(367): unsure at all n locations
tggaantttgggctgatttatgtgcttgtttatctgcttgtttatctgcttgcatcgccgtcagaatgatagaagggcatggtcggcaggggatcatagaggggcagggtgcgtgacaagatcatagaagggcatcgtcgtcagaagatgatagaaggaataagaatcggtaaaaagagagtaagaaaggaggtgctcagaacaagcactcggaaagggagaagaggaggaacaatatgtacgaagagggtatgaaaggagaaaagaagaagaagaaatagtatcgagggaataagaatacgaataggtcgaaagatagtcaataaaagacagaaaagaggagataaaaggacgaataccgccaacg

SEQ ID NO: 65186 - DNA, 392 bp, Glycine max
  unsure (1)..(392): unsure at all n locations
tttgggctgatttatgtgcttgcatggtcgtgagaagttaataaaaggggccccgccggacgcaaaattacgggacgacgaaggcgatacgaaaaagtccgaagaactagcgagactcgcctagacggaaggccgtcccggggcgtacttaaatccgccttcgccggacatggcaccaagaaatcgtanaccacgtccatcaccgcggacgattcagccctcgccgacatctccaccgaggaatactctatagccgagtttactaacgaacacgcttagagccgcgataccgcggttcctaacaaaacacaaatcataactggcgggacccggagactacggtaatcgggagaaccgtaagccccagaaatcacgcctcagggggaatcatt

SEQ ID NO: 65187 - DNA, 407 bp, Glycine max
  unsure (1)..(407): unsure at all n locations
gttggaacctttgggctgatttatgtgcttgtttatgtgcntgctggtcgtgagagatgataaaggctggtcgtgagaagatgatagaggggcatggtcggagaagaatgatagaaggcatggtcgtgagaagatgatagaagggcatggtcgtgagaagatgatagaaggggaagataaaaacaaaaccncccanaaaaaaaaaaaaaaaaaaaaaaaaaaagtggttgtctcagaggacttaagtccatgcatgtgcgtacgtgatgctacagtctcctcacagcgctattcaaacctaacctatcggttgctgccccataatgctgcgatcgggaaaatttcggtgccatttaatccaactgttccgtagtatactttttccctgttagtcggtgcaacagtga

SEQ ID NO: 65188 - DNA, 453 bp, Glycine max
tggttggaacctttgggctgatttatgtgcttgcatggtcgtgagaagatgatagaagggggaatcgagtcctcctaaaagcgactagctactgagccacgacgacgacgagcacctaaaattacgtcgcgactctcgtacgcgtatatgtctaacgttcttttaacgtagtcgcgaagacaccaggtcgaacctacgttatctagaccgcaagagtcgcacgcgtatatgtctatagttaggatagcgctgccgctccgatattaatgatcctcgtcataaattccgtaagcttagagacgatcagaaaaatcaacagtctctctaaacggatgaagttttcccaggtcccgcccggcacgccaggggagataaacaaaataagaaacaaaagtctagcggttagcaacccgtccccagtaaaaccgggttaccccaacaacttcaaccctt

SEQ ID NO: 65189 - DNA, 459 bp, Glycine max
  unsure (1)..(459): unsure at all n locations
gttggaantttgggctgattgatgtgcttgtttatgtgcttgcatggtgtgaaagcaccatagagggggctcgaaggtgaggccaagtgcagaacaaagaagagaacggtcagagatagtgcttcaatatgtgcggtgattggagttgttgccggtggcgtcactggtggtgtagctggcgtcgcccacgggatccatgacgtaaccaggcacaaggccttcggatcttctaagacaaggtacacagggtagattatctcgggaagcgtagtcgcacccagtccgccttcagtggtaggaattccgacatgactctatcagcccgcccttccagaccgcgtagctacggcgatgagcccctccctaaccccagttagtaaaaaccgttacgcaattctataccaactccccgggcgccgataccacacaaagcctccccccaacaaaaaatagaaaacc

SEQ ID NO: 65190 - DNA, 345 bp, Glycine max
tcgtgccccgattcctaactctaactacggttaaagtcgaaggcggtaaggaattaacaaacgaataagtagcagtaaacacgcacgtcgtaacgaggctcgagtctaattaaacccatcttaaaacaatcgaatcggagacggaagccagcgagtatataccggccattaacgttacctaattatccgattaactcagatgacgtcactgcacgaccggaggggcgtccgcggagagaattactaaagaggctccgttcgtcgcgtagtgaaacaaagaaggatctgaagaggccgcggtaaggtccaatgaggtgcccgaaaagaagaaaaaggaaaccctcg

SEQ ID NO: 65191 - DNA, 325 bp, Glycine max
  unsure (1)..(325): unsure at all n locations
gttggaacctttgggctgatttagtgcttgctggtcgtgagagatttagaggcgatagtgtaataactaacanagacgagcccgacgaataatatgatagagtcaaatgcgcgccagaagaccacccaatccgaggtggccatagtcgtatctacggaatcgagtcgacctaccagcgattggttactaagccacgacgacgacgagcacctagtgtttcgtctcgactctcgtacgcgtatatgtctaacgctcgtcgaacgtagccgcgcacacaccaagtcgaacctacgttatctagaccgcaagagtcgcacgcgtatat

SEQ ID NO: 65192 - DNA, 447 bp, Glycine max
  unsure (1)..(447): unsure at all n locations
gttggaacctttgggctgatttatgtgcttgtttatgtgcttgtttatgtgcntgtttatgtgcttgtttatgtgcttgcatggtcgtgagaagatgatagaagggtattcagcgaagaagacatttttgaggtaaacgttaaacacgatataatcatggtagactaggctatccactagctcgtccagggcaataactcaaggccataccataccgaccatgttaggtcacggagttaccgccgcgctttcgacccgcataggaaccggagaggtcactaaccaggcggaaacgtcagttaaaacacgggaccaaatcactttccgaaattacggcgtcgtacgcacctctaagactacccccgttagtagcacgaggaattttgcacatacttactcgaagtaccagtacctccccccgcacagttacgccgaaaggaaaaagtc

SEQ ID NO: 65193 - DNA, 373 bp, Glycine max
ttgggttgatttatgtgcttgcataggtgctgaagatgatacatggtgacgcgatcgaacatactagaaaagttatacttacgagtagttcaacaaaacgatgagtgtcagtccgactgtcactccatcatcacgtgtgcgtattctacattcattccgtcgtattgtttacgatcggtctgatgcggacggtgacttgatctggaatgcggctacacatcatgtcccgtttgtaacaagaggaaatggaggtggaacagaatgagttgtctctaggaaagatatctgcttcactatcgcagcgtaactccctaacgtgaatctcaaggggaacgaaaccaaagccgaactcgtacattatgttcaccataca

SEQ ID NO: 65194 - DNA, 477 bp, Glycine max
ggcttggaacctttgggctgatttatgtgcttgcatggtcgtgagaagatgatagaagggcatggtcgtgagaagatgatagaagggcatggtcgtgagaagatgatagaagggggttgcggaagagagaaatttcagggcccggaagaagtcgactggagaagacggcgtagtgctctattcattgtaagtgttatagtcacgttattaaacttaattagtatagagctgctaagatctttggcggtaagtccgcccactagattatgaagaagagggttagtggatttaagcgtttcgctatcggaaagaggacctaagggaccttatacccaaggttaatagaacacaagagactaaggccatttaaaaattgaaggatcgcgaattgcgtacacggcggcgcgccgctcggtagcgtcgccagagagagaactacctgagtccctccggccgaaagagtaaagaccgcgaaaa

SEQ ID NO: 65195 - DNA, 168 bp, Glycine max
ttgggctgatttatgtgcttgcatggtcgtgatagatgatagaaggtcctataatcaatcaaaaaagctccttacagtgttggaaaaacaaagagtattgagtgctcccgtctctccctctccccgcgttcctattattctacattcattcctagttactgtctacca

SEQ ID NO: 65196 - DNA, 74 bp, Glycine max
aaatctaacaacttctcctcctaatataaaaaattatctcctcatgtcctccacgacggtcccacattacttcc

SEQ ID NO: 65197 - DNA, 346 bp, Glycine max
ttggaacctttgggctgatttatgtgcttgtttatgtgcttgctggtcgtgagaagaatgatagagggtctcgaggacgactagaaaaacgttcccttgaaccgcccacgaggaaaacatacggagattcgaatcgaagaggtaacggtcacgcagcggtcctccacatgcaggtacctcggtcctaaaacaccaatacgcatgctcaacgcccgcacggaacagccctaaaacgcgcagcctcccacgcttccgcctccccgcttccgcgcaaccatgtcggaccacccaccaccgcagaacacagacccggcttacttaaaccagacgaccaccggagatcact

SEQ ID NO: 65198 - DNA, 373 bp, Glycine max
tggcttggaacctttgggctgatttatgtgcttgtttagtgcttgctggtcgtgagaagatgatagaagggggcgtattgcgggaagtatagcgcccgctctccttccttttgtcttcctctccttaattaatgccgacgccgcaattttaagtaagggccctccccgccccaccccctgacccccgacctaaacccgctccgatccctccctgcgcacccccgccgacgcaccgaccctccagacccggatggagcaaaagagaagggaataagaaaggagaaataagatcaaccctggtggcacgacgaagagccggctgctagtgacgggagcagagaatgaagagaagaagaaggagaaacaagcctca

SEQ ID NO: 65199 - DNA, 441 bp, Glycine max
gttggaacctttgggctgatttatgtgcttgcatggtcgtgagaagatgatagaaggggagagaacgaataacggcgtaaatgcacggaaccgtttagcagttcatgataagtccggggcgagacatagaacgcggagagacgtaccggagagaggagttaaataatcattacctctattataatatacagaccaagcatagagcgaataacccccacccctccccctctctatctagcgatgtcctccaaacttcctgacaaggaaccccctcccccctaatctaaggtcctactactctcataagagtccttggaaatcgccgcacctactagaggtcgccttccttttcacaacagctgagctccgatattcccctatttcccccctaccccccccaaacgcgcatagccctaaaattacccccccttttccgcgaca

SEQ ID NO: 65200 - DNA, 408 bp, Glycine max
gttggaacctttgggctgatttatgtgcttgcatggtcgtgagaagatgatagaagggggttccccaataataagaacccggacacaagcccgcccgcccctaagttaatcaccgcaactacagacgattccgcctacggatccaaatatcctcttccaattatcgagagttccggccgcgcctaaagtctcacacccaggagtacttacggaaacacgactacacggcacggagtacggtagaggtggctgagcaaggaaaaagaggagtcgattctaatttccaaactaacgccaagtaatacactaagtacggtcgcgccaaccgaatatagcccttccgaagtacatggcggagaactaagagacggtcccctagtcgtaaaacctcttatccgggatacaaca

SEQ ID NO: 65201 - DNA, 352 bp, Glycine max
  unsure (1)..(352): unsure at all n locations
gaantttgggctgattgatgtgcttgcatggtcggagaagatgatagaagggaagactggtgcgtggagaagtcgaaaacgaacagcgaaggagacgacaccctaggcgacgaggaggtcaaatgaacggaccactactaaagcgacagcgcagccatattactcgagtaaaagaagttcgagaccgaaccgtggaataaggtctccgaactttctaaagtaaagaagggtacgaacaatcaaacgtactatacttaagccccacgccgccccgcgtcccaaaaatccaccgagaaacactccagtccgcccaagaaatccggccccgtaaacgccacgcccacccacctac

SEQ ID NO: 65202 - DNA, 240 bp, Glycine max
  unsure (1)..(240): unsure at all n locations
ttgggttgatttatgtgcttatttatgtgcttgcatggtcgtgataacatcctagnaggtgttagaaagagagaaaagggcggccaactccgcctgcggcggccttctttagaataagccttctacgctatcttgctccttagcggtgctcatcgccaatcgtgttcataatatctagatcaataattctcatactaccctcacccaaaggcactaaaccttccctcaattcctccattc

SEQ ID NO: 65203 - DNA, 366 bp, Glycine max
  unsure (1)..(366): unsure at all n locations
gttggaantttgggctgatttatgtgcttgcatggtcgtgagaagatgatagaagggcatcgtcgtgagaagatgatagaagggaggcgaaggacactctctctaccatacgactgactacctacagtacagcgcgaaacccgagtgagatttcacgaaaaaaaaaaaaaaaaaaaaaaaaaaaaaagtggttgcctcagaggacttaagtccatgcatgtgcgtacgtgatgctacagtctcctcacagcgctattcaaacctaacctatcggttgctgccccataatactccgatcgggaaaatttcggtgccatttaatccaactgttccgtaatatactttttccctgttagtcggtgcaac

SEQ ID NO: 65204 - DNA, 397 bp, Glycine max
gaagggggctcccccgaatccatattcgaacctcgaaagcgagggcacgcggatattaccaaaagaatttctctatcgaaaatatgtgcatcacccacccggcggaatcacactagtccagagaccccccggggtatagaaacgtcgagcatggctcaaaggcagcgacctttgcacggacggggagaagttctgggaatatatcgaatcctcctctaactcagtacttggaaacattttcatccgagccattcgccctggaacaaccgagactcttaattcccttacgatactatgcacgtctactttcccccaccgcgagggccctcaaccgtcaccggggcccagacacccatcgccaaaaacccgcctaagttacaatgttgcgtaacccccg

SEQ ID NO: 65205 - DNA, 369 bp, Glycine max
tggttggaacctttgggctgatttatgtgcttgcatggtcgtgagaagatgatagaagggcatggtcgtgagaagatgatagaaggggtctaccgataacctataataatatataatacaccaccaagatatattttaaattaaattatcctatatagaatatacacttaccggcgaaggagcactacgggcgaataaccagggtcatcaaaagctacggccgcgtaagggaaaaggccggcgacttgggaccctaagattagcgacttccacgcagcatctaaatcagggaactagatcgtaaagattaaggcaaccaacagtcgtccgaacttcgcccggaacgaagagtcgaaccctatctcgata

SEQ ID NO: 65206 - DNA, 341 bp, Glycine max
  unsure (1)..(341): unsure at all n locations
tggaacctttgggcttgatttatgttgcttgcatgnngtcgtgagaagatgattagaaggggatttgttgcctctactctactcctttagcctctatgtctatgtgtcgtactcctatgctgctctcaatgagggaaaacgagctgaggaggcgtagtagtagtgaagggaaagaagaagggcgtcatacctattaccgatcgcgtaaagttagcagaagataagactacggataccgtcctctctgagaagccctcctaagagaggactaaggccggcggtaaagccggcgtctccggcgatctcgccattgccatatgcgagaagatcaagaccacctc

SEQ ID NO: 65207 - DNA, 325 bp, Glycine max
ggctgatttatgtgcttgcagtcgtgagaagatgatagaaggggactttaactagaaaaagccagggcccgcaatcccggtccgcgtccgtgaactcgaactgaacaacaactaactaactactacgctgctggtgaagaagactatatcgaagagcctggatggtgaggtccctgaggcggatgaggtggcggtgtcggagctctagatgacaaagtatacgactgaagatgatcgtgttgatagtggtactttctcgttgaatgcgatgagtaagacttcggtgaaggcgactgagcatcgtaagaagtatgctgaggttgtg

SEQ ID NO: 65208 - DNA, 173 bp, Glycine max
cccaaacccaatcaccaaatttaacccaaactaacattcataaatctctatccctacatataccccacttaacccactaaacctccctctcccatcactctaataaaaacaatactctttaattacttttcaaccattctacccaagatctccacccccattaaataaccttc

SEQ ID NO: 65209 - DNA, 351 bp, Glycine max
  unsure (1)..(351): unsure at all n locations
tggaantttgggctgatttatgtgcttgcatggtcganaagatgatagaagggcatggtcgtgagaagatgatagaagggcatgggcgggagaagatgatagaaggggactctaaataccagcatcaacaatttaaaaacggtattactacccctactagtaattaagtctcctcttcctctaccgtccccgtcaattataataacggcccacgaagttaacctctaaccattctcgtaaatgatgccggcgcctcattcttgagatacagtaataggatttaatgtaatagcccttttaactattggttctattggaagggaccggattcatgaataacctggaataaca

SEQ ID NO: 65210 - DNA, 426 bp, Glycine max
tggctcggaacctttgggctgatttatgtgcttgtttatgtgcttgcatggtcgtgagaagatcatagaagggaagagtagttataaacggaagcctcccttccgacggagacgtcgccgagggtaagaaaactaataccgtaaggaaaggcgaaagtcccctcgcccttaagactcggtaacgtctcaggaaagacaagccgataggtctactagacgtctacccttacaatctcatcgctatcctgatcccgttacggacgaacaaagctagaggcatccgatatacgaagtcagcccgcaccccaatcaaccctatacccctaccgaaggaacttacccgccgtgtattagtaaccttctctatcccgaccccatttccccccaccacccgcagcgatagaatccgcaactgcattacaatac

SEQ ID NO: 65211 - DNA, 242 bp, Glycine max
aaaagtcgttgtctcagatgacttaagtccatgcatatacgtacgtcatgttccaatctcctcacacagctattcaaacctaacctatcggttgatgctccctaatgattgcatcgagaaaatttctctgcaatttaatccaactgttccgtacaatacttcttccctattagtcggtccaacacttcacaagatcccattaaatgtttccattaatagccgtctatatcaaaccgttaacc

SEQ ID NO: 65212 - DNA, 353 bp, Glycine max
tggcttggaacctttgggctgatttatgtgcttgcatggtcgtgagaagatgttcgaggggggcacagagcgtggccgagagaagagagtgtcggcctttctattaaacgacaattagagtaagggtggactaatctatcgacgaatagacgcttgagcctaaggaagttccgagtccgcctaactcggattgtgactgccgtacgacaattaaggcgtccgaaatcgtcacgtccctaccgtggtgaaatttaatcgaggtagaatcctacgatacgactaacgaaccggacgtcgacgggaacgggattacagatccgtgtgagccttcaaattctacggccaggacgacg

SEQ ID NO: 65213 - DNA, 387 bp, Glycine max
aacctttgggctgatttatgtgcttgtttatgtgcttgtttatgtgcttgcatggccgtgagaagatgatagaagggggctgcgaggataaaagaagaagcactatctacacaacatctcgcactaccctaccctgacaactacttacagtcatcgaagaaaacggtaattactctcgtcgtcactataattttactgactctttgtgtaatctccgcgtaaaagtgggctctactctttgcctccggcccgttagtaacgggcaaggcgggaagagcgagccgtcttacggaggaaaaattccacctcgcgaaggaaagtagtctcagtacgccggggacgggggtactctcgacggtagtcgttagtgtcgtagttacgctaggt

SEQ ID NO: 65214 - DNA, 478 bp, Glycine max
  unsure (1)..(478): unsure at all n locations
aaccgttgggctgatttatgtgcttgcatggtgagaagatgatagaagggggccgtactgaagagagagagagtgagagagagagagagaacggtagtatccggcggtaactgcgacgcggtaggaagttagaatagttccgagactgacggcccagtctgtcccgtcgccgaagaatataataaaaaatagaacgtttccccggagcccgaaaaggcagcaagcgtaaaatagtaagcggccctcggcattccgcatattactatcccggaggtaaaagacggcgggtaaaagaaggcccacgaagttaaagcccgggagaaggtacggccgaatcctaaggaggcgtaagagcctaagtccgccggagacgtattcgtacagctcagcgtccaaccaggccgtagaagagcgaacagcgagatagttcgntctgaaggggaaagttcaaggacacactaaagtacgtcacacgcac

SEQ ID NO: 65215 - DNA, 430 bp, Glycine max
aacctttgggctgatttatgtgcttgcatggtcgtgagaagatgatagaaggggatcccttcgaactccgagttccctccatcccgaccccgaatcttccaacgaagtacgcgtccctatcttctaatttatttgaaaacgtttcctaaccctacgtaaccctccccggtcgccgagtccttacgtcttaactcaaagtcatatagacacagacctcttacgtcccgccaagaagcatccgagaacccgaagtatagccaaagtattaatccgtccagtcctcctattgagaacgtactccggttcgcggcccaaagtctcgagtcgccttacgaacttctgcgtcctactcccgtccttccctgggaaaacacgaaggacggtagaggccatcccgaacctaggcgctaacactccacattacataatt

SEQ ID NO: 65216 - DNA, 439 bp, Glycine max
aacccttgggctgatgtatgtgcttgtttatgtgcttgcatggtcgtgagaagatgatagaccgggacctagaactagaacaagacgaacaagaaacgaaaaaaaaaaatctcggtccattatacccgagcccgagtccggcctcctaaacgagacttttcctcgccggacctattggaacatccgcgtcctccgccccttctctcgtccgtcgccgtagcctcctcatatacgggagcccggaaatggagaaaatccccgttaccacaaaattagatggaccgtccggcaatcatatagacgacactaagagaataaccgcagaacacggccctagaaccccaaaggaaaagaccgcctaatctgacgagggtatcgcgaaaagcccccacgtcgagtatctccctaaaagtcctcccctaagttccacaaaacatac

SEQ ID NO: 65217 - DNA, 383 bp, Glycine max
gaacctttgggctgatttatgtgcttgtttatgtgcttgcatggtcgtgaatgatagcagggggaaagagagagaaatagcactcgcgccccttccctgaagacagtcagagagaaagcgaaaaagaaagaaaaaacaagcccccacccccccacccccctacaatccgaaaaaaaaaaaacaaaaaaaaaaaaaaaaagtggttgtctcagaggacttaagtccatgcatgtgcgtacgtgatgctacagtctcctcacagcgctattcaaacctaacctatcggttgctgccccataatgctgcgatcgggaaaatttcggtgccatttaatccaactgttccgtagtatactttttccctgttagtcggtgcaacagtga

SEQ ID NO: 65218 - DNA, 337 bp, Glycine max
ggaacctttgggctgatttatgtgcttgcatggtcgtgagaagatgatagaaggggctattatataataaataacaccacctaacagagaagaaagaaagacgagcttaatacgggcccccgcgccaggcaccaccgtagtaacgccggcggccgcgaacggataactactaacgaagttaccggcgaagatagcggaaggggaagaaggcgcgcgatatagggcgggagcgtaagggccggctcgtccaccgtcgtaacgagatcactcttgaccatccctagatacattagtccgagaattctcctgtgaagtgtaacctgttggcggtatacat

SEQ ID NO: 65219 - DNA, 372 bp, Glycine max
tggcttggaacctttgggctgatttatgtgcttgcatggtcgtagaagatgatagacgggggaaaagaagagccctagaaaacggacgtataagaagtataagtagaagttctaaagagattattaggctgcggcgttatcgaagcgtcctactagagaaaactatccctccctaatcctataataacgatcacagtcggcccggacaccatagtcgtcgcgggacatatcgctccacacgcgaagaagaagttcgaagtcagtgtcaaggacgcagtaaaggccatctccggagccgtgaacttcgaagaagatcatttcaagagacggacaacacaccaccagtcggactacacaacagcccataatccc

SEQ ID NO: 65220 - DNA, 372 bp, Glycine max
tggctcggaaccgttggactgatttatgtgcttgcatggtcgtcagaagatgatacacgggcatggtcgtgagaagatgatagaagggaaaatggaattaaaaaaaaaggaaaaaggataaaaaaaaaagtgggtgtctcagaggacttaagtccatgcatgagcgtacgtaatgctacagtctcagcacagcgctattcacacctaacttatcggttactgaccaataatgctacgatcgggaaaattacggtgctatttaagctaccacgttccgaactatacttatgccctgatagtacggtgcaccactaaataggtttgaattgactgaatccattaatacaggagtagttcgataggttaacggca

SEQ ID NO: 65221 - DNA, 433 bp, Glycine max
aacctcttgggctgatttatgtgcttgcatggtcgtgagaagatgatagaaggggttaaattacagagttgaatttggttcccagggagaaagagaagaaaaaaaaaactttcctctcccccgccctttctctcctctctccttacggaaaaaacggtggtagtcctcagaaaattaagaagtgtagcaaccggactttccctcctaattttcaggcctcgtaatctctatctcatactactactcctcctccttctagtccctgtcctccttattcttagtcctattctctgtcttcttcttcctccctattgtctccgtctcttaatatgcgctaattctcatggccttattgtctttcttgcttggcctctttctgattgcctggctctcttgaattgtcttactctggcggtgttgtgaattggtgtcc

SEQ ID NO: 65222 - DNA, 201 bp, Glycine max
caagcgagccgaacgaatgtctatgatacctaagcgcgttacactcgatactacggtaagaggcggaaaatcaatgaagtcaaagctagcgtcgaagaaactgaatctacctggtaataatagtaagtacacttgctattatagtactagtcttgctttaaatgatgaacttcatcctacactagattcatatgtttatca

SEQ ID NO: 65223 - DNA, 351 bp, Glycine max
aacctttgggctgatttatgtgcttgatggtcgtcagaagatgacagaagggggacggaaaaactaaaatgagaaataccaataaggagaagaaaaaaaaaaaacaagtaaaaacggaaaaacaacaaaaaacacaaaaaaaaaaaagtggttgcctcaaaggacttaagtcaatccatgtgcgtacgtaatgctacagtctccacacagggctattcaaaccaaacctatcgtttgctgccccataatgcagagatcggaaaaatttcgatgccattaaatccaactgttccgtaaaatacttttcccctgtaagccggtgcaacagtaaaaaggtttctattgactgtt

SEQ ID NO: 65224 - DNA, 355 bp, Glycine max
ggaacctttgggctgatttatgtgcttgcatggtcgtgagaatgatagaagagcatgcgagaccgccgagtagagccggatcgtcgatgcaactactacagacaagacagggtcctcgcgataactaaaaggccgctaaaaggacacacgaccgaacaattagtagatcctaaaaagaattaccacgacccctcagcttccgatatcgcgtccgtctaaatctcacgagccaacgccttattccacccctcttaaaaaaaaaaaaatacaaaaaataaaagaaagtacaaacaaaaaaaaaagaaacaaaataaggagataaaaaaagaaagaaaaaaaaaaaaaaagtgtttcc

SEQ ID NO: 65225 - DNA, 349 bp, Glycine max
ttggcttggaacctttgggctgatttttgtgcttgcatggttgagaagatgatagacggggacggcggctacgaccctcatcatagagtccgcgctactcgtttaacgttccaagtaaccttaaaatcgtccacgccccgctctctcgcccagggtcggcctcgatctgactaagtccccgatcttccaaaaaagaaaaaaaaaaacacggagggcgatatacctctcggctccggtaatggcatttagaccgacagtaagactccgtagatacccaagaaaagtcccgcctaagcttagaatactccggactagaattgggcatctactaacgagacaaattagaact

SEQ ID NO: 65226 - DNA, 400 bp, Glycine max
tggcttggaacctttgggctgatttatgtgcttgccgtgagaagatgatagaaggcgcatggtcgtgagaagatgatagaagggcatggtcgtgagaagatgatagaagggcatggtcgtgagaagatgatagaagggcatggacgtgagaagatgatagaaggggataaaaaggaatccaacaccaacccacgaacaaaatcaaaaaaaaacgaacaaaacaagacaaaatttcttaaaaaaaaaaaataaaattacctagagaaagtggttgtctcagaggacttaagtccatgcatgtgcgtacgtgatgctacagtctcctcacagcgctattcaaacctaaccaatcggttgatgccccataatgctgcgatcgggaaaatttcggtgccattta

SEQ ID NO: 65227 - DNA, 298 bp, Glycine max
aaccgttgggctgatttatgtgcttgtttatgtgcttcgctatgtgcccccatgtcgtgagaagatgatagacgggttgggtcgggagaagatgatagaggggcatggtcgtcagaagatgatagacgggcatggtcgtcagaagatgatagaagggcatcgtcgtcagatccatgctagaagggcatggtcgccagaagatgatagataggcatcgccgtgagaagatcatagatggccatgcgtcgtcgagaagcatgatagaagggcatagtcgtcacaagatcatagcggggca

SEQ ID NO: 65228 - DNA, 440 bp, Glycine max
tgggctgatttatgtgcgtgcatggtcggagaagatgatagaaggggaatgacaataccaataatatgagatcatcctcagagaagaagtcgagcgtcttatgtgaggaagaagagaaaaccagtaaaggaaaaaaagaaaaaagagaaagaaggagagagtgagtagaacaaggcgctctctccggatcgacctgttctaactgtactctcacctctcatcatctacctacccccacacattctctccttcctctctctttatttctaatatacaaaaaaaaaaaaaaaaaaaaaaaaaaagtggttgtctcagaggacttaagtccatgcatgtgcgtacgtgatgctacagtctcctcacagcgctattcaaacctaacctatcggttgctgccccataatgctgcgatcgggaaaatttcggtgccatttaatcca

SEQ ID NO: 65229 - DNA, 353 bp, Glycine max
  unsure (1)..(353): unsure at all n locations
ggttggaacctttgggctgattagtgctgttattgctgcatgcgtagagatatgaaggggactctaactacctcgcgtacttccggcccttaaaaaaagaagaaaacaaaagtaacgggcagttccgaaagtggaagaataatagcaggaccggtagtaagagatttcctaaggacctctcttttacatattcataactcaagaaatataggtttcgacgacgcccatacaaaagcctgtcatcgcggaacccgttacctcgactcttattagaccaaaaacgactccggtacgcttaatcactttacggctttaggatacgaagcggccggcgaggcatcggangcggggct

SEQ ID NO: 65230 - DNA, 371 bp, Glycine max
  unsure (1)..(371): unsure at all n locations
gctgatttatgtgcgtgattacgtgcctgcatggtcgagagaagatcatagaaggggacctctaacctaacctcgccgacttccggtcctttaaagaaggagaaaacaaaaagtaacgggcagttccgaagtggaaagaataatagcaggaccggtagtaagagatttcctaaggacctctcttttacatattcataactcaagaaatataggtttcgacgacgcccatacaaaagcctgtcatcgcggaacccgttacctcgactcttattagaccaaaaacgactccggtacgcttaatcactttacggcttctaggatacgaagcggccgtcgaggcatcggatgcggngctagatgccagtaggcct

SEQ ID NO: 65231 - DNA, 434 bp, Glycine max
ggctctggaacctttgggctgatttatgtgcttgtttatgtgcttccatggtcgtccagaagatgatagaagggggagagagagaaaggaaagcggcggtaacggtaatgacggaagagaccttataaagtttagaagtgaagccggggacgtgagcggaggactcccgggatgcctaggacgtatagccgagcctttattgagaagtctaatgtccgccccgaaagtactttcgctctcgtccccttcccggacttcctaaatatagaaaccgagaccaaactagatgttatttcagtagacgtcgccaagacaccggtaggatataatgcccctagtgtgttcgcggcggacgccgaggtgttcgaagatgtcagccggaccgatagacatactggaaccgccgagcccgtcggaaccgccgcacggacccc

SEQ ID NO: 65232 - DNA, 267 bp, Glycine max
aaagactcttgaactaactaaacctccctatcccaatataacccttaaaaccttcctctcccgaccacggatcccgtaagtcgaattcggcgccccagtctaaatctctattatagttacctaatccggacataggtacaccgatcgcctcagcgtgcacaagaactaagtacaaaccgtcctcgtctccaaaaagtcccccgacgaccgcgcggcgaactccgacgatccacgcactatccctaaatctccacgcctaaactacct

SEQ ID NO: 65233 - DNA, 470 bp, Glycine max
ggaactttgggctgatttatgtgcttgtttatgtgcttgcattcgtgagaagatgatagaaggggaataatacccgcctcagataagactctgtgcactcgcctttaaaagtccggccgcaagaacggtccttggcgaatagaaacctttcttctaataataataaatatagttcgggaaggagtacgtcacgatcttagcattttaacctatcagtttcgatcataagttcctaaacaaatcctaagggaagaccgtaccagctatcgggggcgacctcgggaccggatgagtggcgcgcaatccgcccgttccagaaggcgtcattgcggttcctatgcacgcgaaggggtacgaggataaggatgtgagggatataccggaaacgactaagagagtaaagatcctggacgttaaggacttaacggtaacagtactcgacccgggccatgacgagaatcgtaagaagg

SEQ ID NO: 65234 - DNA, 390 bp, Glycine max
  unsure (1)..(390): unsure at all n locations
ggaacctttgggctgatttatgtgcttgtttatgtgcttgcatggtcgtgagaagatcatagaagggcatggtcgtgagaagatgatggaagggcatggtcgtgagaagatgatagaagggcatggtcgtgagaagatgatagaagggcatggtcgtgagaagatgatagaagggcatggtcgtgagaagatgatagaagggcatggtcgtgagaagatgatagaagggcatggtcgtgagaagatgatagaagggcatggtcgtgagaagatgatagaagggcatggtcgtgagaagatgatagaagggcatggtcgtgagaagatgatagaaggggatagtanaaataaccaacaaagacgagcccgaagaataatacggcggcgtca

SEQ ID NO: 65235 - DNA, 446 bp, Glycine max
tggctctggaaccgttgggctgatttatgtgcttgcatggtcgtgagaagatgatcgcagggcatggtcgtgagaagatgatagaagggcatgggcgtgagaagatgatgagagggcatggtcgtgagaagatgatagaagggcatggtcgtgagaagatgatagaagggcatggccgtgagaagatgatagaagggcatggtcgtgagaagatgatagaagggcatggtcgtgacaagatgatagaaggggatagtatagataaccaacaaagacgagcccgaagaataatacggcggcgtcaaaggcgcgtccgccgtcctccccgtccgcgggggccatagtcgcatgtacggaatcgagtcctccaaaaagcgactagctactaaggcacgacgacgacgagcacctaaaattacgtcgcgactctcgtacgcgtatatatg

SEQ ID NO: 65236 - DNA, 414 bp, Glycine max
tggcttggaacctttgggctgatttatgtgcttgcatggtctgagaagatgatagaaggggactacaagaagaagaagaaaagtaagcaaaaaggccctaagccccaatttacccgccccgtcccactccccctatcccctagacttccccctctctaacctcgagtagaaaatccacacttccgctcgaggccaatcccccctactggcaacttttctttctttcatggactgcgctcccctccctttctaccataccttcccaaagcctaaattatcttcttaattgtatttccccctccgcaggatataatagataataattagagtaagaagaattagcccccgcccgcgcgctcaccctagtcgttaaacacggacaggagtgggtaaacattagtgcccgggaatcgg

SEQ ID NO: 65237 - DNA, 453 bp, Glycine max
aacccttgggctgatgtatgtgcgtgtttatgtgcttgcatggtcgtgagaagatcatagaccggggaattagggatattagataagaatagggaaggcttattaatcgagttggcgatggagccctattatatcttaactataccttgttatgctatttatttccttctcgtttctcttttatgcgctgatggctattgctaatctatttctccttgctcaatgaaattttaaaaaaggccttaagataaccccttttgcaacccgccccaaaaacaaaaattaaaaaaaaaaaaacacaaacaaaaaaaaaagtggttgtctcagaggacttaagtccatgcatgtgcgtacgtgatgctacagtctcctcacagcgctattcaaacctaacctatcggttgctgccccataatgctgcgatcgggaaaatttcggtgccatttaatccaa

SEQ ID NO: 65238 - DNA, 375 bp, Glycine max
ttgggctgatttatgtgcttgcatatgtgccagaagattcttgaagatgctctaaagcgaggacaaggtccccctcctagggtgccggctccgcaggaataatgcctcaatacctgtccctctatacatccatctcccctgcactactcacctcaaactagcctccgccgctagagatccacaaatctacagccctaagcgccttcggcgtctacaccggccctaacagaaagatcgcacaacgcaaggcactatcaaccgcaaactaattaaccttcgcgatacttaacgctataactacaccggatcgataggtcacataaacgaaaagcgtcccgggctactcagtaccaatccacatctgacaatcgctac

SEQ ID NO: 65239 - DNA, 421 bp, Glycine max
ttgggctgattgatgtgcgtgtttatgtgcttgtgagaagatgatagaacgcggggatcaggcggaggagtcgagtgtggtggtcacgtatgttcaacataagtgaaaggaaaaggatcttgatttgtctgagattcatcgtaaggataacttggagattaccgagcgtaaaatccctgaagatcgagaaagtgtcctccatgcgtacgacgactcttatacgctcgctcgctaatcaaaatatcaccgtgccctacgacacactaaaccgcgaatacgtcacgcgccaacgccctcccaaagtacaacttacagttttccacgcccaactaaattaaaaccacgtttcagccccccccccccgcgaacgtcaaactaaaccaaggaaataaacactgaccgtgcgaaaacgcagactccc

SEQ ID NO: 65240 - DNA, 400 bp, Glycine max
ctttgggctgatttatgtgcttgcatggtcgtgagaagatgatagaagggccccccgggaaccaccgtctttactgttaccgggcctaccgctggtgtcaataccccgccgggcggggttcctctcggagtggttacgaattttgtcgcgatacccgggttcgtcgctgcgagtcggattcggattaattatcggactcatcgggttgggttctctactggcggcggaactgtcggttccgcccatgaggccgctcccactagttatatttatgagtagtcctttattatcgatcatcagagggggggaaacgaaaacaaaaaaaaaaaaccgcgcaccaccgaaccctctcggaactcctcctcgcgcacggccccttccttccgcgcccctccttcca

SEQ ID NO: 65241 - DNA, 456 bp, Glycine max
tggcttggaacctttgggctgatttatgtgcttgcatggtcgtgagaagatgatagatggggatgcccaaatggagcctcaaaccggtggtgagccctttctctctgaactcgtgatattgatgaactctatcaagtggaatcctgtacctagaaaacggtcccaggcggaatagtctttttgagaggaagcgtagtagtcatcgttagtacgaggagaaggagaataattggcggcgtggttctcggaggagtagtcggaatcacgtcttgaccccatatcgacgacgttttcggatctaagactcttttaaacgcggtctccgcaacgagtaccggtcccacagtacccgtcgttacatcctacgcgacgggtaagtcgcatctcgcgtgtatggaggtccatgagacagactatgacgccatgcgtatacccggacccctaacatatagctct

SEQ ID NO: 65242 - DNA, 373 bp, Glycine max
tggcttggaacctttgggctgatttatgtgcttgcatggtcgtgagcagatgatagcagggggtcttacctcgtataacctctctcgactactggcgccaccattctcccttaaagcttaaacccctcagccttattaaattaaattaaattaaaacggtagtagttctagttctacttacgacactaatattagttccactcttaattacttaaaagtattactacccgaagttacttaatgcgcgtccttaaggctccagattttctgtaaggcctattaaagttctactaattaaagcgagtattattattaaaagggccaccttaaagggcggcgccagagtcgaatctaatctagtttccgcgacaag

SEQ ID NO: 65243 - DNA, 435 bp, Glycine max
tggcttggaacctttgggctgatttatgtgcttgtttatgtgcttgtttatgtgcctgcatggtcgtgagaagatgatagaaggggataagtccctccccggacgcgataacggccctccgcgggacgcgactaacttagaacttagcgaattgtaattagaagacggggcgctcagagaaaacgtcctcgaggtcccggacgtcgagatcaggctaagcattttcaatgttatcaactagtaaacggataagtgcacgagtcttttgaggacgtttaacctcaaatgaccgaaggaacgaaaaagccttaagacaaataagacccattaccagcgtagttagtaatcggagaaccggttactcgaacctccggaatggtacaccactaccccacatgcaaaaggcaccgacgcaacctctgcgcaacactctcg

SEQ ID NO: 65244 - DNA, 395 bp, Glycine max
aacccttgggctgatgtatgtgcgtgatggtcgtgagaagatgatagaagggcatggtcgtgacaagatgatagaagggcatggtggtgagagcatgatagaagggcgtggtcgtgagaagatgatagaagggcatggtcgtgagaagatgatagaaggggcaccgagacaagtccaaagaacacctaacaaaaccacccaaaaaaaaaaaaaaaaaaaaaaaaaaaaaagtggttgtctcagaggacttaagtccatgcatgtgcgtacgtgatgctacagtctcctcacagcgctattcaaacctaacctatcggttgctgccccataatgctgcgatcgggaaaatttcggtgccatttaatccaactgttccgtagtatacattttccctg

SEQ ID NO: 65245 - DNA, 458 bp, Glycine max
tttgggctgatttatgtgcttgcatggtcgtgagaagatgatagaaggggactctacgctctacttttatatcagagagaatgcagaaattacaaattaccttatattcctataaatatataaatctaaagaaatatatatatacagagcgagatagagagagaggtacggggaactataggcccaagccactagacacgaccttaaacgtccggccccataagtcgagggatacgggcaaaggaagagacctaagaaagtaaaatataatatttctcaggaaaaagaagtaaatcctatttttcctaattatatacctactaacatgaaattaattttattaataaaataataataattttagaaaacttcatcaccctataagagattctaaaactctatttccaaaatattttaaaatcacccttttcttcagaaaactaattaattaagaattt

SEQ ID NO: 65246 - DNA, 483 bp, Glycine max
aacctttgggctgattgatgtgcttgatggtcgtgagaagatgatagaagggcatcgtcgtagaagatgatagaaggggaactaaggaactgggaactagagttactgatgatcgtaacggctcgtgagaagcgcgagaagaaaccactgaaggcgacagcattagataagcggaaagaaggggttagtaacatcattgagggcggcggttgtaagactaatgagaataagtcctctcttaagaaaaatagacggattttccatggaaatatcaagcgtattacccgtaagtagtaagcgtattagaacgtcaagcatcgttatattcgcgtccatctcaaaggagcccgcgtaacgcgcggtaagtaagcctccgacattaagccccataagtaaagtaacgcgcaacggacatctgcgccgcaccgcgcgttgcgctcctccccagacgtacggcaataccggtccctcccttacccgctc

SEQ ID NO: 65247 - DNA, 394 bp, Glycine max
gcttgattatgtgcttggtgagcagatgatcagaaggggtagtcgtgaaaattcggcgtagtgcaagggccgcgaagtacggggagaagagttacggcgtatgccctccctcattgaaatcacgggaaaatgcctaagaagttctgctgctttcatgagaaggagtgcccggatgttgagccgaagtcggctggcgagcatgggtcctgtcgtaagagggagccacggacggcttagcatgtttcgagttgtacttgcaataatgttagaaattcaccgatttccgacgagaagaatttctgttgcactcctgagggcgaagtttcctcctgaagaacgccttgccatggatcttctgatgagatatacaataagtcggaccacgcgccggtct

SEQ ID NO: 65248 - DNA, 488 bp, Glycine max
  unsure (1)..(488): unsure at all n locations
ggaacctttgggctgatttatgtgcttgcatggtcgtgagaagatgatagaagggggcagtaaggtattccacttccttctactaatgataaaagcggtcgataatacagagaataatcctcgcgtcgataacgtattagaatcggcccttccgaattgactcgaggaggaaccctagttaatggctctcgttctccgagtacaattagcgcccgtcttgcctcacgccgcgcgacagcgcggaagatcacgagcacgaacgcagaactatagatatcgacgcaaccgcaccaggccacgaagctcgcaatcgcgccccacacgcaatacagtcatcaaattcgaaacggctcgcaatagcgcgatccgaaagcngcgcgtactcgcttatgctcaggaagcacgtcacngcgcccgactatctcacagcaaatcggcacctcggcacgagatcacgcggattatcggacactaacggggcgacgcct

SEQ ID NO: 65249 - DNA, 404 bp, Glycine max
ttggcttggaacctttgggctgatttatgtgcttgtttatgtgcttgcatggtcgtcagaagatgatagaagggtcagtaccgtcgatgaaacatagaaccgaggtgccgttgatccctactacgcccaaggacggagaattccacgactgtcccgagggagtaccgatcgtagactagtctaccgaatgtacagaagttggttctaaggccaagtaacaatttcatcacaacgaagatataaagaagtccgctcaccggaacggctgactatacatacgacacgaccgatcggaactatccgccctaatactggctagatacccccgaagcgaccaacggactctaaaacgttaagacctaatttcaaaacacccaacccaaccagtagcgcgacccccacaa

SEQ ID NO: 65250 - DNA, 371 bp, Glycine max
gcttggaaccgttggacggatttatgtgcttgcatggtcgtgagaagatgatagcaggggactctaaaaaataaaaactaacatggcagagagaatataagtataggactgaaagaagagcctccccccgagagagaccgggacggtcccgatgaagaagactatatcgaagagcctggatggtgaggttcctgaggcggaggaggtggcggtagcggagctttagatgactaagtatacgactgacgatcatcgtgttgatagtggaaccttctcctttaacgccattagtaagacctcggctaatgccactgagcaccgtaagaagtatgccgaggttaaccgtgtcgacgagaagtttagctaggacg

SEQ ID NO: 65251 - DNA, 443 bp, Glycine max
aacctttgggctgatttatgtgcgtgcatggtcgtgagaagatcatagaagggcatcgtcgtgagaagatgatagaagggcatggtggtgaggggatgatagaaggggggaccggaggaaaaaaggcgctactatttaagcaaagcattaagggggtcgcggaagtggccgggtgcccctcgttatgggagttacagaagtagtatacgtaacagtaataggagattccgccagttccctcgaataagaatctgcagatcgcgcggaagaaagtgaaggccgccataacggacggtatcactaactgcctgaacgggccccagaatacggcgggaccgttatcgacgacgaccacttccatagagtcaaagaaggcagacgtaaagttaacaagacataagataaggccataaccgatggacacgaaatctcaacaacgctag

SEQ ID NO: 65252 - DNA, 338 bp, Glycine max
tgagaagatgatagaagggaatggtagtgagaagatgatagagtggggtagagagagggaaatgggtaaaaaaaaaaaagaaaaaaaaaaaaaaaaagtggtagaataagaggaattaagttaatgaatgtgagtaagttatgatagaatataagtaagagggatatttaaagataatatataggttgatgaagaataatgataaaatagggaaaatttagatgagatttaatgaaaaggttaagtaaaataatttataaaggatagaaggtataaaattaaaaaggtttgtattgaatgaataaagaaatggtagtataaatagaaaggtgaaagga

SEQ ID NO: 65253 - DNA, 495 bp, Glycine max
ggcttggaacctttgggctgatttagtgcttgcatggtcgagaagatgatacgaggggaaggccgcctctacccttgaatataacacttgccgggcaaggcgaagaggaaaaaagagaaaaaagccgcgtagcgaggaatgtgaagatgtgagacagggaacaggtgatagcgtgcccggtcgtttttagtaactgaatcttccgcgtcatctgtattctacctctctctctcactgcactcataatcctaatcaatcaatccccacgaagttgaaggtgctagcgaactgatttttaatattagacgcggctgaaaacgctttcgaaagagaatttatgtcctaagagtctactaatactaagccgactgagatcggagagaacgagtgttctacggagtcgccgagggaaaggtccgccgaccgtggtcggaaggacgaaacggaaatctctcgtagagtcgccgcgaagaacaaagggagggacaacgccat

SEQ ID NO: 65254 - DNA, 424 bp, Glycine max
ggcttggaaccgttgggctgatttatgtgcgtgcttatgtgcttgattatgtgcgtcatggtcgtcagaagatgatagatgggcatgggcgttagaacatgatagaaggggatagtaaaaataaccaacaaagacgagcccgaagaataatacggcggcgtcaaaggtccgcgaagcgtccgccccatccgccggggccatagtcgtatctacggaatcgactcctcctacatgtgactacctactcagtcacgacgacgacgagtacctaaacgtacgtcgagactctcggacgcgtatatgtctaacgttcggctaacgtatccgccaaaacaccaagtcgaacccacgttatcgataccgcaaaggtcgcacgcgtatatgtcgatagttaggatagcgtttccggtccgataatacgatc

SEQ ID NO: 65255 - DNA, 439 bp, Glycine max
ggcttggaacctttgggctgatttatgtgcgtgcataggcgagaagatgatagaaggccttgatcgtgagaagatgatagaaaggtggggtaatggaacaaccaagaaaaggtacccttacagtagttcaagaaaacgaaaagtatcagtccggaagtcactccctcatcccgtgttcctattctacattcattccatgatattgcttaggatgcatctcatgagtacggtgactttatatgtcataaggcttacacatcataccccgttagaaacaagaggaaatcgaggttgaacagaatgagttatatctacgaatgatatccgattcactatcgcagcgtaactctttaacttaaatctcaaggggccagaaaccaagaacgatctcgtacatcttgatcaccatacatatgaaatttcaaccccgtagaccaaa

SEQ ID NO: 65256 - DNA, 384 bp, Glycine max
cggtcgtaacgacgtcctactccaatataatcatctttacggagagtaccgactatcgacgtcaagaaccactacggaccaccgtaccaaagtttgaacctaacatcgtcaaacgtccagagtctggatacaatgtagacctcggacgagaagtcctttatacccaatggcatcggatcgtacaactcaaccctcatacgcaaagcaatcacgtacgatagtaaaatgcgacgattacaggatcaaccatattccgaacacgttcacaacaataccactaaggcaactcaaggccgaaaaaatagacaaacgcctataaaccgtggctccagactaaaacggccagggcagacgccgtaatccgaaggaacgtccctcggccct

SEQ ID NO: 65257 - DNA, 492 bp, Glycine max
ggcttggaactttgggctgatttatgtgcttgcatggtcgtgagaagatgatagaaggggatattaatattaatatcaattccgcccctcctgcgcccatctcctctcctatagaagtgcaaaaataaaaggtccgatcagagaaagagagagagagagtcctgaactgaaatctagaagcagaaagaaatataaactataactgtcacggtcaggcatgattgagtaactattgcgcctcttttcgatggttactctccttaggctgagcatgtttctgaagttgcttgtaagggtaatgttgttgctggtgcttgtggtattgataacgccgcttctggtgctgagaagaaacttattgttaaatcttaagatcttaggctggcgaggaagacagcgaactcggatgattataccgtgtcggttcgtgtggggtcgaaggttgatgtatgtgcgtctacaaataaggtatgcgcggagcgttagagctat

SEQ ID NO: 65258 - DNA, 492 bp, Glycine max
ggcttggaacctttgggctgatttatgtgcttgatggtcgtgagaagatgatagaagggggagacggagtaaacaaagtatagaatagccgaagcgaacggtacaaaaacgtacgccgtagagaaaggagagggcttagcggcgccgccttcgtatggtcctttcgagtctcggcatctacggtgttactagacctctctttctagtctttctggtcattgtgttgctgtctttgactcttgcggtcatggcgatattgaagtattattcctaactagtagtcataatcgtccttatacagcgggcgactctgccgtgtccaccgatctctcgggcgcttaataagcgccttccgcggtctacgatcggggagttactacaggccggcactcacgtacgccctgtttcgataaagccaaggttcacgctcgttctagcgctttctcttcttgtagagatttaaatactagaatggcggacggtacgtgcgtc

SEQ ID NO: 65259 - DNA, 477 bp, Glycine max
tggaacctttgggctgatttatgtgcttgcatggtcgtgagaagatgatagaagggaggagaggggagagaaaacgttaacaccagaagggggcagacggaaccagcgaatacatttgtctaaagtgatatttaaaccatatgtataattatattcccaaacctctttaaaaaaaaaaaaaaaaaaaaaaaaaaaaagtggttgtctcagaggacttaagtccatgcatgtgcgtacgtgatgctacagtctcctcacagcgctattcaaacctaacctatcggttgctgccccataatgctgcgatcgggaaaatttcggtgccatttaatccaactgttccgtagtatactttttccctgttagtcggtgcaacagtgaagaggtttgtattgactgtttcctttaatagccgtgtagttcgaacggtgaacgggatgtgtttcgcagtggtgtaccaagtgtggtggacgcggc

SEQ ID NO: 65260 - DNA, 452 bp, Glycine max
ctttgggctgattagtgcttgctgggcgtgagaatagatagagggatgacaggagacataaaacgtttacaccagaaaggcgcacacggaaccatcgaatacatttgtctaaagtgatatttaaaccatatgtataattatattcccaaacctcattaaaagaaagaccaactactctcacaaaaactagatgtctcagaggacttaagtccatgcatatacgtacgttatactacagactcctcacagcgatattcaaacttaacactatcgattgcatgccccataatcatcctgatcgggaaaatttagctaccatttaatccaacttttccgtagtatacgttttccctgatagtcagtgcatcattcaacaggttcgaattgactgtatcactaaatagccctatagatcgaacgatcaacgggatctatttcgcaatggtgtacca

SEQ ID NO: 65261 - DNA, 498 bp, Glycine max
tggcttggaacctttgggctgatttatgtgcttgcatggtcgtgagaagatgatagaagggcatggtcgtgagaagatgatagaagggggacaagcagaatcggcttaactgaaatcacgcacccgtttccctatcactcttgaagaaatacctctgacgcgggcaccgattacaccccagaccggacccagagtacagtcaccttccggcggcaagaaatgtccgcagttagcgcaagactagcctcaacgcaagaactagcctccaataccaaaacaccgtcccctcataaaaaataacaaaaaagaaaaaatcaaacaaatatatatcaataaataaaataaaaaaaaacaaaccgaaaataataatccacgacctaaaattccaaaaacataaagaagatcaggggaaatcaacagtctcaccaaacggaaaaaagttttctcaccacaaggcttttacccccaggttgatcccccgaatacgaaacccccccc

SEQ ID NO: 65262 - DNA, 488 bp, Glycine max
tggcttggaacctttgggctgatttatgtgcttgcatggtcgtgagaagatgatagaaggggaaaacctcaaccaaaaaaaaaataaaggcaaccgacacccctccaaagaataaaacgcccgccacgtccaacactcccaacccggctcgcacccgcacctatcttgcttcccacctaagcagcccccctctggtgaaaccgtttgaagttcatgtccctccgaacttaaccgcggacaccacgttagcaacatttccatctcccccctccccagtccccgcccggtaagtcgtcgcaagcccctgacgacactcgcaacccgagcaacgctccaaaaaaaaaccaagaacccactagaaaatcaaaacctgaataccccaataacccaaaagactaaacaagctccatagcgcgaaccactgaccttaacaccgaaacccccggacacacatgaaaaaacatggattactctactactcatgcccc

SEQ ID NO: 65263 - DNA, 495 bp, Glycine max
tggaacctttgggctgatttatgtgcttgcatggtcgtgagaagatgatagaagggggataaagcagtcgagccggccacccacttacccagaaagataccgcggccatttacagctctacagcgctacatcgtaatataaaataacgggcctttccacggtaggacgggatctcatttatacagacttctaactagttatatccaaaaggaattgtctatctattaaggacgaaaccgacgtccatcggaaactaaagaagaagacagaggaagaatattccagagtcacccttaatccgctagagatcacctaggtcagtaaaagtatagaattcgagaagaagccgtagaagctaacgattacgttcgcgatttgcgtatgggatcatccaaacacgggtacagatataagcccggagtactccaccaagaaaaacggtcggcggattaagagcagtcgggtaccctcgaacgagttcttagcgatcgaagt

SEQ ID NO: 65264 - DNA, 483 bp, Glycine max
ttgggctgagttatgtgcttgcatggtcgtgagaagatgatagaaggggagagcgcggaattcctgtcaatttcaaaacccctgcacaatgaaacggtacttatggttggtgttgttgtgagactgaccccttgcctgcgccttctctgttgtgttgtgccttgctctggtcttgaagttaaagtggtctggctcttgccttgtgctgtccttaattaattctctctgtgactcatatctaggcgctttgccgaaccgagtccccgcgcggaacttacgccattgcattacatagtaatcgtcctcgtcccgacgatcctgacgtcacttgctctctgttatagtcatggccggtccttcgaaggtaaagagaagatcacccgaagactaagaactaaggccgggacgatacggattctccccgacgccgggtcccaaataaaacaaattacctccaccaggaagacccgtcagacactcact

SEQ ID NO: 65265 - DNA, 491 bp, Glycine max
ggcttcgaactttgggctgagttatgtgcttgtttatgtgcttgtttatgtgcttgcatggtcgtgagaagatgatagaaggggaagaacaggagtttaaaaatcattacagttatcgatcgacctagaaatctccaggtacagtgaaaacgataattattcctgtgattgctgtaggatctggcggcgtactatcgctacttattctactctgctctattctagggcccgcgaaactgttagcgagcgtcaggaactttccgaggtaagtcgcggtaacgggaaacgggagggccatacgtcctgagaggaaccggtcgtgggtagaccatagcgcgaccgggcccgggccgaccggccggtcagtatttctaagtgcattggtcactaatggcaaaagctcgatcggttctcctcccgagagtaccggagtcgagtccgtctatccttttattttcctcgtttccatcctacttccccggccacggtcg

SEQ ID NO: 65266 - DNA, 499 bp, Glycine max
tggcttggaacctttgggctgatttatgtgcttgcatggtcgtgagaagatgatagaaggggagagcggcggagcgcgtagaagagtgctgtagctgtaatttcaactagaagaagtgtagtcctaagtgagcgatagttattagttacgggctgcacgtatagttgtggcaagggcacacttctcctcgtcccgtttcataaaaggatattcttcagtcggtctaagactctcctgtaagacgctgaagaaaacactcgtaagcccgtgaagaaaggcccgattttgctctagaccggcgctacctctagagacctctatggcaccgtctaggctaacagtgctatcggtagtaaaacttcctgtacttctaaagtctatggatccgtgttcgaaaccttagaggattcgcattacccgaccaagaaggtagccctaaccaggaagtactccgagaggaataggaaggataaggatcttaagcctaggccgacctccg

SEQ ID NO: 65267 - DNA, 493 bp, Glycine max
ggcttggaacctttgggctgatttatgtgcttgcatggtcgtgagaagatgatagacggggaccgagtaaaactcggaaaaaagcccgaagaaaggaaaaagaaataacctagcaaaaccgagcgcgtacacgcgccggcgcactcgtacgatattaaactagcggaagacatctataaaattcccattctgaaaccctctacccaaaataaagataatccgggagaaaaacctacactaagcggttacgacgggggccgacccaaccccttctcccctccttctctctcctactcttcacactctctcctctcgtcctaaaaaacccctaagaaaaaaaccctttcccaccagccctctcctctcatcctcacgccaggcctaagagaacttaaacctttccgttcccgagccccgagaccggggacaagaaccgagaaggatctacatcgtatgcgggccccctagaacctcgacccaggcgcaaggccct

SEQ ID NO: 65268 - DNA, 477 bp, Glycine max
ctttgggctgatttatgtgcttgcatggtcgtgagaagatgatagaaggggaactcggcgagcaacaaaaactaagaaaaaaaagaaaaaaaagtggattcacaaaggggttaagtcaatggatttacgtccatgaatctacatacgtcacacagcggtattcaaacagagctaatcggttgtaacccaataattcttggatcgtaaaaatttcatcggcataaaatcgaactcatccaaaccaaacgttccccaggatactcggtccaacatagacgaggtatcaattaacaggttcctataaacggcgtctagtacgaacggtgtacgtcatacgtttaacggtatgttacccactgtggtgtaccaagtgtccatgtctagtcggatatgcatatcccgaagggcataactgttagtcttccactgctcgccttccctgccctccgttacgctcgctcggccatgtcggtaagt

SEQ ID NO: 65269 - DNA, 451 bp, Glycine max
tttgggctgagttgtgtgcttgattatgtgcttgcatggtccgtgagaagatgctccaagggcatggtcgtgagaagatgatagaggtgcatccccgtgagaagatgggagaagggcatggtcgtgagaagatgatagaagggcatggtcgtcagaagatgatagaacggcatggtcgtcagaagatgatagaccggcatggtcgtcagaagatgatagaaggggatggtctctgaccctgcctccgcctcggcccacagactcccgtcaacgacgcccatagtgtccaattaaagacgtacactgaggaacgatagactatcgagtcccataccttcaggaagcgtcctcctataaatagaccgaccattgccaacgattacgctccggcctagactaataccgcgtacgcggacgacaacggtgcccataaaggttacccccctaaccc

SEQ ID NO: 65270 - DNA, 478 bp, Glycine max
gcttcgaactttgggctgagttatgtgcttgcatggaagatgatagaagggggactctatggagatggattctctctctgtgtggatgtgcgggcgcagtctgtctatctctaggtctctgtgtaattttttctctgcggatgtgccgccgtagacttctgcctgcctctgtctctctgtgcgagcccccgaacccgccggctcacgcgtaggattagttttgaatcttcgtctaactttcgcggactagtccggcatctacttacaacggagtccgggtccattcccatccccgatcgtccgacgccccaacgccatctcaccccgccccttaccgcccccaccagccgatttcgaaatcccattaccccgcggcccggctcggcccctacagtactgacccactttcggaggaaagccaataaaacttcggacaacagttctccggggtccccaaaccgaactgaggacgggagat

SEQ ID NO: 65271 - DNA, 465 bp, Glycine max
attggcttggaacctttgggctgatttatgtgcttgtttatgtgcttgatggtcgtgagaagataatacaagggcatggtcgtgagaagatgatagaagggagcggcgcacaacgacgagagacatccgccaagacgtgcaaaacgccataaaaaaaaacaaaacaaaaaaaaaaaaaaagtggttgtctcagaggacttaagtccatgcatgtgcgtacgtgatgctacagtctccacacagcgctattcaaacctaacctatcggttgctgccccataatgctgcgatcgggaaaatttcggtgccatttaatccaactgttccgtagtatacattttccctgttagtcggtgcaacagtgaagaggtttgtattgactgtttcctttaatagccgtgtacttcgaacggtgaacgggatgtgtttcgcagtggtgtaccaagtgtggtgggcgcggcggcca

SEQ ID NO: 65272 - DNA, 487 bp, Glycine max
ctttgggctgatttatgtgcttgcatggagaagatgatagaaggggggagcggaggcagcagtaagcatgctgcacacgcggccgactcctcgtcggccgcccgccccgccttccttaaccgctagactcgaactattggatctatctcctatatctatctatatcgaacggtcctcgaaggtgattgctattattattattattattactaagactatgactactactactacgactacgactattactactactatgacggagagggagagattaatctacgggcaggcaaggacgggaaggcgcattacagttatgacggctcggtgttgtacctctatgaatttacccatctttttggtcatcctgttagaagagtcttattgtcctctaatagaaatcctaatgaaagagttcctattgctggaactggcggatttgctggcatcggtaaaatagtctctacgccggtttcccgcgaatctc

SEQ ID NO: 65273 - DNA, 350 bp, Glycine max
acctttgggctgatttatgtgcttgcaccgtcgtgagaagatgatagaaggggacgtccatcgaacaaccaagaaaagttacccttaggggtattcaccaaaacgaagggggtcagtccgcctgtcactccctcatcccgtgttcctattctacattcattccttgctattgtttaggatgcgtctcatgcggacggtcacttgacatggaatggacctacacatcatgccccgttcgtgcccatccgcaatctccctcgaacacaatccagttctatccccgccaagatctccgtttcactatccaccagtaactccaccactcccctcccatccctccagaccccccc

SEQ ID NO: 65274 - DNA, 461 bp, Glycine max
cttggaacctttgggctgatttatgtgcttgcatggtcgtgagaagatgatagaagggggagtctactgattatgtaacctaggcttaagggcgttcttacaataacgacgtctaacattaaaacgtctccctttattcccctctcgctctctagccgaaaacgccgaaaggagaagagacatccgagtaacctgaggtcctcagcctcctcgagttcgcggtcctcccaatctaggaaatagaaagcgaaaaggagaacggaagggaaggcaagggaagcaagaacgacgagacaactaaagagtcgaagaaggcgaagaggtagaatcccgcgatctaccgctcctccctggcgacgaccgcttctaacgcggtccggtaatcactagaggccctctccaccccgaaagctaaagacggatcaagttatttccccagacttaagaattcgacgataaag

SEQ ID NO: 65275 - DNA, 494 bp, Glycine max
ggcttggaacctttgggctgatttatgtgcttgcatggtcgtaagatgatagaagggggccgtaaaccgtaatatctagctagtatcgtattatcgtaccctaccctttagtccagtcataatcataagtttatgctgtccctacaaaattatatttattcgttattactatcccttttaaaatgtaatactactaaaatccaaatctagagaactagagagagagagagagagaaacgagcgaagaagttaaaaagaatcctgttggagtctcaatggtgaggtttaatcttgacgagttgaaattggtattggcgttagtcgcctttttgaagaaggctgctactaagagtgtcgacacgacttttgatacgtagaaggaggttgccgacactgttgctgttgtgcccgagaagcataacgcggagaaagatgccgtggagtagacaaagaaggagcctgacaagaggtacggttttatgcggtaccgcact

SEQ ID NO: 65276 - DNA, 248 bp, Glycine max
tcgtgagaagatgatagacgggcatcgccgtcagaagatgatagaagggcatggtccgcagaacctcatagaagggcatggtcgtcagaagatgatagaagggtatggtcgtcagaagatcatagaagggcatggtcgtgacaagatgatagaagggcatcgtcgtaagaagatgctagaacggcatagtcgtgagaagatcatagaagggcatactcgtcagacgatcatagatacgcatggacgtc

SEQ ID NO: 65277 - DNA, 499 bp, Glycine max
tggtttggaacctttgggctgatttatgtgcttgcatggtcgtgatgatagaagggggccaactcgaagactcccaacgcgctagtaaataagtcggtcgtctccttcgaacttaccgtctcccgtaggctatcagctgaaccggacgtaagtcccaataatccaacgcgctcgttaatgaatacgggccccggatccgccaattccgagaagtctccgacttacccgaataagacatgaccctcctttgttcttaccggagaaacgaaactctctaggtactccgacgcttaccctaacgagtcctacggttcattctaacttaccgggaaatctataaactcggaacactcgaacgccagtagcaatcccagcgatacgatagagtcattcgaaatatccggcgactcggctaatccaagggagtccgattctagtaataattaaacttgagtctccttccatctgcctggcaggtccgaaaaaacgataaagtcta

SEQ ID NO: 65278 - DNA, 492 bp, Glycine max
ttggaacctttgggctgatttatgtgcttgcatggtcgtgagaagatgatagaagggcatggtcgtgagaagatgatagaagggcatggtcgtgagaagatgatagaagggcatggtcgtgagaagatgatagaagggggaaggaagggagggaagaacagaacgggactcggaagcggaaaatatatcggagagcctcctaggagaagggacgtacggaggaagtacttgacgtctattaactagtcttgttatgttattttcggttccggtactgttgctgctgttcctggcactcattctgctggtgaataagctcataacaggtctcacgtctttgacttctacctgaccctctatgcgaaggttggggactattatcaaatgcccggatggatgtatcttaccttactactatccaacaagtccgtcagtacgcctctgtagttcccaacgcccaaaccctagattgcgcctgtcctcccggtatct

SEQ ID NO: 65279 - DNA, 489 bp, Glycine max
ttggaacctttgggctgattttgtgcttgcatggtgtgagaagatgatagaagggggcccctaccgggcgtcgactggaataaatagggagcagaagagaggagaagacgggccctacaacggaacccgtggagaatccggcaccaaagccgacggaagacttgaaggaaagggactggaggcctagggagtatgcccacagagcgaaggataggcgtgagaagatgaaggagacgcggagtcatttcacgtgatttcacgggccccggatacctgaatgttataacctctagtccgtccgggacgtatagaccagttaagcggttgggaggagggatttccacgacgactcttcttaataccctctcattttattcaagcgagcgccgtcgaatccgttataagtaccactggcgaaaaggacggacccgctgcaacccttttccgcaacacttcgctccgccgtacgccgtagagaccataatcgga

SEQ ID NO: 65280 - DNA, 303 bp, Glycine max
tggcttggaacctttgggctgatttatgtgcttggtgagaagatgatagaagggacactaaaaagtagaataaaaaaacaaaaacaaagggagaagagtattggctgacacgaatgacgtaaatgcatgcatgtacgtacgtgaagatactatccacacacagagtcaatcaaacctaaccgatcgattgacgacaaataatccatcgataggaaaactttcgcatgacattcaaaccaacccgtcggaaacatactcactgcccagtcagtcgaagcatcaataaacaggtatggactgact

SEQ ID NO: 65281 - DNA, 485 bp, Glycine max
tggcttggaacctttgggctgatttagtgcttgctggacggtagaagatgatagacgggctacccgggaaccaccgtctttactgttgccggcgctaccgctggtgtctataccccgccgggcgaggttcctctcggagtggttacgaattttgtcgcgatacccgggttcgtcgctgcgagtcggattcggattaattatcggactcatcgggttgacttctctactggcggcggaactgtcggttccgcccatgaggtcgctcccactagttatatttatgagtagtcctttattatcgatcatcaaagggggcgaaacgaaaacagtcaatcgcgtatctatctatactaagaagtggttgtctcataggacttaagtccatgcatgtccgtacgtgatgctacagtctcctcacagcgctattcaaccctaacctatcggttgttgccccataatgctgcgatcgggaaaatttcggtgcc

SEQ ID NO: 65282 - DNA, 437 bp, Glycine max
  unsure (1)..(437): unsure at all n locations
tgtttggaacctttgggctgatttatgtgcttgcatgggtgagaagatgatagaaggggatatactcaatcaagaaagctccttacagttttttggaaacgaagagtattactcctcccgtctctccctctccccgcgttcctattattctacatccattcctagttactgtcgaccctgcgtctgacaacgaaggcaatttctccgaaaacggcggtatacaccacactccgctagatacaatagtacccggcggaacaagagtagttttaatgggaaacgaaagacgtttctctatcgcggcgtaactctgtaacgagtctgataaagggaccggaataactactctgcttttacactgaacttgccccactgttgaaggttacttcccgagttccaagcctgacctacccgtagccacaacgtcgcngcgcgga

SEQ ID NO: 65283 - DNA, 496 bp, Glycine max
ttggaacctttgggctgatttatgtgcttgcatggtcgtgagaagatgataaaagggggaggaagaaacgtactacactcgcgcccgtcgtaggggtccgatcttctcattcttcttcttcttcttgtcctattaaagatgaaatatctcagctaccatccccgtcctaaagctcggaggaggacccctatccaatctgccatcgaaaagccgcaaaagccgtggaggaaagggggtaaccgaacgcttcggacgcaaggggatgggaaagaacaaaaagaatggaaacacacccgaatggcggaaacgccccgaccgttaaggacccgggtcaaagagtcgctttagtcgtggaaaggaaggtgcaatatttgaataaagaggagaaagacaggaccaaggacctaaatccgtatcccctctctaaccgactaattttccattttcccacgtaactccacatccatgacacaaacagaggctacacgtactcccc

SEQ ID NO: 65284 - DNA, 492 bp, Glycine max
tggaacctttgggctgatttatgtgcttgcttatgtgcgtgcatagtcgtgagaagatcatagaagggggaggtaagaagccgcaccccggtgcttgtgcggtcctaagaagagaactctaacggaggtttacgagtcgaagtgtgcgccttagacgcctgattgtaatggtgatgggagaacaatgaagaaggagtcgaatgatctgtcggagaattcgggtactcctactcacgataaggattcgagttaaacgacttagaggactgatgctaatggtgatagccgtgcggatacggatgagcccggggagtcgcactagattacaacggatgaatgtgataacgacgaggatacgagggaggttcctaatgctcctgattagaatgttgatagtcctactattgctgatgagccgaagattgctccgcttctttctggtcagaagtcaggaagaattgcctaagatcgtaaggttacgactcttaaagc

SEQ ID NO: 65285 - DNA, 307 bp, Glycine max
agatgatagaccccgaaacaaggtacactgtgaatatccgaggcgactcgatagaacggtcctggggctcagtactaacgatctttaagattcccctcgcatctaccgtctcgtccacgtcgttcttatgatcaactctaacactactgacatccacacaactcacattgcacctattgaccctacttacgccaaccatacggtcgcaaccggactacccttacccaatcaatcttcactacgaccatccctccgaaaccccaataaccggtaaccgacgcgctcacaaagtcttattcgaccaaaa

SEQ ID NO: 65286 - DNA, 332 bp, Glycine max
tatgtgcttgcatggacgtgcacagatgatacccccgatagtcaaatctaaccaactcagaccagggcgaagggtaatacggcgacgtgcaaatgcgagctcgccgtcctccccttccgctggggccatagacgcatgtacggaatcgagtcaccctaaaagcgactacgtactaaatcacgacgacgacgagcacctaaaattacactcccgactatcgtacgcgtatatgtctaacgtatcatctaacgtaatcgcgaagacaccacgtctcaacctacgttatctacaccgcaacagtctcacgcgtatatctctatatatagcatagc

SEQ ID NO: 65287 - DNA, 485 bp, Glycine max
ttgggctgatttatgtgcttgattatgtgcttgtttatgtgcttgcatggtccccagaagatgatagaaggggatggtatctcgccctgcctctgcctcggcccacagactcccgtgaaggaggcccatagtgtctaattaaagacgtagaatgaggaaggatagactatcgagtcccataccttcaggaagcgtcttgttataaatagaccgaccattgtcaaggattacgtcctggcctagactaataccgggtacgcggacgagaacggtgctcataacggttaccctcttatccccgtttctcgtggacctacttgcgtctagggcgacgtcgatagcgtctcagattgtccgcggtagaagaagaaagccgaagccaagtaatagcagatatttacgacagcccgccatcctgccacgcaccaaccctcatctccgtcagagacacccgagcatcacgaccgctgccccgagtataaaca

SEQ ID NO: 65288 - DNA, 495 bp, Glycine max
  unsure (1)..(495): unsure at all n locations
tggcttggaacctttgggctgatttatgtgcttgcatggtcgtgagaaatgatagaaggggaccgcagaatcgaataagggccctctccctctccctctcgctcgtcctcctatccctctctgccctaactgaaaaaactacgggtagaaaacctcctgctggcggtaatcggaaacgtaacgggattatcgaggaggcgaagaagaccgccatcatcccaaacgaagtcaaagctttcggagaagacgccgcagaagccgccgcgagtttcttccccgcgccttccttccccgcaaaaagcccgtcgtgtttcgacccttacgctctggtttaaaaccgccgggcctataaaggcggcgtccacatcggagaggccagcgtcgaaacgtccgccaacccgggaaccttccgggccaccaccggctatctcgaatggaggtagtccccgaacgaactanacgagcccgcgggagacaaagccgttcacgtatcct

SEQ ID NO: 65289 - DNA, 473 bp, Glycine max
tggcttggaaccgttggactgatttatgtgcttgtttatgtgcttgcatggtcgtgcagcaagatgatagtaggggacaacacatatacgtgaacttccgaaagcctatcgagacacacagaatcactcctaaccctatagtacgaaaaatgcgcccgctatacctgcgagtctcgtcaggcgtactcggctccatagcgatagaccgacatctacacttattaactctaataaatctaatattaaacgatcataaccgcctataatcgacgaacaatccgttcgctctgcgtacaaaccattccaccgttggagacgtcggcttcctatgcgcccggcgttaaagatacaacgtagctccagtactaatatgcctatgtacctacttagcggtcgtacgcacgcgtcaccatcatgaccgactcacatccatccatctgtctgcagatagggttagactatccctcacacat

SEQ ID NO: 65290 - DNA, 246 bp, Glycine max
tagaccgcgatagccgagaggccccgacgtactgtcggtatcgacaaaggactctcactcatcaaggattggaacaaaatttcctctctcgctaccaacagaacggtcctagactgcaaatcctatatcccccaggaggcggtaaactatacttagattaacgaccgtcgatctactacccccggtaaggcgcacgacgctatttcccctacggacgactactttggaggccacgagaatttccca

SEQ ID NO: 65291 - DNA, 224 bp, Glycine max
acctatacctttattaatggaattacggttcttgcgcatagtcgcatcgagcgtggacttaattcgcactccgatcctgtctacgttcatttcctacatccagcatcccgaattggtaataacggtcttgctcttcctcctcgtcgcgattttatcaagcctaagcctcacaacgcggataagtcctgttttcctcctgaaattgccaatcatcggggaaccta

SEQ ID NO: 65292 - DNA, 462 bp, Glycine max
ggcttcgaacctttgggctgatttatgtgcttgcatggtcgtgagaagatgatagaaggggatacaaagagaaagtaacggtcctctcggtaagtccagtcgccgcctaattactcatcgctaagggttccgtcggaatcaagtctctccctaagtttctctgttagagtcctagatttaagaaccctaggagcggcgttgccgcagtaaagcatggcgataagagcgcgcatcccgacccggaggactcaggtaatatcatcggctagcgggatccgcatggtcttgacgtattcctatttcataatttctcctagagtaagcctcctgagatacctgttgtcttacctataaagaggggaccgccatcaaagcccccgacttcgggaggcggccttatttcggtacatccgagcgttatagtgctaggcgatacctcattaactaagaagggtttataat

SEQ ID NO: 65293 - DNA, 301 bp, Glycine max
gcttcgaacctttgggctgatttatgtgcttgatgggagaagatgatagaaggggatagtcgacataagctactaagacgagctcgacgaataatagggatgcgtcaaaagcgtgcacgtcgtccaccccgtccgggggggccattgtcgttgccggaatcgatcccgaaaagtgactagtacaagcactagcgatagcactataatacgtcggatccgtacggttatgtcaacgtcatcacgttgcgtgaagacccagtcgaaccgacgttatctagaccgtaagagtcgcacgtgtata

SEQ ID NO: 65294 - DNA, 300 bp, Glycine max
cttgtttatgtgcttgatggtcgtgagaagatccccgacggggatagtgaaatagagagcgagttgccgacccactaacgcctaggggactctactacaactgctagtgctaaccgacgaagacgttgactagaaatacccttgctgtaaggttcgaagaggtgatctattccgatatgccgaatgtggtcgtggtcgagtctactctaattcctactcctacgcctgctcgtctacgtcttaatacagctcataataagtccattgattatggcctcgctattttcgttggttctactc

SEQ ID NO: 65295 - DNA, 460 bp, Glycine max
tggcatggaacctttgggctgatttatgtgcttgcatggtcgtgagaagatgatagaaagggaacttagaatgtccctacatatactgaaagaagaaagaaataacaataatcaagtaagtattacaaaccccccaaaattctctcctccctcctcttactgtcgttggagaacggataccttggtgatttcaatccttttgctgacgaacaacgtctgctctcttgattattgctgttatgctccttatgaaaatatctgttcctaaaaaattcctatctttccagttcagaagaaaaatcaaaattgcatacaatcatgcacaacttttctcccaacctcccccctcccccttccccccctcaattcccttctctccaagaatatgttgaacttgccacctccgatcggcgcaggaagcaagaatgacgaccacgcgccgatcaaggcccctttgccc

SEQ ID NO: 65296 - DNA, 451 bp, Glycine max
tttggcttggaacctttgggctgattttaaaaaatccgaccagggcgacggcctatgcagcgggttactgtttcgacagatggccccctgtttcccgatgccggagcttatgcctccaacagcggatctccgccttaaatcggaataatatctaatttcactctggctcacctccccgacccacaagggaccccgttgaccctggttcaccggccaaaaaacgagtcgacccaataaaaacccaatgtgaaccccaataaaacaccaatgtccataacccaggcggtatcccctggggaaacgcgtgtggaattttcacccgtccaccccctcaaacatacctaaacacgcacttgtctacgagataacaatttcgacaaacgtcctaacaacaccgaaaaaggaagagcacgagcacctaatacccttgcgctgtttccacctttccccc

SEQ ID NO: 65297 - DNA, 406 bp, Glycine max
tgcttggaacctttgggctgatttatgtgcttgcatggtcgtggaagatgatagaagggcatggtcgtgagaagatgatagaaggggagtgccgcgtttaatcgaacgcgggaggtgaggaaagaaaagtaccagaacagtgccggaggaggacttgctactttctgtaaagcaccatccccgtagagtctactaaattgaattcctacctttgttcctatgcccctcccttccctattaataataatccccgccctccccttcccccaccgcaccggcgaagtcctattacaacctaaccacgagtcttattatcctgaaagttatgcttatgacccgaccttcggacttaatgtacttaccaagtccctgtgacggtgcggcccagcgggaaaaacatacgggg

SEQ ID NO: 65298 - DNA, 398 bp, Glycine max
gctccgaacctttgggctgatttatgtgcttgtttatgtgcttgcatggtcgtgagaagatccatcgagggcaccctctcacgacaaaatcgggagaacacagcacgcaccaacgctccaaaagcccatccgataactacccccaaaaaacacccaccaaacccctataccaacgaaaccgccaaacaccttaccagcctccaaccacaagacaccaccgaccaacccacgtccaccaagaaacctcactaacccacccaccagtaccaaacccacttgcaaccacaccacccccttaaaaccactaccaatataccccccaaatcactaccacgaggcaccaccccgcaacaaggctattaccaaaccacttagcaaacgactgaaatgtggcaaac

SEQ ID NO: 65299 - DNA, 320 bp, Glycine max
tggcttcggacctttgggctgatttatgtgcttgcatggtcgtgagaagatgattagaggggctaccgactagaatagaatctccgcttacgtttgcgacaccgcgaagctttaagggaaccctaaaaggtccctttcaattgacaccaagaccgataccaagaaggctttcaagaagaaagactccgctaaagttacggaagacgtccacgccaagattaagcgggagaagagcctacggggtaagaaatctaccgctaggaagagaagggtaccttctaacgaccccgacagggctaagacaacgccggttaagacta

SEQ ID NO: 65300 - DNA, 377 bp, Glycine max
ggaacctttgggctgatttatgtgcttgcataggtgcgagaatattatagagagggtacatatatagtcaatgaagaaagctctctacggtttggccaaaacgaatagtaggactattccagtctcacgttctcatcgcgttcctattattcaacattcattcctagttactttcgacaatgggtctgactacgaacgcaatttcaccagaaaacgggggtgtacaccacactccgatagatacaatagtacccggcggaacaagagtagttctaatgggaaacgaaagacgtttctctatcgatgtgtcaacctgtaacgagtctgataaaaggaccggaataactactctgcttttacactgaacttgtcccact

SEQ ID NO: 65301 - DNA, 376 bp, Glycine max
tttgggctgatttatgtgcttgcagatgatagaaggggcggataccgaaccaccgtatgacgttataggaagagaagtttggggtggccagcgctcctaccccgcgacgcactccacccacgagaacctgccgggtccatacaaggcggacgccaattccttcatcctagaaggaaatctcccctagacgccaaaggccacgcaatcgcaccggtccccttccccagcctccccggacgtcccgcttagccccaacgggaaaaacacaacacaacccacacaccaaccaaagtcgttcgctcagaggacttaagtccatccatgtgcgtacgtgatcctacagtctcctcaccgcgctattcaaacctaacctatc

SEQ ID NO: 65302 - DNA, 368 bp, Glycine max
tttgggctgatgtatgtgcttgcatggtcgtgagaagatgataaaagggcatggtcgtgagaagatgatagaagggcatgggggtgagaagatgatagaagggcgtggtcgtgagaagatgatagaagggcatggtcgtgagaagatgatagaagggcatggtcgtgagaagatgatagaaggcgctggtcgtgagaagatgatagaagggcatggtcgtgagaagatgatagaagggcatggtcgtgagaagatgatagaagggcatggtcgtgagaagatgatagaagggcatggtcgtgagaagatgatagaagggcatggtcgtgagaagatgatagaagggcatggtcgtgagaagatcatag

SEQ ID NO: 65303 - DNA, 366 bp, Glycine max
  unsure (1)..(366): unsure at all n locations
tggcttggaacctttgggctgatttatgtgcttggtgagaagatgatagaaggggacagtgaaatagagagcggccctagcgagcgactggcgcctagccgacttcctacaagctgctactactactactactactattgccgaccgaagaagacgttgactagaaatactgttactggaaggttcgaagaggtcatctattttgatatgccgaaggtggggccggtcgagcctactcttattccgactcctgcgcctgttggcctaggccttggtactgttcataataagtctattgataatggtgttgntatctttgttggttctactcttgtccttactgtttacgtccctgtttctcctgct

SEQ ID NO: 65304 - DNA, 401 bp, Glycine max
gcttcgaactttgggctggttgagtgcttgcataggcgtctgaatatgcatcgaggggacgcacacgagcatccaagaaaagttacccttacagtagttccccaaaacgaagagtgtcagtccgcctgtcactccctcatcccgtgttcatattctacattcattccttgttattgattaggatacgtctgatgcgcacggtgacttgacctggaatggcgctacacatcatatactgttggtatcaagatgaaatcgcggtcgaacacaataagttgtatctcctaaaggtatccgtttcactatcgcaccgtaacccttcaacttaaatctcaaggagccataaatcaagcccgaactcgaacatttaacccaccatacatatgaaatgtcaaccccgt

SEQ ID NO: 65305 - DNA, 185 bp, Glycine max
cttggacctttgtgattatctggtgagagtatgagggggtttttaagatccaaaggagagagagaggagagcgtgtcacaagccccgggactagttagaggtacgggtgaaaaagcgaaagaaagccatcggtcagttataagacagttagataacagagactgcaaggtacgcaacggagtccg

SEQ ID NO: 65306 - DNA, 387 bp, Glycine max
tttgctgatttatgtgcttgcataggtgcgtgattatgttcgtgggtatgtgcatgcttatctgcttgcatcgacgtgcgacgatgatcgacgggttacccgggaataaacgtctttacagttaccggccctaccggtagtgtcaatacccgccgggtcggtgtatctacgcggagtggtctacgagttttgacgcgatacccgggttcgtcggtgcgagtaggattcggattaattatcggactcatcgcatttcattctctactatcagcggaactgtcacatcaggagatgaagaagctcccactagttatatttatgagtagtcctttattatcgatcatcatcagagaagttacgtccatgcatgtgcgtacgtgatgctac

SEQ ID NO: 65307 - DNA, 351 bp, Glycine max
tgcttgcatggtcgtgagaagtgatagaagggggaagtagccgtagattgagtcagtcagtcagtaagtaagtatagagacggaggtaaagtgaggttacgtttctacgcgtccggtatgcgccctatctccttctcgtgtctcaatttcacttgtcgtctatggaagtattatggcctaagatactgtgagaaagccgaaatctggggataatgagtcctcgtgtatggagaagaagcctaaggcccctacggagaaccatgggaggagtcatcttatagaggaggagcacccgtgttgcccggggacccctgtttagaatacggctagagtggtggagtactaggtgtc

SEQ ID NO: 65308 - DNA, 397 bp, Glycine max
ggctgatttatgtgcttgtttgtatatgagattatgtgcgatattaactacgtcgatggtccacataggtatgatcgagggggttcccttacgtcacctctgcgcctgataacgcgcgcggaacacacatcgcggacgataaagatggcccacttgagtactagtagacgctcatttaaccttgagcgaccaatttcccaacgaaagctttcgtcgcaggagatggaaggattaattcacgtgagagatacagaagtcgcgtcacggtcgaatagagataagctactcgtctgtatatcggtgatgtgcggatcggtaatctctgaatgtaatagatcctaactaatcggatcgatacatgaacgatcttagacacgagaaatgacagagagagaat

SEQ ID NO: 65309 - DNA, 360 bp, Glycine max
tttgggctgagttatgtgcttgcatggtcgtgagaagatgatagaagggcgacacacacacgaactcaatcaaccatcacacggggtcatctaattacacacgcgtacacacccccctatcagcatcagtgcctgcactcatacgaacatcacaacacaacacgtgaagcatcgaattaaccaacggcgagtcctgccggctctctgcttgcgccgcaacgacggactgggcatcagtcagcctcgtagccttatcgcgccgcaacgctcggccccgcccgaagcgtccacaagtacgaccaacccgtcgcgcctcgtagcagacgaacgaactcgacgcgtccaccaacccgtgagcat

SEQ ID NO: 65310 - DNA, 440 bp, Glycine max
tgcttggaacctttgggctgatttatgtgcttgcatggtcgtgagaagatgatagaagggaccgggacgtacgggtccaagaggaccagatcggggggaaaggacaccggaaaaacaaagggcccgtcttaccccataaaaaccgagaaaaatcacggacgctacggcggacacaagaggaacccacacatcttacaaacgcccaccgcaaataccataagcagccaacaacccaccgacaaccacccgcgtaaaaacacacacccagccgcccaccattgcgcgctggccccctcgaaaccggagaccggacccgacgaaacacactaatccccgggaaaataaaagtaacaaaaagtggttgtctcagaggacttaagtccatgcataatcgtacgtgatgctacaatctcctcacagggctattcaaacctaaccta

SEQ ID NO: 65311 - DNA, 488 bp, Glycine max
  unsure (1)..(488): unsure at all n locations
acctttgggctgatttatgtgcttgcatggtcgtgagagatgatagaagggggactagaacccctcgtagcccgacttagtcttttgagaaaccgagtttgatattatatgaaagatattagaccaccccccgcaatcctacacaatttcccgcccgcaagtcatcgtcccacgtcgccatcgcagacgcgctcccaaggagagaagagccctatcgcccaagcgggatggccactactaatacaacctccctccccggagcccgctcgtcgccgtcgtcgtcgttgctccacccggataagaaatanacagaaaccgatataaccggcgcccgcacacccccgacaggaggaagtggtaacaatacgacacactacgcgtcgcaaaccccctccaaaccaaactctaagccagagagtagnaccccgagcctcgattactacgcctacccgagatcgccgacggcgatagacgtaagcgccgaaaaa

SEQ ID NO: 65312 - DNA, 456 bp, Glycine max
tggcttggaacctttgggctgatttatgtgcttgtttatgtgcttgcttcggtgagaagatgatagaaggggatgggcccgacggtaacgacgctggggacccgtccttcgacctgcccgactccgacgtcggtgaggactcccccgaagagcccacaagactcctcgaactttaagaagaaatcggatttaaagcaatcgtacgaggtccagagacgaatttacccaaagaactcattcattaattcaagagatcggatttaaggttccagtcccaggctagccagacgacacgcccgtactacgccacttgcagtcctaatccctcgcaatcctccgcacaggtaaaggccctaaattcctaactcacttcctctccgtccccgttaaaacgccacggcgaacagggaaggaaaaagacggaaaaaaacgcgatcggcctacgcatcgacaccg

SEQ ID NO: 65313 - DNA, 411 bp, Glycine max
tggcttggaacctttgggctgatttatgtgcttgtcgtgagaagatgatagaagggggagcgagataacactatatacaacacaaccttaaaacgagcttcaccatcacagtaacacgacgggcgatatcgagactaaattactagccgaagcagctacacgcgtccttacgaataacaataacagtgtaaataattatatttctttaattgatactattaagctactataactatatccattaactccgattaagtcttacgtcggccatccccctacacgttcccttcccggcgtataagtcccgtctcggaagagcccgagcaaatataataaggatctataaatctctcggtacggacctaacccgacgttccttacggtgccctcatcatctcggcgtgcggtatc

SEQ ID NO: 65314 - DNA, 467 bp, Glycine max
gcttcgaacctttgggctgatttatgtgcttgtttatgtgcttgcatggtcgtgagaagatccatcgagggggcctcagcgcgcgaccgtcgagcgtcgcaatctgcctcctccgcgccgccgcctcgcgcccgcgcccgcccccctctctattcgaaaacgctccgtcgtggcggcaatcgcggccgtggaagtcttcgtaagcgtggtaatggtcgttgaggtcgtaagacgcatttagatccgagtcatatcgagctaattattattcagattccggctacgggagcggtattcgccaaggtctaacccgagggcgtcgaaacgtgcccgtttctcgagaatgacggtcgtaaacgcggattaaatcgtcttcgtaattttcgtatccgtaagcgaggcgccgggagagtaagtcctaagtacagacagtttccaaccatgaacaacgacaaatcaccaacgcg

SEQ ID NO: 65315 - DNA, 281 bp, Glycine max
ggcttggaacctttgggctgatttatgtgcttgatggtcgtgagaaagatgatagaggacatggtcgtgagaagaatgatagagggggccaatgagagttactattgaaaaaaaaaggggaaaaaaaaaaaaagtaagtggctgactcagaggacgtaagtccatgcatgtacgtacgtgaagcgacagtctacacacagagctattcaaacctaaccgatcggttgctgacacataatgcatcgatcgggaaaatttcggagccatttaaaccaactggt

SEQ ID NO: 65316 - DNA, 503 bp, Glycine max
cttggaacctttgggctgatttatgtgcttgtttatgtgcttgcatggtcgtgagaagatgatagaaggggaaaaaaaaaagaaatacaccgggtagcgaacccgcaaacagggtaaaagcaacggacaaggaaccaaccctctcggacacaccagaaaattgaacctgaccgctcaacgacgaaatcaaaatgaaacacccaatcaaaacacacgacttcccttcgaatggatgtccctgcggataaactgaaaacgcccccctaattctaacttaacacgaaaaaaacgaaaaaaaaacattaccccgacaaacaaaacctacggcacttccaccctcaacaacatccacaaaaaaaacaacagcaaccacctagaaccagagaaaaaaacacacacacccgacagaaaactcccagcaatcataccccccacccctaactcaactagcaaacccctaaaaaaaaccacactaagtccgacccccgaagtatccctccaac

SEQ ID NO: 65317 - DNA, 388 bp, Glycine max
aacctttggtctgatttatgtgcttggtgagaagatgatagaaggggagataaagccccgccgtaaagtaaaaaatcatgaagagtcgcttcttacatgaacttaaggaggagagaggagatatagatatcaaggaaatggaaaaagtaatatatataaaaaaggctcgcgttcatctccacacgcaacagacagccctcgaagtagacaaaagaagcatttaaatccaaatcaagtcgatgtcacagaggacttaaatccatgcatctgcatacgtaatccgccaggccccacacaggggtattcaaacctaacctatcggttgctgacccataatgttaagatcgggaaaattgcggtgccatttaatccaactgttccgtagtat

SEQ ID NO: 65318 - DNA, 278 bp, Glycine max
tacgtagacctaatattgttattattatgagagttcacatcgcaagtacgtagaactttatcgcctctctcacttatttacatactccttttactaataaaaatagctatagatatagtcatcgtaaacatagaaataatcaaaagtggtcgtctcacacgacttaattccatgcatgtccgtacgtgattcaacagtcatctcacatacgctattcagtattaaccaatctcttactcgagcataacgatacgatcgcgaaaatctcgaatccattt

SEQ ID NO: 65319 - DNA, 355 bp, Glycine max
tggcttcgaacctttgggctgatttatgtgcttgcatggtcgtgagaagatgatagaaggggagtactacggcgaagtcggcggagagacccaggggttagaagtccatgccagaattaagaggatcatccaacggagtaaactagccggaagaatccgcagtcagtcctttaatcggtccactcgagcgcggagaagtaccactaagttccaggagcaggagaatgagcatcgcccgcgacgaacgctcacggcccaagaaactcgctcccagctaatccgcgcgccccgccacctagcctctagtaacaaatcgtctcggtaactcagccctacgcctaacgttaaatcacaa

SEQ ID NO: 65320 - DNA, 412 bp, Glycine max
gtgcatgcatggtcgtgagaagatgatagcagggcatggtcgccagaagatgatagaagggcatgggggggagaagatgatagaagggggtgggcgtgagaagatgatagaagggcatggtcgtgagaagatgataaaaggggatgaaagacatgacgcaaccgtaaaatggtaaccggtaaccgtaaggaagagagaccattgatgccgaaaaaggaggtgtacccaactaaactaaaataaataaattatacaaaacaaatgaaactgaaaaaaaaaaaagtggttgtctcagaggacttaagtaccatgatgtgcgtacgtaatgctacagtctcctcacagcgctattcaaacctaacctatcggttgatgccccataatgctgcgatcgggaaaatttcggtgccat

SEQ ID NO: 65321 - DNA, 462 bp, Glycine max
aacctttgggctgatttatgtgcttgtttatgtgcttgtttatgtgcttgtttatgtgcctgcatggtcgtgaatgatagaagggcatggtcgtgagaagatgatagaagggcatggtcgtgagaagatgatagaagggcatggtcgtgagaagatgatagaagggcatggtcgtgagaagatgatagaagggcatggtcgtgagaagatgatagaagggcatggtcgtgagaagatgatagaagggcatggtcgtgagaagatgatagaagggcatggtcgtgagaagatgatagacggggacaataacagaagacagagaaaaatcccacaaatacacgtcaaaagtggttgtctcagaggacttaagtccatgcatgtgcgtacgtgatgctacagtctcctcacagcgctattcaaacctaacctatcggttgctgccccataatgctgcgatcggga

SEQ ID NO: 65322 - DNA, 358 bp, Glycine max
tggcttggaacctttgggctgatttatgtgcttgatggtcgtgagaagatgatagaagggcatggccgtgagaagatgatagaagggcatggtcgtgagaagatgatagaagggcatggtcgtgagaagatgatagaagggcatggtcgtgagaagatgatagaagggcatggtcgtgagaagatgatagaaggggctattattaatacccacccgaagtggatgactcagaggacttaagtccatgcatgttcgtacgtgatgctacagtctcctcacagcgctattcaaacctaacctatcggatgtaggcccataatgctgcgatcgggaaaattccggtgccattcaatccaac

SEQ ID NO: 65323 - DNA, 476 bp, Glycine max
gcttggaacctttgggctgatttatgtgcttgtttatgtgcttgtttatgtgcttgcatggtcgtgagaagatgatagaagggacactactggggctcaacctactcgagcaagcgcataagtgaaagaccctctactctcacgggaccaaactttgagacaccttaaaaaaaaaaaaaaaaaaaaaaaaaaaaaagtggttgtctcagaggacttaagtccatgcatgtgcgtacgtgatgctacagtctcctcacagcgctattcaaacctaacctatcggttgctgccccataatgctgcgatcgggaaaatttcggtgccatttaatccaactgttccgtagtatactttttccctgttagtcggtgcaacagtgaagaggtttgtattgactgtttcctttaatagccgtgtagttcgaacggtgaacgggatgtgtttcgcagtggtgtaccaagtgtggtgggcgcggc

SEQ ID NO: 65324 - DNA, 289 bp, Glycine max
tttgggctgatttatgtgcttgcatgggccctaaaaaattttttcaaagggcttccccctctaaaaaatttttataaaggcatgtttcgtgagacgataataaaagggcatgggtcgtgaaaaaattatataacgccatagacgtaagaccatgattgtacgtccttgacgttacaagatcatcacagcggtattcaaaactaacccaacggattgcttcccacaaatgatttaatatcgaaaaatttccgtaccctttaatccaaactctccacaacgtaacttttcc

SEQ ID NO: 65325 - DNA, 289 bp, Glycine max
acccactcacgacaaactcggcaaaggcacaccacgcaccagccctggaaaagcccatcccataactacccccaaaaaacacccaccaaacccctataccaacgaaaccgccaaacaccttaccaccctccaaccacaccacaccaccgaccaacccacctccaccaataaacacccccaacccacccaccacttaccaaacccactttcaaccacactacccctccaaaaccactcccaatataccccccaactccaccaccaccccacacccccacccaacaaccct

SEQ ID NO: 65326 - DNA, 494 bp, Glycine max
  unsure (1)..(494): unsure at all n locations
ttggttcgaacctttgggctgtttatgtgcttgcatggtcgtgagaagatgatagaaggggacccccccactccgaaatatacaccatcagatcgatcttaaaacaatcactcctacctcgtatttcctccgcctcctcgcccagttaaaaaacctcgagcgccaaaccagcgatctacgatcgtcatcacgactaagccacacccccccctttccgttaccccggccactccttccgttaacttaaagggcgcgatcctaagcctaagcattagcgagttcataaccctagtactcttcggcgccccgttccacgcgatcattttagagacccttctacccccctttatcttaagcgtaacctaattaacgagcctcggccccgaagttgaggtattggtattggtatttagcctaagggaagccgagggtaagaggctcctcggcctagtcaggccggaccgcgtangcgttaccggccggcgctcgtctcg

SEQ ID NO: 65327 - DNA, 420 bp, Glycine max
tggcttggaacctttgggctgatttatgtgcttgtttatgtgcttgcatggtcgtgagaagatgatagaaggggataatactactactaataataagtagactaactctctctctctctctaattacaacagctacgggcccgaaggaggaccccgagtagcacgtcgagaaagtaaagatcccgttattgatctaactaaatgaagatccgtccacttcccacggaccgcataaataggttattgccggattcgctaatattagttgcttcggaacgcctaatacgagggatagagtcaaacgggacgtacggaaagtcgccgaaaggaaacttaaggatgaagtaacgggcgaccatactaccaaggcgaaatagtcgtcggaagtagtcggtccgttcgtccgacaataccgctacg

SEQ ID NO: 65328 - DNA, 389 bp, Glycine max
aacctttggtctgatttatgtgcctgtagatgtgcgggtgagaagatgatatacccccactaagttacggaaagtacgaagacgagagcgatccccataaagaacaggaggaattctacgtcgactatttcttatagtgattaactaggtttaaatactaagaattatgctcaagatgacgctagatcagaaacggggccgaggaaaacacccgtattacgaagtcctatgagaataccgtctggttcctatacatcgatcaccataatctaaaagtcggctgtacaagcctttccgatagctcgatttctttagcttcgtaataacccggatctatcgtttaacacgccgattcgcataggaacggaactcatctcatataccgcaat

SEQ ID NO: 65329 - DNA, 487 bp, Glycine max
tggcttggaacctttgggctgatttatgtgcttgtttatgtgcttgcatggtcgtgagaagatcatagatggggatagacacccacgcgctcaggagatacacatcaaaaaattaaggtgagcgaaagaaaaaaaacgctaggcgcgctctcagtagcgctcggcttattagtagtaatagcggtcgaagtagtaggcataaagttcaaatgaagaatagaataggtactaacgggcggtacgacgggcctatcgtgtgcgacagaatcctagtcggcggttcctactccggcgcctctagtaagcggttccgctttatcttccgactcagagcctttcgtacctgttctcgtacatactccggtgtccctataacctgtacccatactggtgctcctgctggggatcgagactcctaaagggagtacaccgccgtgaacgcacgccgacgtcggtattattgcggggtcgcctccgttgtcggtcc

SEQ ID NO: 65330 - DNA, 452 bp, Glycine max
ggaacctttgggctgatttatgtgcttgcatggtcgtgagaagatgatagaaggggcggaacggcgacgtctaccaatccggtccctagcgagggcgagcacgtcggtagtatctctagtacgtccgggaggaatttcgcctaggatatcgccagggaaacgtttaccgccggaggtatgggtgcgcctaggcccgttaagggtcacgttaccgttaagagctcccgggaaaccctcgataacgagtaccccgcggcggagcactacgctatcgccctctacttccacactcgacacgctccccgccaagagcaacaaaccccaggtccagacactcctaagacggcacgacaaacgaacaaaccccaccgagccccaagtaaaaaaaaccaaccaacaaaccaaaaaaaagtggttgtctcagaggacttaagtccatgcatgtgcgtacg

SEQ ID NO: 65331 - DNA, 263 bp, Glycine max
  unsure (1)..(263): unsure at all n locations
ggggtggtcgtgagaagatgatagaagggcatggtcgtcagaagatgatagaagggcatggtcgtgagaagatgatagaaggggcaagcagcatacaaaataaaaaccaatcgagcaacttcacgacttacacttatcgtaaacaggactgacttaatagccagagggattcaaaacaaacccnanaaaaaaaaaaaaaaaacaaaacaaaaagtggttgtctcagaggacttaagtccatgcatgtgcgtacgtgatgctac

SEQ ID NO: 65332 - DNA, 374 bp, Glycine max
cctttgggctgatttatgtgcttgcatggtcgtgagaagatgatagacggggggcgaggccaacaaaaccaaaccagcggtgtatgccacgtgtcttagagagcgtgaggtgagagagaacgataacactcgcccctccagccttcctgatgttctagccgcgcaatcatagaactctacggttaacctttatccatttcctctccctcctcctcaagccaatcgccctatcgcgtctcttccttttcttaatactcgccactgaagagggcttcctcttcctattagaaccgattagcggccgcaaggtgcgcggaagagaagaaacggagtaaggacgtaacggcgaaggaaagacctaaggcgggaccgtc

SEQ ID NO: 65333 - DNA, 400 bp, Glycine max
ttgggttgatttatgtgcttgcatggtcgtagaagatgatagaagggacctcggcgaggacgggtttctcgatcggaagaagggggtagaaaacggcggacggaagaacggcaacggactctaggtccggaattaggacatcggcgataaggacaggtaaagtcggagttagggaaacgtagacaaggagtgcttcagtcggaattaaggaagcggaagcaactagagtcggagcctagtcagcgtcggagtcaatgacaaccggaataataacgggctcatatagatcgtagaagtcagtcggaaaaaaactcatcataatcgaagagattaatacttacgatagcgggcggaataagggactcagcctaaatatcatcctctggggacggggctaact

SEQ ID NO: 65334 - DNA, 388 bp, Glycine max
ggttggaactttgggctgatttagtgcttgagatgatagagggcatggtcgtgagaagatcatagaagggggcactgtaggaaccaggaggtgccacggggcctctcgcaattatgtcaacccctgtagcgaccggaaccgcggtgctttcccgcattagaacccgccctaatagaggattccttgtcaactcaccctattcaatcccggcctccatcgtaataatacgtcgtcggacgacgcgggtgaccgcacactcagtatagacgaaattgtctacagcattcacaccgagcgagggcgaacaatccctcgcacaaatagacgtaatctccaagaacgtgaactatcagccggatgtcggagaggagacgaccctagtctctac

SEQ ID NO: 65335 - DNA, 352 bp, Glycine max
  unsure (1)..(352): unsure at all n locations
tgggctgatttatgtgcttgcatggtcgtgagaagatgatagaagggggacaaaaatgaagaaagaaaaactcaagatcacgcgagagaaagaaatgtcctctctctgagtgcgactgcgacttgcctttccttaaccccattaaanaaaaaaaaaaaaaaaaaaaaaaaaaggtggttgtctcagaggacttaagtccatgcatgtgcgtacgtgatgctacagtctcctcacagcgctattcaaacctaacctatcggttgctgccccataatgctgcgatcgggaaaatttcggtgccatttaatccaactgttccgtagtatactttttccctgttagtcggtgcaac

SEQ ID NO: 65336 - DNA, 418 bp, Glycine max
tggaaccttgggctgatttaggtgcttgcatggtcgtgagaagatcatagacgggggcaccgtactagcgaaacggtcggcctaaccggaagtggagggaatataagtatgggcgcggagcggtatgcgtgattcttaaatttcaagaactttactgctcctcctgacgctattactggcaatacctttgttggctgaactaagacggaatctcctgttgacaccgtttttaaaatcgttgagaaccctaggtagcctcgtatcggggaacataggaaagtaggatcgttcgccggccataagggccgctaaccctacagagccaccaaagaccccacgacctatgtcggcgaacccgcaaagggagacggcagcggacgcgcccttactcacggatctaagcccgacgacgaaaatc

SEQ ID NO: 65337 - DNA, 206 bp, Glycine max
ctttgggctgatttatgtgcttgcatggtcgtgagaagatgatagacgggggtcgcaacccagcacgagaacggtatcgtcctagaggagaccaacacagaaataaaaaagaaattaataaacacccgagccaaaactcgcaaaaacacaagaaaacaccgctatcccacgacaacacccacgttcgttgaaaataaatccgtcgc

SEQ ID NO: 65338 - DNA, 239 bp, Glycine max
tagaagggcatggtcgtgagaaggtgatacacgggcatgggcgtgagaagatcataggagggcatggtcgtgagaagatgatagaagggcatggtcgtgagaagatgatagaagggcatggtcgtgagaagatgatagaagggcatggtcgtgagaagatgatagaagggcatggtcgtgagaagatgatagaagggcatggtcgtgagaagatgatagaagggcatggtcgtgagaag

SEQ ID NO: 65339 - DNA, 349 bp, Glycine max
aacctttgggctgatttatgtgcttgtttatctgcttgtttatctgcttgtttatctccttgtttatgtgcttgcatggtcgggaggggatgatcgaagggcatggtgaaaataaccaacaaagacgagcccgaagaataatacggcggcgtcaaaggcgcgcccgccgtcctccccttccgcgggggccatagtcgtatgtacggaatcgagtcctcctaaaagcgactagctactaagccacgacgacgacgagcacctaaaattacgtcgcgactctcgtacgcgtatatgtctaacgttcttctaacgtagtcgcgaagacaccaggtcgaacctacgttatcta

SEQ ID NO: 65340 - DNA, 316 bp, Glycine max
gaacctttgggctgatttatgtgcttgcatggtcgtgagagatgatagaagggcatcgtcgtgagaagatgatagaagggcatggtcgggagaagatgatagaagggcatggtcgtcagaagatgatagaagggcatggtcgtgagaagatgatagaagggcatggtcgtgagaagatgatagaagggcatggtcgtgagaagatgatagaagggcatggtcgtgagaagatgatagaagggcatggtcgtgagaagatgatagaagggcatggtcgtgagaagatgatagaagggcatggtcgtgagaagatgat

SEQ ID NO: 65341 - DNA, 299 bp, Glycine max
ggggataccccatattgcctaacccgactctctttcgctcggctcccctcgctcgctcgcggtctccctctctctcctggggagtgagactaactagtcatagtccttttttataaaaattaaaaactagacaatttagacaaaaataatctttaaaaaaaaaaaaaaaaaaaaaaaaaaaaaagtggttgtctcagaggacttaagtccatgcatgtgcgtacgtgatgctacagtctcctcacagcgctattcaaacctaacctatcggttgctgccccataatgctgcgatcggga

SEQ ID NO: 65342 - DNA, 424 bp, Glycine max
  unsure (1)..(424): unsure at all n locations
aaaattgggttgattgatgtgcatgatgtcgtgagaagatgatcagaggggcttccctcagatacgataacggggcggggcgaggaggggcaccgctcatttaacttgtgatttcgatctttctaatacgcctttacatctgcatttgacatctgatagaccaaaacccaccactctacttttgcatttaccgggcactgggcacctttgattctgctttgcattagacctaaaccagaaaaacgcccccccccgcaaagaaaacaccaaaaacccgaccccagaaaaaaacaaaccgaccgccaaatacccacccccaatcatccacacgccaacaaacccaccacagtgtccgcgctcataaaaactgccaagaaaaagacaccaaaccacgcaaaanaaaaaaaaaaaaggaaaaacaaaa

SEQ ID NO: 65343 - DNA, 388 bp, Glycine max
ggaacctttgggctgatttatgtgcttgtttatgtgcttgcatggtcgtgagaagatgcatagagggaggttatggtgggaagcctatgcggactggttatggtcatgagtaagccgagacgttgtatggcgtcacggatgttaaggatttgaatcctgaggacttcgcggagactgttattgcgcgactgtggcggcccttggcggttaggctcgcaaacagcagcaaccggtgaaatgcgcccccctgcgcctaacaacgcgaagtgaactggagaagaagtgcccctcgcgaccgaccgccacagactcgactcactcgtggcacccggcagcagtacggtatccgccgcatacacactgctccggagccggaagcgtatctgca

SEQ ID NO: 65344 - DNA, 403 bp, Glycine max
ggctccgaacctttgggctgatttatgtgcttgtttatctgcttgtttatctgcttgcatggccctcagaagatgatagaagggggtagttaagggaacgacaacttctaacccctcgagtagttaaatatctctctctcgctctctgaaaacctctagcccgtagagaaaactcgaactacgctgcggcaagtgcacgctgatgactattcctcgcgcgatactcaacgcaattattctatctatgtcgtcactactgcttaagatcgtagtgcccgggtctagagcattgatcctttctagcctaaattcgacgagacaatcgttactacgaacgatcccaacgagttcggactatccgtcttaatcggaccgcactctggcggtattaaacacacggcta

SEQ ID NO: 65345 - DNA, 380 bp, Glycine max
  unsure (1)..(380): unsure at all n locations
gcgccaccgaagagcanggacgacagaacttgcactgcagtaaaatgtatgagccaagggtggtgacgggaggtctactggaggaccctctggcggcggcgtcggtgctggattctggtgctgacgtgtgattcccttctgaatatgaccaatagtaagaagaagagaaccggtatgatcgcctttagcattctctttttgatgaggatcctcttgactctgactagccgtaaccttcttgttcttaaggtcttgataagaatcttaactgtacctcttgtactgctggtaagcatccctttggcatcttccctatcttccttctcatctaattaacatctgcaaccctacgcgcctctgaccccgtcctctacatatat

SEQ ID NO: 65346 - DNA, 426 bp, Glycine max
  unsure (1)..(426): unsure at all n locations
tggaacctttgggctgatttatgtgcttgcaagagatagaaggggataacagaaagagaatacaaggctaaacttccataacggtccccgacacccactaatgattccacgccccgagtgctacacgtaccgtcacgacccctgtcgtaggagcagcaatccgccccgagctcttatcatcaagtcgttaggagtgacgtacacacgacttaatgcgtgatcccactcgttacaaaaagggccccgctaaagggggactccgcaagttaactacctcacacccctcgtgccgtcgcacgaaacgagcaactcttacgcgcgaaaaacagaacaaaatcaccggagccagcaagaatcctccgcatccgacccactaacatacgcgtggcgcgatctgccgtcctcatcnacaaccctacgcgcctc

SEQ ID NO: 65347 - DNA, 340 bp, Glycine max
aacctttgggctgatttatgtgcttgcatggtcgtgagaagatgatagaagggtgtcaccacgggaaaaaaaaaaaaaaaaaaaaaagaaaaaagttgtttgccccaagggcttaaatcccttccttttccttccttaatctacaatccccccaccagggtatttaaacctaacctaaccgtttgtgccccataattcttcgattcggaaaatttccgttccatttaattcaaccgttccctaagaaaacttttcccctttaatccgttccacaattaaaaagttttgaattacttgttcccttaataaccggttaattccaaccggtaaccggattttt

SEQ ID NO: 65348 - DNA, 417 bp, Glycine max
ctttgggttgatttatgtgcttgtttatgtgcttgcatggtcgtgagaagatgcatcgaggggaaggcaaatgatggcgatgaggggcgggcggtgttgcatgttctactttacttactgttactggtattccttccaaatgatactgtgcttactattttcccctctccttctatagctatagtagcggcagtcctttaaaaaagagcgttaacggtacttctcctagatctacgggcgaaggaacacaacgaagtatcgaaatccgtcgacgacactagcggtacgaccctcgagtagagcctacccttcgtactcggattagaaatttagtactacctactcgtcacaacgagaaagaccataacaccggcgattaggtccgacagtccgtagcttttcccgctaaagtccttt

SEQ ID NO: 65349 - DNA, 359 bp, Glycine max
  unsure (1)..(359): unsure at all n locations
ctttgggctgattgatgtgcttgcatggtcgtgagaagatgatagaagggcggccggagcggaacggaaatcccgtaccggatggaccgcatcacgtcgagcatacgaatatcggactaggcgtcggagccgtcaattgcgcgaagcggttagggcattacgtaccgaacgacctgagttaggtcagcaatcctattgcgctctaacccaccgaggggaactcacggccgttcctaatcggagcaattcctatcatgggatctatagcccaatagaaacaaatcatcgttatgttccggtatctctccgcatccaaccacacaaagncaccacacacccacagcccacactacaggaag

SEQ ID NO: 65350 - DNA, 427 bp, Glycine max
aaccattgggttgatttatgtgcttgtttatgtgcttgcatggtcgtgagaagatgcatcgaggggataccaccctactggaaaaaagaaaagacatgactccacgacgaggggaagaataagatacgaggaagacgagtaactctgagtcccgcattagtctcttgtgtctgcctctaattcttcctgtctgttctcgctgctgccgatgcctctcgatgaggccttgttgccggtggtgctatggtgctttgggtcgggctagacactgttggtgggacctgttcttccgtcgccgggaacactgtcggtgccgacgtcccgcggactggcgatgcctcctactgggcctgcgccgacgttgcgggcctcgggaccggctacgtctcctcatgctgttggaacttctcttagttctcttgctcct

SEQ ID NO: 65351 - DNA, 329 bp, Glycine max
  unsure (1)..(329): unsure at all n locations
ggttggantttggctgattagtgctgttattgcctgtttctacctgctcgtcggccccatcatagaaggagatccctagccggaatgagataacctaacgtaactcggtctgactacggataggaaaatacccgcgcccccgcctccgtcttcgtccgctccagtcctcgacgcgatggcgaagagagtagacgtgaaagaccgtccgataacggaagtattggccctatggctgacctccactcgataggtaacgcctatacagcgcgtatgagtcacagccctactggtggctagccttaatgtttcccccggaaacgtcccccgtc

SEQ ID NO: 65352 - DNA, 458 bp, Glycine max
tgggctgatttatgtgcttgcatggtcgtgagaagatgatagacggggatcgcgtccaccgccagggcccgtaattctaacgggtcgggaagaactcttactcccttactgatgacgaagaagaatgaggaatgtagtgacaactagagtacgaagaagaaataaacaacgacgaagaagaagaatgccctgaggccgggtggaagcggttccctgtctaatgtccctgttaatgtaaaacctaagaatagctatcacaatttagttactacaaagaagtaaagggagcctcacaaaaacgtcaagaacgcgaacaagcccaagaagccggcaaagtagtaaaattagtagaacgaatttctcctggtctagagatacacagagccctcgcccgtccccatagaacgcaaacgaaatcgaaaagaataaggatgacagcgagaggaaggaagaggaag

SEQ ID NO: 65353 - DNA, 324 bp, Glycine max
  unsure (1)..(324): unsure at all n locations
gcatggtcgtgagaagatgatagaagggcatggtcgtgagaagatgatagaagggcatggtcgtgagaagatgatagaagggcatggtcgtgagaagatgatagaagggcatggtcgtgagaagatgatagaagggcatggtcgtgagaagatgatagaagggcatggtcgtgagaagatgatagaagggtcagcattattcaaaaacaccccctttcaccaaaccataataaaaacagcangggaaaaaaaaaaaaaaaaaaaaaaaaaaaaagtggttgtctcagaggacttaagtccatgcatgtgcgtacgtgatgctac

SEQ ID NO: 65354 - DNA, 139 bp, Glycine max
tttccgccgtcccccccggttcattacattcattcatcgcactgtctaaaagcttccgaaagggttacaccacaccgtaaaatatccgggaaagatattatgaaagaaattccacggggtactctacgatcgtaaggac

SEQ ID NO: 65355 - DNA, 254 bp, Glycine max
tagaaggggaccgttactaaaacataagcgcacttcaagaagccctccgagacagaaccctgtcccataaaacgaagaaagcgcccacagtaacccccttctcatcagccgcacccgcctctatagccatagtcctagaattagagttattagccatattcctacgattattaaaggtagggttattacaggtattagccatagtcctagaactagagttattagccatattcctacgaatattaaaaggtagg

SEQ ID NO: 65356 - DNA, 464 bp, Glycine max
gaacctttgggttgatttatgtgcttgcatggtcgtgagaagatgatagaaggggaccctaccctctaacctctataccaccacctagagtctctctctctctttttaagaaacctaatagagccccgaccaatccgaaaccgcctaataagaaacggagaacctaccgggaaagcatggaaaagagtccaactctgaggtcatagagccgaggccggggccgttcggaagtgacgagttcgagaaatgccccgtcgccagaagtaataagagactcctattagaagtaagcgaagaagagcgtacaagtaagggtaatacgaacctcctcgacggcctcgacactataagcgacgattaagataatgccgcgttattcgtaaagcaagcgcgacacacacacacacacacatatacacttccccaaccccttaaaacggcgttagagacaaaagaaaaaaata

SEQ ID NO: 65357 - DNA, 462 bp, Glycine max
tggaacctttgggctgatttatgtgcttgccgtgagaagattatagaagggggagcgaacagttccaacgttgttgttaagattattgttgattggtcgatcctgcataatcgttcgaagctccttgttacttaaactcttggtcctaaagttaataatgttgttctctcttttggtaaacgtggagctcttacttttcataagactagtattcttattaatcgtgtcattactaaagcccgaagagagagctacggatgtaggaaattggacatcatctatcaacacacgagcagtaccaccaacaccaagaacaaaactgagggcgacgagggtcttatccacacgtttttctttctccgcacggagacccgcaccgggaaaatcccaaaacgcgccgtgccgccaacctctcccacgaagcatttacagccacactcaatcccaaaaccggccttcttc

SEQ ID NO: 65358 - DNA, 375 bp, Glycine max
  unsure (1)..(375): unsure at all n locations
gggggtggaccataccgctaggcggggagcccggtcgaggtggtgacgaaaagacctcctcatgtgcacaagtaggcgccggtggcggcgacgggaagcctagaggtcaatggcaattgagccgggccgagccgtgatctggtcgatctgccgatctagaccccttccgaattgatgcaccccttaagtccggacgttgttaagatcccctccggacattcgcgggacaacaatgacaacaataaacggacacgaaaatgannnanaaaaaaaaaaaaaaaaaaaaaaaagtggttgtctcagaggacttaagtccatgcatgtgcgtacgtgatgctacagtctcctcacagcgctattcaaacctaacctatc

SEQ ID NO: 65359 - DNA, 476 bp, Glycine max
  unsure (1)..(476): unsure at all n locations
tggntctggacctttgggctgattgtagtgcttgggtcgtgagaagatgatagcaggggtctgctcagcattctagcgcgagtgcctcgttgcatgttcgtccctaactgatcgtaggactcctcctcctcctcgtcgctctttttacagacggaccggtaagggtaaaagtcagtggagtaatcgacgtagacaacgtcgtccgtacccgtcgcgaccgtacccgccggcggacacgctacggtcctcccttaaacgacgacctctacacacgtcgggggcgtggcccctattattccgcctatcgcttttaaccggttttcccctaactgttacttatccatgcggccggacttaatcgaagcggaaaagtacttttagttataattactcgctaacgcaatctaaaaaaagaaatttggcaaaaagcaggccccccccaccacaaattccccccgggggacgacacactcccg

SEQ ID NO: 65360 - DNA, 252 bp, Glycine max
tggaacctttgggctgatttatgtgcttgcatggtcgtgagaagatgatagaaggggatctctatactcaatcacgatcgttccttacgggtttgtaacaacgacgagtattagtcctcccgtctctctactctcccgtgttcctattattctacattcattccgacttactgtcgacactgggtctaacaacgaacgccatttcgccgaaaacggaggtatacactacactccgctagatacaatagtacc

SEQ ID NO: 65361 - DNA, 319 bp, Glycine max
ttgggttgattgatgtgcatgtttatgtgcttgtttatctgcttgcatggtcctcagaagatgatagaaggggagattgtaggcgaggtcgcgacatttgtcgagctcaagtacactaacaagtggaggtaaaaaaaaaaaaaaaaaaaaaaaaaaagtgtgtgtctcacaggagataaaactatatatatgtgtatatgagatcatacactccacacacagctattaaaaaacaaaacatcgcgtgtgggcccataaaatgcagatatcgaaaaaattgaggtgatataaactaacactgccgtagaatataatttcc

SEQ ID NO: 65362 - DNA, 307 bp, Glycine max
gcttggaacctttgggctgatttatgtgcttgcatggtcgtgagaagatgatagaagggggaatggcacaatatcggtgtactcatttcgaggtgctgtcctctcctctcgctgcgagctattacggcgagggccagcgcgtcgaatgacgtctcgaagagtacgcataacgtcgagaaaaggggaaagtgttaagctacgaccaggttacttcttaaagctaccactaaaccttccccggcgacgtaaaagtatggacatactggagagcccgagcacgccgacgattatagggtcggcaaaactg

SEQ ID NO: 65363 - DNA, 380 bp, Glycine max
  unsure (1)..(380): unsure at all n locations
tagcccggactcattaaaatcagtanacagctaaaggagaaaaaagagagcaaaagcccagccgagttaaacggcttagagaaaatgaaagtcattaacaaaaaaaaggcgcgcctcgacggcaaaatacaaaaaggagaaaaaaaaaggtacgaaatggagatctgagtaagacactacatccaaaccatacccgcatacaaaaaaaaaaatttccataccacacccggccagaaaaaaaaaaaaaaaaaaaaaaaaaaaaaggtggttgtctcagaggacttaagtccatgcatgtgcgtacgtgatgctacagtctcctcacagcgctattcaaacctaacctatcggttgctgccccataatgctgcgatcgggaa

SEQ ID NO: 65364 - DNA, 380 bp, Glycine max
tggctcggaacctttgggctgatttatgtgcttgatggtcgtcagaagatgatagaagggggccgccaaaccaagtaagcaaggccgggacggagggaatcaacagcagtggcgacaatgcgcgcgtgggcgcggcgtacagcaggacgaggacgaaggcgacggcggtcacagatgagagcgaaggaagtcctcacgtctccaagcgggtttccgacaattctcctattattacggttatcgcgggagaagtactactattcgaaaacgacggtacggcgcctccggcctacgccgagtttaaagcctataatcacgcgcactttactggatttggcggagtagttccccacttcgtaatcgcagcagcggacctggcg

SEQ ID NO: 65365 - DNA, 357 bp, Glycine max
tggcttggaacctttgggctgatttatgtgcttgcatggtcgtaataatatgatagagagcgatcccgagctagcgcggtcatcataacaccgcgagcccctactccgacttaagaggactctacttcatcttaacctacattacagtcgaacctctcactaatcaacgacgcactactcacacggaacacaatattagaaccccccaccgggaactcaatagaaacaatttacatcaaagaccacagatttaaacaccaccgtacttaccgtcatcgattcgcctacgacagtcatcatcgacccgtcatccacaacgcatgcaaaaattgctattgaaagcgatcaaccctaaca

SEQ ID NO: 65366 - DNA, 280 bp, Glycine max
cgagaatcaagaaggagaagtaaacggtccttctaacgactctccttttagtcgccattaccgctaattgcgttggcgttggtacggccgtcttacctatcggttctaagcttacggtcggtccttttattagaaagattaataacgataccattcttaccgtcagtaatggcggaagagcgtaacgtacgtaagcgcggttattagccggtaagaaaaagcccgagatctcccttcattcgttagattccgacgacgtataaccggtaaaagaagcaga

SEQ ID NO: 65367 - DNA, 290 bp, Glycine max
caacaaaaacgaacctcaaaatatgagtcccctcaaaggcgcgcgtgacatcatccccttcctcagaggccatagtcgtatgtacggaatcgactcctcctaaaagcgactagctactaagccacgacgacgacgagcacctaaaattacgtcgcgactctcgtacgcgtatatgtctaacgttcttctaacgtagtcccgaagacaccacgtcgaacctacgttatctaaaccgcaagaatcgcacgcgtatatttctataattaaaataacgctccccctcccatatt

SEQ ID NO: 65368 - DNA, 326 bp, Glycine max
atagaagggcatggtcgtgagaagatgatacaagggtcgggagtaatcttgctataaagattactcgcgtttacacgcccgataaattatcccttaatatctttatcgctcacgatcggtcgcatagcggggagattagaactacgtattgtcgaagtcgaagctcccactcaacgcgattgcgggccgtacgcaaacaccgctgccccctgccaagtactcgttatgcccgtaatcatcaccatcaccacgcgctgggaacccaccgtcttgccgtccatctaaatacaacaccatcagttcccccggcccccccccaataagcc

SEQ ID NO: 65369 - DNA, 374 bp, Glycine max
tggatccgaacgtttgggttgatttatgtgcgtgcatggtcgtaagatgataagagaccccatccgagtttaacccgacccctacctacatcggcgatggaaaacgatcgcgcgcatccacgcgggaaacgtccaaaccctaagattaaccgtatctatacgtacacccctacaaagtagtagtcggcgtcactaggcgcacactacgctccccgccagcacctcctacagccgctagaatcggcttggattggcctaaccgggaataggatcggcgactggcttggctatctcaaaaaagtaaacgaccctagatttagcgagaatcggttaagaattggctaaacaaaaattggccagaattggtatccctt

SEQ ID NO: 65370 - DNA, 282 bp, Glycine max
atagacgggcattgtcgtcagaagatgatagaagggcatggtcgtgagaagatgatagaagggcatggtcgtgagaagatgatagaagggcatggtcgtgagaagatgatagaagggcatggtcgtgagaagatgatagaagggcatggtcgtgagaagatgatagaagggcatggtcgtgagaagatgatagaagggcatggtcgtgagaagatgatagcagggggtagggcatacgctaagtaagaagattacggagactaatttcgagaatttaactac

SEQ ID NO: 65371 - DNA, 465 bp, Glycine max
  unsure (1)..(465): unsure at all n locations
ggcttggaacctttgggctgatttatgtgcttgcatggtcgtgagaagatgatagaagggggcagaaacgggagacgtccctctcctaaatacgggaataaaacctccagacagactgcacagaagccacggaataaaacaagacaaaaacgatcggagccgcgaccacgacaacgaccagggcgagccccctaccgggcgaccataactacttacccgactaaaccggattaaactacgcgctcgataaatctagacgcgccgattcccgcaaaacagaacgcgtgttcccatcaacattcttcggtggcggctcctcacacacacaccgcgccaaaaagcgcgcggtcggccgcggtccgagtaaacttaccgacgtctgctacaccgtggttaatagagtaagccttcgtgcgtaaagacgctaaaaataaacaacaccccgncataaaaaacgccagaaaa

SEQ ID NO: 65372 - DNA, 376 bp, Glycine max
ggctctcgacctttgggctgatttatgtgcttgtttatgtgcttgtttatctgcttgcgtggtcgtgaagatgatagtagggggcctcagtgcgcgcgaccgccgcgatctgcctcctcctgctgccactcctcctccccgccgcccgcgcgctcgcccccctctctattcgaaaacgctccgtcgtggcggcaatcgcggccgtagcagtgttcgtaagcgtactaattgtcgtggaggtcgtaagacgcatttacatccgagtcatattgagctaattattattgacattccggctacgggagcggtattagccaaagtctaacctgagagcgtcgaaacgggcgcctttgtcgagaatgacggtcgtacacgc

SEQ ID NO: 65373 - DNA, 473 bp, Glycine max
aacctttgggctgatttatgtgcttggaagatgatagaagggtattacaccttccaccgcacgagctaggacctttgggcggtaaagatagcttgcatcgaattctgcgacgtagacagaagactcttctcctacatagcgcactggacgttattactcctaaacgacctctacgtagactacttcaccggattcgagaataggacagaactcagggaccccaaggagagcagagacttttggcccgagaactgcgacatgaagatagagaagaaggaaccgtacggcgaagttagaagggacctctagaccgtaaagagcgagaaggacgcgtgagccgacggtagagaagatgataataaggacactagacacgaatgggacagttacaacgacctaaaaggcgataccaagatagataaagacggtcacggcacggcaagtagtagtagttattcgagccggaaagaact

SEQ ID NO: 65374 - DNA, 398 bp, Glycine max
aacctttggtctgatttatgtgcttgcatggtcgtgagaagatgatagcaggggacgttcacgacgaagccgagccgcggcgtcgagccgcggtcggacgcgcgaactaaaacaagctccaagtctctccgaaccgcgccgcctaagacaaccgagtacaagtaaatataaaccgcaatcacttaagttccaagtaacacaaatatcatctccgaccctcaggccgaaactgtcggcgtcggtagtccgaatacaagaatccgcacaaaccatcgggaaccggctatcatgcgccccgagtcgaaacccccatcgaacccctcagatactcggattaaaaccacgaaaaaagaaataagtaacccggaaaaaagacgccccccttaaatccaaaaagt

SEQ ID NO: 65375 - DNA, 339 bp, Glycine max
tggtcggaacctttgggctgatgtatgtgcttgtttatgtgcttgagaagatgatccacgggcctggtcgtgagaagatgatagaagggcatggtcgtcagaagatgaggcgagggcatggtcgcgagaagatgatagaagggcatggtcgtgagaagatgatagaagggcatggtcgtgagaagatgatagaagggcatcgtcgtcagaagatgatagaagggcatcgtcgtgagaagatgatagaagggcatggtcgtgagaagatgatagaacggcatggtcgtaagaagatcatacaaggacatcgtcgtgacaagatcatacaacgccatcgcc

SEQ ID NO: 65376 - DNA, 398 bp, Glycine max
tggcctggaacctttgggctgatttatgtgcttgtttatgtgcttgcatggccgtgagaagatcatagaagggcatggtcgtgagaagatgatggaagggcatggtcgtgagaagatgatagaaggggataggcgcccgtaacatcagtgacagtcgacaagagagacattaataagaaaagaaaaaaagaagagccgagacctttcccgaagaaaagacggtactttacaggtaaagtcacgaagtcggctaaatcaagggttgaatcgaggaaaagatgaattagatgacgggtaacaccggagagaaggtctaagtcgtaaaggagaagatttaggaaacggtttaagtcgtaaaggagaagatttaataaatagtttaagtcgttaaggataag

SEQ ID NO: 65377 - DNA, 326 bp, Glycine max
tgatttatgtgcttgtttatgtgcttgattacctgcttgattatcctcgtcgatagacgataatagatggtcatgggcgtaataaaattaccgaagggcatagacagaaaaagataataaaaagtggttggcccagagaacataattcaatgcctttgcctacataatattacagactcccctcagcgctatacaatcataaactatcgtttgctgcacaataatactgagatccataaactttcgatgataattaatccacctggtccgtagaatacgatagcccgactaggccgtgcaacaatgataaagtttcatattcactg

SEQ ID NO: 65378 - DNA, 485 bp, Glycine max
gcttggaacctttgggctgatttatgtgcttgcatggtcgtgagaagatgatagaagggcatcgtcgtgagaagatgatagaagggcatggtcgtgagaagatgatagaagggcatggtcgtgagaagatgatagaagggcatggtcgtgagaagatgatagaagggcatggtcgtgagaagatgatagaaggacatggtcgtgagaagatgatagaaggacatggtcgtgagaagacgatagaagggcatggtcgtgagaagatgatagaagggcatggtcgtgagaagatgatagaagggcatggtcgtgagaagatgatagaagggcatggtcgtgagaagatgatagaagggcatggtcgtgagaagatgatagaagggcatggtcgtgagaagatgatagaagggcatggtcgtgagaagatgatagaagggcatggtcgtgagaagatgatagaagggcatggtcgtgagaagatgata

SEQ ID NO: 65379 - DNA, 366 bp, Glycine max
ctttgggctgatttatgtgcttgtttatgtgcttgcataggcgcgtgaatatccctgagagatgttggcgtgaggagatgatagagagtactgtttgtccgatcgggtccatcatcgcgtcaataacaccctcctctccttattctcctcctccaggtttccataacgggcttaatccatccctgtgcatccatcgtgggacagactacgaacaatgatcttgaagaataggcctatcggttcgcgtggtcacatcgagtacatcgtcagagtactctcccgttatcgcgaagtagtccgcgctataggtcacaccggttaaacgtctcactactgacgtatctaccatcgactgctacactgaat

SEQ ID NO: 65380 - DNA, 146 bp, Glycine max
ggaacccttgggctggatttatgtgcgttgcgtgcagaagatgcatagacaggggaccgtcctctaagaatctcttccgtctgaaagtgaactcataggagtcatcggaagttccgcaaagcacgggcttacgagcccgcaacacg

SEQ ID NO: 65381 - DNA, 449 bp, Glycine max
aacccttgggctgatttatgtgcttgtttatgtgcttgcatggtcgtgagaagatgatagacgggcatggtcgtgagaagatgatgagaggggatggtcgtgagaagatgatagaagggcatggtcgtgagaagatgatagaagggcatggtcgtgagatgatagaagggaaaaaaatccgctcggacgacgtccccccgccgacagttttggaaaacaaaaagaaattaaaaatagagccacaaaactagcaagaaaaaacaatcaccaccaagaaaaaaaaaaacaaaaaaaaaaaaaaaaaagtggttgtctcagaggacttaagtccatgcatgtgcgtacgtgatgctacagtctcctcacagcgctattcaaacctaacctatcggttgctgccccatagtgcaacgatcgggaaaatttcggtgccatttaatccaactgtt

SEQ ID NO: 65382 - DNA, 444 bp, Glycine max
aacctttggtctgatttatgtgcttgcatggtcgtgagaagatcatagaaggacatcgtcgtgagaagatgatagaagggcatgggcgtgagaagatgatagaaggacatggtcgtgagaagatgatagaagggcatggtcgtgagaagatgatagaagggcatggtcgtgagaagatgatagaagggcatggtcgtgagaagatgatagaagggcatggtcgtgagaagatgatagaaggggttggaaaaaaccaacccaactacagcactgcgtaaaaaaaaaaaaaaaaaaacaaaaaaaaaagtggttgtctcagaggacttaagtccatgcatgtgcgtacgtgatgctacagtctcctcacagcgctattcaaacctaacctatcggttgctgccccataatgctgcgatcgggaaaatttcggtgccatttaatcca

SEQ ID NO: 65383 - DNA, 447 bp, Glycine max
ttggctctggaacctttgggctgatttatgtgcttgcatggtcgtgagaagatgatagaagggggacgattctacccaaggcctttaataaaatatgctatcacttcaagggaaaaccattcaaaaccaccacatataaacggaagcagagccattaaccggaggtctttaatccatccttaacgaaaggttcccccgccataaagcccgaaaataaagaaaaccgctaaccataaaaaaaaaaaaaaaaaaaaaaaaaaaaaagtggttgtctcagaggacttaagtccatgcatgtgcgtacgtgatgctacagtctcctcacagcgctattcaaacctaacctatcggttgctgccccataatgctgcgatcgggaaaatttcggtgccatttaatccaactgttccgtagtatactttttccctgttagtcggtgcaacagtg

SEQ ID NO: 65384 - DNA, 466 bp, Glycine max
  unsure (1)..(466): unsure at all n locations
tggcttggaacctttgggctgatttatgtgcttgtttatgtgcttgcatggtcgtgagaagatgatagaaggggacctcgcaaaattaaactaagagggaatagagaaagagagaggagaggtaccgcaactgcgattctctaagtcctccctaaagatagagaagaaagaagaaaataactctaataaatataaataaataagtaaatactaacggtaaatctgcacatgcggtttccttctgtgaccctcgttatttctccgtcctcctcgctcctgctgttgatagtggatgtgggagtgtcgggtacggaaacgatacggacatttcttacgtttacggaagaggagccttagtcggatagtgagactagttggtgtactccagttatgattaagcatactagtcatggcgtgtcgtagaggaatatcgcttttcgtctctgttgtggagttcntcatcata

SEQ ID NO: 65385 - DNA, 424 bp, Glycine max
aacctttgggctgatttatgtgcttgcatggtcgtgagaagaccatagaaggggagcacgagaagaatccggttgagctctcacggagatattgccggtcactctcagtcaacgtcaccgacctagataagaacactaccgacctcagaacccgtaggacttcgcaaaccggctcacccctcgggcatttccccgccatcacaggcctcagccggattgcgacatacgatcaagattacggaccaacagcgtagagccatccctcatagcaccgtccggaacagaaacgctgcgttgatacacatcacgacacttatggctggttgacgcacacccagattgaaccccaacgaggctcccccaacacctatccaaaccacccgcagccgacgccccaaacgccccgaccgcgaagccacccacc

SEQ ID NO: 65386 - DNA, 422 bp, Glycine max
tgggctgatttatgtgcttgtttatgtgcttgcatggtcgtgagaagatcatagaacgggacagtcgagagagaaagggagggccggtcaacaagtaacatcctaacggttatttccgccgcctacaattaaatcctcctcgtctaagacgtcgaggtctcttaataggtccctaaaggacggggggtcgacgataaggttaccacagtaacatcgggctatagaaacgcctactagaggtaagaaactagaaaagtccacgaggagacccattaagaggactctactaaatgttccgagcttgagactctcggcgatcccgagagagtcacgcattggcggacgccgtacttcgtggactgcgacgtcgccccggcgaacgcggtaactaataacgggattaaacatcactacgcgaccgt

SEQ ID NO: 65387 - DNA, 425 bp, Glycine max
cttgggctgatttatgtgcttgcatggtcgtgagaagatgatagaaggggactgatacatacaagcatacgcccggaaccgcgctatagcgggccggggaaaacgggccttaaggtcccgtctgcctccgccacgcctccggtcctcgtttctacctccctcgtcgaagccgtttttaaaaacccggacgagaaccccgacgtaaagtacgcaggcgccgcggacataaacgaggcagacgaaaaaaaagacggccacgccagccggtgaagcggcgccttaccgtgccgcgtctacttccgtcgccaccggcattacggaaggtgcccaaagcatcgtcgtggcttcctcttcttaaaattctacaatcaagtaggaatccacgtcaagataagccggcgtaactatagctatcacgcacaaac

SEQ ID NO: 65388 - DNA, 487 bp, Glycine max
gaacctttgggctgatttatgtgcttgtggtcgtgagaagatgatagaaggggatattgagctgtagaaaaagaaaaaagtgactacagcccggtcctggttccacttagcccagggccctggcctctcatttcactccctatgcactgaaattccaaacccatgactaggctcgagtaactcggccggcagaattcccggctccagcgagctaagccccacgctcgaaccagatgactaaaccttcatcgttcctgacttccccgtcgacgtaaacgtcgacgatctgggcgtcgggctaaaggagcacgcgtacacctgcgcatagtagtgaaacggcaggaaaagttcgataattgcctagggaccgaaaagggaacctagtcacaataagacatccaaagatgctaagaaagagcctcgccgtaacggaatagccgcctaggatttagaatcaggataggccaccttaaaaatttcccccccc

SEQ ID NO: 65389 - DNA, 449 bp, Glycine max
tggcttggaacctttgggctgatttatgtgcttgcatggtcgtgagaagatgatagaagggggtagcctaaagtgaagaaagacctgaaatgaagaaagaaagtgccgcgaagaacggtggaagagggataagcgactggcgcttatagtgcagaggagcggaaggaatactctaagaagggagaagagcttaagaaaccgaccgcggcggaccccatcgtcctccggcgtggcttacgttgccctaccgttttaacctccgtagagcccgtcaaaaagccgttgaacgctattccttctaaggcggacgcggacgaaccggagatcgcccttaaggagcggggaaccgaggtcacgttaattccttcgcctccgaaagaaggtaagtcggcggataaggccgcgggcgttaagaaagaggagtcgtaaccgataacagttaaatacgt

SEQ ID NO: 65390 - DNA, 459 bp, Glycine max
ctttgggctgatttatgtgcttgagatgatagaagggatgcccacttacctaacacatacactacatagctaaaaagccccttacaaccagaaacaaaatacgtttcacaggtcccattacgacaagaaccctactagcaaagtcatctctcggcttcaccacaacatagactctcgctcactcaatcggcaatcgatgctagatatcacccgacaaaaaaaatcaataaccaataatatccgtcaaaaaaaaaaaaaaaaaaaaaaaaaaaaaagtggttgtctcagaggacttaagtccatgcatgtgcgtacgtgatgctacagtctcctcacagcgctattcaaacctaacctatcggttgctgccccataatgctgcgatcgggaaaatttcggtgccatttaatccaactgttccgtagtatactttttccctgttagtcggtgcaacagtga

SEQ ID NO: 65391 - DNA, 381 bp, Glycine max
tgggctgatttatgtgcgtgcatggtcgtgagaagtgatagacggggggagaacaccggggagaagacggccataccgcggacttggaagaaatatgggcggcccacggggagcgcgcgggacgaaccaccctgtcctacatttaattaaagaggaactacaaatatcggcgctcgtctgtgccaaaggctactgaagagccgactatctcttctcccgagttgcaaaggcctaacataatgagcgtccgcccctccagggataagtaccgcatccacgcacgacctcgcgcaattacgagctccttatgccgcatcaacgcgaaaggtaaaaacaaaatatagaataagcctgccccctctaaacaacgcgaacgtacca

SEQ ID NO: 65392 - DNA, 474 bp, Glycine max
  unsure (1)..(474): unsure at all n locations
tggcctggaacctttgggctgatttatgtgcttgtttatgtgcttgtttatgtgcttgtttatctgcttgcatggtcgtgagaagatgatagaggggtaagaataatatcctcaggcccgccgcaaaggtcctagacgagttcgtagtggtggtatttgttattgttatatttttagtcgaagtcgaagtcaaattaaagttattattcaccggttttaagagaggcgtcaaggcgaagacctccaggaaggaactccatcggcataaaggtattggcctagcggccgtcgccgactaggattttaatatctgtcatttcgccgcggcctgacctaataaagctaatcacgttaacgcactaataaataatcacgtcccggacgagactgcggaagctgaacgaacttaatccaaccgcaaccccgacatccgctacgtcactgtagncatcatcagttcaaagacaccccccc

SEQ ID NO: 65393 - DNA, 227 bp, Glycine max
agcgacggaccacaaaaaaataccaacaataccaaaccgaacaaaaaaccacgcaccaccccaaaaaggtgccgtggtctcacacgacttaagtccatcaatctccgtacgtaatcctacactctcctcacagcgctattcaaacctaacctatcgcttgcccccccataatcaccacatccgcaaaatttccatgccatttaatcccaactcctccctaatatacc

SEQ ID NO: 65394 - DNA, 422 bp, Glycine max
ttggctgatgattgctgctggtcgtgagaatgatcagagggggtatcctaaccgtaactaaaccagcctacctctccggtgtagcctttcattctcttcgctaagacgtagactcctgctaagatttctattggaaagattactatttccgaggcggaaagtctcgatattactgataatgctaaggttaagacttaggataaggaaggaacctttttggactagtaatgctctactcctgttggaaagtagtctgaggatggttgcatttctgttgatcataatacttagaaggagctaatttcctattccgcttcctgctcttgcggcggtacgtagactcctgctaagatctctatcggtaaaattacaatttcagaagctgaaagtctcgatattaccgataatgctaaggttaagac

SEQ ID NO: 65395 - DNA, 392 bp, Glycine max
gaacctttgggctgatttatgtgcttgcatggtcgtgagaagatcatagaaggggacttaatatagttctattaatattatgtattagtattataataaacagcgaccgagaggaccgcctacttctaataatcaaacacctcagcgatacgacggaggaatacgacgataaagaaggggctacgagatattcctccgaagtcctcgacgacgaatccgggaccttaaacaaagaggacgaactatctgactccggcgaagacgggcctaagcctaatggcggagatacgcccctcctaacccgcgacggcccgccgcgggagtccgaacacgaagtcgtcactcatcacgactcccccgtagctccaatccccctctcaagccaccccccc

SEQ ID NO: 65396 - DNA, 196 bp, Glycine max
aaatgataagcggaaatacaaggcgacggaaaaaaaaaaaaaaaaaaaaaaaaaaaaaaaaaaaaaaaaaaaaaaaaaaaaaaaaaaaacaaaaaaaaaaaaaaaaaaaaaaaataaacaaaaaaaaaaaaccaaaaaaaaaaacatccatccccaaaaaaaaaaaatccaacaaataacaacaccaacccaaaaa

SEQ ID NO: 65397 - DNA, 457 bp, Glycine max
tgggctgattgatgtgcttgcatggccgtgagaagatcatagaagggcatcctcgtgagaagatgatagaagggcatggtggggagaagatgatagaagggcgtggtcgtgagaagatgatagaagggcatggtcgtgagaagatgatagaagggcatggtcgtgagaagatgatagaagggcatggtcgtgagaagatgatagaaggggacaaaaagccagagacggtcctcctaagccccccacgctcgcgcccgacgcccgtccccgccgcggtccgtcccgtctgcggtacctttatagattaattatttgcgtctcatggagatatatataagaacttactcatcctaaataccgagtactactaacggctgggagataaagccatatattttaaccctaatttacgctaagcctctaagccctatagagaacctagaaaggacatcgatag

SEQ ID NO: 65398 - DNA, 456 bp, Glycine max
tcgtgagaaatgatagaaggggaacccaagctaccgagggacgttccctctccttcaataaacagcccccgcttttacgaacctcctctttatccgcctaccaataagcaatacaaataaacacccctaaccacaattaaaaaccgaaatcagacccgtataaaacgaaattaaactcgaagacggccctctctcttcttcccctaacggtggcctgtggcaagcgcaggtataatactgacgacgaaaattagcgcgtgatgactccgtccgacgggcgtacgatcgctacgtccgacgtttactttccatcaaattaaataatcgtaagttaccgctactagccgcctcgccagacttcagccccagctagactcagcccccaccgccgtgacgcgggccccctactggtgatagcgtgatatttcggcctgccccgcgcagactcaacccgcc

SEQ ID NO: 65399 - DNA, 483 bp, Glycine max
tgggctgattgatgtgcatgtggtcgtgagaagatgatcagaggggtcatcctctccccccatatcaagcccccaccctaggagaggacatgtgagcgagaacgcgtgaaatggcgccggaacccgcgactcggcgagttacgaacgtcagaagagacggctgtaataatagagccgtctcccccgacggcaccgaggagggcggtactagagtactgctctcccaccttctaagcctcctttacgaaaccgacgaatacgacaacgaataagtaccggacggaccgtaagacagagctaactcgtccaaaagaccgctaggcgacacaaacgaggaagcggacagctacaattggacgtcggactgcacgggaaacgacacggacctcctgagaggagcttctctaggtatcacggacaaacctaaaacggcacccgagataaaactagttgaagaacgcccctatccgcagtacttcccgg

SEQ ID NO: 65400 - DNA, 154 bp, Glycine max
ggctgatttatgtgcgtgcatggtcgtgagaagatcatagaccggcatcgtcgccagaagatgatagaagggcatcggcgtgagaggatcatacaagggcatcggcgtcacagatgatagaagggcatggtcgtcagaagatgatcgaacggca

SEQ ID NO: 65401 - DNA, 446 bp, Glycine max
gggctgatttatgtgcgttggaagatgatagaagggcatggtcgtgagaagagatacaaggctggtcgtgagaaagggagaagccatcgtcgtgagaggatgatggaagggggaggtgaacttccattaccgtctgagacgggcgaagaagcgaaggttgtggccttagagctcgccccgaagaactagaagagagaggaggaacgggtgccggttaagaagtaggattctgaggtcgtgaagaagaagagagttgagagttgtaaatctactcataatagagtcaagtagcatgtcaaggagcatgactattagcagaaggaaccgacctggccgaaatgtgacgttaagtcgaaaggcggacctcacgctgacttacatgtccagtctcccgccaccgcctgtacttgcggcaccaacgttaccgattttaaactaaggaagac

SEQ ID NO: 65402 - DNA, 468 bp, Glycine max
tggctctggaacctttgggctgatgtatgtgcttgcatggtcgtgagaagatgatagaaggggacgaagaggatgaggatagcgataacgacgacgacgaagacgcggcggtaccgatgaagctatttaagaagtactaccgatgatgcgcctcaacacactacgccgccgcctcgccctaggtccttacgcgccggaagtagggaaattcttctagcccagacagaagaatgacggccagcccccaggaacccagtctctctacgaatagaggatacaccagggaaaaaaaagaaccgcacgccgggcggaaacacgcccagcctaaaaagctgccagcgcccccctttctccgttccctatacacagttgccatctcaccaaaacacctaaacggtagccactagaggcccattgtctagctacgcgtctgacgccggctcggcgccggtccgcaaaggaatcggc

SEQ ID NO: 65403 - DNA, 408 bp, Glycine max
aacctttggtctgatgtatgtgcttgcatggtcgtcagaagatcatagacggggccactatatatatagacatagttgggcacaagcattcctgaacccgagcccgcgcccctcttctctatatacgacagacaggacccctcctcgtcattcctaaaaatactatactaagaagtaacaatatttttcaacatgagccaggcgagcctctagcctaatctactgcgcataaaaaaaaaaaaacaaaacaaaaaaaaaaagtggttgtctcagaggacttaagtccatgcatgtccgtacgtcatgctacagtctcctcacagcgctattcaaacctaacctatcggttgctgccccataatgctccgatcgggaaaatttcgctgccatttaatccaactgttccgt

SEQ ID NO: 65404 - DNA, 243 bp, Glycine max
ggacacacatacacaaaaaaaaacagaacttatcaacaccgatacactagaacacgcacaacaacaaagaaccacaaaatataattacactcatatcacttaactacatccatcttaatccataattacgaactcacctcacacctttaattaatacaaaactatcagatcacataccataatcctacaatctgaaaaatttctatacacttcacatcaactattccgtaatatactttttcc

SEQ ID NO: 65405 - DNA, 446 bp, Glycine max
tgggctgagtgatgtgcttgcatggtcgtgagaaggatagaagggcatggccgtgagaagatgatagaagggcatggtcgtgagaagatgatagaggggcatggtcgtgagaagatgatagaagggcatggtcgtgagaagatgatagaagggcatggtcgtgagaagatgatagaagggcatggtcgtcagaagatgatagaagggcatggtcgtgagaagatgatagaagggcatggtcgtgagaagatgatagaagggcatggtcgtgagaagatgatagaagggcatggtcgtgagaagatgatagaagggcatggtcgtgagaagatgatagaagggcatggtcgtgagaagatgatagaagggcatggtcgtgagaagatgatagaagggcatggtcgtgagaagatgatagaagggcatggtcgtgagaagatgatagc

SEQ ID NO: 65406 - DNA, 440 bp, Glycine max
  unsure (1)..(440): unsure at all n locations
gggctgatttagtgcttgcatggtcgtgagaagatgatagaaggggaatgcaaaaaaaaaaagaacaacaaacagaagaaggaggacgccgaccacacagaaagcaaagggtaataactacccccgcccattacgggcaaggatattactgtcgatacaacaattcacacaagaaacgtcgatacgaacaaaaaaggaacggcctaaacattacccatcaatacaatagaaaataccgcaaaaacatccccatgtgagggccccgccgaaaatgctagaaaatacagagaaaatgataaacaccccccagccccaatctcatggcacagaagaaacagaaaaggactacacaaaagccccccaaacccaaaatggactagcatatttggctcatgaacacacctcaaccactaatgaacnttctgaaccccaaggggtac

SEQ ID NO: 65407 - DNA, 385 bp, Glycine max
gaacccttgggctgatttatgtgcgtgtttatgtgcttgcatggtcgtgagaagatcatagaccggacctgacctctctcgtatctagcctcagggcccctctcgtgtgacaagtaactacggtggacgaaatattaaacgagacgaaggaggaggccttagaaaccgccttccccgacttcattaaaaaaaaaaaaaaaaacaaaaaaaaaaaagtggtttctcagaggacttaagtccatgcatgtgcgtacgtgatgctacagtctcctcacagcgctattcaaacctaacctatcggttgctgccccataatgctgcgatcgggaaaatttcggtgccatttaatccaactgttccgtagtatactttttccctgttagtc

SEQ ID NO: 65408 - DNA, 477 bp, Glycine max
  unsure (1)..(477): unsure at all n locations
cttggctgttgagtgcatgctggtcgtgagaagaccatagaagggggcctcccgtgagacagaagagaaagttgctgtcgcttcagctctcctgcttttcggctttacgctagccctaggacggaactctaggcgaagtatgtttccgccgctaaagccacgggctgcatcgggctcagggggtggccgatctaggccagagcgaagcccccggacgactaaaattgatgtactacgaagaatgcgaagggatttgcgagagaaggagatacctctatttcatccgagctcgaaagagaagtaagaaggccgtgtcagaggactctcctacggcccggtctaagatccaaataaaatacctgccgccccgccgcagccaaaggacgctaaacgccaaccgctacggattcgaaccacgtattcatcacngccgataccacgttaccacgcccgcggtcgagccacgatcaaacccac

SEQ ID NO: 65409 - DNA, 451 bp, Glycine max
ggaacctttgggctgatttatgtgcttgcatggtcgtgagaagatgatagaagggggtgtatttagagaggaagtccagagagagagagagagagagagagagaggagagagcaccggtgtcctattaagacgggcaccctcagggaccttacgtataagaggtgcgttatcggcggtaagaaaaaggtccggagaaagaagagaaagcacgagtccgggtgctaggtagtaaatattaagccactaagtaataagataactaggaggacctgcgccagaggcggtaacgccaaacggagggtaccgaggtcggacatcggtaaccatctacggggcagcgaagtagccatctgtaagatctgcacctcagacgccgcccataacgttctaaataatgagtccgcgtgaatctagatttcggctaagagcgtcaccgcttaggccgacgtc

SEQ ID NO: 65410 - DNA, 476 bp, Glycine max
ctttgggctgatttatgtgcttgtttatgtgcttgcatggtcgtgagaagatcatagaaggggatatccatcagcagcaagtgcggagcgtctaaagactcacgtccattttccttctcgtacgactccctctctccttgttatctttacctctggccgcggtcatcgcggtaaattttttaaaaagtataagttcggcaaaatattaaagatatttaaaatatttgccgccaagttattagctattactttctttaccaacgccttctttgccgcctccttattaacagcgaagtttttaggcacctctttcttaaccttaaccaccaatttattaattatattagggaagggagggaatatcttacgtttattattaaagttcctcgtgtaggtcatgcgttttaccgatatgtctaaatccggcgttcgcgcggactcctccggagggccggcctataccggccccggggggg

SEQ ID NO: 65411 - DNA, 179 bp, Glycine max
atcggtcgtgcagaagatcatagcccggccccgtcgtgagaagatgatagaaggggatgggcgtgacaagatgatggaccggcatggtcgtcagaagatgatagaagggcatggtcgtgagaagatgatagaagggcatggtcgtgagaagatgatagacgggcatggtcgtcagaaga

SEQ ID NO: 65412 - DNA, 507 bp, Glycine max
  unsure (1)..(507): unsure at all n locations
aacctttgggctgatttatgtgcttgcatggtcgtgagaagatgatagaagggggcgaacaaacagaaaaaaaatgcagaaggaaggccaagatccaagagaggccgcagtaacgcctccccctcctgcgggagggccattgtaagagccgtggtaggcgtcgaaactcggcgcgggtaagcgtatgcgtcgtgttaataattgtgctgactctgctaatcatgataaggcctctaaatctcctcctgccttcgttgtttggaattgttgttgacctggtgctggtgaaggcctttggtgttccgtgtcgttgcccacgtgattgtgtggcggaggtcgatccttgacctcgttttcctcgcggtcttgaatcgcgaagagagacgcgctaagagaggccccgggaaaacccaaaaccaanaaanaaaaatccgaggcccaccagcgccccgccacgcataacatcacgactggaccaccccccggcgcagaaactgcaaaacaacc

SEQ ID NO: 65413 - DNA, 437 bp, Glycine max
  unsure (1)..(437): unsure at all n locations
tggcttggaacctttgggctgattgatgtgcttgcatggtcgtgagaagatgatagaaggacatggtcgtgagaagatgatagaaggggggaaggagttggcatagtagtggaagtcgcagtccgggtagtgaactataacggtgagaggaccgaagaagtacccgaagaggtccaacgttttaaagtaccggacgtccgataaatcgggtggcgtacccgtcttcaagtttctactcggattatataaacttagggaacgttcgttatctacatctaccccgtgaaattggtcgaagcacgtctcgatacattgcgaagctaccgtcacctcgacgtagtgatacgcttcccgcgacggtaaagctaggatagataagatacacntcgtcggccctacggacgccgcactaactttcaaataaacgagaatccttg

SEQ ID NO: 65414 - DNA, 197 bp, Glycine max
acacactcccgtgaaagacgcccatagtgtctaattaaagacgtccaatgaggaacgatatactatcgagtcccataccttcagcaaccgtcttgctataaatagacccaccattcccaacgattacctcctggcctacactaataccccctacgctcaccacaacggtgcccataacggttaccctcatatccccg

SEQ ID NO: 65415 - DNA, 490 bp, Glycine max
ggtcggaacctttgggctgatttatgtgcttgcatggtcgtgagaagatgatagaccgggacagtagtactacataaagtaccgaacgtaaagatccaagcctaccttccgcgccccgtccctccttctaaaattaaatacgctgaatatacgtggtaatcgtgatcgtgtcgataagatcagtcgtatgcaagcgtcctaccctcccctcgtacccgcgcgtaagataactcccatatacacgcagcctacgccataactattacacccgactgtcaaaggaccaactcgcacaggagcacaccacgtacatagcacatcgagactcgacgcacagtccgtacgacctacacaaaggtcgccccatccacacttccctacatcacgttacgtagtaagggaaatagtcacggcgccaccgcagagatcgagaagaggcaaaagcctatccccggcactgaccgcaccacgtcccgaacatcccagagtc

SEQ ID NO: 65416 - DNA, 371 bp, Glycine max
tttgggctgatttatgtgcttgtttatgtgcttgtttatgtgcttgcatggccgtgagaagatgatagaagggcatggtcgtgagaagatgatagaagggcatggtcgtgagaagatgatagaagggcatggtcgtgagaagatgatagaagggcatggtcgtgagaagatgatagaagggcatggtcgtgagaagatgatagaagggcatggtcgtgagaagatgatagaagggcatggtcgtgagaagatgatagaagggcatggtcgtgagaagatgatagaagggcatggtcgtgagaagatgatagaagggcatggtcgtgagaagatgatagcagggcatcgtcgtgagaagatgatagaagggc

SEQ ID NO: 65417 - DNA, 301 bp, Glycine max
gagacgatacaagggggacggccaccctaccgaggagaaagtagaagaagcgggaacgtaaaactccaaaacgtggatatagaaaggcccgctaaagaaaaaaaagccaaaagaaagaaacaatgaacccgtagacgaagggaaaaaatagaaaaaagagaaagcacaagtaccagtagacacagaaatcttaaagaaaaggagcaagaagagatagcaaaccagcacacccaaggaaccagcatccaaattacaaccctcgagcatagaaagtacacccccgaagagaacaagagaggca

SEQ ID NO: 65418 - DNA, 424 bp, Glycine max
ctttggtctgatttatgtgcttgcatggtcgtgagaagatgatagaccgggatttactaacagtaaaacgattaagccgatagggtcttctactctctcggctcgtcgtactgtttatatccgtagtgttcttaaacggtagtattagtaagacagtcgttgtacgtagtcttagggggcgaattctatgtttcgtcagaagtatactacggagaacacttaaggttgtggtgacgatgacgacgacgacgatgatgataactatacctctaggattacgtggcgaagaactaatcatacaaggaggaatgaaggaaacgatgaagatcaacgagaagaaggatatacgtagaagcgtcgtatagaaacgagtgagtcgagaagttttaaacgttagcgtaaagtgtcgtaggaagacaacgga

SEQ ID NO: 65419 - DNA, 236 bp, Glycine max
cgttcatatcatagaccctctccttcaccaaaaagtcgctactggtatgctagaccgaaatggtgcgtgctctatacacactcgtcctatcgtatctactagtcgcataatcattacaacctactgtccactctctctcagacaacagacgccatttttactcaaacgattatatacaccacacctcggtagatactatagtcccagacaggatacaagtacctttaatagtaaac

SEQ ID NO: 65420 - DNA, 429 bp, Glycine max
ttgggctgatttagtgcttgcatggtcgtgagaagatgatagaccgggattcctatttactaacattaaaacgatgaagtgcataacctcttctactgtctcctctcctactgtttatattcgtcgtgttcttaaacggtaatagtattagtaagagagtcgttgtgagtagtctaaggggactaattctaattttcgcgagtataccacggagaagacttaagtcggttgttgtggtgaggatggtagtgatgaagactatacctctactacgattacgttgggaagaactaatcatactaggaagaacgaaggaaaagaagaagaagaaggatatacgtagaagcgtcgtagtgaaacgagtgagtcgaaaagttttacacgttaccgtaaagtgtcatagaggacaacggacaattagagtgagta

SEQ ID NO: 65421 - DNA, 419 bp, Glycine max
tttgggctgattgatgtgcttgtttatgtgcttgtttatgtgcttgtttatgtgcccccatggtcgtgagaagatgatacacggggaagagtaatttccaattatagtagataatactgccctacacacagcgagcgagagaactcattactaattacgctcgacaccgtcacgccggcagtagaagaacacgagaggaggataacgaaccccaagaaggtcagtgtcgcataagagaggaatccgaatgcggccctccgcgtcctcccgccggcctcgaaggagaagaccgaggcgtagaagaaggagtccgctaagcgggccccggaatttaaaatttaacccgtaaccgtcgtccccaattaagcctcccctcgtccgaataaatccaatcccgtcggccgtaacagccggtcgcc

SEQ ID NO: 65422 - DNA, 369 bp, Glycine max
aacctttgggctgattgatgtgcttgtttatgtgcttgcatggtcgtgagaagatgcatagaggggggcggtaagctgttatagatagacagatatgcctataagtagagaacgaaaatgccgagagtcgagaaaacgatacgcccccgcgaacgtccgcaacgatctagatttatgcccctaaaactgcattccgaaacctctcgtcctcgccctatccgtaaccaactctcccgtctagttatctatttattatctattattaattgcgatctatagtattacaaggtaataacgaccgacgattactagcctcccccgaactttgcgatacctaagcggtcacaactacaacgaagtccggagacg

SEQ ID NO: 65423 - DNA, 384 bp, Glycine max
ctttgggctgattgatgtgcttgcatggtcgtgagaagatcatagaaggggatagtacacacactaacaactcaccccacatcacgttgctaccccgacaacccctggcgcagccgacagttacggtcatttgcggaaagtccgaggccgataccgactctaagcttaatgtacataagcatcggtaaatttccacgaacctcatcgaaacacctttcaacgttcctttatacgaccataaaagtaccgaggcctccgagggcgacggtaagctcttcggcctcacttgttatacaagccacggcgaacgcctattatccgcgaaactacttcccgagaagaccgacgtcgccgacgaggaaaagaaagcaccgctgcatatca

SEQ ID NO: 65424 - DNA, 406 bp, Glycine max
tggcttggaacctttgggctgatttatgtgcttgcatggtcgtggaagatgatagaagggcatcgtcgtgagaagatgatagaagggcatggtcgtgagaagatgatagaagggcatggtcgtgagaagatgatagaagggcatggtcgtgagaagatgatagaagggcatggtcgtgagaagatgatagaagggcatggtcgtgagaagatgatagaagggcatggtcgtgagaagatgatagaagggcatggtcgtgagaagatgtatagagggcatggtcgtgagaagatgatagaaggggaaaaaaaaaaaaaaaacctcaactaaaaaaaaaaaaacccaaaaaaaaaaaaaagtggttgtctcagaggacttaagtccatgcatgtgcgtacgtgatgct

SEQ ID NO: 65425 - DNA, 329 bp, Glycine max
ggtcggaacctttggctgatgtagtgcttgcttagtgcttgattatgtgcttgcctggccgtgatgatagaaggggaaaccaagtgcgaggctactaacgtcatggaggacggaggtcgaaaaggtcaaataataaaatatgacactggaaatccagccatagataacccgcgcaatcgctcctctccaaaacaccctcctaaagacgagaccaagacgcttaccaaagtaatcaatcgatacgcggcagtacgccacggtactgccccaaagcccaaaaggtctacgctatacctctcagaacaaataccgtactgacgaacagcccc

SEQ ID NO: 65426 - DNA, 393 bp, Glycine max
gaactttgggctgatttatgtgcttgcatggtcgtgagaagatgatagaccggcatcgtcgtgagaagatgatagaagggcgtgggcgtgagaagatgatagaagggcatggtcgtgagaagatgatagaagggcatggtcgtgagaagatgatagaagggcatggtcgtgagaagatgatagaagggcatggtcgtgagaagatgatagaagggcatggtcgtgagaagatgatagaagataaaaaaaaaaaccacacaaccacaaaaaaagtggttgtctcagaggacttaagtccatgcatgtgcgtacgtgatgctacactctcctcacagcgctattcaacactaacctatcggttggctgcccataatgctgcgatcgggaaaattt

SEQ ID NO: 65427 - DNA, 461 bp, Glycine max
aacctttgggctgatttatgtgcttgtttatgtgcttggtcgtgagaagatgatacaaggggaggagaggtggagatgaagaagcgaagagaagagaagagaagggacccggactcgaaaagagaagacggggggaggaacggaagtaaataagaataagcctacagaggaccggggtatcgttagagagaattcggagcctaacccttgccggatctgttgtaattccgtctccgccggtactcctggtactgtcacctttgcttctgctcataagggtactgcttgcgaaccttacacgtaagacgaagacaacggctggttgcataggaagcctacgcgagagagcacggagagctccccgcaacaacctgctaagccagattccgacaccacgaggtcataaattacgcccccccccttccaacctgtaaaggtccgtccgtccccaagcatctcag

SEQ ID NO: 65428 - DNA, 412 bp, Glycine max
aacctttgggctgatttatgtgcttgcatggtcgtgagaagatgatagaaggggacaatacagccgccgcgccccaccagacggagccgtcttcccttcgccagacgaacaactaaacggccgtagcccgcgcacgccagacggagccgtcttcccttcgccagacgaacaactaaacggccgtagcccgcgcacgatgaaaaaaaaaaaaaaaaaaaaaaaaaaaaaaaaaaaaaaaacaaaaaaaaaaaaaaaaaaaaaaaaaaaaaagtggttgcctcagaggacttaagtccatgcatgtgcgtacgtgatgctacagtctcctcacagcgctattcaaacctaacctatcggttgctgccccataatgctgcgatcgggaaaatttcggtgccatttaatccaactg

SEQ ID NO: 65429 - DNA, 353 bp, Glycine max
tggcttggaacctttgggctgatttatgtgcttgcatagacgatagtagtagtagaacgagatccagcccatggctcactcatacgagtcggaagcatactacggcggcgtcacacgattaagtagcgtgcgccaactcgggaatcgccatattcgcatctacgtcatatcgtcctccaagctgcgatcagcatcaacgctacgaatacgaccatcgcatacgattacatccggacgtccacacgcgtatatatctaaggtacctgctaagtacgcgcgaagacaccaggtcgaacctacgttatctagatcgctcgaatcactcgcgtctatatctatacgtacgtatagcg

SEQ ID NO: 65430 - DNA, 495 bp, Glycine max
  unsure (1)..(495): unsure at all n locations
tggtctggacctttgggctgatttatgtgcttgtttatgtgcttgcatggtcgtgagaagatgcatagaggggtaccaaaaaaaaaccagaaagtaacacagacatgactccccacttcacaaccccactaaccacgtagacaagaaagatctacacactcacggacacagactttcaccctaagcaaaaaaaaattaagcgaccctcctcaaccataatatgcacaaaaagaaccaccggacactacagacaactcttccactaagaaccacacactggaagacgtgacctcagacacggaaaaaaacacgcacagaaagcaccccgaccggacgggaactaacagagaaacatcaaactgccttacactgaacttagaaccccggcctcccctaaaacccgcgacaccccacgatgtacacaggggcaatctgtaggccacattaactaaaccatcccccccctcctcaacgcanactaaaacgccagcgaaa

SEQ ID NO: 65431 - DNA, 473 bp, Glycine max
gcttggaacctttgggctgatttatgtgcttgtttatgtgcttggtgagaagatgatcagagggaccatcaccatcgactaactaaaacacggactaaaagcaaaaagtgaagagaagggaaaaatcccaaccccccacggcaaaaaacctaaccacattcgccaccctataagaaaaaaaaaaaaaaaaaaaaaaaaaaaaaagtggttgtctcagaggacttaagtccatgcatgtgcgtacgtgatgctacagtctcctcacagcgctattcaaacctaacctatcggttgctgccccataatgctgcgatcgggaaaatttcggtgccatttaatccaactgttccgtagtatactttttccctgttagtcggtgcaacagtgaagaggtttgtattgactgtttcctttaatagccgtgtagttcgaacggtgaacgggatgtgtttcgcactggtgtaccaagtgtg

SEQ ID NO: 65432 - DNA, 320 bp, Glycine max
agagatagactcgcgagcgtaacataagctaccagagaaataggcacggcccgacaaaatggaaggaagtcgaaaacatcgccttcttatggacctacaataaccgcgagcccctccaaaaagtaaactagtaaacggcacttcctctcacctacctaacccgacacggccccattacaccgcaaacatttcacccgaagaaagctcgatacacaacgtactcctttcatattccatcacgagcggctataacctcaaaaggatccgatagcgcatcccactccgcaataacttactctacatccacgtgaccacaccat

SEQ ID NO: 65433 - DNA, 334 bp, Glycine max
aacctttgggctagatttatgtgctgtgtttatgtgcttccatgaaagatgatccgaaccgcgaccaggaaccctggacagaaaggtcgggagtgcgcactaatactgtcaaggagagggtgacgaagcctcgagtgcctcacggatcgagctacatctccaggacataaagcgtctgtcagaactagaggagacacacgtggtataaacactcttgattgagccgtatgcgaccgtaggaaagacacttcacaacgtgactcagctcgatatacgacaagtaaaaaatcattcggcctacctgacatccagctgcgtcgggtaaccctcacct

SEQ ID NO: 65434 - DNA, 347 bp, Glycine max
ttggctgatttagtgcttgcatggtcgtgacaagatgatagcaccgtactccgccgcataacatacttgagagggactagctacgccgacaccccgcaaatcgccccccccccttcgcccagtatcctctaacctatacgtcccatgtctaccccacattgccgcccacaacttgtccataaaaaaaacaccaaaaacaaatcaaccaaagtggttgcctcagaggacttaagtccatgcatgtgcgtacgtgatgctacagtctcctcacagcgctattcaaacctaacctatcggttgctgccccataatgctccgatcggcaaaatttccgtgccatttaatcc

SEQ ID NO: 65435 - DNA, 424 bp, Glycine max
  unsure (1)..(424): unsure at all n locations
tggtccgaccttggctgattagtgcctgttatgtgctgggagaagtgtagacccggagcctgatcaaatactacctagtcgtctgactacggaaggaaaatacccgggccccgctccgtcttctccgtccatcctcgacgcgatggcgaagagagtagagtgaagacgtccgataggaggtatggcctaggcagacgtccacctgataggtaacgcgtatacgcgcgtaggagtgacggcctactggcggctacgttgagtttctccgtaaacgtcccgtagtagttacgccgatgaaacatcatcgttaaagagttacgaaacaaataaataaataaacaaacaaacagtctcaattgatatacacgcatgcagcgctngggcctcagtcagtcaggcaagcatgcgcgctcnccggcactga

SEQ ID NO: 65436 - DNA, 266 bp, Glycine max
ctttgggctgattgatgtgcttgtttatctgcttgcatggtcgttagaagatgcccccggggatagtataaataaccaacaaagacggccccgacgaataatacggcggcgtcaaaggcgcgcccgtcgtcctccccttccgcggcggccatagtcgtatgtacggaatcgagtcctcctaaaagcgactagctactaagccacgacgacgacgagcacctaaaattacgtcgcgactctcgtacgcgtatatctctaacgttctt

SEQ ID NO: 65437 - DNA, 467 bp, Glycine max
gacctttgggctgatttatgtgcttgcatggtcgtgagaagatgatagaagggggcggcgggcccggagggacgatactagtgacggctccagatgtgacgcgctcctggaatccgcgaaactccagcgtagaatagaggaggctgaactcggaaagcctgctagaaagcgtgagaaaattgaagagacctctaggaaccgtactggaaagttcgtcgaacgccgtaactaaataaagagcacatcgaaaaggacactatagacgaggcatccaaaggaaggctcgccttacccagtctactcgatggcggcgcgcccgaccctttcgggtcatgaaacgacaccgaagctacggaatgcaattcgccaggcggctctagctgccctcctgatatagtcgaacaaacgaagaacgggccccccgaagcccccctcaagctcttaagtactccccgacgtaaagctac

SEQ ID NO: 65438 - DNA, 412 bp, Glycine max
ctttgggctgatttatgtgcttgcatggtcgtgagatgatagaagggggtagccgttaaaatgccatcatacccgagagaagcggtgttgaaatcttagtaatacagcagagcacccaccagtcatatatggagcctatcaattccttttgtcctcgactaaaactaaatcgtgaaaatttcaaaatttcagcataccatacccgaaaaaaaaaaaaaaaaaaaaaaaaaaaagtggttgtctcagaggacttaagtccatgcatgtgcgtacgtgatgctacagtctcctcacagcgctattcaaacctaacctatcggttgctgccccataatgctgcgatcgggaaaatttcggtgccatttaatccaactgttccgtagtatactttttccctgttagtcggtgcaac

SEQ ID NO: 65439 - DNA, 378 bp, Glycine max
actttggctgtttatgtgcttgctggtcgtgagaagtgatagaagggagccggtatcgaacacgaaatagctaaaagatgaacagatgaagccgagggagtcgccgcgaaaccagcagacatcaacgactaatcgataaaggactccgaagagagtgttttgctctcgaataggtagattctggccgagccggaaaagagcagatatacttagagaaaaagaacaattgagtaggtatgaaaaggcctcgaatagacaggaaggccgtagcccgaggcgcagaatacctaacatatcccgtcgaaaccggtcgacgagagtaaagggaagagtacacctatcggaaaactagcggctccgtccacggatcccacctat

SEQ ID NO: 65440 - DNA, 377 bp, Glycine max
gaacctttgggctgatttatgtgcttgcatggtcgtgagtagatcatagacccgtccctagttgataatctatatcgtattggtttcggaatgacagtcagcggtctctctctctctcgctcgctgtcagcatacctagtacataaagcgagttccactaagcacgatatatttgaagggacaaaatacattaatttcagtacgatatgtacgtcagctgatgactaacgtatggtacaggtatagaaagatacatacataaataatattgattaaaaaccaagtaagaacaaacaaaaactagatggctcactcggcttacgtaaatccatgtatgtacgtaagtcaacattcactccacatacatagtcattcac

SEQ ID NO: 65441 - DNA, 307 bp, Glycine max
ctttgggctgattgatgtgcttgcatggtcgtggaagatgctagaagggaccgcccataactactctgcttttacactgaacttgggcggctgttcaacgttacttcccgagttccaagcctgacctacccgtagccacaacgtcgcgcgccgcaaccttcattgagcggctcgccgcggaggactcattagaaggattcgtcgccaaaaccggccagaataaagacgtaacgcacggccgccccagatccgagagagctctcgacgactaacctaacactcacaagtccgcgcctccgttatagta

SEQ ID NO: 65442 - DNA, 367 bp, Glycine max
ctccgaacctttgggctgatttatgtgcttgcatggtcgtgagaatgatagaagagcatgccacaccgccgagtagagccggatcgtcgaccaaccactccggagttctcaccgtcgccaaaaggccgctaaaggactcgaccgaacaattacacaagcatccaaaagaataaccgcgccccgcaatttccgataacgcgcccgcctagatccacacgaacagacgtcttattccacgactctaaaaaaaaaaaaaaaaaaaaaaaaaaaaaacaaaacaaacaacacattaaacaaaaaaaaaaaaaaaaaaaaaaaaaagtggttgcctcagaggacttaagtccatccatgtgcgtacgtaatg

SEQ ID NO: 65443 - DNA, 125 bp, Glycine max
atcactccgcctttcactccctcatcccgtgttcctatctccacattcattccttgttattttttaggattcgtctcatcctcacagtgactatcacctcaaatcaccactacacatcatcaccc

SEQ ID NO: 65444 - DNA, 468 bp, Glycine max
aacctttgggctgatttatgtgcttgcatggtcgtgagagatgatagaaggggacgcaaaagccgaggccgatcccggagtaagtcacagcatcccggactcttaacccgccctctcctaatacgaggcctaaacttttttcgtaaccgtctactacttcctcggcccccctacccgcctctctcctcgtcgtctcttaaataataagaaggtccccgttaaataaagaaaaaattttcatttaaaccatactagacaagccctagggcgccgaggaaccgaaaaacggagaagaaacgcccgacacggtagaagagcctacggcagagagaaggaccgacccggagagcaacgaccacttagggataggagtaaataattagtacgacttaaagatattaggaggattcccgagaaacaacgtacacatccccgcatagaccacgaggatcaagagaaccactaacg

SEQ ID NO: 65445 - DNA, 131 bp, Glycine max
tccgaggaccattgtatattatatatagatcggattctcgattctagccgggcgcaatataaaactcagaatgaaaatattacgtaacagtcaaaaaaaaagtgtgggtctcacaggagtcaagtccatac

SEQ ID NO: 65446 - DNA, 410 bp, Glycine max
aactttggtctgatttagtgcttgcatggtcgtgagaagatgatagaccgggatctacaatacaatatacctctccctcgccgggactttatctaaactaggatttacttgctagtactcgagagagaattttataaatataaagagaacactcgctctaagctctaatcaaatctagtctagcgaagaacgtgaaagagtaacgaggaactcctgaactcgagctcgaggaagttatttccgaagaggagtaagataaccttgaacttaaaatatatagttctcgttttttaccctctcgctctcgctctcgatcttgatgagtaacggaatcatttcctcccttccggtattattattaagaaaaaaaaattactccctaaattttataattctaattcccttaaaca

SEQ ID NO: 65447 - DNA, 334 bp, Glycine max
gggctgattgatgtgcctgcatggtcgtgagaagatgatagaagggagagcacgtagggtcgaagatacataacgtcggctggagggcacgagttaggcatacatcacagagaactaataagactgacgagtccgagtactgaataaggccccatagtcataaactgatgcatttgcggggccccccctcacttccgggccagagaaaaaaaaccaagatagactaaaacaaaaagtggttgcctcagaggacttaagtccatgcatgtgcgtacgtgatgctacagtctccccacagcgccattcaaacctaacctatcggttgctgccccat

SEQ ID NO: 65448 - DNA, 304 bp, Glycine max
agttacccttacagtgatggcaacaacacgaacagtagcagtccgactatcactccctcatcacgtgttcatattctacattcattccatattaatgcttaggatacgtctaatacgcatcgtaacttgaccttgaattgacctacacatcatgcacacatcataacaagatgaaatcgcgatgaaacagaattagttctatctgagaaagatctccgtttcactatcgcatcataactccttaacttaaatctcacagagatagcaaccaaccacgaactcgtacattacgctcaccatacaa

SEQ ID NO: 65449 - DNA, 498 bp, Glycine max
tttggctgattttgtgcttgcatggtcgtgagaagagatagaagggcatgctcgtcagaagatgatagaagggcatggtcgtcagaagatgatagaagggcatggtcgtgagaagatgatagaagggcatggtcgtgagaagatgatagaagggcatggtcgtgagaagatgatagaagggggagcttgagcgcgagagaaattagcgatcgatcccctgagaaagaaaaataaaaacgagcccttgctaccttactacggatgtctcctttacctcttctcctccttctcctgccctcgtaccagccctcgtgaagaaaatcggcgacgcgatggagtcgtaaaccggtgcgaagtacacattagcactacgcgaagtctacgtatataaaggcgatagagctaaagcatatcacacgggaaaatctatcgacggaatcgcccctgacctcagtcccgaaagaaaccacttaaccgaacccgagtccggcctcggct

SEQ ID NO: 65450 - DNA, 382 bp, Glycine max
tgatttatgtgcttgcatggtcgtgagaagatgatagtaggggcccgaagcacagaagagagagagagagagaaagtgcgctctgcgaagtagtaggcgaagtctaagtaaaagaaaacaaaagtctattctccctacttccctccctccctccctctccttcctcctctcttacccctctctctctctcatacagtccctaatatcctataatatactatattttacccctctctctcaataacctaccttctatccctatgagacttttactattgtccgcgataccgtcgtcgtacacctatagagagagaaagaaagaatgaaaaaaaacctataaacccacaatacaagagagaccccagcccccaagacatttcct

SEQ ID NO: 65451 - DNA, 445 bp, Glycine max
gaacctttggtctgatttatgtgcttgcatagtcgtgacaagatgatagaccgggcgcactggagcaacgaccagtaaggatgagctaggacgtcgacggcggaaacggcccctagagcacagcgacactatcgaaagatattccccacgataaagttgaagtaccagccggggcccatagagatctcgaaagaggtcgcctgagaatctctatacccgacccgatcaaacattgagagcctcaaaacctacttacaaggcatagccgacaagttgttcgccacacgcattgtacctagaggccggccgtacccccaccctccgctcggaggcggttaaatcaacgcgaacttcctcccccattttctcctaaccctccgcgccccaagccattagccgggccatccccaaaatcaaccgcaacaggacccttccagcacacgca

SEQ ID NO: 65452 - DNA, 159 bp, Glycine max
tagacgggcacctatataagcaaggggagaacgctccttacagttttttaaaaacgaacagtattactcatcccgtctctccctctccccgcgttcctattattctacattcattcctagttactgtcgaccctccgtctaacaccgaaagcaatttct

SEQ ID NO: 65453 - DNA, 265 bp, Glycine max
ttgtaagatgatagaagggaatagtagtgagaagattatagaagggaatggtagtgagaggatgatagaaggggatagggggaataaaaaaaaaagaagaggaagaagaataatatggaggtgttaaaggtgtgtaaggagtagtagagattatgagggggtaatagtagtatgtagggaatagaatgataataaaagagattagataataagataggatgatgaagagaaaataaaattaggttgtgaatgtggtaagagtata

SEQ ID NO: 65454 - DNA, 411 bp, Glycine max
tggcttcgaacctttgggctgatttatgtgcttgcatggtcgtgagaagatgatagaaggggatgtatgtccgtatgcgctgctttcccttcttgactctttcgaaaacattgtaatttcccgactcttgcccaacctttcccgtactcgaaagaagaaatctatagcggtccatggctactgaccctacagactcaccaagaccactcggaacggtagtaacccatagctcccatactactaacaaactcggcggaccaactcaccacaaggaccacgggctcgtcggatgaacggacattaacgacagtccgtgggcggtgagcccacggtatctaacgtatgtcactctctagtagccactattcgccctaagccggccaggaaccgaatccccctaagtagacatac

SEQ ID NO: 65455 - DNA, 341 bp, Glycine max
gcttggaacctttgggctgatttatgtgcttgtggatgtgcgggtggatgtgcgggcgtgagaagatgatagaagggggaagtacccgagatcagtctccagagagaaaaaaaaacggtccgcgtaggcggaggagacgtagcgagattagcggcaacacgcgacaataagcgcggtcgcatatcctcacgtatcgcgggccttatccgtaggcgtataagcgtcggtatcgttataggagggggcgactatgcgatacgtctgcgtggagagtatcggcggcgtaacttacgtctacgccttaagaccgtggtcgtcggaagcggccgtagacgcggtat

SEQ ID NO: 65456 - DNA, 236 bp, Glycine max
cttcgaactttgggctgagttgggtgcttacttatctgcttgcaaagtcgcaaaagtgatcccaaggcaaatacgcacagaacaccttagaggtgcgcccaataaatgtagcggtgcccgtattacgcaactacatcacccggtctaacaacacgcatccgaactaacgaccaccaaacacactcaacgcaatacaaaacccccaccgacagcaaccatcaccactcctatacccc

SEQ ID NO: 65457 - DNA, 495 bp, Glycine max
ggcttgcaacctttgggctgatttatgtgcttgcatggtcgtgagaagatgatagaagggcatcgccgtgagaagatgatagaagggcatggtcggcagaagatgatagaagggcatggtcgtgagaagatgatagaagggcatggtcgtgagaagatgatagaagggcatggtcgtgagaagatgatagaaggggactttacaaaaaatataagtaaacttcaaaaagcctatcgagacacacagaatcactcctaaccctataaaacgaagaaagcgcccgctatacccgcagtctcgtcagccgcacccgcctccatagcgatagtcctagagctaaagttattagctataataaacctagtattaaacgatcataaccgcctataagcgacgaacaatccgcccgccctgcgtgcagaccattctaccggcggagacgtccgcttcctaggcgcccgccgttaaagcgccaacgtagcgaaagtaccaata

SEQ ID NO: 65458 - DNA, 347 bp, Glycine max
  unsure (1)..(347): unsure at all n locations
tggcttggaacctttgggctgattttgtgcttgnagaagatgatagaagggggttataagtcatacatataagaacggtctgtatatccgctctagcgaccctgccacccccccccattcccgtagctacggccggcgcctcacctctaaccggcgcgaacagtagccagactcgcttcggaaaccgtgaaaaccccctaaatcgtaacgtccatcgttaggtttatcactacaagaaagggacacgtactagcttattcaactcagggcataccngacgccgtcctctacgagcccctcctacacaaccacaagtaagtaacgcaccgcccacaacaaccaccagt

SEQ ID NO: 65459 - DNA, 342 bp, Glycine max
tggcttggaacctttgggctgatttatgtgcttgattggcggtaaaaggttattggaggggggttcggtctcagaggatagtctacgctagggaaaggagttctactaatatcggacgtctgattctggatagtcaactatacgagtgagagggccgaaatcgtactataagaggtccaaagatttgaagaaccacacgtagggtacataggatatcgtaagcgttctaaagtttctactccgattatatacatctatcgaaggttcattgtctacatttaggatatgaaatttataggagattgtgtacatacattgtgaaactaccgtaaccacggcgta

SEQ ID NO: 65460 - DNA, 283 bp, Glycine max
  unsure (1)..(283): unsure at all n locations
agatgatagaaggggactngagaggagaggngtggtganggtnggggtaggggtctttaaganaacaatggnggtacctgacaagtaaaattgaaggaggagccctgaaggaccgcgcgggaaaaggcactgggcaagggcgaagtgaagctaagactacctagcgaaccgcggcaccgagtgaagtagtagtgacggaaagaaagggggtggaggaggaagatgcgcaaacctgaaccacgccgcgttgtcggataatacggtgaatctacttcgtacaata

SEQ ID NO: 65461 - DNA, 338 bp, Glycine max
ggcttggaacctttgggctgatttatgtgcttgcatgtcgtgagaagatgatagaagggcatggtcgtgagaagatgatagaaggggaaccaaaaaagagtcaacaattaatgtactgtcctggaccactcagactcaaagaatcagctaaaatacaaaaaaacacaaaaaaagacacaccacagtaatcgaatcaccgcgaagtacaaaagaataaagactccacccaggcgcaaagtaacaaaaacacatagacaaacgaagaggcgagagaaagagagaaaaaaaactaacgacacagaacctcaacacgcaaaggctcacgggccactctacaa

SEQ ID NO: 65462 - DNA, 385 bp, Glycine max
tggcttggaacctttgggctgatttatgtgcttgcatggtcgtgagaagatgatagaaggggaatctaagccctacgaacgaccgacacgcggaagagcgcaccggcgccggcgcctccgcgctccagctccagcaacggcgacgactaagagaagaagaaatttcgcccgcgggagcggaagagatcgagcagtgtccatctcgttcactgggtatcccccttcctaagcaccggctccgatacgtccaagaattccgctatctatatacacgtttgccctcccttcttaaacacagaccccagaagagaggaagaagggtaagctaaaaagaacggagtcggggaaaaggccagagaagtccccgtgaaaagttcaagaaaca

SEQ ID NO: 65463 - DNA, 138 bp, Glycine max
aattatcctaccccataaaacaacaaatacactcctatatgcctcaccagcacttaactccatacatctccctacatcacccctcactctccccacaacgaaattcatacctaacctacccattactaccccatcatc

SEQ ID NO: 65464 - DNA, 409 bp, Glycine max
tggttccaacctttgggctgggttaggtgcttgcatggtcgtgagaagatgatagacgggcatgcgccgtgagaagatgatagaagggcattgtccgaggaacctgatagaagggcggggtcgtgagaagatgatagaagggcatggtcgtgagaagatgatagaagggcatggtcgtgagaagatgatagaagggcatggtcgtcagaagatgatagaagggcatggtcgtgagaagatcatacaagggcatggtcgtgagaagatgatagaagggcatggtcgtgagaagatgatagaacggcatggtcgtgagaagattatagaagggcatggtcgtcagaagatgatagaagggcatggtcgtgagaagatcatagaacggcctcgtcgtcacaagatcatacaa

SEQ ID NO: 65465 - DNA, 333 bp, Glycine max
ggcttggaacctttgggctgatttatgtgcttgattgtcgtgagcaagcttatcgaccggcattacccggagctctagtcaaaagcccgtgcgacggcggcacagactcggcaggaaacacccatagtacgtggcgataccccgtaaccctggaagcctagccccaagtcaatctacccccctcatcatttcccctacccacgacattagtgaacacaacaaaaacaacacaaaaaaccacgtattggcgaacccataacccggacccgtaagaaaacgcaccgcaaacaacacacggaataagcacattagccccccccttctaaagtccga

SEQ ID NO: 65466 - DNA, 359 bp, Glycine max
gcttggaacctttgggctgatttatgtgcttgcatggtcgtgagagatgatagaagggggtgagtgagtgagtagccctaaagagaggacccgggaccgggaaggtgagggaccgtgtcgtgctctccttctcctctccctgacctaccttctacctacaactccgtaacttaataattccagttctatatccatatacatatatactcgaatgtgcaccgctttctctacggtcctaaagtgtacttctaaagagtctaaggatccgtagaaagatttattaatcctccgtagtgtcggcctagcagtcgaggatacgccttaccggtaagtaatgaccacgggcttcgtcgacagct

SEQ ID NO: 65467 - DNA, 349 bp, Glycine max
tggcttggaacctttgggctgatttatgtgcttgcatggtcgtgagaagatgatagaaggggaggaaaaaaaaaactaaaagcggacaacggtcctggcactgtcccgtacagttacgaaagtatttatctttctaatcctctctacctctatcgttttaaaattactcctgtctctcccgaattccatttgtatccgtcttattgtctgtctcttgtcctcttaccgtcttccttctctcctcatcctttcctctctctttttccaacttacccaaagtccgctatccggaccggaacccatactcaaccccgggattagaagaagaaaaggcctcggttccgccgcg

SEQ ID NO: 65468 - DNA, 409 bp, Glycine max
tggcttggaacctttgggctgatttatgtgcttgtttatgtgcttgtttatgtgcttgcatggtcgtgagaagatgatagaaggggggattagagaagtgctccaacaaatgtcaattctcgcattacctcctcctccaaaaacgagagagcgtacccttacttataccggttaggttggtacctaggctggaaacgtccgtcgggagtcccaccgttctgagtacgttacctaggtcgacgggtagacgttgagcgacaagattacaggcggcggcgatgacgtccccaatattcctcctagtgagattggcgttggaaagtatgcgttctgcgtagcccctgcggactctgagtttatcgctaccgacgaaactagaatcggtatacaattgtaaccggcctacctg

SEQ ID NO: 65469 - DNA, 449 bp, Glycine max
ctttgggctgggttgggtgcttaaatggtcgtcagaagatgatcgaagggggcgcctgctgccatgtgagtaagtactttaaaatgtctatccctccatcgtccctgggccccataccacgacggagctctaggcgaagtatgtatccgccgctaaagccacgggctgcatcggacttacaggatacgcaattcacgtcagagcgaaacccccggacgactagacttgctatactacgacgaacgcgaaaggattcgcatcagaaggacatacctctatttcatctcagctcgacagggaagcacgaacaacgtatccgactgccctcaccggtccgttcataaacctcaatcacatcacgcgacccacgtcgacaccacacggcacacggcggacgctcaacgccccagtctttcaccccaacggccgctccccggcccacatccacc

SEQ ID NO: 65470 - DNA, 457 bp, Glycine max
tggcttggaacctttgggctgatttatgtgcttgtttatgtgcttgtttatgtgcttgcatggtcgtgagaagatgatagaagggcatggtcgtgagaagatgatagaagggcatggtcgtgagaagataatagaaggggacttatagtacaaaaaaaaaaaaaaaaaaaaaaaaaaaagtggttgtctcagaggacttaagtccatgcatgtgcgtacgtgatgctacagtctcctcacagcgctattcaaacctaacctatcggttgctgccccataatgctgcgatcgggaaaatttcggtgccatttaatccaactgttccgtagtatactttttccctggtagtcggtgcaacagtgaagaggtttgtattgactgtttcctttaatagccgtgtaattcgaacggtgaacgggatgtgtttcgcagtggtgtaccaaatgttggtggcgcg

SEQ ID NO: 65471 - DNA, 387 bp, Glycine max
tggcttggaacctttgggctgatttatgtgcttgcatggtcgtgagaagatgatagaagggcatggccgtgagaagatgatagaggggcatggtcgtgagaagatgatagaagggcatggtcgtgagaagatgatagaagggcatggtcgtgagaagatgatagaagggcatggtcgtgagaagatgatagaagggcatggtcgtgagaagatgatagaaggggatagtaaaaataaccaacaaagacgagcccgaagaataataccgcggcgtcaaaggcgcgcccgacgtcctccccttccgcgggggccatagtcgtatgtacggaatcgagtcctcctaaaagcgactagctgctaaggcacgacgacgacaagcacctaaaa

SEQ ID NO: 65472 - DNA, 280 bp, Glycine max
  unsure (1)..(280): unsure at all n locations
ggtcgtaaagagatgattgatgggtatagtngtgggaagatggtagaggggagtggaagtgagaagattatagaagggaatggatgtgagaagatgatagaagggtatggtngtgagaagatgatagaagggcatggtngtgagaagatgatagaagggtatagtngtgagaagatgatagaagggnatggttgtgagaagatgatagaagggtataggngagagaaagtagtagaagagtatggtcgttgagaagatgatagatgggtatagtcgtgag

SEQ ID NO: 65473 - DNA, 448 bp, Glycine max
  unsure (1)..(448): unsure at all n locations
attggcttggaacctttgggctgatttatgtgcttgcatggtcgtgagaagatgatagaagggggcgcccctcccttcccgcgtaataataataatcgaagacgaacaactactaagtgctagagaagaagaatgacaatacggagaagttatcaatcttaccgacgttcntcttcttccttatatccgaaaggataatccttaccgacgacgagttcaaaatcccgtccgaagaggagacgaaagccgtaagggaagtagtctctaaaactactaacctctatctaaaagaagacgtttcgaaaacaccttcggtgggcccggcgttagcgggaataagtctaaagtaagcgaaagaagacggcgctgcgctcgatcatgacgatgatgatgaacgaagtaccacctgggcggaaaacgacggcttcgcggaaagtcgaagtcccaa

SEQ ID NO: 65474 - DNA, 437 bp, Glycine max
tggcttggaacctttgggctgatttatgtgcttgcatggtcgtgagaagatgatagaagggggaaacttaaatacgcatcgaaacgtaggctgcttcaagaggccgccggcccccgccaacttgcccggcgagaagaaacttgtcatgaagacccctgtcgaataagcgaaattctcccccgaagacgtctacacttaaactatagcctaagaaattaagtattagtcttacgtaaaggaagccgtctgcctgtcaggcaccatcaaacatgacgggaccgcccgcgccagcggagacggaaccccggccgaagccagtcctaccgttaccatatccgccgtatcacccgccactactactccgaatgctaccgctaagcctggggccaacaacataaaataacgactacaacaacgactagactatatcttcccct

SEQ ID NO: 65475 - DNA, 436 bp, Glycine max
tttgggctgagttgaggtgcttgcatggtcgtgagaagatcatagaaggggggcctcgtatttcctatctataagctattagctcgctctccacgccgcgatccgcggggacgctaatcttcgtaaggaagagatctacgagagaccctaaaagaccgtaatcagacttcttcgtcggtactagcggcgtcttctaagataacaacaccacgtcccggaacgtagccactcctcgattggaccatatttttcgggacggaggtatacccaagccaatatcctagcctattgacgaccacttcaacaaattattcatagcgtgtccagccctccaaacgccctactttaatacccacctagaccgaactacacgcccggatactccataaaactaccggcattttccacacgacgccctcgacatctccattccaac

SEQ ID NO: 65476 - DNA, 329 bp, Glycine max
  unsure (1)..(329): unsure at all n locations
gcttggaacctttgggctgatttatgtgcttgtcgtgagaagatgatagaagggggcttcagccaacatgtaccacctcttcaatgtccacctcccctagtctctcgttcntgatagaaacagccctactaggtctacccaacccattctaaaacaaaataaccccactccgccacggtctccccggcgcactccgcgtccccttcagtttctatcgactacctaagcgtctcccaccgcccacgtaaagacggcgcgagcgactaaatttcctagaaagtaacagaccacgtccgcggaaacggagtcgatcgcattttcacctccta

SEQ ID NO: 65477 - DNA, 477 bp, Glycine max
tttgggctgatttatgtgcttgcatggtctggaagatgatagaagggcatggccctgagaagatgatagaaggggtccccccggggggaaccggggtaaatagtaggcttcattttcaatttcaatccggaattcctccttcctagacctacttgcattgtcagccacaccatcggacctggggtagaccgtcgccattgtgccctcttgtccctacccacaaggccccgagccgccggcccccgaacacaaacggatgttaaatggcctacttagtcggccgaggagaagaagaagaccacggagagaaaggaagtcttctcgaaacgggagtagaagtcggaagtcgtcgtcgaaatcaaagagaggaagtcgaaggtcataaagtacaaaaaaagactcggtctcgacagcgatagcgacaacgatagcgacgacgagagcagaaagataagcaagagactctatcaggagtat

SEQ ID NO: 65478 - DNA, 345 bp, Glycine max
ctttgggctgatttatgtgcttgcatggtcgtgagaagatgatagaagggcatggtcgtgagaagatgatagaggggaataaatatagcataaataaaaatgccggaagaggaaagcggtggcgaaaaacgaaagcgatccggaagaataagaagaagaaatgccgcccatttatgccgctatatcctatcgattcctttcccgagtacaactactaataatatcttaatattgatgtcgaagacggtgtgtacgcctttgatgttatataaccggtcaatgaaccctaagtctaaggagataagtccgtcacggacgggaagcattgggaagtatcaagcaaac

SEQ ID NO: 65479 - DNA, 322 bp, Glycine max
tttgggctgatttatgtgcttgcatggtcgtaagatgatagaagggggagagagcataaagaactaaagaaaggggcggcggtcgtcctgaaagtaccaacaaccgggcacccttagaatactacagcccctgtagtagtaaatcaataaaccatctacactacacaacaagacggtttgcctctctctgtaagttaaatgcaccggcgcttccgccgtctaactcactctttcaaccttagcctactggtgaggccatatagcggtaccttgacgcaccgggaagagccggaccgggcaacaccgggtgaaagaacggaac

SEQ ID NO: 65480 - DNA, 353 bp, Glycine max
  unsure (1)..(353): unsure at all n locations
tggcttggaacctttgggctgatttatgtgcttgtttatgtgcttgtttatgtgcttgcatggtcgcgagaagatgatagaaggggatattaatattaaaataaatttatcaagacggtccttcccgcacttccttcagcgtcgtcctccgtagtttccacttctacgttctaagggtccgtcatccatcataaattaaccaagaagttattagcgcataagttcntagcgcataagttattagcgcataaattattggcccacaagttaaaattattggcccataagttgaaattattggcccataagttattacacaagaagttattacataagaaattattccacggaaa

SEQ ID NO: 65481 - DNA, 443 bp, Glycine max
gctccgaactttgggctgatttatctgcttgcatcgtcgtcagaagatcatagcccgggaaccagaaaaaaaagacctcaaagaggcacaatggacacctcccagaagaactaaaaagaacaccaaacctaaacaaaccccagaccgaaaaaagatccaaaaaggaggacccgaaacgtgagactcaaaaatacactcccttgcggtattagcagcaagcatctcacggcctggcgtcccggcgggctctccgacagagactaactgcccccccttagacgtaccgacacctttcccccccctacctcagccaccgatatgcaaaggggcgaagaagaccacagacttaaccaagcaccaaacacacgcaaccaacacgcaaccaactcttctcctcccaccctgctccccaccatccttcccccccataaccgcaacacaac

SEQ ID NO: 65482 - DNA, 97 bp, Glycine max
gacaagcagtgtttcactgacagtgtgtgtgagagatggagagagagagatggcatggttttgtgctgctaggactttccacattcctacgatgaac

SEQ ID NO: 65483 - DNA, 312 bp, Glycine max
  unsure (1)..(312): unsure at all n locations
gacagcaaaatcaattaataaagatgagtttgaagaacaacatggtggtgctaaaggtgtgtttgttgcttcttttccttgtggnggttacagctgcacgcatggaactgagcttcttcaaaagtgatcagtcatcaagttatgatgatgatgagtattcaaaaccatgctgtgatctctgcatgtgcacacgctcaatgcctnctcaatgcagctgtgaagatattaggctgaattcatgccactcagattgtaagagctgtatgtgcacacgctcacaaccaggacagtgtcgttgtcttgacaccaacg

SEQ ID NO: 65484 - DNA, 293 bp, Glycine max
  unsure (1)..(293): unsure at all n locations
tgacagcaaaaacaattaataaagatgagtttgaggaacaacatggtggtgctaaaggtgtgtttgttgcttcttttccttgtgggggttacagctgcacgcatggagctgagcttcttcaaaagtgatcagtcatcaagttatgatgatgatgagtattcaaaaccatgctgtgatctctgcatgtgcacacgctcaatgcctnctcaatgcagctgtgaagatattaggctgaattcatgccactcagattgtaagagctgtatgtgcacacgcttacagtcaggacagtg

SEQ ID NO: 65485 - DNA, 488 bp, Glycine max
tgcttggacctttgggctgatttagtgcttgcatggtgagaagatgatagcaggcgactatatcaactatctatctcctatctagaatctccgctccctacccctacaacctttatataccacggtcgagtcctatcattaattataatattaacatttttcttgtcatttcaatgacttatattaataaatttgccttcttatttattaggctgctaaggttgttattgttgctatagtgggtggtctttctccgacttctgttctgccgacttctgttgttattgctaccgtttctattactgctattttgtcgcctgctacccctagcttggcctctgcttttgttgcaactattgccgtgtcttcgagttcggggccttctgttctgagcgggcctggcgcggtggtgactatggcgtcggtgcggactcataggcatgctattggtaagtaattattcggtgtggactagccagatagtgtgt

SEQ ID NO: 65486 - DNA, 357 bp, Glycine max
aacctttgggctgatttatgctgcttgcatgcgtcgtcacaagatgatagacgcgcatcctcgtgagagaaatagaggggctctcgggacaagatcatagggggtcatggtcgtcagaagatcatacaagggcatcgtcgtcagaagatcatagaacggcatggtcgtcagacgatcatcgaaggccatcgtcgtcagaagatccatacaagggtgctctacaccccaaacctcaccaccacacccaccaagtaccccacccagaggacttaccaccctccatctgcccacctcacccaataccccccccaccgcgcccctcacacccaacccatcgcttaccccccatcatccacc

SEQ ID NO: 65487 - DNA, 395 bp, Glycine max
gagagaaagattataagattggaatggagaaggcaagcctgtgcgacaggaacactcctctcccacttcttaatcgcccttccaattttcttcaattcaagcaccaaaactccttcctcaagttcccgaacccaaacctccatcgactgcgcaggctcaattgctcagtatcagacggcaccgtttcgtgtaagcctcgtattgcatttctttcccctccggtttctgaattcaaattttgtgcagttagttagttaatgaatgttgttgttgttgcgtttgcatttttattattattcagcttcgcttggtgccacggactcgtctcttgcggtgaaggtgagacagattaagattgttgatagatagaatcatgcgtgtttgatttcacaatg

SEQ ID NO: 65488 - DNA, 227 bp, Glycine max
  unsure (1)..(227): unsure at all n locations
gacagcaaaatctattattaaagatgagtttgaagaccaccatagtggtgctaaaggtgtgtttgttgcttcttttccttgtgggggttacagctgcacgcatggaactgagcttcttcaaaagtgatcagtcatcaagttatgatgatgatgagtattcanaaccatgctgtgatctctgcatgtgcacacgctcaatgcctnctcaatgcagctgtgaagatatt

SEQ ID NO: 65489 - DNA, 52 bp, Glycine max
ggaggcggagacgaagaagtgaagagaagagaagagaagggatttggatctg

SEQ ID NO: 65490 - DNA, 273 bp, Glycine max
ctttgggctgatttatgtgcctgcttatgtgcctgtcgtgagaagccgatagacgggcatggtcgtgagaagtgagagaacccgatatcgtgacaggatcatagaagggcatggtcgtcagaagatcatagaagggcatggtcgtgagaagatcatagaagggcatggtcgtgagaagatgatcgaccggcatggtcgtgagaagatcatagacggccatggtcgtgagaagatcatagaagggcatggtcgtcacacgatcatagaagggca

SEQ ID NO: 65491 - DNA, 310 bp, Glycine max
ttgggctgatttatgtgcttgcatggtcgtcagagatgatagaccggcatggtcgtgagaagatgatagaagcgatggtcgtgagaagatgataggggggcatggtcgtgagaagatgatagaagggcatggtcgtgagaagatgatagaagggcatggtcgtgagaagatgatagaagggcatggtcgtgagaagatgatagaaggggggccccggccaacgccccaccccaccacctcaaaaaaaaaaaaaaaaaacaaccaccaaaaaaaaaacataaacaaacaaaaccaaaccaaaaaaacacaa

SEQ ID NO: 65492 - DNA, 349 bp, Glycine max
tttgggctgatttatgtgcttgcatggtcgtccagaagtcatccccggggttcagtgcgctctcttgtagtagtgcctcccggtgaactagtctaggagttattagtacgcaagacacggccaagtacaataatgccacttttaacgggtatcctaggaaatatcggtaaaatcacgcgaagatccggcccaactaattagtatcgaagattagaaggtgcccactctggtagaacaacgtcgctaagacccctttaaggttcatcgtcggattctctacgttaaccgtctacggttagatctcgacacataatacgaaagctagactcgggacaggacccctctctca

SEQ ID NO: 65493 - DNA, 187 bp, Glycine max
cttccataagaccactttaagttaccactacaaacagacaacagacgtggtttgggagaacatcatagaagggcgtaatctcttaatctcttcttcttcttcctgctcttgatacagactatcacatggatctgacttaattaactgcagatcattaataatgtcattactattaatactcttaagt

SEQ ID NO: 65494 - DNA, 485 bp, Glycine max
cttggcttggaacctttgggctgatttatgtgcttgcatggtcgtgagaagatgatagcaggggggcggagagaggggcatcgatctagatttatagcagctgggggtagtcctaaagcattcttataccgctcttcatctccatcgcctctcctctcctctactacccccaccccccttaactaaattaaataaaatacaagtattgtctcccctctcttgaaacttttactctttcctatcctcgagtctcggatgagactttagactctattactccctatgtatctccttactagacctatttccctgcccaatgtaaatctacaatccgaaggccaacggtcgtcttattggtaagggtctgcgttgaccatgaccactctacaaagtcctctccgattggcggtagtggcgccgggaaaagccgttcttcctcgtgccctcttgacggcctccctattatcagccctactataatcaca

SEQ ID NO: 65495 - DNA, 282 bp, Glycine max
gcctgcaatcgctcatccttcactcaccgcacgctttatctccggtgtcgcgccatttctatcgctgtcttctcattaccactcaaccctcactgtgagcgatcccacactatcgcaaccactcataaccctagtccagccaccactcattaccgtggttaccacacacaatcatcaccatctaccctcaactaatgcctaacgtgaaactaaataatctcaccagcatctctacaaacggaatgagcatgctaaatataaccccaatatcgttaggtgtga

SEQ ID NO: 65496 - DNA, 397 bp, Glycine max
tccgtattcccggtcgaccacgcgtccgtcacgcgtgcgaccacacatacggccacgctctctcacagctgctagcagacctctgtaggattatcacggatatcactaacacgaacatcccgtcatattctcccatactcgcgcttgttgccttcatagcttctggaaaacatgtgcatatgacagtcataccaacttgtgtgctacaaagcttgtcaagtcattatgaaatattcaagaatccttgcgaacttctttgccaacaacactttggatcacccgcaacacattgagcttgtggcatcaaattccatgtatgtgtatgacatccatgctaatttaaagtttaaccattacaatcacagctttaatacctatttaatagcatttatcccat

SEQ ID NO: 65497 - DNA, 315 bp, Glycine max
gacagcataaagaattggtaaagatgagtttgaagaacaacatggtggtgctaaaggtgtgtttgttgcttcttttccttgtgggggttacagctgcacgcatggaactgagcttcttcaaaagtgatcagtcatcaagttatgatgatgatgagtattcaaaaccatgctgtgatctctgcatgtgcacacgctcaatgccttctcaatgcagctgtgaagatattaggctgaattcatgccactcagattgtaagagctgtatgtgcacacgctcacagccaggacagtgtcgttgtcttgacaccaacgact

SEQ ID NO: 65498 - DNA, 164 bp, Glycine max
tgactgttacagcaaatacaattaataaacatgagtttggtgaacatcatggtggtgctaaaggtgcttgtgttgcttcttttccttgtcatggttgcaactgcactcatggaacttaacttcttcaaaagtgatcattcatcatgttatgatgcttactagta

SEQ ID NO: 65499 - DNA, 148 bp, Glycine max
  unsure (1)..(148): unsure at all n locations
gtccgcccacgcgtccgcccacgcgtccgaattcgagctgccgcttttttnttttttttttttttttttttttttagatttttttttaataaaaatgacgaaattttctaaaagcaaattactggccacttaacttttatttcttgtt

SEQ ID NO: 65500 - DNA, 198 bp, Glycine max
gacagcaaattcaattaataaagatgagtttgaagaacaacatggtggtgctaaaggtgtgtttgttgcttcttttccttgtgggggttacagttgcacgcatggaactgagcttcttcaaaagtgatcagtcatcaagttatgatgatgatgagtattcaaaaccatgctgtgatctctgatgtgcacacgctcaat

SEQ ID NO: 65501 - DNA, 319 bp, Glycine max
tttttagtgcctgaactcagtcccttctcacagacttaagtccatccatgggctcctgaaaaggatccgtcacaggctattcaaacctaactacgttgctgcccctatgctcgacggaaaatttcgtgcctttaatccaatcccctatatactttcccattatcgtgcaacactgaaaggttttatgattttccttaataccgttattcgaacgtcaagggaatctttcgcatccttacaacttcctagcccgaacctatctactccattgtctatccttatctttcatattttactcccttcctcctttcctccctct

SEQ ID NO: 65502 - DNA, 276 bp, Glycine max
tcgggagaagatgatagaagggcatggtcgtcagaagatcatagaagggtatcgtcgtgagaagatcatagaagggcatcgtcgtgagaacatcatagaagggcatcgtcgtaacaagatgatagaacgccacgacgacactagctaaaaaaaaaacaaccaacacacaactaaacgtcgcagactcataagacctacacccatgcctcctgctacctccacccacatcacacccacagcccaattcaacaccaacctatcgcccccccacccata

SEQ ID NO: 65503 - DNA, 318 bp, Glycine max
gattcacacaactaactaagaaagtcttccatagccccgcaaagatgaagagcaccatcttctttgctctctttctcttttgtgccttcaccacctcatacctaccttcagccatcgctgatttcgtgctcgataatgaaagtaaccctcttgaaaatggtggcacatattatatcttgtcagacataacagcatttggtggaataagagcagccccaacggggaatgaaagatgccctctcactgtggtgcaatctcgcaatgagctcgacaaagggattggaacaatcatctcgttcccatatcgaatccgtttta

SEQ ID NO: 65504 - DNA, 140 bp, Glycine max
agacgacagaaggggaaaaaaaagaaattaatattaatttatgaataaaactaaaaaaaaaaatgaataaaagaagatgaaaccctccaaaatccttctttgatttgaacttatctagttcaaaatctttttttattctg

SEQ ID NO: 65505 - DNA, 461 bp, Glycine max
tgattgatctgcttgcatggtcgtcagaagatcatacacgggcatcgtcgtgagaagatcatagaacggcatggccgtgagaggatcatggaagggcatcgtcgtgagaagatgatagaagggcatggtcgtggaagatgatagaagggcatggtcgtgagaagatgatagaagggcatggtcgtgagaagatgatagaagggcatggtcgtgagaagatgatagaagggggagtattaaaaaagaaaaatctcgtttcagccggtcaaaaaaaaaaaaaaaacaacaacaaaaaaagtggttgtctcagaggacttaagtccatgcatgtgcgtacgtgatgctacagtctcctcacagcgctattcaaacctaacctatcggttgctgccccataatgctgcgatcgggaaaatttcggtgccatttaatccaactgttccgtagaatactttttccct

SEQ ID NO: 65506 - DNA, 138 bp, Glycine max
gacaacagtaatatcatattatacacaataaaaaaatgaagtaagtagtagaatattcaagaggcctgaaaagatcaagataaagacgaaggagccgacttgatattttagcattataaccgaaaaaaaaaaaaatat

SEQ ID NO: 65507 - DNA, 423 bp, Glycine max
tggcttggaacgttggggctgatttatgtgcttgcatggtcgtcagaagatgatagcagggatcataatacttagaaggaactaaggtcctattgtgcttcgtgctcttgcggcggtacgtagactcctgccaagatttctattggtaagatcacaatttcagaagctgagagtcttgatattactgataatgctaaggtcaagacttaggataaggagggcacttttttagattagtagaggtcgactcctgttggtaagtagtctgaggatggatgcatttccgtcgatcataatacttagaaggagctaatctcttatccggcgccgtgctcctgcggcggcacgtagactcctgctaagatttccatgggcaagatcaccatttctgaggcggagagtcttgatattaccgataacgcg

SEQ ID NO: 65508 - DNA, 200 bp, Glycine max
aaaaacaaaaggtaaagaaataacacaataaacaaaaaaaaaaaaaaaaaaaaaaaaaagtgcttctctcagacgacttaagtccacccatgtacgtacctcatgcaacaatctcctcacaacgctattcaaacctaacctatcgattgatcccccataatcctccacatcgcgaaaatttcgctgccatttaatccaac

SEQ ID NO: 65509 - DNA, 78 bp, Glycine max
tatttcctttcatcttacatttatcaaactattttaatattacaatttacatgcttcacgaatagtatcatcatttct

SEQ ID NO: 65510 - DNA, 246 bp, Glycine max
tccgaacacatcacatcttaacatcaatattgtcatattatacaccatacataactgtatttgggaatcgatttttctataatcctgacctgatcattatactctccaactgagctcaactccatatttcatcaccatatcctatacctaatgattttttgtctgtcctataaatcctacgatcttaatgatccaatcatacttactcctgcatcctatgtcttaactattatcattggtcaccta

SEQ ID NO: 65511 - DNA, 245 bp, Glycine max
  unsure (1)..(245): unsure at all n locations
gattcacacaactaactaagaaagtcttccagagccccccaaaaatgaagagcaccatcttctttgctctctttctcttttgtgccttcaccacctcatacctacctccagccatcgctgatttcgtgctcgataatgaaggtaaccctcttgaaaatggtggcacatattatatctngtcagacataacagcattttgtggaataagagcagccccaacgggaaatgaaagatgccctctcact

SEQ ID NO: 65512 - DNA, 157 bp, Glycine max
gttccatactcttggactttatgtccataatgatctcgcccttagagttaggtgctaattgtcaacgagaatgtcattgatcattcacaagattgatgagacccttcatgtgggaggccacaataacgatgatgagtacaagggtgagcatcaccat

SEQ ID NO: 65513 - DNA, 389 bp, Glycine max
tggcttggaacctttgggctgatttatgtgcttgcatggtcgtgagaagatgatagaagggggtgatgacggcggtatacctgagcctccggggtagggtgtctgcggttactctgtttcacattcctctcgttactggtactgttgctgtcactggtgctcttgcctctggtgttgttcgggggactcatactattggcagcagtccgactggtgtcgtaactagggtcttctgaactatccttaaaaactctatcagcgcaactcctcgcgaagtcgccgtcacacacggcgccaccgcggtcaccacctcctaaataaaagcagaaagcgccttagtactaaacactcacgtattcgagctctccaaggtcggacacgtaactccc

SEQ ID NO: 65514 - DNA, 469 bp, Glycine max
tggctccgaacctttgggctgattgatgtgcttgtttaggtgcttgattatgtgcttgcatggtcgtgagaagatgatagaaggggagagaacggggacgaagctcgtcacgcgcgtagcggcggccgcagtatcctcctcctcggtggaggcggggtttacggtcgaggtcgcgatacgtattttaatagagccgatcttgcgctccttagtaactatccgtggcgtcaaattccttaacgtccgccgtatgaagtcgaagtagtacaaattacgtccacgcggtcattctaaaaatgtcagtccgaagtagcacgccaatctcttcaacgtttgaaaaattgccgtcctccgcgggacctttcccttaatctgccaaccaaccaagttcctccacaaccaaagcgcgggacacacacacacacagacaaatagctcaacccacatatatcccgacttcataaagtac

SEQ ID NO: 65515 - DNA, 253 bp, Glycine max
  unsure (1)..(253): unsure at all n locations
tgtttatgtggttgnatggtggtagaagatgaccccagggggttgagaaaatttnagggtgttggtgggtatataagaggttaaggtgaggtaaagtttgagangggtgaagaagggaaggtaggagaattagaantagtggggaagaagtgtaagagggaggaggaatgggtgnaggttaagaagtaagaatatgangtagttaagaagaagagagttgagagttgtaaatgtagtgataatgaggatgaag

SEQ ID NO: 65516 - DNA, 358 bp, Glycine max
tggcttggaacctttgggctgatttatgtgcttgcatggtcgtgagaagatgatagaagggcatggtcgtgaaaatattatagagggatattgtcgggaacatactaagacgagatagaagaattatacggcggagtcaaaggcgaggaataagacggcggcgtcagaggggggcatagtggtatgtatggaatcgagtgccataaaaagctattaggtattaagtcacgatgacgacgagtacctacaattacgtgacgactatcatacgcgtatatgtcgtagggacttccaaagtagtatatatcaaacgatcttgaaacgaagttatctagacagcaagactcgcatacgtata

SEQ ID NO: 65517 - DNA, 362 bp, Glycine max
tggcttggaacctttgggctgattgatgtgcttgtttatgtgcttgcatggtcgtgagaagatgatagaagggcatggtcgtgagaagatgataggggggcatggtcgtgagaagatgatagaagggcatggtcgtgagaagatgatagaagggcatggtcgtgagaagatgatagaagggcatggtcgtgagaagatgatagaagggcatggtcgtgagaagatgatagaagggtctcgcacgcactacacacgcgcaaacgaccgaaccctcccttgtggttgcctcagaggacttaagtccatacatgtgtgtaccagatgacttaagtccatccatgtgcgtacgtaatgatacaatc

SEQ ID NO: 65518 - DNA, 481 bp, Glycine max
  unsure (1)..(481): unsure at all n locations
tggcttggaacctttgggctgatttatgtgcttgcatggtcgtgagaagatgatagaaggggagttatgcatgtaatcgaaaaggaaaatttcaagagacgaagggaatctccactccgcctttctctcctccctcctcccgcgttcctattctacactcattcctagttattgtcgacgacgactacgcgcatgatatcgatggtgacaagtcctaacatggcgctaaccaccctgcgccgttagcgacaagaggaaacggtggcggaacataagcagtaaaagtaggaaatgaaatccgtttctcgatcgcggcgtaactcggtaatgagtctctcgaggggccattgacaaagaccgtactctgactagtaggagctgtccctactatttaaggttagtcccctaagagtancctagcctgcgcgcccttacttatatctagattagggcgctttttaagcttaaccttcctcaagcg

SEQ ID NO: 65519 - DNA, 286 bp, Glycine max
gcttcgaacctttgggctgatttatgtgcttgcatggtcgtgagaagatgatagaaggggcacgctaacagaattagtactatctcatcttacatgaagaaaaaaaaaaaaaaaaaaaaaagtaaatttctcatatcacttaactcaattcaattccttaccttacgttacactccactcacagcacaattcaaaccaaacctaaccgatcgtttcccataatataatgatcggatcaattacatttccattcaatccaacccaaccgtaccatactttacccctc

SEQ ID NO: 65520 - DNA, 394 bp, Glycine max
ggcttggaacctttgggctgatttatgtgcttgtttatgtgcttgcatggtcgtgagaatgatagaaggggataaacaacaacaacagcacgaacgaagggaaaggagagagagagagagagagagagaggcctccatacgagagaagggtgcgcccggacgtagcggcggaagtcgcgggacaaagtaacggactcgagaacagagaaagaagagagaagagaaaagggggcggaacaccgagaatagagacacccggacccgaagcgcgaggagacgagagagcccgccccgcgaagcgccaacaaaaagggaagcgggcatcgaaagctcaagaaagcgttggaaaaggaagggtcttccctaccccaacgcttatcaaatccttatacat

SEQ ID NO: 65521 - DNA, 178 bp, Glycine max
  unsure (1)..(178): unsure at all n locations
ttgggntgatttatgtgcttgnatggtcgtgagaagatgatagaaggacatggtcgtgagaagatgatagaaggggaagaaaggagaaaggannngganntgaggtccgtcaggagaagntaataaaaaaaaaaaaaaaaaaaaaaaaaaaaaagtggttgtntnagaggatttaagt

SEQ ID NO: 65522 - DNA, 437 bp, Glycine max
tgcttcgaacctttgggctgatttatgtgcttgcatggtgagaagatgatagaaggggacctatataatcaatcaagaaagctccttacagtttttgaaaaaccaagagtattactcctcccgtctctccctctccccgcgttcctattattctacattcattcctagttactgtcgaccctgcgtctgacaacgaaggcaatttctccgaaaacggcggtatacaccacactccgctagatacaatagtacccggcggaacaagagtagttttaatgggaaacgaaagacgtttctctatcgcggcgtaactccctaacgagcctcatacacggaccggaataactactctgcttttacactgaacttgccccactgttgaaggttacctcccgagttccaagcctcacctacccgtaagcacaacgtcgcgcgcc

SEQ ID NO: 65523 - DNA, 445 bp, Glycine max
tggcttggaacctttgggctgattgatgtgcttgcatggtcgtgagaagatgatagaagggcatggtcgtgagaagatgatagaagggcatggtcgggagaagatgatagaagggcatggtcgtgagaagatgatagaagggcatggtcgtgagaagatgatagaagggcatggtcgtgagaagatgatagaagggcatggtcgtgagaagatgatagaagggcatggtcgtcagaagatgatagaagggcatggtctgagaagatgatagaagggcacgaaaacagacactaccattaaaaacgaaaagcgcaacaaaaaaaaaaaagtggttgtctcagaggacttaagtccatgcatgtgcgtacgtgatgctacagtctcctcacagcgctattcaaacctaacctatcggttgatgccccataaatgcacgatcgggaaa

SEQ ID NO: 65524 - DNA, 271 bp, Glycine max
tggcttggaacctttgggctgagttgagtgcttgcatggtcgtgaaagatgatagaagggcatggtcgtgagaagatgatagaagggcatggtcggcgtaagatcatagaagggcatggtcgtgagaagatgatagaagggcatggtcgtgagaagatgatagaagggcatggtcgtgagaagatgatagaagggcatggtcgtgagaagatgatagaagggcatggtcgtgagaagatgatagaaaggggcaagtacccgaaatcaatct

SEQ ID NO: 65525 - DNA, 463 bp, Glycine max
tggcttggaacctttgggctgattgatgtgcttgcatggtcgtgagaagatgatagaagggcatggtcgtgagaagatgatagaagggcatggtcgggagaagatgatagaagggcatggtcgtgagaagatgatagaaggggatctatctacataacagagattagtccccgtcctcccgcgaatacggagacgaggaaactacgcggtcctcctcctccgtcttcttcttccgctcccgtcctttaggcggcggcgtagatggagggaagagcgcgcgagctataaagttatgggccttacggcccgcgcaacagagattataatcgcgtcccggctcgtaggaatgaaggccctcttggcggtaggcgtaaaggtccttgttgctgtcgtccccgtattgggacccggcgagactctactaaatatcatctccgttacgtaaaccaacaaactacagtca

SEQ ID NO: 65526 - DNA, 268 bp, Glycine max
gcttggacctttgggctgattgagtgcttgcatggtcgtgagaagatgatagaagggggtatagaagtacgaagaataacactagaccagcggagattgccgaaatctcaatgaggctacctatgtccggtaccacagagatggaccttatcacgtttacagaatcgatacatcagaaatataactcgcacacaaagcacaccgacgtacaccatcccaactaacctcacgaactcacgtaaacgtacatctcacacgatctcctcat

SEQ ID NO: 65527 - DNA, 347 bp, Glycine max
ggcttggaacctttgggctgattgatgtgcttgtttatgtgcttgcatggtcgtgagaagatgatagaaggggatacaaagtattctacgaagcctcgtgatagttcttacggaggtccgaataagtctgtcgagccgccggaggctgagagggccgggaccagttactaggttggtcttgacagtccgtctatccttcgcatacctaggaaaccgaaggacaaccctcccagcggtcttccggagaagcacgtaagcgctccgcacgggccaggcgccgagaacggataaggcctctaccgaagaaaaaaaaaaacgacaaaattccggagaatctctcccggccg

SEQ ID NO: 65528 - DNA, 313 bp, Glycine max
tggcttggaacctttgggctgatttatgtgcttgtttatgtgcttgtttatgtgcttgcatggtcgtgagaagatgatagaaggggatatatataaaggtagataaatacaaaaaaaaaaaataatatatatatatctctacatatatgccgctgtgtatataccttcctaccttgtagtaataaataaatactccccattccaaataataacggttgacgttgaggacacctaattttctgcccgtgacaacggaattggaacggctaaggtcggccccgtcggagacgacgtattgaaggtcgcgcctttc

SEQ ID NO: 65529 - DNA, 141 bp, Glycine max
  unsure (1)..(141): unsure at all n locations
gtgcttgatggtcgtgagaagatgatagaagggnatggtcgtgagaagatgatagaaggganaaanggaggaaaaagaaanataagaggaagaaaaaaaaaaaaaaaaaaaaaaaaaagtggttgattaagaggatttaag

SEQ ID NO: 65530 - DNA, 464 bp, Glycine max
  unsure (1)..(464): unsure at all n locations
ggcttggaacctttgggctgatttatgtgcttgcatggtcgtgagaagatgatagaaggggggcgagcgcaataacgacaacaaacccgaggccgagagagcgaaagaggagacgggcgtgacaatgagtgtggcgacagtagccgcaggagcctcctcaggccggattataacagagactgtacgcaaattccgctccgaaaagggctgtgaagttactgactgaagctctgacttagaccatgactttgatgatattgttacctgtgttttatctaattttattgctgttcctgttattgctaaagttgtccgagaaaccgacgctttactcctctatgcccttgttcggcacctaacctggcgctcaaactaaaaggtcacncccccctcccccccgacgcccgcgcacccgtgtgtccccgacggtgtcaccaaacggtgaacccacgacacaaagcgcg

SEQ ID NO: 65531 - DNA, 494 bp, Glycine max
tgcttggaacctttgggctgattgagtgcttgcatggtcgtgagatgatagaagggggaagagcgaagagaacggtctttaagggcccaattcgctcggtcgcgccaacacgtgccctagtatcgctatcgagcttcctcgccgtgggggaagggtaaaacaacggttccgccacgaatcctcataaggaactacgtttctaggtcgaagatactactatagagtaagctaagtcctctcataagtgttataagaatatcgtccctcttcggtctaggaatactccttacgatcgcgtcgcctagagccgcgacgtcctatcgccgtcggatcttataagaaggagtccgctcgagaaggaaatagacagaagtcccgggccgagaaaccctaagcataccgagattactaaagaagtcccggaaagagaacgtttcggagccgccctacgcgtcgacacttccggctctcccgctagagacggtaccgccctg

SEQ ID NO: 65532 - DNA, 488 bp, Glycine max
ggctccgaacctttgggctgattgatgtgcttggtgagaagatgatagaagggtataaggacggggatataagcgctttcgccgagaaagccgaggccgccgaaatagtatacgtcgaggaaaagaaggggccttctgataagaccaaggagaagtcattagggtataagaagatagaggaggttatagtcatcatcttcttcttattattcgccgtactaccggagtacggcgaaggcgtctactacgaaggagaggttaaggagaagaaaggcacaccagaaaagacaaaagagaagtccttcggccactatcttaagatagaggaggaaaaggaaaaggaaaaggagagcggcgtctaccgacacccaagaccgagataaggtccccccgccggccggagacgtacgaccgcggcgcgtccccgccctaccctactacacgatagttccgcgggccctcccggcgccctccgacgtacatccaac

SEQ ID NO: 65533 - DNA, 311 bp, Glycine max
tggcttggaacctttgggctgattgatgtgcttgtttatgtgcttgcatggtcgtgagaagatgatagaaggggacagacagtcttcctaaccagggcgcgggcgactcgtaagtcatgacgggcaagggaatggggagccctggcaagagaaggaataagatttatatttctcgcgcgaggcgcggttgttgtagcccttattcctagaagagctgccgtgttgtgcgtgtcccttttgtcgcgtgtattaggaaacacaatcggagtgcgaaggttaccaggagaaagattattggaatcggaaagacg

SEQ ID NO: 65534 - DNA, 394 bp, Glycine max
aacctttgggctgagttatgtgcttgtttatgtgcttgcatggtcgtgagaagatgatagaagggcatggtcgtgagaagatgatagaggggcatggtcgtgagaagatgatagaagggcatggtcgtgagaagatgatagaagggcatggtcgtcagaagatgatagaagggcatggtcgtgagaagatgatagaagggggcaaataaaaattactattaaaaaaaaaaccgagacaaaaaacaaaagtggttgcctcagaggacttaagtccatgcgtgtgcgtacgtgatgctacagtctccccacaggagcattcacccccaacctatcggttgctgccccataatgctgcgatcgggaaaatttcggtgccatttaaaccaaatgttcc

SEQ ID NO: 65535 - DNA, 457 bp, Glycine max
tggcttggaacctttgggctgattgatgtgcttgcatggcgtgagaagatgatagaaggggctctcgaaaagtaatatcacaggtgaaggatcccgggccgggacccgggaaccagggccacctgtgcggtgaagacgaccgaggcggccccgaatgactgaccggggaagaaggcgtgtgcgaagcgtaatgatgacgacattactggtgattcgaagaagtccgcggtggtctagatcggtataagagttgataagacttgtacttagaagcggcatattactcataaggactatactatctctaaggaccatgagacttacgatggtacgggctctgaatctcatcataatcaaatataataaggctcacctttactctaacctcctccccaaccgacatcagggccccgccccccagggcctttgaaccccgacccgccccctcgtcacaact

SEQ ID NO: 65536 - DNA, 282 bp, Glycine max
tggcttggaacctttgggctgatttatgtgcttgcatatgtgcgtgaataggtgtaagaagatgatagacgggactggacgtgagaagatgatagagggggatagtcgtgagatgatgataaatgggattcgtcgcgagaatatgatagacgggcatcgtcgtaataagatgatagatggtcatggtcgtgagaagattatagaaaggcatggtcgcgagaagatgattgacggtaatcgtcgtgataagatgattgatgggtatggtcgttagaagatcat

SEQ ID NO: 65537 - DNA, 394 bp, Glycine max
tggcttggaacctttgggctgatttatgtgcttgcatggtcgtgagaagatgatagaagggtccgataaaaattcagtaataagctcgcctaagggggcctcgaagcataggtttgaggataaagtcgaaaagaaggagaggtctccgaaaagggtctaggtagaggtcgaaggtaaaatcgccgaagtcaagaagttcaccgccgcgaagcacggctctaattacgccattcattctactgagtagaataaagtatagtctgccgcgaccgtctatgacgcggattttaccgaaccggccgctcggtccttcgtcccgcgtaggaagaacggaaccttgcatcgcaccgcgaaaggaaaggtttgtccgggaatggcccgttataagaaaatc

SEQ ID NO: 65538 - DNA, 140 bp, Glycine max
  unsure (1)..(140): unsure at all n locations
ggttcgaactttgggctgattttgtgcttgtttatgtgcttgnatggntgagaagatgatagaagggggttaaatnngnnnngnnnnntnggggttttnngtnnnttttngtaagagtaanggttatngtaatagaagtt

SEQ ID NO: 65539 - DNA, 296 bp, Glycine max
  unsure (1)..(296): unsure at all n locations
ttgggctgagttgagtgcttgnatggtcgtgagaagatgatagaagggggagccgagaggactgcgagaggggtagcagttgaggccttgcgagccgtaaaaacgaagatgacctcccttattgagattacgaatactttggatggtgcgagtactaaagcctacgttaaggctactgaagccgagggtttttgtggaaaaccggcgtgagatcctaagtacccgaactctgacccctagtctaccatcgatgaaaatggcaaaagaaagtccaaaaccgatgtgcggcccgggct

SEQ ID NO: 65540 - DNA, 395 bp, Glycine max
ggcttggaacctttgggctgattgatgtgcttgcagtgagaagatgatagaaggggatgtatatataatatataataatataaaaacctctaaaggtctaaatctaaatggcatccataaaaaaaaaaaaaaaaaaaaaaaaaaaaaagtggttgtctcagaggacttaagtccatgcatgtgcgtacgtgatgctacagtctcctcacagcgctattcaaacctaacctatcggttgctgccccataatgctgcgatcgggaaaatttcggtgccatttaatccaactgttccgtagtatactttttccctgttagtcggtgcaacagtgaagaggtttgtattgactgtttcctttaatagccgtgtagttcgaacggtgaacgggatgtgtt

SEQ ID NO: 65541 - DNA, 456 bp, Glycine max
ttggcttggaacctttgggctgattgatgtgcttgcatggtcgtgagaagatgatagaagggcatggtcgtgagaagatgatagaagggggagagggagagagaggagaaaggaggaaagacgagcagcctactaaggttggcgttgaggagagagagcttacggggagctattggagagaactacttcgaatttaaagtctattgtcgtaacgattgcgctgaggatgccacctaggtccgtcccgagggaaatttacctaagatcgccttgggattccctaagtctcctcggtagcgtacgtgccttaaatttggcgaggaattaatagttttacccatccactcggacccggagttctcaaagagagaaatggaattcgcgaaattcgagcagcgctatccccatccataaacgtttcactagtcccggtatcgtacggcttcccaacggccc

SEQ ID NO: 65542 - DNA, 397 bp, Glycine max
  unsure (1)..(397): unsure at all n locations
gcttgaatttggctgatttatgtgctgcatgtcgtgagagtgatagaggggacctatatatcaatcaaaaagctccttacagtgttttaaacgaagagtttactcctcccgtctccctcccctggttccattattctacattcattcctattactgtcgaccctggtctgacaacgaagcatttctccgaaaaggggctacaccacactccgtagatacatataccgcggaacaaaagtattttatgggaaagaaagactttctctatcggggtaatctgtaacgacctgataaaggaccggaatactactctgctttacactgacttgcccactgttgaggttacttcccgagttccagcctgacctacnccgtagcacaacgtcgngcgccggaa

SEQ ID NO: 65543 - DNA, 478 bp, Glycine max
  unsure (1)..(478): unsure at all n locations
gttggaacctttgggctgattgatgtgcttgtttatgtgcttggtgagaagatgatagaaggggacgtaatcgaacaaccaagaaaagttacgcttacagtagttcaagaaaacgaagagtatcagtccgcctgtcactccctcatcccgtgttcctattctacattcattccttgttattgtttaggatgcgtctgatgcggacggtgacttgacctggaatggccctacacatcatgccccgttggtaacaagaggaaatggcggtggaacagaatgagttgtatctgggaaagatatccgtttcactatcgcagcgtaactctttaacttaaatctcaaggggccagaaaccaagcccgaactcgtacattttgttcaccatacaaatgaaatttcaaccncgtaaacaaagcctagccatttatagtagcgcgaaagaaagaacttcccgcgggttaccctcaaagacacactc

SEQ ID NO: 65544 - DNA, 278 bp, Glycine max
ggcttggaacctttgggctgattggagtgcttgcatggtcgtgagaagatgatagaagggcatggtcgtgagaagatgatagaagggcatggtcgggagaagatgatagaagggcatggtcgtgagaagatgatagaagggcatggtcgtgagaagatgatagaagggcatggtcgtgagaagatgatagaagggcatggtcgtgagaagatgatagaagggcatggtcgtgagaagatgatagacgggcatgggcgtgagaagatgatagaaaggca

SEQ ID NO: 65545 - DNA, 380 bp, Glycine max
cttggaacctttgggctgatttatgtgcttgtttatgtgcttgcatggtcgtgagaagatgatagaaggggacatatggaaaacaaacaagaacgcagaaattccagtcaagctattacgctcttaaaactaaaggtcaaagtaacgcctcctactccgaaaacaacaacgccaaactccccgttattaacacacgtacgcgggttacgtatcttgttatgctattataaatatttgttgtactatggtggaagttggttgaaagcgcttttcttgtcgttgttgactacaactaatttcttggcggcattgctcgctgcggcgacacatttattattaactctattattgcatttggtggtgtatggcggtagcttccc

SEQ ID NO: 65546 - DNA, 382 bp, Glycine max
gcttggaacctttgggctgattgatgtgcttgcatggtcgtgagaagatgatagaagggccatggtcgtgagaagatgatagaagggcatggtcgtgagaagatgatagaagggcatggtcgtgagaagatgatagaagggcatggtcgtgagaagatgatagaagggcatggtcgtgagaagatgatagaagggcatggtcgtgagaagatgatagaagggcatggtcgtgagaagatgatagaagggcatcgtcgtgagaagatgatagaagggcatggtcgtgagaagatgatagaaaggcatggtcgtgagaagatgatacaaggggtagtaaaaataaccaacaaagacgaagccgaagaataatacggcggcgtca

SEQ ID NO: 65547 - DNA, 357 bp, Glycine max
tggcttggaacctttgggctgatttatgtgcttgcatgggtgagaagatgatagaagggggacctctctcgaagatctcccgccccccaccccaggcgcagatccgcgggcaaccaacaacccagccacaaccaggaccgtctccgcggtcgtcgtaaccgagcccccgaagaccgtagcgtcatccgcaggacccggaccacgccagctcccccctccccctcccccccccccaaacccgtccaccggtcacctgacggctaacacgacgcaaactctctcattccggctagtcggcccccccccctccgtacggttacggcaaacgaccttgggccaagctcccggtcacggccc

SEQ ID NO: 65548 - DNA, 292 bp, Glycine max
tttgggctgattgatgtgcttgctggtcgtgagaagatgatagaacggggggtaactgcgcaatgtagctgcaccggatcgcaacgggtatacacagaagacttagccttaactttaattgaataaatcacaaaccaaggcctacactttacccttctagaccctactctagaccctgtaccgacccgtgccgtgcggccggccccgtggcactgaaaaacaagacggcgaactaagcccccttcgcgaaactagcgactcatgtcgtccccttcccctagtaaaagaccac

SEQ ID NO: 65549 - DNA, 341 bp, Glycine max
tgcttcgaacctttgggctgattgatgtgcttgcatggtcgtggatgaatgatcgacatggtcgccagaagatgatcgatagacgtggacgtaagaggataatagaagggcatggtcgtgagaagatgatagatgggcatggtcgtgagaagatgatacgagggcatggtcgtgagaagatgatagaagggcatcgtcgtgacaagatgatagacgggcataaactaagaacaacgccacgacgacgacgcacacaccagtggttcgcccagacgacctaacgccatgcatgtccgtacgtcatgctacattctcctcacaacgctatttaaacctaacct

SEQ ID NO: 65550 - DNA, 372 bp, Glycine max
tggcttggaacctttgggctgattgatgtgcttgcatggtcgtgagaagatgatagaaggggggtagaagattaaggaggccgggtaggacacctagagtagggtataggacataagggaggtagtcgtaagggacgtaagggaggtagtcgtaagggacgtaagggaagtcgtcgtaagggacgtaaaggcggaagtaagggacgcaaagagaataatagcgatagtaataattgtaattgtacgacgagcaacctcgacaccagagggagtaccaacggcgccgcgcgacgcggcccacacggggaaaccaaaccaacgacagacgcattccccgtgtcacgcaggcccgcgcgccccggcccggcgctc

SEQ ID NO: 65551 - DNA, 320 bp, Glycine max
gcttggaacctttgggctgattgaagtgcttgcatggtcgtgagaagatgatagaagggcatttaccaaccgcgataaaatttacaaactcctcgatggaacaaattctaacccaccgtaccgtacaacattacgctaacgaagccgcacgtcctttctatttccatggcgcggtcccctacggttatacccctgtgagtttaacatgccaccgatataaacggtgaatttgccgataacgacgacgagcaccatactaggttagttacaattgataatggacggtgccctattccgactaattgaaatgggctgcgttt

SEQ ID NO: 65552 - DNA, 397 bp, Glycine max
tggttggaaccttgggctgattagtgcttgctggtcgtgagaagagatagagggcatggtcgtgagaagatgatagaagggcatggtcgggagaagatgatagaagggcatggtcgtgaaagatgatagaaggggggatccgaggaggaacccggcaccattgcggaagaagaaagcgtttagagcactattattgcctaagatgtcgtcgacacgactgacaagtcctccgaaattaaggtccaaatcagcaaaaaggataagtacgcttaccccagagccccccgtcacgctgatggaaggggcccccaaactccaactccggcaccataatccgaccggtcaagcaatcggcagcctcccctcggaacggaccggtgacatcaccacaacaggc

SEQ ID NO: 65553 - DNA, 372 bp, Glycine max
ggctcggaacctttgggctgatttatgtgcctgcttatgtgcttgcatggccgtgagaagatcatagaagggcatggtcgtgagaagatgctggaaggggcctatataatagtaggaaaagtagtaataatacgtaaccttaagaggaaccatccgcggcccttaaggactatatttaaacgacgacgaccaagggtaaaagaattaagtgctaaagaccgttacttctctccaggtcagttacgttccacaacctaattctaagcaacagcagtcttaataaccttacccacatcgttataattcatccatttctctatctccctattaataatataaccgaaccctgagaagattaacatacggcgaacc

SEQ ID NO: 65554 - DNA, 359 bp, Glycine max
aacctcttgggctgatttatgtgcttgcatggtcgtgagaagatgatagaagggggcaaagttaagaaaatggatagacccaaccacggaagagtgactcgaaaacacgacgtacgacactgcatggtcgaacgtcctcactaaatggccttacgattccgagaagcctcatctcacagagtatgaaaccaaaatgatcggatcgggaaaaataagtggctgtctcatacaacttaagtcgcatgcatactgcgtacgcttatgttacagtacaccccacagcgatattcaaacctaccctatcgcttaatgccccataaggttgcgatcggaaaaatatcggtcccactgaatccaac

SEQ ID NO: 65555 - DNA, 372 bp, Glycine max
aacctttgggctgatttatgtgcttggtgagaagatgatagaagggcatgatcgtcagaagatgatagaagggacatagcaacatagacctagccgcgcgtccacgtacattcgagcctcccgtctactccgagcaatttcgcgcggattcctatgaatagtcactgaataaaaaaaaaaaaaaaaaaaaaaaaaaaaaagtggttgtctcagaggacttaagtccatgcatgtgcgtacgtgatgctacagtctcctcacagcgctattcaaacctaacctatcggttgctgccccataatgctgcgatcgggaaaatttcggtgccatttaatccaactgttccgtagtatactttttccctgttagtcg

SEQ ID NO: 65556 - DNA, 429 bp, Glycine max
  unsure (1)..(429): unsure at all n locations
tggcctggaacctttgggctgatttatgtgcttgcatggtcgtgtgaagatgatagacggggagggccagacctgccgccgccgccggaaaatgcgtatatacctcttgctgttataataataacggtcttgaagaaaggcgcgaaaggccttgccgcagtagtgaagaagaaggcctaggagaaggcgatgaacttcccgcctgagaagtgcttgaagtagcctgggactggaggtgtgtcgttgttgaagtgggattcgatgtggcctgcgaagcggttgaagaatgcttaaacttaatgtaagaagtgtacttctaagtagaggtctaaggctttcttcgtatctaattagcctattaaaatttcagataagaactctgttatgaactcacncaagacgtcgtctaagcataggttggaagataag

SEQ ID NO: 65557 - DNA, 398 bp, Glycine max
gaacctttgggctgatttatgtgcttgtttatgtgcttgcatggtcgtgacaagatgatagaagggcatggtcgtgagaagatgatggaagggcatggtcgtgagaagatgatagaagggcatggtcgtgagaagatgatagaagggcatggtcgtgagaagatgatagaagggcatggtcgtgagaagatgatagaagggcatggtcgtgagaagatgatagaagggcattgtcgtgagaagatgatagaacggcatggtcgtgagaagatgatagaagggcatggtcgtgagaagatgatagaagggcatggtcgtgagaagatgatagaagggcatggtcgtgagaagatgatagaagggcatggtcgtcagaagatgatcgcagggcatagtcg

SEQ ID NO: 65558 - DNA, 268 bp, Glycine max
ctttgggctgatgtatgtgcttgcatggtcgtgagaagatcatagaagggcatcgtcgtgagaagatgatagaagggcgtcggggtcagaagatgatagaggggcgtggtcgtgagaagatgatagacgggcatggtcgtgagaagatgatagaagggcatggtcgtgagaagatgatacgagggcatggtcgtgagaagatgatagaagggcatggtcgtgagaagatgatagaagggcatggtcgtgagaagatgatagaagggca

SEQ ID NO: 65559 - DNA, 480 bp, Glycine max
  unsure (1)..(480): unsure at all n locations
ctttgggctgatttatgtgcttgcatggtcgtgagaagatcatagaaggggatctaagtataatactctcactgaggggaccgatcacgaagttcattgcatcacgcactttcccttccttcgttctcccccgtcccttcggtctccctagaagacgccgaataagccgcggatacaagccgctaattttacccctttaggcggtatacaccataccacgttactaatccggggtgtcgttggcggcggaccgaagtcaggttggataggaaatctaaatcgtttagccatcgccccgtaagaccatctagaaactccttgcggtatattagctcaacctagtacattcgggacaagtttcggaactactcncataggcatctcatccgaaactgagccctgagagaaattccaccgcgtcgaacttcctaaacgggcggtgcccgcggataacgacacctaaaagtacgcgcgggcacc

SEQ ID NO: 65560 - DNA, 259 bp, Glycine max
acctttggtctgatttatgtgcttgcatcgtcgtgagaagatgatagaacgggatcccggcctgatcaaatacctaggtaagctcttctgactacggggaggggaatacccgcgcccccgcctccgtcttcttccgctccactcctcgacgcgatcgccaacagagtacacgtcacacaccgtccgataaggacgtatggcccttacggcagacgtccacctcataggtaacgcgtatacgcgcctccgactcaccgcc

SEQ ID NO: 65561 - DNA, 347 bp, Glycine max
tggcttggaacctttgggctgatttatgtgcttgcatggtcgtgagaagatgatagaagggggagagagcgagcgagacagagagagatgtccggtaaactctaactgaactctagaaaaacgagagaaactactagtacctatacaggctaggttgggacttaggctggaaatcttcgtcgggaatctcatcgttctgaatacggtacttagtttgatggtacaacgttcctcgatcttattcctggcgcagtttatgatgttcctaatattcctcctagtgaaattggactcggtaagtatgctttttgcgtcgctcctgctgattctgaatttattgctactga

SEQ ID NO: 65562 - DNA, 301 bp, Glycine max
tggaacctttgggctgatttatgtgcttgcatatgtgcttgcatagtcgtgagaagatcataggagggggagtcgctccccgcgtttcggcacgctaacaacacggtcgaggaatatctaagtccatataacgacgccagctaacacgtcgcgtcacgacccgcaagtcccttaacgagatcggcccactcggaaacgaatcccaccagccggaactaaccaaccaacgaccaaatacaagccgcaattaaagaagtaaaaagtggttgccccaaaggacttaggcccaggcatttccgtc

SEQ ID NO: 65563 - DNA, 361 bp, Glycine max
tggaacctttgggctgatttatgtgcttgtttatgtgcttgcatggtcgtgagaagatcatagaaggggaattcccgtacctcacctacgtaagagctagtaagcgtgccccggaagtagagattgaaacatcctgagacggtttgcataaagtaaatcgtctgcaagctaatcggaggaaaagtctttaggaagtagtccgtaattaaggtcgtatgcaagctcgtattaataatcggcggcgtgaagaagttctactgccactgtttcggaatcgccgtctcctgcgagaccaggaaacattagaagagtatcgagtcttcaactaggaagtccttcccttagaggccgccctgcgaaa

SEQ ID NO: 65564 - DNA, 303 bp, Glycine max
  unsure (1)..(303): unsure at all n locations
ggctctggaacctttgggctcgatttatgtgccttgtttcatgtgcttgcttatgtgctctgcttatcgtgcttgcatgcgtcgtcgagaagatcgatagaggcggggtataagtcgagcccgcacgactgagacaatcagtaaatagcgacgacgaaaacgaaggcttcacgcccctccntgccgtcataaccccaggcaggtacggtaacgtatacgctgcatgaaacactgcctttctccttgaacgtaataatcgagtccacggcgttatgcatccttggaaggcgaaacgttgtaagc

SEQ ID NO: 65565 - DNA, 430 bp, Glycine max
tggcctggaacctttgggctgatttatgtgcttgcatggtcgtgagaagatgatagacgggggagagggaccggagccgggaagaacgagaacgtgttctggactccacctagtctaatctaggcacacacggccactttatttttcgcaaggttctttaggaccatataaccctctaaattccacgcctcgaagacgaaccccattaacaagcacgcgagcgtttaggcgacctatagtttaatcgtcatcgcagttctcctcgtaagtctgtaggagaaagtgccgagactaagtccggaaatcagctgtgacgcggtcgtagtcgtaaagaccgggaagacatcagtagaatgttgcccgtccaagaatacactcgtcgccctcgcctatccgtagagagagtataagcactacggacaggccaaag

SEQ ID NO: 65566 - DNA, 305 bp, Glycine max
accttggggttgatttatgtgcttgtttagtgcctgctggtcggagacgtcctagacgggaggttggtataaaccggttatgcgccaaccctccgacggtcggcgatctagacccccatgccggtgtaccgggcctccttcggcttccctccacagacggaacgagaaacatcggctgacaggcaacggtcgggcccccgagcgccgaccaagctcgaccccggcacagagccatatgcccgcaaaccacactactagcgctcaggtcgctacagtcacacgacctctcgtgcgcacaaccaccg

SEQ ID NO: 65567 - DNA, 439 bp, Glycine max
  unsure (1)..(439): unsure at all n locations
cttggaacctttgggctgatttatgtgcttgcatggtcgtgagaagatgatagaagggagaccataggagtatttcatagggtatgtcgcgacggcccgattgctatagacgcgcttcggccgctgcatatggagtactggggggccagggtaccctaggagaccctactcccttaaggctaatcgagacggggcttcacggctactatagtctgattggagagggcggcatgttaacccggccatacttagagtacttacttgttgttcgccagcgtatgaccgctatatgaccagacatacgataggcggacgtagcccgtggactatccatcattcgtgggctagtcccgctcagcgtccgggcaggcactcgtggaccatacggagcggccnccttgtacactctatttacctacgacattgattcaggtaggcg

SEQ ID NO: 65568 - DNA, 442 bp, Glycine max
tggctctggaacctttgggctgatttatgtgcttgcatggtcgtgagaagatcatagacggggctcttcccctaccccacaccctctcggcctttgattcttcctctcccaactctccggctaagcctacctgcctggtctagctaatacactcacaacaaccacaatcttctctccctccctctaatctctataatataagaagacggtcctcactctatagggttcctcctctattatcgttacgtcctctcttattatttcgtcccacgccgtccctcttaggttcctaccctaaacctattatctcaataaatttatcccgtgtctccgtccgcacctagaggaaaagaaaaaggagggaaagaagaagaaaaagaagaaagcgaaacccgtagacagcgcgaaggacggaagagaaaggaacgaataaagaagtaat

SEQ ID NO: 65569 - DNA, 389 bp, Glycine max
aacctttgggctgatttatgtgcttgtttatgtgcttgcatggtcgtgacaagatcatagaaggggaagtataaattcgagctagtgtctacacttccacgtcgcccgccctaacggaagctaccctcgtcctcagtccgaactttaatgtcttgacgcctgcgttatctgttcactggatggcggaggaccctcttgattagcggcgggattctgcctatcttctttttcggccttgtgatcatcggtcttgtgagcgtccttaagacttttagccttaaaatgatgatctccctgatcctgatcccgattcagactcttaagacgaatacgaacgggaatgaaaggaagggaaagaggctgcgcttccggggtcgtcgaaacggtta

SEQ ID NO: 65570 - DNA, 308 bp, Glycine max
gtcgttataagatcatagcacgggacaattacgttgctcaatctcgtccgggtctggcatcaatctcaacgatcactgcttactatcaataccgcatccgttcaaaaggtctacatctaagtctacgtcatagtctttatccttaagcatcgagaaaagaacgtacatcacgtcaagaaagtgagacaatcttcaacaccgatcaactttacgaatataccaatgttaccaacaacgtagacatggatcaatatcttaacattaccatgaaaataggatacaacacacctaaaacgccaaatgtcaac

SEQ ID NO: 65571 - DNA, 346 bp, Glycine max
ctttgggctgatttatgtgcttgcatggtcgtgagaagatcatagaaggggcagtacattgcgattaaatcaaacggagaagaacgctaacaccgaatatagtaggcctacataagcccagtagcgattgtatgacctacgaacacgtttgagagacacggaataccgaattagcttaaccgttacagaggagcacagagaactggcgttacgcggccgcgacgactatcgtacagtccaaccttctgcagtagagaacaaaacacaatcctgtgcagacatgtctcccaagggcgtgtctacagctaaaacaagtccgtagcctcgcaacacacacgccccacgg

SEQ ID NO: 65572 - DNA, 333 bp, Glycine max
taaacaaactaactctaagagggagacgacacaaccccccccagtaagggttacggtacactcctacgaaacgtcggacgtctcgaagggctccgccggcgcgtcaaacaatacggacgagggcgaaatctatactaataacgtaattcctccctttaacaacctttacagcttcgtcctcacgttcgcaaggaactgtctcgccggaaaacacactagtagccgtatctacaagaccaaaggctcgagccattaaatcggtcccactgacagtaatccgcatccgattaccaatcccggtaaaccatacgttcaaacaaaccaacccattaa

SEQ ID NO: 65573 - DNA, 290 bp, Glycine max
ctttggtctgatgtatgtgcttgcatggtcgtgagaagatcatagacggggcgcctgagaataccctcggcacctttggtgcggcggggcttacgcctgtcctgtgcgcctttactacagtcttcaacacgagcgccctcgtccatcctaataagaaatatatcgacaggaattataagctcctgcacctggccatcgcctaaggcgccgccgatcacacaggggcccctatccgcgcgcgtaccgggcggtttcggctaaccggcgacgactacgccccggcaaaacta

SEQ ID NO: 65574 - DNA, 450 bp, Glycine max
  unsure (1)..(450): unsure at all n locations
ggaacctttgggctgatttatgtgcttgtttatgtgcttgtttatgtgcttgcatggtcgtgagaagatgatagaaggggaacttctctcttgatctaagaggtgatttatcctgtcgtatgttaaataccgtatcgtgtgaaaagctctagagcacggatatctagaaagggttgctcctactggtcgtagtcgccatcctacgctgaaagaagaagaatgaagaagttatccccccggaggatccgaaggactataccgatgagcccaccaacgtcctcacggacgaatacaagatccgtcctaagaaaatagcctagaagacgcctggaacgcttaaggtcgccgtagagagggatattaacgtcgttaaagaagccgagagcctctcgttctcctagataatcccgtaagatcagcactacgtcngtctctaggaaaaacaacggc

SEQ ID NO: 65575 - DNA, 378 bp, Glycine max
aacctcttgggctgatttatgtgcttgcttatgtgcttgattatgtgcgtgcatggccaagatcatagacgggcatggtcgttagagggttatggaatgacatggtcgagagaagatgatagaatgtcctggacgtaagaagatgatcgacagtgatcccgagcctgaatcaaataacctaccctaactcgttctcactacggacagaaaaatacccgggcccccgcctccgtcttcgtccgctccaatcgtcgacgcgatggcgaagagagtagacgtcaaagaccgtccgataaggaagtatggtccatacggcagacgtccacctgataggtaacgcgtatacgcgcgtaggagtgacggctcgactggcggcta

SEQ ID NO: 65576 - DNA, 472 bp, Glycine max
  unsure (1)..(472): unsure at all n locations
tggctctggaacctttgggctgatttatgtgcttgcatggtcgtgaaaagatgatagaagggcatggtcgtgagaagatgatagaagggcatggtcgtgagaagatgatagaagggcatggtcgtgagaagatgatagaagggcatggtcgtgagaagatgatagaagggcatggtcgtgagaagatgatagaaggggatagtaaaaataaccaacaaagacgagcccgaagaataatacggcggcgtcaaaggcgcgcccgccgtcctccccttccgcgggggccatagtcgtatgtacggaatcgagtcctcctaaaagcgactagctactaagccacgacgacgacgagcacctaaaattacgtcgcgactctcgtacgcgtatatgtctaacgttcntctaacgtagtcgcgaagacaccacgtcgaacctacgttatctagaccgcaaagatcgcacgcgtatatgt

SEQ ID NO: 65577 - DNA, 385 bp, Glycine max
aatttctcaaggcaaagtgaaaaccttcctctataatatacctacaactaccaacacacccctcatacaacaccacttcacaatacgtctcactctttcatccgcacttataccgacgattcataatattactacgcataatctacaactctctctatcactgctctattaagtccctacctccacgcgtccgtcccattctcccctcgcccacttaaccaaccatcgccccacccctccgagttaaaactaacctccccgacactccaacaccccccaccccaccctaaaatcacaccgtgcaacgcaatccaccgcaccctacatcaaccccaccccccccattccccccccaaaaacccccccaaactcccctccccccccc

SEQ ID NO: 65578 - DNA, 473 bp, Glycine max
  unsure (1)..(473): unsure at all n locations
tggaacctttgggctgatttatgtgcttgcatggtcgtgagaagatgatagaaggggataaaaacttacctctaaccgagaaagtgaagtgtacagaactgaaagaggggaaaagaaaaagaaaagccagggccagggaccccgagagacggtactgatcaagaagactatttcgaagagcctggatggcgaggttcctgaggcggaggaggtggcggtgtcggagctgtagatgactaagtatacgactgaggatgatcgtgttgatagcggaactttctcttttaacgctattagtaagacctcggtgaaggccactgagcatcgtaagaagtatgccgaggtgaatagcgtcgacgagaagtttagcgaggacgcgtctaaggtccgggatgcggaccctgctaatgtcgactaggttatctctcctgactctacctcggtcgtanatcatccgaatactaagagttccc

SEQ ID NO: 65579 - DNA, 382 bp, Glycine max
gaacctttgggctgatgtatgtgcttgtttatgtgcttgcttatctgcttgcttacctgcttgcttatgtgcttgcatggtcgtgaggggatcatagaaggggagcgtgtggatgtagcgatcaaattaaatcctctatctgttgctgcagggccctcttccctgcccagtactaataataaccgccgtagttaagaaaattaagaagatttacgagagtactaataataggtctgtctccgctacgaacagcggaaaacctacttctgcccataagatcgactcgaaaccaccctcgaccttaaagggaaaccgaccactaccgtcaatactcgttccttcccgacgaaactccacaccgaacatcacgtcacgcccgtta

SEQ ID NO: 65580 - DNA, 473 bp, Glycine max
ctttgggctgatttatgtgcttgcatggtcgtgagaagatgatagaaggggagggcccggccaccagggcccctgtctattggggcgtagctgagtttttgaagaaaaagtgaaaacgttgctgtataagatacctagaactaagaagaagccggtgaagaagacgaggtagaataggttcacttttcatcggacttgtacgaggattgataatattactaggcataatgtgaagtgttgctatcggtgctgtattaagtccggacctcgaggcgtccgtcccgttctggcctcgcccacttaaccaaccagcgccccacccctccgagttaaaaataacgtcccggagaccccaacaccccgtaccccgccttaagatcacaccgcgcaaggaatccaccgcagcctagatcaacggcggcgccggctattcccccccaaaagcaccccggaaccttccgtgcccgggccaa

SEQ ID NO: 65581 - DNA, 464 bp, Glycine max
  unsure (1)..(464): unsure at all n locations
tggaacctttgggctgatttatgtgcttgcatggtcgtgagaagatgatagaagggcaacccgggaaccaccgtctttactgttaccggccctaccgctggtgtcaataccccgccgggcggggttgctctcggagtggttacgaattttgtcgcgatacccgggttcgtcgctgcgagtcggattcggattaattatcggactcatcgggttgggttctctactggcggcggaactgtcggttccgcccatgaggccgctcccactagttatatttatgagtagtcctttattatcgatcatcagagggggggaaacgaaaacaaaaaaaaaaaaaaccgcgcaccaccgaaccctctcggaactcctcctcgcgcacggccccttccttccgggcccctccttcaacctatccctgagggccgcatcngccttccctgctccaaacttccggacgaccgacg

SEQ ID NO: 65582 - DNA, 421 bp, Glycine max
cttggaacctttgggctgatttatgtgcttgatggtcgtgagaagattatagaaggggaagaaacgtaactataacggcccgcaacccggggacgaccgaacggagcgagaaaaagagaccagagagagagagagaggagatgaacgatatacgacagtcgaatacaaaggcgaggccatgcgcactctccgaagcagcgttacgttattttactaacaacaagactatctaactattaacgtactactgccgccggaaccctagtgtcgcgcccggaaaccggaatcggaggggtcctatgcgctacaactctaattccagacaatagaccaccgtatagtaaaaattccgcaaaaggagaaccagaactattctctccatgaacgcggaaagaaaagtcacggcgaaagaaatagatac

SEQ ID NO: 65583 - DNA, 385 bp, Glycine max
tggctctggaacctttgggctgatttatgtgcttgcatggtcgttagaagatgatagaccgggaccaaccccaatgccaagtccaggaggaaaatgcgctgcgaggataaaagaagaagcactatctacacaacatctcgcactaccctaccctgacaactacttacagtcatcgaagaaaacggtaattactctcgtcgtcactataattttactgactctttgtgtaatctccgcgtaaaagtgggctctactctttgcctccggcccgttagtaacgggcaaggcgcgaagagcgagccgtcttacggaggaaaaattccacctcgcgaaagaaagtagtctcagtacgccggggacggaggtactctcgacggtagccgtt

SEQ ID NO: 65584 - DNA, 315 bp, Glycine max
acctgtggtatgttttatgtgcgtgcttatatgcttgtttatgtgcatcctgagaatatgatagaaaggagaagcgaggcatatggtaccgcggctcagtgagtcgggcctatctattacgtaggtcagcgacacgatcaatacttatacctaatctaagtactcttaagttaaatacgcacgaatccgctacgtcgaccagaatagacccttacgtctagactatacctcatgtatctgtcacgtactacacacaggttatcattaccaatcgagatctcacgtcactgtcctaaacgaactcactcgaacaca

SEQ ID NO: 65585 - DNA, 402 bp, Glycine max
gaacctttgggctgatttatgtgcttgtttatgtgcttgccgtgagaagatgatagacgggggaaataaagttacgcgtacggagatgatcaaaaacgctttttataacctttaccgcgctcccaaaccaccaccacacggcgagtacagcctgtcatgcatatacgaccgactaagtgatactagtaaccggactggagtcttccaccaccaccactcccggtcgaacttctccgctagtacgctcttaataacgcatctcctcacggaacctccccgccccacgcgccgaccctccccatacccctcgaaaccaacaaacctgaccagccctcggatcagcccacccggcgctctacaactctcgaccttgaaccgatcctgtattcgtatcccgtaacc

SEQ ID NO: 65586 - DNA, 305 bp, Glycine max
taaattacgcgtacttacatgatcaagcacgctttttataaggtttacggcgctcccaaaccaccaccacacggcgagtacagcctgtcatacatatacgaccgactaagtgatactattaaccgaactggagtcttccaccaccaccactcccaatcgaacttctccgctagtacgctcataataacgcatctcctcacagaacctcccagccacacgcgccgaccctccccatacacctcgaaaccaacaaaccttaccagccctcggaatcacccacccggacactctacaactctccacct

SEQ ID NO: 65587 - DNA, 380 bp, Glycine max
tttatctgcttgtttatgtgcttggataagatgatcccagtccatagtagagatagccaacataggcgatcgggaataatactacggatacttggaaggcgtgcacgccgacctccccttccacttacttccatagatcgcattctactgaatctgactcctcctaatcgtcactacctacactaccacctcgaccacgaccacctaaaattacgtcgagactctcgtacgcgtatatctcttacgttcctctaatgtatccactattacaccaattacaaccatcctaatctacatcgtaaaaatcgcacgagtatacctctataatctcgatagatcgcatgaccctatcttactcatcctcatcataatttccctca

SEQ ID NO: 65588 - DNA, 296 bp, Glycine max
tcccaccttctaaattaaatacgctgaatatacgtcgtatcgcgatcgtctcctaagatcaatcgtattaagggaaatagtcacggagccacagcagacatcgagaagagtcatactcagatcgaccatacggacgccttactaatcgagtacgacgggaagcgtaagcgagctgatcaatcgtatccgtatggatcgtatccgcggtaaccaaggaatacgcacgtaaacgcgaccgtttcgcgtccggtaacataaactcttaaacaacgcaactcccgcacgaacaaatgcct

SEQ ID NO: 65589 - DNA, 451 bp, Glycine max
ggctccgaacctttgggctgatttatgtgcttgcatggtcgtgagaagatgatagaagggggtagtgtccgacccgaggttaggtaagtgcgagctaattattatattctgttcggcctatgtcattttccctcgtctcctcctcattccctaagccccaaaagcacaaagacggtagagataccttcacccattctagagctggcgaatgagggatatttcgataagtctcgtgattaaactcctgacgtcgcttctgatgtccgttctgagtaggatttagatagtaaagccgttcgtgaaatacgtattaaaattaatccggctacggctcctggagaaaccatgattaacgttaatgccgatcatcagaagacagcgtgcgatattcctaggaatactggtcccgctctaaacgacgcgggatcggacgttgataatcgtaaggctt

SEQ ID NO: 65590 - DNA, 401 bp, Glycine max
tggaacctttgggctgatttatgtgcttgcatggtcgtgagaagatgatagaagaggtcgtagtagtaatcccaaatgttgaagaaagcttacttaactcttgaagtttcctattgtaccgtaattacgctgagaagaaaggccagagagttaaaggaagaaaatgcgatctcgggtttagtcgccagggacggtgaatacgctcccggtgctgtctgtactcccgttcttcctaacgacattcctacctacgctatcgactcgcttgggagggaaatatccgcttgtactataggcggaacgaaggccaaggtcgatagagacgaactgctctttcacgtcgtcacgtccgtcgtataggatgccgtcgttagacgtaaggaatcgggtacaatcgtctc

SEQ ID NO: 65591 - DNA, 211 bp, Glycine max
ccaacaaagacgaggccggggaataatacggccgcgtcaaaggcgcgcccgccgtcctcccctcccgcgggggccatagtcgtacctacggaatcgagtcctactaaaagcgactacctactaagccacgacgacgacgagcacctcaaattccgtccgcactctcgtacccgtatatgtctaacgttcccccaacgtacaccccaagaca

SEQ ID NO: 65592 - DNA, 376 bp, Glycine max
tggaacctttgggctgatttatgtgcttgtttatgtgcttgcatggtcgtgagaagatcatagaaggggacctcttcagagacgttatagttgtggaagcaagtataatccgccgagtcatccaagttccgccgcgcacctaatcctcatgcatacacaaccgcgccacacagccccggctccaagttccggttcccgcgaaatcgtaatcgcccgcggtccggaccccccccagttaacgccgccaacggcgcccttcgcaccccatcgccccttcccggcgttaccgagaaccgaagaacgagatagaccctatcggagcgcgccgagtccccagttcgccagctgccaacgacgcaataccctcgtcccgaat

SEQ ID NO: 65593 - DNA, 347 bp, Glycine max
tggaacctttgggctgatttatgtgcttgcatggtcgtgaaagatgatagaagggggcagtacacccgagatcaatctggagagaaagagagagagagagagaaaaacggtcgacataagcggaggagacgtagcgagattggcggcaacacgcgacaataagcgcggtcgtatagccttacgtatcggcggccttatccgtgggcgtataagcgctggtacgataatcggaggtggcgactatgcgatacgtctgcgtggagagcatcgcgggcgtaacttacgtctacgctttaagatcgtggtcctcggaatcggccgtagacgcggtatagaccgtctacgcg

SEQ ID NO: 65594 - DNA, 428 bp, Glycine max
gaacctttgggctgatgtatgtgcatgcatggtcgtggaagatgatagaccggtgcagcaagtgatgaaacgtcctgtgcgcccgagaacaagtgcagacttggggacctttgacacaggctaattccctgaatcgtcgtcgaacttatgggtaggtaaaaaaaaaaaaaaaaaaaaaatcaaaaaagtggttgtctcagaggacttaagtccatgcatgtgcgtacgtgatgctacagtctcctcacagcgctattcaaacctaacctatcggttgctgccccataatgctgagatcgggaaaatttcggtgccatttaatccaactgttccgtagtatactttttccctgttagtcggtgcaacagtgaaaaggtttgtattgactgtttcccttaatagccgtgtaattcgaacggttaacggga

SEQ ID NO: 65595 - DNA, 271 bp, Glycine max
gaacctttgggctgatttagtgcttgctggtcgtgagaagatgatagacggggcataaaatcaatctctaccaaaaagggaagagagaaaccaaaaagttggtggctgtctcaacttacttaagtccatgtatgtgcgtacatcatcattcagtctactcacatagttattcatacctaacctattggttgctgacacataatgcatcgatcgagaaaatttcgcttcaattcaatccaaccgttacgtaacatacctcctcccagttagt

SEQ ID NO: 65596 - DNA, 358 bp, Glycine max
gtttatgtgcttgcatggtcgtgagaagatcactagaggggggaagaaaaacgaagggcatgtcagtccaagagtcgagagaggtacctaaagcacccgatagacactaaaacggacatacacttgttatcgagtcgaggtatgcaacgacgaaccaccgagagaggtcgatagacgaagaggtagaataaacgaccagagaggtagacccgcacggggacggctaagccagtcccgaagaacccctaaggaccacgacgtcaaaacgacgaacccgcaaacataatccccaccccacctaccctcataaccatcatcgccgccgaaacgcccaccgttagccataatccttctcccc

SEQ ID NO: 65597 - DNA, 302 bp, Glycine max
tggaacctttgggctgatttatgtgcttgcatggtcgtgagaagatgatagaaggggacctatatagtcgatcaagtaagctcgttacagtttttgtaaaacgaggtgtatgactcatcccgtctctcgttcactccgcgttcctattactctacattcattcgctagttactgtcgatcttgcgtctagacgcggaagcgatttctccgaatacggtggtgtacaccacactccgttagatacagtagtacccggcggaacaatagtagttttagtgggattagtaagacgtttctctatc

SEQ ID NO: 65598 - DNA, 443 bp, Glycine max
aacctttgggctgatttatgtgcttgtttatgtgcttgcatggtcgtgaaaaaatgcatagagggggaatttattgtgccctggagagagagatgctgtaacggggaggaggttcgtaaggcgccattggtagacaaaaaataagttacatcttaaactatgccctcgttgcggcgccttcgacttcaagactagaacccacgacgccggcacgaagaacaaaggcgccgacgagccctttcctcgtgcctactcggcgagtcgggaaaaagaaaacgccctaagcccagtaccggaagtcgtcagaaccgtacgtaataaacacacggcgaaacccgtcggaaaggaccgtccctatccgagagctagagcatacttaccttacgcctccaagactaataaaacgtccctacgcgtcggaatcgacacgtcctagatcggaa

SEQ ID NO: 65599 - DNA, 190 bp, Glycine max
caaagacgagcccgaagaataatacggcctgcgtcaaaggcgcgtccgccgtcctccccttccgcggcggccataatcgtatgtaccgaatccgatccaccgaaaagtcactagctactaaggcacgaacacgacgaagacctaaaatcaagtcgcgactctcgtacgcgtatatgtctaacgttcctcc

SEQ ID NO: 65600 - DNA, 411 bp, Glycine max
ggaacctttgggctgatttatgtgcttgtttatgtgcttgtggtcgtgagaagatgatcagaggggagtccccgactcccgcgcccgcgtcaacaacaatcccgagccctacgacgtcccgcgtagaggtgagaaattcatacgtcccctagtaataggtaacggaacacggcgtcgtcggcccgtgaatgtaaagcctacactaactaataacactcatcccggaacgccgtgcacgggatcggcctttttactcgggtgcctcatattaacctaatctcgtcagggtacgtacacaccgtaatcatgaagcctaaagtcaaccctcttacactaccaaccacgcccgcagctccccaaaccacagggccgacccccagactcacaaacgaaaaaagaaacgcaccccca

SEQ ID NO: 65601 - DNA, 475 bp, Glycine max
  unsure (1)..(475): unsure at all n locations
gaaccttgggctgatttagtgcttgagaagtgatagaaggggacatctaacaagtcaccgcgcaagcgctacttcaataaacgtgataataacataagctgcaacgacgatcccggccaggaccgcccccactgtggctgcctccatcccgacaatccttaacgtggccggacctatcagcatattaaagatgctgggcttcaactaacgctacgacaacgttgaccgtctaacaaagccattccatcgcaagggaacagttccccgctgcaacggagcccgtgtgcgccatgaagagaaagtaagtacaatataataacgctaaaacgacaaagaccgtacctacccaacccgcgtcttgttgcgcgaagcccttcaccgcgatatanaaatccttaaacgtaaacgtaagcgcaagaatcagtcagacgtcagagacccgactatcaaacacgcagcggacaacgaccccaac

SEQ ID NO: 65602 - DNA, 436 bp, Glycine max
ttggcttggaacctttgggctgatttatgtgcttgcatggtcgtgagaagatgatagaccgggaggtggaactcaggggcaatgttctgaccacgagcttccccttaggtgcggcccccattcaatttcataacctgttgacttccttagccggggccccctgtccctagtgaagagtggcgcacacagaaatttcacctttttcacgtattaggggaaccgaacacagaaacaagaaaaaggtgaaaaaaaaaaaaaaaaaaaaataaaaaaaagtggtttctcagaggacttaagtccatgcatgtgcgtacgtgatgctacagtctcctcacagcgctattcaaacctaacctatcggttgctgccccataatgcttcgatcgggaaaatttcggtgccatttaatccaactgttccgtactatactttttcc

SEQ ID NO: 65603 - DNA, 343 bp, Glycine max
aacctttgggctgatttatgtgcttgcatggtcgtcagaagatgatagcagggggagcgtgatatcatataaatcctaggaccactgagatctgcgaatcgtagtatttccagaccctaccattcaagatcaggcgaagtattggaagtgcaacagaatggacacgcatacctggcgccaaatgtaccaagatacttcatctaacatggcgtatgttactcgacacaacatccgatacaaagtagaacccgtaagaatccaccgactagctactcaccaactaatgtacaacccgattcgacataggagaagcaccagaagatctcaagatctcgatagacta

SEQ ID NO: 65604 - DNA, 392 bp, Glycine max
ctttgggctgatttatgtgcttgcatggtcgtgagaagatgatagaaggggatagtaaaataacccctaaatctaaccattacgttacaattcaaactcttctcccgcccttgagctagagagtaatggtatgcattaagtaaattgtctgtaagcttattggtggaaaggtgttgaggaagtaaccggtgatcaaagttgtctgtaagctagtcttggttattggtggagcgaagaagttttattgtcctaggtttggaatggcggtctcgagggagactagaaagcattagaagagtatcgaatcctcgacttgaaaatctttaccttagaggtctgctagagaaactgtctaggaccctaaaatagactcctgcccttagagtagtgtc

SEQ ID NO: 65605 - DNA, 402 bp, Glycine max
aacctttgggctgatttatgtgcttgcatggtcgtgagaaaatcatagaagggcgcctgcgcactcggccgtcaacctgagcgtcaccagctcgcggcccggccggcccgcaattttgtcatccgggccacgcccgaccgcacaccacttcagagaaacaaaaaccccaaaccactagcatgcaccggcaccaaaaaaaaaaaaaaaaaaaaaaaaaaaaaaagtggttgtctcagaggacttaagtccatgcatgtgcgtacgtgatgctacagtctcctcacagcgctattcaaacctaacctatcggttgctgccccataatgctgcgatcgggaaaatttcggtgccatttaatccaactgttccgtagtatactttttccctgttagtcggtgcaac

SEQ ID NO: 65606 - DNA, 485 bp, Glycine max
ggcttggaacctttgggctgatttatgtgcttgcatggtcgtgagaagatgatagacgggggggaccgccctcgcgcccctcaataagtaacggtcacgagactgcgggcgagctgaggaggacttacgatctgcccgacggatctaataaactgaggggtcccgagctggcctccgagtgataagggctgtacctctagtgaggaggaataggttaaagagaacgctcatacttagaaacgggagagggagaggccggagaaatagaagtaatcgctcgagaaggttaaggtctctatggataaagacgtcctcgtcgtcgtctacaagaaattcgaaggcgtctaaaaggatcgagcccactccctatataatttgctaaggctatcccgcgggaaacaagtacggagaacaaaatataccgatttcgagcgaatcccggctcccgcacagaccgcgccctccggccacccgcaaccctgcga

SEQ ID NO: 65607 - DNA, 430 bp, Glycine max
aacctttgggctgatgtatgtgcttgcatggtcgtgagaagatgatagaaggggctcgaggaaaagtaagatctccccagaggtagggagagatatcgtaacagcccgcatatttaaacctatacagaaaccaaaaggcctaccacgagtcatagcaatctcaaaaccataagcattatatttggagacacaagaccagcagggcgagaaaagaaggaaagacatcattccagaccccctcagcaacaaaaatcaataatcagcaacaaaaatcaataatgcaacaaccaatacccacgccaaaaaaaaaaaaagaataggtattttatacaagcgatacgtatcaaacccctacagttcgacaaatcacacagtatacgtcagtcaagaaacaaggctacgtagggaaggccggcaagaaacgagaagg

SEQ ID NO: 65608 - DNA, 477 bp, Glycine max
tggctcggaacctttgggctgatttatgtgcttgtttatgtgcttgtttatgtgcttgtttatctgcttgtttatgtgcttgtttatgtgcttgcatggcgtgagaagatgatagaagggcatggtcgtgagaagatgatagaagggcatggtcgtgagaagatgatagaagggcatggtcgtgagaagatgatagaagggcatggtcgtgagaagatgatagaagggcatggtcgtgagaagatgatagaagggcatggtcgtgagaagatgatagaagggcatggtcgtgagaagatgatagaaggggaaaaagaaaaaaaaacacgtaacaaaaaaaaaaagtggttgtctcagaggacttaagtccatgcatgtgcgtacgtgatgctacagtctcctcacagcgctattcaaacctaacctatcggttgctgccccataatgctgcgatcgggaaaatctcggtgccattta

SEQ ID NO: 65609 - DNA, 437 bp, Glycine max
aacctttgggctgatttatgtgcttgcatggtcgtgagaagatgataggggggttacatataaccttcaaacccaacgcgctgcgccctacaggcgaaattactagagaccccaacaatcacgtaacgaaacacaaactaacgcaaaacacttatgcacccgacgaggcccaagcagcatcttaacaaggcgacccctatcgttctgcgtagccgcactcgcccaacgaacgaacaacgtacaatgccccccagcagtattcgcacgtaaaaaaaaaaaaaaaaaaaaaaaaaaaaaagtggttgtctcagaggacttaagtccatgcatgtgcgtacgtgatgctacagtctcctcacagcgctattcaaacctaacctatcggttgctgccccataatgctgcgatcgggaaaatttcggtgccatttaatccaa

SEQ ID NO: 65610 - DNA, 464 bp, Glycine max
aacctttgggctgatttatgtgcttgtttatgtgcttgcatggtcgtgagagatgatagaacggggttgtacgggccgccaagccccggttcgcggttaccgtaacacgtagagtgagcctcttgacgtgaagaagtgtagagaggaggataatttctaaatatctgccctttctgcatatgatagcgagaagaagaagagaaagagaaagagaaagaagaaaactgaggaactaaatgagtagttttaggccgaggcacgtttcaaacttccagcagatctggccactttaaccgccgtataaaaggaaaacgtcgaaattattatagagaacctcaatttaatttttaagaaaaaaaaaaaaaaaaaaaaaaaaaaaaaagtggttgtctcagaggacttaagtccatgcatgtgcgtacgtgatgctacagtctcctcacagcgctattcaaacctaacct

SEQ ID NO: 65611 - DNA, 466 bp, Glycine max
  unsure (1)..(466): unsure at all n locations
aacctttgggctgatgtatgtgcttgcatggtcgtgagaagatcatagaaggggaccttatcgagcgcagcaactaactactcccggcccgcctcctagcgtcccagcgcgcgacccaaccttaagaccccgagaacgctcagtcgcgggcgcggaagcagtcgtaatcgcggtagtaatcgtggccgtaataagcatctccccgatccgagtcacgccgagaagataattatagacatctccgccccgggcgccgggctcgcgaaggtttaaccggagggcgtcgaaacgggcgccgtagtcgacaatggcggtcgtaatcgcggactaagtcgtattcgtgatttacgtaatcgtaagccaagctaaaacccacaattccgaagtagacacaatcgcaacacacgcactaataaacaacaagnaccatgcgccgcgcccaacaaaacgactaccgtctgcaccc

SEQ ID NO: 65612 - DNA, 336 bp, Glycine max
tggaacctttgggctgatttatgtgcttgcatatctgcatagataatataatggaagggcatggtcgtcagaagatgatggacggacatggacgtgagatgataatagaagggagaatcagagcctgaatgcagttaacgaaacgtaacacgatcagactacggagaggaaaatacccgagtaaccgtcaccgtcgtcttgcgcaccattcctcgacgcgatcgtaaagagagtcaaggtgaaagaaagtccgataacgacgtctaggacgcagtgcagacgatcacctgataggtaacgcgtatacatatctatgactgaaggccctactcgcgg

SEQ ID NO: 65613 - DNA, 263 bp, Glycine max
aacctttgggctgatctatgtgcatgtttatgtgcttgcatagccgtgcccagatcctagaaggggatagtaaaaataatggacagggacgagccctatgagtaatacgtcgacgtcaaatccgtgtccgacgtcctccccttccgcatacgtcatagtcatatatccggatatccatccagtcaaaagcgaccaccatacccacccacgactaccacctagactctcgattacataccgtctcacgtacacgtctatgtctc

SEQ ID NO: 65614 - DNA, 462 bp, Glycine max
  unsure (1)..(462): unsure at all n locations
ggcttggaacctttgggctgatgtatgtgcttgcatggtcgtgagaagatcatagaagggaacgtataagccattacggatcaaacgggaatggctagaaaagatacacgactagtcctagatggggaggaacgtccccgtcgtagcgtcccgaacccaacccccctcttctagtcgccagcactctcaacgaaaaacaccccacgaatacttaacgcgccacacgatatttagcgaaaaaggaaaaagagcaaaaacacacgcaccagaagccacaccacacgactcaacgggaggaaatagacaaagaaaaacaacaaaccgccaatgcagcgcccaaaaaaagcgagcgcttacgcaatctattctctacgcccagacccctctcacaccgcgcattaccggtacggaccacactcactcgncaaccaaccctcctctaacataagaagtatcgaccgg

SEQ ID NO: 65615 - DNA, 468 bp, Glycine max
aacctttggtctgatttatgtgcttgcatgtcgtgagaagatgatagaaggggacctatataatcaatcaagaaagctccttacaggtttttaaaaacgaagagtattactcctcccgtctctccctctccccgcgttcctattattctacattcattcctagttactgtcgaccctgcgtctgacaacgaaggcaatttctccgaaaacggcggtatacaccacactccgctagatacaatagtacccggcggaacaagagtagttttaatgggaaacgaaagacgtttctctatcgcggcgtaactctgtaacgagtctgataaaaggaccggaataactactctgcttttacactgaacttgccccactgttgaaggttacttcccgagttccaagcctgacctacccgtagccacaacgtcgcgcgccggaaccttcattgagcggctcgccgcggaggactca

SEQ ID NO: 65616 - DNA, 371 bp, Glycine max
aacctttgggctgatttagtgctttctgtcgtgagtactcattgaacgggacccatataatcaatcaagacatctccgtacaggtttttaaagacgtagagttttcctcattacgtctcttcctctctacgcgttcctattattctacatacattcctagttactgtcaaatttgtgtctcacatcgaaggcaattttccagaaaaaggttgtatacaccacacacggattcatacactacttacagccgcaactagagttgttataattagaatcgataaatgttactcaatcaacgcctatatcgtcaccaagtacggtataggcatactcattactacacgacatttacacggcacttattacaccgc

SEQ ID NO: 65617 - DNA, 393 bp, Glycine max
tggaacctttgggctgatttatgtgcttgcatggtcgtgagaagatgatagaaggggaaaatagaaaaaaaaaggcagggcctcgaacgcggaacctctaataaaacgagaccgacccaattggtgatggggaagagaggctaaatctctctccagtgaatatgtgccgtagtcctcgtccctttcgtcgtcccggcctttggcgttatctggctagtgttgggcctgtgcggcgggagtgtgcgtgagttatgctgctacggctggagataagtttctatctcgaggtgtaattagtaattgggagccttagcgggagccggcggctcggtggcgcgagggttcccacgaaggcgtgggagcggctggagtctgtggtggggttctggcgga

SEQ ID NO: 65618 - DNA, 471 bp, Glycine max
tggaacctttgggctgatttatgtgcttgcatggtcgtgagaagatgatagaaggggatctaatacagaacccgactagcgacaaaaaagaaaagagagatgaacagagagaatttaacacgctcaaatcagttatctctccgatcccggtctcctcatcgagtcctaacccaactcacgttctttgcttaaatttcctatccactagcgctctcctcccgtacggggacgccgtggtcataaaggtagaagagacagacggcgagagccgcgaagaagggatagaggaacgcccggtaagaaggatatccgtcgtgtactctgaccacactcatatctagaaggacaaatcgggctagtacctccaacggtactataggtacacgaaccgtaacatcacaaacaaaccaacgcattatatacacacgcacgcgcgcatccaccctaccaataaataaacgtcccgtcggt

SEQ ID NO: 65619 - DNA, 474 bp, Glycine max
aacctttggtctgatttatgtgcttgcatggtcgtgagaagatgatagaccgggaacaaccccctcgctatcatttatctgccctgtcgctcttactgccctgtaccgtataagtatctctctccctttccatttccccctaggccctaatgtcttaatcacttacggtaaattgtcggtctagatttgaggcgcacttatcgcctgtcgtggccggcgtcgtcgccgggactcgcggaccttaatcggcctgcaacactcgtactaatttcgaagctagggcgagtaaggagggaaggaaggtaggagccccggagaatcccgtcgagggagagaagcacgttgagtatccttcgaggaagcacgcgtgtaatagaatcttggagaccacgtttcttactaatagtcctcctgtcgatatacgctgtaatcaagccgtcccgaacaaataaaggccaacgcgagacaccaacc

SEQ ID NO: 65620 - DNA, 464 bp, Glycine max
tggctcggaacctttgggctgatttatgtgcttgcatggtcgtgagaagatgatagaagggcatggtcgtgagaagatgatagaaggggacgtggtcgaacaaccaagaaaagttacccttacagtagttcaagaaaacgaagagtatcagtccgcctgtcactccctcatcctgtgttcctattctacattcattccttgttattgtttaggatgcgtctgatgcggacggtgacttgacctggaatggccctacacatcatgccccgttggtaacaagaggaaatggcggtggaacagaatgagttgtatctgggaaagatatccgtttcactatcgcagcgtaactctttaacttaaatctcaaggggccagaaaccaagcccgaactcgtacattttgttcaccatacaaatgaaatttcaaccccgtaaaacaagcctagccatttatagtaacgcgaa

SEQ ID NO: 65621 - DNA, 371 bp, Glycine max
aacctttggctgatgtactgcttgctggtcgtgagaagctcatagaagggggcaccggcggacgtcgtacctttctggtccaagggcgccgccgttataatcgacgcggccgaggtacgtatcggggctaacaccgttgcgacggccggcggacctttaagaaaagaaggcacggagaggaaggacgcgacgatcaagaatgctcttacccataagctttaggtcctcgtttccgaaaagtacgtcgtcgttaatcgcctccgccgccgtcaatttagtaaatattaacgtaccgactccgaaggaacccgtcttactcacctttgagaagaataccctcccgccgatcagaccggactataataaggtac

SEQ ID NO: 65622 - DNA, 466 bp, Glycine max
tggaacctttgggctgatttatgtgcttgcatggtcgtggaagatgatagaaggggggaagagagaagaagacggtgctgagtggagtggcgttgccccggagggtagtggggacgatacatactatacatctaaatacacgtgtgaactcggctagggaccgttctaaggaatttcataaggtcgaagttactctctgcgagaaggcttaccccgtctctcttaaacgggctgatgttaagttcgaaaaattcatcacctgcctagatattttagagtagcgacttggaacagccggaagtcacaaacgtacaaactcccgagactcggaagcctaccgctaccccgaattccctcgcgacgcccaaccttcccgtcctccccccccctaccttacgaaacggaatacatatcggaccccgacccgtacgaccaactccgcaacaacaaaaagccaaataaacga

SEQ ID NO: 65623 - DNA, 207 bp, Glycine max
aacctttggtctgatttatgtgcatgcatggtcgtgagcagatgatagacccggaccatcataaacagcacgacctcctagcatcgggtattcctatcctatatatgagtacccttcattattgttcctatgtcctttagtctccgtatttagacacctctctcgatgacgaagatcccataaaacttcgcgattacgatctaataa

SEQ ID NO: 65624 - DNA, 480 bp, Glycine max
ggctcggaacctttgggctgatttagtgcttgcatggtcgtgagaagatgatagacggggcgataccacccccaactgtcctaaccccgcttgaccccggacatgaagcagctcagtacgcaaacctcgccgtagagcacactgaggaaaacgggaagaagtcccgcgcgaccaagaaacaaccacgacctgcaacctgttctaaaaaaaaaaacacacaaaaaaaaaaaaaagtggttgtctcagaggacttaagtccatgcatgtgcgtacgtgatgctacagtctcctcacagcgctattcaaacctaacctatcggttgctgccccataatgctgcgatcgggaaaatttcggtgccatttaatccaactgttccgtagtatactttttccctgttagtcggtgcaacagtgaagaggtttgtattgactgtttcctttaatagccgtgtagttcgaacggtgaacgggatgtgtt

SEQ ID NO: 65625 - DNA, 472 bp, Glycine max
tggaactttgggctgatttatgtgcttgcatggtcgtgagaagatgatagaagggggagccgttaccgaagaagaagtctagactggaaaaaccgattctcttaactttaactttactgccgtaaacgacttgacctacctcgccgtagaataggtagggtaagatttgctccgttaaacatcatgccttctctgaggatcttgagaagtataaggctgaacatgaggcctactggtctgctgcaaatagagatttcaaacatataaaccctgctgagccctgcatgtataagacaacacataggtgacacgtcgggccaccccctctatctcgcgccgacactatcgacaacgagccggtgcacccagagcgtacttacccgcccgcggaaacaccggactatcctcctagtaacgctcgcgagtctgacccggcccccaatccttataaggctcactccacatccgacga

SEQ ID NO: 65626 - DNA, 277 bp, Glycine max
agtcatggcgtgagacccacaaaccgaactttcaaccctgaggccttcatcttcgcggagcgactacacattgaaccccgggccagtgaactaacccgtagagcaaggaacaaggacgggaaaaaattaagttcatagagtcacgtacagagttaggtctgctggtgttcctgctggttttcatcaggccgaacatcgtacggcggacggcctaccctacctattagaacggtacgtagtctccccggccagttccaatattctccatattaccctt

SEQ ID NO: 65627 - DNA, 436 bp, Glycine max
aacccttgggctgatttatgtgcttgtttatgtgcttgcatggtgagaagatgatacgagggcgagcgagcagcgagaacggagccgtaaggggcattggaaggccgtaccgtcagcacatctctctgtatcatgttggtggatgcgcgcaggccccttgctgcactaaagaccccttgcctggttgtcgaactggatgtcgcgcggaaatgcccctctttccttgaccattaccttactaccctttagctcttcctgttctctaatcacttccttaagaaggagtctcactctgtctctctggactgtttcactactactgactagggcaaaaagagtccctaaccggagaaaaagagcgggaagaagcgccatacgtccgtcgtcagagtctctagtaccacccggggcgatatcgagtaacatcggaatcgga

SEQ ID NO: 65628 - DNA, 467 bp, Glycine max
tggaacctttgggctgatttatgtgcttgcagatgatagaaggggatctgtagacctaaatgcccttgaggcgaggtcgaggtactctggctcggccctcagaacgggagtcgggtgcggagctcttactctatccgacggggcgagggataagaattccacgtagtctaaaaagtctaactctgtctccccttttgcctgccataacgataaacatcacgctgacgtatctgtccttggcgaacccgttaaatcagtccatcacagcgacacccgcgccggagtaaccgtacgttggtcggagaagaaggaaggcggggggtaagcctgggcccatactacgatgccaggcgccccggcattccattgcggatccggcaccggaataaagccaccgaactacgcctccgactcccgtcttaagtaaaataccctcgaggcccatccgtacgcgtagataaataacg

SEQ ID NO: 65629 - DNA, 287 bp, Glycine max
gaacctttgggctgatttatgtgcttgcttatgtgcttgcatggtcgtgagaagatcatagaaggtgaacggtggacacggaattgaggttcaatgatctgttctcagaggaaacgcgaaaatcttaaatacccgcgagtgagtcaaggaggagaccgaggtcgagtcctactgtgatagactgtcatattactatcgacaaatctacgggataagagacgataccgacaacgcaatcgcatttgacgaaactaaagtgttcggcgtagccgaatagacgaaggagc

SEQ ID NO: 65630 - DNA, 469 bp, Glycine max
  unsure (1)..(469): unsure at all n locations
ggctctggaacctttgggctggatgtatgtgcattgcgttgagaagatgatagtaaggggtacctatgataantcaatcaagcaaagctaccttacagtgttttgcaaatacgtaagagtagttactgcccggccgtctcatccctctaccccgcgtctcctattatctctacatctcatctcctagtatactgatcgcaccctgcgttctgacatacgaacggcaatcttctaccgacaaactggcggtattacactcatcactcctgctacgataccaatcagtacaccggcgtgaacaatgagtagttctcaatgggtaaacagaaagacgttatctctatccgtggcgtacactctgtaacgcagtctgcataaagggaccgcgaatacactactactgctctttacacatgaacttaccaccactcgttcaacgttactctcccgaagttccaagacctgacct

SEQ ID NO: 65631 - DNA, 398 bp, Glycine max
acctttggtctgatgtatgtgcttgcatggtcgtgagaagatgatagcacgggatccctagcctgaatcaaataacctagcttagctcgttctgactacggagagggaaatacacgggcactagcctccgtcttcttccgctccagtcctcgacgcgataccgaacagagtagacgttaaagaccgtccgataaggaagtgtcagctttagggcacacgtccacctcataggtaacgcgtatacccgcgtatcactgacagacctactggcggctatcgctaaagtttcacctgtaaacgtcactgtagtaggttacgctgactgataccatcatcgttaaagacgttacgtaacaaatacataaataaagctacaataactctcaatctctatacac

SEQ ID NO: 65632 - DNA, 403 bp, Glycine max
aacctttggtctgatgtatgtgcatgcatggtcgtgaagatgatagaagggcatcgccgtgagaaaatgatagaaggggaacttaggatgttcaaaaaacaataaaagagtaaaaaaaaaaaaaaaaaaaaaaaaaaaaagtggttgtctcagaggacttaagtccatgcatgtgcgtacgtgatgctacagtctcctcacagcgctattcaaacctaacctatcggttgctgccccataatgctgcgatcgggaaaatttcggtgccatttaatccaactgttccgtagtatactttttccctgttagtcggtgcaacagtgaagaagtttgtattgactgtttcctttaatagccgtgtacttcgaacggtgaacgggatgtgtttcgcactggtgtacca

SEQ ID NO: 65633 - DNA, 403 bp, Glycine max
tcgtgagaagatcatagaccgggctcctaaatagagacgatgatttgacgctaagggcaattctccgaagtgtgcttgtgcgagtgttcgctacggttgcactgcaaagtattgcaagtattttgctggttcgcgaaatcttcgcggtacgtactattataccacttcgcctgataagcattacttgggtcctcctggcaaggcggacaacgaggcatccttacaagtcccgtaacaaacctcatctttttactgccaatgctcaaaagtcacggctctctacattttaagatctgaaggaaatagtttcaaaactgaacgatatcctattctcaactgatgctatatagtatgggcatcccaaagttccctcaaaacgcgcctccttctaaaactacctccc

SEQ ID NO: 65634 - DNA, 478 bp, Glycine max
tggaacctttgggctgatttatgtgcttgcatggtcgtgagaaaatgatagaagggaaggacaagaggtaaagtcggctcaagtttctcgatagagtcgaccacgacaatacgtgcggaagatactcagactacggagacgagtaacactacggagcaaagggcccggtactacacgaattagactcaagcgtcgccgaagaaggggaggcactggtatccgacgataccggggcagggtccttactatttaagctaagtaactgtaagagaaaagtaggaagtcttttcgaaagaggaacggaggggaagtaatgctacaaccacggctccggattaaattataacaactgccccgaccatgcggaggactgaaataaggctagctggtcaggttacatcgagagggatagtaaaaggtacgcataggaaaattacgcccgaacaacgcgcattacggccgcgcgcggttcgcgcgc

SEQ ID NO: 65635 - DNA, 463 bp, Glycine max
aacctttgggctgatttatgtgcttgcatggtcgtgagaagatgatggaagggcatggtcgtcagaagatgatagaaggggacctaggatatgaatcaagaaagctccttacagttttttaaaaacgaagagtattactcctcccgtctctccctctccccgcgttcctattattctacattcattcctagttactgtcgaccctgcgtctgacaacgaaggcaatttctccgaaaacggcggtatacaccacactccgctagatacaatagtacccggcggaacaagagtagttttaatgggaaacgaaagacgtttctctatcgcggcgtaactctgtaacgagtctgataaagggaccggaataactactctgcttttacactgaacttgccccactgttgaaggttacttcccgagttccaagcctgacctacccgtagccacaacgtcgcgcgccgga

SEQ ID NO: 65636 - DNA, 343 bp, Glycine max
tggctctggaacctttgggtctgatttatgtgcattgcatggttcgatagaatattcatagaccggtgtcctcatagtaacacataacaaacaaacggcgaggggcgaatacataatacgtgctaaggcgcacgtcgccaccgtactccatctgcttccatcatcagtcatatatgctatatacgaaatccgactattattgactgtcaacctctacttcgcgacgacgtccacctacaattacgactatatccttactctcgtatatgtctatcgctaatctaacgtcatcgttaagacgcagtctcacactcacgctctcgacacctacactgtcacactc

SEQ ID NO: 65637 - DNA, 402 bp, Glycine max
tggctctggaacctttgggctgatttatgtgcttgcatggtcgtgagaagatgatagacgggggcgctctatctatactatatatatctctacaggcgcagtggtgatatcaagactggagaaagaacggtgaaaatgatgctgccgtcgtctcccatatcgtcttctcctggaatttcagtctctacttaggtgaagaaactgaaggaggacccgaaggaggcgatttataaggcccatcccgacgccgagaccaacggaaaagaagtaggctgcaccgcaacgggctcccacgggaaggtcgccttaaaaatcgtagaaaatccttgagtatcccgtataggggaaaagggaatcggcaaaagcggaaagttctcttaccataaaggcagtctaccttac

SEQ ID NO: 65638 - DNA, 186 bp, Glycine max
ccccagactgaatcaaagaacctaacctaactcactctcactacccacatcaaaatacctacacccccgtctccatcttcatccactccactcctccacaccatccactaaaacagtataactcaaagaccctcccatatcaaactatcccccttacccctcacctccacctcataactaaccact

SEQ ID NO: 65639 - DNA, 300 bp, Glycine max
cctcaaaccctaaactacaaaaccgccttagtaattcaccaaacggtccgcggcctcctaaactctttctccatgctctctcctcactcttactacactaatctactcccttacaccgcattctgattcaattaaccccattatatataaatatgctctcctatcgccttaatcacgcaacataaaataccgatcctctcattacaattatcaacaacacctactaacatccgaaacccctaaaaacaatacgaatcacaccacacataccaacctatatacaaaactattttacctcta

SEQ ID NO: 65640 - DNA, 416 bp, Glycine max
gattcacacaactaactaagaaagtcttccatagccccccaaaaatgaagagcaccatcttctttgctctccttctcttttgtgccttcaccacctcatacctaccttcagccatcgctgatttcgtgctcgataatgaaggtaaccctcttgaaaatggtggcacatattatatcttgtcagacataacagcatttggtggaataagagcagccccaacgggaaatgaaagatgccctctcactgtggtgcaatctcgcagtgagctcgacaaagggattggaacaatcatctcgtccccatatcgaatccgttttatcgccgaaggccatcctttgagccttaagttcgattcatttgcagttataatgctgtgtgttggaattcctaccgagtggtctgttgtggaggatcta

SEQ ID NO: 65641 - DNA, 376 bp, Glycine max
gacagcaaaaacaattaataaagatgagtttgaggaacaacatggtggtgctaaaggtgtgtttgttgcttcttttccttgtgggggttacagctgcacgcatggaactgagcttcttcaaaagtgatcagtcatcaagttatgatgatgatgagtattcaaaaccatgctgtgatctctgcatgtgcacacgctcaatgcctcctcaatgcagctgtgaagatattaggctgaattcatgccactcagattgtaagagctgcatgtgcacacgctcacagacaggacagtgtcgttgtcttgacaccaacgacttctgctacaaaccttgcatgtccagagatgactagaaaaactaatagctctctcaaatgga

SEQ ID NO: 65642 - DNA, 67 bp, Glycine max
ttgggggtttgatattatgatctaggaataggggactagtcaaaaacatatcgacggacggaatgaa

SEQ ID NO: 65643 - DNA, 187 bp, Glycine max
ttggaacattgagatacatattgtagagtgggagagacgcttttttgttagattgtggtgttaataggcaatcacagttttgagctataaataatggtattggtatggaaataaaaaaaaatgatgttatatcagtattttacaaatttatatatcaaataattaaaaaaaaatctgtccttcttaa

SEQ ID NO: 65644 - DNA, 228 bp, Glycine max
  unsure (1)..(228): unsure at all n locations
caccanncctcataccnnntaccttcanngccatcgcnntgactttcgtgcttcgactaatgaagagtaaacccttctctgaacaatgcgcggcaccataattatatctctcgtcagacattaaccagcnnatttggtgcgaaataacgaagcaagcnncccaaccgtggaaaaatgaaaagaaatgcccttcttcaactgtgnnngtgcaatctttcgcaattgaag

SEQ ID NO: 65645 - DNA, 121 bp, Glycine max
aacactcgtgcgactacgagaacacgacataacgttataaaacttttatctcccaaatattccactgaggacccctagaacaaagcagctgtcaccaactattaacacgaacttctatact

SEQ ID NO: 65646 - DNA, 104 bp, Glycine max
ggccaaaccattgagccgaacccggcctttagggaaaaaagaaagaaagaaaaaaaaaaaacccttctttcccctccttctctcttccatagagatttttctcc

SEQ ID NO: 65647 - DNA, 166 bp, Glycine max
cacacgcgtccgaggatgagagaagacagccgacggtgagcgccacactacaatcgttgccgtcacgcgatgtttgactgcgccgactgcgatctccaacaataccgacccagatatgcaatatgagaaagatcgcttctggtgaaccgttcttcattaaactgaa

SEQ ID NO: 65648 - DNA, 142 bp, Glycine max
acctaatcaattactggccgcgtttcacatcatcagactggaaaaccctgggttcccacataatcgcttgaaacatacactttcgcagctgcgaatacgaataggccataccgatcacacttcaacagtgccagccttaatg

SEQ ID NO: 65649 - DNA, 54 bp, Glycine max
ccctaattcccgggtcgaccgcacgcgtccgaacctataccttaccaactcatc

SEQ ID NO: 65650 - DNA, 107 bp, Glycine max
gcggccacgcgagcggacacacgtgcgcaccgctgccagtttacgactgaagggtacacattcgagacgaggaccaaacgggacgggtgcgagaagaccactgattg

SEQ ID NO: 65651 - DNA, 221 bp, Glycine max
taaacacttgaaaacagaaacaagaaactaggtgagggtgggtttcttttatagggaacatataaccattaagatacagaacctaactttattattttatctattccaattactttatcttgttaaaccggataaccttattgaaattacaatttcacaaatccacaccttttatcattccaacaaaactttcccaaaagctcattctttaactatctcaa

SEQ ID NO: 65652 - DNA, 289 bp, Glycine max
acatcgcaatctagataagcatcataaaatcatagccactccgaccttacttccttccttagctgtagagaatgccactctgagcaatcatcatacccacttttacgcataggatcatctaactctgcactctattttacactgtgaaaccaagacgaaggtagcatttgacgctgacttaactaatcgtactgctctaagctcctccttgttagaagcgtcaatggccaggtctgccttctgatgctaacagagcgccaaaaggcgttatagggctcctatgaaagac

SEQ ID NO: 65653 - DNA, 136 bp, Glycine max
tacggctgtattacgactacatatggctacataccctagtggtgcatatgagtcatatacgtagcggcctagcaaattgcacagacttcgctagagccacatcgacttactttgcgcccacacctaatacctacct

SEQ ID NO: 65654 - DNA, 332 bp, Glycine max
gacagcaaaaacaattaataaagatgagtttgaagaacaacatggtggtgctaaaggtgtgtttgttgcttcttttccttgtgggggttacagctgcacgcatggaactgagcttcttcaaaagtgatcagtcatcaagttatgatgatgatgagtattcaaaaccatgctgtgatctctgcatgtgcacacgctcaatgcctcctcaatgcagctgtgaagatattaggctgaattcatgccactcagattgtaagagctgtatgtgcacacgctcacagtcaggacagtgtcgttgtcttgacaccaacgacttctgctacaaaccttgc

SEQ ID NO: 65655 - DNA, 265 bp, Glycine max
acagcgtacgaccagactacagatgactatagatatattaccaatgcacgggcctccatactgtaggggggcacctcggacacagagtatgggaaaacatctcttatgctgactgcgaaaccgtcgcacgatctaactgacatgacaaagctcgaataagcactgctatctgtacatacaaaatgcgcgcttacaggtgcattcaaactactaccttgtgagtcctgtactaacacaactgcaaggatacttactattgcggatg

SEQ ID NO: 65656 - DNA, 196 bp, Glycine max
acgagaaaacgactgatctctgcaccctaatgagttctcacaaatggagagttatggtgagtaacgcgtgacttggggtcaaggcggctggactctcgcagcagctctatacttatgatactcgcgtcaggctagaggttctcaaaacatcctactcatcttctagctctggctcacatagaaatcacttatcaca

SEQ ID NO: 65657 - DNA, 416 bp, Glycine max
ggacacacaactaactaagaaagtcttccatagccccccaaaaatgaagagcaccatcttctttgctctctttctcttttgtgccttcaccacctcatacctaccttcagccatcgctgatttcgtgctcgataatgaaggcaaccctcttgaaaatggtggcacgtattatatcttgtcagacataacagcatttggtggaataagagcagccccaacgggaaatgaaagatgccctctcactgtggtgcaatctcgcaatgagctcgacaaagggattggaacaatcatctcgtccccatatcgaatccgttttatcgccgaaggccatcctttgagccttaagttcgattcatttgcagttataatgctgtgtgttggaattcctaccgagtggtctgttgtggaagatctac

SEQ ID NO: 65658 - DNA, 239 bp, Glycine max
cttctacaagaccaccgaatcgtacttctactttaagactacagatcagtactattgcgagaatacgtcagaaatcgtgcggctgcaacattaccaccaatgtgtacaccttccatatgactacatacagttacatataccacaacactacaacaccttacactctatgaaacacttcaacaaatacctcactactcattagcataaattcaatccataaatcatacatcaattcctct

SEQ ID NO: 65659 - DNA, 111 bp, Glycine max
catgtacctctgctagaagacgactgatcggtactgatgctataatactactgaatgttacggatgctagaagactacataaagttacagctgctagatgactacataagg

SEQ ID NO: 65660 - DNA, 146 bp, Glycine max
ttgcgactctcattttattatactattttaattttgactaacatcctggtactattaggagaattttggaggcctaccatggttaccatttctgctcaacctctattgttctacttctatttacctcatatcaatcaccctattat

SEQ ID NO: 65661 - DNA, 495 bp, Glycine max
ggagtttgttgatcgagataactagaaacggtgtgatgaaaatgaaggtccttgttttcttcgttgctacaattttggtagcatggcaatgccatgcgtacgatatgttccctctccgaatgaacactggctatggtgcccgtactccggaggtgaaatgcgcaagttggaggcttgctgtggaagcacacaacatctttggctttgagaccattcctgaagagtgcgttgaagcaacaaaggaatacatccatggcgaacaatatagatcagactccaaaacagttaaccaacgagcttacttttatgccagagacctcgaagtccatcccaaggacacatttgtgttcagtatagatggcaccgtactctctaatattccatactacaaaaaacatggatatggggtggagaaatttaactcgaccttgtatgatgaatgggttaacaagggcaatgcaccggcactgcccgagactcttaagaattacaaca

SEQ ID NO: 65662 - DNA, 205 bp, Glycine max
cttctaaaaggacaccgaatggggactatcatattaactactgcagatgagatcaacggacaacgtgtgatctactaatatatgttgggccatccaacacattacagctgatacagacataaacatgccttaccttgtaggtcttagaatctagttactatatatcatatactatacgtactgcgatccataatgctatatcatg

SEQ ID NO: 65663 - DNA, 130 bp, Glycine max
ggaatcaatatcacgaaatctatgtatctatatatggagagatggagattcatgtcttatcgtgatggcgacaaacaagaatggttgggacaatcaatatacatctcgatcatattttggatacccatat

SEQ ID NO: 65664 - DNA, 388 bp, Glycine max
gacagcaaattcaattaataaagatgagtttgaaggacaacatggtggtgctaaaggtgtgtttgttgcttcttttccttgtgggggttacagctgcacgcatggaactgagcttcttcaaaagtgatcagtcatcaagttatgatgatgatgagtattcaaaaccatgctgtgatctctgcatgcgcacacgctcaatgcctcctcaatgcagctgtgaagatattaggctgaattcatgccactcagattgtaagagctgtatgtgcacacgctcacagccaggacagtgtcgttgtcttgacaccaacgacttctgctacaaaccttgcaagtccagagatgactagaaaaactaatagctctctcaaatggacgaagccccttt

SEQ ID NO: 65665 - DNA, 486 bp, Glycine max
  unsure (1)..(486): unsure at all n locations
ggatggcgatgctttcgcttctgttgtgtcttcgtcctctccgaccactcttcctcggtcaagcccgtcggcctcattgcactctcgttgcctacgacaaggccacctccgtcgcagagcaagaccatcacaagaaagtcctctgtaaaatctgagagctgagtgtttttagatctgaaatctgagtttttttattttagatctgagatctgcggagcaccgtgcgactctccctccgccaactacgtcctcctccaccagaccacaacttcttcaccgacgactgcgacaacgacttcctctccggcggcgacggcggctgctccttctccgcctcctcgctggcgacaactnccacccccaccaccaccaccactaccaggccaacaaccttcctgcgccactgccactcttctacttctttcattnttcctctccctgttcatcgcattnntctgggttttttatgttcaagatttggttttc

SEQ ID NO: 65666 - DNA, 125 bp, Glycine max
gatgtcttgttgggagaaaaaaaaacaaaaaaaagagaaaaaaaggcgcccgtttaaaagatccaaggttacctacccctgcattccacgtcataactcttctatagtggcaactaaattcaatt

SEQ ID NO: 65667 - DNA, 319 bp, Glycine max
gacacacagtttaaacaattaataaagatgagtttgaagaacaacatggtggtgctaaaggtgtgtttgttgcttcttttccttgtgggggttacagctgcacgcatggaactgagcttcttcaaaagtgatcagtcatcaagttatgatgatgatgagtattcaaaaccatgctgtgatctctgcatgtgcacacgctcaatgccttctcaatgcagctgtgaagatattaggctgaattcatgccactcagattgtaagagctgtatgtgcacacgctcacagccaggacagtgtcgttgtcttgacaccaacgact

SEQ ID NO: 65668 - DNA, 441 bp, Glycine max
ggcacaagtgagtttgttgatcgagataactagaaacagtgtgatgaaaatgaaggtccttgttttcttcgttgctacaattttggtagcatggcaatgccatgcgtacgatatgttccctcttcgaatgaacactggctatggtgcccgtactccggaggtgaaatgcgcaagttggaggcttgctgtggaagcacacaacatctttggctttgagaccattcctgaagagtgcgttgaagcaacaaaggaatacatccatggcgaacaatatagatcagactccaaaacagctaaccaacaagcttactcttatgccagagacctcgaagtccatcccaaggacacatttgtgttcagtatagatggcaccgtactctctaatattccatactacagaaaacatggatatggcgtggagaaatttaactttaccttgta

SEQ ID NO: 65669 - DNA, 61 bp, Glycine max
gtggatatgcaatagaatgttcacaatttagtttaatttataaataaaaagtaatatgcac

SEQ ID NO: 65670 - DNA, 160 bp, Glycine max
  unsure (1)..(160): unsure at all n locations
tgggatagaaagaaaggacggtggccggtggcggtgagtggtgtgtttgggaaagcgtaagagtaagaatggagggtggagaggaaggattggncatgatgtctgaatgatcggagtttcagtacccgtgcatggcattggataaatttactgttcacgt

SEQ ID NO: 65671 - DNA, 311 bp, Glycine max
  unsure (1)..(311): unsure at all n locations
cgattttgtgtatatgcaatggcttggagacaagatagggcaagatatgaatgaaaagtagtgatcgcaacaatttatgatcaacctaaagggtcctactgctatgtgtacctgatccagagtaacctacgcaaccatgcatgatactaactctactattaacaaacctaatttaaattcaatagtcaacgttatacaatgntgtcgattttgaaatcactctcttgatccagcttaatctgattgtaacacatactcgtttaggcagctatcattgtacccaatattcttggtatctatagccctatcca

SEQ ID NO: 65672 - DNA, 123 bp, Glycine max
ttgtgcagaaagataaacaaacaaataagtaaaggggaaaaaaccgacgacaaagaaaggacaaaaaaaaaaaaaaaaaagcggccgttctagaggatcaaacttacctaccccttccttcca

SEQ ID NO: 65673 - DNA, 375 bp, Glycine max
gacagcaaaaacaattaataaagatgagtttgaggaacaacatggtggtgctaaaggtgtgtttgttgcttcttttccttgtgggggttacagctgcacgcatggaactgagcttcttcaaaagtgatcagtcatcaagttatgatgatgatgagtattcaaaaccatgctgtgatctctgcatgtgcacacgctcaatgcctcctcaatgcagctgtgaagatattaggctgaattcatgccactcagattgtaagagctgtatgtgcacacgctcacagccaggacagtgtcgttgtcttgacaccaacgacttctgctacaaaccttgcaagtccagagatgactagaaaaactaatagctctctaaatgga

SEQ ID NO: 65674 - DNA, 387 bp, Glycine max
gattcacacaactaactaagaaagtcgggcatgagccccccaaaaatgaagagcaccatcttctttgctctctttctcttttgtgccttcaccacctcatacctaccttcagccatcgctgatttcgtgctcgataatgaaggtaaccctcttgaaaatggtggcacatattatatcttgtcagacataacagcatttggtggaataagagcagccccaacgggaaatgaaagatgccctctcactgtggtgcaatctcgcaatgagctcgacaaagggattggaacaatcatctcgtccccatatcgaatccgttttatcgccgaatgccatcctttgagccttaaattcgattcatttgcagttataatgctgtgtgttggaatt

SEQ ID NO: 65675 - DNA, 59 bp, Glycine max
cggaattcacggatcgcagccaggcgtgcggtgagaagacgacagaagacaacaaaaag

SEQ ID NO: 65676 - DNA, 72 bp, Glycine max
ttgtagatcaaagattacttactcctgcatgctacgacataattcttctattatggcacctaaattaaatta

SEQ ID NO: 65677 - DNA, 396 bp, Glycine max
ccgacagaaggggatatagattagtgttttctgcacgcctgattggagtggttctcgttgccgatgccctatattttggtgctcaacaaattgggcgctatcttcaggatatctggacccattgaggtatgcttttggttaatcctcacggagacaatattccttgtggataagcatatgcagacagcaggctaaggaactcaattttgaatgctgacccttggcagaggctttccgagattatcataattgcccccatcttttctcactactggattttaatgtaagtttcttccatgtagctatgtattaataccttttttgtacaaatggttgtgtttttcttagaaatttccttaacaaaaaaataataataattgtgtcctattactgtcc

SEQ ID NO: 65678 - DNA, 239 bp, Glycine max
gattcacacaactaactaagaaagtcttccatagccccccaaaaatgaagagcaccatcttctttgctctctttctcttttgtgccttcaccacctcatacctaccttcagccatcgctgatttcgtgctcgataatgaaggtaaccctcttgaaaatggtggcacatattatatcttgtcagacataacagcatttggtggaataagagcagccccaacgggaaatgaaagatgccct

SEQ ID NO: 65679 - DNA, 154 bp, Glycine max
  unsure (1)..(154): unsure at all n locations
gatatctttcttcacagaagaaaaaagaagaagaagagtgggttgtgaaagaanccaacatggtgnnngtgctaaagggnnngtgtttggtggctttacttttccttgggtggggggtacctatctanngtgccannacttgagagggctgagt

SEQ ID NO: 65680 - DNA, 317 bp, Glycine max
gccgtccagactaccacacacatcttttattactacaacaaacgatctcctgcagcagaaatagataattttttatcataacaacacctatttcattcattgcattctcatatttcatccttagcaatttttcaacacagacaaccaaatcaaggcaacttctcttctattattattttcaaccaatcataatattcataactattataatctaataacactaattcccatttcatttagatttcccataatttacatatattgaaatgcattcctaccatttatttttatccttaatttctgaataatatattaac

SEQ ID NO: 65681 - DNA, 303 bp, Glycine max
aagactacttctgattatgcacctaaatacttaacatggcccttgttctatatttattagcactatttaaacccctaccttgttagttatctccttattctgaaccttaacttactacataccttacgacatcctccaagacgagttctatcagattaggcaatctatcatgaacgacctgatatactacacttttattgacattactggaatatttagcgacttacttcgttacgaaccttgccataacactttaactattacttccattccaagatccaatgcattctataatggacttga

SEQ ID NO: 65682 - DNA, 88 bp, Glycine max
gttaacaacataacatatcaaaaacagacgacagatacactcttttagttcattaacctcttcagaaaaaacaactacaacatctaat

SEQ ID NO: 65683 - DNA, 70 bp, Glycine max
ttaatactactgatagatgccgatgcaagaagacgactgaaagggggggctgggagaatactacagacgg

SEQ ID NO: 65684 - DNA, 140 bp, Glycine max
ctctcttgttcttccaggggggcaacggaaggggtacacccgtccagtggaaaaccaccgcttgtctgcgaacaagtttcgggcgcaagctccgcctgttgccagattgtgactataaccattgctcaatataatatact

SEQ ID NO: 65685 - DNA, 394 bp, Glycine max
ggcacaagtgagtttgttgatcgagggaactagaaacagtgtgatgaaaatgaaggtccttgttttcttcgttgctacaattttggtagcatggcaatgccatgcgtacgatatgtcccctctccgaatgaacactggctatggtgcccgtactccggaggtgaaatgcgcaagttggaggcttgctgtggaagcacacaacatctttggctttgagaccattcctgaagagtgcgttgaagcaacaaaggaatacatccatggcgaacaatatagatcagactccaaaacagttaaccaacaagcttacttttatgccatagacctcgaattccatcccaaggacacatttgtgttcagtatagatggcaccgtactctctaatattccatac

SEQ ID NO: 65686 - DNA, 287 bp, Glycine max
agggatagcaaccacagcacgcaatattttcagctgggtcaggttctctctttgtgcgaagattggaaaattgcacatctatgtttcactacttgctgctgcatttgtatttgagataggagtagctgaatgcacataatagaaagtaaacccttttgaaaatggtccggccttttatatgttcccagccttaataccacatcgttcgaatttgataactctttactgggtatgcaaaattcaatttaactgtccggcgttttcaaagtgatgtcttgaaataacct

SEQ ID NO: 65687 - DNA, 386 bp, Glycine max
tcatgttatattttgttcatgctttttataggaaattgaggtaatttgcttatactttttttgagtttaaatattagattttaaatatattgtgaaagactaaaataaactatttaatttaatttaaaagaaaattcaattttgattagataaaaaaaaaaaacccatttaataaaagtgaaccttgtgtttgattgtgtggaaatgagggggcaaggaaagaagatcaaagaaaggagaggatctccagttgagtgcatcatttggtatgcaagaaatgagaaaataaaatttttatgtaggtgaatttaataaaataaattttaattttaaattaataaaaataaaataaaataaaataaataaaaaattttaaattgtatccc

SEQ ID NO: 65688 - DNA, 190 bp, Glycine max
  unsure (1)..(190): unsure at all n locations
tggcttcttcttcctgctcctcctccttgtctttgcttcccnggtggtggtgctctctgggggctgtgtgtgtgtgtcnccttgccccggtttccttggtttgtgnttttgngtccccctctgtgctttggtctgctggttcgctcgtttctccggtggccggtgccttggcttccgccgccgctgcttt

SEQ ID NO: 65689 - DNA, 376 bp, Glycine max
  unsure (1)..(376): unsure at all n locations
ggaagagtgaagagaatggctcccaaaggtttggcctttctggctgtgttaatatgcgtttcagcactgtcactgagtccttctgttgcgggggaagggcaaaataatggccttgttatgaacttctacaaggaatcatgccctcaggctgaaggcatcatcacagaacaagtcaagcttctctacaagcgccacaagaacactgctttctcctggctcaggaacatcttccatgactgtgctgttcagagttgtgatgcttcactgttgctggactccacaagaaggagcttgtctgagaaggaaacagatagaagctttgggttgagaaatttcangtacattgaaaccatcaaagaagctttggaaagagaat

SEQ ID NO: 65690 - DNA, 273 bp, Glycine max
ttcgggggccagatgacaacagaaggggaacacttggtttatcaagagaaaaaataccaaccatggcaaccatttctactgaccaaccaagaagatcctacttctatggaacctcctatggagcaccctatggaaccacctatgagaccaacagcagcattaacaacccttcttcacgccaaaccgtgaagttcataactgctgcaactattggcatcacactcttactactgtctgggtcgaccctaacaagcactgtaataggtttgatca

SEQ ID NO: 65691 - DNA, 104 bp, Glycine max
ggaatcgtcgaggtatttattcaaataggtataatccacggaattgcggaaattttagaaatcttaaaaatgaaagaattcgagataataactataagtatacg

SEQ ID NO: 65692 - DNA, 316 bp, Glycine max
aggacagcagagacaattaataaagatgagtttgaagaacaacatggtggtgctaaaggtgtgtttgttgcttcttttccttgtgggggttacagctgcacgcatggaactgagcttcttcaaaagtgatcagtcatcaagttatgatgatgatgagtattcaaaaccatgctgtgatctctgcatgtgcacacgctcaatgcctcctcaatgcagctgtgaagatattaggctgaattcatgccactcagattgtaagagctgtatgtgcacacgctcacagccaggacagtgtcgttgtctagacaccaacgac

SEQ ID NO: 65693 - DNA, 314 bp, Glycine max
gacagcaaaaacaattaataaagatgagtttgaagaacaacatggtggtgctaaaggtgtgtttgttgcttcttttccttgtgggggttacagctgcacgcatggaactgagcttcttcaaaagtgatcagtcatcaagttatgatgatgatgagtattcaaaaccatgctgtgatctctgcatgtgcacacgctcaatgcctcctcaatgcagctgtgaagatattaagctgaattcatgccactcagattgtaagagctgtatgtgcacacgctcacagccaggacagtgtcgttgtcttgacaccaacgac

SEQ ID NO: 65694 - DNA, 375 bp, Glycine max
gacagcaaaaacaattaataaagatgagtttggggaacaacatggtggtgcgaaaggtgtgtttgttgcttcttttccttgtgggggttacagctgcacgcatggaactgagcttcttcaaaagtgatcagtcatcaagttatgatgatgatgagtattcaaaaccatgctgtgatctctgcatgtgcacacgctcaatgcctcctcaatgcagctgtgaagatattaggctgaattcatgccactcagattgtaagagctgtatgtgcacacgctcacagccaggacagtgtcgttgtcttgacaccaacgacttctgctacaaaccttgcaagtgcagagatgactagaaaaactaataactctctcaaatgg

SEQ ID NO: 65695 - DNA, 181 bp, Glycine max
acgtttccgcacacgtttcctcccacccttccttccggttgagagaggccgccaaagggttccggttgcaaaaacacccagaaggtccggttgcaagaagccaacagaaggattttgagttgtgataacctcaaaattctaaataaaatgaaataaaaatgaccaacacacaatatttcat

SEQ ID NO: 65696 - DNA, 103 bp, Glycine max
ggtcgttggattgctttatttttttggcattcattcatacccaacaacttaacaactcctccaaccctcctagactacgaaaaaacaaaaaaagacaagcgat

SEQ ID NO: 65697 - DNA, 110 bp, Glycine max
acaacaaaacattcttctgctaaaagactacataatggtacttttgcttgaagacgacacaactgtacgcatgcaacaatacttcttaacaatacgactgttataagact

SEQ ID NO: 65698 - DNA, 266 bp, Glycine max
ggaagaaagagagagaaagagaggagggagttttggttggttgtttttcttgtgtgagaaagaaaaaagaaaaaaaaaaaaccttcctgtagctaaacaacaaaaaccaagtcttcattggcaacaagaagattattattttgatatgatttgtttatttgccacccaatgattgactttgcctagctgctgctacgagagaagatattggtggtggtgctagcaatagcaagttcaaacctctttcaagtaatttataagttgag

SEQ ID NO: 65699 - DNA, 275 bp, Glycine max
gattcacacaactaactaagaaagtcttccatagccggccaaaaatgaagagcaccatcttctttgctctctttctcttttgtgccttcaccacctcatgcctaccttcagccatcgctgatttcgtgctcgataatgaaggtaaccctcttgaaaatggtggcacatattatatcttgtcagacataacagcatttggtggaataagagcagccccaacgggaaatgaaagatgctctctcactgtggggcaatctcgcaatgagctcgacaaa

SEQ ID NO: 65700 - DNA, 392 bp, Glycine max
  unsure (1)..(392): unsure at all n locations
gaagactacagaangggacagcaaatacaattaataaagatgagtttgaagaacagcgtggtggtgctaaaggtgtgtttgttgcttcttttccttgtgggggttacagctgcacgcatggaactgagcttcttcaaaagtgatcagtcatcaagttatgatgatgatgagtattcaaaaccatgctgtgatctctgcatgtgcacacgctcaatgcctcctcaatgcagctgtgaagatattaggctgaattcatgccactcagattgtaagagctgtatgtgcacacgctcacagccaggacagtgtcgttgtcttgacaccaacgacttctgctacaaacctttgcagtccagaaatgactagaaaaactaatagctctctcaaaatga

SEQ ID NO: 65701 - DNA, 189 bp, Glycine max
  unsure (1)..(189): unsure at all n locations
aattttaaacatcctttgcgccggctttttcttcacctctttctcacccacaaaatcaatttncctcttttcctccaaatcaaccaccccaatttcctacacccttcaatcaacattttcaaatccaaaatctacaccttctcctcaacctctttttctaaattcaattcacataataaatatttaaat

SEQ ID NO: 65702 - DNA, 244 bp, Glycine max
  unsure (1)..(244): unsure at all n locations
tataggattatttggaatttcttggttatgtgctcaatggcttcttaagaggaaagtcagatacttgatagtcacatttactttaccccgcactaaacttggatatttataatattattcttactgtagtttatcaaaaaatgttgttctcactatctctttccgttgtactactttttttccagtcttccttggcagggactaaaggctggcacccnnnnaaaatnatattttttttaatttt

SEQ ID NO: 65703 - DNA, 359 bp, Glycine max
gacggcaaaaacaattaatggagatgagtttgaagaacaacatggtggtgctaaaggtgtgtttgttgcttcttttccttgtgggggttacagctgcacgcatggaactgagcttcttcaaaagtgatcagtcatcaagttatgatgatgatgagtattcaaaaccatgctgtgatctctgcatgtgcacacgctcaatgcctcctcaatgcagctgtgaagatattaggctgaattcatgccactcagattgtaagagctgtatgtgcacacgctcacagccaggacagtgtcgttgtcttgacaccaacgacttctgctacaaacctttgcagtccagagatgactaagaaaaacta

SEQ ID NO: 65704 - DNA, 265 bp, Glycine max
ggttctagtgtatgtgattgttgtgactcggtggtcttcgtcgttatcttcttcttttgttgtttgtgtgtttgttttttctctcacctgaaaatgtcttgctgcggtggtaactgtggttgcggaagcgcctgcaagtgcggcaacggctgcggaggctgcaagatgtacccagacttgagctacaccgagtcaaccaccaccgagaccttggtcatgggagtggcaccagttaaagctcaattcgagagtgctgaaatgggtg

SEQ ID NO: 65705 - DNA, 272 bp, Glycine max
gacagcaaaaacaattaataatgatgagtttgaagagcggcatggtggtgctaaaggtgtgtttgttgcttctttttcttgtgggggttacagctgcacgcatggaactgagcttcttcaaaagtgatcagtcatcaagttatgatgatgatgagtattcaaaaccatgctgtgatctctgcatgtgcacacgctcaatgcctcctcaatgcaaatgtgaagatattaggctgaattcatgccactcacattgtaagagctgtatgtgcaca

SEQ ID NO: 65706 - DNA, 231 bp, Glycine max
tttttcaacaacaaacaaaaaaaaaaagataaggcgacatcttcgaagaactacatcttctttctcaacttgttttacttgctccttttccatctgcccacatctaacagagcctacttaaaactgaacaatcatgaccttctcatgaagatgaatcatcataaacactcaaatatttctgaatgtgcacacccttactgccatctaaatgcatgtacaaagatataactt

SEQ ID NO: 65707 - DNA, 373 bp, Glycine max
tgattcacacaactaactaagaaagtcttccgtggccccccaaaaatgaagagcaccatcttctttgctctctttctcttttgtgccttcaccacctcatacctaccttcagccatcgctgatttcgtgctcgataatgaaggtaaccctcttgaaaatggtggcacatattatatcttgtcagacataacagcatttggtggaataagagcagccccaacgggaaatgaaagatgccctctcactgtggtgcaatctcgcaatgagctcgacaaagggattggaacaatcatctcgtccccataccgaatccgttttatcgccgaaggccatcctttgagccttaaattcgattcatttgcagttattatgc

SEQ ID NO: 65708 - DNA, 106 bp, Glycine max
gcatgcaactgaataattaagaaaagccatttccatagcagcctaagaaaatgaagagcactagcttgttcgctatctttctactttgcgccttcacctcatacct

SEQ ID NO: 65709 - DNA, 236 bp, Glycine max
tatgtctgctagaaaacaacaaaaggatacagggtggagtttacgacaaactgcttcttcttccacaagacgacatacgggcttttaaaccaaaatatgaatgttgacagagcctactaaaagctaattaaacttatcctgctgctttagaggatccatgattacctacgcgtccattcatcattatacctcttttatcttgtatcctaaatcaaatacactgtccgaccttttac

SEQ ID NO: 65710 - DNA, 250 bp, Glycine max
acaaaaaaacaaaaaaggggatttcctaaacaattactacaaatgagtacgacgaacaatttactactactaaactcctctttaatactacttcacattggagcggttacaactatacgaatgaaactgatctctttcaaaagacaacagacatcaacttatgatgataaacactatatcaaaaccatcctgagatctctacatatgcacacgcttaatacctccttaatgaaggtgacaagatattaaa

SEQ ID NO: 65711 - DNA, 239 bp, Glycine max
  unsure (1)..(239): unsure at all n locations
ccgacccaggcgtacgggtactcntagacaaacgcgtgggattctttcaaagaagacaacaaaaggggcttcggaggttatatacaataaaaaaacactagccccaacaacaacattgtggtgctcaatgtctatttatagcttcttttactcatgggtgatacatctcctcacattgaactgaactctttcaaaagtgatcagtcatattatatgatgatgatatacttcaaaaccat

SEQ ID NO: 65712 - DNA, 363 bp, Glycine max
gcaaccataacgacaagacgacatttctataccaattcattaagacgacagaggtgtacggtttctagaagacaacagactgttactcctttcttaagactacagagggtaccggttgacacatgacgacagactggttacagatgcgataagacaacagattgttactgttgtgagaagactacaaacatgctctgatctctgaatacgaccaaactttacgccttctaaatgacgacagaaggatatttagttgattaatagccacatctatttttattattaatataaccacacgcttacagccaagacattgaatctttattttaactcgattatttttatacatacctttcaaattca

SEQ ID NO: 65713 - DNA, 168 bp, Glycine max
gacccacgcgtcgtcggctccaacaaaaagacacatttgatcagctctacaaatcaacagaagggacggtttcagaagatacatatcttactattcaaactaaactacacatggatacggctgcaaaaatactacataggggtaccgatgctaaaatacttcacaatg

SEQ ID NO: 65714 - DNA, 302 bp, Glycine max
gattcacacaactaactaagaaagtcttccatggccccccaaaaatgaagagcaccatctcctttgctctctttctcttttgtgccttcaccacccatacctaccttcagccatcgctgatttcgtgctcgataatgaaggtaaccctcttgaaaatggtggcacatattatatcttgtcagacataacagcatttggtggaataagagcagccccaacgggaaatgaaagatgccctctcactgtggtgcaatctcgcaatgagctcgacaaagggatggaacaatcatctcgttcccata

SEQ ID NO: 65715 - DNA, 319 bp, Glycine max
gatttcaaaaacaattaataaagatgagtttgagaacaacatggtggtgctaaaggtgtgtttgttgcttcttttccttgtgggggttacagctgcacgcatggaactgagcttcttcaaaagtgatcagtcatcaagttatgatgatgatgagtattcaaaaccatgctgtgatctctgcatgtgcacacgctcaatgcctacttaatgcagctgtgaagatattacgctgaattcatgccactcagattgtaagagctgtatgtgcacacgctcacagccaggacagtgtctttgacttgacaccaacgacttctgc

SEQ ID NO: 65716 - DNA, 125 bp, Glycine max
  unsure (1)..(125): unsure at all n locations
gatataatttattaataattagaactttcttttttcttaaaaaaaaaaagtaaataaaaagatttgatagaatcgtaatttcaattcgattatatagatacctggannaaaagnnanaagttaat

SEQ ID NO: 65717 - DNA, 234 bp, Glycine max
atttacatccttatccttcccaattactaaagcgactctcattaatatctcattcctattcctatatcctaacccttaggctcattcattcttctactcaaaacaaaacatgtctcacacacaacccatctaatctcccccttcaacacaacaacttactgttatacaccttccgccacattattcaatccactatttcttcactctcattatagtcagtaacatatattcact

SEQ ID NO: 65718 - DNA, 357 bp, Glycine max
tgacagcaaaaacaattaataaagatgagtggggggaacaacatggtggtgctaaaggtgtgtttgttgcttcttttccttgtgggggttacagctgcacgcatggaactgagcttcttcaaaagtgatcagtcatcaagttatgatgatgatgagcattcaaaaccatgctgtgatctctgcatgtgcacacgctcaatgcctcctcaatgcagctgtgaagatattaggctgaattcatgccactcagattgtaagagctgtatgtgcacacgctcacagccaggacagtgtctttgtcttgacaccaacgacttctgctacaaaccttgcaagtccagaaatgactagaaaaac

SEQ ID NO: 65719 - DNA, 412 bp, Glycine max
  unsure (1)..(412): unsure at all n locations
acggcttcanaagacaaaaaagcgactttaaaaacaataaataatataaggaggcgaaaatcttaaagtacctaaagtcctttttatccctcctttcctttgaggggttaccacatcaccccatgaaccatacctctttaaaaattaaccagcattaaattaataatattaataataatcaaaacccatctcttaacctttcacaatcccacccctaataccctcctaatacaattttttaaaaaattacctcaatataatcctcactcaaattgtaaaaccctgtatttaccacctcctcacatcacaaaacatttgccactatcttatacactaacaatcttatcttataacctttcatattcccatataattatcttaaaatactttatttctttttttttaaattaaa

SEQ ID NO: 65720 - DNA, 254 bp, Glycine max
gacttcaaaaacaattaataaagatgagtttggagaacaacatggtggtgctaaaggtgtgtttgttgcttcttttccttgtgggggttacagctgcacgcatggaactgagcttcttcaaaagtgatcagtcatcaagttatgatgatgatgagtattcaaaaccatgctgtgatctctgcatgtgcacacgctcaatgcctcctcaatgcagctgtgaagatattaggctgaattcatgccactcagattgt

SEQ ID NO: 65721 - DNA, 350 bp, Glycine max
  unsure (1)..(350): unsure at all n locations
tggcaatctgttgttttccatgnaagatttttggcgttggacgagacatttacatgtataggcttcaaatggagttattatttggcatatttttgtggttctttttttattatgtgtattgagataacataatacatattctgtgctatgtgtaagcacatcttcaacgagcaaatggtcattacatagaattcttacaacaaaattgacagaaacactccagggcccaaattcccttggttatcaaatgataaaaatgctattttttttttgctttttttggtattggaaggagaattaactttgttattttaccctacgtttttttttagcctaaattaactgatttt

SEQ ID NO: 65722 - DNA, 388 bp, Glycine max
gacagcaaaaacaattaataaagatgagtttgaggagcaacatggtggtgctaaaggtgtgtttgttgcttcttttccttgtgggggttacagctgcacgcatggaactgagcttcttcaaaagtgatcagtcgtcaagttatgatgatgatgagtattcaaaaccatgctgtgatctctgcatgtgcacacgctcaatgcctcctcaatgcagctgtgaagatattaggctgaattcatgccactcagattgtaagagctgtatgtgcacacgctcacagccaggacagtgtcgttgtcttgacaccaacgacttctgctacaaacctttgcagtccagagatgactagaaaaactaatagctctcttaaatggacgaagccccttt

SEQ ID NO: 65723 - DNA, 208 bp, Glycine max
tgcgatagtaggaaaaccaactcaatctagggtatgggcaataacaaaaccaaactattcaaccccttcatacctaccggatacccctcaggtatgctcccaaatccaaccatcacagattctcaacactcccaggattaagattaattatcaaaccgctttcactaagaccatactacctacgtgcactgtcactgtaaacattatt

SEQ ID NO: 65724 - DNA, 364 bp, Glycine max
ggttttataaaatatcgacgcaaaaacacgctctgctacactatcctgccattcaacacgatctgtccagtgattccgctctccgtcaagtctgctcatggtgaagaatcacgaggccatccgccggtgaagaatcactaggccatccgccggtgaagaatcgctcgattcgtttggaaatcgcgattcaaacacgattcatcctcgatgcagatattcaaccacgattcaggaacaaaaaccacacaagctccaattcatattgatacttgatggacattgatacaagccctctatccgtatagtaaattctacgatacctaacttaccaaggacagttctactttttaatttgcagttcctt

SEQ ID NO: 65725 - DNA, 306 bp, Glycine max
  unsure (1)..(306): unsure at all n locations
tggactgtgcaaaaacccaattaataaagaatgagtgtgagagaacaatctatggtggtgctttaaaggtgtgtttgttgcttttcttttcctttgtnngggggttacangnnctgcacgcnnatggaactgagctttttcttcaaaagnntgatcagtcatttcaagttatttgatgnnntgatgagnntattcaaaacncnnatgcttgtgatctttcttgcatgtngnccacacgcttcannatgccttccttcaattgcagctttgtgaaagaatattaangcttgaaattcaattgccact

SEQ ID NO: 65726 - DNA, 114 bp, Glycine max
  unsure (1)..(114): unsure at all n locations
gggggcatcattgtgtagttnnngctgatcgagaaataacctagaaacagggtgtgtattgaaannatgaaggtcncnnttgttttctttttcgttgcttacanannttttggt

SEQ ID NO: 65727 - DNA, 189 bp, Glycine max
aaaaaactcttccataccccccccggcattattatcaccatcatccctcccctctatctctttttttccttcaccacctcatacctaccttcatccattccctatttctcactccataataaaactaactcctctttcaaatatttccacctattatatctttttacacataacaacatctctttttat

SEQ ID NO: 65728 - DNA, 210 bp, Glycine max
gattcacacatctaactaagaaagtcttccatagcccgccggaaatgaagagcaccatcttctttgctctctttctcttttgagccttcaccacctcatacctaccttcagccatcgatgatttcgtgctcgataatgaaggtaaccctcttgaaaatggtggcacatattatatcttgtcagacataacagcatttggtggaataagag

SEQ ID NO: 65729 - DNA, 273 bp, Glycine max
gggggggggggatatttaacatgagacagagattaatatgaaaatgaagaaaaaatacaaacaaaaaataaattttaggaaactaaaagctgaaaaaaaaaaaaaaaaaacttctgatatatatgcagaataagaagagaaaactaggtagttgcaaattggtttaatattagactgtttaaacaagctaagaagaagagggagaaaaattaattggaaacttaataaacagaatagtaaattttaaatttgtcaaaaaagagtcttttaact

SEQ ID NO: 65730 - DNA, 361 bp, Glycine max
gattcacacaactaactaagaaagtcttccatagccccccaaaaatgaagagcaccatcttctttgctctctttctcttttgtgccttcaccacctcatacctaccttcagccatcgctgatttcgtgctcgataatgaaggtaaccctcttgaaaatggtggcacatattatatcttgtcagacataacagcatttggtggaataagagcagccccaacgggaaatgaaagatgccctctcactgtggtgcaatctcgcaatgagctcgacaaagggattggaacaatcatctcgtccccatatcgaatccgttttatcgccgaaggccatcctttgagccttaaattcgattcatttgc

SEQ ID NO: 65731 - DNA, 204 bp, Glycine max
acgcgtccgaagacgacgacaggatgcttctgctgcaagacgacgacagggggggacagcaactacctttgatagtgatgagtatgaagaacaacatggtggggctcaaggtgtgtgcgctgcttctattccgtgccgtggttacatcatacctccctgaactgatcgttttttaaagggatcattcttaatgttacgatgttg

SEQ ID NO: 65732 - DNA, 435 bp, Glycine max
  unsure (1)..(435): unsure at all n locations
acgacagaagggggaccaacgcaactcgattcctagcctcttcacgttgttcttttaagcttgttttaacggctcgaagttcccggccagcttgttttcagcttctttgacggctccaacttcgcgactcgaacgcgacgaggtcgtgaagaaggatattgttcgatcacttttgccgaaatcagggaatttcttccttttctgaacaacaggtactgggttgcaaacgggttgtgaaggttcattaaaatactgggtatgtagacaacacaccaacacagagactgctccaggtcattggtaagcataagctcctgttcatctatattttctttgaaacatgtaattaattaaattactttgcaagatttgtagatacttctgcttaattattatatggatgataaattntggaactgattagatgttaatatc

SEQ ID NO: 65733 - DNA, 51 bp, Glycine max
ggccttgaggtgtgaggaggctccattggatgttggcatctagggtggtgg

SEQ ID NO: 65734 - DNA, 383 bp, Glycine max
gattcacacaactaactaagaaagtcttccatagccccccaaaaatgaagagcaccaccttctttgctctctttctcttttgtgccttcaccacctcatacctaccttcagccatcgctgatttcgtgctcgataatgaaggtaaccctcttgaaaatggtggcacatattatatcttgtcagacataacagcatttggtggaataagagcagccccaacgggaaatgaaagatgccctctcactgtggtgcaatctcgcaatgagctcgacaaagggattggaacaatcgtctcgtccccatatcgaatcccgtttatcgccgaaggccatcctttgagccttaagttcgattcatttgcagttataatgctgtgtgttgga

SEQ ID NO: 65735 - DNA, 377 bp, Glycine max
gattcacacaactaactaagaaagtcttccatagccccccaaaaatgaagagcaccatcttctttgctctctttctcttttgtgccttcaccacctcatacctaccttcagccatcgctgatttcgtgcccgataatgaaggtaaccctcttgaaaatggtggcacatattatatcttgtcagacataacagcatttggtggaataagagcagccccaacgggaaatgaaagatgccctctcactgtggtgcaatctcgcaatgagctcgacaaagggattggaacaatcatctcgtccccatatcgaatccgttttatcgccgaaggccatcctttgagcctttagttcgattcatttgcagttataatgctgtgt

SEQ ID NO: 65736 - DNA, 145 bp, Glycine max
tgggactataagtcaatctgataactaacatatccggatactttatattgacccaatgttatatcatcttaatccattttctaccatcacattattaattacttattaaatctctattttctttatccactttaaatttaaacct

SEQ ID NO: 65737 - DNA, 141 bp, Glycine max
gagcacaagccagagcacaaagaggggtgcctagacaaagtcaaggacaagatccatggtgagggcggctcctctaagggctagaagattaagaaggcgtacatgcagaatgatcatggtcatgtgcatggccatgacttc

SEQ ID NO: 65738 - DNA, 123 bp, Glycine max
tggacacggctgcgactagacaaacgatgggttcgctgaccgtagacgacttacgggtaatgctgctttaagacgacggaatggtaccgatgagggaagaccacataagggttctcaacagtt

SEQ ID NO: 65739 - DNA, 95 bp, Glycine max
tggagacttctataacaattaatatagatgagtctggggaacaacatgatggtgctaaaggtgcatctgctgcgtctattccctgtgttgcttac

SEQ ID NO: 65740 - DNA, 182 bp, Glycine max
caagcttgtggtggatgatgcttgttcataatgaaatcagaaatatggttgtagcctatgattttgattttcctaaagcaccttaagtctcgttaagtatccaaagaataataaagaagtatcaaatgcgattaataatgtatgaaatgaggtttgtatagcctattaaaaaatctttttat

SEQ ID NO: 65741 - DNA, 139 bp, Glycine max
gacagcaataacaattaataaagatgagtttgaagaacaacatggtggtgctaaaggtgtgtttgttgcttctttgtcttgtgggggttacagctccacgcatggaacttatctttttcagatgtgatcagtcattcat

SEQ ID NO: 65742 - DNA, 413 bp, Glycine max
gacagcaaaaacaattaataaagatgagtttgaagaacaacatggtggtgctaaaggtgtgtttgttgcttcttttccttgtgggggttacagctgcacgcatggaactgagcttcttcaaaagtgatcagtcatcaagttatgatgatgatgagtattcaaaaccatgctgtgatctctgcatgtgcacacgctcaatgcctcctcaatgcagctgtgaagatattaggctgaattcatgccactcagattgtaagagctgtatgtgcacacgctcacagccaggacagtgtcgttgtcttgacaccaacgacttctgctacaaaccttgcaagtccagagatgactagaaaaactaatagctctctcaaatggacgaagcccctttaggctttgtttgttatgttaaggga

SEQ ID NO: 65743 - DNA, 308 bp, Glycine max
gacagcaaaaacaattaataaagatgagtttgaagaacaacatggtggtgctaaaggtgtgtttgttgcttcttttccttgtgggggttacagctgcacgcatggaactgagcttcttcaaaagtgatcagtcatcaagttatgatgatgatgagtattcaaaaccatgctgtgatctctgcatgtgcacacgctcaatgccttctcaatgcagctgtgaagatattaggctgaattcatgccactcagattgtaagagctgtatgtgcacacgctcacagccaggacagtgtcgttgtcttgacacc

SEQ ID NO: 65744 - DNA, 262 bp, Glycine max
ggttctagtgtgtgattgtttgttgttgtaactcgttcttcttcttttgttgttctgtgtttgtgtttgttttttctctcacctgaaaatgtcttgctgcggtggtaactgtggttgcggaaactcctgcaagtgcggcaacggctgctgaagctgcaagatgtacccagacttgagctacactgagtcaaccaccaccgagaccttggtcatgggagtggcacctgttaaggctcaatttgagggtgctgaaatgggtgtg

SEQ ID NO: 65745 - DNA, 329 bp, Glycine max
gacagcaaaaacaattaataaagatgagtttggggaacaacatggtggtgctaaaggtgtgtttgttgcttcttttccttgtgggggttacagctgcacgcatggaactgagcttcttcaaaagtgatcagtcatcaagttatgatgatgatgagtattcaaaaccatgctgtgatctctgcatgtgcacacgctcaatgcctcctcaatgcagctgtgaagatattaggctgaattcatgccactcagattgtaagagctgtatgtgcacacgctcacagccaggacagtgtcgtcgtcttgacaccaacgacttctgctacaaacct

SEQ ID NO: 65746 - DNA, 222 bp, Glycine max
caacacaacgggctgggataccaggggcgctaagacaagatgagacgcagtgggctgatgctcatgaagggtgcatacccagcacctgttccaatgtacaagacctaacaaacaacacgacattcgatcagcattgcacaaacaccacaaccttaattctggcaccataaccctaactttaaaagctggagctttcgatgattcaatcttacgtactcatgg

SEQ ID NO: 65747 - DNA, 409 bp, Glycine max
gattcacacaactaactaagaaagtcttccatagccccccaaaaatgaagagcaccatcttctttgctctctttctcttttgtgccttcaccacctcatacctaccttcagccatcgctgatttcgtgctcgataatgaaggtaaccctcttgaaaatggtggcacatattatatcttgtcagacataacagcatttggtggaataagagcagccccaacgggaaatgaaagatgctctctcactgtggtgcaatctcgcaatgagctcgacaaagggattggaacaatcatctcgtccccatatcgaatccgttttatcgccgaaggccatcctttgagccttaagttcgattcatttgcagttataatgctgtgtgttggaatttctaccgagtggtctgttgtgga

SEQ ID NO: 65748 - DNA, 262 bp, Glycine max
gcttgacaggttaaacaattaataaagatgagtttgaagaacaacatggtggtgctaaaggtgtgtttgttgcttctttttcttgtgggggttacagctgcacgcatggaactgagcttcttcaaaagtgatcagtcatcaagttatgatgatgatgagtattcaaaaccatgctgtgatctctgcatgtgcacactctcaatgccttcttaatgcatctgtgaagaatttatgctggattcatttccactcagattgtaag

SEQ ID NO: 65749 - DNA, 376 bp, Glycine max
gacagcaaaaacaattaataaagatgagtttgaagaacaacatggtggtgctaaaggtgtgtttgttgcttcttttccttgtgggggttacagctgcacgcatggaactgagcttcttcaaaagtgatcagtcatcaagttatgatgatgatgagtattcaaaaccatgctgtgatctctgcatgtgcacacgctcaatgcctcctcaatgcagctgtgaagatattaggctgaattcatgccactcagattgtaagagctgtatgtgcacacgctcacagccaggacagtgtcgttgtcttgacaccaacgacttctgctacaaaccttgcaagtccagagatgactagaaaaactaatagctctctcaaatgga

SEQ ID NO: 65750 - DNA, 432 bp, Glycine max
  unsure (1)..(432): unsure at all n locations
ggaattgaagcatataaatgaatatgttttgctgattataaaaaaagagtccaagcaacaacatctcataaaaagttagagatggcttcttcaagttttttatgtctgtgtttgatgtttgcttttgttgtggcttgctttgctcgtggcattcccacagaccaaccacccgtgctctacggagacacacacaagaatccatctacttcaaacattgagcatcatcaatggtcgggagacaaagttacacacccaatttcaacccgtgtcaagttctcaagtttcacagagaattcagaaaggatactgacagaggtagattatgacggtccacatacacacccaaatccaccttctcatgctcagaagtttcgattgtaaacattgtcttctcaatgacaannaaataataaaatattatgtcacaattta

SEQ ID NO: 65751 - DNA, 292 bp, Glycine max
  unsure (1)..(292): unsure at all n locations
gacagcaaaaacaattaataaagatgagtttgaagaacaacatggtggtgctaaaggtgtgtttgttgcttcttttccttgtgggggttacagctgcacgcatggaactgagcttcttcaaaagtgatcagtcatcaagttatgatgatgatgagtattcaaaaccatgctgtgatctctgcatgtgcacacgctcaatgcctnctcaatgcagctgtgaagatattaagctgaattcatgccactcagattgtaagagctgtatgtgcacacgctcacagacaggacagtg

SEQ ID NO: 65752 - DNA, 396 bp, Glycine max
gctggagcaagggtgtcaaatgatgcctgttgtgttatgtatgttaaattgtaagtcactgttagcttagaaagtagggattctgccaggtcatttgttgtgagattaataatattcacgaatgagtctacgtcaacttaggtttattttttctttcatctgttctttcttcttttttgggcgattacgttcatggaaatcaggttcaggttcaggaattggaatgtatttgctgtataaaatggttaaattagctacatgttctttctttcttttttagctggttaactagcttacacggatttatgggacatgtacgaacttgtgcatcctgaatgaggcttcttcatgaatcaatacattttgtaacattccagtactcgaattattttgagt

SEQ ID NO: 65753 - DNA, 290 bp, Glycine max
gacagcaaaagcaattaataaagatgagtttgaagaacaacatggtggtgctaaaggtgtgtttgttgcttcttttccttgtgggggttacagctgcacgcatggaactgagcttcttcaaaagtgatcagtcatcaagttatgatgatgatgagtattcaaaaccatgctgtgatctctgcatgtgcacacgctcaatgcctactcaatgcagctgtgaagatattaggctgaattcatgccactcagatcgtaagagctgtatgtgcacacgcttacagccaggacag

SEQ ID NO: 65754 - DNA, 374 bp, Glycine max
ttgggacagcaaaaacaattaataaagatgagtttgaagaacaacatggtggtgctaaaggtgtgtttgttgcttcttttccttgtgggggttacagctgcacgcatggaactgagcttcttcaaaagtgatcagtcatcaagttatgatgatgatgagtattcaaaaccatgctgtgatctctgcatgtgcacacgctcaatgcctactcaatgcagctgtgaagatattaggctgaattcatgccactcagattgtaagagctgtatgtgcacacgctcacagtcaggacagtgtctttgtcttgacaccaacgacttctgctacaaaccttgcaagttcagagattgactagaaaaacttattactctctc

SEQ ID NO: 65755 - DNA, 406 bp, Glycine max
gattcacacaactaactaagaaagtcttccatagccccccaaaaatgaagagcaccatcttctttgctctctttctcttttgtgccttcaccacctcatacctaccttcagccatcgctgatttcgtgctcgataatgaaggtaaccctcttgaaaatggtggcacatattatatcttgtcagacataacagcatttggtggaataagagcagccccaacgggaaatgaaagatgccctctcactgtggtgcaatctcgcaatgagctcgacaaagggattggaacaatcatctcgtccccatatcgaatccgttttatcgccgaaggccatcctttgagccttaagttcgaatcatttgcagttataatgctgtgtgttggaattcctaccgagtggtctgttgt

SEQ ID NO: 65756 - DNA, 400 bp, Glycine max
gctacacagagttagaattaaattagattataagtaaacgtagagttgactgaaagatacgaatggaaccgaacaagtgaaggattgcacaacacatagagatcggatgacaaaacattctcactacgaacaaaatgattgttaacagcaaatctacgcaatcaccgatgatcgtcaaaatcgatccttacatcgtattcatgacgactcatgctacaccgataccattcgacgatcacgacgtcatcaccaagatcgcaactcagccgactcagattcgcaaagcctgtactatcttcaaacgctgttgcgaccatcgcgattccggactcggcttcttaagaaatgccagtaccaacgtgcaaatcgtacacttaagtctggatgatcatttggcacg

SEQ ID NO: 65757 - DNA, 356 bp, Glycine max
gacacaactaactaagaaagtcttccatagcccggcaaaaatgaagagcaccatcttctttgctctctttctcttttgtgccttcaccacctcatacctaccttcagccatcgctgatttcgtgctcgataatgaaggtaaccctcttgaaaatggtggcacatattatatcttgtcagacataacaacatttggtggaataagagcagccccaacgggaaatgaaagatgccctcttactgtggtgcaatctcgcaatgagctcgacaaagggattggaacaatcatcttgtccccatattcaatatcgtttatcgcccaatgccattctttgagccttaaattcgattcatttt

SEQ ID NO: 65758 - DNA, 128 bp, Glycine max
gacagcaaaaacaattaataaagatgagtttgaagaacaacatggtggtgctaaaggtgtgtttgttgcttctttttcttgtgggggttacagctgctcgcatggaactgagcttcttcaaaagtgat

SEQ ID NO: 65759 - DNA, 396 bp, Glycine max
ggttctagtgtgtgattgtttgttgttgtaactcgttcttcttgttttgttgttctgtgtttgtgtgggttttttctctcacctgaaaatgtcttgctgcggtggtaactgtggttgcggaagctcctgcaagtgcggcaacggctgcggaggctgcaagatgtacccagacttgagctacactgagtcaaccaccaccgagaccttggtcatgggagtggcacctgttaaggctcaatttgagggtgctgaaatgggtgtgcccgctgagaacgatggctgcaaatgtggaccaaactgctcctgcaacccctgcacttgcaagtgaggtgttgggagagcaagcttcaagcagagatagcccttattaggaataatgataaactattaatgtgt

SEQ ID NO: 65760 - DNA, 330 bp, Glycine max
gacaactcaaacattctctccattggtccgtagagactcatcagtcatcaccatggccaagctagttttttccctttgttttctgcttttcagtggctgctgcttcgctttcagttccagagagcagcctcagcaaaacgagtgccagatccaaaaactcaatgccctcaaaccggataaccgtatagagtcagaaggagggctcattgagacatggaaccctaacaacatgccattccagtgtgccggtgttgccctctctcgctgcaccctcaaccgcaacgcccttcgtagacctttctacaccaacggtccccaggaaatctacat

SEQ ID NO: 65761 - DNA, 252 bp, Glycine max
cacacgcgtgagcacacgcgtccggaagacttcagaaagacgttgataaactaagcatggggggctactatggagtgaactagtagtatcagtgattacataagtgcgggtgtaatacatagtaggataagtatcaaagttatggatactatagactatagttaatgaagcttctatgatattaattgggcctatgataacttattaaccattatagactctgaatgataagcatcatcacctgtaaattat

SEQ ID NO: 65762 - DNA, 152 bp, Glycine max
cccactcgttcgtactgtatactacagaatgttacttctgctagaagactacagatggtgggatcggtttcaattaataaagatgagggtgaagaacaacatggtggtgctaaaggtgttgtttgatgcttcttttacttgtgtgtggttac

SEQ ID NO: 65763 - DNA, 199 bp, Glycine max
ataaaaaaaaaaaaaattagagaaggtttaaatcgcactctcgtctaggatacacacttacatacactctcatacgacatcttatctctcttatattgacacatctattcaatacacacttcctctcttttcacaattttgactctgaaaacacctttcgtttcacaattctatatcctttcatctcatatcccttttt

SEQ ID NO: 65764 - DNA, 260 bp, Glycine max
gataccatggcgtctaactctgcgtccctcttacttgctggatgcctatcgcccatcacttgcttcttctgcgtttcgtgctcaagctcaatctcatgctccagctccactttaagtactgtgaaaagaatgctactaatcttgaaagtagtgtagtggtaatattgctgccccttggtagaggagtgccaatacctttaagatccctcttatactcctgaccaatatcaagctgggactctttatataaaattttaatg

SEQ ID NO: 65765 - DNA, 238 bp, Glycine max
cccacgcgtgcgtacacgcgtgcgggcatttgtcagctcactcattaaggctgctgttaggggacaacataagggggggctaggtacattagttaatagagatgatgatgggtatcaacatcatcatgatggagctaaatgtgtgtatggtgctatctttcatttgttgaaggtactactagtgccttcttacatatgattaattttcagcagttcatgaattgtgatgattaataac

SEQ ID NO: 65766 - DNA, 342 bp, Glycine max
tcgacctacgacgtacgcacagtcgccagaagactactgaacgctactgcactgacaattaatacagatgcggttgaaggacatcatggtgcagctacaggtgtgacggacagcttcagatgcttatctggttcactactgcgctcatacaactgagctactctataagttatcagtcacggagacatcatgataacttacattcgtcaccatgctgctatctcttgctgtgatctctctcgatacttgttaaatgcgaccactgctatatctgatcacactgctgcgcctcagaatgtaagatctgcatgtgcacactctcattgccaggtcaatgcccct

SEQ ID NO: 65767 - DNA, 178 bp, Glycine max
ttgttggacacaactaacttataaagtgttacgggtccctcttataatgatgagcgccatcttttttgctctttatcttaaatgtaccttcactcatcatattcctacctttcatcctattcttatttcttgctctataattaatgtaacctttatgaaaattccttcacttattatt

SEQ ID NO: 65768 - DNA, 214 bp, Glycine max
gacatcaaacactatcaggaagggaaaattaaaaaaaaagcaggggaaagcggtcgttctagagtgattcaagcttactttcgctttcatgcgacgtcttatctgttttatattagtcactttaatgtaattcacttgtcatcgttttataatgttataactgggaataccttttctttatccatcttaattactattgattttattctttttt

SEQ ID NO: 65769 - DNA, 268 bp, Glycine max
gatttctaaaacaattaataaagatgagtttgaggaacaacatggtggtgctaaaggtgtgtttgttgcttcttttccttgtgggggttacagctgcacgcatggaactgtgcttcttcaaaagtgatcagttcatcaagttatgatgatgatgagtattcataaccatgctgtgatctctgcatgtgcacacgctcaatgccttctcaatgcatttttgaatatattatgccgaattcattccactcatattgtttgatcttgtatg

SEQ ID NO: 65770 - DNA, 406 bp, Glycine max
gatttacacaactaactaagaaagtcttccatagctccccaaaaatgaagagcaccatcttctttgctctctttctcttttgtgccttcaccacctcatacctaccttcagccatcgctgatttcgtgctcgataatgaaggtaaccctcttgaaaatggtggcacatattatatcttgtcagacataacagcatttggtggaataagagcagccccaacgggaaatgaaagatgccctctcactgtggtgcaatctcgcaatgagctcgacaaagggattggaacaatcatctcgtccccatatcgaatccgttttatcgccgaaggccatcctttgagccttaagttcgattcatttgcagttataatgctttgtgttggaattcctaccgagtggtctgttgt

SEQ ID NO: 65771 - DNA, 211 bp, Glycine max
ggtggatgtgcaaatggtttatgcagccttgtatcttcatggtgagtaacatttaaaaaaaaaaaatgtataattacctttctcatccttataatcgaaagaatcttccttcatagtttaagacattttattatgattcatataattgtaattttcttatcctttcaaaaaaaaaaaatgactataaatgcaaaaagcggccactcgaatt

SEQ ID NO: 65772 - DNA, 191 bp, Glycine max
cagacttgagtatgtgaaaaaagagaggatttttgtgaggaagagaagggagaatgaatttgaaagagaaaaaaaaaagagcatagacacgtacccttgaagtatgtctctgattatatttagggtgagcctattgctattctattttcctttattttattattttataaaaagaactctattttacttcg

SEQ ID NO: 65773 - DNA, 113 bp, Glycine max
ggaatcatgagtgctgagttactaaaaagaaaagaaaaacaagaatcaagacatcacacactacgtatcttgaagcaggatctttggtctaagtaacgattctaccgaagacg

SEQ ID NO: 65774 - DNA, 390 bp, Glycine max
tactataaatgttacaggcttacttctccaaatcctaggatgtacattggctctggcaaggtttctgaaattaagagtgcaattcatgcattgggcgttgaaactgttatctttgatgatgagctgtcagctgggtagggccctttttcctttgttttaacatttatgtcatccatatgtgtgcttcatgcttcatgttaagactaatttttgtctgtgccaccatttattagtgaattaagggttagatgggtgggtattgagagtatgatgtatttatgttggagaatatcaatttgcaagctgttggaatggaaaggtattaagcagtcaattggtccgtttggggttgtgagtttacctgcagcatttggattttgggattgatta

SEQ ID NO: 65775 - DNA, 135 bp, Glycine max
gacccaggcgtacgcactggtgctagatgactatcagaatggattgttgctatcttaaattccattgtagatatgaaggaggggatacatcttttcattgtagggaacaattattatgaatacagaatctaattt

SEQ ID NO: 65776 - DNA, 152 bp, Glycine max
gacttatagagagattgatgaagaaatcagcatgtgttcaatagcatctgggtttgtgctgactcttaatgttgcatcttccaccacaaactcactggttgtcttgttcaacacaaataacaactcttatatacttctcgtgagggcttcat

SEQ ID NO: 65777 - DNA, 233 bp, Glycine max
ccgcttgtacgaacacgccagagggggcctccaaaaccacttattaaggttacgtttgaggaccaccttgggggtcctaaaggttatttggtggctcattttcctggtggggtttcaagtttaccccttgaacctaacttttttaaaaattgttcattcataaattatgactgattataagtattcaaacccatgctgtgatctttgattttccaaatcttaaatgcttctta

SEQ ID NO: 65778 - DNA, 378 bp, Glycine max
gacagcaaaaacaattaataaagatgagtttgaagaacaacatggtggtgctaaaggtgtgtttgttgcttcttttccttgtgggggttacagctgcacgcatggaactgagcttcttcaaaagtgatcagtcatcaagttatgatgatgatgagtattcaaaaccatgctgtgatctctgcatgtgcacacgctcaatgcctcctcaatgcagctgtgaagatattaggctgaattcatgccactcagattgtaagagctgtatgtgcacacgctcacagccaggacagtgtcgttgtcttgacaccaacgacttctgctacaaaccttgcaagtccagagatgactagaaaaactaatagctctctcaaatggacg

SEQ ID NO: 65779 - DNA, 362 bp, Glycine max
taatacgacagaatttgtcagcatatacaatttatataggggagtgtgaagaacaacatggtggtgctaaatgtgtttttgttgctttttttccttttttgagttacatctttcactcatgtaactgatcttctttaaaatttatcattctttaatttattattattatttttatttaaaactatgttgatattttttctatttcttatccttaatgtctccttaattcttttgtttatttttaaagcttatttaatcctcttcttatttttatatcctttatttttcatatttttatatttattactttaattttatttttatatctaataaatttttttttccatatttttttattatct

SEQ ID NO: 65780 - DNA, 90 bp, Glycine max
gacagcataggcaagggataaagatgagtttgaagaacaacatggtggtgctaaaggtgttgtttgttgcttctttttcttgtgggggtt

SEQ ID NO: 65781 - DNA, 209 bp, Glycine max
aggtgtcagaacagacgtccgtgatttcacttcattttgacttgatgctgcggctactttacaactgcatcatcgtatcatcgtcacctcatcgacagacactattcagggggggcggggcaaagccctgctggcaacaatacctttgtgcaatgtcttctctagcagatgccaactaagttctacaccttctccaattccattgttac

SEQ ID NO: 65782 - DNA, 201 bp, Glycine max
gcccgatacattttttgctattgggtggtcacctgtactactaacttgcgtttctgaaacatttttctctcttacctttctcacgttgggggggggggccactcccccaaaaaaaaaaaagcggccgctctagcggctccacccttacctacccgtgcatcccacctcatacctcttctatatcgtcacccaaattcaatt

SEQ ID NO: 65783 - DNA, 102 bp, Glycine max
attgtaaacataacaaaaggaacgagggaaattagcaacagtctaccatcaataaaaagaatcagttaaaaaaagatcctttttgatagggggggggggggg

SEQ ID NO: 65784 - DNA, 351 bp, Glycine max
cgacagacggggacactctcttttctctctctacaaacaatatcaagacatcttcatctaattaaccattaatcaccaacaatattctcctgtgacttcaggggcagcggtgggtcagagcaacccaaacaaaccaccaccacctgttggttatcccacaaatgatcatgttccttcccaccaaaatgttccaatcaaaacctctattatgggtgatcgctttttccacggatcttgtgctggattgttctgttgctgttccctcgattgttttctcctattccctttattcctttcggcctatcccctctgtcctttgtcattttcctttacccacttaactttttttcc

SEQ ID NO: 65785 - DNA, 360 bp, Glycine max
gacagcaaaaacaattaataaagatgagtttgaagaacaacatggtggtgctaaaggtgtgtttgttgcttcttttccttgtgggggttacagctgcacgcatggaactgagcttcttcaaaagtgatcagtcatcaagttatgatgatgatgggtattcaaaaccatgctgtgatctctgcatgtgcacacgctcaatgcctcctcaatgcagctgtgaagatattaagctgaattcatgccactcagattgtaagagctgtatgtgcacacgctcacagccaggacagtgtcgttgtcttgacaccaacgacttctgctacaaaccttgcaaatcaagagatgactagaaaaactaat

SEQ ID NO: 65786 - DNA, 402 bp, Glycine max
gacagcaaaaacaattaataaagatgagtttgaagaacaacatggtggtgctaaaggtgtgtttgttgcttcttttccttgtgggggttacagctgcacgcatggaactgagcttcttcaaaagtgatcagtcatcaagttatgatgatgatgagtattcaaaaccatgctgtgatctctgcatgtgcacacgctcaatgcctcctcaatgcagctgtgaagatattaggctgaattcatgccactcagattgtaagagctgtatgtgcacacgctcacagccaggacagtgtcgttgtcttgacaccaacgacttctgctacaaaccttgcaagtccagagatgactagaaaaactaatagctctctcaaatggacgaagcccctttaagctttgtttgtt

SEQ ID NO: 65787 - DNA, 179 bp, Glycine max
gacagcaaaaacaattaataaagatgagtttgaacaacaacccggtggtgctaaacgtgtgtttgttgcttcttttgcgggcgggggttacagctgcacccataaaactgagcttcttcaaaagtgatcagtcatcaagttatgatgatgatgactattcaaaaccatgctgtcatctc

SEQ ID NO: 65788 - DNA, 200 bp, Glycine max
gagaagccaccgaacggacccactcgttttcgttctcgttctggtttatacatctttgccaacgatgtttacaccgctcaaccaaacatgcaccacggggggggggaggtcactgacctttacaaaccaaagaagtgctcctccacacccacattcattaccgctaatgaccatgcttccgttcacatcaacattgcgca

SEQ ID NO: 65789 - DNA, 69 bp, Glycine max
gatccgttaccgaaatcaatcaaggtgggatagagagaaaaaagaagtggcaaccttattgtctcctac

SEQ ID NO: 65790 - DNA, 147 bp, Glycine max
gagaagacgacagcagggtacagctgctaaaagacgacataatgtgagtgtatgtaattgttgtgactcgttcttcttcttccttatcttcctcttttgttgtgtgtgtgtgtggtttttctctcaccctaaaaatttcttgcttcc

SEQ ID NO: 65791 - DNA, 233 bp, Glycine max
gacagcaaaaacaattaataaagatgagtttgaagaacaacatggtggggctaagggtgtgtttgttgcttcataaccttgtgggggttacagctgcacgcatggaactgagcttcttcaaaagtgatcagtcatcaagttatgatgatgatgagtattcaaaaccatgctgtgatctctgcatgtgcacacgctcaatgcctcctcaatgcagctttgaaaaatattaaggc

SEQ ID NO: 65792 - DNA, 376 bp, Glycine max
gagatcagcacatggtaagtggatgaaggatctcggacgtgccgcggtacatgggtcggtgatcctcgattgcctgcttcccgtctaggtttcacaccagtgacggcaacactacaagagccacctatattctccgcgatgacggcagcatcactcttcttaacgagacttgatatgacggcatgacaggtttcattgaaggcactgcttataaagttgatcccaacagagacgaagccaagttgcacgacaagttctgggtgcctccctttttacccatcattcacgttacaggcgattactggcttttgtacattgatcatgattatcactaggctgtcattggccaaacttccaagacatatccttggataat

SEQ ID NO: 65793 - DNA, 136 bp, Glycine max
tatttcgtataccaaaaaaaaaaaaaaaaaaaaaaaaaaaaagcgggcggtccaaaagatataaacttaaggaaggggggaagggaagtcaaaactcctccaaaatggcaactaaaattaatttacatgggcgttc

SEQ ID NO: 65794 - DNA, 401 bp, Glycine max
gacacacaactaactaagaaagtcttccatagccccccaaaaatgaagagcaccatcttctttgctctctttctcttttgtgccttcaccacctcatacctaccttcagccatcgctgatttcgtgctcgataatgaaggtaaccctcttgaaaatggtggcacatattatatcttgtcagacataacagcatttggtggaataagagcagccccaatgggaaatgaaagatgccctctcactgtggtgcaatctcgcaatgagctcgacaaggggattggaacaatcatctcgtccccatatcgaatccgttttatcgccgaaggccatcctttgagccttaagttcgattcatttgcagttataatgctgtgtgttggaattcctaccgagtggtctgt

SEQ ID NO: 65795 - DNA, 376 bp, Glycine max
gacagcaaaaacaattaataaagatgagtttgaagaacaacatggtggtgctaaaggtgtgtttgttgcttcttttccttgtgggggttagagctgcacgcatggaactaaacttcttcaaaagtgatcagtcatcaagttatgatgatgatgagtattcaaaaccatgctgtgatctctgcatgtgcacacgctcaatgcctcctcaatgcagctgtgaagatattaggctgaattcatgccactcagattgtaagagctgtatgtgcacacgctcacagccaggacagtgtcgttgtcttgacgccaacgacttctgctacaaaccttgcaagtccagagatgactagaaaaactaatagctctctcaaatgga

SEQ ID NO: 65796 - DNA, 58 bp, Glycine max
gattcatctctacagcacaaaaaagaaagaaatccaacccgtgaagaaagcacagcac

SEQ ID NO: 65797 - DNA, 378 bp, Glycine max
gattcacacaactaactaagaaagtcttccatagccccccaaaaatgaagagcacatcttctttgctctctttctcttttgtgccttcagcacctcatacctaccttcagccatcgctgatttcgtgctcgataatgaaggtaaccctcttgaaaatggtggcacatattatatcttgtcagacataacagcatttggtggaataagagcagccccaacgggaaatgaaagatgccctctcactgtggtgcaatctcgcaatgagctcgacaaagggattggaacaatcatctcgtccccatatcgaatccgttttatcgccgaaggccatcctttgagccttaagttcgattcatttgcagttataatgctgtgtgt

SEQ ID NO: 65798 - DNA, 321 bp, Glycine max
gattcacacaactaactaagaaagtcttccatagccccccaaaaatgaagagcaccatcttctttgctctctatctcttttgtgccttcagcacctcatacctaccttcagccatcgctgatttcgtgctcgataatgaaggtaaccctcttgaaaatggtggcacatattatatcttgtcagacataacagcatttggtggaataagagcagccccaacgggaaatgaaagatgccctctcactgtggtgcaatctcgcaatgagctcgacaaagggattggaacaatcatctcgtccccatatcgaatccgttttatcg

SEQ ID NO: 65799 - DNA, 261 bp, Glycine max
gacacaactaactaagaaagtcttccatagccccccaaaaatgaagagcaccatcttctttgctctctttctcttttgtgccttgagggggtgagacctaccttcagccatcaaagatttcgtgctcgataatgaaggtaaccctcttgaaaatggtggcacatattatatcttgtcagacataacagcatttggtggaataagagcagccccaacgggaaatggaagatgccctctcactgtggtgcaatctcccaatga

SEQ ID NO: 65800 - DNA, 224 bp, Glycine max
aaaaacgacaggtgggatcatctattattaacaaaaccatttcacaccacccaatatctttataccttctcttctccctacccttctactttgtgcgggggcggatatctattttccaacaacacatatcgttttctctacttccattactattcttttcactcctgtttcatattctatcttttcccacatatcataatttactgtcatagaataaacctaac

SEQ ID NO: 65801 - DNA, 372 bp, Glycine max
gacagcaaaaacaattaataaagatgagtttgaagaacaacatggtggtgctaaaggtgtgtttgttgcttcttttccttgtgggggttacagctgcacgcatggaactgagcttcttcaaaagtgatcagtcatcaagttatgatgatgatgagtattcaaaaccatgctgtgatctctgcatgtgcacacgctcaatgcctcctcaatgcagctgtgaagatattaggctgaattcatgccactcagattgtaagagctgtatgtgcacccgctcacagccaggacagtgtcgttgtcttgacaccaacgacttctgctacaaaccttgcaagtccaaagatgactagaaaaactaatagctctctcaaa

SEQ ID NO: 65802 - DNA, 135 bp, Glycine max
gatacacaattagggacaccctttggattactttgcttgtttaattagttatccaatgcccaatctgccaatcatgtgattatatggagcaggtcccaattaaaaaaaatccaatatgagaaattgggattcaac

SEQ ID NO: 65803 - DNA, 378 bp, Glycine max
  unsure (1)..(378): unsure at all n locations
gacagcanaaacaattaataaagatgagtttgaagaacaacatggtggtgctaaaggtgtgtttgttgcttcttttccttgtgggggttacagctgcacgcatggaactgagcttcttcaaaagtgatcagtcatcaagttatgatgatgatgagtattcaaaaccatgctgtgatctctgcatgtgcacacgctcaatgcctcctcaatgcagctgtgaagatattaggctgaattcatgccactcagattgtaagagctgtatgtgcacacgctcacagccaggacagtgtcgttgtcttgacaccaacgacttctgctacaaaccatgcaagttcagagatgactagaaaaactaatagctctctcaaatggacg

SEQ ID NO: 65804 - DNA, 347 bp, Glycine max
gattcaaaaaaaaaaaccttacaaattaacataacatgttcacaaaatcaaaattcgtcaacaaagtcaaaacttagaaaatttttgcgaaaaagtgaaatagtttacagtaaaagttgtcaaagaaaaagttaatgataaaaagtacaattatacaagcatgtcacatcaacttgacaataaatatataatttaaagttgtttttaacaagttaaaagtaaaatacaccaaattaatttgttggtagtaaaatgtcccaaaaaataaaataaaaaaacataaaaatgtgattaagctaatttttctaattatatctctagtgagaattaatttttaaaaaatataa

SEQ ID NO: 65805 - DNA, 73 bp, Glycine max
gctataggatataaacttatatatgcgtgcatacgacatcatagctcttctataatgtcacctaaattcaaat

SEQ ID NO: 65806 - DNA, 403 bp, Glycine max
gacagcaaaaacaattaataaagatgagtttgaagaacaacatggtggtgctaaaggtgtgtttgttgcttcttttccttgtgggggttacagctgcacgcatggaactgaacttcttcaaaagtgatcagtcatcaagttatgatgatgatgagtattcaaaaccatgctgtgatctctgcatgtgcacacgctcaatgcctcctcaatgcagctgtgaagatattaggctgaattcatgccactcagattgtaagagctgtatgtgcacacgctcacagccaggacagtgtcgttgtcttgacaccaacgacttctgctacaaaccttgcaagtccagagatgactagaaaaactaatagctctctcaaatggaccaagcccctttacgctttgtttgtta

SEQ ID NO: 65807 - DNA, 384 bp, Glycine max
tgtgattctgatgtctttcagctttcaaattctatgtggcctcgtgcacaatacttgcctgaggtcgaagtatatgcgttgccagacgcagttccgttttgattcttttggattattttttgacaataggtggtagtttgatgaaagtagggagctgttctgtgttctaattgagaaccggtggatgattgtttttttgaaagagaaaaacaattacatggcatatgggcaaagattgcgttaatatgttcaaacatgatcgatgtaattttgtcatccatacttggcgttagtagtatttgtagaatgcacagacataaatattatagtagtaaaacagttttttagccacccccccgacgccggcccgccgcgccggggccg

SEQ ID NO: 65808 - DNA, 372 bp, Glycine max
gacagcaaaaacaattaataaagatgagtttgaagaacaacatggtggtgctaaaggtgtgtttgttgcttcttttccttgtgggggttacagctgcacgcatggaactgagcttcttcaaaagtgatcagtcatcaagttatgatgatgatgagtattcaaaaccatgctgtgatctctgcatgtgcacacgctcaatgcctcctcaatgcagctgtgaagatattaggctgaattcatgccactcagattgtaagagctgtatgtgcacacgctcacagccaggacagtgtcgttgtcttgacaccaacgacttctgctacaaaccttgcaaatccagagaatactagaaaaactaataactcctctcaa

SEQ ID NO: 65809 - DNA, 387 bp, Glycine max
gacagcaaaaacaattaataaagatgagtttgaagaacaacatggtggtgctaaaggtgtgtttgttgcttcttttccttgtgggggttacagctgcacgcatggaactgagcttcttcaaaagtgatcagtcatcaagttatgatgatgatgagcattcaaaaccatgctgtgatctctgcatgtgcacacgctcaatgcctcctcaatgcagctgtgaagatattaggctgaattcatgccactcagattgtaagagctgtatgtgcacacgctcacacccaggacagtgtccttgtcttgacaacaacgacttctgctacaaaccttgcaagtccagagatgactagaaaaactaatagctctctcaaatggacgaaacccctt

SEQ ID NO: 65810 - DNA, 386 bp, Glycine max
gacagcaaaaacaattaataaagatgagtttgaagaacaacatggtggtgctaaaggtgtgtttgttgcttcttttccttgtgggggttacagctgcacgcatggaactgagcttcttcaaaagtgatcagtcatcaagttatgatgatgatgagtattcaaaaccatgctgtgatctctgcatgtgcgcacgctcaatgcctcctcaatgcagctgtgaagatattaggctgaattcatgccactcagattgtaagagctgtatgtgcacacgctcacagccaggacagtgtcgttgtcttgacaccaacgacttctgctacaaaccttgcaagtccagagatgactagaaaaactaatagctctctcaaatggacgaaacccct

SEQ ID NO: 65811 - DNA, 76 bp, Glycine max
ggttctagtgtctgcattccttgttgttgtcactccttcttcctcttttgttgttctatctttctctttctttttt

SEQ ID NO: 65812 - DNA, 408 bp, Glycine max
agaaggggacacaactaactaagaaagtcttccatagccccccaaaaatgaagagcaccatcttctttgctctctttctcttttgtgccttcaccacctcatacctaccttcagccatcgctgatttcgtgctcgataatgaaggtaaccctcttgaaaatggtggcacatattatatcttgtcagacataacagcatttggtggaataagagcagccccaacgggaaatgaaagatgccctctcactgtggtgcaatctcgcaatgagctcgacaaagggattggaacaatcatctcgtccccatatcgaatccgttttatcgccgaaggccatcctttgagccttaagttcgattcatttgcagttataatgctgtgtgttggaattcctaccgagtggtctgttg

SEQ ID NO: 65813 - DNA, 315 bp, Glycine max
  unsure (1)..(315): unsure at all n locations
gattcacacaactaactaagaaagtcttccatagccccccaaaaatgaagagcaccatcttctttgctctctttctcttttgtgccttcaccacctcatacctaccttcagccatcgctgatttcgtgctcgataatgaaggtaaccctcttgaaaatggtggcacatattatatcttgtcagacataacagcatttggtggaataagagcagccccaacgggaaatgaaagatgccctctcactgtggtgcaatctcgcaatgagctcgacaaagggattggaacaatcatctcgtcnccatatcgaatccgtt

SEQ ID NO: 65814 - DNA, 245 bp, Glycine max
gacagcaaaaacaattaataaagatgagtttgaagaacagcatggtggtgctaaaggtgtgtttgttgcttcttttccttgtgggggttacagctgcacgcatggaactgaccttcttcaaaagtgatcagtcatcaagttatgatgatgatgagtattcaaaaccatgctgtgatctctgcatgtgcacaccctcaatgcctcctcaatgcagctgtcaacatattacgctgaattcatgccca

SEQ ID NO: 65815 - DNA, 62 bp, Glycine max
attattaaagataaataatcacttttgtgtctgaatgtgtaattcgctgataaatgagtacc

SEQ ID NO: 65816 - DNA, 104 bp, Glycine max
cgacagaagggtcctaaagtcaagaaggaagaaaatgacgacgacattcccatctggagaagcacctccaactccaaggaagtgaagaaaaagaggataacaat

SEQ ID NO: 65817 - DNA, 314 bp, Glycine max
ccacagaagggtacggctgccataacaccacagaacggtactgttgacagaacacgacataacggcatgattgacctctgcaactgtgataatatggggggcgtcggatttcttcttgctctttcaagcctctatgccacatctttactaaggctgctcccaacacgtgtggattcatggacaatgtgatgatggaaagcttgagcaccgacatgatcaatttctccttttaactaagctgcctattgttttttaaacaattggacaacaataacttcacttcctacctttcttttttgtttataaaatcaaac

SEQ ID NO: 65818 - DNA, 465 bp, Glycine max
gcgtccggattcaagtgtgtgattgtttgttgttgtaactcgttcttcttcttttgttgttctgtgtttgtgtttgttttttctctcacctgaaaatgtcttgctgcggtggtaactgtggttgcggaagctcctgcaagtgcggcaacggctgcggaggctgcaagatgtacccagacttgagctacactgagtcaaccaccaccgagaccttggtcatgggagtggcacctgttaaggctcaatttgagggtgctgaaatgggtgtgcccgctgagaacgatggctgcaaatgtggaccaaactgctcctgcaacccctgcacttgcaagtgaggtgttgggggagcaagcttcaagcaaagatagcccttaattaggaataatgataaactattaatgtgtagctaacaacttatgtattatgtctgtgatggttttcgtgcactctggtgttttgtgtaaa

SEQ ID NO: 65819 - DNA, 202 bp, Glycine max
cgggggacagaacggcatggacagagacacagagacactgcgtgttgggttgcgttgtgactgcatacacaactaaatgaggggggtgggtcaccattcaaaatgacatcattaggatctgtgtcaaccaccaacatctctgacgcagagggcactgtctactgtcacaggcatcggtgaccgaaacacacaccacggaaac

SEQ ID NO: 65820 - DNA, 235 bp, Glycine max
agacgtcagcacacgcgtcagtgcggctgctaagattacaaaaggggggtcgtctagccgcaatcacgaatcccaattccatacctcgcgttctgccttcctctattacatcaggatggagtcacaggtgatgcatgcaattgttggcagccttctgggtcgtagtgggtgaaaaggacaattatcacaactttggttgaaatttttggatgatcataatcttcgcaacagcagg

SEQ ID NO: 65821 - DNA, 397 bp, Glycine max
gacagcaaaaacaattaataaagatgagtttgaagaacaacatggtggtgctaaaggtgtgtttgttgcttcttttccttgtgggggttacagctgcacgcatggaactgagcttcatcaaaagtgatcagtcatcaagttatgatgatgagtattcaaaaccatgctgtgatctctgcatgtgcacacgctcaatgcctcctcaatgcagctgtgaagatattaggctgaattcatgccactcagattgtaagagctgtatgtgcacacgctcacagccaggacagtgtcgttgtcttgacaccaacgacttctgctacaaaccttgcaagtccagagatgactagaaaaactaatagctctctcaaatggacgaagcccctttaagctttgtttg

SEQ ID NO: 65822 - DNA, 333 bp, Glycine max
aacaaaacaaagacgagaaaaaggaagaaacaaacgaagacaaacatgaggagaataaagaggacaacaacgaagaaaataacgaagagaagaaggaggagaaaaaataataaacaatacttgattatcatctggttttgtctaattctacccttttattttcttttctttttttttaactttgttttgcatattttcccatattcacaaccacttgttacctgcagcaacctcctccatctacttcactctcacgccgccgctctataggatccatgcttacctccccctccatcctacgtcctccctcttctgtagtgtcacccaaattca

SEQ ID NO: 65823 - DNA, 108 bp, Glycine max
gacccattttgattttgtcctgagaaattatcccaaaaattaaaaaaatacaaaattacctaacaattttcccttctatttcatttgctcagtaaaagaattataaca

SEQ ID NO: 65824 - DNA, 401 bp, Glycine max
  unsure (1)..(401): unsure at all n locations
gacacaactaactaagaaagtcttccatagccccccaaaaatgaagagcaccatcttccttgctctctttctcttttgtgccttcaccacctcatacctaccttcagccatcgctgatttcgtgctcgataatgaaggtaaccctcttgaaaatggtggcacatattatatcttgtcagacataacagcatttggtggaataagagcagccccaacgggaaatgaaagatgccctctcactgtggtgcaatctcgcaatgagctcgacaaagggattggaacaatcatctcgtcnccatatcgaatccgttttatcgccgaaggccatcctttgagccttaagttcgattcatttgcagttataatgctgtgtgttggaattcctaccgagtggtctgttg

SEQ ID NO: 65825 - DNA, 373 bp, Glycine max
gacagcaaaaacaattaataaagatgagtttgaagaacaacatggtggtgctaaaggtgtgtttgttgcttcttttccttgtgggggttacagctgcacgcatggaactgagcttcttcaaaagtgatcagtcatcaagttatgatgatgatgagtattcaaaaccatgctgtgatctctgcatgtgcacacgctcaatgcctcctcaatgcagctgtgaagatattaggctgaattcatgccactcagattgtaagagctgtatgtgcacacgctcacagccaggacagtgtcgttgtcttgacaccaacgacttctgctacaaaccttgcaagtccagagatgactagaaaaactaatagctctctcaaat

SEQ ID NO: 65826 - DNA, 94 bp, Glycine max
gtagaagttatggaacactaatgtgtaatcaaagtctgatagtttcaaaaaaaattaattatatccaaaaaattatattatatattggtacccg

SEQ ID NO: 65827 - DNA, 387 bp, Glycine max
gacagcaaaaacaattaataaagatgagtttgaagaacaacatggtggtgctaaaggtgtgtttgttgcttcttttccttgtgggggttacagctgcacgcatggaactgagcttcttcaaaagtgatcagtcatcaagttatgatgatgatgagtattcaaaaccatgctgtgatctctgcatgtgcacacgctcaatgcctcctcaatgcagctgtgaagatattaggctgaattcatgccactcagattgtaagagctgtatgtgcacacgctcacagccaggacagtgtcgttgtcttgacaccaacgacttctgctacaaaccttgcaagtccagagatgactagaaaaactaatagctctctcaaatggacgaagcccctt

SEQ ID NO: 65828 - DNA, 409 bp, Glycine max
gattcacacaactaactaagaaagtcttccatagccccccaaaaatgaagagcaccatcttctttgctctctttctcttttgtgccttcagcagctcatacctaccttcagccatcgctgatttcgtgctcgataatgaaggtaaccctcttgaaaatggtggcacatattatatcttgtcagacataacagcatttggtggaataagagcagccccaacgggaaatgaaagatgccctctcactgtggtgcaatctcgcaatgagctcgacaaagggattggaacaatcatctcgtccccatatcgaatccgttttatcgccgaaggccatcctttgagccttaagttcgattcatttgcagttataatgctgtgtgttggaattcctaccgagtggtctgttgtgga

SEQ ID NO: 65829 - DNA, 166 bp, Glycine max
gaatggaagcatagtcaacgcttctctgcctaaaataatattacgcgtctagagggccaaacgtattgcctttgatcctctctcatcgcattcatagtcaggtactattagttttgcactccgcggtctgtcttcatgtccctgatcagatccgcttttttacatt

SEQ ID NO: 65830 - DNA, 196 bp, Glycine max
ttgcacataccaaccgatcagctgactaacgacagataccacacaacactacaaacaaagaagaattgagattccctttgcagaggagatggcatcccacaggcaaagctatgaagctggtcaacctaacggccgaactgacgaaaatacgaaccagacgatgggcaatatttgggacaaggctcaaactgcaaag

SEQ ID NO: 65831 - DNA, 171 bp, Glycine max
ggaacaagaagatattaaggaaatacgcatcgaggagcacgtgcgaacttgaaaatcggcgagtttcctgtcagggcgacgtttcggactctgttgcaaacttcggatcgtcatatcatcacttctttttacatccatgttttgtccaatgtcgcccccgatcttctccac

SEQ ID NO: 65832 - DNA, 283 bp, Glycine max
gattcacacaactaactaagaaagtcttccatagccccccaaaaatgaagagcagcatcttctttgctctctttctcttttgtgccttcaccacctcatacctaccttcagccatcgctgatttcgtgctcgataatgaacgtaaccctcgtgaaaatggtggcacatattatatcttgtcagacataacagcatttggtggaataagagcagccccaacgggaaatgaaagatgccctctcactgtggtggaatctcgcagtgagctcgaacaagggattgg

SEQ ID NO: 65833 - DNA, 383 bp, Glycine max
gagagacggagcagaagaaggatccacaccgttctcttcctctcttcttctccttcttcattaccaaacctaaaaggtatgtatgtattcatatcatatgcatgtcctctctctatctttatatacatacactaatgtttctttttttagtttttacgttttggattatataaaaaattactaatagatggaaaaacgatggttagaaatggaaatggtggttgtggtgtggttatgtgattgtgagatattagaaaatatgaatttgaaatgaatgcatttatatttttgggtaaagtttggtgtcgggtgaagaaagaattaataaatgcaaccacggattcaacccatgacattaattaattaatatacgatcctccttt

SEQ ID NO: 65834 - DNA, 366 bp, Glycine max
gattcacacaactaactaagaaagtcttccatagccccccaaaaatgaagagcaccatcttctttgctctctttctcttttgtgccttcaccacctcatacctaccttcagccatcgctgatttcgtgctcgataatgaaggtaaccctcttgaaaatggtggcacatattatatcttgtcagacataacagcatttggtggaataagagcagccccaacgggaaatgaaagatgccctctcactgtggtgcaatctcgcaatgagctcgacaaagggattggaacaatcatcccgtccccatatcgaatccgttttatcgccgaagggcatcctttgagccttaagttcgattcatttgcagtta

SEQ ID NO: 65835 - DNA, 325 bp, Glycine max
gacagcaaaaacaattaataaagatgagtttgaagaacaacatggtggtgctaaaggtgtgtttgttgcttcttttccttgtgggggttacagctgcacgcatggaactgagcttcttcaaaagtgatcagtcatcaagttatgacgatgatgagtattcaaaaccatgctgtgatctctgcatgtgcacacgctcaatgcctcctcaatgcagctgtgaagatattaggctgaattcatgccactcagattgtaagagctgtatgtgcacacgctcacagccaggacagtgtcgttgtcttgacaccaacgacttctgctacaa

SEQ ID NO: 65836 - DNA, 398 bp, Glycine max
gattcacacaactaactaagaaagtcttccatagccccccaaaaatgaagagcaccatcttctttgctctctttctcttttgtgccttcaccacctcatacctaccttcagccatcgctgatttcgtgctcgataatgaaggtaaccctcttgaaaatggtggcacatattatatcttgtcagacataacagcatttggtggaataagagcagccccaacgggaaatgaaagatgccctctcactgtggtgcaatctcgcaatgagctcgacaaagggattggaacaatcatctcgtccccatatcgaatccgttttatcgccgaaggccatcctttgagccttaagttcgattcatttgcagttataatgctgtgtgttggaattcctaccgagtgg

SEQ ID NO: 65837 - DNA, 102 bp, Glycine max
caagtgtggcatcatgatctagttatatatatatgtcgtgatcatcttgctctgttcagcaataaattataatggaaattaataaattagttatgccttttc

SEQ ID NO: 65838 - DNA, 188 bp, Glycine max
cgagacgacgactagaatcgggatgtgctgttgcacgaacactaagggaactaacaacaaatgggacaaaaaaaagtatccacatttcccgttcttccttcttccatattgaggttttctcagacagtgatctcgcataattccgctgaacttccacaagtcaccaactcgcgatcagtcatgcacac

SEQ ID NO: 65839 - DNA, 406 bp, Glycine max
gattcacacaactaactaagaaagtcttccatagccccccaaaaatgaagagcaccatcttctttgctctctttctcttttgtgccttcaccacctcatacctaccttcagccatcgctgatttcgtgctcgataatgaaggtaaccctcttgaaaatggtggcacatattatatcttgtcagacataacagcatttggtggaataagagcagccccaacgggaaatgaaagatgccctctcactgtggtgcaatctcgcaatgagctcgacaaagggattggaacaatcatctcgtccccatatcgaatccgttttatcgccgaaggccatcctttgagccttaagttcgattcatttgcagttataatgctgtgtgttggaattcctaccgagtggtctgttgt

SEQ ID NO: 65840 - DNA, 312 bp, Glycine max
aggacagcaaaaacaattaataaagatgagtttgaagaacaacatggtggtgctaaaggtgtgtttgttgcttcttttccttgtgggggttacagctgcacgcatggaactgagcttcttcaaaagtgatcagtcatcaagttatgatgatgatgagtattcaaaaccatgctgtgatctctgcatgtgcacacgctcaatgcctcctcaatgcagctgtgaacatattaggctgaattcatgccactcagattgtaagagctgtatgtgcacacgctcacagccaggacagtgtccctgtcttgacaccaa

SEQ ID NO: 65841 - DNA, 280 bp, Glycine max
tggcacaatgatgaatgaagcaacttctggtttgaatcatctaatctgatacaggtaaagcatgccgaaaaaacgacaaaaagggtaaaaaaaaaaacgggcggcccaaaaggttcaaggctaacctagacgttcaaggaatacctaagccctcctgcatggtcaccgaacttcaattaaggggccttcgtttaaaaacttcgtaacgggaaaaaccctccggtactgcaaataacctcccttgaacaaaatcccccttttgcaacaggactcactttca

SEQ ID NO: 65842 - DNA, 74 bp, Glycine max
caatggcagagacagatttgtaccatctcttgcctcaaataatgcagcaccatcacaagccaacctcttcatca

SEQ ID NO: 65843 - DNA, 267 bp, Glycine max
cgtccgaacaggagtcaggacgatacgaggggataacagaaggagaccataagttaagtgtaagtgattcaatttaaatcatcactcgagtataatgtcagggatcattcacaatattggtgatacccttcatgttcgaaggtacaaaaatgacgatgagcataaggatgagcaacatactgcgtaatacagaggggaggattatagtgtacatacttatgcgtacagcagagagcatcattgtgcacacacaactggttaatacca

SEQ ID NO: 65844 - DNA, 142 bp, Glycine max
acctttcaaaagacaataatgtcttcagtcatttacactttcaaaaggcgacaatgccttcattttcattttgaagatgacggggtctggagtcatctcaaagacttcaatgtcgacgtcctttatttatatgctttttttt

SEQ ID NO: 65845 - DNA, 222 bp, Glycine max
cccacgcatccgtacacgcgtgcgcgagaaaacgacagaacgtgggtatgatcatgaagttcaccattacaatgaacagaagcaccacaagcatcttgagcaccttggtgacttaagtgctgcatcgccgcccgggtactccttgcatgataaggacagtgcagagaaccatccactgcatgctctccttcacatgatacagtttcaggtcccagccgcaac

SEQ ID NO: 65846 - DNA, 112 bp, Glycine max
aggcggcgcccctcgaaaaaaaaaaacaaagcggccgctctagaggctgcagccctagatgatcctaccttccatatccgtgcacgccacgtcagacaccttccatcatgtc

SEQ ID NO: 65847 - DNA, 388 bp, Glycine max
gacagcaaaaacaattaatagagatgagtttgaagaacaacatggtggtgctaaaggtgtgtttgttgcttcttttccttgtgggggttacagctgcacgcatggaactgagcttcttcaaaagtgatcagtcatcaagttatgatgatgatgagtattcaaaaccatgctgtgatctctgcatgtgcacacgctcaatgcctcctcaatgcagctgtgaagatattaggctgaattcatgccactcagattgtaagagctgtatgtgcacacgctcacagccaggacagtgtcgttgtcttgacaccaacgacttctgctacaaaccttgcaagtccagagatgactagaaaaactaatagctctctcaaatggacgaagccccttt

SEQ ID NO: 65848 - DNA, 381 bp, Glycine max
gacagcaaaaacaattaataaagatgagtttgaagaacaacatggtggtgctaaaggtgtgtttgttgcttcttttccttgtgggggttacagctgcacgcatggaactgagcttcttcaaaagtgatcagtcatcaagttatgatgatgatgagtattcaaaaccatgctgtgatctctgcatgtgcacacgctcaatgcctcctcaatgcagctgtgaagatattaggctgaattcatgccactcagattgtaagagctgtatgtgcacacgctcacagccaggacagtgtcgttgtcttgacaccaacgacttctgctacaaaccttgcaagtccagagatgactagaaaaactaatagctctctcaaatggacgaag

SEQ ID NO: 65849 - DNA, 348 bp, Glycine max
gacagcaaaaacaattaataaagatgagtttgaagaacaacatggtggtgctgaaggtgtgtttgttgcttcttttccttgtgggggttacagctgcacgcatggaactgagcttcttcaaaagtgatcagtcatcaagttatgatgatgatgagtattcaaaaccatgctgtgatctctgcatgtgcacacgctcaatgcctcctcaatgcagctgtgaagatattaggctgaattcatgccactcagattgtaagagctgtatgtgcacacgctcacacccagtacagtgtcgttgtcttgacaccaacgacttctgctacaaaccttgcaagtccatagatgact

SEQ ID NO: 65850 - DNA, 241 bp, Glycine max
ataagagacagaaagggactttgacttcgaattagacaattcaattcaatctgcctcgatcatggtgaggaaaacatttgggtttttgttcttgctcctccttggcgtagggtctgatgtgacggtgaagagaacaggggtgatagattgcatgacatcgaagcatgggatccatggtagatgcttattcgacagggaatgtgcagatgtgtgcaagaccgatggtttcatcagtggacag

SEQ ID NO: 65851 - DNA, 360 bp, Glycine max
tacgtatcggtacaagaatacgtcaggctgggggggtaccacagacaggcaatgtcgtcagcacgtaaataacatgtacatccgtggaatatactatatcccatttgagaatcattacttgagtgagggaaccaccaccaccttagttaaaaaggggcggttagatcggacgtacgctatgatcggtggtgaccaaggcatgcatggaatcatcaagcggttcaaaacagtcacatctgttaactgcgttgcgggtcgattcaaatgatcaagagcgtgaaaatcatgacgtcacgcaacttacaccttctgcaccacatccggcattcatcatctgcgatgttgatcactaggagttca

SEQ ID NO: 65852 - DNA, 311 bp, Glycine max
agattgaggatgccaacgaggagcaagtacttgctgaactggccacgattgaggcttcgaaagaactgacagatactgagacccagagaaaacatgaacacacttaaattttcattcaacttgcaaagcacgaggacacagttgaaggaggccattgactagattgatgagtcacatgagcttgcaatgcacttgggtgtgacattatcagatgttgacttcttgcaacatgaattaaactcagttcacgcactggataacagggttcaaagacattcgactgcaagacagctagaatgaacactccccca

SEQ ID NO: 65853 - DNA, 75 bp, Glycine max
ctgcgacaacacgacggtatggttccgttgcgacaacactacagattggtattgctgcgagacgactacataacg

SEQ ID NO: 65854 - DNA, 356 bp, Glycine max
gataccaaaaacaaaacacaagccaagtgaaagtgagaaaaaataaaaatcaaagagcataatgtcagggatcattcacaagattggggagacccttcatgtgggagggcacaagaaggaggaggagcataagggtgagcaccatgctggagaatacaaaggggagcaccatggtgaacacagtagtgagtacaaaggagagcatcatggtgaacacaaagctggagagtaccatggtgagcacaagccagagcacaaagaggggttcctagacaaagtcaaggacaagatccatggtgagggcggcgccgccgagggcgagaagaagaagaatgagaagaagaagaaggagcatg

SEQ ID NO: 65855 - DNA, 378 bp, Glycine max
  unsure (1)..(378): unsure at all n locations
gattcacacaactaactaagaaagtcttccatagccccccaaaaatgaagagcaccgtcttctttgctctctttctcttttgtgccttcaccacctcatacctaccttcagccatcgctgatttcgtgctcgataatgaaggtgaccctcttgaaaatggtggcacatattatatcttgtcagacataacagcatttggtggaataagagcagccccaacgggaaatggaagatgccctctcactgtggtgcaatctcgcaatgagctcgacanagggattggaacaatcatctcgtccccatatcgaatccgttttatcgccgaaggccatcctttgagccttaggttcgattcatttgcagttataatgctgtgtg

SEQ ID NO: 65856 - DNA, 284 bp, Glycine max
gtacgagaagacgacaggatgggacacaactacataagggcatcgtccatagcatgtcactaacaactagcatgaccttcgttgactctctctctctgtgtagagcctttatggggtcaggtcatatcttcagccatcgcagaatttcgtgctcgataatgaaggtgaacctcttgatccatggtggcatatactagcacgtgacatccatacccttctatggtggcacataaattaacttcactggacgtcgttttatacccttccagatgtgggaaaatcct

SEQ ID NO: 65857 - DNA, 418 bp, Glycine max
gatatattgaagagctctctgaaaatgaatctagagagcacaatccgaggttgtcaatttctaataaaaccgtgggatttggacatgtttctccaacttcgaatgtcaggcctgctagaaatgctttttcagaggcgagaacatatagcaccaggttagactctcttggaggttctaatgtccaaattccttatgtgtctcgggttcggagaagtcgtccaagaaaagatatcgcgtctcttatgaaattccatccaactggaatgggtgaggctgaaaaactgagtaataagctccttgagcatagttctgatgctggtagtgacttttcagacaaagttttgaagtcaagaatgcctgcaaagtttcatcaaccatcctcttctgaacctgtgaaagagcagtgttcagtaatatg

SEQ ID NO: 65858 - DNA, 60 bp, Glycine max
ggaagaagtaactaaaccaaactgcgaaacgctgaacatttgaagcaaaaaaacaaaaac

SEQ ID NO: 65859 - DNA, 205 bp, Glycine max
cggtactgctgctacaatacaacataaggatgaagaccgttctcgtcatctcgacgtcttcatcttcattaccattcataaacagtaatttggttgggagaacatcaggatctcttctctcaatgggtgtattgattgaataatatttctttctttaggttttatgttttgggttatctcacaatttaagatcaacttacataac

SEQ ID NO: 65860 - DNA, 301 bp, Glycine max
  unsure (1)..(301): unsure at all n locations
acagagaagggacacaattacaataataaatatagtttgacatcagcatgcaatcgaaaggtgtgtgcgtcgcttccttgccttggggggagggaacgcacgcatcgaactacccacggggnattatactcatcaagttaaataatgaaactattcaaaccatgatgtatcctgcatatacaacactcaatcccactcaagttatctgtaaatatataggcttaattcatgcacacagattgaaatatctgtacatgcacacacatcacagccaagacactgtcgctgtccatgaaccaac

SEQ ID NO: 65861 - DNA, 336 bp, Glycine max
tccgtccgatgcgacaagacgacggtacgggatgcaactgactaattaagggtagtcatttccatagcaccatatgtaggtcaagatcactaacttgttcgggatgggtctactttgcgccttcacctcatagggagcgtcggcaaacgaccacaacgtgctctacgtggatggcgatccgattccgtccagtttcatatactacgttttgccagcatcatcattgctctgtttcacaattgaacgatcaccactccggaactacatttacccaatcactgttttgcactctctcactccaggctctatcgtgttactaattgcatatgtctctgc

SEQ ID NO: 65862 - DNA, 378 bp, Glycine max
gattcacacaactaactaagaaagtcttccatagccccccaaaaatgaagagcaccatcttctttgctctctttctcttttgtgccttcaccacctcatacctaccttcagccatcgctgatttcgtgctcgataatgaaggtaaccctcttgaaaatggtggcacatattatatcttgtcagacataacagcatttggtggaataagagcagccccaacgggaaatgaaagatgccctctcactgtggtgcaatctcgcaatgagctcgacaaagggattggaacaatcatctcgtcgccatatcgaatccgttttatcgccgaaggccatcctttgagccttaagttcgattcatttgcagttataatgctgtgtg

SEQ ID NO: 65863 - DNA, 100 bp, Glycine max
gaaaaaaaaaattgtgtttattttgtacttcaagttatgaataaaagaatttcactgtttgtttgtaaaaaaaaaaaaaaaaaaaccaaagggagagagg

SEQ ID NO: 65864 - DNA, 99 bp, Glycine max
gacagcacaagcaattaataaagatgagtttgaagaacaacatggtggtgctgcaggtgtgtttgttgcgtcttttccgtggtggggttacagctgcac

SEQ ID NO: 65865 - DNA, 296 bp, Glycine max
cacaaacgggattcacgcaacaactacatatgaataatacagcctctttgctccctctccactttgtgccttcaccatctcatacctacctggccggcgacagttcgtgctcacactatagggatcacctcacaccagtggcacatttctatagttccagttatatatgaatgggccgttaatataaatcattcacctgcaatagacattgccctctcacttttgtgctacctccctgtgtgcccgatattgggacttaactattctttatatctccatttcatactctttttatc

SEQ ID NO: 65866 - DNA, 376 bp, Glycine max
gattcacacaactaactaagaaagtcttccatagccccccaaaaatgaagagcaccatcttctttgctctctttctcttttgtgccttcaccagctcatacctaccttcagccatcgctgatttcgtgctcgataatgaaggtaaccctcttgaaaatggtggcacatattatatcttgtcagacataacagcatttggtggaataagagcagccccaacgggaaatgaaagatgccctctcactgtggtgcaatctcgcaatgagctcgacaaagggattggaacaatcatctcgtccccatatcgaatccgttttatcgccgaaggccatcctttgagccttaagttcgattcatttgcagttataatgctgtg

SEQ ID NO: 65867 - DNA, 185 bp, Glycine max
gacagcagcaacaattaattcagatgagtttgaagaacaacatggtggtgctaaatgtgtgtctgttgcttctttgggttgggggggttacagctgcacgcaaggaactgagcttcttcaaaagtgatcagtcatcaagttatgatgatgatgagtattcaaaaccatgctgtgatctctgcatg

SEQ ID NO: 65868 - DNA, 130 bp, Glycine max
gacagaaaggggcagacgcaggtgcccttacacttaattggcccactatcctatgcatgcctttgacttggcctatcgaatattgacagtacgatatatggcatgttgattgcttggtaggtgcgtgagg

SEQ ID NO: 65869 - DNA, 59 bp, Glycine max
ctcgggtacggctgccacaatactacacaatggtaccgctgcaagacgacgtcacaatg

SEQ ID NO: 65870 - DNA, 377 bp, Glycine max
ggagtagaagaaaatggatccgcaaaaagcgcaagcagaagcctcaaagagaccaccaggtcatggtgctactgaagtgcttcatcagaagaaatcacttcctttcagcttcaccacaatgactatagctggtttgcttattacagctgctgtaggatacagtgtcttgtatgtgaagaaaaagcctgaagctagtgcaaaggatgtaacaaaggtttctgtcggagttgcaaaacctgaagagactcaccctgagaagtagttaatagatttatgatacatatataccacttgtctctctcttcgtttcatttccttttttttcattttccatgtgtcatctctgtggtgtcgttatttataagaggacacgtaca

SEQ ID NO: 65871 - DNA, 253 bp, Glycine max
ggacgcgtacgtaatgcaacgacaacacgacagaaagggacagctacgacagctaaaaaacatgagtttggatgagctgcatagaggtgctaatggtgtatatgatgcttcatttccatgtatgggtttgaggagcagacatcgaagtgaactgcgtcattggtgcttagtcaccatgtgagggttacaactactagcatggaacagaccgtcatcactgcttgtgaatcagcacattagcaccacaatgcat

SEQ ID NO: 65872 - DNA, 276 bp, Glycine max
acaaaagacaggtagggatgcaatcatacaatagaaaggaacttttgcttcattgtgacaatggggatcaggtgctcaagtagattcatcgtcatgcgcgtcatcaatatctatgctgctcaggttgtgatacaaacagagggaggtactggtgagatagacgagaaaaggttacattgctagtatgatacagaccaggactgtgctttagattacacgaacgaaagtttctccggcggcaagtgcaaacggttcctctagaggatcatttgctac

SEQ ID NO: 65873 - DNA, 290 bp, Glycine max
tcacgcatcagtaaagcttccatactacatcatagggcattcatacatgtcacctaaattctcttcactggccctccttttataacgtccatcatcgttcattgctctcttgctcttttgcgggttcggcatctgagacataccttcatcgatagctggcttcatactcaataagcatgcgtagcttcttcttcctggtggttacacttacttcatgtcaaatcatacaccatttgtatggaataatgaagccccaacggtaaatgagttatgcctctcactgtggtgca

SEQ ID NO: 65874 - DNA, 300 bp, Glycine max
gacagcaaaaacaattaataaagatgagtttgaagaacaacatggtggtgctaaaggtgtgtttgttgcttcttttccttgtgggggttacagctgcacgcatggaactgagcttcttcaaaagtgatcagtcatcaagttaggatgatgatgagtattcaaaaccatgctgtgatctctgcatgtgcacacgctcaatgcctcctcaatgcagctgtgaagatattaggctgaattcatgccactcagattgtaagagctgtaggtgcacacgctcacaggcaggacagtgtcgttggc

SEQ ID NO: 65875 - DNA, 386 bp, Glycine max
gacagcaaaaacaattaataaagatgagtttgaagaacaacatggtggtgctaaaggtgtgtttgttgcttcttttccttgtgggggttacagctgcacgcatggaactgagcttcttcaaaagtgatcagtcatcaagttatgatgatgatgagtattcaaaaccatgctgtgatctctgcatgtgcacacgctcaatgcctcctcaatgcagctgtgaagatattaggctgaattcatgccactcagattgtaagagctgtatgtgcacacgctcacagccaggacagtgtcgttgtcttgacaccaacgacttctgctacaaaccttgcaagtccagagatgactagaaaaactaatagctctctcaaattgaccaaacccct

SEQ ID NO: 65876 - DNA, 368 bp, Glycine max
gacagcaaaaacaattaataaagatgagtttgaagaacaacatggtggtgctaaaggtgtgtttgttgcttcttttccttgtgggggttacagctgcacgcatggaactgagcttcttcaaaagtgatcagtcatcaagttatgatgatgatgagtattcaaaaccatgctgtgatctctgcatgtgcacacgctcaatgcctcctcaatgcagctgtgaagatattaggctgaattcatgccactcagattgtaagagctgtatgtgcacacgctcacagccaggacagtgtcgttgtcttgacaccaacgacttctgctacaaaccttgcaagtccagagatgactagaaaaactaatagctctct

SEQ ID NO: 65877 - DNA, 107 bp, Glycine max
ggaagtgtacctgaggaacacttacttcgcgagtctttgtcgaagaacatataggtacccgttgtgtggttgatgcatctttgcggtgtcggggttacagctgcaaa

SEQ ID NO: 65878 - DNA, 239 bp, Glycine max
gataccaaaaacaaaacacaagccaagtgaaagtgagaaaaaataaaaatcaaagagcataatgtcagggatcattcacaagattggggagacccttcatgtgggagggcagaagaaggaggaggagcataacggtgagcacgatgctggagaatacaaaggggagcaccatggtgaacacagtagtgagtacaaacgagagcatcatggtgaacacaaagctggagagtaccatggtg

SEQ ID NO: 65879 - DNA, 235 bp, Glycine max
  unsure (1)..(235): unsure at all n locations
gaccttttagaacacaacacaataccaattatcctaacactctcaacccaacacaggttttttttttcttcagtttttctcttcggagagagtttttgttttgtcatttggtcttctcatgggtgggtttgaggagaggatgaaggatanggccaatgagctcaaggtcttgctcaagaaaggggtgaatattgtgggagattcatgcaagaaggggtggaacaaagtcagggac

SEQ ID NO: 65880 - DNA, 367 bp, Glycine max
gtacagatgccaaaagacgacaacttgggattctcactcttcatttcttttcactctccctccatcatcgacaggactccctttttgtttctttcccctccttggcgtgggttctggtgtgacgttacagagaacagaggcgacacaatgcttgacacggaagcacgggttccattgtagatgcttattcgacacgcaatgtgcacatgtctgctggaccgatggtttcatctctgctcagtgccgtggccctcttcgcatatgcttttgcatcatgccatgttgatcgaatttaccactgccataccagccatgctatacactcaccctcatctccattgatatctctaacccacacatatttacc

SEQ ID NO: 65881 - DNA, 176 bp, Glycine max
gcttcacagcaaaaacagcaagcaaagttgcgtttgaagattaccatggttgtgctaaaagtttctttgatgcgtcttatccttgtgggggttcaagctgaacttatgaaattaaacgtcgacatgactcatcagacgtcaagttataatgatgggaagtaatcacttgcatgctg

SEQ ID NO: 65882 - DNA, 341 bp, Glycine max
acccgtacgtatcggtacaagaatacgtcaggatgcgagagtactacataagggcaatgtcgatagcatgtcactaacaactacattcatacaaattcaccattcccattggaaatcattaatggagtgaggcatcaactaacacattacttaaaaaagggcacgataaatcggccttacgctcatgttccatgcttacctaggcatgcacgcgaccaccaagcgcttcaatagagtcacctatgttcacttcactgcggttccatttaaaacatcaagagcgtgaaaatcacgacgtcacccaaattacacgttttgcaccacatcccgcattcaccatc

SEQ ID NO: 65883 - DNA, 195 bp, Glycine max
gacagcaaatacaattaataatgattagtttgactgaaacattcgcgacgctaaacgagtgtttgttgcctcttttccttgtgggggttacagctgcactcatgtgactgagcttcttcaatggtgatcagtcatcaagttatgatgatgatgagtattcacaaccatgctgtgatctctgcatgtgcacaccac

SEQ ID NO: 65884 - DNA, 372 bp, Glycine max
gacagcaaaaacaattaataaagatgagtttgaagaacaacatggtggtgctaaaggtgtgtttgttgcttcttttccttgtgggggttacagctgcacgcatggaactgagcttcttcaaaagtgatcagtcatcaagttatgatgatgatgagtattcaaaaccatgctgtgatctctgcatgtgcacacgctcaatgcctcctcaatgcagctgtgaagatattaggccgaattcatgccactcagattgtaagagctgtatgtgcacacgctcacagccaggacagtgtcgttggcttgacagcaacgacttctgctacaaaccttgcaagtccagagatgactaaaaaaactaatagctctctcaaa

SEQ ID NO: 65885 - DNA, 294 bp, Glycine max
acgcatccgtaccgatacgacaacacaaggggactttacgttcgaactaaacaattcaattcattctgcctcgatcatgggaaagaaaacatttgggtttttgttcttgctcctccttggcgttggggtctgatgtgacagtgataagactaggggcgaacgattgcttgacaaagatgcacggattccacagtagatgcttattcgacaagcaatgtgcacatttctgcaagaaccataggttcatcggttgtcaatgccaaaggcctcttcacaaatgcttttgcaacaaga

SEQ ID NO: 65886 - DNA, 103 bp, Glycine max
acgctggcaaaacagacagggaggtacagcacaaacaattaatctcaattcattcgaccaccatcatggccatgctaaaagtcagcttgtatgcttcttctcc

SEQ ID NO: 65887 - DNA, 123 bp, Glycine max
tgggagagaaagagagagaaagatgtcgaagcgtggcccagggggttccgcagggagtaagttccgcacgtcggtgcatcttccagtggcggcgaccgtgtagtgcgtccacaacaccggggc

SEQ ID NO: 65888 - DNA, 86 bp, Glycine max
tgcaggttacagctgcaaacagacgactaaaggtgacagcaagaccacattaatggtacatgattttagaaaacaacatggtggta

SEQ ID NO: 65889 - DNA, 69 bp, Glycine max
tacagcatcgagaagctggcagaaagattcagttgccagaagcctacatagggtccgctgactacttac

SEQ ID NO: 65890 - DNA, 81 bp, Glycine max
gacagccatggcaggtaatatagatgagtttggtgacaagcatggttctcctaaatgcgtctctgttgcttcttttccctg

SEQ ID NO: 65891 - DNA, 147 bp, Glycine max
gaccgctaaaaccattgataaagatgaagttggagaaccaccttggggggcttaaaggggggttggtggttccttttccttgggggggttccagttgaccccttggacctgacctttttaaaaggggtccagccttaaggtattaat

SEQ ID NO: 65892 - DNA, 292 bp, Glycine max
cactaactaatcaaagatgttcttttttaattaaatggctatcacacaatggagttcgaaatttgcatcctcacatgctaaagtgaaacccatggtttagatatgcacgagattatcactaatagaccatattgggaatggtaaaaaaaacttaaaccattagcttgacaaaaaaaaaaaaaaaaaaaaaaaaaaaaaagcggccgttttaaaggatccaagtttacgtacccttgcttgcaacgtcttagcttttcattagggtaacctaaattcaattaactggccgtgg

SEQ ID NO: 65893 - DNA, 312 bp, Glycine max
gacagcaaaaacaattaataaagatgagtttgaagaacaacatggtggtgctaaaagtgtgtttgttgcttcttttccttgtgggggttacagctgcacgcatggaactgagcttcttcaaaagtgatcagtcatcaagttatgatgatgatgagtattcaaaaccatgctgtgatctctgcatgtgcacacgctcaatgccttctcaatgcagctgtgaagatattaggctgaattcatgccactcagattgtaagagctgtatgtgcacacgcttacagccaggacagtgtcggtgtcttgacaccaacg

SEQ ID NO: 65894 - DNA, 293 bp, Glycine max
gacagcaaaaacaattaataaagatgagtttgaagaacaacatggtggtgctaaaggtgtgtttggtgcttcttttccttgggggggttacagcttcacgcatggaactgaacttcttcaaaagtgatcagtcatcaagttatgatgatgatgagtattcaaaaccatgctgtgatctctgcatgtacacacgctcaatgccttctcaatgcagctgtgaagatattaggctgaattcatgccactcagattgtaagagctgtatgtgcacacgctcacagacaggacagtgt

SEQ ID NO: 65895 - DNA, 362 bp, Glycine max
  unsure (1)..(362): unsure at all n locations
ggcacaagtgagtttgttgatcgagataactagaaacagtgtgatgaaaatgaaggtccttggtttcttcgttgctacaattttggtagcatggcaatgccatgcgtacgatatgttccctctccgaatgaacactggctatggtgcccgtactccggaggtgaaatgcgcaagttggaggcttgctgtggaagcacacaacatctttggctttgagaccattcctgaagagtgcgttgaagcaacaaaggaatacatncatggcgaacaatatagatcagactccaaaacagttaaccaacaagcttacttttatgccagagacctcgaagtccatgccaaggacacatttgtgttcagta

SEQ ID NO: 65896 - DNA, 358 bp, Glycine max
  unsure (1)..(358): unsure at all n locations
gacagcaaaaacaattaataaagatgagtttgaagaacaacatggtggtgctaaaggtgtgtttgttgcttcttttccttgtgggggttacagctgcacgcatggaactgagcttcttcaaaagtgatcagtcatcaagttatgatgatgatgagtattcaaaaccatgctgtgatctctgcatgtgcacacgctcaatgcctnctcaatgcagctgtgaagatattaggctgaattcatgccactcagattgtaagagctgtatgtgcacacgctcacagtcaggacagtgtcggtgtcttgacaccaacgacttctgctacaaaccttgcaagtncagagatgactagaaaaacta

SEQ ID NO: 65897 - DNA, 314 bp, Glycine max
gacagcaaaaacaattaataaagatgagtttgaagaacaacatggtggtgctaaaggtgtgtttgttgcttcttttccttgtgggggttacagctgcacgcatggaactgagcttcttcaaaagtgatcagtcatcaagttatgatgatgatgagtattcaaaaccatgctgtgatctctgcatgtgcacacgctcaatgccttctcaatgcagctgtgaagatattaggctgaattcatgccactcagattgtaagagctgtatgtgcacacgctcacagtcaggacagtgtcgttgtcttgacaccaacgac

SEQ ID NO: 65898 - DNA, 145 bp, Glycine max
gctggaagaggagtgaagcggcagagggaggagcggcattaaaaatgcagatcttcgtgaaaaccctaacggggaagaccataaccctcgaggtcgaaagcagcgacaccattgacaatgtcaaggctaagattcaagacaagga

SEQ ID NO: 65899 - DNA, 223 bp, Glycine max
ggaaacagagagtgatttcagtgagtgatcggtgttcacttgatctcatcataatcgtcagcgtcaattgaagaagatgccgatcagaaacatcgccgtcggaaggcctgaagaggcgactcaccccgacacgttgaaggcggctttggctgagttcatctcaaccttcatcttcgtgttcgccggctcaagctccggcatcgcctacaacaagctcaccgac

SEQ ID NO: 65900 - DNA, 360 bp, Glycine max
gacagcaaaaacaattaataaagatgagtttgaagaacaacatggtggtgctaaaggtgtgtttgttgcttcttttccttgtgggggttacagctgcacgcatggaactgagcttcttcaaaagtgatcagtcatcaagttatgatgatgatgagtatccaaaaccatgctgtgatctctgcatgtgcacacgctcaatgccttctcaatgcagctgtgaagatattaggctgaattcatgccactcagattgtaagagctgtatgtgcacacgctcacagccaggacagtgtcgttgtcttgacaccaacgacttctgctacaaaccttgcaagtccagagatgactagaaaaactaat

SEQ ID NO: 65901 - DNA, 178 bp, Glycine max
acggagggggaccacactcttaacacccactctaaattcctttctgcctggtgaattagcgcacttttccaacctttaattttaagcttaattggattccttttttttcttttccaaatggccacggttaaggttgcccttcaaccaccaccaccggttccggaaattgaaccacccg

SEQ ID NO: 65902 - DNA, 372 bp, Glycine max
gacagcaaaaacaattaataaagatgagtttgaagaacaacatggtggtgctaaaggtgtgtttgttgcttcttttccttgtgggggttacagctgcacgcatggaactgagcttcttcaaaagtgatcagccatcaagttatgatgatgatgagtattcaaaaccatgctgtgatctctgcatgtgcacacgctcaatgccttctcaatgcagctgtgaagatattaggctgaattcatgccactcagattgtaagagctgtatgtgcacacgctcacagccaggacagtgtcgttgtcttgacaccaacgacttctgctacaaaccttgcaagtccagagatgactagaaaaactaatagctctctcaaa

SEQ ID NO: 65903 - DNA, 130 bp, Glycine max
gccagcaaaaccaattaataaagatgggtttgaagaacaccttggtggtgctaaaggtgtgttggtggtttcttttcctggggggggttacagctgcacccatggaactgacctttttcaaaagtgatca

SEQ ID NO: 65904 - DNA, 356 bp, Glycine max
  unsure (1)..(356): unsure at all n locations
gacagcaaaaacaatgaataaagatgagtttgaagaacaacatggtggtgctaaaggtgtgtttgttgcttcttttccttgtgggggttacagctgcacgcatggaactgagcttcttcaaaagtgatcagtcatcaagttatgatgatgatgagtattcaaaaccatgctgtgatctctgcatgtgcacacgctcaatgcctnctcaatgcagctgtgaagatattaggctgaattcatgccactcagattgtaagagctgtatgtgcacacgctcacagccaggacagtgtcgttgtcttgacaccaacgacttctgctacaaaccttgcaagtccagagatgactagaaaaac

SEQ ID NO: 65905 - DNA, 309 bp, Glycine max
gattcacacaactaactgagaaaggcttccatatccccccaaaaatgaagagcaccatcttctttgctctctttctcttttgtgccttcaccacctcatacctaccttcagccatcgctgatttcgtgctcgataatgaaggtaaccctcttgaaaatggtggcacatattatatcttgtcagacataacagcatttggtggaataagagcagccccaacgggaaatgaaagatgccctctcactgtggtgcaatctcgcaatgagctcgacaaagggattggaacaatcatctcgtccccatatcgaa

SEQ ID NO: 65906 - DNA, 120 bp, Glycine max
aagacgcctgaaggctgttccgagtagtcttcggactgatccagctgcttattgacttctcattgatgctgcttgtaaacaacttcataatgattcatttgtctaatgataacattatgt

SEQ ID NO: 65907 - DNA, 198 bp, Glycine max
gatggtaccgtctgacagaagacgaccgaaggttaccgctgatagaagactactgatggttactgttgcgagacgaccacagatcgttacagtttgcacaagacgacagactggtagctgcagatgagacgatattaggctgaattcatgccactcagatcgtgcgatctatatgagtccaggttaactacccgtaca

SEQ ID NO: 65908 - DNA, 104 bp, Glycine max
gtactttttgggatacatcacagaaatgaatcatttttccatcatggagtctgtgtttgtttgtgatttcttcatattcttgttcttatggattgctctgctac

SEQ ID NO: 65909 - DNA, 328 bp, Glycine max
gacagcaaaaacaattaataaagatgagtttgaagaacaacatggtggtgctaaaggtgtgtttgttgcttctttcccttgtgggggttacagctgcacgcatggaactgagcttcttcaaaagtgatcagtcatcaagttatgatgatgatgagtattcaaaaccatgctgtgatctctgcatgtgcacacgctcaatgcctcctcaatgcagctgtgaagatattaggctgaattcatgccactcagattgtaagagctgtatgtgcacacgctcacagccaggacagtgtcgttgtcttgacaccaacgacttctgctacaaacc

SEQ ID NO: 65910 - DNA, 275 bp, Glycine max
  unsure (1)..(275): unsure at all n locations
gacagcaaaaacaattaataaagatgagtttgaagaacaacatggtggtgctaaaggtgtgtttgttgcttcttttccttgtgggggttacagctgcacgcatggaactgagcttcttcaaaagtgatcagtcatcaagttatgatgatgatgagtattcaaaaccatgctgtgatctctgcatgtgcacacgctcaatgcctnctcaatgcagctgtgaagatattaggctgaattcatgccactcagattgtaagagctgtatgtgcacacgc

SEQ ID NO: 65911 - DNA, 314 bp, Glycine max
gacagcaaaaacaattaataaagatgagtttgaagaacaacatggtggtgctaaaggtgtgtttgttgcttcttttccttgtgggggttacagctgcacgcatggaactgagcttcttcaaaagtgatcagtcatcaagttatgatgatgatgagtattcaaaaccatgctgtgatctctgcatgtgcacacgctcaatgcctcctcaatgcagctgtgaagatattaggctgaattcatgccactcagattgtaagagctgtatgtgcacacgctcacagccaggacagtgtcgctgtcttgacaccaacgac

SEQ ID NO: 65912 - DNA, 390 bp, Glycine max
  unsure (1)..(390): unsure at all n locations
aagccaaatggaagattcttcagctataatccagcaacaaagaagacaaccctgcttgcccaagacctctactttgccaatggggttgcagtttcagcagatcaacaatttgtggtcttctgtgaatctgtcttgtaagttatttactagcttaaagtaccttcaaatttaatagttttaaatgcagttttaattgctttatttttatatttgttcaactttggtcctcatacttttaattgagttattttaatcctttaattntattatatattaaatgggcttcctacaagagttataaaattaacttagtaattgaagagagaatgcatgagacaaatcgtgtcttgggaattttcctgattaataaactaacaactaacattaatc

SEQ ID NO: 65913 - DNA, 57 bp, Glycine max
gagacctcaggtcaggcggggctaccggctgagtttaagcatatcaataagcggagg

SEQ ID NO: 65914 - DNA, 314 bp, Glycine max
gacagcaaaaacaattaataaagatgagtttgaagaacaacatggtggtgctaaaggtgtgtttgttgcttcttttccttgtgggggttacagctgcacgcatggaactgagcttcttcaaaagtgatcagtcatcaagttatgatgatgatgagtattcaaaaccatgctgtgatctctgcatgtgcacacgctcaatgccttctcaatgcagctgtgaagatattaggctgaattcatgccactcagattgtaagagctgtatgtgcacacgctcacagccaggacagtgtcgttgtcttgacaccaacgac

SEQ ID NO: 65915 - DNA, 363 bp, Glycine max
  unsure (1)..(363): unsure at all n locations
gacagcaaaaacaattaataaagatgagtttgaagaacaacatggtggtgctaaaggtgtgtttgttgcttcttttccttgtgggggttacagctgcacgcatggaactgagcttcttcaaaagtgatcagtcatcaagttatgatgatgatgagtattcaaaaccatgctgtgatctctgcatgtgcacacgctcaatgcctnctcaatgcagctgtgaagatattaggctgaattcatgccactcagattgtaagagccgtatgtgcatacgctcacagccaggacagtgtcgttgtcttgacaccaacgacttctgctacaaaccttgcaagtccagagatgactagaaaaactaatagc

SEQ ID NO: 65916 - DNA, 190 bp, Glycine max
gagtgcaatttagctgaagcaaagcaatggctacttcaaagttgaaaacccaaaatgtggttgtatctctctccctaaccttaaccttggtactggtgctactgaccagcaaggcaaactcagcggaaactgtttctttcagctggaacaagttcgtgccgaagcaaccaaacatgatccttcaaggaga

SEQ ID NO: 65917 - DNA, 314 bp, Glycine max
  unsure (1)..(314): unsure at all n locations
gacagcaaaaacaattaataaagatgagtttgaagaataacatggtggtgctaaaggtgtgtttgttgcttcttttccttgtgggggttacagctgcacgcatggaactgagcttcttcaaaagtgatcagtcatcaagttatgatgatgatgagtattcaaaaccatgctgtgatctctgcatgtgcacacgctcaatgccttctcaatgcagctgtgaagatattangctgaattcatgccactcagattgtaagagctgtatgtgcacacgctcacagncaggacagtgttcgtgtcttgacaccaacgac

SEQ ID NO: 65918 - DNA, 256 bp, Glycine max
gattcacacaactaactgagaaagtctttcatagccccccaaaaatgaagagcaccatcttctatgctctctttctcttttgtgcctccaccacctcatacctaccttcagccatcgctgatttcgtgctcgataatgaaggtaaccctcttgaaaatggtgccacatattatatctggtcagacataacagcatttggtggaataagaccagccccaacgggaattgaaaaatgccctctcactggggcgcaatc

SEQ ID NO: 65919 - DNA, 85 bp, Glycine max
aggttacgatgcaagaagacgaccgcaggttactgctgcagtctgacaacagaatgctaccgttgctagaagactattcaatggt

SEQ ID NO: 65920 - DNA, 191 bp, Glycine max
gacagcataaacaattaataaagatgagtttgaagaacaacatggtggtgctaaaggtgtgtttgatgcttcttttccttgtgggggttacagctgcacgcatggaactgagcttatttataagtgatcagtcatcaaggtatgatgatgatgagtattcaaaaccatgctgtgatctctgcatgtgcaca

SEQ ID NO: 65921 - DNA, 173 bp, Glycine max
gacagcggaaacaattaataaagatgagtttgaagaacaacatggtggtgctaagggtgtgtatgaggcttatattactagtggggggtacagagtgaagcatggaacatagcttcttcaaaaggtgataggtagtcaaggtatgatgatgatgagtattcaaaaccatgctg

SEQ ID NO: 65922 - DNA, 89 bp, Glycine max
gacgacagaaggggaaaacaaaaaccatcacaaaaaaaagaaaaagtggagaaaaaaaaaaagcggccggtcaaaagaacccaggctaa

SEQ ID NO: 65923 - DNA, 104 bp, Glycine max
gacagcaaaaacaattaatgaagatgagtttgaagaacaacatggtggtgctaaaggtgtgtttgttgcttatattacttgttggggttacagctgtacgcatg

SEQ ID NO: 65924 - DNA, 136 bp, Glycine max
gaatctcttcacagaagaaaaaagagaagaagatgggtttgaagaacaacatggtggtgctaaaggtgtgtttggtgctacttttccttgtggggggtactactagtgccaacttgatgctgagtaagcttggcct

SEQ ID NO: 65925 - DNA, 62 bp, Glycine max
tacagcaaaaacaattaatagtagatgagtttgaagaacaacatggtagtgctgaaggtgtg

SEQ ID NO: 65926 - DNA, 92 bp, Glycine max
gagtagtagtgttcctcaagccaccgtaccgtgttgcctctatgcaatctacagccaaaagccttcaagagtacttagacggagggtgccaa

SEQ ID NO: 65927 - DNA, 374 bp, Glycine max
gacagcaaaaacaattaataaagatgagtttgaagaacatcatggtggtgctaaaggtgtgtttgttgcttcttttccttgtgggggttacagctgcacgcatggaactgagcttcttcaaaagtgatcagtcatcaagttgtgatgatgatgagtattcaaaaccatgctgtgatctctgcatgtgcacacgctcaatgccttctcaatgcagctgtgaagatattaggctgaattcatgccactcagattgtaagagctgtatgtgcacacgctcacagccaggacagtgtcgttgtcttgacaccaacgacttctgctacaaaccttgcaagtccagagatgactagaaaaactaatagctctctcaaatg

SEQ ID NO: 65928 - DNA, 184 bp, Glycine max
aggaacaatgttggaaacagaagaccttggcatgtcgattcttcaaagattgcattcacagagacaatctctactgcatacacatgacacgcttcatggagtggatgataacacagacaagagcaagaaaattttggctaacatgtcaagaaagatggacaaaaacaaatggattttgagcacc

SEQ ID NO: 65929 - DNA, 295 bp, Glycine max
acgcttgcgtacacgcgtaacgaaacacttacggtttgatcatacaaaacgacccaaaggatttctcgggtctagcttacaaactaattcttagacttccagcaattcatatcactttcatcttcatcctttttttattatgatcaaataccaactaataccaaaacttatccttcacaaattaacagccttaaacttcaagtctcaactgcccctattaacaactataataattcgcgacccacgtgtccccatttgaatggataataaccagctccatggtaatacaaaaatt

SEQ ID NO: 65930 - DNA, 279 bp, Glycine max
aggagaggagaaatgaggacagacgagtagatcatgaaggtctatgcggaggagagagagtccatgttctgacaccgacaacattcatatgtacccaaagctcaccgcttcaatagctgaccagagtacattctttatcttgactttatgacacaatataaagatcttacaccccaattctcagctgtccctcagaacatcttggttactactcattccatgcctccaacggtaaagtcttcactgtaagcaccatgttactacattgtctcataccct

SEQ ID NO: 65931 - DNA, 106 bp, Glycine max
ggaattcgattcatacacattccctaactttcgagttctctcaggtcgcgcggtgctctactgtctcggcgccggtgccttcgcgtcttgagactgttcgtccatt

SEQ ID NO: 65932 - DNA, 55 bp, Glycine max
cggtccggaattcccgggtcggacccacgacgttcgcccacgcgtctcgaccact

SEQ ID NO: 65933 - DNA, 170 bp, Glycine max
gacagtaaaaacaattaataaagatgagattggagaacaacatggtggtgctaaaggtgtgtttgttgcgtattttgcgtgtgggtggtacagctgtacgcatggaactgagcttctttaatagtgatcagttatcaagttatgatgatgatgagtattcaaaaccatgc

SEQ ID NO: 65934 - DNA, 304 bp, Glycine max
gattcacacggctaactaagaaagtcttccatagccccccaaaaatgaagagcaccatcttctttgctctctttctcttttgtgccttcaccacctcatacctaccttcagccatcgctgatttcgtgctcgataatgaaggtaaccctcttgaaaatggtggcacatattatatcttgtcagacataacagcatttggtggaataagagcagccccaacgggaaatgaaagatgccctctcactgtggtgcaatctcgcaatgagctcgacaaagggattggaacaatcatctcgtccccata

SEQ ID NO: 65935 - DNA, 132 bp, Glycine max
  unsure (1)..(132): unsure at all n locations
ggnncagnnngnngnncgaagccaaaacccnagcagccggcgaggagggcagacgangagggggangcggcggcagcggcaggggcagcgcagccgaagaagagaacgagcaagaaanncagcnncaggggc

SEQ ID NO: 65936 - DNA, 79 bp, Glycine max
ggccacaagctacatacacaagaatggcttgcacacttggctcagggatttcggtaattttttttacctttgcagtcat

SEQ ID NO: 65937 - DNA, 95 bp, Glycine max
cttgaaaaataaaaaaatagaaaaaagaacaaaggagaaaaatgagaaaaaaaaaaaaaagcggcagttctagaggatccaagtttacgtacgcg

SEQ ID NO: 65938 - DNA, 258 bp, Glycine max
aggcgtgagaacacctccgaaaggcggcttcattttctatcacccactcgacccccaaccttcacaaaggcactattaacgacccttctcttatttattcccacacctataccttaccgatcttccttcattttacacattcaccaacaaccccatagtgctctaactactcttgctttgcccaacattcaaactatcctcaaccaaactagagctatttcaaataccaaagacctgcaggataattcaattctgaaa

SEQ ID NO: 65939 - DNA, 414 bp, Glycine max
  unsure (1)..(414): unsure at all n locations
gacagcaaaaacaattaataaagatgagtttgaagaacaacatggtggtgctaaaggtgtgtttgttgcttcttttccttgtgggggttacagctgcacgcatggaactgagcttcttcaaaagtgatcagtcatcaagttatgatgatgatgagtattcaaaaccatgctgtgatctctgcatgtgcacacgctcaatgcctnctcaatgcagctgtgaagatattaggctgaattcatgccactcagattgtaagagctgtatgtgcacacgctcacagccaggacagtgtcgttgtcttgacaccaacgacttctgctacaaaccttgcaagtccagagatgactagaaaaactaatagctctctcaaatggacgaagcccctttaggcttttgttgntatggtaggggag

SEQ ID NO: 65940 - DNA, 56 bp, Glycine max
gacagcaaaaacaattagtaaagatgagtttgaagaacaacagggtggtgctaaag

SEQ ID NO: 65941 - DNA, 110 bp, Glycine max
  unsure (1)..(110): unsure at all n locations
ggcacaccaacaccaaaacaaacccactaagatggcttcctttgtatgcttcctagtgctgcttcttgcagcccttatnctcatgccctcaagggcttgctacttactac

SEQ ID NO: 65942 - DNA, 72 bp, Glycine max
tgtgaaaaggaaaaaaagataaaagtagtgcagtgaggaacgcgaagactcgagatagggaatatgcgacag

SEQ ID NO: 65943 - DNA, 157 bp, Glycine max
gacagcaaaaacaattaataaagatgagtttgaagaacaacatggtggtgctaaaggtgtgtctgctgcttcttttccttgggggggttacagcttcacgcatggaactgagcttcttcaaaagggatcaggcatcaagttatgatgaccatgagta

SEQ ID NO: 65944 - DNA, 234 bp, Glycine max
tgacagcataaacaattgataaagatgagtttgaagaacaacatggtggtgctaaaggtgtgtttgttgcttcttttccttgtgggggttacagctgcactcatggaactgagcttcttcaaaagtgatcagtcatcaagttatgatgatgatgagtattcaaaaccatgctaggatctctgcatgtgcacacgctcaacgccttctcaatgcagctgtgaagatattaagctg

SEQ ID NO: 65945 - DNA, 400 bp, Glycine max
  unsure (1)..(400): unsure at all n locations
gaaaaacaagtaccattagaaatgaagttagaagcagtaggaggagggtgcaagtaccacccaaataacaagcaactacccggtgtttgtccctcatgcttaagagacaaactcttgaagctctatgacagcagcaatccaacttatcctctcccctgtcctcctcgaccttacgtgtctcgtggccaccgncgccatagttctctcgtaatggattctgcttcttccaccatggttagcttcaattatgggttgaagaagagcaactccattgcctttgcttcgagaagccaagccataaatagggaagtcaatggaaacaacaagggtagtaggaaaaggggtatttggtccaagctgctcaaattgaccaaaaagaacaccaaagaggccttcatgc

SEQ ID NO: 65946 - DNA, 159 bp, Glycine max
aggtaccggttgcaaaagaccaccgaaaggtaccgcttgcagaaaaccaccgaaaggtacggctgcaaaaaaacgacgaaaggtaccgctgcaaaagaccacgaaagggaacccccttcataaaaaaatttctgtatataatatacagcacccttttcc

SEQ ID NO: 65947 - DNA, 414 bp, Glycine max
  unsure (1)..(414): unsure at all n locations
gacagcaaaaacaattaataaagatgagtttgaagaacaacatggtggtgctaaaggtgtgtttgttgcttcttttccttgtgggggctacagctgcacgcatggaactgagcttcttcaagagtgatcagtcatcaagttatgatgatgatgagtattcaaaaccatgctgtgatctctgcatgtgcacacgctcaatgcctcctcaatgcagctgtgaagatattaggctgaattcatgccactcagattgtaagagctgtatgtgcacacgcccacagccaggacagtgtcgttgtcttgacaccaacgacttctgctacaaaccttgcaagtccagagatgactagaaaaactaatagctctctcaaatggacgaagcccctttaggctttnngttgtatgttaggggag

SEQ ID NO: 65948 - DNA, 96 bp, Glycine max
gtaccgggctgcgtatgaagaccgacatgaaggggtaccgggctggcgagaagtagcgacagaagggggtgacggctgctgagaagaacgtacaga

SEQ ID NO: 65949 - DNA, 90 bp, Glycine max
gacacaactaactaagaaaggctttcatagccccccaaaaattgagaggaccatcttttttggtctctttctcttttggggctttaacaa

SEQ ID NO: 65950 - DNA, 78 bp, Glycine max
ggtatcttaatttcaaatcatagaaatcttgcgccaaagtatggggtttcttggggtggttcttttcttccttttaag

SEQ ID NO: 65951 - DNA, 353 bp, Glycine max
gattctcaagttccatcaccgaaaaaaaaaaaaaaaaaaaaaaaaagcgaacggtctagactatccaagctaacctaccctaccctgccacgccatagcttatctatagtgtcacgtaaattaaattcactggactggcctttacaacacaacgactggaaaaacaaatacccttacccaactcaacttaattgcattacatcacattttcgtcaggtcacctaatatcgaagaggacaggaccgaacggatttcccaacagaacagcagcccgaattgcaaatggaacgcgacctgtactcgagcattaaattcagcgcgtgtggtggttacgctacacgcagaccgtacac

SEQ ID NO: 65952 - DNA, 258 bp, Glycine max
gcattgtgattcatttgcacatttggaaagtgttgtttttctttttttcatttgcattgcaaagcaaaaaccttgcaaattgcaatggcttccaacaaggttattgccaccatcttggttctttctctccttgcctactcaacatcattcaccaatgcatgtggcacatgccacccaaaacctactccttctccccctcctccattagggaagtgccccaaggacacattgaagctaggggtgtgtgctgatgttcta

SEQ ID NO: 65953 - DNA, 247 bp, Glycine max
  unsure (1)..(247): unsure at all n locations
gacagcaaaaacaattgataaagatgagtttgaagaacaacatggtggtgctaaaggtgtgtttgttgcttcttttccttgtgggggttacagctgcacgcatggaactgagcttcttcaaaagtgatcagtcatcaagttatgatgatgatgagtattcaaaaccatgctgtgatctctgcatgtgcacacgctcaatgcctnctcaatgcagctgtgaagatattangctgaattcatgccactc

SEQ ID NO: 65954 - DNA, 263 bp, Glycine max
gacagcaaaaacaattaataaagatgagtttgaagaacaacatggtggtgctaaaggtgtgtttgttgcttcttttccttgtgggggttacagctgcacgcatggaactgagcttcttcaaaagtgatcagtcatcaagttatgatgatgatgagtattcaaaaccatgctgtgatctctgcatgtgcacacgctcaatgcctcctcaatgcagctgtgaagatattaggctgaattcatgccactcagattgtaagagctgt

SEQ ID NO: 65955 - DNA, 264 bp, Glycine max
atcagtatgttatgtaaacaccaaaaaaaaaaaaggaaaaaaagaaaagcgggcggtctatatgaacgaagcttacttacgcacgcatgcaagctaatagctatcttatagagagagctaactacaattaactgactggccgtttacaaacaacggactgactaaaaaaaggctgtacgctaactaaattaattggcatgacatacatctttcgttagctggctgaataactaacaagcaggcaccgatcgatcttcctaacaa

SEQ ID NO: 65956 - DNA, 242 bp, Glycine max
caccaaataaaaaacatgtctaattattgtttcaaacctgatttatatatttattcatttatacatgagtcaacttcttgtattcattaaaactatatatttttcaagttcatttataaatatgtagtcaagatatcaggacatgttgaccattcgttgaaaaagtaaaaaaaaattatgaatgcctatcgcattcaataaaaagacaaggaattatgtatgatggaaaaaaaaaactaaat

SEQ ID NO: 65957 - DNA, 205 bp, Glycine max
gacagcataaacaattaataaagatgagtttgaagaacaacatggtggtgctaaaggtgtgtttgttgcttcttttccttgtgggggttacagctgcacgcatggaactgagcttcttcaaaagtgatcagtcatcaagttatgatgatgatgagtattcaaaaccgggctgggatctctggatgggcacacgcttaatggcttc

SEQ ID NO: 65958 - DNA, 172 bp, Glycine max
ggagagagaggctgaaacaaagaagtgaaaataacagcaaaaagtagcagctgctgcagctcccccgaagcttatctcagcagcagatactcaaccctgtttgagtagccgagaataacaccaatgggagaggaggaaaagaaaccagaggaacaacccaaggcagaggagg

SEQ ID NO: 65959 - DNA, 341 bp, Glycine max
gacggcgacagcgaaagaaattaggagaggtgaggtgaccaccgacgattccatttctacgaactcagacccttcaattccaactcgtaccttatttctatctatttctttttcatgtttcattatttttctcaattttcttttgttccgcctttgatctgattcctagttattagggcttatatcgtgtatttggggttttcattttgtgtatgcactctgcaaatcgttcgtgtatttcttctgtttgattcgtctttatggaatatcattttttcaaatgcatataactagggcagattaattaccggtgtaattgatatattatgttttcagacttt

SEQ ID NO: 65960 - DNA, 346 bp, Glycine max
gacagcaaaaacaattaataaaggtgagtttgaagaacaacatggtggtgctaaaggtgtgtttgttgcttcttttccttgtgggggttacagctgcacgcatggaactgagcttcttcaaaagtgatcagtcatcaagttatgatgatgatgagtattcaaaaccatgctgtgatctctgcatgtgcacacgctcaatgcctcctcaatgcagctgtgaagatattaggctgaattcatgccactcagattgtaagagctgtatgtgcacacgctttcacagccaggacagtgtcgttgtcttgacaccaacgacttctgctacaaaccttgcaagtccagagat

SEQ ID NO: 65961 - DNA, 310 bp, Glycine max
agggacagcaaaaacaattaataaagatgagtttgaagaacaacatggtggtgctaaaggtgtgtttgttgcttcttttccttgtgggggttacagctgcacgcatggaactgagcttcttcaaaagtgatcagtcatcaagttatgatgatgatgagtattcaaaaccatgctgtgatctctgcatgtgcacacgctcaatgcctcctcaatgcagctgtgaagatattaggctgaattcatggggccactcagattgtaagagctgtatgtgcacacgctcacagccaggacagtgtcgttgtcttga

SEQ ID NO: 65962 - DNA, 351 bp, Glycine max
  unsure (1)..(351): unsure at all n locations
gacagcaaaaacaattaataaagatgagtttgaagaacaacatggtggtgctaaaggtgtgtttgttgcttcttttccttgtgggggttacagctgcacgcacggaactgagcttcttcaaaagtgatcagtcatcaagttatgatgatgatgagtattcaaaaccatgctgtgatctctgcatgtgcacacgctcaatgcctcctcaatgcagctgtgaagatattaggctgaattcatgccactcagattgtaagagctgtatgtgcacacgctcacaggnntcaggacagtgtcgttgtcttgacaccaacgacttctgctacaaaccttgcaagtccagagatgact

SEQ ID NO: 65963 - DNA, 402 bp, Glycine max
tgtggtcaattgaatggccatgagttttttcatcacagattgttgccaatactgctcttgagtcacccagattagcaatgacaagaccttcaccctatgtattgttattgttacattatgttctttttccctatattgaacatgaaaactatgggaaggtccatttacctgtgttttatgataactacagcagtggttccactgctagagcaatctaaattcttttgaagcttcacctacttgtccatcaccttgaaagcacttaaaattgcttctttccatttcttgcagtcgattcctctcttactgtgtcaacataggtctttgtggtgtactaaccattctttattgcatcaatcttttcaagaacattcttttggtccagtatgagggaagataaac

SEQ ID NO: 65964 - DNA, 416 bp, Glycine max
gattcacacaactaactaagaaagtcttccatagctccccaaaaatgaagagcaccatcttctttgctctctttctcttttgtgccttcaccacctcatacctaccttcagccatcgctgatttcgtgctcgataatgaaggtaaccctcttgaaaatggtggcacatattatatcttgtcagacataacagcatttggtggaataagagcagccccaacgggaaatgaaagatgccctctcactgtggtgcaatctcgcaatgagctcgacaaagggattggaacaatcatctcgtccccatatcgaatcccgtttatcgccgaaggccatcctttgagccttaagttcgattcatttgcagttataatgctgtgtgttggaattcctaccgagtggtctgttgtggaggatcta

SEQ ID NO: 65965 - DNA, 350 bp, Glycine max
  unsure (1)..(350): unsure at all n locations
gacagcaaaaacaattaataaagatgagtttgaagaacaacatggtggtgctaaaggtgtgtttgttgcttcttttccttgtgggggttacagctgcacgcatggaactgagcttcttcaaaagtgatcagtcatcaagttatgatgatgatgagtattcaaaaccatgctgtgatctctgcatgtgcacacgctcaatgccttctcaatgcagctgtgaagatattaggctgaattcatgccactcagattgtaagagctgtatgtgcacacgctcacagcnnccaggacagtgtcgttgtcttgacaccaacgacttctgctacaaaccttgcaagtccagagatgac

SEQ ID NO: 65966 - DNA, 311 bp, Glycine max
gattcacacaactaactaagaaagtcttgcatagcgcggccaaaaatgaagagcaccatcttctttgctctctttctcttttgtgccttcaccacctcatacctaccttcagccatcgctgatttcgtgctcgataatgaaggtaaccctcttgaaaatggtggcacatattatatcttgtcagacataacagcatttggtggaataagagcagccccaacgggaaatgaaagatgccctctcactgtggtgcaatctcgcaatgagctcgacaaatggattggaaaaacaatcatctagttcccatatcg

SEQ ID NO: 65967 - DNA, 338 bp, Glycine max
gacagcaaaaacaattaataaagatgagtttgaagaacaacatggtggtgctaaaggtgtgtttgttgcttcttttccttgtgggggttacagctgcacgcatggaactgagcttcttcaaaagtgatcagtcatcaagttatgatgatgatgagtattcaaaaccatgctgtgatctctgcatgtgcacacgctcaatgcctcctcaatgcagctgtgaagatattaggctgaattcatgccactcagattgtaagagctgtatgtgcacacgccttcacagccaggacagcgtcgttgtcttgacaccaacgacttctgctacaaaccttgcaagt

SEQ ID NO: 65968 - DNA, 159 bp, Glycine max
tgcatgcggctgcgagatgactaccgtatgtggagcaacaaacagtgctcctacctgaactcgatgaacaacaactcattggtttaatgttctggatacatgcattcttcatgttgaatgcgacttttatctacagtgtgcagctagcttatatgaatt

SEQ ID NO: 65969 - DNA, 291 bp, Glycine max
cacaaacacacaatttttgaaattgaaccaaaacacggggacctgtaggtagatctatctatatctctctctctatatctatctacagactccaataactttctctacaaccactaatataaactctcaatactaaatccttcttcccatctaactaaaacacaacttaccctctggaacattaaaaccatcaattctcaaaccccctaaaacactttacacccgaaaaattccaattcctaatgaaccaacatcatgctctaacccccctgcaatttcctatacccataa

SEQ ID NO: 65970 - DNA, 210 bp, Glycine max
aggaacaccaaatacaactaatttagatgacgtcgcacaacaacatggtcattcgaaaagtgttaacagtgctacttttacctatcacatttacaaacgcactcatcgaacctaacattctcaaaactgatcagccatcaaattatcatgatgatcactattcaaaacacatctgcgatctctgaactttcacacactcaatacctcctc

SEQ ID NO: 65971 - DNA, 117 bp, Glycine max
ggtggactgcaagtgctgtttaactaatggagaaatctcactgataatggcatcacatggtaactaaaagcttggatcagggtcaggggtaaaaaaaagtaaaatgcacttgtatac

SEQ ID NO: 65972 - DNA, 166 bp, Glycine max
gagagtggaaccctaaagctacaggtctccttcctgcgtccaccatcgcaccaagtcgcagcttcatagcagcaccgcaccgcaccgcaccaggtcttctttttttctttcatggcggaggaagttacttctcaattaaaaaaaaatttgctgaaaaaaaaaacaa

SEQ ID NO: 65973 - DNA, 324 bp, Glycine max
ggttctagtgtatgtgattgttgtgactcgttcttcttcgtcgttatcttcttcttttgatgtttgtgtgtttgttttttctctcacctgaaaatgtcttgctgcggtggtaactgtggttgcggaaacgcctgcaagtgcggcaacggctgcggaggctgcaagatgtacccagacttgagctacaccgagtcaaccaccaccgagaccttggtcatgggagtggcaccagttaaagctcaattcgagagtgctgaaatgggtgttcccgctgagaacgattgggctgcaaatgtggagctaactgcacctgcaacccctgca

SEQ ID NO: 65974 - DNA, 72 bp, Glycine max
cccacgcgtccgcccacgcgtccgcccacgcgtccgcccacgcgtccgcccacgcgtccgcccacgcgttcg

SEQ ID NO: 65975 - DNA, 333 bp, Glycine max
ggtagttcaattccaatatattccattctctctgtgtatttccctacctctcccttcaagatgcagatcttcgtcaagaccctcaccgacaagaccatcacccttgaggtggaaagctctgacaccatcgacaacgtcaaggccaagatccaggacaaggaaggaatccccccggaccagcaacgtctcattttcgccggaaagcaacttgaggacggccgtacccttgctgactacaacattcagaaggagagtactcttcaccccctcgtcctccgtctccgtggtggcatgcagatcttcgttaagacactcaccggcaagaccataacc

SEQ ID NO: 65976 - DNA, 127 bp, Glycine max
gtaagtgatgacaaatataatcccagctctatgagaccttcgctactgcaaggtctgggattagatttgtttacagttgtctgagccacgttctcaaacgttatgtacatttttattatttctctct

SEQ ID NO: 65977 - DNA, 360 bp, Glycine max
gacagcaaaaacaattaataaagatgagtttgaagaacaacatggtggtgctaaaggtgtgtttgttgcttcttttccttgtgggggttacagctgcacgcatggaactgagcttcttcaaaagtgatcagtcatcaagttatgatgatgatgagtattcaaaaccatgctgtgatctctgcatgtgcacacgctcaatgcctcctcaatgcagctgtgaagatattaggctgaattcatgccactcagattgtaagagctgtatgtgcacacgctcacagccaggacaaaagtgtcgttgtcttgacaccaacgacttctgctacaaaccttgcaagtccagagatgactagaaaaact

SEQ ID NO: 65978 - DNA, 318 bp, Glycine max
ggcacaagtgagtttgttgatcgagataactagaaacagtgtgatgaaaatgaaggtccttgttttcttcgttgctacaattttggtagcatggcaatgccatgcgtacgatatgttccctctccgaatgaacactggctatggtgcccgtactccggaggtgaaatgcgcaagttggaggcttgctgtggaagcacacaacatctttggctttgagaccattccttgagaatgcgttgaagcaacaaaggaataacccatccatggcgaacaatatagatcaaacttcaaaacagttaaccaacaagcttactttta

SEQ ID NO: 65979 - DNA, 353 bp, Glycine max
ggcacaagtgagtttgttgatcgagatggctagaaacagtgtgatgaaaatgaaggtccttgttttcttcgttgctacaattttggtagcatggcaatgccatgcgtacgatatgttccctctccgaatgaacactggctatggtgcccgtactccggaggtgaaatgcgcaagttggaggcttgctgtggaagcacacaacatctttggctttgagaccattcctgaagagtgcgttgaagcaacaaaggaatacatccatggcgaacaatatagatcagacttttcaaaacagttaaccaacaagcttacttttatgccagagacctcgaagtccatcccaaggacacatt

SEQ ID NO: 65980 - DNA, 323 bp, Glycine max
gattcacacaactaacgaagaaagtcttccatagccccccaaaaatgaagagcaccatcttctttgctctcttcctcttttgtgccctcaccacctcatacctaccttcagccatcgctgatttcgtgctcgataatgaaggtaaccctcttgaaaatggtggcacatattatatcttgtcagacataacagcatttggtggaataagagcagccccaacgggaaatgaaagatgccctctcactgtggtgcaatctcgcaatgaaaggctcgacaaagggattggaacaatcatctcgttcccatatcgaatccgttttatc

SEQ ID NO: 65981 - DNA, 337 bp, Glycine max
gacagcaaaaacaattaataaagatgagtttgaagaacaacatggtggtgctaaaggtgtgtttgttgcttcttttccttgtgggggttacagctgcacgcatggaactgagcttcttcaaaagtgatcagtcatcaagttatgatgatgatgagtattcaaaaccatgctgtgacctctgcatgtgcacacgctcaatgccttctcaatgcagctgtgaagatattaggctgaattcatgccactcagattgtaagagctgtatgtgcacacgcttttacagccaggacagtgtcgttgtcttgacaccaacgacttctgctacaaaccttgcaag

SEQ ID NO: 65982 - DNA, 349 bp, Glycine max
gacagcaaaaacaattaataaagatgagtttgaagaacaacatggtggtgctaaaggtgtgtttgttgcttcttttccttgtgggggttacagctgcacgcatggaactgagcttcttcaaaagcgatcagtcatcaagttatgatgatgatgagtattcaaaaccatgctgtgatctctgcatgtgcacacgctcaatgcctcctcaatgcagctgtgaagatattaggctgaattcatgccactcagattgtaagagctgtatgtgcacacgctcacagccaagggacagtgtcgttgtcttgacaccaacgacttctgctacaaaccttgcaagtccagagatgac

SEQ ID NO: 65983 - DNA, 226 bp, Glycine max
gacagcaaaaacaattaataaagatgagtttgaagaacaacatggtggtgctaaaggtgtgtttgttgcttcttttccttgtgggggttacagctgcacgcatggaactgagctttttcaaaagtgatcagtcatcaagttatgatgatgatgagtattcaaaaccatgctgtgatctctgcatgtgcacacgctcaatgccttctcaatgcacctgtgaagatat

SEQ ID NO: 65984 - DNA, 211 bp, Glycine max
ccagaggacgaccgacagagacagttaaaacatttaattaagatgagtctgaataacagccagcattgtctaaatgaatgtgtgcttcctccttcccttgctagggttacaaatacacgcatacaactgaacttgcttaaaaatgatcaaccattaagctctgattttaatgaatattcatattcaaaccttcatctctacatttgtacac

SEQ ID NO: 65985 - DNA, 272 bp, Glycine max
gacagcaaaaacaattaataaagatgagtttgaagaacaacatggtggtgctaaaggtgtgtttgttgcttcttttccttgtgggggttacagctgcacgcatggaactgagcttcttcaaaagtgatcagtcatcaagttatgatgatgatgagtattcaaaaccatgctgtgatctctgcatgtgcacacgctcaatgcctttttctcaatgcagctgtgaagatattaggctgaattcatgccactcagattgtaagagctgtatgtgc

SEQ ID NO: 65986 - DNA, 127 bp, Glycine max
aggtgtgcgaacacgtccgagaggacagaacacggacatccagtgacagaggcccacatagaaactggtttgccggtctgggatacacgcccagatggttattgttgacgcacgactccacatgctg

SEQ ID NO: 65987 - DNA, 179 bp, Glycine max
gattcacacaactaactaagaaagtcttccatagccccccaaaaatgaagagcaccatcttctttgctctctttctcctttgtgccttcaccaccttatacctacctttagccattgcttttgatttcgtgctcgataatgaaagtaaccctcttgaaaatggtggcacatattatatc

SEQ ID NO: 65988 - DNA, 315 bp, Glycine max
gacagcaaaaacaattaataaagatgagtttgaagaacaacatggtggtgctaaaggtgtgtttgttgcttcttttccttgtgggggttacagctgcacgcatggaactgagcttcttcaaaagtgatcagtcatcaagttatgatgatgatgagtattcaaaaccatgctgtgatctctgcatgtgcacacgctcaatgcctgctcaatgcagctgtgaagatattaggctgcattcatgccactcagattgtaagagctgtatgtgcacacgctcacagccaggacagtgtcgttgtcttgacaccaacgact

SEQ ID NO: 65989 - DNA, 350 bp, Glycine max
gagttacataacatacttgagaagaagctgcatgtcaggacccggatattgaatctgaatccaatgaagatggtaagaaaagaagagaatggtacctactacctacctatcatttgagataaacctcggcttggaggcaaccgcattcttgacaatcaaaacaatgccgtgttcagacaactccaacacggcgtcctacgttaattaaggaatgaagaaaatagggaattactacctgctggcgcttccaccgaacggcccttgaacgttttccagctagcatataacgtctggggcttcttcctcctcctccatgccaccttcgcaaaaccccttctctatctttcaac

SEQ ID NO: 65990 - DNA, 344 bp, Glycine max
gaaggaccagacaagcggagctaaatgactctcggtgcccactgtgcaacagtccggacgaagatgcaacacacctatttttctactacactaagaccctacccctatggtgggaatctcagtcatggataaattcatcgggtgtatatccacacacttccaaagatcattttctgcaacatgataaccggtctgctgttggagttagagctagaagatggaagtgctggttgataacactaacatggacaatttggaagcatctaaacaggatagtcttagataatcaatcttttgatggaagttaagtcatggatgacgcactatttctactatggtcttgg

SEQ ID NO: 65991 - DNA, 386 bp, Glycine max
gacagcacaaacaattaataaagatgagtttgaagaacaacatggtggtgctaaaggtgtgtttgttgcttcttttccttgtgggggttacagctgcacgcatggaactgagcttcttcaaaagtgatcagtcatcaagttatgatgatgatgagtattcaaaaccatgctgtgatctctacatgtgcacacgctcaatgcctcctcaatgcagctgtgaagatattaggctgaattcatgccactcagattgtaagagctgtatgtgcacacgctcacagccaggacagtgtcgctgtcttgacaccaacgacttctgctacaaaccttgcaagtccagagatgactagaaaaactaatagctctctcaaatggacgaagcccct

SEQ ID NO: 65992 - DNA, 275 bp, Glycine max
gaagcataggcatagggttggatatagctaaagcgcggagaggactacattagacacctggggtttgctactggccatcttaacttcacactttacattctaaactgctaaaaccaaatcatctttccacactgcatcaccagttgcatcttcaacgctcattcaacattccatgtgcacatcgcctgcttcatctattacttcataaatcttcagcgacgacgacctctcacccaatgcctttgcattaccgcaagttgatacaaacgactact

SEQ ID NO: 65993 - DNA, 392 bp, Glycine max
gataccaaaaacaaaacacgagccaagtgaaagtgagaaaaaataagaatcaaagagcataatgtcagggatcattcacaagattggggagacccttcatgtgggagggcacaagaaggaggaggagcataagggtgagcaccatgctggagaatacaaaggggagcaccatggtgaacacagtagtgagtacaaaggagagcatcatggtgaacacaaagctggagagtaccatggtgagcacaagccagagcacaaagaggggttcctagacaaagtcaaggacaagatccatggtgagggcggcgccgccgagggcgagaagaagaagaaggagaagaagaagaaggagcatggccatgagcatggccatgacagcagcagcagcagtg

SEQ ID NO: 65994 - DNA, 374 bp, Glycine max
  unsure (1)..(374): unsure at all n locations
gacagcaaaaacaattaataaagatgagtttgaagaacaacatggtggtgctaaaggtgtgtttgttgcttcttttccttgtgggggttacagctgcacgcatggaactgagcttcttcaaaagtgatcagtcatcaagttatgatgatgatgagtattcaaaaccatgctgtgatctctgcatgtgcacacactcaatgcctnctcaatgcagctgtgaagatattaggctgaattcatgccactcagattgtgagagctgtatgtgcacacgctcacagtcaggacagtgtcgttgtcttgacaccaacgacttctgctacaaaccttgcaagtccagagatgactagaaaaactaatagctctctcaaatg

SEQ ID NO: 65995 - DNA, 394 bp, Glycine max
  unsure (1)..(394): unsure at all n locations
gacagcaaaaacaattaataaagatgagtttgaagaacaacatggtggtgctaaaggtgtgtttgttgcttcttttccttgtgggggttacagctgcacgcatggaactgagcttcttcaaaagtgatcagtcatcaagttatgatgatgatgagtattcaaaaccatgctgtgatctctgcatgtgcacacgctcaatgccttctcaatgcagctgtgaagatattaggctgaattcatgccactcagattgtaagagctgtatgtgcacacgctcacagccaggacagtgtcgntgtcttgacaccaacgacttctgctacaaaccttgcaagtccagagatgactangaaaactaatagctctctcaaatggacgaagcccctttaggctt

SEQ ID NO: 65996 - DNA, 376 bp, Glycine max
gacacaactaactaagaaagtcttccatagccccccaaaaatgaagagcaccatcttctttgctctctttctcttttgtgccttcaccacctcatacctaccttcagccatcgctgatttcgtgctcgataatgaaggtaaccctcttgaaaatggtggcacatattatatcttgtcagacataacagcatttggtggaataagagcagccccaacgggaaatgaaagatgccctctcactgtggtgcaatctcgcaatgagctcgacacagggattggaacaatcatctcgtacccatatcgaatccgctttatcgccgaaggccattctttgagccttaagttcgattcatttgcagttataatgctctgtgtt

SEQ ID NO: 65997 - DNA, 92 bp, Glycine max
tgaaagatgccgtacaactgtggtgcaatctcgcaatgagcttaagcggacggtttagaacattcatgtttacgtactcttgcatgcgattt

SEQ ID NO: 65998 - DNA, 256 bp, Glycine max
ggttcacaatcctcctcatctctcttctcttctgcatcgcccacacttgcagcgcctccaaatggcagcaccagcaagatagctgccgcaagcagctccagggggtgaacctcacgccctgcgagaagcacatcatggagaagatccaaggccgcggcgatgacgatgatgatgatgacgacgacaatcacattctcaggaccatgcggggaagaatcaactacataaggaggaacgaagaaaaaaaaactaatag

SEQ ID NO: 65999 - DNA, 360 bp, Glycine max
aggcgtgagatgacagcagacggcggactggtgcgccaagttgcggattcgatacccttatcagtccaacgaggtagacgtatcacagttaacatgcgctttgatgcaaccggatcacaggaggctcagatcatgaagaatactattactgaccgtgaagagacagcaatcagactggaagaaccgtgccgtgacacaactatagcatccaggggcgaattcagctcttgcaagctggcatattatggaaaaggcgtgtacagagaggtgtacaaagcaactggacagcctaaatggccaatggcacccgccgtgaagaagttctatataggcacaacgctgttgtgtgccacacgcaga

SEQ ID NO: 66000 - DNA, 431 bp, Glycine max
gcgagaagacgacagacgggggtgtgattgtttgttgttgtaactcgttcttcttcttttgttgctctgtgtttgtgtttgttttttctctcacctgaaaatgtcttgctgcggtggtaactgtggttgcggaagctcctgcaagtgcggcaacggctgcagaggctgcaagatgtacccagacttgagctacactgagtcaaccaccaccgagaccttggtcatgggagtggcacctgttaaggctcaatttgagggtgctgaaatgggtgtgcccgctgagaacgatggctgcaaatgtggaccaaactgctcctgcaacccctgcacttgcaagtgaggtgttgcgagagcaagcttcaagcagagatagcccttaattaggaataatgataaactattaatgtgtagctaagaacttatgtattatg

SEQ ID NO: 66001 - DNA, 83 bp, Glycine max
gaacacagaaccttcacataaagtatcttaaatttttaatcccccaaaaaggtcaaaacaaatcaaaagaaaaaaataaaaac

SEQ ID NO: 66002 - DNA, 373 bp, Glycine max
  unsure (1)..(373): unsure at all n locations
gattcacacaactaactaagaaagtcttccatagccccccaaaaatgaagagcaccatcttctttgctctctttctcttttgtgccttcaccacctcatacctaccttcagccatcgctgatttcgtgctcgataatgaaggtaaccctcttgaaaatggtggcacatattatatcttgtcagacataacagcatttggtggaataagagcagccccaacgggaaatgaaagatgccctctcactgtggtgcaatctcgcaatgagctcgacaaagggattggaacaatcatctcgtccccatatcgaatccgttttatcgccgaaggccatcctttgagccttaagttcgattcattngcagttataatgct

SEQ ID NO: 66003 - DNA, 293 bp, Glycine max
gacagcaaaaacaattaataaagatgagtttgaagaacgacatggtggtgctaaaggtgtgtttgttgcttcttttccttgtgggggatacagctgcacgcatggaactgagcttcttcaaaagtgatcagtcatcaagttatgatgatgatgagtattcaaaaccatgctgtgatctctgcatgtgcacacgctcaatgcctactcaatgcatctgtgaagatattaggctgaattcatgccactcagattgtaagagctgtatgtgcacacgctcacagccaggacagtgt

SEQ ID NO: 66004 - DNA, 172 bp, Glycine max
tacaggtgtcagaagacggctggatgtgatgcaactgagtgactgacaaaagccatttccatatacagcctaagataatgaagagcactagcttggtcgctatctttctactttgggcctttatctcatacttaccttgcggcaccagacattacgtgctctacgtggattg

SEQ ID NO: 66005 - DNA, 398 bp, Glycine max
gattcacacaactaactaagaaagtcttccatagccccccaaaaatgaagagcaccatcttctttgctctctttctcttttgtgccttcaccacctcatacctaccttcagccatcgctgatttcgtgctcgataatgaaggtaaccctcttgaaaatggtggcgcatattatatcttgtcagacataacagcatttggtggaataagagcagccccaacgggaaatgaaagatgccctctcactgtggtgcaatctcgcaatgagctcgacaaagggattggaacaatcatctcgtccccatatcgaatccgttttatcgccgaaggccatccttcgagccttaagttcgattcatttgcagttataatgctgtgtgttggaattcctaccgagtgg

SEQ ID NO: 66006 - DNA, 234 bp, Glycine max
gattacatctgacatataacaatctgaagcggtgggcaacgaaaacgtggtgtatgcatcaaactgctctcctactatgttgtgccttaaacatctcatacacagcttccgctctagatgatcccagctctcgatcacgtacgtgcgactttttaaagcggttatacatataattactttcaatacactggcaccactttttacaactaagagactgcccaaaccatgacgaaa

SEQ ID NO: 66007 - DNA, 367 bp, Glycine max
gcttcacagcaaaaacaattaataaagatgagtttgaagaacaacatggtggtgctaaaggtgtgtttgttgcttcttttccttgtgggggttacagctgcacgcatggaactgagcttcttcaaaagtgatcagtcgtcaagttatgatgatgatgagtattcaaaaccatgctgtgatctctgcatgtgcacacgctcaatgcctcctcaatgcagctgtgaagatattaggctgaattcatgccactcagattgtaagagctgtatgtgcacacgctcacagtcaggacagtgtcgttgtcttgacaccaacgacttctgctacaaaccttgcaagtccagagatgactagaaaaactaatagc

SEQ ID NO: 66008 - DNA, 406 bp, Glycine max
  unsure (1)..(406): unsure at all n locations
gacagcaaaaacaattaataaagatgagtttgaagaacaacatggtggtgctaaaggtgtgtttgttgcttcttttccttgtgggggttacagctgcacgcatagaactgagcttcttcaaaagtgatcagtcatcaagttatgatgatgatgagtattcaaaaccatgctgtgatctctgcatgtgcacacgctcaatgcctnctcaatgcagctgtgaagatattaggctgaattcatgccactcagattgtaagagctgtatgtgcacacgctcacagccaggacagtgtcgttgtcttgacaccaacgacttctgctacaaaccttgcaagtccagagatgactagaaaaactaatagctctctcaaatggacgaagcccctttaggctttgtttgttatgt

SEQ ID NO: 66009 - DNA, 388 bp, Glycine max
gacagcaaaaacaattaataaagatgagtttgaagaacaacatggtggtgctaaaggtgtgtttgttgcttcttttccttgtgggggttacagctgcacgcatggaactgagcttcttcaaaagtgatcagtcatcaagttatgatgatgatgagtattcaaaaccatgctgtgatctctgcatgtgcacacgctcaatgcctcctcaatgcagctgtgaagatattaggctgaattcatgccactcagattgtaagagctgtatgtgcacacgctcacagccaggacagtgtcgttgtcttgacaccaacgacttctgctacaaaccttgcaagtccagagatgactagaaaaactaatagctctctcaaatggacgaagccccttt

SEQ ID NO: 66010 - DNA, 405 bp, Glycine max
gttacaagaatttaacatcttagaaaattttgaaataaatttgtagatttagagaagacttatggcaaagaatgagatgaaaattatcggagttgtgattatgactatgattctgtttggtttctcacaagctaattataatccttcatttgagaaaattggactaaatcatgtgtctgatggaatcgtttgtcgacttagatgcgagaataaatgtaaaaaattcctaataattccgcccggactcattttctatctgatatgttatcatacatgttatgcaaattgccatgacatgcccattgatgccgctcatgattgtatcactagttgtggcttgaccaagccggttgacttcaacaatgatgctcctggtcttgcaaccgacggggtgaattcttgttt

SEQ ID NO: 66011 - DNA, 385 bp, Glycine max
gacagcacaaacaattaataaagatgagtttgaagaacaacatggtggtgctaaaggtgtgtttgttgcttcttttccttgtgggggttacagctgcacgcatggaactgagcttcttcaaaagtgatcagtcatcaagttatgatgatgagtattcaaaaccatgctgtgatctccgcatgtgcacacgctcaatgcctcctcaatgcagctgtgaagatattaggctgaattcatgccactcagattgtaagagctgtatgtgcacacgctcacagccaggacagtgtcgttgtcttgacaccaacgacttctgctacaaaccttgcaagtccagagatgactagaaaaactaatagctctctcaaatggacgaagccccttt

SEQ ID NO: 66012 - DNA, 287 bp, Glycine max
gattgtgattcccagcaataaggttgcttctatattcttaaccttcttgacatcatatctgcacataccttaaaacaaattattagcattagtttgtgtttttttactctatttttcatctctctaccttaaactttatcatagtatcagagttctcctttttttttagagctttatataatcattaacattagttgcgcaatcttttctttggtccgctcatggcttctgttcgtgatgctgcttctcatgaacttggttttgaagaaggcatgatctggctaccc

SEQ ID NO: 66013 - DNA, 308 bp, Glycine max
tgtttcacacaactaactaagaaagtcttccatagccccccaaaaatgaagagcaccatcttctttgctctctttctcttttgtgccctcaccacctcatacctaccttcagccatcgctgatttcgtgctcgataatgaaggtaaccctcttgaaaatggtggcacatattatatcttgtcagacataacagcatttggtggaataagagcagccccaacgggaaatgaaagatgccctctcactgtggtgcaatctcgcaatgagctcgacaaagggattggaacaatcatctcgtccccatatcg

SEQ ID NO: 66014 - DNA, 136 bp, Glycine max
ttccggttccagaagaccaccgaaggggagcttcacagattcatagctagagatagactgcatggtgaatacgatcaaatgtatcaaatgctgagaagacgacagaggggtccggttgcaaaaagaccacagaagg

SEQ ID NO: 66015 - DNA, 176 bp, Glycine max
tcgcccacgcgttcgtagacgacagaaggggacaccaacaccaaaacaaacccactaagatggcttgctttgtatcctttctagtgctgcttcttgcagcccttattctcatgcctcaagggcttgctacttactacaaaccaattaagaagccaccagtgtacaagccttcagtg

SEQ ID NO: 66016 - DNA, 402 bp, Glycine max
ggatttcgtttcatttgtcaataggagggacctcgagagagagaatcagaggaggacgatcatctatatgaagtggagtctccttaccggcccggtcgccattctcggcggcgtagtcgtcgccatcgccgccgcaaacgttatcttcgtcaagaatgtgaggttgctgatgaatcaaccaagtccaagactattgaatcaaaaaacaaattctaagcaaaaatcatttgtaagaattgctttctcaatggcttgtcctaatatttagaggatcccttcctcaaaccagaagagaggaagtatgaaaatgaaccttgctccaagtaggagaaaagagacaacagaagtttgcgttttgatgtcttttaaaccctgagttatgagctctgtatactcgtttgc

SEQ ID NO: 66017 - DNA, 282 bp, Glycine max
  unsure (1)..(282): unsure at all n locations
gacatcccgcaggagcagcctaaatattttttttcaggcttgtgttttttttctctggaggggaaacacaaaatttaggcttgtgttttttttggacgttgcagttgtgttcccctccatggacgttgcagcattcacaagtggatgttccccttcctctgcaagcgtagccgctgtgatcttctactaaagatagatctgctttaattcttatcatttttggtattctaaaattttgatgtagatctngtcaccattggacaatgtaaggaattatgatgc

SEQ ID NO: 66018 - DNA, 280 bp, Glycine max
  unsure (1)..(280): unsure at all n locations
gacagcaaanacaattaataaagatgagtttgaagaacaacatggtggtgctaaaggtgtgtttgttgcttcttttccttgtgggggttacagctgcacgcatggaactgagcttcttcaaaagtgatcagtcatcaagttatgatgatgatgagtattcaaaaccatgctgtgatctctgcatgtgcacacgctcaatgcctcctcaatgcagctgtgaagatattaggctgaattcatgccactcagattgtaagagctgtatgtgcacacgctcaca

SEQ ID NO: 66019 - DNA, 302 bp, Glycine max
  unsure (1)..(302): unsure at all n locations
gaatatggatgatgaaagggagtaatnnttgtgatacccaacattttactttgggggggattaaattaaattactttgggttcaattacagaaaaacctagtattgttgtatatgaggctgctgagttgatacctgatattgttgcaggcactatctatttggttcaatgggtatctatgtattactattacagttcacaggttttcgataaaaaagaaaaaaacaacatagaatccttgaatgcggtgcaaattaacgatcagttttatttgttacacacataagtgtcctacatctgata

SEQ ID NO: 66020 - DNA, 246 bp, Glycine max
  unsure (1)..(246): unsure at all n locations
gacagcaaaaacaattaataaagatgagtttgaagaacaacatggtggtgctaaaggtgtgtttgttgcttcttttccttgtgggggttacggctgcacgcatggaactgagcttcttcaaaagtgatcagtcatcaagttatgatgatgatgagtattcaaaaccatgctgtgatctctgcatgtgcacacgctcaatgcctnctcaatgcagctgtgaagatattaggctgaattcatgccact

SEQ ID NO: 66021 - DNA, 275 bp, Glycine max
gacagcaaaaacaattaataaagatgagtttgaagaacaacatggtggcgctaaaggtgtgtttgttgcttcttttccttgtgggggttacagctgcacgcatggaactgagcttcttcaaaagtgatcagacgtgaagttatgatgatgatgagtattcaaaaccatgctgacatcctttgatgtgcacacgctcaatgcctcctcaatgcagctgtgaagatattgggctgaattcatgccactcagattgtaagagctgtatgtgcacacgc

SEQ ID NO: 66022 - DNA, 357 bp, Glycine max
  unsure (1)..(357): unsure at all n locations
gacagcaaaaacaattaataaagatgagtttgaagaacaacatggtggtgctaaaggtgtgtttgttgcttcttttccttgtgggggttacagctgcacgcatggaactgagcttcttcaaaagtggtcagtcatcaagttatgatgatgatgagtattcaaaaccatgctgtgatctctgcatgtgcacacgctcaatgcctcctcaatgcagctgtgaagatattaggctgaattcatgccactcanattgtaagagctgtatgtgcacacgctcacagccaggacagtgtcgttgtcttgacaccaacgacttctgctacaaacctttgcagtccagagatgactagaaaaact

SEQ ID NO: 66023 - DNA, 307 bp, Glycine max
gattcacacaactaactaagaaagtcttccatagccccccaaaaatgaagagcaccatcttctttgctctctttctcttttgtgccttcaccacctcatacctaccttcagccatcgctgatttcgtgctcgataatgaaggtaaccctcttgaaaatggtggcacatattatatcttgtcagacataacagcatttggtggaataagagcagccccaacgggaaatgaaagatgccctctcactgtggtgcaatctcgcaatgagctcgacaaagggattggaacaatcatctcgtccccatatcg

SEQ ID NO: 66024 - DNA, 203 bp, Glycine max
agggacacttactagtagtaagcatggagtcctcaaagatctatgcttacctcttcctctgcatgatctttctctctttcaccactcccattctcggttgtggctactggggcaaaccccccaaaaagcacaagcctggttaaacaccaaagacacccaaaacacccgttgttaaaccaccagtcaccatccctcccattaat

SEQ ID NO: 66025 - DNA, 410 bp, Glycine max
acacaactaactaagaaagtcttccatagccccccaaaaatgaagagcaccatcttctttgctctctttctcttttgtgccttcaccacctcatacctaccttcagccatcgctgatttcgtgctcgataatgaaagtaaccctcttgaaaatggtggcacatattatatcttgtcagacataacagcatttggtggaataagagcagccccaacgggaaatgaaagatgccctctcactgtggtgcaatctcgcaatgagctcgacaaagggattggaacaatcatctcgtccccatatcgaatccgttttatcgccgaaagccatcctttgagccttaagttcgattcatttgcagttataatgctgtgtgttggaattcctaccgagtggtctgttgtgggggatct

SEQ ID NO: 66026 - DNA, 82 bp, Glycine max
  unsure (1)..(82): unsure at all n locations
tgcagcgtaccgnngtccggaattcccggggtcggacccacgcccgtctcgtacgcgaggaagacgacacgaaggggtacgg

SEQ ID NO: 66027 - DNA, 295 bp, Glycine max
  unsure (1)..(295): unsure at all n locations
gattcacacaactaactaagaaagtcttccatagccccccaaaaatgaagagcaccatcttctttgctctctttctcttttgtgccttcaccacctcatacctaccttcagccatcgctgatttcgtgctcgataatgaaagtaaccctcttgaaaatggtggcacatattatatcttgtcagacataacagcatttggtggaataagagcagccccaacgggaaatgaaagatgccctctcactgtggtgcaatctcgcaatgagctcgacanagggattggaacaatcatctc

SEQ ID NO: 66028 - DNA, 53 bp, Glycine max
gggggcccggtggtgatcacagaggtgctgttcgtgctgttaagcccggggct

SEQ ID NO: 66029 - DNA, 433 bp, Glycine max
ggccataccacaccacaacacaactctgggtcttccgtgtttctctttctcccattatccatttagagaccccaaatggcctctgccaccactctcttcacccctaaccccatgttttcaactgaacaacactctctctctctctccatctccaaccattcccaaatccttcactggcctctgcaagcccttccattcaagggtccccacttccatcccctcctttcattgcagaagacccaaattctttgtcagggccactgttataaagtggagatgtccaaagcaaactatcccttccgatgataccggtttccaaaagaaactcctgtatctggaatcaatcggtattgactctttctcgctttatgaaaaccatccaacagtgatcacaactttttttgcttgcctaaaatccaccgtggaatacatt

SEQ ID NO: 66030 - DNA, 466 bp, Glycine max
  unsure (1)..(466): unsure at all n locations
cccacacgttcgtactgcttttatacgacattatggtagaatgtttnttttgtgttatattgtgggtattttttatatatggtggtttattttatttttctcttataatattttatctttcttacttcttaattattatttttttttttttttattatttctttacttttatttgttttttattttttttaaaaataactattatttctttgatttttttatactctaattcttattttatttaattttaaaatataatattttaatttaaattactcttattttttttttcttttttttttatacttttctatcttttatataatttattttttttttttttattattttatttcttttatatttattttttttttttttcatttttaaatattttattatttttcttattttaaaaaaaccattctttctttttttttttttttttttttgtcttattttattt

SEQ ID NO: 66031 - DNA, 416 bp, Glycine max
gattcacacaactaactaagaaagtcttccatagccccccaaaaatgaagagcaccatcttctttgctctctttctcttttgtgccttcaccacctcatacctaccttcagccatcgctgatttcgtgctcgataatgaaggtaaccctcttgaaaatggtggcacatattatatcttgtcagacataacagcatttggtggaataagagcagccccaacgggaaatgaaagatgccctctcactgtggtgcaatctcgcaatgagctcgacaaagggattggaacaatcatctcgtccccatatcgaatccgttttatcgccgaaagccatcctttgagccttaagttcgattcatttgcagttataatgctgtgtgttggaattcctaccgagtggtctgttgtggaggatcta

SEQ ID NO: 66032 - DNA, 72 bp, Glycine max
  unsure (1)..(72): unsure at all n locations
ccacgcgtncgaccacgcgtncagccacgcgtncgaccacgcgtacgaccacgcgtacgnccacgcgtgcgt

SEQ ID NO: 66033 - DNA, 356 bp, Glycine max
  unsure (1)..(356): unsure at all n locations
gacagcaaaaaacaattaataaaagatgagtttgaagaacaacatggtggtgctaaaagtgtgtttggtgcttcttttccttgtgggggttacagctgcacgcatggaactgagcttcttcaaaagtgatcagtcatcaagttatgatgatgatgagtattcaaaaccatgctgtgatctctgcatgtgcacacgctcaatgcctcctcaatgcagctgtgaagatattaggctgaattcatgccactcagattgtaagagctgtatgtgcacacgctcacagccaggacagtgtcgttgtcttgacaccaacgacttctgctacaaaccttgcangtccagagatgactagaaaa

SEQ ID NO: 66034 - DNA, 393 bp, Glycine max
gaaaagtccagaagaaggagtataatgggagcaagaagaagccaggacagcaagcagggagggagagaagaaaacaccgagagagtgatagacaagttgaaaaacaaagccacaggaacagctttgaaggaaggagagttttgaaaataaggaacgtttgattccctcttgagacttacactcctggtgtgtatttttacaataagaacttcttttatgtctttgtcatgtattacttatgtttgttttttatgactggttgttgaaggccaacgtttcttgaatcaatagtacgcataaaataacaattgatttatataatgacgaatacttgtaagtttgaattttttttttctaaccaaattgttttggattataaaccattagggctat

SEQ ID NO: 66035 - DNA, 139 bp, Glycine max
gaagaaagctgctagcagagggaagttctacacttttttgtttggattgatcgagtgtactttttcttttcgagattggcttggtgtgcagtggaaagagggtggaaaagagtggtaagggggagggcggcgcccctag

SEQ ID NO: 66036 - DNA, 425 bp, Glycine max
  unsure (1)..(425): unsure at all n locations
gaagtgcatagttatacacacaacacattcataccagacactctcctagagttaagtaaaaataaaggctatgtcaccaaacaagcgcttacttcttgttgcttttctgttgctttgcttcatcaccatgacagctagtgccagaagtttgagagatattaaggatgatgcagtcaagaagagtactcaaactagtttctttaagccaaaccatgaaggggtacaagacagcaatgatgagttggatacaatggattacacacctgcaaaaaggaatcctccaatccataantgaaagttccattatttttttcttttgttaaaaaagcaccaattttatttcacagtgcttaacccactctgcaagtgatctatcaaagaccgtcatgtattgatattggttggagcttggaaattcacacccc

SEQ ID NO: 66037 - DNA, 387 bp, Glycine max
gacagcaaaaacaattaataaagatgagtttgaagaacaacatggtggtgctaaaggtgtgtttgttgcttcttttccttgtgggggttacagctgcacgcatggaactgagcttcttcaaaagtgatcagtcatcaagttatgatgatgatgagtattcaaaaccatgctgtgatctctgcatgtgcacacgctcaatgcctcctcaatgcagctgtgaagatattaggctgaattcatgccactcagattgtaagagctgtatgtgcacacgctcacagccaggacagtgtcgttgtcttgacaccaacgacttctgctacaaaccttgcaagtccagagatgactagaaaaactaatagctctctaaatggacgaagccccttt

SEQ ID NO: 66038 - DNA, 264 bp, Glycine max
  unsure (1)..(264): unsure at all n locations
gactacaagcgagtcacatgcgaagtgaaagtgnggaaaaaaaagagaaaaaaaaaaaggcggcgcggctagaggatacgagctaagctaacctacccgggcatgcgatatcatatctatagtgtagcgtaaactaaattcaatggactggccgttacaacacacacgactggaaagaaaaaaccctgacgtaacttaattgaattgcattgcagtacattttcgtttggtgagctaatataatagaggacaggcaccgaccga

SEQ ID NO: 66039 - DNA, 113 bp, Glycine max
ggcacaagtgagtttgttgatcgagataactagaaacagtgtggtgaaaatgaaaggccttggtttcttcgttgctacaattttggtagcatggcaatgccctgcgtacgata

SEQ ID NO: 66040 - DNA, 62 bp, Glycine max
caccaaaaggggccacttttttttttattcccactttttttttggggtccctaaaaaaaata

SEQ ID NO: 66041 - DNA, 362 bp, Glycine max
gattcacacaactaactaagaaagtcttccatagccccccaaaaatgaagagcaccatcttctttgctctctttctcttttgtgccttcaccacctcatacctaccttcagccatcgctgatttcgtgctcgataatgaaggtaacccccttgaaaatggtggcacatattatatcttgtcagacataacagcatttggtggaataagagcagccccaacgggaaatgaaagatgccctctcactgtggtgcaatctcgcaatgagctcgacaaagggattggaacaatcatctcgtccccatatcgaatccgttttatcgccgaaagccatcctttgagccttaagttcgattcatttgca

SEQ ID NO: 66042 - DNA, 344 bp, Glycine max
ccaagagcacgacagaagggggaagtagaaaagcattggaagaaaagaaaaacgtgaaagaaggaaagaagagaactgtaaagcattcaagattgggtacaaatgaatacatacaaaatgcctgttagataagaacaccttgattcaattcactgaaccatcgttttacaacctgccgacttaaaaaactaagccttcactcaccttaattccacggcaaaacttttttatattggcagctaaactaatagccttgacgcccgtttacaacgcccttactaacaaaaacccagccttaaccaacattattaccctccctgaaaatccccatttagccccttggg

SEQ ID NO: 66043 - DNA, 422 bp, Glycine max
ggttctagtgtgtgattgtttgttgttgtaactcgttcttcttcttttgttgttctgtgtttgtgtttgttttttctctcacctgaaaatgtcttgctgcggtggtaactgtggttgcggaagctcctgcaagtgcggcaacggctgcggaggctgcaagatgtacccagacttgagctacactgagtcaaccaccaccgagaccttggtcatgggagtggcacctgttaaggctcaatttgagggtgctgaaatgggtgtgcccgctgagaacgatggctgcaaatgtggaccaaactgctcctgcaacccctgcacttgcaagtgaggtgttgggagagcaagcttcaagcagagatagcccttaattaggaataatgataaactattaatgtgtagcttaaaacttatgtattatgtct

SEQ ID NO: 66044 - DNA, 241 bp, Glycine max
tgcaagacagagggtcggtgagaagacagaaggtcggtggagaagacagaggtacgtgagaaacacagagggtacgtgagagacaagaggtacgtggagagacacagagggaagagtcagggttttagacttgcaaacctcccgatcaaacgattcgacggaaatggatcgcgcgcgacgatattcatatctcgcagcggcaggttcggtgatggaaccaaccgtcgtctcgtcgatcggt

SEQ ID NO: 66045 - DNA, 285 bp, Glycine max
gacagtattatatattaggtgggagtgacaggtttccctaccccgtcatcttcttctgattagggttcttctcgttccctcaaattctgagaatttgaccaccaattattactgcgttttaaaatctgacatttgtccgtatccaacgattcagcagaagatcgaaattcttcggcgttttccgttcgggtacggttctacgtggacaattacctatggcttcatcctacataatcactccccaaaatgtgttggagtcgctgattaacgacggcccaattgatg

SEQ ID NO: 66046 - DNA, 289 bp, Glycine max
gacagcaaaaacaattaataaagatgagtttgaagaacaacatggtggtgctaaaggtgtgtttgttgcttcttttccttgtgggggttacagctgcacgcatggaactgagcttcttcaaaagtgatcagtcatcaagttatgatgatgatgagtattcaaaaccatgctgtgatctctgcatgtgcacacgctcaatgcctcctcaatgcagctgtgaagatattaggctgaattcatgccactcagattgtaagagctgtatgtgcacacgctcacagccaggaca

SEQ ID NO: 66047 - DNA, 291 bp, Glycine max
gacagcaaaaacaattaataaagatgagtttgaagaacaacgtggtggtgctaaaggggtgtttgttgcttcttttccttgtgggggttacagctgcacgcatggaactgagcttcttcaaaagtgatcagtcatcaagttatgatgatgatgagtattcaaaaccatgctgtgatctctgcatgtgcacacgctcaatgcctcctcaatgcagctgtgaagatattaggctgaattcatgccactcagattgtaagggctgtatgtgcacacgctcacagccaggacagt

SEQ ID NO: 66048 - DNA, 202 bp, Glycine max
ttggaggaggccgccggagggggcagcaaaagcaactaattgagctgtgtttttgtaactacgtggaaggtgctggggtgggaatgaatgctctctggacatgtgggggaacccgctgcgatcgtgtaatggtgaatcttaaacagagtatttgacttaaatatatgatcctttgctgaacggacgctttgctgggcaaatt

SEQ ID NO: 66049 - DNA, 59 bp, Glycine max
  unsure (1)..(59): unsure at all n locations
cccacgcgttcgccacgcgtncgaccacgcgtgcgtacgctcgataagacaagggaagg

SEQ ID NO: 66050 - DNA, 344 bp, Glycine max
ggaaacagagagtgatttcagggagtgatcggtgttcacttgatctcatcataatcgtcagcgtcaattgaagaagatgccgatcagaaacatcgccgtcggaaggcctgaagaggcgactcaccccgacacgttgaaggcggctttggctgagttcatctcaaccttcatcttcgtgttcgccggctcaggctccggcatcgcctacaacaagctcaccgacaacggcgctgccacccctgccggcctcatcttcgcctccatcgcccatgcattcgccctcttcgtcgccgtctccgtcggcgccaacatctccggcggccacgtcaaccccgccgtcacct

SEQ ID NO: 66051 - DNA, 270 bp, Glycine max
gacagcaaaaacaattaataaagatgagtttgaagaacaacatggtggtgctaaaggtgtgtttgttgcttcttttccttgtgggggttacagctgcacgcatggaactgagcttcttcaaaagtgatcagtcatcaagttatgatgatgatgagtattcaaaaccatgctgtgatctctgcatgtgcacacgctcaatgcctcctcaatgcagctgtgaagatattaggctgaattcatgccactcagattgtaagagctgtatgtgca

SEQ ID NO: 66052 - DNA, 255 bp, Glycine max
gacagcttaaacaattaataaagatgagtttgaagaacaacatggtggtgctaaagagtgtgtttgttgcttcttttccttgtgggggttacaactgcacgcatggaactgatcttcttcaaaagtgatcagtcatcaagttatgatgatgatgagtattcaaaaccatgctgtgatctctgcatgtgcacacgctcaatgtctcctcaatgcagctgtgaagatattaagctgaattcatgccactcatattgt

SEQ ID NO: 66053 - DNA, 298 bp, Glycine max
  unsure (1)..(298): unsure at all n locations
tccacgtaaatacaacacaanaaacgtacgttttataaattcacaggtaaaaatcatcacttcaaattaatctatatctagaaagattcataggtagctatagagagagaaacagatgtcatggatcgtttgcaaagatctgaagtgtctttcacgagacagggttcatcaagtcttgtttgggacgacaagttattgtcaggggaatttaacaaagtgaacaacaaccaataccaaaatggtggtggttctggtggtcaccttaaccttaaagttataactacaccacccaacacca

SEQ ID NO: 66054 - DNA, 304 bp, Glycine max
gacagcaaaaacaattaataaagatgagtttgaagaacaacatggtggtgctaaaggtgtgtttgttgcttcttttccttgtgggggttacagctgcacgcatggaactgagcttcttcaaaagtgatcagtcatcaagttatgatgatgatgagtattcaaaaccatgctgtgatctctgcatgtgcacacgctcaatgcctcctcaatgcagctgtgaagatattaggctgaattcatgctactcagattgtaagagctgtatgtgcacacgctcacagccaggacagtgtcgttgtcttga

SEQ ID NO: 66055 - DNA, 227 bp, Glycine max
cacccgtcactcctgctgccacacgaccactcacgcgtacagacactggttaagactacggagagatacaatgccaacttttctaccaaatccacattattacgttgtttcctttgctctttcccacactctatctttcactccgcacaaaggtttagcggccgttatgaagttacaaggtccacctgctgcagcataataatttctgctcgcaaccctcagcgacg

SEQ ID NO: 66056 - DNA, 335 bp, Glycine max
ggaggaggttctgatcttctttggttggtgtctaggaccctttcttgcttcaaccaatttctagatccgaaaccggcatcagatccgatccgaaatgtacggattcgaagctctcaccttcaacatccacggcggcttcctagaggccatcgtccgcggccaccgctccggccttctcaccaccggcgattacaacaacctctgccaatgcgaaaccctcagaatcaaaagtccagagttcatgacagcgttgtcttcatattttagtcggacggctcgttatagttcgtatgttcggtgggacaatctgcatactttctgcattatccatctga

SEQ ID NO: 66057 - DNA, 75 bp, Glycine max
cccactcgtcctcccacgcgtccgtccactcgtccgcccacgcgtccgtgcacgcgttcttccacgcgttcgtac

SEQ ID NO: 66058 - DNA, 352 bp, Glycine max
gcttcacagcaaaaacaattaataaagatgagtttgaagaacaacatggtggtgctaaaggtgtgtttgttgcttcttttccttgtgggggttacagctgcacgcatggaactgagcttcttcaaaagtgatcagtcatcaagttatgatgatgatgagtattcaaaaccatgctgtgatctctgcatgtgcacacgctcaatgcctcctcaatgcagctgtgaagatattaggctgaattcatgccactcagattgtaagagctgtatgtgcacacgctcacagccaggacagtgtcgttgtcttgacaccaacgacttctgctacaaaccttgcaagtccagagatgact

SEQ ID NO: 66059 - DNA, 348 bp, Glycine max
gacagcaaaaacaatggataaagatgagtttgaagaacaacatggtggtgctaaaggtgtgtttgttgcttcttttccttgtgggggttacagctgcacgcatggaactgagcttcttcaaaagtgatcagtcatcaagttatgatgatgatgagtattcaaaaccatgctgtgatctctgcgtgtgcacacgctcaatgcctcctcaatgcagctgtgaagatattaggctgaattcatgccactcagattgtaagagctgtatgtgcacacgctcgcagccaggacagtgtcgttgtcttgacaccaacgacttctgctacaaaccttgcaagtccagagatgact

SEQ ID NO: 66060 - DNA, 316 bp, Glycine max
gattgacacaactaactaagaaagtcttccatagccccccaaaaatgaagagcaccatcttctttgctctctttctcttttgtgccttcaccacctcatacctaccttcagccatcgctgatttcgtgctcgataatgaaggtaaccctcttgaaaatggtggcacatattatatcttgtcagacataacagcatttggtggaataagagcagccccaacgggaaatgaaagatgccctctcactgtggtgcaatctcgcaatgagctcgacaaacggattggaacaatcatctcgtccccatatcgaatccgttt

SEQ ID NO: 66061 - DNA, 366 bp, Glycine max
tgggattcacacaactaactaagaaagtcgggcatagccccccaaaaatgaagagcaccatcttctttgctctctttctcttttgtgccttcaccaccgcatacctaccttcagccatcgctgatttcgtgctcgataatgaaggtaaccctcttgaaaatggtggcacatattatatcttgtcagacataacagcatttggtggaataagagcagccccaacgggaaatgaaagatgccctctcactgtggtgcaatctcgcaatgagctcgacaaagggattggaacaatcatctcgtccccatatcgaatccgttttatcgccgaaggccatcctttgagccttaaattcgattcatttgcaa

SEQ ID NO: 66062 - DNA, 53 bp, Glycine max
ttcggctgggagattacaacagaagggtacggctgctaaaacacgacatatgg

SEQ ID NO: 66063 - DNA, 361 bp, Glycine max
ttgggacagcaaaaacaattaataaagatgagtttgaagaacaacatggtggtgctaaaggtgtgtttgttgcttcttttccttgtgggggttacagctgcacgcatggaactgagcttcttcaaaagtgatcagtcatcaagttatgatgatgatgagtattcaaaaccatgctgtgatctctgcatgtgcacacgctcaatgcctcctcaatgcagctgtgaagatattaggctgaattcatgccactcagattgtaagagctgtatgtgcacacgctcacagtcaggacagtgtcgttgtcttgacaccaacgacttctgctacaaaccttgcaagtccagagatgactagaaaaact

SEQ ID NO: 66064 - DNA, 138 bp, Glycine max
  unsure (1)..(138): unsure at all n locations
cgantgcaaaaaaaaaaaaaaaaaaaaaaagcgggggggggacagtatccaagcttacgtcctccttcctccgacatcctacctcttatatattgtaacctaaaaccaatacactatccactggtttacaacttacaa

SEQ ID NO: 66065 - DNA, 183 bp, Glycine max
  unsure (1)..(183): unsure at all n locations
aggcgtncgtacacgacaaaacgactcatgttgacaacaaaaacaaatggggagggtgtgtttgaagaacaacatggaggatctaaaggcgggttagaaacttctttatcatgtggtggatacacatcctcgcgtggaacaaagcttgtttaaaagttatttttcttcaggggatgactatta

SEQ ID NO: 66066 - DNA, 352 bp, Glycine max
gacagcaaaaacaattaataaagatgagtttgaagaacaacatggtggtgctaaaggtgtgtttgttgcttcttttccttgtgggggttacagctgcacgcatggaactgagcttcttcaaaagtgatcagtcatcaagttatgatgatgatgagtattcaaaaccatgctgtgatctctgcatgtgcacacgctcaatgcctcctcaatgcagctgtgaagatattaggctgaattcatgccactcagattgtaagggctgtatgtgcacacgctcacagccaggacagtgtcgttgtcttgacaccaacgacttctgctacaaaccttgcaagtccagagatgactagaa

SEQ ID NO: 66067 - DNA, 288 bp, Glycine max
  unsure (1)..(288): unsure at all n locations
atgggcgagccaagcgaaccgtcacgcctncttacagattacaaattacttctgaaagtgatcaacactttgagatcggtagataaaataccaaccatggcaaccatttttacttatcaaccaaaaagatccctactctattgaaacctccatttaaccacctatttaaccacctattataccaacagcatcattaacaacccttcttcacacccaacccgtaaattcataacttcttcaactattttcattacactcttaatcccttcttggtttacccctacaaac

SEQ ID NO: 66068 - DNA, 276 bp, Glycine max
ggcggcaaaaacaattaataaagatgagtttgaagaacaacatggtggtgctaaaggtgtgtttgttgcttcttttccttgtgggggttacagctgcacgcatggaactgagcttcttcaaaagtgatcagtcatcaagttatgatgatgagtattcaaaaccatgctgtgatctctgcatgtgcacacgctcaatgcctcctcaatgcagctgtgaagatattacgctgaattcatgccactcagattgctagagctgtatgtgcacacgctcac

SEQ ID NO: 66069 - DNA, 124 bp, Glycine max
gagtgagagaaagagagagagagggtgtcagtgatgcccttttgcttgatccctcatttgtcaagataataagaagagggtacataacttggtggtgatttgatacgcacgaaaaaaaaaaata

SEQ ID NO: 66070 - DNA, 356 bp, Glycine max
gattcacacaactaactaagaaagtcgtccatagccccccaaaaatgaagagcaccatcttctttgctctctttctcttttgtgccttcaccacctcatacctaccttcagccatcgctgatttcgtgctcgataatgaaggtaaccctcttgaaaatggtggcacatattatatcttgtcagacataacagcatttggtggaataagagcagccccaacgggaaatgaaagatgccctctcactgtggtgcaatctcgcaatgagctcgacaaagggattggaacaatcatctcgtccccatatcgaatccgttttatcgccgaaggccatcctttgagccttaagttcgattca

SEQ ID NO: 66071 - DNA, 333 bp, Glycine max
tataaatgaaattggtggttcagggaagttagagaagaatgagtttgttcaggatgctgatagcaagttagagaaagttgaactagttgaagaagcaagaaaatgtgtcacaaaaaagctagaaaaaaccagctccaaatttttcagaaagaaagcataatcttggagctaatgactggtaaattataaaatgtattaagacttgtatggagtatattatggtagtagacaatattttctgttgtggattaatggaagtaaagtgtaagatatgtatttgatttgatatctatcagtatgttagttataatacataaaaaacaatgttttgtc

SEQ ID NO: 66072 - DNA, 347 bp, Glycine max
gacagcaaaaacaattaataaagaggagtttgaagaacaacatggtggtgctaaaggtgtgtttgttgcttcttttccttgtgggggttacagctgcacgcatggaactgagcttcttcaaaagtgatcagtcatcaagttatgatgatgatgagtattcaaaaccatgctgtgatctctgcatgtgcacacgctcaatgcctcctcaatgcagctgtgaagatattaggctgaattcatgccactcagattgtaagagctgtatgtgcacacgctcacagccaggacagtgtcgttgtcttgacaccaacgacttctgctacaaaccttgcaagtccagagatgac

SEQ ID NO: 66073 - DNA, 375 bp, Glycine max
tacgacaaaacggctcgaagtcctaatttgggtaacttacaaaggatgatagacgtcatatgggatggtcttttatactagacctttcattgtaatagagatattttaagtgatcaaaataaaactttttaaatttaagatatcaaactgaaaaaaaaatgatacatcaaaactatattctatcttttactttctcaatatttcaagcatttattaaaatatactaaatactttttaatgcattggcaatattcatattaatttaaggagttaattctgtatcattgacttgacgcgtccacgttatttagaattcggagaggatagttacataattccttcattttgtaaaatgcgacttttaaatttcttatc

SEQ ID NO: 66074 - DNA, 329 bp, Glycine max
ggcagcaaaaaacagtgatgaaaattaggttggagaacaacatggtggtgctaaaggtgtgtttgttgcttcttttccttgtgggggttacagctgcacgcatggaactgagcttcttcaaaagtgatcagtcatcaagttatgatgatgatgagtattcaaaaccatgctgtgatctctgcatgtgcacacgctcaatgcctcctcaatgcagctgtgaagatattaggctgaattcatgccactcagattgtaagagctgtatgtgcacacgctcacagacaggacagtgtcgttgtcttgacaccaacgacttctgctacaaacct

SEQ ID NO: 66075 - DNA, 293 bp, Glycine max
gagacaaagttttggtgcaaagcaaaggctggtacgaggagctttcctccataccaatcaaaggaggagagagagagagagggaggacacacacacacaaaaggaaccgagcaagccacacacaaaaaaagggacgtccgtgccttctcatatatgtgatagctcgcttccgagacaaaaaaaaaaaaataccaaccgcggccgccccggccgatctaaaggaaccaaccttacctacgcggagcacgcagatgtgataactcttctatagcacgaactaaactgactccact

SEQ ID NO: 66076 - DNA, 300 bp, Glycine max
gacagcaaaaacaattaataaagatgagttggaagaacaacatgggggcgctaaaggtgtgttcgttgcttcttttccttgcgggggttacagctgcacgcatggaactgagcttcttcaaaagtgatcagtcatcaagttatgacgattatgagtattcaaaaccatgctgtgatctctgcatgtgcacacgctcaatgcctcctcaatgcagctgtgaagatattaggctgaattcatgccactcatattgtaagagctgtatgtgcacactctcacagccagcacagtgtcgttgtc

SEQ ID NO: 66077 - DNA, 293 bp, Glycine max
gacagcaaaaacaatgtaataaagatgagtttgaagaacaacatggtggtgctaaaggtgtgtttgttgcttcttttccttgtgggggttacagctgcacgcatggaactgagcttcttcaaaagtgatcagtcatcaagttatgatgatgatgagtattcaaaaccatgctgtgatctctgcatgtgcacacgctcaatgcctcctcaatgcagctgtgaagatattaggctgaattcatgccactcaaattgtaagagctgtatgtgcacacgctcacagccaggacagtg

SEQ ID NO: 66078 - DNA, 332 bp, Glycine max
gacagcaaaaacaattaataaagatgagtttgaagaacaacatggtggtgctaaaggtgtgtttgttgcttcttttccttgtgggggttacagctgcacgcatggaactgagcctcttcaaaagtgatcagtcatcaagttatgatgatgatgagtattcaaaaccatgctgtgatctctgcatgtgcacacgctcaatgcctcctcaatgcagctgtgaagatattaggctgaattcatgccactcagattgtaagagctgtatgtgcacacgctcacagccaggacagtgtcgttgtcttgacaccaacgacttctgctacaaaccttgc

SEQ ID NO: 66079 - DNA, 328 bp, Glycine max
gacagcaaaaacaattaataaagatgagtttgaagaacaacatggtggtgctaaaggtgtgtttgttgcttcttttccttgtgggggttacagctgcacgcatggaactgagcttcttcaaaagtgatcagtcatcaagttatgatgatgatgagtattcaaaaccatgctgtgatctctgcatgtgcacacgctcaatacctactcaatgcagctgtgaagatattaggctgaattcatgccactcatattgtaagagctgtatgtgcacacgctcacagacaggacagtgtcgttgtcttgacaccaacgacttctgctacaaacc

SEQ ID NO: 66080 - DNA, 65 bp, Glycine max
cgggaaaaaaaaaagaaaaaaaagattctaaagaaatataactaatattctttagaataatcaaa

SEQ ID NO: 66081 - DNA, 305 bp, Glycine max
  unsure (1)..(305): unsure at all n locations
ggagtttgttgatcgagataactagaaacagtgtgatgaaggtgaangtccttgttttcttcgttgctacaattttggtagcatggcaatgccatgcgtacgatatgttccctctccgaatgaacactggctatggtgcccgtactccggaggtgaaatgcgcaagttggaggcttgctgtggaagcacacaacatctttggctttgagaccattcctgaagagtgcgttgaagcaacaaaggaatacatccatggcgaacaatatagatcagactccaaaacagttaaccaacaagcttacttt

SEQ ID NO: 66082 - DNA, 422 bp, Glycine max
gatctggcagcagaagaacaagtagttgagaactgagaaggagaagcaaatggcttcctcaatgatctcttccccagctgttaccactgtcaaccgtgccggtgccggcatggttgctccattcactggcctcaagtccatggctggcttccccaccagaaagaccaacaatgacattacctccattgctagcaacggtggaagagtgcaatgcatgcaggtgtggccaccagttggcaagaagaagtttgagactctttcctacctgccagaccttgatgatgcacaattggcaaaggaagtagaataccttcttaggaagggatggattccttgcttggaattcgagttggagcacggtttcgtgtaccgtgagcacaacaggtcaccaggatactacgatggacgctactggaccatgt

SEQ ID NO: 66083 - DNA, 56 bp, Glycine max
ttcggcttgcagaagacgactcaagggtaccgctgccaaaagacctcaggaaggtt

SEQ ID NO: 66084 - DNA, 100 bp, Glycine max
gtccacgcgtcgccaccgtcgccaccgttcacgctgcaaagacacagaagggggagatcatctttaacaaaaatgaatgcttagaagagagctatatatt

SEQ ID NO: 66085 - DNA, 350 bp, Glycine max
gatctggcagcagaagaacaagtggttgagaactaagaaggagaagcaaatggcttcctcaatgatctcttccccagctgttaccactgtcaaccgtgccggtgccggcatggttgctccattcactggcctcaagtccatggctggcttccccaccaggaagaccaacaatgacattacctccattgctagcaacggtggaagagtgcaatgcatgcaggtgtggccaccagttggcaagaagaagtttgagactctttcctacctgccagaccttgatgatgcacaattggcaaaggaagtagaataccttcttaggaagggatggattccttgcttggaattcgagt

SEQ ID NO: 66086 - DNA, 201 bp, Glycine max
tgcacaaagtaagttgttgatcgcgataactagaaacagtgtgatgagaatgaatgtccttgctttctatcgtgctacaattttggtagcatggcaatgccatgcgtacgatatgttccctctccgaatgaacactggctatggtgcccgtactccggacgtgaaatgcgcaagttggatgcttgctgtggaagcacacaa

SEQ ID NO: 66087 - DNA, 91 bp, Glycine max
  unsure (1)..(91): unsure at all n locations
ggaggcttcaataagtaagtatcaatggcttccgaagaatcccagaacaagcccnccagcgagcagtccactaccgaactcatcacgagcg

SEQ ID NO: 66088 - DNA, 192 bp, Glycine max
cggcacagacgagcagaaagcgacagtagggtacagatgtgtcaagacctcataatgtggatgattgtattagttagagaccatgatcctacctccaatatcataacaatgtcaaccatgcgatgtgcaatatctaagtcttcacacacactaaagtgtgataagaaggattacgatatgctctacatagct

SEQ ID NO: 66089 - DNA, 395 bp, Glycine max
gacaagtgagttagttgatcgagataactagaaacggtgtgatgaaaatgaaagtccttgttttcttcgatgctacaattttggtagcatggcaatgccatgcgtacgatatgttccctctacgaatgaacactggctatggtgcccgtacttcggaggtgaaatgcgcaagttggaggcttgctgtggaagcacacaacatcttgggctttgagaccattcctgaagagtgcgttgaagcaacaaaggaatacatccatggcgaacaatatagatcagactccaaaacagttaacctacaagcttacttttatgccagagacctcgaagtccatcgcaaggacacatttgtgtacagtataaatggcaccgtactctctaatattgcatactac

SEQ ID NO: 66090 - DNA, 352 bp, Glycine max
ggcacaagtgagtttgttgatcgagataactagaagacagtgtgatgaaaatgaaggtccttgttttcttcggtgctacaattttggtagcatggcaatgccatgcgtacgatatgttccctctgcgaatgaacactggctatggtgcccgtactccggaggtgaaatgcgcaagttggaggcttgctgtggaagcacacaacatctttggctttgagaccattccttgagagtgcgttgaagccacaaaagaatacatccatggcgaacaatttagatcagactccaaaaacggtaacccacaagcttacttttatgccagagacctcgaagtccatcccaaggacacatt

SEQ ID NO: 66091 - DNA, 317 bp, Glycine max
gacaagtgagtttgttgatcgagataactagaaacagtgggatgaaaatgaatgttcttggtttcttcgttgctacaattgtggcagcatggcaatgccatgcgtacgatatgttccctctccgaacgaacactggctatggtgcccgtactccggaggtgaaatgcgcaagttggaggctcgctgtggaagcacacaacatctttggctttgagaccattcctgaagagtgcgttgaagcatcaaaggaatacattcatggcgaacaatatagatcagactacaaaacagttaaccaacaagcttactgttatgtc

SEQ ID NO: 66092 - DNA, 56 bp, Glycine max
tggtacgggttcgaaaagaccaccgaagggtaccggttccaaaagacgacagaagg

SEQ ID NO: 66093 - DNA, 239 bp, Glycine max
ggcacaagtgagtttgatgatcgagataactagaaacagtgtgatgaaaatgaaggtccttgttttcttcggtgctacaattttggtagcatggcaatgccatgcgtacgatatgttccctgtccgaatgaacactggctatggtgcccgtactccggaagtgaaatgcgcaagttggaggcttgctgtggaagcacacgacatcgttggctgtgagaccattcctgaagagtgcgttg

SEQ ID NO: 66094 - DNA, 291 bp, Glycine max
aagaaggaagctgaagtcatagaagagaagaaggaagtggaagtgacggaagagaagaaggaaattgaagtaacagaagagaagaatgaagctgaagtcatagaagagaagaaggaagtggaagtgacggaagagaagaatgaaattgaagtaacagaagagaagaaggaagcagaagtgaaagaagagaagaaggaaggggaagtgacggaagagaagaaggaagttgaagtgacggaagagaagaaggaagcggaagtgatagtagaagaaaaacaagtgatcgttcat

SEQ ID NO: 66095 - DNA, 86 bp, Glycine max
ggccattgttgttgctattatcatccgcagctggttttattcgcaccggaaacagtgagccatggccgtcggaaagaacaagcgca

SEQ ID NO: 66096 - DNA, 188 bp, Glycine max
  unsure (1)..(188): unsure at all n locations
gagcgaaacagagagtgatttcagtgagtgatcggtgttcacttgatctcatcataatcgtcagcgtcaattgaagaagatgccgatcagaaacatcgncgtcggaaggcctgaagaggcgactcaccccgacacgttgaaggcggctttggctgagttcatctcaaccttcatcttcgtgttcgccg

SEQ ID NO: 66097 - DNA, 399 bp, Glycine max
gagtgagccaccgagatccgtcaccgattcatcggggataactagaccttatagtatgaactctgttctacaaatgcacataccgcacatctacatgatatactggaatacatgagaatcaactacaacgatcaagttatagatgcatacgtctaagacgatgtaaaatcaaatcttctttcactcccacataaccatcttagtgctttagcacaagctaacatacacagccacattcagaacattaagtctaatctcacgttagatggtacattcatattgactgttcctactactttgcatgccattctaattgtctggtccactagaactggcaaatatgactttagtgtcactactgctaactttattgacgatactctaaaatgtactatatcc

SEQ ID NO: 66098 - DNA, 262 bp, Glycine max
gactcaccaagtgaaccaatatagcccaagccctatacaaccaaaccctaacacacacccatttgattcagtttccatggctagcctcaaggttgcatttttggctgcagtgctctgcatggttgtggtgagtgcacccatggcacatgcagctatcacgtgcgggcaggtgacgagcagcctggccaattgcatcggttacctccagaagggaggaacgccgtcgtcgggatgctgcaacggagtgaagagcctcaatgcc

SEQ ID NO: 66099 - DNA, 156 bp, Glycine max
cgagggcactcaacattttacactctattcttcttctcgttgtggcttcggtgtcgaatcatggatcaaaaagtcgatttcagctctccgcattccatgggatccactatcatcggcgatacttacaacagctgtgtctatctctgagcctacttt

SEQ ID NO: 66100 - DNA, 155 bp, Glycine max
gttcttccaaaaggcatgaatctaagagtgctggaattgaaatggtgactgaaagggaacaaggagaggttaccgcgagagattaatccttggggtcctcctttgaaaatcctggtccttggaatccgaattcacttaaaccaaaaggcaccaaa

SEQ ID NO: 66101 - DNA, 62 bp, Glycine max
attaccaatgacaaaaaaaaaaaaaaaaaaaaaaaaaaaaaagcggccgttttaaaggatcc

SEQ ID NO: 66102 - DNA, 104 bp, Glycine max
ccacgcgtccgaacacgcgtacacgcgactagtatacgactacatcaagactccgctacgcggagacctcagaaggatactccttcgataagacgacggtacga

SEQ ID NO: 66103 - DNA, 192 bp, Glycine max
gaaaggtgcagtgcaaattcaactaacaaaggttcagactactgacatgacgccagaagatacgattcaagcagatctgcaggaactggaccagctccttatacttatgtgccatatggtggagggccaagtatgtaccctggaaaagagtatgctgcgaatggaacatatggtgatcatgcacaacttaat

SEQ ID NO: 66104 - DNA, 284 bp, Glycine max
ggcacaagtgagtttgttgatcgagagaactagaaacagtgtgatgaaaatgaacgtccttgttttcttcgttgctacaattttggtagcatggcaatgccatgcgtacgatatgttccctctccgaatgaacactggctatggtgcccgtacttcggaggtgaaatgcgcaagctggaggcttgctggggaagcacacaacatctgtggctttgagaccattcgtgaagagtgcgtttaagcaacctaggaattcattcatggggaacaatatagatcagact

SEQ ID NO: 66105 - DNA, 108 bp, Glycine max
ggtctcaagcgggcatggcgatggcaacccaagcctctctcttaaccccacccctcttcggtctcaaagccagcgaccgagccttcgtgccatggaaacaaaacttca

SEQ ID NO: 66106 - DNA, 98 bp, Glycine max
tacagtgactcaatgcaatatttagaaccgccatacaagttaacgtctatactatctctcattaacgttagcactatacatataacagtctgctttac

SEQ ID NO: 66107 - DNA, 208 bp, Glycine max
aagaaggaagctgaagtcatagaagagaagaaggaagtggaagtgacggaagagaagaaggaaattgaagtaacagaagagaagaaagaagcttgaagtcatagaagagaaagaagaagtggaagtgactgatgagatgaaggaaattgaaataacagatgagaagaagaagcagaagtgaaagaagagaacaatgaaggggaagtga

SEQ ID NO: 66108 - DNA, 98 bp, Glycine max
ggctgtggtaagagaagagagagaagggttaggtttttctttctctctctttctctttgtgtttttgtcttctgtttttgacacaaaaaaacaactat

SEQ ID NO: 66109 - DNA, 323 bp, Glycine max
ggcacaagtgagtttgttgatcgagataactagaggcagtgtgatgaaaatgaaggtccttgatttcttcgatgctacaattttggtagcatggcaatgccatgcgtacgatatgttccctctccgaatgaacactggctatggtgcccgtactccggatgtgaaatgcgcaagttggaggcttgctgtggaagcacacaacatctttggctttgagaccattcctgaagagtgcgttgaagcaacaaatgaatacatccatggcgaacaatatagatcagactccaaaacagttaaccaacaagcttacttttatgcccgag

SEQ ID NO: 66110 - DNA, 284 bp, Glycine max
gatctggcagcagaagaacaagtagttgagaacgaagaaggagaagcaaatggcttcctcaatgatctcttccccagctgttaccactgtcaaccgtgccggtgccggcatggttgctccattcactggcctcaagtccatggctggcttccccaccagaaagaccaacaatgacattacctccattgctagcaaccgtggaagagtgcaatgcatgcaggtgtggccaccagttggcaagaagaagtttgagactctttcctacctgccagaccttgatgatg

SEQ ID NO: 66111 - DNA, 330 bp, Glycine max
tgccatgcgtacgatatgtgcgctctccgaatgaacactgtctatggtgcccgtactccggaggtgaaatgcgcaagttggaggcttgctgtggaagcacacaacatctttggctctgagaccattcctgatgagtgcgttgaagcatcacaggaatacatccatggcgaacactatacatcagactccgcaacagttaaccgacaagctcactcttatgccagagacctcgaagtccatcccaaggacacatttgtgttcagtatatatggcaccgtactctctaatatgccatactacacaaaacatggatatggggtggagaaattt

SEQ ID NO: 66112 - DNA, 291 bp, Glycine max
  unsure (1)..(291): unsure at all n locations
ggaagcttccataagtaagtatcaatggctttcggagaatcccagaccaagctcgccatcgagcattccactaccggactcatcacgagcgccaagctggcggcagacgcggcgcattctgctctgaagagcgacagcgacaaactggacaaggccaatgtggctgacactgccggcgatcttaatgacgcggtactgaagtatgggaaacttgatgacgtacacggcatanggcagtatgttgacaaggctgctgattatacgcatgattaccaaggtgataataccact

SEQ ID NO: 66113 - DNA, 81 bp, Glycine max
tacgggttgtagaagaccaccgaaaggggatgggtattggacacattcttcaacgactgggtttttggatcggaacctctt

SEQ ID NO: 66114 - DNA, 375 bp, Glycine max
ggcagcagaagaacaagtagttgagaactaagagggagaagcaaatggcttcctcaatgatctcttccccagctgttaccactgtcaaccgtgccggtgccggcatggttgctccattcactggcctcaagtccatggctggcttccccaccaggaagaccaacaatgacattacctccattgctagcaacggtggaagagtgcaatgcatgcaggtgtggccaccagttggcaagaagaagtttgagactctttcctacctgccagaccttgatgatgcacaattggcaaaagaagtagaataccttcttaggaagggatggattccttgcttggaattcgagttggagcacggtttcgtgtaccgtgagcaca

SEQ ID NO: 66115 - DNA, 91 bp, Glycine max
tgagcgccaatgtttttttagaggagtttcatcttgtaatcaaaagaggttatcttatagtaggaaatcgatgtcttactccattttaagg

SEQ ID NO: 66116 - DNA, 109 bp, Glycine max
ggcaagagtttgttgtgagctataagctagtttatcgtgaggagaatatgaagttgcttgttatctttgttgctgcagtagttctggtagcatggccatgccatggcgc

SEQ ID NO: 66117 - DNA, 180 bp, Glycine max
gaccacattccaaaacacaaacacatacattgtagtatcacttttgtctcggaatttgttcttttgagttatggcaagcttaaaagttgcatgtgtggttttgatgggcatggctgggatgagtgcaccaatgatggtgcaagccgtgtcatggcatgatgtttctgggaacctagcacc

SEQ ID NO: 66118 - DNA, 390 bp, Glycine max
gcacaagtgagtttgctgatcgagataactagaggcagtgtgatgaaaatgaaggtccttgttttcttcgttgctacaattttggtagcatggcaatgccatgcgtaccatatgttccctctccgaatgaacactggctatggtgcccgtactccggaggtgaaatgcgcaagttggaggcttgctgtggaagcacacaacatctttggctttgagaccattcctgaagagtgcgttgaagcaacacaggaatacatccatggcgaacaatatagatcagactccaaaacagttaaccaacaagcttacttttatgccagagacctcgaagtccatcccgaggacacatttgtgatcagtatagatggcaccgtactctttaatattcca

SEQ ID NO: 66119 - DNA, 309 bp, Glycine max
gatttagcattataatatcatggtattgaaatcggagacgtagaaacttataattactataataatctctagctcagatattactcactgacaacgagtgactctgactcaacatgtttgcgtacattcactgtcgctatagaccatgtctggcttctttaccagaaagacggacattgacattaattacatggctagccacggattgagagttgcatgcatgcaggcatggactgccaatgacgagttcaactcagagaactcttaatacatgccagacgaggattatgcacaattgtcaaatgatgt

SEQ ID NO: 66120 - DNA, 294 bp, Glycine max
gatctggcagcagaagaacaagtagttgagaactaagaaggagaagcaaatggcttcctcaatgatctcttccccagctgttaccactgtcaaccgtgccggtgccggcatggctgctccattcactggcctcaagtccatggctggcttccccaccaggaagaccaacaatgacattacctccattgctagcaacggtggaagagtgcaatgcatgcaggtgtggccaccagttggcaagaagaagtttgagactctttcctacctgccagaacttgatgatgcacaattggc

SEQ ID NO: 66121 - DNA, 120 bp, Glycine max
ggcacaagtgagtttgttgatcgagataactagaaacagtgtgatgaaaatgaaaggccttggtttcttcggtgctacaattttggtagcattgcaatgccattcctaccatatggtccc

SEQ ID NO: 66122 - DNA, 363 bp, Glycine max
ggcacaagtgagtttgttgatcgagataactagaggacagtgtgatgaaaatgaaggtccttgttttcttcgttgctacaattttggtagcatggcaatgccatgcgtacgatatgttccctctccgaatgaacactggctatggtgcccgtactccggaggtgaaatgcgcaagttggaggcttgctgtggaagcacacaacatctttggctttgagaccattcctgaagagtgcgttgaagcaacaaaggaatacatccatggcgaacaatatagatcagactccaaaacagttaaccaacaagcttacttttatgccagagacctcgaagtccattccaaggacacatttgtgttcagta

SEQ ID NO: 66123 - DNA, 85 bp, Glycine max
  unsure (1)..(85): unsure at all n locations
acaaataaaacatttggtttatttagtgacactgtaatttccccttacaaaaaaaaaaaannnananaaannnanannaaanaaa

SEQ ID NO: 66124 - DNA, 103 bp, Glycine max
aaaaggccgccggaagggtcctcttgcaaaaggcctccgaatgggtccggtggggtgatgccaccataagggttctgctttgagcagactactcaatggtacg

SEQ ID NO: 66125 - DNA, 186 bp, Glycine max
aagcatactaccacacctcaatctgatttcaaaccacagaagattaactgccggtctagtataatcacacatacggactcttacttacaatgtcattgcttatctattatataccctaaattcattttactggccttcaatttacatcatcattactgcgaaaaccatgcccttacctaacttaat

SEQ ID NO: 66126 - DNA, 78 bp, Glycine max
agggactgcagtaaagtgaattaacagaaccaatggtgggtattccttcactctacggtgtctctaccaccgaaccat

SEQ ID NO: 66127 - DNA, 295 bp, Glycine max
  unsure (1)..(295): unsure at all n locations
tggggcctagatatactgtgtatcatttcatagcgagagtcattcatagtgcctggataaattggtaaccatctaacatgttataaacacgccgtcgctgagactggcatgactagagcaactgcaccaacggaaacagctatggcgttatagtagagactgagaatagctacatctagactgatgacatggatgctccaacgactgaccatcatgtgaagtgcaaagctggcactaactgcacttgcacggactgcacttgtggccattaangaatatctatgacaatgtaatt

SEQ ID NO: 66128 - DNA, 98 bp, Glycine max
gacagaaagaaaaagccatggcttgtatggcaagcttagctgctgctcaaccatctactgtcaagggccttgctggaacttagctacttttcaagccc

SEQ ID NO: 66129 - DNA, 140 bp, Glycine max
gatagtaagtagcaaggagactagatccggattcggatatcattgcttaaactgcatcattcaccattactgcctatatctttggttgaactaaattcaatttaaaggcctctggagctaaccttagacccatgaatttc

SEQ ID NO: 66130 - DNA, 125 bp, Glycine max
aagtatacgaacacgtccgactcaacttcttaatctaaataacataaaacagggtaaggtaaatgaaagaacatgttttgttcaatcctacaatcctaatagccttgctagaacttacctaccat

SEQ ID NO: 66131 - DNA, 77 bp, Glycine max
gagacctcaggtcaggcggggctacccgctgagtttaagcatatcaataagcggaaaaaaaaatgaatggagaatgg

SEQ ID NO: 66132 - DNA, 164 bp, Glycine max
tgggacatctaatctagtcatatgtcgccaccatggcgcctgggcgacaacctactgcggtttcaatcactgtatgcatccctcggcttttaaatggacctaatctctctgagtccaatcgctatcaacatatacaacttgttatcaatccatcttcaatcatt

SEQ ID NO: 66133 - DNA, 351 bp, Glycine max
ggcacaagtgtttttttttatcgagataactatttgcagtgtgatgaaaatgaaggtcctcgttttcttcgttgctacaattttggtagcatggcaatgccatgcgtacgatatgttccctctccgaatgaacactggctatggtgcccgtactccggaggtgaaatgcgcaagttggaggcttgctgtggaagcacacaacatccttggctttgagaccattcctgaagagtgcgttgaagcaacaaaggaatacatccatggcgaacaatatagatcagactccaaaacagttaaccaacaagcttacttttatgccagagacctcgaagtccatcccaaggacacatt

SEQ ID NO: 66134 - DNA, 258 bp, Glycine max
gggtctctagtttagttaggtatagcacggatggggcacgagccccaatgtaggtgttatatgagtggcatcttgtggtcgaaatagtcgatgttatagtaggaaatttatgacttactgcattctaaggatatcctacatgagagcattaatctgtgcaaatttttaagcatagattcgaatgctttttaggggctagatatcttttacgggaatgcttatgtctcctacaatctaaggattgatccaatattggga

SEQ ID NO: 66135 - DNA, 61 bp, Glycine max
ggggccttcactctgaaccaaataccatagtcttctctttgtccgtgacaaaacagttccc

SEQ ID NO: 66136 - DNA, 349 bp, Glycine max
gcacaagtgagtttgttgatcgagataactagaaacagtgtgatgaaaatgaaggtccttgttttcttcgttgctacaattttggtagcatggcaatgccatgcgtacgatatgttccctctccgaatgaacactggctatggtgcccgtactccggaggtgaaatgcgcaagttggaggcttgctgtggaagcacacaacatctttggctttgagaccattcctgaagagtgcgttgaagcaacaaaggaatacatccatggcgaacaatatagatcagactccaaaacagttaaccaacaagcttacttttatgccagagacctcgaagtccattccaaggacacat

SEQ ID NO: 66137 - DNA, 398 bp, Glycine max
gctggcagcagaaaaacaagtagttgagaactaagaagaaggaaatggcttcctcaatgatctcctccccagctgttaccaccgtcaaccgtgccggtgccggcatggttgctccattcaccggcctcaaatccatggctggcttccccacgaggaagaccaacaatgacattacctccattgctagcaacggtggaagagtacaatgcatgcaggtgtggccaccaattggcaagaagaagttcgagactctttcctacttgccagacctcgatgatgcccaattggcaaaggaagtcgaataccttctaaggaaaggatggattccttgcttggaattcgagttggagcacggtttcgtgtaccgtgagcacaacaggtcacctggatactatgat

SEQ ID NO: 66138 - DNA, 105 bp, Glycine max
cggctcaagtgcggtttatgatcgagataactgggaacattgtgatgaaaatgagaggtacttgttttcttagaagctccaagtttcttagcataggcatgccgt

SEQ ID NO: 66139 - DNA, 334 bp, Glycine max
ggcaagagtttgttgtgagctataagctagtttatcgtgaggagaatatgaagttgtttgttttctttgttgctgcagtaattttggtagcatggccatgccatggcgcatgctaccaaaggttccctctccgaatgaaaactggctatggtgagcgttcttcggaggtaaaatgcgcaagttttaggcttgctgtggaagcacacaacatccgagcctttaaaaccattcctgaagagtgcgttgaaccaacaaaagactacattaatggcgaacaatttagatcagactctaaaacaagtaaccaacaagctttcttttatgctaatgaacg

SEQ ID NO: 66140 - DNA, 407 bp, Glycine max
tggaagacgacagaaggggagagacagagcaagaatgtggtcagagaaggaaagcgagagtcggaagagatttggcgcgagttgaaaaccctagtgagttccaatgatctccactcccttaacctcatgcaacacaccatattgggaaggttgcaggatagcaatgcggtgttgtcgcatttcaacgacttctctcagcactgctttgctgagatttccggcgacatcgctagaaacacgcgtgttttgagaagtatgaaataaaaaattatggctacttatcccgatgcatttcctgaagactcatcgagcgaagtgattgataggagaccggatcttgaaatgtccaagtaactaacgttatccgaacacagattagaatgagttatactaatgaaaagttggtt

SEQ ID NO: 66141 - DNA, 190 bp, Glycine max
actccttatttaaaattcacaacatccacacatcctataaaatctcacaacatcctactatctactacaatttctcaataactcgtcacttctccacataaacacatacataactatcaatctatatctacctaccaatcatttatccaacaccctttcttttatacaatatacctccaacttcatccct

SEQ ID NO: 66142 - DNA, 326 bp, Glycine max
gagtgcacaagtgagtttgttgatcgagatagctagaaacagtgtgatgaaaatgaaggtccttgttttcttcgttgctacaattttggtagcatggcaatgccatgcgtacgatatgttccctctccgaatgaacactggctatggtgcccgtactccggaggtgaaatgcgcaagttggaggcttgctgtggaagcacacaacatctttggctttgagaccattcctgaagagtgcgttgaagcaacaaaggaatacatccatggcgaacaatatagatcagactccaaaacagttaaccaacaagcttacttttatgccagag

SEQ ID NO: 66143 - DNA, 271 bp, Glycine max
tttttaactaacaaaataacattcctttcaaggagggtctcttctaaactgacgatgaccacactcgataccactcctaattgtaacgagaatcaattccccattgactataatgtctgcagatagaccccataatatatccactgctacacaccatcatactctaccatataatacacaatcactttatacaaaccgctagcccaccatataccatccactccctcacctttctcatgattctactctcactattcccacttacgctttt

SEQ ID NO: 66144 - DNA, 382 bp, Glycine max
gatctggcagcagaagaacaagtagttgagaactaagaaggagaagcaaatggcttcctcaatgatctcttccccagctgttaccactgtcaaccgtgccggtgccggcatggttgctccattcactggcctcaagtccatggctggcttccccaccaggaagaccaacaatgacattacctccattgctagcaacggtggaagagtgcaatgcatgcaggtgtggccaccagttggcaagaagaagtttgagactctttcctacctgccagaccttgatgatgcacaattggcaaaggaagtagaataccttcttaggaagggatggattccttgcttggaattcgagttggagcacggtttcgtgtaccgtgagcacaac

SEQ ID NO: 66145 - DNA, 426 bp, Glycine max
cgacagaagggggcacaagtgagtttgttgatcgagataactagaaacagtgtgatgaaaatgaaggtccttgttttcttcgttgctacaattttggtagcatggcaatgccatgcgtacgatatgttccctctccgaatgaacactggctatggtgcccgtactccggaggtgaaatgcgcaagttggaggcttgctgtggaagcacacaacatctttggctttgagaccattcctgaagagtgcgttgaagcaacaaaggaatacatccatggcgaacaatatagatcagactccaaaacagttaaccaacaagcttacttttatgccagagacctcgaagtccattccaaggacacatttgtgttcagtatagatggcaccgtactctctaatattccatactacaaaaaacatggatatggg

SEQ ID NO: 66146 - DNA, 148 bp, Glycine max
ctaccacatctgcctctaaattatatgctccatgtgtcgttcatattattaacaactctataaactctttattaatcctatagattctctttctacactacatatctttttccattaactccaacatccacatgcactaccactaatt

SEQ ID NO: 66147 - DNA, 174 bp, Glycine max
tgccgacgggacccgccattactcactatgcatacttcgatcatgcacttagttgctcacaatcaacgaggctctgctagagaagctctgggatgatggcgtggctggccctcaacctgagcgtggtctctgcaggctcagactaactgccaggctcaaaactattgatgaagg

SEQ ID NO: 66148 - DNA, 276 bp, Glycine max
gacccactcgtacgtccggaagaagactcttcagaatttatttccattcactaactcctcatataatcgtcggcctatttcacatacacgcacggcataaatttaaattaactatatactaatttcatttcccaccctcaaacatctttctttttctgaaaagatgttcttatttttttaccgtgcctgtctctaaatcacatattattacacacacttaaaaacaagaacaaagaacaccctcatgacaatccttataagaatgaaaattacttc

SEQ ID NO: 66149 - DNA, 438 bp, Glycine max
ggttctagtgtgtgattgcttgttgttgtaacggggtcttcttcttttggtgctctgtgtttgtgtttgctttttctctcacctgaaaatgtcttgctgcggtggtaactgtggttgcggaagctcctgcaagtgcggcaacggctgcggaggctgcaagatgtacccagacttgagctacactgagtcaaccaccaccgagaccttggtcatgggagtggcacctgttaaggctcaatttgagggtgctgaaatgggtgtgcccgctgagaacgatggctgcaaatgtggaccaaactgctcctgcaacccctgcacttgcaagtgaggtgttgggagagcaagcttcaagcagagatagcccttaattaggaataatgatcaactattaatgtgtagctaaaaacttatgtattatgtctgtgatggttttcgtgc

SEQ ID NO: 66150 - DNA, 365 bp, Glycine max
gatctggcagcagaagaacaggtagttgagaactaagaaggagaagcaaatggcttcctcaatgatctcttccccagctgttaccactgtcaaccgtgccggtgccggcatggttgctccattcactggcctcaagtccatggctggcttccccaccaggaagaccaacaatgacattacctccattgctagcaacggtggaagagtgcaatgcatgcaggtgtggccaccagttggcaagaagaagtttgagactctttcctacctgccagaccttgatgatgcacaattggcaaaggaagtagaataccttcttaggaagggatggattccttgcttggaattcgagttggagcacggtttcg

SEQ ID NO: 66151 - DNA, 355 bp, Glycine max
gataccaaaaacaaaacacaagccaagtgaaagtgagaaaaaataaaaatcaaagagcataatgtcagggatcattcacaagattggggagacccttcatgtgggagggcacaagaaggaggaggagcataagggtgagcaccatgctggagaatacaaaggggagcaccatggtgaacacagtagtgagtacaaaggagagcatcatggtgaacacaaagctggagagtaccatggtgagcacaagccagagcacaaagaggggttcctagacaaagtcaaggacaagatccatggtgagggcggcgccgccgagggcgagaagaagaagaaggagaagaagaagaatgagcat

SEQ ID NO: 66152 - DNA, 425 bp, Glycine max
gatctggcagcagaagaacaagtagttgagaactaagaaggagaagcaaatggcttcctcaatgatctcttccccagctgttaccactgtcaaccgtgccggtgccggcatggttgctccattcactggcctcaagtccatggctggcttccccaccaggaagaccaacaatgacattacctccattgctagcaacggtggaagagtgcaatgcatgcaggtgtggccaccagttggcaagaagaagtttgagactctttcctacctgccagaccttgatgatgcacaattggcaaaggaagtagaataccttcttaggaagggatggattccttgcttggaattcgagttggagcacggtttcgtgtaccgtgagcacaacgggtcaccaagatactacgatggacgctactggaccatgtgga

SEQ ID NO: 66153 - DNA, 388 bp, Glycine max
gaccgacgcattcgtacgctcggatgcgacaacacaacagaatgggataaacaagaatctaaacattgacatgggcagctaattctcatcagagataggttggacttctaaggtattgcgtcagagagttaacacacctgtaccaaacactcccgttgattctctcaattccaaagcttacttgcttcactgggtactcttcttgagtcagctcgcgcttgcaaccctaacacgaacatttcgactgacgaggatcaagtgttcgatggaaaactaactgcgagggcttgtgctgatgcagcttgcatcaaatacatcagaactgtattccatgagattacgaacttcgaccttgctcttgctctgcttctcattcctactactgagc

SEQ ID NO: 66154 - DNA, 362 bp, Glycine max
gactttcctaacgagaaggggagagactaatcgaagatataattgaataaagtaacgttgcttaaggtagcttagctgcttttcctgttatggttcagttcaacgactgcacttgctactctattcgatccaggtcacttcattacataagtgctgcgctacaattactatgctatgatcaaatccacatccactgcatggtatgatctgagcctttgctcagcaccaaatcctacccattgccaatccgtagattagatcgaaacaagacatgactcatgtcacgtagcttgcatttgctatacgatatgtaattggacgtgacgttgtgtagatataacctactcctgttatgacatatc

SEQ ID NO: 66155 - DNA, 337 bp, Glycine max
ggtgattgtttgttgttgcaactcgttcttctgtcttttgttgttctgtgtttgtgtttgttatttctctcacctgaaaatgtcttgctgcggtggtaactgtggttgcggaagctcctgcaagtgcggcaacggctgcggaggctgcaagatgtacccagacttgagctacactgagtcaaccaccaccgagaccttggtcatgggagtggcacctgttaaggctcaatttgagggtgctgaaatgggtgtgcccgctgagaacgatggctgcaaatgtggaccaaactgctcctgcaacccctgcacttgcaagtgaggtgttgggagagcaagc

SEQ ID NO: 66156 - DNA, 402 bp, Glycine max
aaaaggcctccgaagggggttgccagagaatttcacattctatctgtcgggttgctctactaactcactcgcgccatggctgctaccatcatcaccacatgcaagctctcactgcttttgagtcttctctcagttacacttttgctggatgtgaggtctgagacccttcataatgtaagcgcaattctccccacatgcaatcgcatagagtgtcccagctatgatagcattcacgtatgcagctgattcgaaatgcgctgctataagtcacccgtttggatgccatacatgcatattcaggacataccgctcgttgaagccttcctatccggcttcaggtggttatatagctatcttcaaggttagaatcacttcaatcagaagtttgagctcactgttcct

SEQ ID NO: 66157 - DNA, 318 bp, Glycine max
agggacaagtgagtttgttgatcgagataactagaaacagtgtgatgaaaatgaaggtccttgttttcttcgttgctacaattttggtagcatggcaatgccatgcgtacgatatgttccctctccgaatgaacactggctatggtgcccgtactccggaggtgaaatgcgcaagttggaggcttgctgtggaagcacacaacatctttggctttgagaccattcctgaagagtgcgttgaagcaacaaaggaatacatccatggcgaacaatatagatcagactccaaaacagttaaccaacaagcttacttttatg

SEQ ID NO: 66158 - DNA, 346 bp, Glycine max
gtgcagcagaagaacaagtagttgagaactaggaatgggaagcaaatggcttgctcaatgatctcctccccagctgttaccactgtcaaccgtgccggtgccggcatggttgctccattcactggcctcaagtccatggctggcttccacaccaggaagaccaactacgacattacctccattgctagcaacggtggaagagtgcaatgcatgcacgtgcggccaccagttggcaagaagaagtttgagactctttcctacctgccagaccttgatgatgcacaattggcataggaagtagaataccttcttaggaagggatggattccttgcttggaattcgagt

SEQ ID NO: 66159 - DNA, 386 bp, Glycine max
agaaggggactcaccacttcaaaacactcataacacaaagcacaaagcaaagctcatccttgagttaaaaaatggcagcagcttcttccatggctctctcatccccatccttggctggcaaggccgtgaagctgggcccatcagccccagaagtgggaagggtgagcatgaggaagaccgtcaccaagcaggtctcctcaggaagcccatggtacggcccagaccgagtcaagtacttgggcccattctctggcgagcccccgtcctacctaaccggtgagttcccaggcgactacggctgggacactgctgggctttccgcagacccagaaaccttcgccaagaaccgtgaactcgaagtgatccactccaggtgggccatgctc

SEQ ID NO: 66160 - DNA, 397 bp, Glycine max
ggcacaagtgagtttgttgatcgagataactagaaacagtgtgatgaaaatgaaggtccttgttttcttcgttgctacaattttggtagcatggcaatgccatgcgtacgatatgttccctctccgaatgaacactggctatggtgcccgtactccggaggtgaaatgcgcaagttggaggcttgctgtggaagcacacaacatctttggctttgagaccattcctgaagagtgcgttgaagcaacaaaggaatacatccatggcgaacaatatagatcagactccaaaacagttaaccaataagcttacttttatgccagagacctcgaagtccatcccaaggacacatttgtgttcagtatagatggcaccgtactctctaatattccatactac

SEQ ID NO: 66161 - DNA, 407 bp, Glycine max
  unsure (1)..(407): unsure at all n locations
ggcacaggtgagtttggtgatcgagataactagaaacagtgtgatgaaaatgaaagtccttggtttcttcgttgctacaattttggtagcatggcaatgccatgcgtacgatatggttcctcttcgaatgaacactggctatggtgcccgtacttcggaggtgaaatgcgcaagttggaagcttgctgtggaagcacacaacatctttggctttgagaccattcctgaagagtgcgttgaagcaacanaggaatacatncatggcgaacaatatagatcagactccaaaacagttaaccaacaagcttacttttatgccagagacctcgaagtccatcccaaggacacatttgtgttcagtatagatggcaccgtactctctaatattccatactacanaaaacatg

SEQ ID NO: 66162 - DNA, 297 bp, Glycine max
  unsure (1)..(297): unsure at all n locations
ggtctcggaattcccgggtccgactccacgccccgtccggaagaccgaccagaagggggatccctggcagcagtaagaaaccaagggtagttgagaaactttaagaagggagagagcccaaatggctttttcctcaatgggagtctcttcnncccagctgtntnnaccactgnntcaaccgttgccccggtgccccgtacatggttntngctccatnntcactgnngccttaagtcccccatggctgnngcttccccaactcaggaagactcaaccaatggaccannttacctccat

SEQ ID NO: 66163 - DNA, 200 bp, Glycine max
ggcactgtgttttatttatttttttgttacctgttatcatgatatgtatctttaatgtaatgttcttcagaaatgaagtgaaccctctgatgtgtgtactaatatgtgactcttatgctccacttgagcagaagcttttcaatgcttaaaattgtaatttttgttttgacccattatagaaatagttaattacgtgtttt

SEQ ID NO: 66164 - DNA, 325 bp, Glycine max
  unsure (1)..(325): unsure at all n locations
ggtgcacaagtgagtttgttgatcgagataactagaaacagtgtgatgaaaatgaaggtccttgttttcttcgttgctacaattttggtagcatggcaatgccatgcgtacgatatgttccctctccgaatgaacactggctatggtgcccgtactccggaggtgaaatgcgcaagttggaggcttgctgtggaagcacacaacatctttggctttgagaccattcctgaagagtgcgttgaagcaacaaaggaatacatccatggcgaacaatatagatcagactccanaacagttaaccaacaagcttacttttatgccagag

SEQ ID NO: 66165 - DNA, 352 bp, Glycine max
ggcacaagtgagtttgttgatcgagataactagaaacagtgtgatgaaaatgaaggtccttgttttcttcgttgctacaattttggtagcatggcaatgccatgcgtacgatatgttccttctccgaatgaacactggctatggtgcccgtactccggaggtgaaatgcgcaagttggaggcttgctgtggaagcacacaacatctttggctttgagaccattcctgaagagtgcgtcgaagcaacaaaggaatacatccatggcgaacaatatagatcagactccaaaacagttaaccaacaagcttacttttatgccagagacctcgaagtccatcccaaggacacattt

SEQ ID NO: 66166 - DNA, 431 bp, Glycine max
ggcacaagtgagtttgttgatcgagataactagaaacagtgtgatgaaaatgaaggtccttgttttcttcgttgctacaattttggtagcatggcaacgccatgcgtacgatatgttccctctccgaatgaacactggctatggtgcccgtactccggaggtgaaatgcgcaagttggaagcttgctgtggaagcacacaacatctttggctttgagaccattcctgaagagtgcgttgaagcaacaaaggaatacatccatggcgaacaatatagatcagactccaaaacagttaaccaacaagcttacttttatgccagagacctcgaagtccattccaaggacacatttgtgttcagtatagatggcaccgtactctctaatattccatactacaaaaaacatggatatggggtggagaaatttaact

SEQ ID NO: 66167 - DNA, 294 bp, Glycine max
gatctggcagcagaagaacaagtagttgagaactaagaaggagaagcaaatggcttcctcaatgatctcttccccagctgttaccactgtcaaccgtgccggtgccggcatggttgctccattcactggcctcaagtccatggctggcttccccaccagaaagaccaacaatgacattacctccattgctagcaacggtggaagagtgcaatgcatgcaagtgtggccaccagttggcaagaagaagtttgagactctttcctacctgccagaccttgatgatgcacaattggc

SEQ ID NO: 66168 - DNA, 331 bp, Glycine max
  unsure (1)..(331): unsure at all n locations
gaaggtgcaagagtttgttgtgagctataagctagtttatcgtgaggagaatatgaagttgtttgttttctttgttgctgcagtagttttggtagcatggccatgccatggcgcaggctaccaaaggttccctctccgaatgaaaactggctatggtgagcgttcttcggaggtaaaatgcgcaagttttaggcttgctgtggaagcacacaacattcgagcctttaaaaccattcctgaagagtgcgttgaaccaacanaggactacattaatggcgaacaatttagatcagactctaaaacaggtaaccaacaagctttcttttatgct

SEQ ID NO: 66169 - DNA, 339 bp, Glycine max
ggttctagtgtatgtgattgttgtgactcgttcttcttcgtcgttatcttcttcttttgttgtttgtgtgtttgttttttctctcacctgaaaatgtcttgctgcggtggtaactgtggttgcggaagcgcctgcaagtgcggcaacggctgcggaggctgcaagatgtacccagacttgagctacaccgagtcaaccaccaccgagaccttggtcatgggagtggcaccagttaaggctcaattcgagagtgctgaaatgggtgttcccgctgagaacgatggctgcaaatgtggagctaactgcacctgcaacccctgcacttgcaagtgaggtgtt

SEQ ID NO: 66170 - DNA, 317 bp, Glycine max
ggcacaagtgagtttgttgatcgagataactagaaacagtatgatgaaaatgaaggtccttgttttcttcgttgctacaattttggtagcatggcaatgccatgcgtacgatatgttccctctccgaatgaacactggctatggtgcccgtactccggaggtgaaatgcgcaagttggaggcttgctgtggaagcacacaacatctttggctttgagaccattcctgaagagtgcgttgaagcaacaaaggaatacatccatggcgaacaatatagatcagactccaaaacagttaaccaacaagcttacttttatg

SEQ ID NO: 66171 - DNA, 360 bp, Glycine max
attcccgggtcgacgcacgcgtacgctccgataagacaacacaacggaatgttatgaacaagaaggagcacatccacaagcgcgggcataacatctctaagcgcaaataccctcattaaactgctccatcacctatcctcataccaggcccattcaaccatagaagccctcacttagactccatttctctctctctatgtacctctctctatctatatctgtgtccattttgcctatcaagagacctactgatcagccataaagacataattgagacattgctcttatataaggaggctaatcatcttgctattaatgtaagggataggtcgtttaccacctcgttgacaaatactatgc

SEQ ID NO: 66172 - DNA, 94 bp, Glycine max
caatttgggaattattgctcccatcgccattggtttcattgttggcgctaacattttgttgggtggggccttctccggagcagccatgaaccct

SEQ ID NO: 66173 - DNA, 215 bp, Glycine max
ggagaccacaaacattaagagtaagcgttatgaatcagtccaaagtggagcaattcagcacatagtaatccaacacagaagaggaacacactgttaacaatctcaacagaaattttgtatttggtgacaacttcggcagaagagagatccaactctttctcctccctttcatcgtccgacatggtggcacaactctttagtccttgtgaactctg

SEQ ID NO: 66174 - DNA, 87 bp, Glycine max
  unsure (1)..(87): unsure at all n locations
tccggaaaattcccgggtcgaacccacgccgtnctcgacggctggcgagaagaacgactagaagggggaataattaattgggtatcc

SEQ ID NO: 66175 - DNA, 394 bp, Glycine max
gccttcccaaaaccaaaccacaggccaggtgaaggtgaaaaaaattaaaattcaaagaccttaatgtcagggatcattcacaggaattggggagacccttcatgtgggagggcacaagaaggaggaggagcataagggtgagcaccatgctggagaatacaaaggggagcaccatggtgaacacagtagtgagtacaaaggagagcatcatggtgaacacagagctggagagtaccatggtgagcacaagccagagcacaaagaggggttcctagacaaagtcaaggacaagatccatggtgagggcggcgccgccgagggcgagaagaagaagaaggagaagaagaagaaggagcatggccatgagcatggccatgacagcagcagcagcagt

SEQ ID NO: 66176 - DNA, 263 bp, Glycine max
acgtgccgcagcgtgagatagtgggatcgaccattctagcattgatgagcgccgtataggaatggcgtgcgaatattaccatcagtaggatgtgactgagctaactagagatgaccgtagaaaagaggactctaagaatgatttgctatacccatatggtcatgaggaacttgctgtctgctaagacgttgatcaagatcgagctgttattgataagtattcctattatcactctatatatgctaagctatcatatggataga

SEQ ID NO: 66177 - DNA, 295 bp, Glycine max
gatatctggcagcagaagaacaagtagttgagaactaagaaggagaagcaaatggcttcctcaatgatctcttccccagctgttaccactgtcaaccgtgccggtgccggcatggttgctccattcactggcctcaagtccatggctggcttccccaccaggaagaccaacaatgacattacctccattgctagcaacggtggaagagtgcaatgcatgcaggtgtggccaccagttggcaagaagaagtttgagactctttcctacctgccagaccctgatgatgcacaaattg

SEQ ID NO: 66178 - DNA, 368 bp, Glycine max
gaaagtgcacaagtgagtttgttgatcgagataactagaaacagtgtgatgaaaatgaaggtccttgttttcttcgttgctacaattttggtagcatggcaatgccatgcgtacgatatgttccctctccgaatgaacactggctatggtgcccgtactccggaggtgaaatgcgcaagttggaggcttgctgtggaagcacacaacatctttggctttgagaccattcctgaagagtgcgttgaagcaacaaaggaatacatccatggcgaacaatatagatcagactccaaaacagttaaccaacaagcttacttttatgccagagacctcgaagtccatcccaaggacacatttgtgttcagtat

SEQ ID NO: 66179 - DNA, 215 bp, Glycine max
  unsure (1)..(215): unsure at all n locations
gatctggcagcagaagaacaagtagttgagaactaagaaggagaagcaaatggcttcctcaatgatcccttccccagctgttaccactgtcaaccgtgccggtgccggcatggttgctccattcactggcctcaagtccatggctggcttccccaccagaaagaccaacaatgacattacctncattgctagcaacggtggaagatgcaatgcat

SEQ ID NO: 66180 - DNA, 403 bp, Glycine max
gaaggtgcaagagtttgttgtgagctataagctagtttatcgtgaggagaatatgaagttgtttgttttctttgttgctgcagtagttttggtagcatggccatgccatggcgcaggctaccaaaggttccctctccgaatgaaaactggctatggtgagcgttcctcggaggtaaaatgcgcaagttttaggcttgctgtggaagcacacaacatccgagcctttaaaaccattcctgaagagtgcgttgaaccaacaaaggactacattaatggcgaacaatttagatcagactctaaaacagttaaccaacaagctttcttttatgctagtgaacgcgaagtccatcacaacgacatatttatattcggcatagataacaccgtactctctaatatccca

SEQ ID NO: 66181 - DNA, 378 bp, Glycine max
aagaaggaagctgaagtcatagaagagaagagggaagtggaagtgacggaagagaagaaggaaattgaagtaacagaagagaagaaggaagctgaagtcatagaagagaagaaggaagtggaagtgacggaagagaagaaggaaattgaagtaacagaagagaagaaggaagcagaagtgaaagaagagaagaaggaaggggaagtgacggaagagaagaaggaagttgaagtgacggaagagaagaaggaagcggaagtgatagtagaagagaagaaggaagttgaagtgacggaagagaagaaggaagtggaagtgaccgaaggaaagaaagaagtggaagtgatcgaagagaagaaggaaacagaagtgacagaa

SEQ ID NO: 66182 - DNA, 62 bp, Glycine max
tgtaaaagacaaccgaaggggaaggtgcaagagtttgttgtgagctataagcgtatttatcg

SEQ ID NO: 66183 - DNA, 418 bp, Glycine max
gaaggtgcaagagtttgttgtgagctataagctagtttatcgtgaggagaatatgaagttgtttgttttctttgttgctgcagtagttttggtagcatggccatgccatggcgcaggctaccaaaggttccctctccgaatgaaaactggctatggtgagcgttcttcggaggtaaaatgcgcaagttttaggcttgctgtggaagcacacaacatccgagcctttaaaaccattcctgaagagtgcgttgaaccaacaaaggactacattaatggcgaacaatttagatcagactctaaaacagttaaccaacaagctttcttttatgctagtgaacgcgaagtccatcacaacgacatatttatattcggcatagataacaccgtactctcttatatcccatactttgaaaacatg

SEQ ID NO: 66184 - DNA, 180 bp, Glycine max
tggggctgaaggactgtgacctagttcgagaggcatcatggcgacactggattccgacgtgaccgtgttttcagccggagaagcctctaacaacgccggttcttctttgaccaccaagaaactctaaacgtttcgagatcaagaattggaatgcgggttccctctgggcttgggatattg

SEQ ID NO: 66185 - DNA, 251 bp, Glycine max
tgcgaaaggacgacagaaagatgctgagtggatcatgacctagttctagatgttgcatagccttaccggaatcacttccttaccttttttcagtcttacttaccctaaaccatcttcggtcttttttaaccttacccgaacttgatccaacggttgatcttacattgtacattggttctttctgtgttctgcataccttctctgttaaccttgctccatttcaggctccgtacttggattggatttgacat

SEQ ID NO: 66186 - DNA, 310 bp, Glycine max
acgacggtaaaaaatactgatgaggttgagatcgctatgaaaggtaatggcaagaaattggattgaggccattggagattttaatttattcattttattaagtttgattctacataaaaaaaaaaaaactataaaaatgaaaactaaaaatagaaaaaaaaaattcaaaagaaaaattcacaaaataatagtatagttattgaaacacacataaatgttagcctctaaagacatttcgcaaaaaacaaaaaaaccggcccttttaaaaagaaccgggttatcaatcccgattatgcacctcaaaagtttt

SEQ ID NO: 66187 - DNA, 350 bp, Glycine max
ggtatgtgattgttgtgactcgttcttcttcgtcgttatcttcttcttttgttgtttgtgtgtttgttttttctctcacctgaaaatgtcttgctgcggtggtaactgtggttgcggaagcgcctgcaagtgcggcaacggctgcggaggctgcaagatgtacccagacttgagctacaccgagtcaaccaccaccgagaccttggtcatgggagtggcaccagttaaggctcaattcgagagtgctgaaatgggtgttcccgctgagaacgatggctgcaaatgtggagctaactgcacctgcaacccctgcacttgcaagtgaggtgttggagagctaaagcttcaag

SEQ ID NO: 66188 - DNA, 398 bp, Glycine max
ttttggcacaagtgagtttgttgatcgagataactagaaacagtgtgatgaaaatgaaggtccttgttttcttcgttgctacaattttggtagcacggcaatgccatgcgtacgatatgttccctcttcgaatgaacactggctatggtgcccgtactccggaggtgaaatgcgcaagttggaggcttgctgtggaagcacacaacatctttggctttgagaccattcctgaagagtgcgttgaagcaacaaaggaatacatccatggcgaacaatatagatcagactccaaaacagttaaccaacaagcttacttttatgccagagacctcgaagtccatcccaaggacacatttgtgttcagtatagatggcaccgtactctctaatattccatac

SEQ ID NO: 66189 - DNA, 400 bp, Glycine max
ggttctagtgtgtgattgtttgttgttgtaactcgttcttcttcttttgttgttctgtgtttgtgtttgttttttctctcacctgaaaatgtcttgctgcggtggtaactgtggttgcggaagctcctgcaagtgcggcaacggctgcggaggctgcaagatgtacccagacttgagctacactgagtcaaccaccaccgagaccttggtcatgggagtggcacctgttaaggctcaatttgagggtgctgaaatgggtgtgcccgctgagaacgatggctgcaaatgtggaccaaactgctcctgcaacccctgcacttgcaagtgaggtgttgggagagcaagcttcaagcagagatagcccttaattaggaataatgataaactattaatgtgtagc

SEQ ID NO: 66190 - DNA, 102 bp, Glycine max
cgggattgtgattcatttgcacatctgcaaagtgttgctggtccgggaagaatacgcattgctacggctacacctagccgattgcaatgtcctgcaacaagg

SEQ ID NO: 66191 - DNA, 206 bp, Glycine max
cagcctatccaacggatcaaagatgtcatcaagatgatcaacatcatcggagcaccaggtctactctaaccattaatgttactcaaatgggtgtatgcacgatacacaacaacccttgtacctgcgatcataactcctggggattctgctgggatgtatggtacaatgactatcatggcacccttttcaaggctgattaccctcct

SEQ ID NO: 66192 - DNA, 404 bp, Glycine max
gaaattgaaggagaacttattggataaagaaaatgagttgcagtgtatgtttcaagaaaatgatgaactccgaattagggaagctgaatctatcaagaaggtggaggagttatctaagttgctggaagaagctacaaccagaaaccactacactgaggaaaatggggatcttactgacagtgagaaggactatgatttgcttcctaaagtagttgaattttctgaagaaaatggacatgtaagagaagacatttcaaaggtagagctttcagtgaatcaggaggaactcaagcaaaacagcatacaggaagatagcattctatccaacgacaaggctgaaaaaattgaatctcccaaatatgaggaagtgagtgaaaaactggaggaaaatgagagcaaagaaa

SEQ ID NO: 66193 - DNA, 292 bp, Glycine max
gatctggcagcagaagaacaagtagttgagaactaagaaggagaagcaaatggcttcctcaatgatctcttccccagctgttaccactgtcaaccgtgccggtgccggcatggttgctccattcactggcctcaagtccatggctggcttccccaccaggaagaccaacaatgacattacctccattgctagcaacggtggaagagtgcaatgcatgcaagtgtggccaccagttggcaagaagaagtttgagactctttcctacctgccagaccttgatgatgcacaattg

SEQ ID NO: 66194 - DNA, 378 bp, Glycine max
gagaagaacaagtagttgagaactaagaaggagaagcaaatggcttcctcaatgatctcttccccagctgttaccactgtcaaccgtgccggtgccggcatggttgctccattcactggcctcaagtccatggctggcttccccaccaggaagaccaacaatgacattacctccattgctagcaacggtggaagagtgcaatgcatgcaggtgtggccaccagttggcaagaagaagtttgagactctttcctacctgccagaccttgatgatgcacaattggcaaaggaagtagaataccttcttaggaagggatggattccttgcttggaattcgagttggagcacggtttcgtgtaccgtgagcacaacaggtca

SEQ ID NO: 66195 - DNA, 380 bp, Glycine max
gatctggcagcagaagaacaagtagttgagaactaagaaggagaagcaaatggcttcctcaatgatctcttccccagctgttaccactgtcaaccgtgccggtgccggcatggttgctccattcactggcctcaagtccatggctggcttccccaccagaaagaccaacaatgacattacctccattgctagcaacggtgaaagagtgcaatgcatgcaggtgtggccaccagttggcaagaagaagtttgagactctttcctacctgccagaccttgatgatgcacaattggcaaaggaagtagaataccttcttaggaagggatggattccttgcttggaattcgagttggagcacggtttcgtgtaccgtgagcaca

SEQ ID NO: 66196 - DNA, 326 bp, Glycine max
taatgagaggaagaagacggatcatggccatgggcatggccatgacagctacagcagtctccacagcgattaaactgctgcatgagctacttatctaggaggactatggcaccatcgtagccagggctgtgcactagttcctctctgtctaactatatatttagctccctatctatgctagtactttatccctagctggggaactacttatgaaggataaaaacaacagtgagaacatgtgcgtatatctggttgctaactttacggctattactatgaggtttgggtcagttgaaaccgcgatgatcgcggtatggctgcatgca

SEQ ID NO: 66197 - DNA, 191 bp, Glycine max
gactgataagatcatgccacctctgtctacacctgtcggaggctctcgacactagagagcgcatatgtcatcgaacgctaacgattctcgttagacctctgcgagaaagaccctacttggcgaacgtacattgctgcgaaggaccttacgatcgagtacgaccggcaccattgactgcatatttgccggtg

SEQ ID NO: 66198 - DNA, 74 bp, Glycine max
gaccatagcaagtagcaaggagactagttctgtattcagattacattgcaaaaatggcatcattcaccatgaca

SEQ ID NO: 66199 - DNA, 57 bp, Glycine max
gagacctcatgtcaggcggggctacccgctgagtttaagcatatcaataagcggagg

SEQ ID NO: 66200 - DNA, 396 bp, Glycine max
gctcaagtgagtttgttgatcgagataactagaaacagtgtgatgaaaatgaaggtccttgttttcttcgttgctacaattttggtagcatggcaatgccctgcgtacgatatgttccctctccgaatgaacactggctatggtgcccgtactccggaggtgaaatgcgcaagttggaggcttgctgtggaagcacacaacatctttggctttgagaccattcctgaagagtgcgttgaagcaacaaaggaatacatccatggcgaacaatatagatcagactccaaaacagttaaccaacaagcttacttttatgccagagacctcgaagtccatcccaaggacacatttgtgttcagtatagatggcaccgtactctctaatattccatactac

SEQ ID NO: 66201 - DNA, 313 bp, Glycine max
ctcagttaatttggtgatccaaaatactagggacggtgttaataaatgaaagtcctgtgtttctttcgttgctacaattttggtagcatggcaatgccatgccttacgatatgttccctctccgaatgaacactggctatggtgcccgtactctggaagtgaaatgcgcaagttggaagcttgctgtggaagcacacaacatctttggctttgagaccattcctgaagagtgcgttgaagcaacaaaggaatacattcatggcgaacaatatagatcagactccaaaacagttaaccaacaagcttactttta

SEQ ID NO: 66202 - DNA, 420 bp, Glycine max
  unsure (1)..(420): unsure at all n locations
ggttctagtgtgtgattgtttgttgttgtaactcgttcttcttcttttgttgttctgtgtttgtgtttgttttttctctcacctgaaaatgtcttgctgcggtggtaactgtggttgcggaagctcctgcaagtgcggcaacggctgcggaggctgcaagatgtacccagacttgagctacactgagtcaaccaccaccgagaccttggtcatgggagtggcacctgttaaggctcaatttgagggtgctgaaatgggtgtgcccgctgagaacgatggctgcaaatgtggaccaaactgctcctgcaacccctgcacttgcaagtgangtgttgggagagcaagcttcaagcagagatagcccttaattagaataatgataaactattaatgtgtagctaaaaacttatgtattatgtc

SEQ ID NO: 66203 - DNA, 337 bp, Glycine max
gatctggcagcagaagaacaagtagggtgagaactaagaaggagaagcaaatggcttcctcaatgatctcttccccagctgttaccactgtcaaccgtgccggtgccggcatggttgctccattcactggcctcaagtccatggctggcttccccaccaggaagaccaacaatgacattacctccattgctagcaacggtggaagagtgcaatgcatgcaggtgtggccaccagttggcaagaagaagtttgagactctttcctacctgccagaccttgatgatgcacaattggcaaaggaagtagaataccttcttaggaagggatggattccttg

SEQ ID NO: 66204 - DNA, 57 bp, Glycine max
atatgctggtgtcgaacaaaaaaaaaataaagctggaaaaaaaaaagccggccgttt

SEQ ID NO: 66205 - DNA, 393 bp, Glycine max
gcacatgtgagtttgttgatcgagataactagaaacagtgtgatgaaaatgaaggtccttgttttcttcgttgctacaattttggtagcatggcaatgccatgcgtacgatatgttccctctccgaatgaacactggctatggtgcccgtactccggaggtgaaatgcgcaagttggaggcttgctgtggaagcacacaacatctttggctttgagaccattcctgaagagtgcgttgaagcaacacaggaatacatccatggcgaacaatatagatcagactccaaaacagttaaccaacaagcttacttttatgccagagacctcgaagtccatcccaaggacacatttgtgttcagtatagatggcaccgtactctctaatattccatac

SEQ ID NO: 66206 - DNA, 105 bp, Glycine max
gattcacaatttcatcatcaactcatagcaacgattgttgtcaaaaagaacagggaagaaaaggcccagaaacctcatcatcaagttcttgcaactctttcttcc

SEQ ID NO: 66207 - DNA, 426 bp, Glycine max
ggttctagtgtatgtgattgttgtgactcgttcttcttcgtcgttatcttcttcttttgttgtttgtgtgtttgttttttctctcacctgaaaatgtcttgctgcggtggtaactgtggttgcggaagcgcctgcaagtgcggcaacggctgcggaggctgcaagatgtacccagacttgagctacaccgagtcaaccaccaccgagaccttggtcatgggagtggcaccagttaaggctcaattcgagagtgctgaaatgggtgttcccgctgagaacgatggctgcaaatgtggagctaactgcacctgcaacccctgcacttgcaagtgaggtgttggagagctaaagcttcaagcagagatggcccttagaaataatgataaaaactatatgtagtttcaaaacttcaaaattatgtagtat

SEQ ID NO: 66208 - DNA, 426 bp, Glycine max
  unsure (1)..(426): unsure at all n locations
ggtacaagtgagtttgttgatcgagataactagaaacagtgtgatgaaaatgaaggtccttgttttcttcgttgctacaattttggtagcatggcaatgccatgcgtacgatatgttccctctccgaatgaacactggctatggtgcccgtactccggaggtgaaatgcgcaagttggaggcttgctgtggaagcacacaacatctttggctttgagaccattcctgaagagtgcgttgaagcaacaaaggaatacatccatggcgaacaatatagatcagactccaaaacagttaaccaacaagcttacttttatgccagagacctcgaagtccatcccaaggacacatttgtgttcagtatagatggcaccgtactctctaatattccatactacaaaaaacatggatatggngtggagaaatt

SEQ ID NO: 66209 - DNA, 347 bp, Glycine max
gaaggtgcaagagtttgttgtgagctataagcgagtggatcgtgaggagaatatgaagttgtttgttttctttgttgctgcagtagttttggtagcatggccatgccatggcgcatgctaccaaaggttccctctccgaatgaaaactggctatggtgagcgttcttcggaggtaaaatgcgcaagttttaggcttgctgtggaagcacacaacatccgagcctttaaaaccattcctgaagagtgcgttgaaccaacaaaggactacattaatggcgaacaatttagatcagactctaaaacagttaaccaacaagctttcttttatgctagtgaacgcgaagtcc

SEQ ID NO: 66210 - DNA, 290 bp, Glycine max
tcatcttcaataactaagtatcgattggtttctaataatccgagatcgggccccccatatagcagtccactaccaaactcatctccatctccaatcttttttctccatcttttcactcagctctcaacatcttcttctaccaattcgacaattccaacatctcttactctaccaccaatcttttatactctgatcctaaatatgcacaactttatcacaaacatcgcatacttcaatctcataactacgcttctcattatctccataattaccattattatatataccac

SEQ ID NO: 66211 - DNA, 167 bp, Glycine max
ggagagggagagagggagggagagagagagagagaggaaaagtaactccacacaacacatcacagcctaagagaattggattctaagctcgagagagagagagagagagagagagagaagaaagaatcatgtggtgctggaaaggagagggaggctagaagaagaag

SEQ ID NO: 66212 - DNA, 412 bp, Glycine max
  unsure (1)..(412): unsure at all n locations
ggttctagtgtgtgattgtttgttgttgtaactcgttcttcttcttttgttgttctgtgtttgtgtttgttttttctctcacctgaaaatgtcttgctgcggtggtaactgtggttgcggaagctcctgcaagtgcggcaacggctgcggaggctgcaagatgtacccagacttgagctacactgagtcaaccaccaccgagaccttggtcatgggagtggcacctgttaaggctcaatttgagggtgctgaaatgggtgtgcccgctgagaacgatggctgcaaatgtggaccaaactgctcctgcaacccctgcacttgcaagtgaggtgttgggagagcaagcttcaagcagagatagcccttaattaggaataatgataaactattaatgtgtagctaanaacttatg

SEQ ID NO: 66213 - DNA, 426 bp, Glycine max
gatctggcagcagaagaacaagtagttgagaactaagaaggagaagcaaatggcttcctcaatgatctcttccccagctgttaccactgtcaaccgtgccggtgccggcatggttgctccattcactggcctcaagtccatggctggcttccccaccaggaagaccaacaatgacattacctccattgctagcaacggtggaagagtgcaatgcatgcaggtgtggccaccagttggcaagaagaagtttgagactctttcctacctgccagaccttgatgatgcacaattggcaaaggaagtagaataccttcttaggaagggatggattccttgcttggaattcgagttggagcacggtttcgtgtaccgtgagcacaacaggtcaccaggatactacgatggacgctactggaccatgtggaa

SEQ ID NO: 66214 - DNA, 232 bp, Glycine max
tcctaacgggaattctttttctacattcaaaacctatcccatgccaggttacattacaacgtgggcttgcactactctgacacatactcattatccatacatcaacaactcatctaagatcacggtccctttaacgtacacttcatacataatcttatcgtactagaactttgattaccatcctcattataactacacattcatatataagcccatcatccccaactcccta

SEQ ID NO: 66215 - DNA, 326 bp, Glycine max
aggcgtgcgaacacgtgcgagaggactacagagggggagagggagaggcgttagcaagagcaagaataactctgctaggcccatgtgctctattcagcgatcgagtatggggccctcacagctgccccttgcactgatgagacgtcctcagaactatgcctaccatacctcttatggaactccttgctaaccagagtctccgtctgcggtggcaacaacatccagactggcatgcctgatcggagtaatggtgccatggctgcaaaggaaggagccgcagcatctggcttgatacgaacgcgcaagagcggacaccagaatggaac

SEQ ID NO: 66216 - DNA, 395 bp, Glycine max
gatctggcagcagaagaacaagtagttgagaactaagaaggagaagcaaatggcttcctcaatgatctcttccccagctgttaccactgtcaaccgtgccggtgccggcatggttgctccattcactggcctcaagtccatggctggcttccccaccagaaagaccaacaatgacattacctccattgctagcaacggtggaagagtgcaatgcatgcaggtgtggccaccagttggcaagaagaagtttgagactctttcctacctgccagaccttgatgatgcacaattggcaaaggaagtagaataccttcttaggaagggatggattccttgcttggaattcgagttggagcacggtttcgtgtaccgtgagcacaacaggtcaccaggat

SEQ ID NO: 66217 - DNA, 355 bp, Glycine max
  unsure (1)..(355): unsure at all n locations
gcacaagtgagtttgttgatcgagataactagaaacagtgtgatgaaaatgaaggtccttgttttcttcgttgctacaattttggtagcatggcaatgccatgcgtacgatatgttccctctccgaatgaacactggctatggtgcccgtactccggaggtgaaatgcgcaagttggaggcttgctgtggaagcacacaacatctttggctttgagaccattcccgaagagtgcgttgaagcaacaaaggaatacatccatggcgaacaatatagatcagactccaaaacagttaaccaacaagcttacttttatgccagagacctcgaagtccatcccaaggacacantttttt

SEQ ID NO: 66218 - DNA, 335 bp, Glycine max
taacgggactatacgttcttcgagctacatggacgggagatcgagataacgctacggatgacacgagactggcgctggtgtgcggttcaacttccgtgactacattcctttctgacaagaacgttcgtatcacaacctctgcaaaatctccctttgttggctctcaattgccgcttacaaagctgacattatcttcttacgttcgaacccttctgacggcatcatcccgtgctcgttgccagcacgagtctactgctgctaacgctgtcgcacaagaagacccgcgcttcgcgtgcgtcgaacccgaacccagatttaaacgcccggacatttgg

SEQ ID NO: 66219 - DNA, 393 bp, Glycine max
  unsure (1)..(393): unsure at all n locations
gataccaaaggcaaaacacaagccaagtgaaagtgagaaaaaataaaaatcaaagagcataatgtcagggatcattcacaagattggggaggcccttcatgtgggagggcacaagaaggaggaggagcataagggtgagcaccatgctggagaatacaaaggggagcaccatggtgaacacagtagtgagtacaaaggagagcatcatggtgaacacaaagctggagagtaccatggtgagcacaagccagagcacanagaggggttcctagacaaagtcaaggacaagatccatggtgagggcggcgccgncgaaggcgagaagaagaagaaggagaagaagaagaaggagcatggccatgagcatggccatgacagcagcagcagcagtga

SEQ ID NO: 66220 - DNA, 314 bp, Glycine max
  unsure (1)..(314): unsure at all n locations
ggcacaagtgagtttgttgatcgagataactagagacagtgtgatgaaaatgaaggtccttgttttcttcgttgctacaattttggtagcatggcaatgccatgcgtacgatatgttccctctccgaatgaacactggctatggtgcccgtactccggaggtgaaatgcgcaagttggaggcttgctgtggaagcacacaacatctttggctttgagaccattcctgaagagtgcgttgaagcaacanaggaatacatncatggcgaacaatatagatcagacttcaaacagtttaccaacaagcttactttta

SEQ ID NO: 66221 - DNA, 427 bp, Glycine max
ggcacaagtgagtttgttgatcgagataactagaaacagtgtgatgaaaatgaaggtccttgttttcttcgttgctacaattttggtagcatggcaatgccatgcgtacgatatgttccctctccgaatgaacactggctatggtgcccgtactccggaggtgaaatgcgcaagttggaggcttgctgtggaagcacacaacatctttggctttgagaccattcctgaagagtgcgttgaagcaacaaaggaatacatccatggcgaacaatatagatcagactccaaaacagttaaccaacaagcttacttttatgccagagacctcgaagtccatcccaaggacacatttgtgttcagtatagatggcaccgtactctctaatattccatactacaaaaaacatggatatggggtggaagaaatt

SEQ ID NO: 66222 - DNA, 415 bp, Glycine max
  unsure (1)..(415): unsure at all n locations
cccacgcgtccgagacgacagaagggggagtttgttgatcgagataactagaaacagtgtgatgaaaatgaaggtccttgttttcttcgttgctacaattttggtagcatggcaatgccatgcgtacgatatgttccctctccgaatgaacactggctatggtgcccgtactccggaggtgaaatgcgcaagttggaggcttgctgtggaagcacacaacatctttggctttgagaccattcctgaagagtgcgttgaagcaacanaggaatacatccatggcgaacaatatagatcagactccaaaacagttaaccaacaagcttacttttatgccagagacctcgaagtccatcccaaggacacatttgtgttcagtatagatggcaccgtactctctaatattccatactac

SEQ ID NO: 66223 - DNA, 390 bp, Glycine max
ggtgtgattgtttgttgttgtaactcgttcttcggcttttgttgttctgtgtttgtgtttggtttttctctcacctgaaaatgtcttgcttccgtggttacctgtggttccgaaacttcttgcaattccggcaccggttgcgaaggctgcaagatgtccccagacttgagctacactgagtcaaccaccaccgagaccttggtcatgggagtggcacctgttaaggctcaatttgagggtgctgaaatgggtgtgcccgctgagaacgatggctgcaaatgtggaccaaactgctcctgcaacccctgcacttgcaagtgaggtgttgggagagcaagcttcaagcagagatagcccctaattaagaataatgataaactattaatgtgt

SEQ ID NO: 66224 - DNA, 195 bp, Glycine max
catctggcagcagacgaccgagtgggatatatggcagcaggaggaccagttggcgtgctctatgatcgattagccaactgctaccactgtgaactgttcccgagctggtatcactgttaactgtactggcgtcaacatcattgctggattcactgacctgaagaccatcgctggctttacctccattgatagcaa

SEQ ID NO: 66225 - DNA, 319 bp, Glycine max
ggtgcacaagtgagtttgttgatcgagataactagaaacagtgtgatgaaaatgaaggtccttgttttcttcgttgctacaattttggtagcatggcaatgccatgcgtacgatatgttccctctccgaatgaacactggctatggtgcccgtactccggaggtgaaatgcgcaagttggaggcttgctgtggaagcacacaacatctttggctttgagaccattcctgaagagtgcgttgaagcaacaaaggaatacatccatggcgaacaatatagatcagactccaaaacagttaaccaacaagcttacttttatg

SEQ ID NO: 66226 - DNA, 291 bp, Glycine max
gatctggcagcagaagaacaagtagttgagaactaagaaggagaagcaaatggcttcctcaatgatctcttccccagctgttaccactgtcaaccgtgccggtgccggcatggttgctccattcactggcctcaagtccatggctggcttccccaccagaaagaccaacaatgacattacctccattgctagcaacggtggaagagtgcaatgcatgcaggtgtggccaccagttggcaagaagaagtttgagactctttcctacctgccagaccttgatgatgcacaatt

SEQ ID NO: 66227 - DNA, 238 bp, Glycine max
ggtgcacaagtgagtttgttgatcgagataactagaaacagtgtgatgaaaatgaaggtccttgttttcttcgttgctacaattttggtagcatggcaatgccatgcgtacgatatgttccctctccgaatgaacactggctatggtgcccgtactccggaggtgaaatgcgcaagttggaggcttgctgtggaagcacacaacatctttggctttgagaccattcctgaagagtgcg

SEQ ID NO: 66228 - DNA, 371 bp, Glycine max
  unsure (1)..(371): unsure at all n locations
gatgcgcatgagagagagtagatcggggtaactagaaactgagcattgtgattgcaaggatcaggacacatgtgtgcttcaattgaaagagcatggtgatgccatagcacatgcttaggaaactatcgggttgatcactgagattagtgccaatactccagagctcaagagcacaaattaggggattgctactactgctcatacaatatcatctgtttgatacatatgcatcatggagagcgtngctcatcacgaaggaatacgtccatgagaaacaatgtatatagaactgctaaacgagtaacttactggctatcacttatggacaaaacatgaaaaggcatacgaaggacacattggtgctcattgat

SEQ ID NO: 66229 - DNA, 404 bp, Glycine max
gatctggcagcagaagaacaagtagttgagaactaagaaggagaagcaaatggcttcctcaatgatctcttccccagctgttaccactgtcaaccgtgccggtgccggcatggttgctccattcactggcctcaagtccatggctggcttccccaccaggaagaccaacaatgacattacctccattgctagcaacggtggaagagtgcaatgcatgcaggtgtggccaccagttggcaagaagaagtttgagactctttcctacctgccagaccttgatgatgcacaattggcaaaggaagtagaataccttcttaggaagggatggattccttgcttggaattcgagttggagcacggtttcgtgtaccgtgagcacaacaagtcaccaaggatactacgat

SEQ ID NO: 66230 - DNA, 430 bp, Glycine max
gcacaagtgagtttgttgatcgagataactagaaacagtgtgatgaaaatgaaggtccttgttttcttcgttgctacaattttggtagcatggcaatgccatgcgtacgatatgttccctctccgaatgaacactggctatggtgcccgtactccggaggtgaaatgcgcaagttggaggcttgctgtggaagcacacaacatctttggctttgagaccattcctgaagagtgcgttgaagcaacaaaggaatacatccatggcgaacaatatagatcagactccaaaacagttaaccaacaagcttacttttatgccagagacctcgaagtccatcccaaggacacatttgtgttcagtatagatggcaccatactctctaatattccatactacaaaaaacatggatatgggggtggagaaaatttaa

SEQ ID NO: 66231 - DNA, 224 bp, Glycine max
acgacagaagggggcacaagtgagtttgttgatcgagataactagaaacagtgtgatgaggatgaacgtccttgttttcttcgttgctacaattttggtagcatggcaatgccatgcgtacgatatgttcccttctccaaatgaacactggtatggtgcccgtactccgaaggggaaatgcccagttggaggcttgctgtggaaacacacaacatctttgggtt

SEQ ID NO: 66232 - DNA, 421 bp, Glycine max
gaaggtgcaagagtttgttgtgagctataagctagtttatcgtgaggagaatatgaagttgtttgttttctttgttgctgcagtagttttggtagcatggccatgccatggcgcaggctaccaaaggttccctctccgaatgaaaactggctatggtgagcgttcttcggaggtaaaatgcgcaagttttaggcttgctgtggaagcacacaacatccgagcctttaaaaccattcctgaagagtgcgttgaaccaacaaaggactacattaatggcgaacaatttagatcagaccctaaaacagttaaccaacaagctttcttttatgctagtgaacgcgaagtccatcacaacgacctatttatattcggcatagataacaccggactctctaatatcccatactatgaaaaacatgga

SEQ ID NO: 66233 - DNA, 52 bp, Glycine max
  unsure (1)..(52): unsure at all n locations
gagacctcatgtcaggcggngctacccgctgagtttaagcatatcaataagc

SEQ ID NO: 66234 - DNA, 319 bp, Glycine max
  unsure (1)..(319): unsure at all n locations
gggtgttctaagaacagctatctcgcttttacatcgtttattcgacaagagacgaaaccacatcggaggcatcgtgtatctgtcttcatagagatggctaggacattttaaggatatatggagcgcttccaacctaagggcaaacgaatgctggtaagttgctcggggggtttgacacgcttttcgtctttggtgccatacttctacanccatgagaggctgttggaggcacctgatgatactgcaggtagcacattgatagagtttgaaagctgacaaagaagcaagaatgaagggtgaatgccannacatgccatca

SEQ ID NO: 66235 - DNA, 405 bp, Glycine max
  unsure (1)..(405): unsure at all n locations
agacgtacgaacacacctaagttcactttactcacgactacagaaagtgaccggcagagccattattcacctggagatggtcaccttaatcatagtacatttctttctaattctgctagcattcatagcatccactgcagacgctactctcttcnaccctccatccttcattactcagcagctccccaacattcactatgcacatatcaactcctcactcactgcctgtccaaatccatgtcttatctcaaaatcgaaccctcaccatagtcccaatgcttataccatctagacaggctgattctcaacttccaaaacatgcatttgcaataaaacattttctactacctcaagtagcgcagatattaacaattcctgctatgctacatcaaattcaactctatc

SEQ ID NO: 66236 - DNA, 399 bp, Glycine max
gatctggcagcagaagaacaagtagttgagaactaagaaggagaagcaaatggcttcctcaatgatctcttccccagctgttaccactgtcaaccgtgccggtgccggcatggttgctccattcactggcctcaagtccatggctggcttccccaccaggaagaccaacaatgacattacctccattgctagcaacggtggaagagtgcaatgcatgcaagtgtggccaccagttggcaagaagaagtttgagactctttcctacctgccagaccttgatgatgcacaattggcaaaggaagtagaataccttcttaggaagggatggattccttgcttggaattcgagttggagcacggtttcgtgtaccgtgagcacaacaggtcaccaggatacta

SEQ ID NO: 66237 - DNA, 425 bp, Glycine max
  unsure (1)..(425): unsure at all n locations
ggtgcacaagtgagtttgttgatcgagataactagaaacagtgtgatgaaaatgaaggtccttgttttcttcgttgctacaattttggtagcatggcaatgccatgcgtacgatatgttccctctccgaatgaacactggctatggtgcccgtactccggaggtgaaatgcgcaagttggaggcttgctgtggaagcacacaacatctttggctttgagaccattcctgaagagtgcgttgaagcaacaaaggaatacatccatggcgaacaatatagatcagactccaaaacagttaaccaacaagcttacttttatgccagagacctcgaagtccatcccaaggacacatttgtgttcagtatagatggcaccgtactctctaatattccatactacananaacatggatatgggggtggaga

SEQ ID NO: 66238 - DNA, 397 bp, Glycine max
gagtgcacaagtgagtttgttgatcgagataactagaaacagtgtgatgaaaatgaaggtccttgttttcttcgttgctacaattttggtagcatggcaatgccatgcgtacgatatgttccctctccgaatgaacactggctatggtgcccgtactccggaggtgaaatgcgcaagttggaggcttgctgtggaagcacacaacatctttggctttgagaccattccttgaaaatgcgttgaagcaacaaaggaatacatccatggcgaacaatatagatcagactccaaaacagttaaccaacaagcttacttttatgccagagacctcgaagtccatcccaaggacacatttgtgttcagtatagatggcaccgtactctctaatattccatac

SEQ ID NO: 66239 - DNA, 419 bp, Glycine max
gaacgtgcaagagtttgttgtgagctataagctagttgatcgtgaggagaatatgaagttgtttgttttctttgctgctgcagtagttttggtagcatggccatgccatggcgcaggctaccaaaggttccctctccgaatgaaaactggctatggtgagcgttcttcggaggtaaaatgcgcaagttttaggcttgctgtggaagcacacaacatccgagcctttaaaaccattcctgaagagtgcgttgaaccaacaaaggactacattaatggcgaacaatttagatcagactctaaaacagttaaccaacaagctttcttttatgctaatgaacgcgaagtccatcacaacgacatatttatattcggcatagataacaccgtactctctaatatcccatactatgaaaaacatg

SEQ ID NO: 66240 - DNA, 312 bp, Glycine max
  unsure (1)..(312): unsure at all n locations
gacagcggaaacaattaataaagatgagtttgaagaacaacatggtggtgctaaaggtgtgtttgttgcttcttttccttgtgggggttacagctgcacgcatggaactgagcttcttcaaaagtgatcagtcatcaagttatgatgatgatgagtattcaaaaccatgctgtgatctctgcatgtgcacacgctcaatgcctnctcaatgcaactgtgaagatattaggctgaattcatgccactcagattgtaagagctgtatgtgcacacgctcacagccaggacagtgtcngtgtcttgacaccaacg

SEQ ID NO: 66241 - DNA, 343 bp, Glycine max
  unsure (1)..(343): unsure at all n locations
ggcagggttaggtttaatttatttatcttggtttagttgtttaatttgtatttctcagttaccttgttgtttaggttggttaattggcttgttttgtttgttttctattttgtgacattttcgactgaacggataatttggtaggagtataaatgttccttccttgacttcagtctaaaaatgtcgtggaatttcccttctttatctctatgttgacccaattcagactatgtatgactttttttctatgtttaaataagttgcacgatcacgtgtttgtgtaatgtgtgttcaatgagagacacattattccctttttacttctaaaaaaaaaaacaangaa

SEQ ID NO: 66242 - DNA, 431 bp, Glycine max
ggcacaagtgagtttgttgatcgagataactagaaacagtgtgatgaaaatgaaggtccttgttttcttcgttgctacaattttggtagcatggcaatgccatgcgtacgatatgttccctctccgaatgaacactggctatggtgcccgtactccggaggtgaaatgcgcaagttggaggcttgctgtggaagcacacaacatctttggctttgagaccattcctgaagagtgcgttgaagcaacaaaggaatacatccatggcgaacaatatagatcagactccaaaacagttaaccaacaagcttacttttatgccagagacctcgaagtccatcccaaggacacatttgtgttcagtatagatggcaccgtactctctaatattccatactacaaaaaacatggatattgggtggaagaaatttaac

SEQ ID NO: 66243 - DNA, 407 bp, Glycine max
gaaggtgcaagagtttgttgtgagctataagctagtttatcgtgaggagaatatgaagttgtttgttttctttgttgctgcagtagttttggtagcatggccatgctatggcgcaggctaccaaaggttccctctccgaatgaaaactggctatggtgagcgttcttcggaggtaaaatgcgcaagttttaggcttgctgtggaagcacacaacatccgagcctttaaaaccattcctgaagagtgcgttgaaccaacaaaggactacattaatggcgaacaatttagatcagactctaaaacagttaaccaacaagctttcttttatgctagtgaacgcgaagtccatcacaacgacatatttatattcggcatagataacaccgtactctctaatatcccatact

SEQ ID NO: 66244 - DNA, 349 bp, Glycine max
ggcacaagtgagtttgttgatcgagataactagaaacagtgtgatgaaaatgaaagtccttgttttcttcgttgctacaattttggtagcatggcaatgccatgcgtacgatatgttccctctccgaatgaacactggctatggtgcccgtactccggaggtgaaatgcgcaagttggaggcttgctgtggaagcacacaacatctttggctttgagaccattcctgaagagtgcgttgaagcaacaaaggaatacattcatggcgaacaatatagatcagactccaaaacagttaaccaacaagcttacttttatgccagagacctcgaagtccatcccaaggacaca

SEQ ID NO: 66245 - DNA, 268 bp, Glycine max
gaccgactggtccattttagactacgcgctatgcatccgacccctatcgcacacccatctgatacaaggttcatggctagcctaaaggatgcatgtttcggctgtcaggctatgcatggctcaggagagtgcaccgatggcacatgcagctatcacgtaccgacaagggactagtgacctgtccaattgcatagctactcttataaggacgaacgtcctttgatgaatgctgcgacggattcaacagcctctatgccgacgacaagac

SEQ ID NO: 66246 - DNA, 187 bp, Glycine max
ggctgactagccaatccttcgcgaaggtgcatagagccgaataagtaccaatggtgaagtcctcaagggaccttgactttccacctaggtcttacaaggctaaaggggcttacctaaggttcaatttaaggaccccagggaaaacggcttttccaatgaggaactggcccttggtcaaggttaaaag

SEQ ID NO: 66247 - DNA, 341 bp, Glycine max
gcagagagcgagcgagcgagcagtttcaaagagaggatttgggattgggaaggccagggattgcgctgcgtctcttcctcttctctttcgatccatccctcattcataatcttccaatccaacaacctcagcctcacactcacacatacacacatctgaacgcgtatcgaccctgccatggcttcaaagcgcatcctcaaggagctcaaggacttgcagaaagacccaccaacttcttgcagcgctggtccagtaactgaagacatgttccattggcaagcaacgattatgggtcctgctgatagtccttatgctggacgtgtattcctagtcactattca

SEQ ID NO: 66248 - DNA, 234 bp, Glycine max
gacgatgagtcgatttgatagctaatgtattgttattcgtgatattgatccaatttgatatcatcgaaatccaatttataccattgttgaattaattatcgatgaaagatttatcatctctatgggattaaattccgcatattttattgcataatagaacataccatggcttaaaaagcacgccgtcgatgtataagatccaagcttacgtgcgcgtgcatgcgactgcatagc

SEQ ID NO: 66249 - DNA, 422 bp, Glycine max
ggttctagtgtgtgattgtttgttgttgtaactcgttcttcttcttttgttgttctgtgtttgtgtttgttttttctctcacctgaaaatgtcttgctgcggtggtaactgtggttgcggaagctcctgcaagtgcggcaacggctgcggaggctgcaagatgtacccagacttgagctacactgagtcaaccaccaccgagaccttggtcatgggagtggcacctgttaaagctcaatttgagggtgctgaaatgggtgtgcccgctgagaacgatggctgcaaatgtggaccaaactgctcctgcaacccctgcacttgcaagtgaggtgttgggagagcaagcttcaagcagagatagcccttaattgggaataatgataaactattaatgtgtagctaaaaacttatgtattatgtct

SEQ ID NO: 66250 - DNA, 243 bp, Glycine max
gattatatttgagttcaaacaaatcaaagccatggccacctccaacttctctattgttctctccgtctccctagccttctttttggtgctacttaccaaggcacactcgaccgataccgtttctttcaccttcaacaagttcaacccagtccaaccaaacattatgctccaaaaagatgctagtatttcatcctctggggtgttacaactcaccaaagttggcagcaacggcgtgcccacctc

SEQ ID NO: 66251 - DNA, 469 bp, Glycine max
gaagacgacagaaggggatctggcagcagaagaacaagtagttgagaactaagaaggagaagcaaatggcttcctcaatgatctcttccccagctgttaccactgtcaaccgtgccggtgccggcatggttgctccattcactggcctcaagtccatggctggcttccccaccagaaagaccaacaatgacattacctccattgctagcaacggtggaagagtgcaatgcatgcaggtgtggccaccagttggcaagaagaagtttgagactctttcctacctgccagaccttgatgatgcacaattggcaaaggaagtagaataccttcttaggaagggatggattccttgcttggaattcgagttggagcacggtttcgtgtaccgtgagcacaacaggtcaccaggataccacgatggacgctactggaccatgtggaagctgcctatgtttggttgcactgatgc

SEQ ID NO: 66252 - DNA, 245 bp, Glycine max
ggcacaagtgagtttgttgatcgagataactagaaacagtgtgatgaaaatgaaggtccttgttttcttcgttgctacaattttggtagcatggcaatgccatgcgtacgatatgttccctctccgaatgaacactggctatggtgcccgtactccggaggtgaaatgcgcaagttggaagcttgttgtggaagcacacaacatctttggctttgagaccattcctgaagagtgcgttgaagcaa

SEQ ID NO: 66253 - DNA, 389 bp, Glycine max
gaaggtgcaagagtttgttgtgagctataagctagtttatcgtgaggagaatatgaagttgtttgttttctttgttgctgcagtagttttggtagcatggccatgccatggcgcaagctaccaaaggttccctctccgaatgaaaactggctatggtgagcgttcttcggaggtaaagtgcgcaagttttaggcttgctgtggaagcacacaacatccgagcctttaaaaccattcctgaagagtgcgttgaaccaacaaaggactacattaatggcgaacaatttagatcagactctaaaacagttaaccaacaagctttcttttatgctagtgaacgcgaagtccatcacaacgacatatttatattcggcatagataacaccgtac

SEQ ID NO: 66254 - DNA, 423 bp, Glycine max
gggaggtagagcttaaaaaaacaagataacaaataaagtataagtgcggcgggtcaaactgggtgtatataatcggatcactataagacaactatttcttttgaggtttcaaagaatgattttcgaattcgattgaatctaaaacacaaaagagttggtttacaggatagaagaaacccacgtatatgtgataggatattctatatgaactagttatatatgaactaaccatatccatatatattatataaaataactaatattttatatctaaaattgccccgctactactgtaaatttcgatagggattaaaaaacatagcctttccgtttcatctcgaattgtgaattgaatattcaatgaccaaataaaattaaaggaaaaggttaaaaaaagcggccgatctagaggatccaagctta

SEQ ID NO: 66255 - DNA, 413 bp, Glycine max
gatctggcagcagaagaacaagtagttgagaactaagaaggagaagcaaatggcttcctcaatgatctcttccccagctgttaccactgtcaaccgtgccggtgccggcatggttgctccattcactggcctcaagtccatggctggcttccccaccaggaagaccaacaatgacattacctccattgctagcaacggtggaagagtgcaatgcatgcaggtgtggccaccagttggcaagaagaagtttgagactctttcctacctgccagaccttgatgatgcacaattggcaaaggaagtagaataccttcttaggaaaggatggattccttgcttggaattcgagttggagcacggtttcgtgtaccgtgagcacaacaagtcaccaagatactacgatggacgctact

SEQ ID NO: 66256 - DNA, 386 bp, Glycine max
  unsure (1)..(386): unsure at all n locations
ggcacaagtgagtttgttgatcgagataactagaaacagtgtgatgaaaatgaaagtccttggtttcttcgttgctacaattttggtagcatggcaatgccatgcgtacgatatggtccctctccgaatgaacactggctatggtgcccgtactccggaagtgaaatgcgcaagttggaagcttgctgtggaagcacacaacatctttggctttgagaccattcctgaagagtgcgttgaagcaacaaaggaatacattcatggcgaacaatatagatcagactccanaacagttaaccaacaagcttacttttatgccagagaccttcgagtccatcccaaggacacatttgtgttcagtatagatggcaccgtactctctaata

SEQ ID NO: 66257 - DNA, 188 bp, Glycine max
ggtgtgagtgaagaagcagagggagtagcggcattaaaaatgcagatcttcgtgaaaactctgacagggaagactataaccctcgaggtcgagagcagcgacaccatcgacaatgtcaaggccaagattcaagacaaggaaggcattcctccggatcagcagcgtttgattttcgccggaaagcagct

SEQ ID NO: 66258 - DNA, 401 bp, Glycine max
ggttctagtgtgtgattgtttgttgttgtaactcgttcttcttcttttgttgttctgtgtttgtgtttgctttttctctcacctgaaaatgtcttgctgcggtggtaactgtggttgcggaagctcctgcaagtgcggcaacggctgcggaggctgcaagatgtacccagacttgagctacactgagtcaaccaccaccgagaccttggtcatgggagtggcacctgttaaggctcaatttgagggtgctgaaatgggtgtgcccgctgagaacgatggctgcaaatgtggaccaaactgctcctgcaacccctgcacttgcaagtgaggtgttgggagagcaagcttcaagcagagatagcccttaattaggaataatgataaactattaatgtgtagct

SEQ ID NO: 66259 - DNA, 107 bp, Glycine max
ggatcctaactcttgaagctgaagaacctgaggctaattgaactctaacgtgccaaaagaaaaatggacaaaaaaatataaaaagcggccgctctagaggatccaag

SEQ ID NO: 66260 - DNA, 397 bp, Glycine max
ggcacaagtgagtttgttgatcgagataactagaaacagtgtgatgaaaatgaaggtccttgttttcttcgttgctacaattttggtagcatggcaatgccatgcgtacgatatgttccctctccgaatgaacactggttatggtgcccgtactccggaggtgaaatgcgcaagttggaggcttgctgtggaagcacacaacatctttggctttgagaccattcctgaggagtgcgttgaagcaacaaaggaatacatccatggcgaacaatatagatcagactccaaaacagttaaccgacaagcttacttttatgccagagacctcgaagtccatcccaaggacacatttgtgttcagtatagatggcaccgtactctctaatattccatactac

SEQ ID NO: 66261 - DNA, 368 bp, Glycine max
ggcacaagtgagtttgctgatcgagataactaggggcagtgtgatgaaaatgaaggtccttgttttcttcgttgctacaattttggtagcatggcaatgccatgcgtacgatatgttccctctccgaatgaacactggctatggtgcccgtactccggaggtgaaatgcgcaagttggaggcttgctgtggaagcacacaacatctttggctttgagaccattcctgaagagtgcgttgaagcaacgaaagaatacatacatggcgaacaatatagatcagactccaaaacagtttaccaacaagcttacttttatgccagagaccctcaagtccatcccaaggacacatgtgtgttcagtatagatg

SEQ ID NO: 66262 - DNA, 436 bp, Glycine max
catgggtcttgagaaagaacttggctatacatcaagttgtccctcaggacaagaaggaggctgcgatcctcctcatggctttatcttatggccttgttcattgatgaaccttaatagctagctagagctaccaccgcttcacttaatttcagatcgttaattaattaggttaatttcttgccttgctgtcttatgactagctagtttttgttagattattattattgtgtgagatcaatggtttgagttatatgtgcgagaagagtatgtaatattgcagtactagctagttagttaggaaaggggagggaaaataaagttacatgggtgtggaggtgatcttatgtacttcatataatattatgtctgatgtgaacatgttgaggaccaaaaaatgtgggtctcttcttgatgtatcttaaaaataagttcaata

SEQ ID NO: 66263 - DNA, 436 bp, Glycine max
  unsure (1)..(436): unsure at all n locations
gaaggtgcaagagtttgttgtgagctataagctagtttatcgtgaggagaatatgaagttgtttgttttctttgttgctgcagtagttttggtagcatggccatgccatggcgcaggctaccaaaggttccctctccgaatgaaaactggctatggtgagcgttcttcggaggtaaaatgcgcaagttttaggcttgctgtggaagcacacaacatccgagcctttaaaaccattcctgaagagtgcgttgaaccaacaaaggactacattaatggcgaacaatttagatcagactctaaaacagttaaccaacaagccttcttttatgctagtgaacgcgaagtccatcacaacgacatatttatattcggcatagataacaccgtactctctaatatcccatactatgaaaaacatggatatggngtggaggaa

SEQ ID NO: 66264 - DNA, 308 bp, Glycine max
gatctggcagcagaagaacaagtagttgagaactaagaaggagaagcaaatggcttcctcaatgatctcttccccagctgttaccactgtcaaccgtgccggtgccggcatggttgctccattcactggcctcaagtccatggctggcttccccaccaggaagaccaacaatgacattacctccattgctagcaacggtggaagagtgcaatgcatgcaggtgtggccaccagttggcaagaagaagtttgagactctttcctacctgccagaccttgatgatgcacaattggcaaagggaagtagaa

SEQ ID NO: 66265 - DNA, 360 bp, Glycine max
agggaagagtgcaagagtttgttgtgagctataagctagtttatcgtgaggagaatatgaagttgtttgttttctttgttgctgcagtagttttggtagcatggccatgccatggcgcaggctaccaaaggttccctctccgaatgaaaactggctatggtgagcgttcttcggaggtaaaatgcgcaagttttaggcttgctgtggaagcacacaacatccgagcctttaaaaccattcctgaagagtgcgttgaaccaacaaaggactacattaatggcgaacaatttagatcagactcttaaacagttaaccaaccagcctttctttatgctagtgaacgcgaagtcccttacaacg

SEQ ID NO: 66266 - DNA, 432 bp, Glycine max
ggcacaagtgagtttgttgatcgagataactagaaacagtgtgatgaaaatgaaggtccttgttttcttcgttgctacaattttggtagcatggcaatgccatgcgtacgatatgttccctctccgaatgaacactggctatggtgcccgtactccggaggtgaaatgcgcaagttggaggcttgctgtggaagcacacaacatctttggctttgagaccattcctgaagagtgcgttgaagcaacaaaggaatacatccatggcgaacaatatagatcagactccaaaacagttaaccaacaagcttacttttatgccagagacctcgaagtccatcccaaggacacatttgtgttcagtatagatggcaccgtactctctaatattccatactacaaaaaacatggatatggggtggagaaatttaactc

SEQ ID NO: 66267 - DNA, 420 bp, Glycine max
gaaggtgcaagagtttgttgtgagctataagctagtttatcgtgaggagaatatgaagttgcttgttttctttgttgctgcagtagttttggtagcatggccatgccatggcgcaggctaccaaaggttccctctccgaatgaaaactggctatggtgagcgttcttcggaggtaaaatgcgcaagttttaggcttgctgtggaagcacacaacatccgagcctttaaaaccattcctgaagagtgcgttgaaccaacaaaggactacattaatggcgaacaatttagatcagactctaaaacagttaaccaacaagctttcttttatgctagtgaacgcgaagtccatcacaacgacatatttatattcggcatagataacaccgtactctctaatatcccatactatggaaaacatgg

SEQ ID NO: 66268 - DNA, 122 bp, Glycine max
aaagtgcaagagtttgttgtgagctataagctagtttatcgtgaggagaatatgaagttgttaggtttctttgttgctgcagtaattatggtatcatggccatgccagtgcgcatgctacca

SEQ ID NO: 66269 - DNA, 406 bp, Glycine max
ggcacaaatgagtttgttgatcgagataactagaaacagtgtgatgaaaatgaaggtccttgttttcttcgttgctacaattttggtagcatggcaatgccatgcgtacgatatgttccctctccgaatgaacactggctatggtgcccgtactccggaggtgaaatgcgcaagttggaggcttgctgtggaagcacacaacatctttggctttgagaccattcctgaagagtgcgttgaagcaacaaaggaatacatccatggcgaacaatatagatcagactccaaaacagttaaccaacaagcttacttttatgccagagacctcgaagtccatcccaaggacacatttgtgttcagtatagatggcaccgtactctctaatattccatactacaaaaaacat

SEQ ID NO: 66270 - DNA, 155 bp, Glycine max
gtgactcgttctgtgtcggctgcgacttgacctcttgttggttcggctgctagaagaccatctaccggacagctgctagatgacgacggaacggggagcacagtatcgccggcaagcccggtaacacctgcagaggctcccccatgttcgcttac

SEQ ID NO: 66271 - DNA, 390 bp, Glycine max
gatatctggcagcagaagaacaagtagttgagaactaagaaggagaagcaaatggcttcctcaatgatcccttccccagctgttaccactgtcaaccgtgccggtgccggcatggttgctccattcactggcctcaagtccatggctggcttccccaccaggaagaccaacaatgacattacctccattgctagcaacggtggaagagtgcaatgcatgcaggtgtggccaccagttggcaagaagaagtttgagactctttcctacctgccagaccttgatgatgcacaattggcaaaggaagtagaataccttcttaggaagggatggattccttgcttggaattcgagttggagcacggtttcgtgtaccgtgagcacaacatgtca

SEQ ID NO: 66272 - DNA, 355 bp, Glycine max
aggggggcacaagtgagtttgttgatcgagataactagaaacagtgtgatgaaaatgaaagtccttgttttcttcgttgctacaattttggtagcatggcaatgccatgcgtacgatatgttccctctccgaatgaacactggctatggtgcccgtactccggaagtgaaatgcgcaagttggaggcttgctgtggaagcacacaacatctttggctgtgagaccattcctgaagagtgcgttgaagcaacaaatgaatacatccatggcgaacaatatagatcagactccaaaacagttaaccaacaagcgtacttttatgccagagacctcgaagtgcatcccaagggacaca

SEQ ID NO: 66273 - DNA, 414 bp, Glycine max
  unsure (1)..(414): unsure at all n locations
gacaagtgagtttgttgatcgagataactagaaacagtgtgatgaaaatgaaggtccttgttttcttcgttgctacaattttggtagcatggcaatgccatgcgtacgatatgttccctctccgaatgaacactggctatggtgcccgtactccggaggtgaaatgcgcaagttggaggcttgctgtggaagcacacaacatctttggctttgagaccattcctgaagagtgcgttgaagcaacaaaggaatacatccatggcgaacaatatagatcaggctccaaaacagttaaccaacaagcttacttttatgccagagacctcgaagtccatcccaaggacacatttgtgttcagtatagatggcaccgtactctctaatattccatactacanaaaacatggatatgggg

SEQ ID NO: 66274 - DNA, 389 bp, Glycine max
gagaagaacgagtagttgagaactaagaaggagaagcaaatggcttcctcaatgatctcttccccagctgttaccactgtcaaccgtgccggtgccggcatggttgctccattcactggcctcaagtccatggctggcttccccaccaggaagaccaacaatgacattacctccattgctagcaacggtggaagagtgcaatgcatgcaggtgtggccaccagttggcaagaagaagtttgagactctttcctacctgccagaccttgatgatgcacaattggcaaaggaagtagaataccttcttaggaagggatggattccttgcttggaattcgagttggagcacggtttcgtgtaccgtgagcacaacaggtcaccaggatacta

SEQ ID NO: 66275 - DNA, 335 bp, Glycine max
agggcacaagtgagtctgttgatcgagataactagaaacagtgtgatgaaaatgaaggtccttggtttcttcgttgctacaattttggtagcatggcaatgccatgcgtacgatatgttccctctccgaatgaacactggctatggtgcccgtactccggacgtgaaatgcgcaagttggacgcttgctgtggaagcacacaacatctttggctttgagaccattcctgaagagtgcgttgaatccacaaaagaatacatccatggcgaacaatatagatcagacttcaataacagctaacaacaggcttacttttatgccagagacctcgaagt

SEQ ID NO: 66276 - DNA, 158 bp, Glycine max
  unsure (1)..(158): unsure at all n locations
accggtgggaaaagaccacagaagggggacacataacacaaccccntanaaaaaaaaaaaaaaaaaaaaaaaaggcgggcggtctaaaagaaccaaacttaactacccctgcattcgaaagcataaatcttttataagggcaactaaaatcaaatcaa

SEQ ID NO: 66277 - DNA, 375 bp, Glycine max
gacttcaaaacactcataacacaaagcacaaagcaaagctcatccttgagttaaaaaatggcagcagcttcttccatggctctctcatccccatccttggctggcaaggccgtgaagctgggcccatcagccccagaagtgggaagggtgagcatgaggaagaccgtcaccaagcaggtctcctcaggaagcccatggtacggcccagaccgagtcaagtacttgggcccattctctggcgagcccccgtcctacctaaccggtgagttcccaggcgactacggctgggacactgctgggctttccgcagacccagaaaccttcgccaagaaccgtgaactcgaagtgatccactccaggtgggccatgctcgga

SEQ ID NO: 66278 - DNA, 399 bp, Glycine max
ggttctagtgtgtgattgtttgttgttgtaactcgttcttcttcttttgttgttctgtgtttgtgtttgttttttctctcacctgaaaatgtcttgctgcggtggtaactgtggttgcggaagctcctgcaagtgcggcaacggctgcggaggctgcaagatgtacccagacttgagctacactgagtcaaccaccaccgataccttggtcatgggagtggcacctgttaaggctcaatttgagggtgctgaaatgggtgtgcccgctgagaacgatggctgcaaatgtggaccaaactgctcctgcaacccctgcacttgcaagtgaggtgttgggagagcaagcttcaagcagagatagccccttattaggaaataatgataaactattaatgtgta

SEQ ID NO: 66279 - DNA, 252 bp, Glycine max
cttacctaacaataaaccctagcttttcaatgctcgggcgggcacagtgagtgagtgagttatttcaaaaacccgcgattcggctaaaggataccaattaacatagacttgcatattggggttgccttggacttttccaaaggaagcaaaatcgctctcaaatgggctattgacaatcttttccgtgacggtgacatactctacatcgtccacatcaagcctttcggaggaagtgaattccgaaattttctt

SEQ ID NO: 66280 - DNA, 79 bp, Glycine max
tgtgtgtcacaagcgtcctcagactcactaaatgcggcaaacatttttatgttcagggcattccccaaaaagtcaacct

SEQ ID NO: 66281 - DNA, 339 bp, Glycine max
ggttctagtgtgtgattgtttgttgttgtaactcgttcttcttcttttgttgttctgtgtttgtgtttgttttttctctcacctgaaaatgtcttgctgcggtggtaactgtggttgcggaagctcctgcaagtgcggcaacggctgcggaggttgcaagatgtacccagacttgagctacactgagtcaaccaccaccgagaccttggtcatgggagtggcacctgttaaggctcaatttgagggtgctgaaatgggtgtgcccgctgagaacgatggctgcaaatgtggaccaaactgctcctgcaacccctgcacttgcaagtgaggtgttgggag

SEQ ID NO: 66282 - DNA, 204 bp, Glycine max
gtacacaacttttctcagattcactaattcggcatccatttttatgttaaggacattccccaaaaaagtaaaaaacgaaagaaacaaagaaagttatttcaaggaaaaaacgagagaagaaaaaaaaaagtatggtgcgaactttatgcaatttccacagaagaaagttggcaaattttttcatcaaaagaaagttgtcttaca

SEQ ID NO: 66283 - DNA, 57 bp, Glycine max
  unsure (1)..(57): unsure at all n locations
gagacctcaggtcaggcggggctacccgctgagtttaagcatatcaataagcggngg

SEQ ID NO: 66284 - DNA, 327 bp, Glycine max
ggttctagtgtgtgattgtttgttgttgtaactcgttcttcttcttttgttgttctgtgtttgagtttgttttttctctcacctgaaaatgtcttgctgcggtggtaactgtggttgcggaagctcctgcaagtgcggcaacggctgcggaggctgcaagatgtacccagacttgagctacactgagtcaaccaccaccgagaccttggtcatgggagtggcacctgttaaggctcaatttgagggtgctgaaatgggtgtgcccgctgagaacgatggctgcaaatgtggaccaaactgctgctgcaacccctgcacttgcaagtg

SEQ ID NO: 66285 - DNA, 373 bp, Glycine max
gggaaggtccaggagtttgttgtgagctataagctagtttatcgtgaggagaatatgaagttgtttgttttctttgttgctgcagtagttttggtagcatggccatgccatggcgcatgctaccaaaggttccctctccgaatgaaaactggctatggtgagcgttcttcggaggtaaaatgcgcaagttttaggcttgctgtggaagcacacaacatccgagcctttaaaaccattcctgaagagtgcgttgaaccaacaaaggactacattaatggcgaacaatttagatcagactctaaaacagttaaccaacaagctttcttttatgctagtgaacgcgaagtccatcacaacgacatatttatattcg

SEQ ID NO: 66286 - DNA, 269 bp, Glycine max
gaagaagaagaaggagcatggccatgagcatggccatgacagcagcagcagcagtgacagtgattaaactgctgcatcacctatatatttaaaaggtctatgggaccatagtagcgagggctgtgccttaatttctatctatctctctatgtatctctctctctatatctttttcctttctccctatcttgcgatctatttatgagtgagaaaaacaaaagtgagatattgcgcgtgcatctggttgctaattcgagtgctattagtct

SEQ ID NO: 66287 - DNA, 233 bp, Glycine max
gggggggctgcatgagggttgagagtcatgcccaggagcacaactatgccgtacgagatgagtcttggagcacatgcttcagctattgtcacaaccacaaacaatcccggagcttgcacatgagcatgaacttctacaacaacatcaataggctgggtgcttatactgatgacgactatgactaataactgcatatgcctcatcatgggcatgagaacggcgtatgagccatg

SEQ ID NO: 66288 - DNA, 392 bp, Glycine max
ggcacaagtgagtttgtcgatcgagataactagaaacagtgtgatgaaaatgaaggtccttgttttcttcgttgctacaattttggtagcatggcaatgccatgcgtacgatatgttccctctccgaatgaacactggctatggtgcccgtactccggaggtgaaatgcgcaagttggaagcttgctgtggaagcacacaacatctttggctttgagaccattcctgaagagtgcgttgaagcaacaaaggaatacatccatggcgaacaatatagatcagactccaaaacagttaaccaacaagcttacttttatgccagagacctcgaagtccatcccaaggacacatttgtgttcagtatagatggcaccgtactctctaatattccat

SEQ ID NO: 66289 - DNA, 360 bp, Glycine max
ggaagtttgctgtgcatagatatggcaaaaccgcgctttttggtttcgacgattcctgtgtctgtcaggcacacattctgccctagcaggataagagttgtcgaagaatatcaagaaggtttgtctgatgaagatgatgatctctgtcccgtcgaatgtgtaagagaattcaccactgatgaagagttcagcaaaattctggacaaggctaaagaaactggatctttggtggtggtagatttctttcgcacctcttgtggaagctgcaagtatatagagcagggttttgcaaaactgtgcaagaaatctggtgatcatgaagctccagtaatctttctaaagcataatgtaatggatgag

SEQ ID NO: 66290 - DNA, 158 bp, Glycine max
acgcgtacgaacaggtccgacgggtctacacatggggagacataccgggggactgggggacgagtatgggcctaggaaacaacttcatgcttcagatgtcatatcaccaaccatggatccggaagtagacaactctacgtaaaccttagggactgatg

SEQ ID NO: 66291 - DNA, 115 bp, Glycine max
gtggcgagacagtgagagggtggaaatggcggctgtggcagcgagaagcacaggcagcgttggtgttggtgctgtcatcttcatctcagtcgctctcaccacttatttcatctcg

SEQ ID NO: 66292 - DNA, 97 bp, Glycine max
actcgtacgaacagtatgaggggtctacacaagggtacacatgcacggggattgggtcagaatacggagtcaccgagattcatctagtatatagatg

SEQ ID NO: 66293 - DNA, 352 bp, Glycine max
ggcacaagtgagtttgttgatcgagataactagaaacagtgtgatgaaaatgaaggtccttgttttcttcgttgctacaattttggtagcatggcaatgccatgcgtacgatatgttccctctccgaatgaacactggctatggtgcccgtactccggaggtgaaatgcgcaagttggaggcttgctgtggaagcacacaacatctttggctttgagaccattcctgaagagtgcgttgaagcaacaaaggaatacatccatggcgaacaatatagatcagactccaaaacagttaaccaacaagcttacttttatgccagagacctcgaagtccatgccaaggacacattt

SEQ ID NO: 66294 - DNA, 94 bp, Glycine max
gaagaaagctgctagcagagggaagttctacacttttttgtttggattgatcgagtgtactttttcttttcgagattggcttggtgtgcagtgc

SEQ ID NO: 66295 - DNA, 381 bp, Glycine max
cacctatgaggggtctacacacggttacgcctaacgagagatcggggaacaatatgggtctaatgagtgaccttgatgattctgatgttacaactcttgcaactggccctgacgagactagccttctggtgcctctcactatgatcatacagtttggactccacagtcctgatgacaactgcaaggcctctgcagctagcttactaatctctcgacttggtaggataatacaccaatcgacacaaggtctatggatcaacaacacaacacatctgctgctaacactagatattcatacatgctaccgctagactatttagcgtcctggtataccacgcatatacacgtttgtcacatggacagactcacggatagtgctac

SEQ ID NO: 66296 - DNA, 398 bp, Glycine max
ggctcaagtgagtttgttgatcgagataactagaaacagtgtgatgaaaatgaaggtccttgttttcttcgttgctacaattttggtagcatggcaatgccatgcgtacgatatgttccctctccgaatgaacactggctatggtgcccgtactccggaggtgaaatgcgcaagttggaggcttgctgtggaagcacacaacatctttggctttgagaccattcctgaagagtgcgttgaagcaacaaaggaatacatccatggcgaacaatatagatcagactccaaaacagttaaccaacaagcttacttttatgccagagacctcgaagtccatcccaaggacacatttgtgttcagtatagatggcaccgtactctctaatattccatactaca

SEQ ID NO: 66297 - DNA, 401 bp, Glycine max
ggtgcacaagtgagtttgttgatcgagataactagaaacagtgtgatgaaaatgaaggtccttgttttcttcgttgctacaattttggtagcatggcaatgccatgcgtacgatatgttccctctccgaatgaacactggctatggtgcccgtactccggaggtgaaatgcgcaagttggaggcttgctgtggaagcacacaacatctttggctttgagaccattcctgaagagtgcgttgaagcaacaaaggaatacatccatggcgaacaatatagatcagactccaaaacagttaaccaacaagcttacttttatgccagagacctcgaagtccatcccaaggacacatttgtgttcagtatagatggcaccgtactctctaatattccatactacaa

SEQ ID NO: 66298 - DNA, 132 bp, Glycine max
agatagcacgaacacgactgatgggtctacaatagatccacatcatcatggtcactggcaacattactatgacaatgacgaacgtcgacacttcgcatctgctgttcctactccatggccactgcatccctt

SEQ ID NO: 66299 - DNA, 378 bp, Glycine max
acgctcgtggaagataccaaggcgcatacatacgaacacagacacgatgaacgacgaaatgctcgacgaagtgctaaatagacttgaatacaagcattcatcctgtaattcaacctttacgactgcctttgaatccgctgctgagtccacgggcagacaaaaaaaaaaaaaaaaaagcggccgatctagacgatctaaactatccaaccttaccttcccatgcattcgatgttatatctcgtctattaagttaactaaattgaacgcactggtccaacgtttacaatgtcaaaactgtgaaaaccctgaacttactcaacttactcgacatgcagcatatgccagtttgggcagttgccataatacccaaaacgatcg

SEQ ID NO: 66300 - DNA, 141 bp, Glycine max
ggcatttcacttgcggctgcagtagagaagcgctcttcggtcttcgactggcttccaaccggtttctctggattgggaaaatggcccttcgagaaaccggttggtcattccccagttttaatcctcattgagaatggattt

SEQ ID NO: 66301 - DNA, 385 bp, Glycine max
gatatctggcagcagaagaacaagtagttgagaactaagaaggagaagcaaatggcttcctcaatgatctcttccccagctgttaccactgtcaaccgtgccggtgccggcatggttgctccattcactggcctcaagtccatggctggcttccccaccaggaagaccaacaatgacattacctccattgctagcaacggtggaagagtgcaatgcatgcaggtgtggccaccagttggcaagaagaagtttgagactctttcctacctgccagaccttgatgatgcacaattggcaaaggaagtagaataccttcttaggaagggatggattccttgcttggaattcgagttggagcacggtttcgtgtaccgtgagcacaaca

SEQ ID NO: 66302 - DNA, 170 bp, Glycine max
gaacgtgcacgaggcgtcagggaactataacatagccaatgctgccgagaatatgacttcagcagctgttcccaatgctacaccactgaattctacgatggacataccctagccttagctcccagccttggcctctccgcttgaaatctgcctatggagatcgatcctct

SEQ ID NO: 66303 - DNA, 391 bp, Glycine max
  unsure (1)..(391): unsure at all n locations
gaaggcaatattcactaacaaaaacaacaattgattaagagtgttgagtgagatcagaatggccgacttgatgaaaagaatcctcctaatggaggccgagcaagcaagcaaatggtccaaacatgttacttcaaccatcaacagtggcaatcatcacaacaacggtaacaggtatgaccactcataccactacgatgaacgccctatttataacagaggcactttcaatggtgatggcaatgggtcacatattcagggtgactttgactcctcagaacggaactactatggtcgtcgntatggttattaattatctgtatttgatacatagtatatgctgggcaacatcatatagtatgttatgttgtactacccataaataatgttgagc

SEQ ID NO: 66304 - DNA, 349 bp, Glycine max
cacgcaacgacaggtgctaagagaccacaaacgagcaagatgaacgagaggactgggaactgtagaatggacgatagtgcgctgcatatgtaagtagacgctatctaggcagccttgatacataatgctgcaagccaacaccctgacccattcaaccatacgtacactcatctgaacgcgtatggctactgccaaggatgcaaagctcctacacaaggcactcaaagactagcatttagacccactaacttctgagcagcgaaggaccattatgtacagacatgttagatagaaaaggaacacatataggtacagcttgtacaaccaaactttcaagcatatcactaac

SEQ ID NO: 66305 - DNA, 352 bp, Glycine max
ggcacaagtgagtttgttgatcgagataactagaaacagtgtgatgaaaatgaaggtccttgttttcttcgttgctacaattttggtagcatggcaatgccatgcgtacgatatgttccctctccgaatgaacactggctatggtgcccgtactccggaggtgaaatgcgcaagttggaggcttgctgtggaagcacacaacatctttggctttgagaccattcctgaagagtgcgttgaagcaacaaaggaatacatccatggcgaacaatatagatcagactccagaacagttaaccaacaagcttacttttatgccagagacctcgaagtccatcccaaggacacattt

SEQ ID NO: 66306 - DNA, 284 bp, Glycine max
gatttggcagcagaagaacaagtagttgagaacgaagaaggagaagcaaatggcttcctcaatgatctcttccccagctgttaccactgtcaaccgtgccggtgccggcatggttgctccattcactggcctcaagtccatggctggcttccccaccaggaagaccaacaatgacattacctccattgctagcaacggtggaagagtgcaatgcatgcaagtgtggccaccagttggcaagaagaagtttgagactctttcctacctgccagaccttgatgatg

SEQ ID NO: 66307 - DNA, 316 bp, Glycine max
ggttaagtgagtttgttgatcgagataactagaaacagtgtgatgaaaatgaaggtccttgttttcttcgttgctacaattttggtagcatggcaatgccatgcgtacgatatgttccctctccgaatgaacactggctatggtgcccgtactccggaggtgaaatgcgcaagttggaggcttgctgtggaagcacacaacatctttggctttgagaccattcctgaagagtgcgttgaagcaacaaaggaatacatccatggcgaacaatatagatcagactccaaaacagttaaccaacaagcttacttttatg

SEQ ID NO: 66308 - DNA, 276 bp, Glycine max
gatctcacattcataccctaggactccttattcattcaccaccctatccaacatggctgaggagactccaaaccagacaaccacaccaccccctcctcaagagtcagtggtgcaagtggaggaagtggtggtaaccgatgttccacagcccgacaaaacaacaactacagttccagttgaaagagattcgcaacctcaaccttatgagccaaaaaacaaaaacccaataaaaggaaaaaagcggccgttctaaaggacccaggttaccttccccgt

SEQ ID NO: 66309 - DNA, 405 bp, Glycine max
ggcacaagtgagtttgttgatcgagataactggaaacagtgtgatgaaaatgaaggtccttgttttcttcgttgctacaattttggtagcatggcaatgccatgcgtacgatatgttccctctccgaatgaacactggctatggtgcccgtactccggaggtgaaatgcgcaagttggaggcttgctgtggaagcacacaacatctttggctttgagaccattcctgaagagtgcgttgaagcaacaaaggaatacatccatggcgaacaatatagatcagactccaaaacagttaaccaacaagcttacttttatgccagagacctcgaagtccatcccaaggacacatttgtgttcagtatagatggcaccgtactctctaatattccatactacaaaaaaca

SEQ ID NO: 66310 - DNA, 333 bp, Glycine max
acgagacgacagaagggggcacaagtgagtttgttgatcgagataactagaaacagtgtgatgaaaatgaaggtccttgttttcttcgttgctacaattttggtagcatggcaatgccatgcgtacgatatgttccctctccgaatgaacactggctatggtgcccgtactccggaggtgaaatgcgcaagttggaggcttgctgtggaagcacacagcatctttggctttgagaccattcctgaagagtgcgttgaagccaccaaggaatacatccatggcgaacaatatagatcagactccaaaacagttaaccaacaagcttacttttat

SEQ ID NO: 66311 - DNA, 407 bp, Glycine max
ggctcaagtgagtttgttgatcgagataactagaaacagtgtgatgaaaatgaaggtccttgttttcttcgatgctacaattttggtagcatggcaatgccatgcgtacgatatgttccctcttcgaatgaacactggctatggtgcccgtactccggaggtgaaatgcgcaagttggaggcttgctgaggaagcacacaacatctttggctgtgagaccattcctgaagagcgcgttgaagcatcaaaggaatacatccatggcgaacaatatagatcagactccagaacagctaaccaacaagcttacttttatgccagagactctcgagtccatcccaaggacacatttgtgttcagtatacatggcaccgtactctttaatattccatgctacaaaaaacatg

SEQ ID NO: 66312 - DNA, 405 bp, Glycine max
ggtacatgtgagtttgttgatcgagataactagaaacagtgtgatgaaaatgaaggtccttgttttcttcgttgctacaattttggtagcatggcaatgccatgcgtacgatatgttccctctccgaatgaacactggctatggtgcccgtactccggaggtgaaatgcgcaagttggaggcttgctgtggaagcacacaacatctttggctttgagaccattcctgaagagtacgttgaagcaacaaaggaatacatccatggcgaacaatatagatcagactccaaaacagttaaccaacaagcttacttttatgccaaagacctcgaagtccatcccaaggacacatttgtgttcagtatagatggcaccgtactctctaatatttcatactaacaaaaaca

SEQ ID NO: 66313 - DNA, 317 bp, Glycine max
tgtgatttggcagcagaagaacaagtagttgagaactaagaaggagaagcaaatggcttcctcaatgatctcttccccagctgttaccaccgtcaaccgtgccggtgccggcatggttgctccattcactggcctcaagtccatggctggcttccccaccagaaagaccaacaatgacattacctccattgctagcaacggtggaagagtgcaatgcatgcaggtgtggccaccagttggcaagaagaagtttgagactctttcctacctgccagaccttgatgatgcacaattggcataggaagtagaataccttc

SEQ ID NO: 66314 - DNA, 402 bp, Glycine max
gaataacaagcaggaaggtgtagcttgcaccaaaggtattgcttttttgttgtttttgaccgcttatggattttggatgcgatagctctagcatctgtgctggaaatttccattgctgtcctcttgtcaacaacgttattttgaagcatctatatatgttagagtgatttcactctcattcctcaatttcatcaaattaagatggcaccaatcaccacctattttttgattctcatgtcctcagtgttctatgttttctgggatgcacgtgtcgcgcttgaagagttcactgttcatgaccatctggctttgcaatgtcttcaatgaattactccctaaccaccatgaatatcaaatcttctatgaatctcaagcacaatatgcatctctctctgctcttta

SEQ ID NO: 66315 - DNA, 118 bp, Glycine max
gattcagattacattgcaaaaatggcatcattcaccatgacagcttccatccttggcagcccagccgtcaccaaccggtcggcagtagcaacgcagaggagatcactcgtagtgaatg

SEQ ID NO: 66316 - DNA, 389 bp, Glycine max
ggaaagccaaaataatgtgttatagggttgactgtaaaacctgtgggggggatgtggcaatcacttgaccactctctatgcaagcattgatcagggaatgcactgcacgtgccgctcctggctcggtgttgccacacgcacaaccaccactcagaaacctactcaatccaataactcctcccaaggaaatgggaattctcaaaattaatgaagctgctttggattttgatctgcaacagttcttttcgtgttatttgacacaagcaaaggaatagagatcgcggtagtaaaaagtattaaggaggttggtattaataatgcaatgtaaggatggtcatgtgaaattgaccaacgtagaccaacattattttctatggtaatggatctac

SEQ ID NO: 66317 - DNA, 397 bp, Glycine max
  unsure (1)..(397): unsure at all n locations
ttggggttctagtgtgtgattgtttgttgttgtaactcgttcttcttcttttgttgttctgtgtttgtgtttgttttttctctcacctgaaaatgtcttgctgcggtggtaactgtggttgcggaagctcctgcaagtgcggcaacggctgcggaggctgcaagatgtacccagacttgagctacactgagtcaaccaccaccgagaccttggtcatgggagtggcacctgttaaggctcaatttgagggtgctgaaatgggtgtgcccgctgagaacgatggctgcaaatgtggaccaaactgctactgcatcccctgcacttgcaagtgaggtgttgggagagcaagcttcaagcagagatagcccttaattaggaataatgantaactattaat

SEQ ID NO: 66318 - DNA, 430 bp, Glycine max
tggggtacaagtgagtttgttgatcgagataactagaaacagtgtgatgaaaatgaaggtccttgttttcttcgttgctacaattttggtagcatggcaatgccatgcgtacgatatgttccctctccgaatgaacactggctatggtgcccgtactccggaggtgaaatgcgcaagttggaggcttgctgtggaagcacacaacatctttggctttgagaccattcctgaagagtgcgttgaagcaacaaaggaatacatccatggcgaacaatatagatcagactccaaaacagttaaccaacaagcttacttttatgccagagacctcgaagtccatcccaaggacacatttgtgttcagtatagatggcaccgtactctctaatattccatactacaaaaaacatggatatggggtggagaaattt

SEQ ID NO: 66319 - DNA, 329 bp, Glycine max
tacgtttgggagtgcacaagtgagttcggtgatcgagataactagaaacagtgtgatgaaaatgaaggtccttgttgtcttcgttgctacaattttggtagcatggcaatgccatgcgtacgatatgttccctctccgaatgaacactggctatggtgcccgtactccggaggtgaaatgcgcaagttggaggcttgctgtggaagcacacaacatctttggctttgagaccattcctgaagagtgcgttgaagcaacataggaatacatccatggcgaacaatatagatcagactgctaaacaggtaaccgagaagcttacttttatg

SEQ ID NO: 66320 - DNA, 424 bp, Glycine max
tgtggaggagaatatgaagttgtttgttttctttgttgctgcagtagttttggtagcatggccatgccatggcgcaggctaccaaaggttccctctccgaatgaaaactggctatggtgagcgttcttcggaggtaaaatgcgcaagttttaggcttgctgtggaagcacacaacatccgagcctttaaaaccattcctgaagagtgcgttgaaccaacaaaggactacattaatggcgaacaatttagatcagactctaaaacagttaaccaacaagctttcttttatgctagtgaacgcgaagtccatcacaacgacatatttatattcggcatagataacaccgtactctctaatatcccatactatgaaaaacatggatatggggtggaggaatttaatgaaaccttatatgatgaatgg

SEQ ID NO: 66321 - DNA, 106 bp, Glycine max
ggttttggagggagagaaagaaaaaaggggaatttcaatggcgtcaagggtttctctgaaggcgaacgggaagagttcaaagggatcgaacgctgcggaagatcga

SEQ ID NO: 66322 - DNA, 293 bp, Glycine max
tgggtacaagtgagtttgttgatcgagataactagaaacagtgtgatgaaaatgaaggtccttgctttcttcgttgctacaattttggtagcatggcaatgccatgcgtacgatatgttccctctccgaatgaacactggctatggtgcccgtactccggaggtgaaatgcgcaagttggaggcttgctgtggaagcacacaacatctttggctttgagaccattcctgaagagtgcgttgaagcaacaaaggaatacatccatggcgaacaatatagatcagacttcaaaca

SEQ ID NO: 66323 - DNA, 54 bp, Glycine max
ctgttgctttgagacgacgacaggaggatacaggtgacgatagactacagaagg

SEQ ID NO: 66324 - DNA, 357 bp, Glycine max
gggatatgaggataaatgttggacacccagtcttactatattgttttatacgtgatgagatttttgggctctctacatctaagaaactaccactggaaactgttgtggagcctaggcttccataccatctttattctctctgagcagtgcctttgcacaaagcgtttctctctaataagattgttgtagggataatgggtcttgagtgagtttatgtttgtcacactggattgcaataaatttttctctcttttcataacaatgttagaaagagagaataactaaaagatgttgtggtgatagggactcgtggtaaccaatgcatggcaaatgtgcaagcgaaagcattttaatgtg

SEQ ID NO: 66325 - DNA, 206 bp, Glycine max
ggagataatgtttacattatcatatcctggcactctaccacaaatgccatgccacgtgccaccaaagcaatcacaaatacgtggccactattattattatcacttgtttttgtttcccatagcatagaagaagcagaaagagaagcattagcaaaagcaagaagaactagtctaagcagaaatggcctcttcagtgatgacatctg

SEQ ID NO: 66326 - DNA, 297 bp, Glycine max
  unsure (1)..(297): unsure at all n locations
tgttggttcaagtgagtttgttgatcgagataactagaaacagtgtgatgaaaatgtaggtccttgttttcttcgttgctacaattttggtagcatggcaatgccatgcgtacgatatgttccctctccgaatgaacactggctatggtgcccgtactccggaggtgaaatgcgcaagttggaggcttgctgtggaagcacacaacatctttggctttgagaccattcctgaagagtgcgttgaagcaacaaaggaatacatccatggcgaacaatatagatcagactccanaacag

SEQ ID NO: 66327 - DNA, 369 bp, Glycine max
gaaggtgcaagagtttgttgtgagctataagctagtttatcgtgaggagaatatgaagttgtttgttttctttgttgctgcagtagttttggtagcatggccatgccatggcgcaggctaccaaaggttccctctccgaatgaaaactggctatggtgagcgttcttcggaggtaaaatgcgcaagttttaggcttgctgtggaagcacacaacatccgagcctttaaaaccattcctgaagagtgcgttgaaccaacaaaggactacattaatggcgaacaatttagatcagactctaaaacagttaaccaacaagctttcttttatgctagtgaacgcgaagtccatcacaacgacatatttatatt

SEQ ID NO: 66328 - DNA, 254 bp, Glycine max
tttgttttttttttttggtaaactcaaggatattttgaggaaacccaaaaatgttaacgatgtactacatacttcctcagttgaaagaatagaagaaggaaggggaaaaaaaaaaaaaaaacaaaagaaaaaaaagcgggctttataaatggtgcactttttgtaaccctagtttataaaatcgtatccttttgatggtgacacctacatttaaactgctggacttcgtgctttaaagtaaggattggtaaaac

SEQ ID NO: 66329 - DNA, 324 bp, Glycine max
ggagcgaagaagatattagggtttttgagtgcggtgcggcgatcctagcactctcttctgcagctttcgccgacagcttcattcaccatggctgagcaaaccgagaaggcttttttgaaacaaccaaaagtgtttctcagctcgaagaaaactgggaagggaaagagacccggaaagggtgggaaccgcttttggaaatccattgggcttggatttaagactcccagggaagccatcgaaggaacctacattgacaagaagtgccccttcactggcaatgtttccatccgtggccgtatcttggctggaacatgtcacagtgct

SEQ ID NO: 66330 - DNA, 52 bp, Glycine max
gaccccatctcaaaatagaaaaaagaaactcttccacaattcaaactcagac

SEQ ID NO: 66331 - DNA, 440 bp, Glycine max
cgagacgacagaaggggatctggcagcagaagaacaagtagttgagaactaagaaggagaagcaaatggcttcctcaatgatctcttccccagctgttaccactgtcaaccgtgccggtgccggcatggttgctccattcactggcctcaagtccatggctggcttccccaccagaaagaccaacaatgacattacctccattgctagcaacggtggaagagtgcaatgcatgcaggtgtggccaccagttggcaagaagaagtttgagactctttcctacctgccagaccttgatgatgcacaattggcaaaggaagtagaataccttcttaggaaaggatggattccttgcttggaattcgagttggagcacggtttcgtgtaccgtgagcacaacaggtcaccaggatactacgatggacgctactggacccatgtg

SEQ ID NO: 66332 - DNA, 393 bp, Glycine max
  unsure (1)..(393): unsure at all n locations
gataccaaaaacaaaacacaagccaagtgaaagtgagaaaaaataaaaatcaaagagcataatgtcagggatcattcacaagattggggagacccttcatgtgggagggcacaagaaggaggaggagcataagggtgagcaccatgctggagaatacaaaggggagcaccatggtgagcacagtagtgagtacaaaggagagcatcatggtgaacacaaagctggagagtaccatggtgagcacaagccagagcacaaagaggggttcctagacaaagtcaaggacaagatccatggtgaaggcggcgccgncgagggcgagaagaagaagaaggagaagaagaagaaagagcatggccatgagcatggncatgacagcagcagcagcagtga

SEQ ID NO: 66333 - DNA, 409 bp, Glycine max
tgtgataccaaaaacaaaacacaagccaagtgaaagtgagaaaaaataaaaatcaaagagcataatgtcagggatcattcacaagattggggagacccttcatgtgggagggcacaagaaggaggaggagcataagggtgagcaccatgctggagaatacaaaggggagcaccatggtgaacacagtagtgagtacaaaggagagcatcatggtgaacacaaagctggagagtaccatggtgagcacaagccagagcacaaagaggggttcctagacaaagtcaaggacaagatccatggtgagggcggcgccgtcgagggcgagaagaagaagaaggagaagaagaggaaagagcatggccttgagcatggccatgacagcaacagcagcagtgacagtgattaaact

SEQ ID NO: 66334 - DNA, 425 bp, Glycine max
  unsure (1)..(425): unsure at all n locations
tttgaagggggttctagtgtgtgattgtttgttggtgtaactcgttcttcttcttttgttgttctgtgtttgtgtttgttttttctctcacctgaaaatgtcttgctgcggtggtaactgtggttgcggaagctcctgcaagtgcggcaacggctgcggaggctgcaagatgtacccagacttgagctacactgagtcaaccaccaccgagaccttggtcatgggagtggcacctgttaaggctcaatttgaaggtgctgaaatgggtgtgcccgctgagaacgatggctgcaaatgtggaccaaactgctcctgcaacccctgcacttgcaagtgangtgttgggagagcaagcttcaagcagagatagcccttaattaggaataatgataaactattaatgtgtagcttaaaacttatgtatt

SEQ ID NO: 66335 - DNA, 406 bp, Glycine max
  unsure (1)..(406): unsure at all n locations
ggttctagtgtgtgattgtttgttgttgtaactcgttcttcttcttttgttgttctgtgtttgtgtttgttttttctctcacctgaaaatgtcttgctgcggtggtaactgtggttgcggaagctcctgcaagtgcggcaacggctgcggaggctgcaagatgtacccagacttgagctacactgagtcaaccaccaccgagaccttggtcatgggagtggcacctgttaaggctcaatttgagggtgctgaaatgggtgtgcccgctgagaacgatggctgcaaatgtggaccaaactgctcctgcaacccctgcacttgcaagtgangtgttgggagagcaagcttcaagcagagatagcccttaattaggaataatgantaactaataaatgtgtagcttaaa

SEQ ID NO: 66336 - DNA, 87 bp, Glycine max
tggggttacaaagagggagggtgcccgaacgaacgcgcggtgagtagttcaatgaatgaatgaataatcaaaaccgattttgataat

SEQ ID NO: 66337 - DNA, 409 bp, Glycine max
ggcacaagtgagtttgttgatcgagataactagaaacagtgtgatgaaaatgaaggtccttgttttcttcgttgctacaattttggtagcatggcaatgccatgcgtacgatatgttccctctccgaatgaacactggctatggtgcccgtactccggaggtgaaatgcgcaagttggaggcttgctgtggaagcacacaacatctttggctttgagaccattcctgaagagtgcgttgaagcaacaaaggaatacatccatggcgaacaatatagatcagactccaaaacagttaaccaacaagcttacttttatgccagagacctcgaagtccatcccaaggacacatttgtgttcagtatagatggcaccgtactctctaatattccatactacaagaaacatgga

SEQ ID NO: 66338 - DNA, 398 bp, Glycine max
  unsure (1)..(398): unsure at all n locations
gacagcgaaacagagagtgatttcagtgagtgatcggtgttcacttgatctcatcataatcgtcagcgtcaattgaagaagatgccgatcagaaacatcgccgtcggaaggcctgaagaggcgactcaccccgacacgttgaaggcggctttggctgagttcatctcaaccttcatcttcgtgttcgccggctcaggctccggcatcgcctacaacaagctcaccgacaacggcgctgccacccctgccggcctcatctccgcctccatcgcccatgcattcgccctcttcgtcgccgtctccgtcggcgccaacatctccggcggccacgtcaaccccgncgtcaccttcggcgccttcgtcggcggcaacatcaccttccttcgcggcatcgtcta

SEQ ID NO: 66339 - DNA, 452 bp, Glycine max
  unsure (1)..(452): unsure at all n locations
cggtccggaattncccgggntcgactcctacgcgtctcgacgggctggcgagaagactgactagaaggggtaccggtctggtcgagagaacgactagaaggggtaccgggctggcggagaagactgactagaaggggtaccgngtctgcgagagaactgacagaaggggtaccggctntgtcgagaagaacgactagaaggggtaccggctttgtcgagaagactgactagaaggggtaccgtgtcttgcgagaagaccgactagaaggggtaccggggctgtcgagaagaacgactagaaggggtaccgggctgggcgagaagaacgactagaaggggtaccggggcttgcgagaagactgactagaaggggtaccgggctgggcgagaagaacgatncagaaagggggggggtcgcaagtgaaccagngtcccgggcgacttgtttactc

SEQ ID NO: 66340 - DNA, 413 bp, Glycine max
tggcagttcaattccaatatattccattctctctgtgtatttccctacctctgccttcaagatgcagatcttcgtcaagaccctcaccggcaagaccatcacccttgaggtggaaagctctgacaccatcgacaacgtcaaggccaagatccaggacaaggaaggaatccccccggaccagcaacgtctcattttcgccggaaagcaacttgaggacggccgtacccttgctgactacaacattcagaaggagagtactcttcacctcgtcctccgtctccgtggtggcatgcagatcttcgttaagacactcaccggcaagaccataaccctagaggttgaaagctccgacaccatcgataacgtcaaggccaagatccaagacaaggaaggtattcccccggaccagcaac

SEQ ID NO: 66341 - DNA, 308 bp, Glycine max
tgtggcactcacaactccataacacaaggcagaaagcaagctcatcctagagttttaaaaatggcagcagcctcctccatggctctctcttccccatccttggctggcaaggccgtgaagctgggcccatcagcccccgaagtcgggagggtcagcatgaggaagaccgtcaccaagcaggcctcctccggaagcccatggtacggcccagaccgcgtcaagtacttgggcccattctctggcgagcccccgtcctacctcactggcgagttcccaggtgactacggctgggacactgctgggctttc

SEQ ID NO: 66342 - DNA, 402 bp, Glycine max
ggaagacatagaagagaagaagatggtgatgggcatttcatctccatcttacaagctgaaattccttcgtcctcgccaacttgaacctctttctttgactccgccatcatcttcattcagagcgttggagttgaaagagaaggttcagcctctgatcccatggccggtgtctccctttacaaacctaaatcctacgaattccctctcttatgctcttcaagacggcaaaattcgcctcgaaatcgatttcccgtatataatataatataattacattcactttcactttctgcattttagtcttttgacattctttcctgatttgtccttgtgcttttgttagcaggcctttgcccagtaacatttcttcttataaggtactattctcttcagtgcagtccg

SEQ ID NO: 66343 - DNA, 407 bp, Glycine max
tggcacaagtgagtttgttgatcgagataactagaaacagtgtgatgaaaatgaaggtccttgttttcttcgttgctacaattttggtagcatggcaacgccatgcgtacgatatgttccctctccgaatgaacactggctatggtgcccgtactccggaggtgaaatgcgcaagttggaggcttgctgtggaagcacacaacatctttggctttgagaccattcctgaagagtgcgttgaagcaacaaaggaatacatccatggcgaacaatatagatcagactccaaaacagttaaccaacaagcttacttttatgccagagacctcgaagtccatcccaaggacacatttgtgttcagtatagatggcaccgtactctctaatattccatactacaaaaaacat

SEQ ID NO: 66344 - DNA, 282 bp, Glycine max
gtatattcaaaaaaagaaataatagataaagagatggagatccataattagaatgctgtatgatatttacgtttacggcgagtgataaaaagatcctatatagaactcagggagattcccgtgtcagttacattcaatttaacgattgaccaacagagaatttaaattataacatttatatcactcaaattccaatatttctacgacacaataatgaaatctaacgaatacatttcgattgattgtatccatatggggtaataccaaatgggggaggagagc

SEQ ID NO: 66345 - DNA, 423 bp, Glycine max
gggcagcagaagaacaagtagttgagaactaagaaggagaagcaaatggcttcctcaatgatctcttccccagctgttaccactgtcaaccgtgccggtgccggcatggttgctccattcactggcctcaagtccatggctggcttccccaccagaaagaccaacaatgacattacctccattgctagcaacggtggaagagtgcaatgcatgcaggtgtggccaccagttggcaagaagaagtttgagactctttcctacctgccagaccttgatgatgcacaattggcaaaggaagtagaataccttcttaggaagggatggattccttgcttggaattcgagttggagcacggtttcgtgtaccgtgagcacaacaggtcaccaggatactacgatggacgctactggaccatgtggaag

SEQ ID NO: 66346 - DNA, 181 bp, Glycine max
gaaaaataaaaaaagacaacaaaaaagagacagggcagggcataaaaaaataaaagaaaagaaaataaaaagctggacgatctaaaggatccaatcttacgtacacttgcttttctacttcgtacctataatataatgtcacctaaatacaattcactggccttcaatagtacaccatgtt

SEQ ID NO: 66347 - DNA, 262 bp, Glycine max
cgataagacaacacaacggagttctagtgtgtgattgttagttgtcagtactggttgttcaactctagatgatgtgcgtcagcgagcagtccactatctgaactcatcaatgtctcgatgctgtggtcactggcgttgcagaagcttctgcacatccaccgacacctagctgacgctgccagatgtgctcacacttgcgctacatcttagtcaaccactcaccgaaaccttggtcatcttgattaccaactgtgcatgctgc

SEQ ID NO: 66348 - DNA, 392 bp, Glycine max
  unsure (1)..(392): unsure at all n locations
ggcacaagtgagtttgttgatcgagataactagaaacagtgtgatgagaatgaaggtccttgttttcttcgttgctacaattttggtagcatggcaatgccatgcgtacgatatgttccctctccgaatgaacactggctatggtgcccgtactccggaggtgaaatgcgcaagttggaggcttgctgtggaagcacacaacatctttggctttgagaccattcctgaagagtgcgttgaagcaacaaaggaatacatccatggcgaacaatatagatcagactccaaaacagttaaccaacaagcttacttttatgccagagacctcggagtccatcccaaggacacnattgtgttcagtatagatggcaccgtactctctaatattccac

SEQ ID NO: 66349 - DNA, 403 bp, Glycine max
gatctggcagcagaagaacaagtagttgagaactaagaaggagaagcaaatggcttcctcaatgatctcttccccagctgttaccactgtcaaccgtgccggtgccggcatggttgctccattcactggcctcaagtccatggctggcttccccaccagaaagaccaacaatgacattacctccattgctagcaacggtggaagagtgcaatgcatgcaggtgtggccaccagttggcaagaagaagtttgagactctttcctacctgccagaccttgatgatgcacaattggcaaaggaagtagaataccttcttaggaagggatggattccttgcttggaattcgagttggagcacggtttcgtgtaccgtgagcacaacaggtcaccaggatactacgat

SEQ ID NO: 66350 - DNA, 405 bp, Glycine max
  unsure (1)..(405): unsure at all n locations
gggaacatggacgtgcgatgctgattctgggatgacaaatgctcacgaggagagagagaaaactgtgtctgaattgtggaaaatttaaccatggctattacaacaacacaagctttgacccccttgtagtatcacgtacaagtggagtagaaccacattttgcgccaatttcaccttcacaagctttgacgctactacactctactgcaatctactgctattcaagctcattcacacttaatgcaaacgaaccttatgcagcttccatgccgttaagcgcttttccgccgatgtggagtggcaggactgcacnggctaaatggggattgatgtgcccatctgtgtagcctatacttgttattctgatacgcgagccattcgatactggatgcactttatttcttc

SEQ ID NO: 66351 - DNA, 425 bp, Glycine max
tggcacaagtgagtttgttgatcgagatagcgagaatcagtgtgatgaaaatgaaggtccttgttttcttcgttgctacaattttggtagcatggcaatgccatgcgtacgatatgttccctctccgaatgaacactggctatggtgcccgtactccggaagtgaaatgcgcaagttggaggcttgctgtggaagcacacaacatctatggctttgagaccattcctgaagagtgcgttgaatcaacataggaatacatccatggcgaacaatatagatcagactccaaaacagttaaccaacaagcttacttttatgccagagacctcgaagtccatcccaaggacacatttgtgttcagtatagatggcaccgtactctctaatattccatactacacaaaacatggatatggggtggagaaa

SEQ ID NO: 66352 - DNA, 218 bp, Glycine max
ggcacaagtgagtttgttgatcgagataactagaaacagtgtgatgaaaatgaaagtccttggtttcttcgttgctacaattttggtagcatggcaatgccatgcgtacgatatgttccctcttcgaatgaacactggctattgtggccgtactctggaggtgaaatgcgccaagttggaggcttgctgtggaagcacacaacatctttgggttttag

SEQ ID NO: 66353 - DNA, 97 bp, Glycine max
gcacaagtgagtttgttgatcgagataacttggaacagtgtgatgaaaatgaagggccttggtttcttcggtggtaccattttggtagcatggcaat

SEQ ID NO: 66354 - DNA, 337 bp, Glycine max
gacacccaaatccttcttcaccttcacaattggaaaaaaaaaaaaaaaaaaaaaaaaaaaaaaagcggcggtttaaaagaaccaagcttaacttccccttccttccaacttataagccttttaatggggtaactaaatttaatttaatgggccgtcgtttaaaaacgtctgaccgggaaaaaccttggggtacccaaattaaacggcttggaagaaaatccccttttgtcaagttggggaaataccaaaaaggcccgaacgaatggcctttccaaaaattgggcaacccgaattggcaattggaacaccccttgaacggggcaataaaccccgccgg

SEQ ID NO: 66355 - DNA, 337 bp, Glycine max
gacagcatatatatcagtaatctatggcatgctatacctacattatgatgatggtctttgtagttgatagccatggctacccggggaaagcttgaggttgacattgatctcaggtccaactcagactggtcctggcatacccttacgaatcttactgggatattcgctaaagccttacgacatgattacaaacgcattgaagttcttgatggtgatggctagtctactggttctatgcggcacataaggtatggtgaagggtcaccacttgtgaaatcatcctttgagaagattgacgctgttgatgatgaaatgaaagtaatgtcgtacactatca

SEQ ID NO: 66356 - DNA, 423 bp, Glycine max
gatctggcagcagaagaacaagtaggggagaactaagaaggagaagcaaatggcttcctcaatgatctcttccccagctgttaccactgtcaaccgtgccggtgccggcatggttgctccattcactggcctcaagtccatggctggcttccccaccaggaagaccaacaatgacattacctccattgctagcaacggtggaagagtgcaatgcatgcaggtgtggccaccagttggcaagaagaagtttgagactctttcctacctgccagaccttgatgatgcacaattggcaaaggaagtagaataccttcttaagaagggatggattccttgcttggaattcgagttggagcacggtttcgtgtaccgtgagcacaacaggtcaccaggatactacgatggacgctactggaccatgtg

SEQ ID NO: 66357 - DNA, 337 bp, Glycine max
aaactgatgtcatagaacaaaagaaggatacggatgtgacaggacaacagaaggatactgatgtgacaaaacagaagaaggatactgaatgtcataagacagactaaaggatatcggattcaagaagacaaccaaaggatacggctgaacgaagaagactaacgggtcctgattcaataagaagactaaaggatgcgaattcacgaaggcgacgaaaggagttgaactgacgaaagataagaaggtttcgacagtcacaatatattatggcactgaagatgtagtctcatttcactgacaatgcactcaaagtctcttctacctgcagacgctcatt

SEQ ID NO: 66358 - DNA, 349 bp, Glycine max
gggcagcagaagaacaagtagttgagaactaagaaggagaagcaaatggcttcctcaatgatctcttccccagctgttaccactgtcaaccgtgccggtgccggcatggttgctccattcactggcctcaagtccatggccggcttccccaccagaaagaccaacaatgacattacctccattgctagcaacggtggaagagtgcaatgcatgcaggtgtggccaccagttggcaagaagaagtttgagactctttcctacctgccagaccttgatgatgcacaattggcaaaggaagtagaataccttcttaggaagggatggattccttgcttggaattcgagttgg

SEQ ID NO: 66359 - DNA, 418 bp, Glycine max
gacaagtgagtttgttgatcgagatagctagaaacagtgtgatgaaaatgaaggtccttgttttcttcgttgctacaattttggtagcatggcaatgccatgcgtacgatatgttccctctccgaatgaacactggctatggtgcccgtactccggaggtgaaatgcgcaagttggaggcttgctgtggaagcacacaacatctttggctttgagaccattcctgaagagtgcgttgaagcaacaaaggaatacatccatggcgaacaatatagatcagactccaaaacagttaaccaacaagcttacttttatgccagagacctcgaagtccatcccaaggacacatttgtgttcagtatagatggcaccgtactctctaatgttccatactacaaaaaacatggatatggggtgga

SEQ ID NO: 66360 - DNA, 400 bp, Glycine max
ggttctagtgtgtgatcgttcgttgttgtaactcgttcttcttcttttgttgttctgagtttgtgtttgtcttttctctcacctgaaaatgtcttgctgcggcggtaactgtggttgcggaagctcctgcaagtgcggcaacggctgcggaggctgcaagatgtacccagacttgagctacactgagtcaaccaccaccgagaccttggtcatgggagtggcacctgttaaggctcaatttgagggtgctgaaatgggtgtgcccgctgagaacgatggctgcaaatgtggaccaaactgctcctgcaacccctgcacttgcaagtgaggtgttgggagagcaagcttcaagcagagatagcccttaattaggaataatgataaactattaatgtgtagc

SEQ ID NO: 66361 - DNA, 419 bp, Glycine max
gaaggtgcaagagtttgttgtgagctataagctagtttatcgtgaggagaatatgaaggttgttggtttctttgttgctggagtagttttggtagcatggccatgccatggcgcaagctaccaaaagttccctctccgaatgaaaactggctatggtgagcgttcttcggaagtaaaatgcgcaagttttaagcttgctgtggaagcacacaacatccgagcctttaaaaccattcctgaagagtgcgttgaaccaacaaaggactacattaatggcgaacaatttagatcagactctaaaacagttaaccaacaagctttcttttatgctagtgaacgcgaagtccatcacaacgacatattcatattcggcatagataacaccgtactctctaatatcccatactatgaaaaacatg

SEQ ID NO: 66362 - DNA, 413 bp, Glycine max
gactgctagtgaacttgaggcgaggatgagccattttcctccttatattatccaaaccattaaaaatcgctctgcttttgtgttggccaagatttgtcaggggaaacaaatgggagaagcaagagaaggatgacataatattactcaagattgtacctcctgtgaaccagatttatgctaaatggcttgctagagaccttgtaagaattcacggctttactgcaaaacgtactcgtgcagtgcagccgcccaatcattatgtagaacatatgaagttgaatggatggttggatgtggacttgaatgatcctgatcttgctcatttgttcgagtagataatttctatatgccatatagacaattattgtgactctgtagctgcactatgattacattaaattgttcagagggcg

SEQ ID NO: 66363 - DNA, 406 bp, Glycine max
ggcacaagtgagtttgttgatcgagataactggaaacagtgtgatgaaaatgaaggtccttgttttcttcgttgctacaattttggtagcatggcaatgccatgcgtacgatatgttccctctgcgaatgaacactggctatggtgcccgtactccggaggtgaaatgcgcaagttggaagcttgctgtggaagcacacaacatctttggctttgagaccattcctgaagagtgcgttgaagcaacaaagggatacatccatggcgaacaatatagatcagactccaaaacagttaaccaacaagcttacttttatgccagagacctcgaagtccattccaaggacacatttgtgttcagtatagatggcaccgtactctctaatattccatactacaaaaaacat

SEQ ID NO: 66364 - DNA, 80 bp, Glycine max
tacaggtcttcgaagacgacatactggtacagttgctagaagactacagatgggtacagatgcgataagactactgaagg

SEQ ID NO: 66365 - DNA, 228 bp, Glycine max
  unsure (1)..(228): unsure at all n locations
gaggttccaatctgatattccaggtaaaacctttctttgtacatataaaaaaaaaaaacataaaaacataaaaaaacagaataccaaccatggctgccaacaagtttgcaaccatgttacatagaaacaccaacaaaatcacccttgttctagtctatgccatcctagaatggattctgatcattctnctnctnctcaattctctcttctcttatctaatcataaagt

SEQ ID NO: 66366 - DNA, 217 bp, Glycine max
gataccaaaaacaaaacacaagccaagtgaaagtgagaaaaaataaaaatcaaagagcataatgtcagggatcattcacaagattggggagacccttcatgtgggagggcacaagaaggaggaggagcataagggtgagcaccatgctggagaatacaaaggggagcaccatggtgaacacagtagtgagtacataggagagcatcatggtgaacac

SEQ ID NO: 66367 - DNA, 227 bp, Glycine max
gattgtgattcatttgcacatttggaaagtgttgtttttctttttttcatttgcattgcaaagcaaaaaccttgcaaattgcaatggcttccaacaaggttattgccaccatcttggttctttctctccttgcctactcaacatcattcaccaatgcatgtggcacatgccacccaaaacctactccttctccccctcctccatcagggaagtgccccaaagacaca

SEQ ID NO: 66368 - DNA, 52 bp, Glycine max
  unsure (1)..(52): unsure at all n locations
ccactcttcctaccactcgtccttccactcttacaaccacacctacncccac

SEQ ID NO: 66369 - DNA, 99 bp, Glycine max
tccaaaagccaccaaaggggatttttccagaatttttttttaaccattggggtggttatcacgaagagaatattaagttttttgttttcctttgtgctt

SEQ ID NO: 66370 - DNA, 151 bp, Glycine max
tgctggttttgagacctcagctaccacctacattgctggtgctgagattatgttgcaatgcaagagcagggttagcaacgaggttgtgtacacgaagaatgggtacaccgactcaaccggagcatacacaatgtacgtggatgaggatcac

SEQ ID NO: 66371 - DNA, 225 bp, Glycine max
gggggtataaagaacgaaaaattcacttacaacagggggggtatttctgcagcattgaacacccatttaacaccaatcttcagcattgaacaccaattcaacgcccatgggtcaagaagaagaaaaatccccaaaaaacaaaatggaggagaaaaaagttgaagaagaagaaaagaaagaagaagagaaaaaatcagatgagaagaaattcaaggagaaatctgc

SEQ ID NO: 66372 - DNA, 171 bp, Glycine max
ggcacaccaacaccaaaacaaacccactgggagggcttcctttgtatccttcctagtgctgcttcttgcagcccttatcctcatgcctcaagggcttgctacttactacaaaccaattaagaagccaccagtgtacaagccttcagtgtacaagccaccagtgtacaaacc

SEQ ID NO: 66373 - DNA, 150 bp, Glycine max
ccccgacggctatgctctgcctaaaacgacgggcgactaccttccccaatcctactctgacgacttgcctttcacttctgtttccaaaaccaccgtcgacacgtgcactcatccatattctggtacttcgaatgtcctgaccactactgc

SEQ ID NO: 66374 - DNA, 149 bp, Glycine max
tacggctgttaaaagacgggggaaaggtccggctgcgataagacaacacactggctgggaattgcattgataggaatgcccattattgacaaagaagggggtatttaacattctaacattaacaacttcgccattggctgaagtgttga

SEQ ID NO: 66375 - DNA, 204 bp, Glycine max
ctccttattttcttctttactacaattttagtaacatggcaatgcccttattacaatttttgaagggtttctcccttgcgctggtgattcttctgatccagtacaacaacgttgtcaacgcctacaacaacaaaaactgtgtcacaaaggattgcctcatcggcaacaaggatttggaatcagagttctactttggatcccatg

SEQ ID NO: 66376 - DNA, 54 bp, Glycine max
gacggatggggggacctcgactcataggcacgggccctaaaagactacttaagg

SEQ ID NO: 66377 - DNA, 69 bp, Glycine max
acctccctcttctctcctttactacaatttttttaacataacaattccatgcttaccatattttccctc

SEQ ID NO: 66378 - DNA, 398 bp, Glycine max
gagtgcacaagtgagtttgttgatcgagataactagaaacagtgtgatgaaaatgagggtccttgttttcttcgttgctacaattttggtagcatggcaatgccatgcgtacgatatgttccctctccgaatgaacactgtctatggtgcccgtactccggaggtgaaatgcgcaagttggaggcttgctgttgaagcacacaacatctttggctttgagaccattcctgaagagtgcgttgaagcaacaaatgaatacatccatggcgaacaatatagatcagactccaaaacagttaaccaacaagcttacttttatgccagagacctcgtagtccatcccaaggacacatttgtgttcagtatagtggcaccgtactctctatattccatacttc

SEQ ID NO: 66379 - DNA, 136 bp, Glycine max
accggtacttaattcccgactcgacgccatctcgtccttacggatacaacaaaaggatacgggttcttatatacctcttaacgacacattctggttgataactccccatgttctcgccttattcaaacactcctaa

SEQ ID NO: 66380 - DNA, 96 bp, Glycine max
ctttgtttgttccatctctgcttcttggtctgattactgcttctttcttcaccatgtcacttgctgggaaaatcaccactgaaattggggttcatg

SEQ ID NO: 66381 - DNA, 84 bp, Glycine max
tctagtaacaccatcaagacgaaactacagagggcttgtaatgtctcaaataataggcaaagttgtaaattgtgattgtgaccc

SEQ ID NO: 66382 - DNA, 171 bp, Glycine max
accggtactgaatgcccgggtcgacgccacgcgtaccggtgggataagacaaccgaaagggatcccccatcacacaaaaaagattagggtcacgagggtttcttttgcctttggttgggaatcttgatcaaaatatcaatcatcccttcattattcatcgggtcggcggcg

SEQ ID NO: 66383 - DNA, 301 bp, Glycine max
tatctcaggtctttccagagtttttcatccatgtgttgatcttctctcgataattgtattttgtttgtaggaaaatttgcactcctgttgtaataaactaaacatttccattgccagaaaaagaaaaaagataggaaaccaattggcaatggattgagcttatttaccattcatttggttttggattattggtaattgtatcatgggaaaggaactgatgtaaacctatggtgctatttagccatggttattagctgttttgtaatttgtatgcgaaatcattatttacatccttggttgt

SEQ ID NO: 66384 - DNA, 273 bp, Glycine max
  unsure (1)..(273): unsure at all n locations
ctttccatagtctttcatacatggtggatcttctctaaaaaatgggatcttgtttgcatcaaaacttccactcctgttgcaataaactaaccatctccatttccagaaactgtacaaatatacgctacctattgtcaccggactgagcttatttaccattcattttgttttctatcattggtaactctctcattggaaaggtactgatccaaacctatagtgctctttagccatgcatattagctcatncgtaatttgcatgctaaatcatta

SEQ ID NO: 66385 - DNA, 53 bp, Glycine max
ggtgcacaagtgagtttgttgatccagataacgggggacaatgtggtgaaaat

SEQ ID NO: 66386 - DNA, 174 bp, Glycine max
tcccgctgctaaaaaacaacaaaaaggggcgggttggaaaaaaccaccgaagggtaccgctgccaaaaaacaacacaaaggtacggcttccaaaagaccacaaaaaggtactgctgggctaagaccacagaaaggtacagcttcgaaaaaaccacaaaaaggtaccgctgcgag

SEQ ID NO: 66387 - DNA, 99 bp, Glycine max
gaaggtgcaagagttggtggtgagctataagctagtttatcgtgaggagaatatgaagctgcttgttttctttgttgctgcagtagttttggtaggatg

SEQ ID NO: 66388 - DNA, 160 bp, Glycine max
aagaaggaagctgaaggcgtggaacaaaagaaggaagtggaagtgaccgaagataagaaggaaattgaagttacagaagagaagaaggaagctggagtcatacaagagaagaaagaagttgaagtgacggaagaaaaaaaagaaattggagttacagaag

SEQ ID NO: 66389 - DNA, 148 bp, Glycine max
ttcttgatcgagaatatcactccccaccagggcggttaatcgcaggaatggaggtcgcaacaaacacaaacgtgaccacgtaaagttcattctatgctcccacattcgacaatgctttcctaaagacaatgctatcaacaagtttctc

SEQ ID NO: 66390 - DNA, 90 bp, Glycine max
aggacgacatattgatacgggtgagtgaccactgcactgtactgttcaggcacaacgacttattggtccggttcaccggagaaggcatgg

SEQ ID NO: 66391 - DNA, 174 bp, Glycine max
  unsure (1)..(174): unsure at all n locations
gaaccctccaattcagattggcttanttggcagcgttgatgcggcttatctctctctttcgttttgaaaaattaatttcggctctattttttcttctcctattttgttcagatgaactaaactccttaacacacctagataggaaattttaatgctgaagcagattattagtgt

SEQ ID NO: 66392 - DNA, 409 bp, Glycine max
ggcagcgagacctaggaagcacgacaacaacactcatcagagggaaaagttgggcccactgcgatgaaaatgcaaagatgatggatgatcaagatctcagtttctgtggcaatgttcttggctgcttcatatatgtactagtgatcgctgatcattgtgtcatgggtgacccatagttcggaggaaactactaatgctttgaaggctaagatgtcacactgcgttgtagactttgaaatgataactgtagcttactaagacttccataaagattacaatgagcgtaacactatcaatatcagatatacttatgcgtgctcaattaagttacttttatgtcttaaagcttgaatgccattcaactgacgcatatgcgtggagtatctatggcaacgtactctctaatatt

SEQ ID NO: 66393 - DNA, 313 bp, Glycine max
acagaaagagggagatagatgggagtaaagacagggaggaggacatagacatactggacgagaggtgaaacgataaatgctgcagatagttactaacactcggaatactatgaatgcacataaaaggatggatatgataggtacacaggaactatctgagcgcgatcacttgaccataagaagacaagcatgcactatatcataatatatgctcatgcagcttcacagatgctcttaatgggttgtatgtgggatacaagctgactacagataactcataccaagttatcttattgatacagatgactagata

SEQ ID NO: 66394 - DNA, 388 bp, Glycine max
taatggggcgcgcatgagtgagcagatcgagggcacttgggacagagtaacggggatggagggacttggttgctgatttgctacaagaaggggatgacgacacatccatctgtacgatatataccctctacaaagcaacaatggttgtcatgcccgtatttgcctagagcgacgcgcttatgtcacgatacatgtttaatcacacaacatctgtactttagtaaccgttgctgatcaatgcgttgaagcaacgaatccatacgtgcatgacaaccttgatcaagatgactctacagctattaattaactacttgacttgaatcgcatatactatgaactgaatactaaggactaattgcacaacagtgtatacctgaaagtatgttgt

SEQ ID NO: 66395 - DNA, 431 bp, Glycine max
  unsure (1)..(431): unsure at all n locations
aagacgacagaagggcagtggaggtaatggtactgcttctgatatgaaaattgatgaagaaacaccactaatttcatcatcaaggttatctcatattggacgaacacagttaaccaaccaatatgcaacaggaaagtgaaaaactaaatactagattatttttagagtactcttttggagaaagaactaggaaggggaagctgagtctaatgcacccctattcctcattctttctaggcaatagattttataatgaaatcatatgcttgttctttgtaattacttgcttgtgtagaatgcatcatttctgagttattaccactctgaaacatggtttttgacaatagatgaggggacaaattggccccttgtataatctggtctcctggttgggaggcccagttatttaattntttcttaagttactgaat

SEQ ID NO: 66396 - DNA, 286 bp, Glycine max
aggaaaaggagtcagtgactatgcctgacttggatggatatttggagagagagatacagagagattatcaatggatcgccgatcagtgtgcgactaggaacagtactttataccgagagtgcttcagaaatcatgcagaccgcctatgaagctgcgccacggaccgatgcttcgactacactgaggacggcgccttgggactacaatgcatccgatgcgggtgccaccaggtcttccaccggaaagtgaagtacctggcggccgctgaaaaccctgccacggagta

SEQ ID NO: 66397 - DNA, 176 bp, Glycine max
cgggatgtgtccaccggcaacaaagataatggcatttacgtacgtgacacttgtcactctgtctaaaggatcctaccttaccatcgcgtacattctatgctataccaacactctattgtctacctcgcttcaatttacatggccctgcataacaatgtcgctactggtaaatccct

SEQ ID NO: 66398 - DNA, 409 bp, Glycine max
  unsure (1)..(409): unsure at all n locations
ggtgtttgttgttgtaactcgttcttcttcttgggttgttctgtgtttgtgtttgttttttctctcacctgaaaatgtcttgctgcggtggtaactgtggttgcggaagctcctgcaagtgcggcaacggctgcggaggctgcaagatgtacccagacttgagctacactgagtcaaccaccaccgagaccttggtcatgggagtggcacctgttaaggctcaatttgagggtgctgaaatgggtgtgcccgctgagaacgatggctgcaaatgtggaccaaactgctcctgcaacccctgcacttgcaagtgaggtgttgggagagcaagcttcaagcagagatagcccttaattaagaataatgantaactattaatgtgtagctaaaaacttatgtattatgtctg

SEQ ID NO: 66399 - DNA, 354 bp, Glycine max
caccgttcctacaagtctacggacacggctataaagcgtctgccatactcaagtatccacgggtgattgggtagatttatcgactttcttacttcctttctagtagggcttccactacagtgaataatgtgacccacttctatgctatacaaattgttcatatgacccctattacacactgtgaacccgagatcaaggtcatatttgtaactgatccacttattggccttgtcctaagctactacctggccatcgagtcaatagccggatctgcttaatgctcatcctagagccccaaaaggtgtcttagggctgtgatgaaagacaggggcaccatgttctgcaggattcgct

SEQ ID NO: 66400 - DNA, 228 bp, Glycine max
gtcaccaaagagtatataaacatcactaactggggacattacgatgcttacttagttcctttgctatacagtatttaaatctttttaaacatgatactgccttgtatgcataattttgctatctataatcaacattctatactgcgataccaatattaacgagatattcacatcttatctacttattattctagtccaaaacttctataggtcataaacgacaatgga

SEQ ID NO: 66401 - DNA, 397 bp, Glycine max
ggcacaagtgagtttgttgatcgagataactaggaacagtgtgatgaaaatgaaggtccttgttttcttcgttgctacaattttggtagcatggcaatgccatgcgtacgatatgttccctctccgaatgaacactggctatggtgcccgtactccggaggtgaaatgcgcaagttggaggcttgctgtggaagcacacaacatctttggctttgagaccattcctgaagagtgcgttgaagcaacaaaggaatacatccatggcgaacaatatagatcagactccaaaacagttaaccaacaagcttacttttatgccagagacctcgaagtccatcccaaggacacatttgtgttcagtatagatggcaccgtactctctaatattccatactac

SEQ ID NO: 66402 - DNA, 305 bp, Glycine max
tactggtccggtaatacccaggccgacgcacgcgttgcgcacaagaccaccgaaaggggcagatggacgagcatacggcatgagcctggccgtgacaaggggactgacaggctacagttgttgaaacctaccacatgcatcctatgtatgctaaaggactattcgaacctttaaatgaatgttgaacattacttttactatacctccatcactttgtctttcttaatgtatgtgtttcaattagatgtatgtactgagctctttaattactaaaccatgttaggtcaacatttgccagagtatca

SEQ ID NO: 66403 - DNA, 407 bp, Glycine max
ggaattcaataatgctctcttcttactaaaatgtctttcttctaaaatttctcacttctctgaaactctgattcatataatgattatcatttgaaactctcaacagctagtatgttctacactcgcctcttaggaggatcttgtgtatcagaacgtcgaatattgatatcaattggtgtgttatctctttagtttatagatatcttgcatcaaagttatcataaactgcttaatgtcttgggtatggctcaacaacatatcggatatcctgagataatggatatctataatgcttcaaagagacaatccatacgcttggtataagttgctttcaaacgtttgccacgcgtaaggtagctttaatcaaacaacatagcatgtatacaccttaactttaagggtgtgtt

SEQ ID NO: 66404 - DNA, 319 bp, Glycine max
ggcacaagtgagtttgttgatcgagataactagaaacagtgtgatgaaaatgaaggtccttggtttcttcgttgctacaattttggtagcatggcattgccatgcgtacaatatgttccctttccgaatgaacactggctatggtgcccgtactccggaggtgaaatgcccaagttggaggcttgctgtggaagcacacaacatctttggctttgaaaccattcctgaaaagtgcgttaaaccaccaaaggattccatccatggcgaacattttagatcagactccaaaacagttaaccaacaagtttacttttatgcc

SEQ ID NO: 66405 - DNA, 300 bp, Glycine max
ggcacacgcgagcataacctacacgtaaactaggaacatctctatgaaaacgcttgaacttgaaccataagcagctcacaagccactgaacagactgataacgatcttacaacatatgagctctccaaaggaacattgtctatcgtgaagctactccgcaagataaatccgccagattgaacctatattgggaaaaccacaacatttatggatttgacaccatatcatactaactcgttctatctccaaactactaccttcatgagaaacatcttctatcaaagtggactacaggtaacc

SEQ ID NO: 66406 - DNA, 362 bp, Glycine max
  unsure (1)..(362): unsure at all n locations
ggcacaagtgagnttgttgatcgagataactaggaaacagtgtggatgaaaatgaaggtcctggttttcttcgttgttacaattttggtagcatggcaatgccatgcgtacgatatgttccctctccgaatgaacactggctatggtgcccgtactccggaggtgaaatgcgcaagttggaggcttgctgtggaagcacacaacatctttggctttgagaccattcctgaagagtgcgttgaagcaacaaaggaatacatccatggcgaacaatatagatcagactccaaaacagttaaccaacaagcttacttttatgccaaagacctcgaagtccatcccaaggacacatttgtgttcag

SEQ ID NO: 66407 - DNA, 405 bp, Glycine max
ggcacaagtgagtttgttgatcgagataactagaaacagtgtgatgaaaatgaaggtccttgttttcttcgttgctacaattttggtagcatggcaatgccatgcgtacgatatgttccctctccgaatgaacactggctatggtgcccgtactccggaggtgaaatgcgcaagttggaggcttgctgtggaagcacacaacatctttggcttcgagaccattcctgaagagtgcgttgaagcaacaaaggaatacatccatggcgaacaatatagatcagactccaaaacagttaaccagcaagcttacttttatgccagagacctcgaagtccatcccaaggacacatttgtgttcagtatagatggcaccgtactctctaatattccatactacaaaaaaca

SEQ ID NO: 66408 - DNA, 409 bp, Glycine max
ggcacaagtgagtttgttgatcgagataactagaaacagtgtgatgaaaatgaaggtccttgttttcttcgttgctacaattttggtagtatggcaatgccatgcgtacgatatgttccctctccgaatgaacactggctatggtgcccgtactccggaggtgaaatgcgcaagttggaggcttgctgtggaagcacacaacatctttggctttgagaccattcctgaagagtgcgttgaagcaacaaaggaatacatccatggcgaacaatatagatcagactccaaaacagttaaccaacaagcttacttttatgccagagacctcgaagtccatcccaaggacacatttgtgttcagtatagatggcaccgtactctctaatattccatactacaaaaaacatgga

SEQ ID NO: 66409 - DNA, 146 bp, Glycine max
gattaaaaatgggaatgaaccaatggcattacgaaaaaaaaaaaaggaaaaaagaaaaaaaagccggccgttttaaagaaccaagcttaactacccctgcattccaaggcataacttttctataggggcacctaaattcaattcaa

SEQ ID NO: 66410 - DNA, 385 bp, Glycine max
ggttctagtgtgtgattgtttgttgttgtaaggcgttcttcttcttttgatgatctgtgtttgtgtttgttttttctctcacctgaaaatgtcttgctgcggtggtaactgtggttgcggaagctcctgcacgtgcggtaacggctgcggaggctgcaagatgtacccagacttgagctacactgagtcaaccaccaccgagaccttggtcatgggagtggcacctgttaaggctcaatttgagggtgctgaaatgggtgtgcccgctgagaacgatggctgcaaatgtggaccaaactgctcctgcaacccctgcacttgcaagtgaggtgttgggagagcaagcttcaagcagagatagcccttaattaggaataatgttaac

SEQ ID NO: 66411 - DNA, 52 bp, Glycine max
accggttgtaaaaggccaccgaagggtacagatggcagaagaccacagaagg

SEQ ID NO: 66412 - DNA, 408 bp, Glycine max
cccacgcggacgcacgcgtcgcgacacgactacagacgggcgtcatgcgactactacttggccagctagaaacagttaaggtgtatgtactcaaccgtgacgcactagcgatatgggaaaatcactctcgacataaccaatattgcgtccatggaccaggcgcttcaagatgacagaagatctactattgaagactttgatagctgccatataactgcgactcatttagatttcctgtcctaatgtacctaccaagcaagagctgcatgcattgtcgtatgagaaaaagctagtctttgactcaaggagactctgctctcagcacgaaaggaaagggaaagggcaattaccacgttgtaaacgaactcagcgctcatacgcatgcatacaaccctatatactacacct

SEQ ID NO: 66413 - DNA, 411 bp, Glycine max
tcgcatacgacgactgaaagatgcacgcttcaaggatactgctgagaggtaccgatacggggatacgggagatgggttcgggtattaggagacgacctatggttaccgctgcgtcaataccaccgaatgctaccgcttttacaagactattgataggtcctgtttcgagaagactgacagcatgatacagttgctatatgacgactcattggtaccgttccaataagaccttagatggctaacgctatcacaagtcgacagaagggttcgagttcgtgaagaccacagagtggttcctgtgttagacgacgactgaagcggtaagcctctaaacttacagattgacattggcaattgctatgttctcacagtgccctggtatctctgactctcacaagcccaatactacct

SEQ ID NO: 66414 - DNA, 416 bp, Glycine max
gacaaattaaaaccatagactatacaaagttcaaaaaaaataaaaattaacatgtctactactacacatgtctctcttctgtccctttacctcatcctatctctaaattcccttcacatgaccatggctgcaaggatcattccccaaagtgcttctagcacagttacaaggcctcaatttctatcagaagctgaaacttatttgaagccacatcttggtcacgaacaaaatgtcttccaagggagacacgtcaagaattgcttgccaaacgggtataggcataactcagctccaagcagattcgcgaactatgacacgctatgctctaatggctgatccggaatgcgttcggagaagccatgaggatgatcatgttcatgtcttcctgaatgaaaaaaaattccttactacaaaaa

SEQ ID NO: 66415 - DNA, 405 bp, Glycine max
ggcacaagtgagtttgttgatcgagataactagggacagtgtgatgaaaatgaaggtccttgttttcttcgttgctacaattttggtagcatggcaatgccatgcgtacgatatgttccctctccgaatgaacactggctatggtgcccgtactccggaggtgaaatgcgcaagttggaggcttgctgtggaagcacacaacatctttggctttgagaccattcctgaagagtgcgttgaaacaacaaaggaatacatccatggcgaacaatatagatcagactccaaaacagttaaccaacaagcttacttttatgccagagacctcgaagtccatcccaaggacacatttgcgttcagtatagatggcaccgtactctctaatattccatactacaaaaaaca

SEQ ID NO: 66416 - DNA, 344 bp, Glycine max
aagcctctaggtcagtttgggagaactcctatcttacactagcgccaatgtatcttatagaggagaatcatcgtgttactacaatagaaggtcctatactaggaaaccgttgccttactcaatgttaaggcacaaaaccagatacctctttcatgacagatgttgaagccgtgaattctaatccatcatcgatgctagatattgttcaggtgtatactcctatctcggaaaagctaggcatactaccgtattagctacctagtgtataaaatgtcatcttcctacctaaagaactataatgtgtatgaaatgtcgagtcctatcttcgaaagtagatctaggcc

SEQ ID NO: 66417 - DNA, 415 bp, Glycine max
ggcacaagtgagtttgttgatcgagataactagaaacagtgtgatgaaaatgaaggtccttgttttcttcgttgctacaattttggtagcatggcaatgccatgcgtacgatatgttccctctccgaatgaacactggctatggtgcccgtactccggaggtggaatgcgcaagttggaggcttgctgtggaagcacacaacatctttggctttgagaccattcctgaagagtgcgttgaagcaacaaaggaatacatccatggcgaacaatatagatcagactccaaaacagttaaccaacaagcttacttttatgccagagacctcgaagtccatcccaaggacacatttgtgttcagtatagatggcaccgtactctctaatattccatactacaaaaaacatggatatggg

SEQ ID NO: 66418 - DNA, 299 bp, Glycine max
ggttctagtgtgtgattgtttgttgttgtaactcgttcttcttcttttgatgttctgtgtttgtgtttgttttttctctcacctgaaaatgtcttgctgcggtggtaactgtggttgcggaagctcctgcaagtgcggcaacggctgcggaggctgcaagatgtacccagacttgagttacactgagtcaaccaccaccgagaccttggtcatgggagtggcacctgttaaggctcaatttgagggtgctgaaatgggtgtgcccgctgaggacgatggctgcaaatgtggaccaaact

SEQ ID NO: 66419 - DNA, 176 bp, Glycine max
ttcggctaagagaggattacggagggttcctacgtgcacaaaaccgcggaagggcatgatgatcatcgtcatgcttcggggagttgaaaattagcgtagatacggtgattcctctatatgagccaagcttacgaactggtgcttgatacacggtcagtcttatatagtgtcaccta

SEQ ID NO: 66420 - DNA, 405 bp, Glycine max
ggaaaaagaaaaaaaaactaaatagttcatttggccgttctaaaattattcttgttggttgttggagcaacgatttggcggtgatcactatcgaaccaagaagaccaagattctcaacctacgccgccacaaaaaaagattctcttagcccacggcttcgctaactcctaaattccgatgctgcttttcactccctctcccgtaacggttactctctctcccagaaaaccatttccctcaaacgctcttactctgcaccactgtttccctcccttctctgcaaaacccatttccagaaattccttcacatgcgctctcacacattcacccacccacacgcacgcgtaccccgacccaggttccgaattcgcagaacacgagacccataagttcaaaagtgaactc

SEQ ID NO: 66421 - DNA, 322 bp, Glycine max
taatggagcacaagtgagtttgatgatcgagatggctagaaacagtgtgatgaatgtgaacgtccttgttttcttcgttgctacaattatggtagcatggcaatgccatgcgtacgatatgttccctctgcgaatgaacactggctatggtgcccgtactccggaagtgaaatgcgcaagttggaggcttgctgtggaagcacacaacatctttggctgtgagaccattcctgaagagtgcgttgaagcaacaaaggaatacatccatggcgaacaatatagatcagactccaaaacagttaaccaacaagcttacttttat

SEQ ID NO: 66422 - DNA, 67 bp, Glycine max
gagacctcatgtcaagcggggctacccgctgagtttaagcgtaggaataagcacaacaaagagagga

SEQ ID NO: 66423 - DNA, 426 bp, Glycine max
  unsure (1)..(426): unsure at all n locations
gaagtgagtttgttgatcgagataactagaaacagtgtgatgagaatgaaggtccttgttttcttcgttgctacaattttggtagcatggcaatgccatgcgtacgatatgttccctctccgaatgaacactggctatggtgcccgtactccggaggtgaaatgcgcaagttggaggcttgctgtggaagcacacaacatctttggctttgagaccattcctgaagagtgcgttgaagcaacaaaggaatacatccatggcgaacaatatagatcagactccaaaacagttaaccaacaagcttacttttatgccagagacctcgaagtccatcccaaggacacanttgtgttcagtatagatggcaccgtactctctaatattccatactacnaaaaacatgggatatgggtggagaaaattaac

SEQ ID NO: 66424 - DNA, 167 bp, Glycine max
gtgccttgatcggcattactcgtgcatcggcgacgggtgcgacatcgcttagattgttcacggctctattgatgccaacgacccgaactcctgcgatccagctgagatctctgccgtgtgaccccggctgtatgctgtgaactgatcaggacatactcataattggt

SEQ ID NO: 66425 - DNA, 395 bp, Glycine max
acagaaagagcacaagtgagtttgttgatcgagataactagaaacagtgtgatgaaagtgaaggtccttgttttcttcgttgctacaattttggtagcatggcaatgccatgcgtacggtatgttccctctccgaatgaacactggctatggtgcccgtactccggaggtgaaatgcgcaagttggaggcttgctgtggaagcacacaacatctttggctttgagaccattcctgaagagtgcgttgaagcaacaaaggaatacatccatggcgaacaatatagatcagactccaaaacagttaaccaacaagcttacttttatgccagagacctcgaagtccatcccaaggacacatttgtgttcagtatagatggcaccgtactctctaatat

SEQ ID NO: 66426 - DNA, 347 bp, Glycine max
  unsure (1)..(347): unsure at all n locations
ggttctagtgtgtgattgcttgttgttgtaactcgtgctgcttcttttgttgttctgtgtttgtgtttgttttttctctcacctgaaaatgtcttgctgcggtggtaactgtggttgcggaagctcctgcaagtgcggcaacggctgcggaggctgcaagatgtacccagacttgagctacactgagtcaaccaccaccgagaccttggtcatgggagtggcacctgttaaggctcaatttgagggtgctgaaatgggtgtgcccgctgagaacgatggctgcaaatgtggaccaaactgctcctgcaacccctgcacttgcaagtgangtgttgggagagcaagct

SEQ ID NO: 66427 - DNA, 72 bp, Glycine max
gggcagcagaagaacaagtagttgagaactaagaaggagaagcaaatggcttcctcaatgatctcttcccca

SEQ ID NO: 66428 - DNA, 298 bp, Glycine max
ggttctagtgtgtgattgtttgttgttgtaacccgttcttcttcttttgttgttctgtgtttgtgtttgttttttctctcacctgaaaatgtcttgctgcggtggtaactgtggttgcggaagctcctgcaagtgcggcaactgctgcggaggctgcaagatgtacccagacttgagctacactgagtcaaccaccaccgataccttggtcatgggagtggcacctgttaaggctcaatttgagggtgctgaaatgggtgtgcccgctgagaacgatggcttgaaatgtggaccaaac

SEQ ID NO: 66429 - DNA, 369 bp, Glycine max
gaaggtgcaagagtttgttgtgagctataagctagggtatcgtgaggagaatatgaagttgtttgttttctttgttgctgcagtagttttggtagcatagccatgccatggcgcaggctaccaaaggttccctctccgaatgaaaactggctatggtgagcgttcttcgggggtaaaatgcgcaagttttaggcttgctgtggaagcacacaacatccgagcctttaaaaccattcctgaagagtgcgttgaaccaacaaaggactacattaatggcgaacaatttagatcagactctaaaacagttaaccaacaagctttcttttatgctagtgaacgcgaagtccatcacaacgacatatttatatt

SEQ ID NO: 66430 - DNA, 412 bp, Glycine max
  unsure (1)..(412): unsure at all n locations
gcacaagtgagtttgttgatcgagataactagaaagagtgtgatgaaaatgaaggtccttgttttcttcgttgctacaattttggtagcatggcaatgccatgcgtacgatatgttccctctccgaatgaacactggctatggtgcccgtactccggaggtgaaatgcgcaagttggaggcttgctgtggaagcacacaacatctttggctttgagaccattcctgaagagtgcgttgaagcaacaaaggaatacatccatggcgaacaatatagatcagactccaaaacagttaaccaacaagcttacttttatgccagagacctcgaagtccatcccaaggacacatttgtgttcagtatagatggcaccgtactctctaatattccatactataaaaaaaagaannnaa

SEQ ID NO: 66431 - DNA, 304 bp, Glycine max
gataccaaaaacaaaacacaagccaagtgaaagtgagaaaaaataaaaatcaaagagcataatgtcagggatcattcacaagattggggagacccttcatgtgggagggcacaagaaggaggaggagcataagggtgagcaccatgctggagaatacaaaggggagcaccatggtgaacacagtagtgagtacaaaggagagcatcatggtgaacacaaagctggagagtaccatggtgagcacaagccagagcacaaagaggggttcctagacaaagtcaaggacaagatccatggtgagggc

SEQ ID NO: 66432 - DNA, 140 bp, Glycine max
gcggacggagacgagagtgcgcaccgagctacatccgtggctacggctctgtatcctacacactcatgcgtggcctatctcgtctctcagataacttggctaacaattatgtgctacttcgctgttgactcatcgaaaca

SEQ ID NO: 66433 - DNA, 195 bp, Glycine max
tacttctgcaagaagacgtcagatgggttctgttgcgggaggactacagaatggtacagttgctatatgactacagtatgactcttataatgataataatgaatgttacaatagaatactatacttatatagattacatgtctaaattaatcttatatgaatttgtacaaaattatttgacactatgtcttctaa

SEQ ID NO: 66434 - DNA, 212 bp, Glycine max
agggtgtagcgcagaagaacgaactagaagctagcgttgcatgcgagagccatcatggctacgatcaatgatctactaccgcagctgctactactgtcaaatgcttcctcacccagatgggaggctcattcactgacactaaatccatcgatgagtagcccaccgagcagacccccaatgacatctcctacattgctatcaacactggaaga

SEQ ID NO: 66435 - DNA, 376 bp, Glycine max
gatctggcagcagaagaacaagtagttgagaactaggaaggagaagcaaatggcttcctcaatgatctcttccccagctgttaccactgtcaaccgtgccggtgccggcatggttgctccattcactggcctcaagtccatggctggcttccccaccaggaagaccaacaatgacattacctccattgctagcaacggtggaagagtgcaatgcatgcaggtgtggccaccagttggcaagaagaagtttgagactctttcctacctgccagaccttgatgatgcacaattggcaaaggaagtagaataccttcttaggaagggatggattccttgcttggaattcgagttggagcacggtttcgtgtaccgtgag

SEQ ID NO: 66436 - DNA, 57 bp, Glycine max
gagacctcaggggaggcggcgctacccgctgagtttaagcatatcaataagcggagg

SEQ ID NO: 66437 - DNA, 57 bp, Glycine max
gagacctcatgtcaggcggggctacccgctgagtttaagcatatcaataagcggagc

SEQ ID NO: 66438 - DNA, 86 bp, Glycine max
gaaacctcaggtcatgcggtgctacccgctgagttcaagcatatcaagtatcagatcaactaacccgtcaatgtgggatccaataa

SEQ ID NO: 66439 - DNA, 479 bp, Glycine max
gatctggcagcagaagaacaagtagttgagaactaagagggagaagcaaatggcttcctcaatgatctcttccccagctgttaccactgtcaaccgtgccggtgccggcatggttgctccattcactggcctcaagtccatggctggcttccccaccagaaagaccaacaatgacattacctccattgctagcaacggtggaagagtgcaatgcatgcaggtgtggccaccagttggcaagaagaagtttgagactctttcctacctgccagaccttgatgatgcacaattggcaaaggaagtagaataccttcttaggaagggatggattccttgcttggaattcgagttggagcacggtttcgtgtaccgtgagcacaacaggtcaccaggatactacgatggacgctactggaccatgtggaagctgcctatgtttggttgcactgatgcttctcaggtgttgaaggagcttcaag

SEQ ID NO: 66440 - DNA, 146 bp, Glycine max
accgcttccaaaaaaccaccgaaaggggctaccttatccctctctctctatctctttctggttgatgcatatttatcactcttatggcacaatttcatcaagcgctcttactccaatcctaaacttcgttttcatttccaatctta

SEQ ID NO: 66441 - DNA, 364 bp, Glycine max
  unsure (1)..(364): unsure at all n locations
gatctggcagcagaagaacaagtagttgagaactaagaaggagaagcaaatggcttcctcaatgatctcttccccagctgttaccactgtcaaccgtgccggtgccggcatggttgctccattcactggcctcaagtccatggctggcttccccaccagaaagaccaacaatgacattacctccattgctagcaacggtggaagagtgcaatgcatgcaggtgtggccaccagttggcaagaagaagtttgagactctntcctacctgccagaccttgatgatgcacaattagcaaaggaagtagaataccttcttaggaagggatggattccttgcttggaattcgagttggagcacggtttc

SEQ ID NO: 66442 - DNA, 403 bp, Glycine max
  unsure (1)..(403): unsure at all n locations
gatctggcagcagaagaacaagtagttgagaactaagagggagaagcaaatggcttcctcaatgatctcttccccagctgttaccactgtcaaccgtgccggtgccggcatggttgctccattcactggcctcaagtccatggctggcttccccaccagaaagaccaacaatgacattacctccattgctagcaacggtggaagagtgcaatgcatgcaggtgtggccaccagttggcaagaagaagtttgagactctntcctacctgccagaccttgatgatgcacaattggcaaaggaagtagaataccttcttaggaagggatggattccttgcttggaattcgagttggagcacgggttcgtgtaccgtgagcacaacaggtcaccaggatactacgat

SEQ ID NO: 66443 - DNA, 52 bp, Glycine max
gagacctcaggtcaggcggggctacccgctgagttgaagcatatcaataagc

SEQ ID NO: 66444 - DNA, 452 bp, Glycine max
gatatctggcagcagaagaacaagtagttgagaactgggaaggagaagcaaatggcttcctcaatgatctcttccccagctgttaccactgtcaaccgtgccggtgccggcatggttgctccattcactggcctcaagtccatggctggcttccccaccagaaagaccaacaatgacattacctccattgctagcaacggtggaagagtgcaatgcatgcaggtgtggccaccagttggcaagaagaagtttgagactctttcctacctgccagaccttgatgatgcacaattggcaaaggaagtagaataccttcttaggaagggatggattccttgcttggaattcgagttggagcacggtttcgtgtaccgtgagcacaacaggtcaccaggatactacgatggacgctactggaccatgtggaagctgcctatgtttggttgcactga

SEQ ID NO: 66445 - DNA, 436 bp, Glycine max
agacgacagatgggggttctagtgtgtgattgtttgttgttgtaactcgttcttcttcttttggggggctgtgtttgtgtttgttgtttctctcacctgaaaatgtcttgctgcggtggtaactgtggttgcggaagctcctgcaagtgcggcaacggctgcggaggctgcaagatgtacccagacttgagctacactgagtcaaccaccaccgagaccttggtcatgggagtggcacctgttaaggctcaatttgagggtgctgaaatgggtgtacccgctgagaacgatggctgcaaatgtggaccaaactgctcctgcaacccctgcacttgcaagtgaggtgttgggagagcaagcttcaagcagagatagcccttaattaggaataatgattaactattaatgtgtagctaaaaacttatgtattatgtct

SEQ ID NO: 66446 - DNA, 71 bp, Glycine max
gagagagagagagattttaattgtttatgtataaaatcatttgttataggtgttagtgagaaatgagatcc

SEQ ID NO: 66447 - DNA, 340 bp, Glycine max
gacgatgaacaacgagcatggacatgagcatgggcaggacagcagcagcagccgcgtcagtgattaaactgctgcatcagctatatatttaaaaggtttatgcggaccatacttccgaaggctatgcctgaacaactgtatatgtctgtgtatctgtatctctatatctgtgattcctttttacctatctagcgatcgatttatgagtgagaaaaccaagggtgtgaaattgtgcgtgaatctggttgctaatacgagtgctattagactgtgcctagactggtttgaaaccccgatactggagttatgtatgattgtctattatactatagaaacaaaa

SEQ ID NO: 66448 - DNA, 464 bp, Glycine max
gaaggtgcaagagtttgttgtgagctataagctagtgtatcgtgaggagaatatgaagttgtttgttttctttgttgctgcagtagttttggtagcatggccatgccatggcgcaggctaccaaaggttccctctccgaatgaaaactggctatggtgagcgttcttcggaggtaaaatgcgcaagttttaggcttgctgtggaagcacacaacatccgagcctttaaaaccattcctgaagagtgcgttgaaccaacaaaggactacattaatggcgaacaatttagatcagactctaaaacagttaaccaacaagctttcttttatgctagtgaacgcgaagtccatcacaacgacatatttatattcggcatagataacaccgtactctctaatatcccatactatgaaaaacatggatatggcgtggaggaatttaatgaaaccttatatgatgaatggg

SEQ ID NO: 66449 - DNA, 108 bp, Glycine max
attactattactgatcaatcaaaatatctatcaaaagtaaaaagcgaagagaagggaaaaactttaatttttttatggtaaaaaattcaattatacctgttatttcac

SEQ ID NO: 66450 - DNA, 260 bp, Glycine max
ggttctagtgtgtgattgattgttgggggaactcgttcttcttcttttgttgttctgtgtttgtgactgcattttctctcacctgacaatgtctcgctgccctggcaactgtggatgcagaagctcctgcacgtgctgcaactgctgcagaggctgcgagatgtacccagacttgagctacactgacttaaccaccacctagacctcggtcatgggagaggcacctgttcaagctcaataacagggagctgaaatgagtg

SEQ ID NO: 66451 - DNA, 101 bp, Glycine max
cggtccgtgaattcccgggatcgaacccactgcgtcacgagctggctgagaaacgaccagacagggtaccggcttgcttatgaagaccgacccagaagggg

SEQ ID NO: 66452 - DNA, 419 bp, Glycine max
  unsure (1)..(419): unsure at all n locations
ggcacaagtgagtttgttgatcgagataactagaaacagtgtgatgaaaatgaaggtccttgttttcttcgttgctacaattttggtagcatggcaatgccatgcgtacgatatgttccctctccgaatgaacactggctatggtgcccgtactccggaggtgaaatgcgcaagttggacgcttgctgtggaagcacacaacatctttggctttgagaccatttctgaagagtgcgttgaagcatcaaatgaatacatccatggcgaacaatatagatcagactccaaaacagttaaccaacaagcttacttttatgccagagacctcgaagtccatcccaaggacacatttgtgttcagtatagatggcaccgtactctctaatattccatactacaaaacaaaacaaantgggnagg

SEQ ID NO: 66453 - DNA, 388 bp, Glycine max
  unsure (1)..(388): unsure at all n locations
gatctggcagcagaagaacaagtagttgagaactaagaaggagaagcaaatggcttcctcaatgatctcttccccagctgttaccactgtcaaccgtgccggtgccggcatggttgctccattcactggcctcaagtccatggctggcttccccaccaggaagaccaacaatgacattacctccattgctagcaacggtggaagagtgcaatgcatgcaagtgtggccaccagttggcaagaagaagtttgagactctttcctacctgccagaccttgatgatgcacaattggcaaaagaagtagaataccttcttaggaagggatggattccttgcttggaanttcgagttgagcacggnttcgtgtaccgtgagcacaacaggtca

SEQ ID NO: 66454 - DNA, 326 bp, Glycine max
aaatgcagtagtgtacgaagaagtgataaatgtgttcaatgaagcagggctttctgctgataacatgccaatggatttccctcaccactcaaaaattgattccaaacatcctgagagagctttccagcagaatgtttgtgatatcccattgtgacactgctttggtctagtctagcaattttataccacgttctatttgatgatctagattttcttccagaactatattcgagtttaatgctttgatgaaaccacggtgaagaatattttttgtaatgacgtctgattcatgtagtccatctcatataataatggaataaaactat

SEQ ID NO: 66455 - DNA, 179 bp, Glycine max
attgactcgatagaaacaaaggagggaacaaaaaaaagcggacgctgtagaggatccaagctgaccaacgcttacatacgacggcatacgacgtcaaaacttttacctaaagtcaagtaaatttaatgcactggccaacgtttaaaaaggaaaaacctggaaataccccaccttaaccg

SEQ ID NO: 66456 - DNA, 257 bp, Glycine max
tacgggtgggagacgactactgaagggggtctgaaaactgcaaaggcaatgcgaccgactttaggtacggaattgggaattagggttgttcgtgtgactaagatgattcaagtggagttgaacgatctattaaggaataaggttcgcctgaatggcatcgactatgacaccatacgggacctgaataacctgttggcggctcagacgggcacaagagccatcaagatccggatgcagaaatagtacaccatgttcca

SEQ ID NO: 66457 - DNA, 265 bp, Glycine max
acgcgtgcgaacacctccgagagtgtcaactgaaggggaactacaacgctcgctaggtagtttcatctgggtaacgcttatgtctcgcacagaacaagtcaccattacaggatcaggactccgactgactacaattactacattggctatcattactgtgaacgctaccgcgctaatatactggtttactaatgcactcatctgggtaccgcactgactcaacttgctagacaggcctcttaaggcacatggtatcctaggaaat

SEQ ID NO: 66458 - DNA, 376 bp, Glycine max
  unsure (1)..(376): unsure at all n locations
ggcacaagtgagtttgttgatcgagataactagaaacagtgtgatgaaaatgaaagtccttggtttcttcgttgctacaattttggtagcatggcaatgccatgcgtacgatatgttccctcttcgaatgaacactggctatggtgcccgtactccggaggtgaaatgcgcaagtggaggcttgctgtgggaacacacaacatctttggttttgagaccattcctgaagagtgcgttgaagcaaccaaagaatacatncatggcgaacattttagatcagactccaaaacagttaaccaacaagcttacttttatgccagagacctcgaagtccatcccaaggacacatttgtgttcagtatagatggcaccgtac

SEQ ID NO: 66459 - DNA, 137 bp, Glycine max
gaagaaagctgctagcagagggaagttctacactgtgttgtttggattgatcgagtgtactttttcttttcgagattggcttggtgtgcagtggaaagagggtggaaaagaatggtaagggggagggcggcgccccg

SEQ ID NO: 66460 - DNA, 161 bp, Glycine max
agtctagacttttagatgatatggtacttgccaaacttaaaaatgttaaacacctgtattaatccaacaaaaaatgggcctttgaaactaaagaaaaacaaactaagattggcccaaactgaagaaatacaaaaaaatggcttgagatcaagcctaaccac

SEQ ID NO: 66461 - DNA, 330 bp, Glycine max
aagttccgggcggttcagtttgccagaactgctccttcctcaccttacagaaattagcttaagatcctggatcacgcagttagcagacgaattggacaaagttcctcgggttatctttttggcaatgcataggcccctgccgcaaaaccggcaactaacaattcccaaatccaacctgaatcgctagctgtaaataattctcctacttcaaaagcatcttctcctacttaaacaatatactctaacaaggctgctggtataaacagtcattctactgatgtccataacaccggcaactatatcactgaccgaacctgaaccaatgtccat

SEQ ID NO: 66462 - DNA, 426 bp, Glycine max
acgcgtgcgaacacctgcgagaggactaccgaatgacgttgacacattgtagtgggcactctataactaattagaagccagcatacgccaaacatatgaatgctcgaactatgctctcagatactgagcattacgctatacacgagcgacactcatctagctgaggctaacacaagaagcagtaggcaaacggatgatatagcgcacaagaccgggcttgacaccgaagtcaggccctcaccgaaactcgctatggaggatgatccctctacgtaccgagccatgatatttatagaattcatgcagcttcaacagagccatgagcatcacagcaagacatgcttgaagacgatggacatgggcaatcaattgagctgctaccatagcttaactaggaaacagtagacacatgcattatttgcatct

SEQ ID NO: 66463 - DNA, 61 bp, Glycine max
caccgtaaggggtgcacaagttaatttggtggatgggataacttggaaccaggttgttgaa

SEQ ID NO: 66464 - DNA, 411 bp, Glycine max
ggttctagtgtgtgattgtttgttgttgtaagtcgttcttcttcttttgttgttctgtgtttgtgtttgttttttctctcacctgaaaatgtcttgctgcggtggtaactgtggttgcggaagctcctgcaagtgcggcaacggctgcggaggctgcaagatgtacccagacttgagctacactgagtcaaccaccaccgagaccttggtcatgggagtggcacctgttaaggctcaatttgagggtgctgaaatgggtgtgcccgctgagaacgatggctgcaaatgtggaccaaactgctcctgcaacccctgcacttgcaagtgaggtgttgggagagcaagcttcaagcagagatagcccttaattaagaataatgataaactattaatgtgtagctaaaaacttat

SEQ ID NO: 66465 - DNA, 414 bp, Glycine max
ggttctagtgtgtgattgtttgttgttgtaacggggtcttcttcttatgttgttctgtgtttgtgtttgttttttctctcacctgaaaatgtcttgctgcggtggtaactgtggttgcggaagctcctgccagtgcagcaacggctgcagaggctgcaagatgtacccagacttgagctacactgagtcaaccaccaccgataccttggtcatgggaatggcacctgttaaggctcaatttgagggtgctgaaatgggtgtgcccgctgagaacgatggctgcaaatgtggaccaaactgctcctgcaacccctgcacttgcaagtgaggtgttgggagagcaagcttcaagcagagatagcccttaattaggaataatgatcaactattaatgtgtagctaaaaacttatgta

SEQ ID NO: 66466 - DNA, 246 bp, Glycine max
ctccgttcctaattcccggctcgacccactcgtccatacctacaaaactacacaacagtactttagcacgagattatttttaactataaggcagtctacttcattggcaactctaacttccttattgtcctctccgtcaccctaaccttcttttctatactacttactaacgcccacttaacctactccatttctttcaacttcaacaaactcaacccaatccacccaaacattaacctccctaaa

SEQ ID NO: 66467 - DNA, 233 bp, Glycine max
ttgcgagaaagttttattgatatattaagatgcggtagacgaggtaaccgagtttgttcattcacctttactaatcctagcacattcaggcgcacgaccgaagaccctgcaatctacaaagggtttagccataaaatcgaaatacgtggtcgatctaaaatatccatgctgacattcctgagcattcgacgatgttactcttatatcgtgtctcctagacctaattcagatga

SEQ ID NO: 66468 - DNA, 414 bp, Glycine max
gaaggtgcaagagtttgttgtgagctataagctaggttatcgtgaggagaatatgaagttgtttgttttctttgttgctgcagtagttttggtagcatggccatgccatggcgcaggctaccaaaggttccctctccgaatgaaaactggctatggtgagcgttcttcggaggtaaaatgcgcaagttttaggcttgctgtggaagcacacaacatccgagcctttaaaaccattcctgaagagtgcgttgaaccaacaaaggactacattaatggcgaacaatttagatcagactctaaaacagttaaccaacaagctttcttttatgctagtgaacgcgaagtccatcacaacgacatatttatattcggcatagataacaccgtactctctaatatcccatactatgaaaa

SEQ ID NO: 66469 - DNA, 407 bp, Glycine max
ggcacaagtgagtttgttgatcgagataacgagaaacagtgtgatgaaaatgaaggtccttgttttcttcgttgctacaattttggtagcatggcaatgccatgcgtacgatatgttccctctccgaatgaacactggctacggtgcccgtactccggaagtgaaatgcgcaagttggaggcttgctgtggaagcacacaacatctttggctttgagaccattcctgaagagtgcgttgaagcaacaaaggaatacatccatggcgaacaatatagatcagaccccaaaacagttaaccaacatgcttacttttatgccagagacctcgaagtccatcccaaggacacatttgtgttcagtatagatggcaccgtactctctaatattccatactacaaaaaacatg

SEQ ID NO: 66470 - DNA, 381 bp, Glycine max
  unsure (1)..(381): unsure at all n locations
ggttctagtgtgtgattgtttgttgttgtaactcgttcttcttcttttgttgttctgtgtttgtgtttgttttttctctcacctgaaaatgtcttgctgcggtggtaactgtggttgcggaagctcctgcaagtgcggcaacggctgcggaggctgcaagatgtacccagacttgagctacactgagtcaaccaccaccgagaccttggtcatgggagtggcacctgttaaggctcatttggaggtgcctgaatgggttgtgcccgcttagaacgattgctgcaaatgtggaccaaactgctcctgcaacccctgcacttgcaagtgangtgttgggagagcaagcttcaagcagagatagcccttaattaggaataatga

SEQ ID NO: 66471 - DNA, 201 bp, Glycine max
gattatatttgagttcaaacaaatcaaagccatggccaccttcaacttctctattgttctctccgtctccctagccttctttttggtgctacttaccaaggcacactcgaccgataccgtttctttcaccttcaacaagttcaacccagtccaaccaaacattatgctccaaaaagatgctagtatttcatcctctggggt

SEQ ID NO: 66472 - DNA, 382 bp, Glycine max
gatctggcagcagaagaacaagtagttgagaggctaagaagagaagcaaatggcttcctcaatgatctcttccccagctgttaccaccgtcaaccgtgccggtgccggcatggttgctccattcactggcctcaagtccatggctggcttccccaccagaaagaccaacaatgacattacctccattgctagcaacggtggaagagtgcaatgcatgcatgtgtggccaccagttggcaagaagaagtttgagactctttcctacctgccagaccttgatgatgcacaattggcaaaggaagtagaataccttcttaggaagggatggattccttgcttggaattcgagttggagcacggtttcgtgtaccgtgagcacaac

SEQ ID NO: 66473 - DNA, 401 bp, Glycine max
gagacgacagaagggggcacaagtgagtttgttgatcgagataactagaaacagtgtgatgaaaatgaaggtccttgttttcttcgttgctacaattttggtagcatggcaatgccatgcgtacgatatgttccctctccgaatgaacactggctatggtgcccgtactccggaggtgaaatgcgcaagttggaggcttgctgtggaagcacacaacatctttggctttgagaccattcctgaagagtgcgttgaagcaacaagggaatacatccatggcgaacaatatagatcagactccaaaacagttaaccaacaagcttacttttatgccagagaccccgaagtccatcccaaggacacatttgtgttcagtatagatggcaccgtactctctaata

SEQ ID NO: 66474 - DNA, 84 bp, Glycine max
gaattggcggaaaagttttatgttatatatggcaatctttctaacacccgaattatatgagaaacttcgatccatttttggaaa

SEQ ID NO: 66475 - DNA, 269 bp, Glycine max
ctgcagagacacagaggggaccaagtgaccaatatagcccaagccctgtgaaccaaaccctaacacacacccatttgattcagttccatggctagcctcaagttgcatttttggctgcagtgctctgcatggttgtggtgagtgcacccatggcacatgcagctatcacgtgcgggcaggtgacgagtagcctggccaattgcatcggttacctccagaagggaggaacgccgtcgtcgggatgctgcaacggagtgaagagcctcaat

SEQ ID NO: 66476 - DNA, 60 bp, Glycine max
aggcgtgagaacagtgagagggacgacagaagggtacagctgctagaagacgggagtagg

SEQ ID NO: 66477 - DNA, 405 bp, Glycine max
gcacaagtgagtttgttgatcgagataactggaaacagtgtgatgaaaatgaaggtccttgttttcttcgttgctacaattttggtagcatggcaatgccatgcgtacgatatgttccctctccgaatgaacactggctatggtacccgtactccggaggtgaaatgcgcaagttggaggcttgctgtggaagcacacaacatctttggctttgagaccattcctgaagagtgcgttgaagcaacaaaggaatacatccatggcgaacaatatagatcagactccaaaacagttaaccaacaagcttacttttatgccagagacctcgaagtccatcccaaggacacatttgtgttcagtatagatggcaccgtactctctaatattccatactacaaaaaacat

SEQ ID NO: 66478 - DNA, 405 bp, Glycine max
  unsure (1)..(405): unsure at all n locations
gaaggtgcaagagtttgttgtgagctataagctagtttatcgtgaggagaatatgaagttgtttgttttctttgttgctgcagtagttttggtagcatggccatgccatggcgcaggctaccaaaggttccctctccgaatgaaaactggctatggtgagcgttcttcggaggtaaaatgcgcaagttttaggcttgctgtggaagcacacaacatccgagcctttaaaaccattcctgaagagtgcgttgaaccaacaaaggactacattaatggcgaacaatntagatcagactctaaaacagttaaccaacaagctttcttttatgctagtgaacgcgaagtccatcacaacgacatatntatattcggcatagataacaccgtactctctaatattccata

SEQ ID NO: 66479 - DNA, 318 bp, Glycine max
ggtgcacaagtgagtttgttgatcgagatagctagaaacagtgtgatgaaaatgaaggtccttggtttcttcgttgctacaattttggtagcatggcaatgccatgcgtacgatatgttccctctccgaatgaacactggctatggtgcccgtactccggaggtgaaatgcgcaagttggaggctcgctgtggaagcacacaacatctttggctttgagaccattcctgaagagtgcgttgaagcaacaaaggaatacattcatggcgaacaatatagatcagactccaaaacagttaaccaacaagcttacttttat

SEQ ID NO: 66480 - DNA, 407 bp, Glycine max
  unsure (1)..(407): unsure at all n locations
ggcacaagtgagtttgttgatcgagataactggaaacagtgtgatgaaaatgaaagtccttgttttcttcgttgctacaattttggtagcatggcaatgccatgcgtacgatatgttccctctccgaatgaacactggctatggtgcccgtactccggaggtgaaatgcgcaagttggaagcttgctgtggaagcacacaacatctttggctttgagaccattcctgaagagtgcgttgaagcaacaaaagaatacatccatggcgaacaatatagatcagactccaaaacagttaaccaacaagcttacttttatgccagagaccttgaagtccatcccaaggacacatttgtgttcagtatagatggcaccgtactctgtaatattccatactacaaanaacatg

SEQ ID NO: 66481 - DNA, 415 bp, Glycine max
gttctagtgtgtgattgtttgttgttgtagcgtcgttcttcttcttttgttgttctgtgtttgtgtttgttttttctctcacctgaaaatgtcttgctgcggtggtaactgtggttacggaagctcctgcaagtgcggcaacggctgccgaggctgcaagatgtacccagacttgagctacactgagtcaaccaccaccgagaccttggtcatgggagtggcacctgttaaggctcaatttgagggtgctgaaatgggtgtgcccgctgagaacgatggctgcaaatgtggaccaaactgctcctgcagcccctgcacttgcaagtgaggtgttgggagagcaagcttcaagcagagatagcccttaattaggaataatgataaactattaatgtgtagctaaaaacttatgtat

SEQ ID NO: 66482 - DNA, 397 bp, Glycine max
ggcacaagtgagtttgttgatcgagataactagaaacagtgtgatgaaaatgaaagtccttgttttcttcgttgctacaattttggtagcatggcaatgccatgcgtacgatatgttccctctccgaatgaacactggctatggtgcccgtactccggaggtgaaatgcgcaagttggaggcttgctgtggaagcacacaacatctttggctttgagaccattcctgaagagtgcgttgaagcaacaaaggaatacatccatggcgaacaatatagatcagactccaaaacaggtaaccaacaagcttacttttatgccagagacctcgaagtccatcccaaggacacatttgtgttcagtatagatggcaccgtactctctaatattccatactac

SEQ ID NO: 66483 - DNA, 312 bp, Glycine max
gacaagtgagtttgttgatcgagataactagaaacagtgtgatgaaaatgaaggtccttgttttcttcggtgctacaattttggtagcatggcaatgccatgcgtacgatatgttccctctccgaatgaacactggctatggtgcccgtactccggaggtgaaatgcgcaagttggaggcttgctgtggaagcacacaacatctttggctttgagaccattcctgaagagtgcgtcgaagcaacaaaggaatacatccatggcgaacaatatagatcagactccaaaacagttaaccaacaagcttactttt

SEQ ID NO: 66484 - DNA, 179 bp, Glycine max
tggggcatcagaaaaagaaaaggcgtcaatcgtatagcattctaagaaatgaagagccctaccattttcattctctttctactttctggcctctacacctcacttctacctttagacaccgctcaagtcgtggttgacatggaaggggatgatcttcaaaatggtgggaaatattatgt

SEQ ID NO: 66485 - DNA, 317 bp, Glycine max
ggagtgcacaagtgaatttggtgatcgagataactagaaacaaggggatgaaaatgaaaggccttggtttcttcggtggtacaattttggtagcatggcaatggcatgcgtacgatatgttccctctccgaatgaacactggctatggtgcccgtactccggaggtgaaatgcgcaagttggaggcttgctgtggaagcacacaacatctttggctttgagaccattcctgaagagtgcgttgaagcaacaaaggaatacatccatggcgaacaatatagatcagactccaaaacagttaaccaacaagcttacttt

SEQ ID NO: 66486 - DNA, 113 bp, Glycine max
gcacaagtgagtttgttgatcgagataactagaaacagggtgatgaaaatgaaagggcctggtttcttcgttgctacaatttcggtagcatggcaatgccatgcgtacgatat

SEQ ID NO: 66487 - DNA, 81 bp, Glycine max
  unsure (1)..(81): unsure at all n locations
ttggcgagggagggcgtgagaaaaacaaaagagtagtggcctttaggtggtgaagaacaagagctcaaatcaaatcgancc

SEQ ID NO: 66488 - DNA, 414 bp, Glycine max
ttttagggggcacaagtgagtttgttgatcgggatgactagaaacagtgtgaggaaaatgaaggtccttgttttcttcgttgctacaattttggtagcatggcaatgccatgcgtacgatatgttccctctccgaatgaacactggctatggtgcccgtactccggaggtgaaatgcgcaagttggaggcttgctgtggaagcacacaacatctttggctttgagaccattcctgaagagtgcgttgaagcaacaaaggaatacatccatggcgaacaatatagatcagactccaaaacagttaaccaacaagcttacttttatgccagagacctcgaagtccatcccaaggacacatttgtgttcagtatagatggcaccgtactctctaatattccatactacaaaaaacat

SEQ ID NO: 66489 - DNA, 374 bp, Glycine max
tgaaaccaatgcaacaaaaagggaaaaaaaataacaactgaaagtttttctttttgtccataacaattaaaaaggttgaagcagaaccttaggcaattttcaaaaccttgcattttttggtgtgattttggtttatttgagcccagaaaaaaatcgttcaacaattccaaagctgaaaacaagcaacaaatcctttggcaaacaaaaatctgcacttttctgagattctggacgcatggcaaaaatctccataaaaccctaacaactcaattattacaattcacacatctttcaatcgaacaaagcaaaaagcaaagtggtcgccttcatcatcatctttacctttaaactttgcttactctaccatatgcccc

SEQ ID NO: 66490 - DNA, 349 bp, Glycine max
  unsure (1)..(349): unsure at all n locations
agccaacaacaacctagggcacttccgaaactttcaatggttttatagcacaacacattctnccatatatctgtgtaccaatggtgctctttctttgcaaggaataatatggtgtgctcttctgcaattactgcgcttcaactcatgaatttggccacaacttttgtatctcaaatgaaggttacgatgacgattatgataatgtcgtcattgatgtgaccccggccgcatagaagaatttctcataacatgcataaatcatgaggatgaggagggatataatattagtcagtgtaagcttcattctgtggtcttgcttaattactacattacattcgtatttactctt

SEQ ID NO: 66491 - DNA, 380 bp, Glycine max
gatctggcagcagaagaacaagtagttgagaactaagaaggagaagcaaatggcttcctcaatgatctcttccccagctgttaccactgtcaaccgtgccggtgccggcatggttgctccattcactggcctcaagtccatggctggcttccccaccaggaagaccaacaatgacattacctccattgctagcaacggtggaagagtgcaatgcatgcaggtgtggccgccagttggcaagaagaagtttgagactctttcctacctgccagaccttgatgatgcacaattggcaaaggaagtagaataccttcttaggaagggatggattccttgcttggaattcgagttggagcacggtttcgtgtaccgtgagcaca

SEQ ID NO: 66492 - DNA, 355 bp, Glycine max
gaaggtgcaagagtttgttgtgagctataagctagtttatcgtgaggagaatatgaagttgtttgttttctttgttgctgcagtagttttggtagcatggccatgccatggcgcatgctaccaaaggttccctctccgaatgaaaactggctatggtgagcgttcttcggaggtaaaatgcgcaagttttaggcttgctgtggaagcacacaacatccgagcctttaaaaccattcctgaagagtgcgttggaccaacaaaggactacattaatggcgaacaatttagatcagactctaaaacagttaaccaacaagctttcttttatgctagtgaacgcgaagtccatcacaac

SEQ ID NO: 66493 - DNA, 358 bp, Glycine max
gatctggcagcaaaagaacaagtagttgggaactaagaaggagaagcaaatggcttcctcaatgatctcttccccagctgttaccactgtcaaccgtgccggtgccggcatggttgctccattcactggcctcaagtccatggctggcttccccaccaagaagaccaacaatgacattacctccattgctagcaacggtggaagagtgcaatgcatgcaggtgtggccaccagttggcaagaagaagtttgagactccttcctacctgccagaccttgatgatgcacaattggcaaaggaagtagaataccttcttaggaagggatggattccttgcttggaattcgagttggagcac

SEQ ID NO: 66494 - DNA, 187 bp, Glycine max
agggatctgggggcagaaagacaagtagttgggaactaagaagaaagaaatggcttcctcaatgatctcctccccagctgttaccaccgtcaaccgtgccggtgccggcatggttgctccattcaccggcctcaaatccatggctggcttccccacgaggaagaccaacaattgacattatcctccg

SEQ ID NO: 66495 - DNA, 399 bp, Glycine max
ggcagcagaaaaacaagtagttgagaactaagaagaaggaaatggcttcctcaatgatctcctccccagctgttaccaccgtcaaccgtgccggtgccggcatggttgctccattcaccggcctcaaatccatggctggcttccccacgaggaagaccaacaatgacattacctccattgctagcaacggtggaagagtacaatgcatgcaggtgtggccaccaattggcaagaagaagttcgagactctttcctacttgccagacctcgatgatgcccaattggcaaaggaagtcgaataccttctaaggaaaggatggattccttgcttggaattcgagttggagcacggtttcgtgtaccgtgagcacaacaggtcacctggatactatgatggac

SEQ ID NO: 66496 - DNA, 313 bp, Glycine max
ggcacaagtgagtttgttgatcgagataactagaaacagtgtgatgaaaatgaaggtccttgttttcttcgttgctacaattttggtagcatggcaatgccatgcgtacgatatgttccctctccgaatgaacactggctatggtgcccgtactccggaggtgaaatgcgcaagttggaggcttgctgtggaagcacacaacatctttggctttgagaccattcctgaagagtgcgttgaagcaacaaaggaatacattcatggcgaacaatatagatcagactccaaaacagttaaccaacaagcttacttt

SEQ ID NO: 66497 - DNA, 397 bp, Glycine max
tgttctagtgtgtgattgtttggtgttgtagctcgttcttcttcttttgttgttctgtgtttgtgtttgttttttctctcacctgaaaatgtcttgctgcggtggtaactgtggttgcggaagctcctgcaagtgcggcaacggctgcggaggctgcaagatgtacccagacttgagctacactgagtcaaccaccaccgagaccttggtcatgggagtggcacctgttaaggctcaatttgagggtgctgaaatgggtgtgcccgctgagaacgatggctgcaaatgtggaccaaactgctcctgcaacccctgcacttgcaagtgaggtgttgggagagcaagcttcaagcagagataagcccttattaggaataatgataaactattaatgtgt

SEQ ID NO: 66498 - DNA, 101 bp, Glycine max
tcacacaagaagactcctcaatcatccatagacatgggcaccgtcacttctgcagcagtttctattccctcattcactggcctcaaggcaagcgcaagcaa

SEQ ID NO: 66499 - DNA, 213 bp, Glycine max
ctttctttcttttcttattactatgtaattatttaaagataatatattattgatatccccctcctcgtgtttcttcgtcctatgagatgaacattataatatatcatgataggagagaaaagcacaaatttcacttgttcagaaacctaccattttgattttgcattgcgtatctgatttgtgtttttctctcccgtatcatgataccccgat

SEQ ID NO: 66500 - DNA, 108 bp, Glycine max
taggggtgcacaagtgagtttgttgatcgagataactagaaacagtgtgatgaaaatgaaagtccttgttttcttcgttgctacaatttttgtagcatggcaatgcca

SEQ ID NO: 66501 - DNA, 252 bp, Glycine max
gacccccaaactctgcatgggaagaaaccctagccactctcccggcgtcacgatgcagatcttcgtgaaaaccctaacgggtaaaacgatcacgttggaggtggagtcttcggacaccatcgacaacgtgaaggccaagatccaggacaaggaaggcatccctccggaccagcagcgcctcatcttcgccgggaagcagctggaggacggccgcaccctcgccgactacaacatccagaaggagtccacgct

SEQ ID NO: 66502 - DNA, 120 bp, Glycine max
gtcacccactcccaaacaaacccacttagatgggttcctttgtattcctcctagtgctgcttctttcaacccttattctcatgcctcaagggcttggttcttacttcaaaccaatttaaa

SEQ ID NO: 66503 - DNA, 402 bp, Glycine max
cggcaagagtttgttgtgagctataagctagtggatcgtgaggagaatatgaaggtgtttgttttctttgttgctgcagtagttttggtagcatggccatgccatggcgcaggctaccaaaggttccctctccgaatgaaaactggctatggtgagcgttcttcggaggtaaaatgcgcaagttttaggcttgctgtggaagcacacaacatccgagcctttaaaaccattcctgaagagtgcgttgaaccaacaaaggactacattaatggcgaacaatttagatcagactctaaaacagttaaccaacaagctttcttttatgctagtgaacgcgaagtccatcacaacgacatatttatattcggcatagataacaccgtactctctaatatcccatac

SEQ ID NO: 66504 - DNA, 285 bp, Glycine max
  unsure (1)..(285): unsure at all n locations
tctttggtgctgcagtatttttgtagcatggccatgccatggcgcangctaccaaaggttccctctccgaatgaaaactggctatggtgagcgttcttcggaggtaaaatgcgcaagttntangcttgctgtggaagcacacaacatccgagcctttaaaaccattctgaagagtgcgtngaaccaacanaggactacattaatggcgaacaatttagatcagactctanaacagttaaccaacaagctttcttttatgctagtgaacgcgaagtccatcacaac

SEQ ID NO: 66505 - DNA, 308 bp, Glycine max
gaccaagtgaggcaatatagcccaagccctatgcaaccaaaccctaacacacacccatttgattcagtttccatggctagcctcaaggttgcatttttggctgcagtgctctgcatggttgtggtgagtgcacccatggcacatgcagctatcacgtgcgggcaggtgacgagtagcctggccaattgcatcggttacctccagaagggaggaacgccgtcgtcgggatgctgcaacggagtgaagagcctcaatgccgccgccaagaccaccgccgaccgccagacggcgtgcaactgcctcaagtc

SEQ ID NO: 66506 - DNA, 396 bp, Glycine max
  unsure (1)..(396): unsure at all n locations
tgttaccaaaaacaaaacacaagccaagtgagagtgagaaaaaataaaaatcaaagagcataatgtcagggatcattcacaagattggggagacccttcatgtgggagggcacaagaaggaggaggagcataagggtgagcaccatgctggagaatacaaaggggagcaccatggtgaacacagtagtgagtacaaaggagagcatcatggtgaacacaaagctggagagtaccatggtgagcacaagccagagcacaaagaggggttcctagacaaagtcaaggacaagatccatggtgagggcggcgccgccgagggcgagaagaagatgaaggagaagaagaagaggagcatggccatgagcatggncatgacagcagcagcagcagtgacag

SEQ ID NO: 66507 - DNA, 217 bp, Glycine max
caaagggagatggccgaaacacaaccccccacacgattccaggggcctatttcattgctctttccaccacccattggtcttggggtgtacctcaatgttcccggggagtacctatacattggagccggcgtatttaccatcatattttgcattattgagatagataaacccgataaaccccatcacttttaaccccacatataccatattggaaagg

SEQ ID NO: 66508 - DNA, 355 bp, Glycine max
gggtgcaagagtttgttgtgagctataagctagtttatcgtgaggagaatatgaagttgtttgttttctttgttgctgcagtagttttggtagcatggccatgccatggcgcaggctaccaaaggttccctctccgaatgaaaactggctatggtgagcgttcttcggaggtaaaatgcgcaagttttaggcttgctgtggaagcacacaacatccgagcctttaaaaccattcctgaagagtgcgttgaaccaacaaaggactacattaatggcgaacaatttagatcagaccctaaaacagttaaccaacaagctttcttttatgctagtgaacgcgaagtccatcacaacga

SEQ ID NO: 66509 - DNA, 364 bp, Glycine max
agaaggggaaggtgcaagagtttgttgtgagctataagctagtttatcgtgaggagaatatgaagttgtttgttttctttgttgctgcagtagttttggtagcatggccatgccatggcgcaggctaccaaaggttccctctccgaatgaaaactggctatggtgagcgttcttcggaggtaaaatgcgcaagttttaggcttgctgtggaagcacacaacatccgagcctttaaaaccattcctgaagagtgcgttgaaccaacaaaggactacattaatggcgaacaatttagatcagactctaaaacagttaaccaacaagctttcttttatgctagtgaacgcgaagtccatcacaacga

SEQ ID NO: 66510 - DNA, 111 bp, Glycine max
ctcataggttagggtttttttctcttcatgctctctctgcgttatttcatctcacagagctcaaaggggtcgaatgcgtgtgcggtctgtcttacccactcttcactcaac

SEQ ID NO: 66511 - DNA, 313 bp, Glycine max
ggcacaagtgagtttgttgatcgagataactagaaacagtgtgatgaaaatgaaagtccttgttttcttcgttgctacaattttggtagcatggcaatgccatgcgtacgatatgttccctctccgaatgaacactggctatggtgcccgtactccggaggtgaaatgcgcaagttggaggcttgctgtggaagcacacaacatctttggctttgagaccattcctgaagagtgcgttgaagcaacaaaggaatacatccatggcgaacaatatagatcagactccaaaacagttaaccaacaagcttacttt

SEQ ID NO: 66512 - DNA, 313 bp, Glycine max
gcacaagtgagtttgttgagcgagataactagaaacagtgtgatgaaaatgaaggtccttgttttcttcgttgctacaattttggtagcatggcaatgccatgcgtacgatatgttccctctccgaatgaacactggctatggtgcccgtactccggaggtgaaatgcgcaagttggaggcttgctgtggaagcacacaacatctttggctttgagaccattcctgaagagtgcgttgaagcaacaaaggaatacatccatggcgaacaatatagatcagactccaaaacagttaaccaacaagcttactttt

SEQ ID NO: 66513 - DNA, 222 bp, Glycine max
ggagcaggatctggacgccaaaccagggaaccacagccgattcaacgccacaaatggcttgagcttcctctgacaaggagcagaactgagctccgttacacaacaacaaccagactgtatgcgaaggctggtgtacgacattaccatgtacccttccatagatgacccttttcaccacgaaggcaatgttatacgcctagcctcaaatcaatgcatctttga

SEQ ID NO: 66514 - DNA, 88 bp, Glycine max
ggttgcaaaaaaacaaaaaaggggtccggttgaaaaaaaacaacgggaggggaggagaaaggaccctattaataacagacgaatatgc

SEQ ID NO: 66515 - DNA, 383 bp, Glycine max
  unsure (1)..(383): unsure at all n locations
gatctggcagcagaagaacaagtagttgagaactaagagggagaagcaaatggcttcctcaatgatctcttccccagctgttaccactgtcaaccgtgccggtgccggcatggttgctccattcactggccttcaagtccatggctggcttccccaccaggaagaccaacaatgacattacctccattgctagcaacggtggaagagtgcaatgcatgcaggtgtggccaccagttggcaagaagaagtttgagactctttcctacctgccagaccttgatgatgcacaattggcaaaggaagtagaataccttcttaggaagggatggattccttgcttggaattcgagttggagcacggnttcgtgtaccgtgagcacaac

SEQ ID NO: 66516 - DNA, 135 bp, Glycine max
ggttctagtgtgtgattgtttgttgttgtaacgcgttggtcttcttttggtgttctgtgtttgtgtttgttttttctctcacctgaaaatgtcttgctgcggtggtaactgtggttgcggaagctcctgcaagtg

SEQ ID NO: 66517 - DNA, 160 bp, Glycine max
tccaattcgagcgggccgttttttttataggtctttttgtgtctttttgggaaatgtttttgatattggtaaccgaggggccttattcaaaattacccgacctttttccggagcgaaccatttcccaacctttaaaaaaaaaaaaaggaggcacccttgg

SEQ ID NO: 66518 - DNA, 311 bp, Glycine max
gacaagtgagtttggtggtcgagataactaggaacagggtgatgaaaatgaagggccttgttttcttcgttgctacaattttggtagcatgggaatgccatgcgtacgatatgttccctttccgaatgaacactggctatggtgcccgtactccggaggtgaaatgcgcaagttggaggcttgctgtggaagcacacaacatctttggctttgggaccattcctgaagagtgcgttgaagcaacaaaagaatacattcattgcgaacaatatagatcagactccaaaacagttaaccaacaagcttacttt

SEQ ID NO: 66519 - DNA, 313 bp, Glycine max
  unsure (1)..(313): unsure at all n locations
ggcacaagtgagtttgttgatcgagataactagaaacagngggatgaaaatgaaagtccctgttttcttcgttgctacaattttggtagcatggcaatgccatgcgtacgatatgttccctctccgaatgaacactggctatggtgcccgtactccggaggtgaaatgcgcaagttggaggcttgctgtggaagcacacaacatctttggctttgagaccattcctgaagagtgcgttgaagcaacaaaggaatacatccatggcgaacaatatagatcagactccaaaacagttaaccaacaagcttacttt

SEQ ID NO: 66520 - DNA, 292 bp, Glycine max
gatctggcagcagaagaacaagtagttgagaactaagaaggagaagcaaatggcttcctcaatgatctcttccccagctgttaccactgtcaaccgtgccggtgccggcatggttgctccattcactggcctcaagtccatggctggcttccccaccaggaagaccaacaatgacattacctccattgctagcaacggtggaagagtgcaatgcatgcaggtgtggccaccagttggcaagaagaagtttgagactctttcctacctgccagaccttgatgatgcacaattg

SEQ ID NO: 66521 - DNA, 217 bp, Glycine max
ggcacaagtgagtttgttgatcgagataactagaaacagtgtgatgaaaatgaaggtccttgttttcttcgttgctacaattttggtagcatggcaatgccatgcgtacgatatgttccctcttcgaatgaacactggctatggtgcccgtactccggaggtgaaatgcgcaagttggaggcttgctgtggaagcacacaacatctttggctttgag

SEQ ID NO: 66522 - DNA, 314 bp, Glycine max
ggcacaagtgagtttgttgatcgagataactagaaacagtgtgatgaaaatgaaggtccttgttttcttcgttgctacaattttggtagcatggcaatgccatgcgtacgatatgttccctctccgaatgaacactggctatggtgcccgtactccggaggtgaaatgcgcaagttggaggcttgctgtggaagcacacaacatctttggctttgagaccattcctgaagagtgcgttgaagcaacaaaggaatacatccatggcgaacaatatagatcagactccaaaacagttaaccaacaagcttactttt

SEQ ID NO: 66523 - DNA, 134 bp, Glycine max
tttccgggtcgacccaagcgttcggccacgccttcgttccggttccaaaagaccaccgaagggggagccttaaattcttttgcccttgggtcaacccccggtgggaaaaaaaaaaaaaaaaaggtggtccaaat

SEQ ID NO: 66524 - DNA, 295 bp, Glycine max
tctgggatcttgtcctttggatctgaaacactctctgagctttctttcttagaaaacgatgtcgtctcaacaacaagaccttcctcttcatctcaactttaacctcaacctcttatggtggacctcactctcattcatgaagctgattctaaaggagctggtctctctctcagctaaattgtttttatttggcttctttgtgtgatgtgtctcttttcgaaatctgcattttgagtttctatgtaattggtactcattagtacttcactgcttcacattgcattatctgtatctg

SEQ ID NO: 66525 - DNA, 410 bp, Glycine max
  unsure (1)..(410): unsure at all n locations
tgagggggcacaagtngagtttgttggatcgaggatggctagaaacagtgtgatgaagaatgaaggtcccttgttttctttcgttgctacaattnttggtagcatggcaatgccatgcgtacgatatgttccctctccgaatgaacactggctatggtgcccgtactccggaggtgaaatgcgcaagttggaggcttgctgtggaagcacacaacatctttggccttgagaccattcctgaagagtgcgttgaagcaacaaaggaatacatccatggcgaacaatatagatcagactccaaaacagttaaccaacaagcttacttttatgccagagacctcgaagtccatcccaaagacacatttgtgttcagtatagatggcaccgtactctcttatattncatactac

SEQ ID NO: 66526 - DNA, 104 bp, Glycine max
ggcagccaaaaaaagaaaatcctcacccattttctgggtagccaaacactctggaattctcagttatgtcgggggaagcgtatgtgggtgatcacctactgggg

SEQ ID NO: 66527 - DNA, 147 bp, Glycine max
gaatctctgaaagcacaagtcacaaccgaaactgtgtccatctctcttacataatgacaactatatcaaattgctcccttcttttgctcatcctaatgcaatccactctccacatagcttccaccctctcaacccccaacaacttta

SEQ ID NO: 66528 - DNA, 76 bp, Glycine max
ggagtttggtgatcgagataactagaaacagggtgatgaaaatgaaaggccttggtttcttcggtggtacaatttt

SEQ ID NO: 66529 - DNA, 354 bp, Glycine max
gataccaaaaacagggcacaagccaagtgaaagtgagaaaaaataaaaatcaaagagcataatgtcagggatcattcacaagattggggagacccttcatgtgggagggcacaagaagaaggaggagcataagggtgagcaccatgctggagaatacaaaggggagcaccatggtgaacacagtagtgagtacaaaggagagcatcatggtgaacacaaagctggagagtaccatggtgagcacaagccagagcacaaagaggggttcctagacaaagtcaaggacaagatccatggtgagggcggcgccgccgagggcgagaagaagatgaaggagaagaagaagaaggagca

SEQ ID NO: 66530 - DNA, 85 bp, Glycine max
aggttttagaacaccaccgaaagtggcacaaattagttttgttatcgaagtaaggagaaacatttcgattaagaggaaagtactc

SEQ ID NO: 66531 - DNA, 318 bp, Glycine max
tgggacaagtgagtttgttgatcgagataactaggaacagtgtgatgaaaatgaaggtccttgttttcttcgttgctacaattttggtagcatggcaatgccatgcgtacgatatgttccctctccgaatgaacactggctatggtgcccgtactccggaggtgaaatgcgcaagttggaggcttgctgtggaagcacacaacatctttggctttgagatcattcctgaagagtgcgttgaagcaacataggaatacatccatggcgaacaatatagatcagactccaaaacagttaaaccaacagcttactttttat

SEQ ID NO: 66532 - DNA, 261 bp, Glycine max
ggttctagtgtgtgattgtttgttgttgtgactcgttcttcttcttttgttgttctgtgtttgtgtttgttttttctctcacctgaaaatgtcttgctgcggtggtaactgtggttgctgaagctcctgcaagtgcggcaacggctgctgaggctgcaagatgtacccagacttgagctacactgagtcaaccaccaccgagaccttggtcatgggagtggcacctgttaaggctcaatttgagggtgctgaaatgggtgt

SEQ ID NO: 66533 - DNA, 171 bp, Glycine max
tataacggaacctcgcctgagcacacacaaccggttcactgcaacagatgcgatgacatatcacaatggcgctaaataagcctttctggtctaaaatacatatcatgcaacatccctgggaacacaccatctttcatccaactcaaagcttggaaacaacattctggcact

SEQ ID NO: 66534 - DNA, 294 bp, Glycine max
ggcacaagtgagtttgttgatcgagataacgagaaacagtgtgatgaaaatgaaggtccttgttttcttcgttgctacaattttggtagcatggcaatgccatgcgtacgatatgttccctctccgaatgaacactggctatggtgcccgtactccggaggtgaaatgcgcaagttggaggcttgctgtggaagcacacaacatctttggctttgagaccattcctgaagagtgcgttgaagcaacaaaggaatacatccatggcgaacaatatagatcagactccaaaacagt

SEQ ID NO: 66535 - DNA, 329 bp, Glycine max
gaaggtgcaagagtttgttgtgagctataggctagtttatcgtgaggagaatatgaagttgtttgttttctttgttgctgcagtagttttggtagcatggccatgccatggcgcaggctaccaaaggttccctctccgaatgaaaactggctatggtgagcgttcttcggaggtaaaatgcgcaagttttaagcttgctgtggaagcacacaacatccgagcctttaaaccattcctgaagagtgcgttgaaccaaccaaagactacattaatggcgaacaatttaaatcagactctaaaacaagtaaccaacaagctttcttttatgc

SEQ ID NO: 66536 - DNA, 128 bp, Glycine max
actcatacaataccacaagacgatacaacgactcatcaattcaaaatatagggtgcattataaacattggttcgcggaacacaaccaatacactatcttgtcgctttcacaagtttgctcattaccaa

SEQ ID NO: 66537 - DNA, 105 bp, Glycine max
gaagaaagctgctagcagagggaagttctacacttttttgtttggattgatcgagtgtactttttcttttcgagattggcttggtgtgcagtggaaagagggtac

SEQ ID NO: 66538 - DNA, 386 bp, Glycine max
ggcacaagtgagtttgttgatcgagataacgagaaacagtgtgatgaaaatgaaggtccttgttttcttcgttgctacaattttggtagcatggcaatgccatgcgtacgatatgttccctctccgaatgaacactggctatggcgcccgtactccggaggtgaaatgcgcaagttggaggcttgctgtggaagcacacaacatctttggctttgagaccattcctgaagagtgcgttgaagcaacaaaggaatacatccatggcgaacaatatagatcagactccaaaacagttaaccaacaagcttacttttatgccagagacctcgaagtccatcccaaggacacatttgtgttcagtatagatggcaccgtactctctaata

SEQ ID NO: 66539 - DNA, 385 bp, Glycine max
ggatatctggcagcagaagaacaagtagttgagaactaagaaggagaagcaaatggcttcctcaatgatctcttccccagctgttatcactgtcaaccgtgccggtgccggcatggttgctccattcactggcctcaagtccatggctggcttccccaccaggaagaccaacaatgacattacctccattgctagcaacggtggaagagtgcaatgcatgcaggtgtggccaccagttggcaagaagaagtttgagactctttcctacctgccagaccttgatgatgcacaattggcaaaggaagtagaataccttcttaggaagggatggattccttgcttggaattcgagttggagcacggtttcgtgtaccgtgagcacaac

SEQ ID NO: 66540 - DNA, 419 bp, Glycine max
agacgacagaagggggcacaagtgagtttgttgatcgagataactagaaagagtgtggtgaaaatgaaggtccttgttttcttcgttgctacaattttggtagcatggcaatgccatgcgtacgatatgttccctctccgaatggacactggctatggtgcccgtactccggaggtgaaatgcgcaagttggaggcttgctgtggaagcacacaacatctttggctttgagaccattcctgaagagtgcgttgaagcaacaaaggaatacatccatggcgaacaatatagatcagactccaaaacagttaaccaacaagcttacttttatgccagagacctcgaagtccatcccaaggacacatttgtgttcagtatagatggcaccgtactctctaatattccatactacaaaaaaca

SEQ ID NO: 66541 - DNA, 365 bp, Glycine max
ggtgcacaagtgagtttgttgatcgagatagctagaaacagtgtgatgaaaatgaaagtccttgttttcttcgttgctacaattttggtagcatggcaatgccatgcgtacgatatgttccctctccgaatgaacactggctacggtgcccgtactccggaggtgaaatgcgcaagttggaggcttgctgtggaagcacacaacatctttggctttgagaccattcctgaagagtgcgttgaagcaacaaaggaatacatccatggcgaacaatatagatcagactccaaaacagttaaccaacaagcttacttttatgccagagacctcgaagtccatcccaaggacacatttgtgttcagtat

SEQ ID NO: 66542 - DNA, 352 bp, Glycine max
ggcacaagtgaggttgttggtcgagataactagaaacagtgtgatgaaaatgaaggtccttgttttcttcgttgctacaattttggtagcatggcaatgccatgcgtacgatatgttccctctccgaatgaacactggctatggtgcccgtactccggaggtgaaatgcgcaagttggaggcttgctgtggaagcacacaacatctttggctttgagaccattcctgaagagtgcgttgaagcaacaaaggaatacatccatggcgaacaatatagatcagactccaaaacagttaaccaacaagcttacttttatgccagagacctcgaagtccattccaaggacacattt

SEQ ID NO: 66543 - DNA, 367 bp, Glycine max
ggcagttcaattccaatatattccattctggctgtgtatttccctacctctcccttcaagatgcagatcttcgtcaagaccctcaccggcaagaccatcacccttgaggtggaaagctctgacaccatcgacaacgtcaaggccaagatccaggacaaggaaggaatccccccggaccagcaacgtctcattttcgccggaaagcaacttgaggacggccgtacccttgctgactacaacattcagaaggagagtactcttcacctcgtcctccgtctccgtggtggcatgcagatcttcgttaagacactcaccggcaagaccataaccctagaggttgaaagctccgacaccatcgataacgtca

SEQ ID NO: 66544 - DNA, 325 bp, Glycine max
gcacaagtgagtttgttgatcgagataactggagacagtgtgatgaaaatgaaggtccttgttttcttcgttgctacaattttggtagcatggcaatgccatgcgtacgatatgttccctcttcgaatgaacactggctatggtgcccgtactccggaggtgaaatgcgcaagttggaggcttgctgtggaagcacacaacatctttggctttgagaccattcctgaagagtgcgttgaagcaacaaaggaatacatccatggcgaacaatatagatcagactccaaaacagttaaccaacaagcttacttttatgccagagacc

SEQ ID NO: 66545 - DNA, 380 bp, Glycine max
gatctggcagcagaagaacaagtagttgagaactaagaaggagaagcaaatggcttcctcaatgatctcttccccagctgttaccactgtcaaccgtgccggtgccggcatggttgctccattcactggcctcaagtccatggctggcttccccaccagaaagaccaacaatgacattacctccattgctagcaacggtggaagagtgcaatgcatgcaggtgtggccaccagttggcaagaagaagtttgagactctttcctacctgccagaccttgatgatgcacaattggcaaaggaagtagaataccttcttaggaaaggatggattccttgcttggaaatcgagttggaacacggtttcgtgtaccgtgagcaca

SEQ ID NO: 66546 - DNA, 118 bp, Glycine max
  unsure (1)..(118): unsure at all n locations
ggcacaagtgagtttgttgatcgagataactagaaacagtgtgatgaaaatgaaggttcttnngtttcttcgtgctacaattttggtagcatgggcatgccatgcgtacgatatgttc

SEQ ID NO: 66547 - DNA, 406 bp, Glycine max
gaaggtgcaagagtttgttgtgagctataagcgagtttatcgtgaggagaatatgaagttgtttgttttctttgttgctgcagtagttttggtagcatggccatgccatggcgcaggctaccaaaggttccctctccgaatgaaaactggctatggtgagcgttcttcggaggtaaaatgcgcaagttttaggcttgctgtggaagcacacaacatccgagcctttaaaaccattcctgaagagtgcgttgaaccaacaaaggactacattaatggcgaacaatttagatcagactctaaaacaggtaaccaacaagctttcttttatgctagtgaacgcgaagttcatcacaacgacttatttatattcggcatagataacaccgtactctctaatattccatac

SEQ ID NO: 66548 - DNA, 294 bp, Glycine max
ggtgcacaagtgagtttgttgatcgagataactagaaacagtgtgatgaaaatgaaggtccttgttttcttcgttgctacaattttggtagcatggcaatgccatgcgtacgatatgttccctctccgaatgaacactggctatggtgcccgtactccggaggtgaaatgcgcaagttggaggcttgctgtggaagcacacaacatctttggctttgagaccattcctgaagagtgcgttgaagcaacaaaggaatacatccatggcgaacaatatagatcagactgcaaaaca

SEQ ID NO: 66549 - DNA, 314 bp, Glycine max
ggcacaagtgagtttgttgatcgagataacgtagaaacagtgtgatgaaaatgaaggtccttgttttcttcgttgctacaattttggtagcatggcaatgccatgcgtacgatatgttccctctccgaatgaacactggctatggtgcccgtactccggaggtgaaatgcgcaagttggaggcttgctgtggaagcacacaacatctttggctttgagaccattcctggaagagtgcgttgaagcaacaaaggaatacatccatggcgaacaatatagatcagactccaaaacagttaaccaacaagcttactt

SEQ ID NO: 66550 - DNA, 77 bp, Glycine max
aggaaatcgagacatgtcagtaatggagaggatgaagatgttcgcagtgcaagaaccatgagtctccttgttctgtt

SEQ ID NO: 66551 - DNA, 118 bp, Glycine max
tggcttatgatgatcatataattatcttagcggatttcagtgagatttctatcaatgacctgattgttacacacactgaagcctatgaaaaaaatttttatttatgataaattaaaaa

SEQ ID NO: 66552 - DNA, 83 bp, Glycine max
ggcacaagtgaatttggtgatcgagataactagaaacagtgttatgaaaattaaaggccctggtttctttcgtggtacaattt

SEQ ID NO: 66553 - DNA, 406 bp, Glycine max
gagcagaagaacaagtagttgagaactaagaaggagaagcaaatggcttcctcaatgatctcttccccagctgttaccactgtcaaccgtgccggtgccggcatggttgctccattcactggcctcaagtccatggctggcttccccaccaggaagaccaacaatgacattacctccattgctagcaacggtggaagagtgcaatgcatgcaggtgtggccaccagttggcaagaagaagtttgagactctttcctacctgccagaccttgatgatgcacaattggcaaaggaagtagaataccttcttaggaagggatggattccttgcttggaattcgagttggagcacggtttcgtgtaccgtgagcacaacaggtcaccaggatactacgatggacgctact

SEQ ID NO: 66554 - DNA, 419 bp, Glycine max
  unsure (1)..(419): unsure at all n locations
gaaggtgcaagagtttgttgtgagctataagctagtttatcgtgaggagaatatgaagttgtttgttttctttgttgctgcagtagttttggtagcatggccatgccatggcgcaggctaccaaaggttccctctccgaatgaaaactggctatggtgagcgttcttcggaggtaaaatgcgcaagttttaggcttgctgtggaagcacacaacatccgagcctttaaaaccattcctgaagagtgcgttgaaccaacaaaggactacattaatggcgaacaatttagatcagactctaaaacagttaaccaacaagctntcttttatgctagtgaacgcgaagtccatcacaacgacatatttatattcggcatagataacaccgtactctctaatatcccatactatgaaaaacatg

SEQ ID NO: 66555 - DNA, 419 bp, Glycine max
ggagtttgttgatcgagataactagagacagggtgatgaaaatgaaggtccttgttttcttcgttgctacaattttggtagcatggcaatgccatgcgtacgatatgttccctctccgaatgaacactggctatggtgcccgtactccggaggtgaaatgcgcaagttggaggcttgctgtggaagcacacaacatctttggctttgagaccattcctgaagagtgcgttgaagcaacagaggaatacatccatggcgaacaatatagatcagactccaaaacagttaaccaacaagcttacttttatgccagagacctcgaagtccatcccaaggacacatttgtgttcagtatagatggcaccgtactctctaatattccatactacaaaaaacatggatatggggtggagaaattt

SEQ ID NO: 66556 - DNA, 273 bp, Glycine max
caccaaggttgctcctcttgggcactggcatattttttctttcacccttaaattcattaattttcatacccattgaaccttcttttaacaatccataatcaaatttcccacctacccaccaatggcttaaaaactttcccaatttcatttttttttacaccaacattttacgggccacaaccttacagacgttaaaaatattataccattattcaaccatattctttaaaacaactggtttacaacccactttattattgaccatttttttaa

SEQ ID NO: 66557 - DNA, 208 bp, Glycine max
actttatgggttatcgttattcattgtgcattatgcaatgggcaccacagcaactctattctgaaccattgtgagcaccttcttcatgaggaagcaacctatgactaccaatagcctaaagacatttcccaacgctctttttggtctgaaatgtggaccaagtggtcgtgtaacttgcattgtctcttacaaagtgaagctcataacc

SEQ ID NO: 66558 - DNA, 411 bp, Glycine max
ggcacaagtgagtttgttgatcgagataactagaagcagtgtgatgaaaatgaaggtccttgttttcttcgttgctacaattttggtagcatggcaatgccatgcgtacgatatgttccctctccgaatgaacactggctatggtgcccgtactccggaggtgaaatgcgcaagttggaggcttgctgtgggagcacacaacatctttggctttgagaccattcctgaagagtgcgttgaagcaacaaaggaatacatccatggcgaacaatatagatcagactccaaaacagttaaccaacaagcttacttttatgccagagacctcgaagtccatcccaaggacacatttgtgttcagtatagatggcaccgtactctctaatattccatactacaaaaaacatggata

SEQ ID NO: 66559 - DNA, 394 bp, Glycine max
  unsure (1)..(394): unsure at all n locations
ggcacaagtgagtttgttgatcgagataactagaaacagtgtgatgaaaatgaaggtccttgttttcttcgttgctacaattttggtagcatggcaatgccatgcgtacgatatgttccctctccgaatgaacactggctatggtgcccgtactccggaagtgaaatgcgcaagttggaggcttgctgtggaagcacacaacatctttggctttgagaccattcctgaagagtgcgttgaagcaacanaggaatacatccatggcgaacaatatagatcagaccccaaaacagttaaccaacaagcttacttttatgccagagacctcgaagtccatcccaaggacacatttgtgttcagtataagatgcaccgtactctctaatatttcatac

SEQ ID NO: 66560 - DNA, 428 bp, Glycine max
  unsure (1)..(428): unsure at all n locations
gataccaaaaacaaaacacaagccaagtgaaagtgagaaaaaataaaaatcaaagagcataatgtcagggatcattcacaagattggggagacccttcatgtgggagggcacaagaaggaggaggagcataagggtgagcaccatgctggagaatacaaaggggagcaccatggtgaacacagtagtgagtacaaaggagagcatcatggtgaacacaaagctggagagtaccatggtgagcacaagccagagcacatagaggggttcctagacaaagtcaaggacaagatccatggtgagggcggcgccgncgagggcgagaagaagaagaaggagaagaagaagaaagagcatggccatgagcatggccatgacagcagcagcaacagtgacagtgattaaactgctgcatcacctatatatttaa

SEQ ID NO: 66561 - DNA, 419 bp, Glycine max
  unsure (1)..(419): unsure at all n locations
ggttctagtgtgtgattgtttgttgttgtaactcgttcttcttcttttgttgttctgtgtttgtgtttgttttttctctcacctgaaaatgtcttgctgcggtggtaactgtggttgcggaagctcctgcaagtgcggcaacggctgcggaggctgcaagatgtacccagacttgagctacactgagtcaaccaccaccgagaccttggtcatgggagtggcacctgttaaggctcaatttgagggtgctgaaatgggtgtgcccgctgagaacgatggctgcaaatgtggaccaaactgctcctgcaaccnctgcacttgcaagtgangtgttgggagagcaagcttcaagcagagatagcccttaattaggaataatgataactattaatgtgtagctaaaacttatgaatatggct

SEQ ID NO: 66562 - DNA, 286 bp, Glycine max
ctccaccatcagcatcacatgatctagacaacccattgcgtcttgggcacctattactcccttctgccaatggccaattcaacaacttcacccacaatcactgttgtcctcatctccagcgttcccaaaccacactgaaagcataggactctgcactccataacaggtcctaaactcacccacaggatctactgctcagaacctttcaacatcactagatccaccagccttcactaaacagttgtatctatcaaacgctctcaccaacaactatcaaacattaact

SEQ ID NO: 66563 - DNA, 419 bp, Glycine max
gatccaatccaattgaattctccagagagaagaagaaacttaatcgatcatcacttcacttcactaatacatcatggcagacgagacccagaacaagtatgagagctctgaggttgaagtccaggatcgtggtgtttttgactttctcggtaagaaaaaggatgaagaagacaagcctcatcctcaggaggaggtcatcgccaccgagtttcaaaaagtcactgtctcagaccaaggagagaacaagcacagcctcttagaaaagcttcaccgatctgacagcagctctagctcttcaagtgaggaggaaggagaagatggagagaaaaggaagaagaagaagaaggaaaagaaagggctgaaagagaagatcgaggagaaaatagagggtgatcatcatcatcacaaggatgaggaca

SEQ ID NO: 66564 - DNA, 348 bp, Glycine max
gatctggcagcagaaaaacaagtagttgagaactaagaagaaggaaatggcttcctcaatgatctcctccccagctgttaccaccgtcaaccgtgccggtgccggcatggttgctccattcaccggcctcaaatccatggctggcttccccacgaggaagaccaacaatgacattacctccattgctagcaacggtggaagagtacaatgcatgcaggtgtggccaccaattggcaagaagaagttcgagactctttcctacttgccagacctcgatgatgcccaattggcaaaggaagtccgataccttctaaggaaaggatggattccttgcttggaattcgagtt

SEQ ID NO: 66565 - DNA, 397 bp, Glycine max
gatctggcagcagaagaacaagtagttgagaactaagaaggagaagcaaatggcttcctcaatgatctcttccccagctgttaccactgtcaaccgtgccggtgccggcatggttgctccattcactggcctcaagtccatggctggcttccccaccagaaagaccaacaatgacattacctccattgctagcaacggtggaagagtgcaatgcatgcaggtgtggccaccagttggcaagaagaagtttgagactctttcctacctgccagaccttgatgatgcacaattggcaaaggaagtagaataccttcttaggaagggatggattccttgcttggaattcgagttggagcacggtttcgtgtaccgtgagcacaacaggtcaccaggatac

SEQ ID NO: 66566 - DNA, 201 bp, Glycine max
gaattgcgctataatttgttgaatcaaaaaaaaaaaaaaaagcggacgatatagcggacgctctataggatccaagtttatgtaagcttgcatgcaacgtattatgtcttctatagtgaaaccatagtccaattctttagaccgtcgttttataacaaaaccattgggaaacccatgttattccccatgtaaatcatcttg

SEQ ID NO: 66567 - DNA, 353 bp, Glycine max
gatctggcagcagaagaacaagtagttgagaactaagaaggagaagcaaatggcttcctcaatgatctcttccccagctgttaccactgtcaaccgtgccggtgccggcatggttgctccattcactggcctcaagtccatggctggcttccccaccagaaagaccaacaatgacattacctccattgctagcaacggtggaagagtgcaatgcatgcaggtgtggccaccagttggcaagaagaagtttgagactctttcctacctgccagaccttgatgatgcacaattggcaaaggaagtagaataccttcttaggaagggatggattccttgcttggaattcgagttgg

SEQ ID NO: 66568 - DNA, 86 bp, Glycine max
tcaaacgaagaaaggcttatggtggatacctaggcacccagagacgaggaagggtgtagtaagcgacgaaatgcttcggggagttg

SEQ ID NO: 66569 - DNA, 408 bp, Glycine max
gggcagcagaagaacaagtagttgagaactaagaaggagaagcaaatggcttcctcaatgatctcttccccagctgttaccactgtcaaccgtgccggtgccggcatggttgctccattcactggcctcaagtccatggctggcttccccaccaggaagaccaacaatgacattacctccattgctagcaacggtggaagagtgcaatgcatgcaggtgtggccgccagttggcaagaagaagtttgagactctttcctacctgccagaccttgatgatgcacaattggcaaaggaagtagaataccttcttaggaagggatggattccttgcttggaattcgagttggagcacgggttcgtgtaccgtgagcacaacaggtcaccaggatactacgatgggcgctac

SEQ ID NO: 66570 - DNA, 356 bp, Glycine max
ggcacgtgggaatgggatcagttcatcgaactaggccagcatgcaaaagaaaaaactcattccctcctagtagaggaagcatcaagaggaaaatattcatcttcatatgtggaaagataaggcaacgcatccttgcttatatggtcagctcaacttagcaagccattaatctctttgtttaaaaccaaagaatgctatacgtatctgcttcatatatattccagttgccatgttgtatctacatacgtgacagtacatatttaactaactacctcttgtgtgtgtctgatcgtaagagtttctcatggaacatgtaatatttctttactaaataaatgaagctatttcttattttc

SEQ ID NO: 66571 - DNA, 389 bp, Glycine max
ggtttgattgtttgttgttgtaactcgttcttgttctttggttgttctgtgtttgtgtttgttttttctctcacctgaaaatgtcttgctgcggtggtaactgtggttgccgaagctcctgcaagtgcggcaacggctgcggaggctgcaagatgtacccagacttgagctacactgagtcaaccaccaccgagaccttggtcatgggagtggcacctgttaaggctcaatttgagggtgctgaaatgggtgtgcccgctgagaactatggctgctaatgtggaccatactgctcctgcaacccctgcacttgcaagtgaagcgttgggagagcaagcttcaagcatacatagcccttaattaggaataatgatcaactattaatgtgt

SEQ ID NO: 66572 - DNA, 394 bp, Glycine max
attcccggggtcgactccaacgcgtctcgtacgtgcttgtcgagaagaacgacacgaaggggtacctgtgctgtcgagaagactgacacgaagggagtacgcgtgtcgagaaagacgacacgaaaggggggtgcacacagtgaagttttgttgatacgagagtaactatgaaacacgtgttgatgaaaaatgtaaggtcccttggtgtttcttcgttggctacacatattttggtagcattgtgcaattgccatactgtaccgaatatgtgtccctcttccgtaatgaactactggctttatgtgtgcccgtacttccggaaggtgaaattgcgcacagttgtgaggctttgctgttggaagcaccacccatcatctttggctttttgagacca

SEQ ID NO: 66573 - DNA, 253 bp, Glycine max
  unsure (1)..(253): unsure at all n locations
ggtgtgattgtttgttgttgtaactcgttcttcttcttttgttgttctgtgtttgtgtttgttttttctctcacctgaaaatgtcttgctgctgtggtaactgtggttgcggaagctcctgcaagtgcggcaacggctgcngaggctgcaagatgtacccagacttgagctacactgagtcaaccaccaccgagaccttggtcatgggagtggcacctgttaaagctcaatttgaaggtgctgaaatgggtgt

SEQ ID NO: 66574 - DNA, 410 bp, Glycine max
gtggcagcagaagaacaagtagttgagaactaagaaggagaagcaaatggcttcctcaatgatctcttccccagctgttaccactgtcaaccgtgccggtgccggcatggttgctccattcactggcctcaagtccatggctggcttccccaccaggaagaccaacaatgacattacctccattgctagcaacggtggaagagtgcaatgcatgcaggtgcggccaccagttggcaagaagaagtttgagactctttcctacctgccagaccttgatgatgcacaattggcaaaagaagtagaataccttcttaggaagggatggattccttgcttggaattcgagttggagcacggtttcgtgtaccgtgagcacaacaggtcaccaggatactacgatggacgctact

SEQ ID NO: 66575 - DNA, 170 bp, Glycine max
ggcacaagtgagtttgttgatcgagataactagaaacagtgtgatgaaaatgaaggtccttggtttcttcgttgctacaattttggtagcatggcaatgccatgcgtacgatatgttccctcttcgaatgaacgcttgctattgtgcccgtacttcggaagtgaaatgtg

SEQ ID NO: 66576 - DNA, 197 bp, Glycine max
cacgcactttgaggttctggctaaggttgatggggataaagttgtgccagagaaagttatgccggtgaaacctgttattgcggtggatagtgtggcggagaatttgctcactcggaatgcgtccatgtccaagacacaagttcatcctccacccgaccccttttacttgtaatttgtggaaaggaaaagggattatt

SEQ ID NO: 66577 - DNA, 158 bp, Glycine max
tcttagcgaaagaaatgtccttggtttcaaacgtgttctgttgttgaacttctaatgccgcgtctcaagccatgggaattggaaggagaagcgattgtggattgaccataatgtcttcctctaggccgcataagaaagccactgcgcatcacattaat

SEQ ID NO: 66578 - DNA, 394 bp, Glycine max
  unsure (1)..(394): unsure at all n locations
gtgattcattagatagagaagtcgtgaaaagttgtccgcgagaaagaaggacgcgactcctctctagcctagcaccctttccctcaaacctgagaacaggcatctcagaaggaaagtttttgaactttcgggcgatgtccttactaaaggaccggataagcagctagatcgattcctaacagattggaaaatctttctttgcttaaaacacaggagagctaactcgatgatcgaccaagccattcaatggcatcggtttttcctaagcctcaaagactggcacctncttcagattctagaaaagaaagtagaagaccaggattaacaaaccagacctaacctagttccccttcttttacctcaagcctaaggagaagatcggtacatcgattca

SEQ ID NO: 66579 - DNA, 399 bp, Glycine max
ggttctagtgtatgtgattgttgtgactcgttcttcttcgtcgttatcttcttcttttgttgtttgtgtgtttgttttttctctcacctgaaaatgtcttgctgcggtggtaactgtggttgcggaagcgcctgcaagtgcggcaacggctgcggaggctgcaagatgtacccagacttgagctacaccgagtcaaccaccaccgagaccttggtcatgggagcggcaccagttaaggctcaattcgagagtgctgaaatgggtgttcccgctgagaacgatggctgcagatgtggagctaactgcacctgcaacccctgcacttgcaagtgaggtgttggagagctaaagcttcaagcagagatggcccttagaaataatgataaaaactatatgtag

SEQ ID NO: 66580 - DNA, 246 bp, Glycine max
ggcacaagtgagtttgttgatcgagataactagaaacagtgtgatgaaaatgaaggtccttggtttcttcgttgctacaattttggtagcatggcaatgccatgcgtacgatatgttccctcttcgaatgaacactggctatggtgcccgtactccggaggtgaaatgcgcaagttggaggcttgctgtggaagcacacaacatctttggctttgagaccattcctgaagagtgcgttgaagcaac

SEQ ID NO: 66581 - DNA, 319 bp, Glycine max
tggtactctccttcactcttaaacgttgaggtaaactttccacaagttttcctttttctaatatcctacaccaggaaacattattctacacacattatgattcaaacaaaagttttatgtagaacatctctcccaaaattaatatccatgaatactacacacatccattgtaagataacaaccgattctgcactctctggactagcatctataactattctccaattttacacacattacacacctgtactcatcaaatccccaaaactacagcttcgcatgatcattggctacatagactttcactccatactatatt

SEQ ID NO: 66582 - DNA, 399 bp, Glycine max
ggcacaagtgagtttgttgatcgagatagctagaaacagtgtgatgaaaatgaaggtccttgttttcttcgttgctacaattttggtagcatggcaatgccatgcgtacgatatgttccctctccgaatgaacactggctatggtgcccgtactccggaggtgaaatgcgcaagttggaggcttgctgtggaagcacacaacacctttggctttgagaccattcctgaagagtgcgttgaagcaacaaaggaatacatgcatggcgaacaatatagatcagactccaaaacagttaaccaacaagcttacttttatgccagagacctcgaagtccaccccaaggacacatttgtgttcagtatagatggcaccgtactctctaatattccatactacag

SEQ ID NO: 66583 - DNA, 59 bp, Glycine max
ggtatttggggtttaggaaaaaggtgaagggcgaagacacgttcttctctcaagtgccg

SEQ ID NO: 66584 - DNA, 415 bp, Glycine max
  unsure (1)..(415): unsure at all n locations
ggcacaagtgaattttggtgatcggggatacttagaaacagtggtgatgaaaaggaaggtcctttgttttcttcgntgctacaattttggtagcatggcaatgccatgcgtacgatatgttccctctccgaatgaacactggctatggtgcccgtactccggaggtgaaatgcgcaagttgggaggcttgctgtggaagcacacaacatctttggctttgagaccattcctgaagagtgcgttgaagcaacanaggaatacatccatggcgaacaatatagatcagactccaaaacagttaaccaacaagcttacttttatgccagagacctcgaagtccatcccaaggacacatttgtgttcagtatagatggcaccgtactctctaatattccatactacaaaaaacatggat

SEQ ID NO: 66585 - DNA, 409 bp, Glycine max
ggcacaagtgagtttgttgatcgagataactagaaacagtgtgatgaaaatgaaggtccttgttttcttcgttgctacaattttggtagcatggcaatgccatgcgtacgatatgttccctctccgaatgaacactggctatggtgcccgtactccggaggtgaaatgcgcaagttggaggcttgctgtggaagcacacaacatctttggctttgagaccattcctgaagagtgcgttgaagcaacaaaggaatacatccatggcgaacaatatagatcagactccaaaacagttaaccaacaagcttacttttatgccagagacctcgaagtccatcccaaggacacatttgtgttcagtatagatggcaccgtactctctaatattccatactacaaaaaacatgga

SEQ ID NO: 66586 - DNA, 398 bp, Glycine max
ccaaataaatttttcttttcctatgttaaaaaaggaaaaaaaaaaaaaaaaaaaaaaaaaaaaaaaaaaaaaacaaaaaaaaaaaaaaaaaaaaaaaaaaaaaaataaaaaaaaaaaaaaaaaaaaaaaaaaataaaaaaaaaaaaaaaaaaaaaaacccctaaaaaaaaaaaaaaaaaaaaaaaaaaatgccccctttttaaaacatccatttttttaccccattactacacaataatacttttttttataagaccaccaaattatactccttctccattattttaaaaaattataccttaaaaaacccttggcttccccctttttttaccctttttaaaaaatcccttttttccaaatgggctaaataccaaatatccccatccaaacttcctttc

SEQ ID NO: 66587 - DNA, 282 bp, Glycine max
tctcggaattcccgacgcgtgcgaccctgcgggaggactacgactacacacgggactatagctcaagagcgtcgtcaataaacctaagagcgtgaaatttccaacgaagaacgccaaagctaaaaagtcaacgattgtagagagctgtacttcaccgtcatagtgattatgtctttcaggttgaatcggatcataagtcgatatattaatagaacaatattgatgaaacttcctttgatagaaactttatcaacatatcttttttagcatctaaccagaccc

SEQ ID NO: 66588 - DNA, 261 bp, Glycine max
tcccgacccacgcgacccctcgggcctcacctgctacaacacgaccataacaacaaatgggtacactaaaaacatcacgtacgattttctcactaatatcttacaacgaaaccctcctaaccacatctatttatcaacaacattacgtgcccaataacaaatttattctatgattaacacctgctttcctccacggactatcggcaattgccctaccaaaaacccttttttcttctaaaacccacaacacttgtaaccttt

SEQ ID NO: 66589 - DNA, 201 bp, Glycine max
gattgaaatactgatcttacattgggcttactcatgtatgaccacgaaaccctctttatcacgatctatctgtgacgagcatgatgggcttacgagcagtgttattgttggctgtacacttgctatcggggatggacttgggcattcaaacagccaagaaccctgtttgctttaaaggtccagtatactgtgacctttgac

SEQ ID NO: 66590 - DNA, 377 bp, Glycine max
taccggtgcggggagaccaccaaatgggggccgcagaagaaccagtagttgagaactaagaaggagaagcaaatggcttcctcaatgatctcttccccagctgttaccactgtcaaccgtgccggtgccggcatggatgctccattcactggcctcaagtccatggctggcttccccaccaggaagaccaacaatgacattacctccattgctagcaacggtggaagagtgcaatgcatgcaggtgtggccaccagttggcaagaagaagtttgagactctgtcctacctgccagaccttgatgatgcacaattggcaaaggaagtagaataccttcttaggaaaggatggattccttgcttggaattcgagttgga

SEQ ID NO: 66591 - DNA, 422 bp, Glycine max
gatctggcagcagaagaacaagtagttgagaactaagaaggagaagcaaatggcttcctcaatgatctcttccccagctgttaccactgtcaaccgtgccggtgccggcatggttgctccattcactggcctcaagtccatggctggcttccccaccagaaagaccaacaatgacattacctccattgctagcaacggtggaagagtgcaatgcatgcaggtgtggccaccagttggcaagaagaagtttgagactctttcctacctgccagaccttgatgatgcacaattggcaaaggaagtagaataccttcttaggaagggatggattccttgcttggaattcgagttggagcacggtttcgtgtaccgtgagcacaacaggtcaccaggatactacgatggacgctactggaccatgt

SEQ ID NO: 66592 - DNA, 398 bp, Glycine max
gataccaaaaacaaaacacaagccaagtgaaagtgagaaaaaataaaaatcaaagagcataatgtcagggatcattcacaagattggggagacccttcatgtgggagggcacaagaaggaggaggagcataagggtgagcaccatgctggagaatacaaaggggagcaccatggtgaacacagtagtgagtacaaaggagagcatcatggtgaacacaaagctggagagtaccatggtgagcacaagccagagcacaaagaggggttcctagacaaagtcaaggacaagatccatggtgagggcggcgccgccgagggcgagaagaagaagaaggagaagaagaagaaggagcatggccatgagcatggccatgacagcagcagcagcagtgacagtg

SEQ ID NO: 66593 - DNA, 407 bp, Glycine max
  unsure (1)..(407): unsure at all n locations
ggcacaagtgagttcgttgatcgagataactagaaacagtgtgatgaaaatgaaggtccttgttttcttcgttgctacaattttggtagcatggcaatgccatgcgtacgatatgttccctctccgaatgaacactggctatggtgcccgtactccggaggtgaaatgcgcaagttggaggcttgctgtggaagcacacaacatcttttggctttgagaccattcctgaagagtgcgttgaagcaacanaggaatacatncatggcgaacaatatagatcagactccaaaacagntaaccaacaagcttacttttatgccagagacctcgaagtccatcccaaggacacatttgtgttcaagatagatggcaccgtactctctaatattccatactacaaaaaacat

SEQ ID NO: 66594 - DNA, 294 bp, Glycine max
tgggttctaacgactaagtttaatcatccttgaaagtcaaactgaactatattcatctcgtatctactaaagcaattggaaagcacaacccttctatattttccaatattacctccgcttactcccaacataaaacctcctctatttacattaataatttgacttctataacccaagccttacatttaaacctcaagcccaacctttaccatacacttccttattttctttcttaacataccctttttatttcctattactccaacttttattccctttccgattcctcttcca

SEQ ID NO: 66595 - DNA, 400 bp, Glycine max
gatctggcagcagaaaaacaagtagttgagaactaagaagaaggaaatggcttcctcaatgatctcctccccagctgttaccaccgtcaaccgtgccggtgccggcatggttgctccattcaccggcctcaaatccatggctggcttccccacgaggaagaccaacaatgacattacctccattgccagcaacggtggaagagtacaatgcatgcaggtgtggccaccaattggcaagaagaagttcgagactctttcctacttgccagacctcgatgatgcccaattggcaaaggaagtcgaataccttctaaggaaaggatggattccttgcttggaattcgagttggagcgcggtttcgtgtaccgtgagcacaacaggtcacctggatactatgat

SEQ ID NO: 66596 - DNA, 67 bp, Glycine max
gaacagataaaaagagagggggttggggaatttgattaaacaaattgaatttcttcaattaacttac

SEQ ID NO: 66597 - DNA, 406 bp, Glycine max
ggcacaagtgagtttgttgatcgagataactagaaacagtgtgatgaaaatgaaggtccttgttttcttcgttgctacaattttggtagcatggcaatgccatgcgtacgatatgttccctctccgaatgaacactggctatggtgcccgtactccggaggtgaaatgcgcaagttggaggcttgctgtggaagcacacaacatctttggctttgagaccattcctgaagagtgcgttgaagcaacaaaggaatacatccatggcgaacaatatagatcagactccaaaacagttaaccaacaagcttacttttatgccagagacctcgaagtccatcccaaggacacatttgtgttcagtatagatggcaccgtactctctaatattccatactacaaaaaacat

SEQ ID NO: 66598 - DNA, 87 bp, Glycine max
cctaaggctacgctgtgagaagacaacacaaaggggcgcgtgtgagatgacaacacaatggtacagatgcgagaggacgacacaggg

SEQ ID NO: 66599 - DNA, 316 bp, Glycine max
ggcacaagtgagtttgttgatcgagataactagaaacagtgtgatgaaaatgaaggtccttgttttcttcgttgctacaattttggtagcatggcaatgccatgcgtacgatatgttccctctccgaatgaacactggctatggtgcccgtactccggaggtgaaatgcgcaagttggaagcttgctgtggaagcacacaacatctttggctttgagaccattcctgaagagtgcgttgaaacaacaaaggaatacatccatggcgaacaatatagatcagacttccaaacagttaaccaacaagcttacttttat

SEQ ID NO: 66600 - DNA, 412 bp, Glycine max
gaaggtgcaagagtttgttgtgagctataagctagtttatcgtgaggagaatatgaagttgtttgttttctttgttgctgcagtagttttggtagcatggccatgccatggcgcaggctaccaaaggttccctctccgaatgaaaactggctatggtgagcgttcttcggaggtaaaatgcgcaagttttaggcttgctgtggaagcacacaacatccgagcctttaaaaccattcctgaagagtgcgttgaaccaacaaaggactacattaatggcgaacaatttagatcagactctaaaacagttaaccaacaagctttcttttatgctagtgaacgcgaagtccatcacaacgacatatttatattcggcatagataacaccgtactctctaatatcccatactatgaa

SEQ ID NO: 66601 - DNA, 52 bp, Glycine max
tatacgtgcgaataagccaagacaagataaaaagcggccgctctagaggatc

SEQ ID NO: 66602 - DNA, 388 bp, Glycine max
gatctggcagcagaagaacaagtagttgagaactaagaaggagaagcaaatggcttcctcaatgatctcttccccagctgttaccactgtcaaccgtgccggtgccggcatggttgctccattcactggcctcaagtccatggctggcttactcaccagaaagaccaacaatgacattacctccattgctagcaacggtggaagagtgcaatgcatgcaggtgtggccaccagttggcaagaagaagtttgggactctgtcctacctgccagaccttgatgatgcacaattggcaaaggaagtagaataccttcttaggaagggatggattccttgcttgaaattcgagttggagcacggtttcgtgtaccgtgagcacaacaggtca

SEQ ID NO: 66603 - DNA, 77 bp, Glycine max
tggtgaaaattctagtataaacaaaaaacgaaaaaaattttaaaaagcggccgctctagaggatccaaagctacgta

SEQ ID NO: 66604 - DNA, 409 bp, Glycine max
  unsure (1)..(409): unsure at all n locations
ggcacaagtgagtttgttgatcgagataactagaaacagtgtgatgaaaatgaaggtccttgttttcttcgttgctacaattttggtagcatggcaatgccatgcgtacgatatgttccctctccgaatgaacactggctatggtgcccgtactccggaggtgaaatgcgcaagttggaggcttgctgtggaagcacacaacatctttggctttgagaccattcctgaagagtgcgttgaagcaacaaaggaatacatccatggcgaacaatatagatcagactccaaaacagttaaccaacaagcttacttttatgccagagacctcgaagtccatcccaaggacacatttgtgttcagtatagatggcaccgtactctctaatattccatactacaaanaacatgga

SEQ ID NO: 66605 - DNA, 294 bp, Glycine max
gacaggcaggcaccaatcgaggttctgatttctcagcactgagcactcttaaaaccaataacggtgaaccaaactaacaaaaccatccatcatcatcatcatcgacatcaacaatctcacttttctctcttttttttctcattaaaatataaattgctctcttgtctccctcttcacccactaaccctcgatcctcatccacctctctcagttcccttccatcaagtttcgatctggatccactttttccacacccaatatttcctattccaacccctttattcatctccacgt

SEQ ID NO: 66606 - DNA, 408 bp, Glycine max
gacaagtgagtttgttgatcgagataactagagacagtgtgatgaaaatgaaggtccttgttttcttcgttgctacaattttggtagcatggcaatgccatgcgtacgatatgttccctctccgaatgaacactggctatggtgcccgtactccggaggtgaaatgcgcaagttggaggcttgctgtggaagcacacaacatctttggctttgagaccattcctgaagagtgcgttgaagcaacataggaatacatccatggcgaacaatatagatcagactccaaaacagttaaccaacaagcttacttttatgccagagacctcgaagtccatcccaaggacacatttgtgttcagtatagatggcaccgtactctctaatattccatactacagaaaacatggat

SEQ ID NO: 66607 - DNA, 316 bp, Glycine max
ggcacaagtgagtttgttgatcgagataactagaaacagtgtgatgaaaatgaaggtccttgttttcttcgttgctacaattttggtagcatggcaatgccatgcgtacgatatgttccctctccgaatgaacactggctatggtgcccgtactccggaggtgaaatgcgcaagttggaggcttgctgtggaagcacacaacatctttggctttgagaccattcctgaagagtgcgttgaagcaacaaaggaatacatccatggcgaacaatatagatcagacttcaaaacagttaaccaacaagcttacttttat

SEQ ID NO: 66608 - DNA, 411 bp, Glycine max
ggcacaagtgagtttgttgatcgagataactagaggcagtgtgatgaaaatgaaggtccttgttttcttcgttgctacaattttggtagcatggcaatgccatgcgtacgatatgttccctctccgaatgaacactggctatggtgcccgtactccggaggtgaaatgcgcaagttggaggcttgctgtggaagcacacaacatctttggctttgagaccattcctgaagagtgcgttgaagcaacgaaggaatacatccatggcgaacaatatagatcagactccaaaacagttaaccaacaagcttacttttatgccagagacctcgaagtccatcccaaggacacatttgtgttcagtatagatggcaccgtactctctaatattccatactacaaaaaacatggata

SEQ ID NO: 66609 - DNA, 423 bp, Glycine max
  unsure (1)..(423): unsure at all n locations
ggcacaagtgagtttgttgatcgagataactagaaacagtgtgatgaaaatgaaggtccttgttttcttcgttgctacaattttggtagcatggcaatgccatgcgtacgatatgttccctctccgaatgaacactggctatggtgcccgtactccggaggtgaaatgcgcaagttggaggcttgctgtggaagcacacaacatctttggctttgagaccattcctgaagagtgcgttgaagcaacaaaggaatacatccatggcgaacaatatagatcagactccaaaacagttaaccaacaagcttacttttatgccagagacctcgaagtccatcccaaggacacatttgtgttcagtatagatggcaccgtactctctaatattccatactacaaaaaacatggatatggngtggagaa

SEQ ID NO: 66610 - DNA, 418 bp, Glycine max
  unsure (1)..(418): unsure at all n locations
gaaggtgcaagagtttgttgtgagctataagctagtttatcgtgaggagaatatgaagttgtttgttttctttgttgctgcagtagttttggtagcatggccatgccatggcgcangctaccaaaggttccctctccgaatgaaaactggctatggtgagcgttcttcggaggtaaaatgcgcaagttttaggcttgctgtggaagcacacaacatccgagcctttaaaaccattcctgaagagtgcgttgaaccaacaaaggactacattaatggcgaacaatttagatcagactctaaaacagttaaccaacaagctttcttttatgctagtgaacgcgaagtccatcacaacgacatatttatattcggcatagataacaccgtactctctaatatcccatactatgaaaaacat

SEQ ID NO: 66611 - DNA, 408 bp, Glycine max
ggcagcagaagaacaagtagttgagaactaagaaggagaagcaaatggctccctcaatgatctcttccccagctgttaccactgtcaaccgtgccggtgccggcatggttgctccattcactggcctcaagtccatggctggcttccccaccaggaagaccaacaatgacattacctccattgctagcaacggtggaagagtgcaatgcatgcaggtgtggccaccagttggcaagaagaagtttgagactctttcctacctgccagaccttgatgatgcacaattggcaaaggaagtagaataccttcttaggaagggatggattccttgcttggaattcgagttggagcacggtttcgtgtaccgtgagcacaacaggtcaccaggatactacgatggacgctact

SEQ ID NO: 66612 - DNA, 412 bp, Glycine max
ggcacaagtgagtttgttgatcgagataactaggaacagtgtgatgaaaatgaaggtccttgttttcttcgttgctacaattttggtagcatggcaatgccatgcgtacgatatgttccctctccgaatgaacactggctatggtgcccgtactacggaggtgaaatgcgcaagttggaggcttgctgtggaagcacacaacatctttggctttgagaccattcctgaagagtgcgttgaagcaacaaaggaatacatccatggcgaacaatatagatcagactccaaaacagttaaccaacaagcttacttttatgccagagacctggaagtccatcccaaggacacatttgtgttcagtataaatggcaccgtactctctaatattccatactacaaaaaacatggatat

SEQ ID NO: 66613 - DNA, 415 bp, Glycine max
ggcagttcaattccaatatattccattctctctgggtatttccctacctctcccttcaagatgcagatcttcgtcaagaccctcaccggcaagaccatcacccttgaggtggaaagctctgacaccatcgacaacgtcaaggccaagatccaggacaaggaaggaatccccccggaccagcaacgtctcattttcgccggaaagcaacttgaggacggccgtacccttgctgactacaacattcagaaggagagtactcttcacctcgtcctccgtctccgtggtggcatgcagatcttcgttaagacactcaccggcaagaccataaccctagaggttgaaagctccgacaccatcgataacgtcaaggccaagatccaggacaaggagggtatccccccggaccagcaacgtc

SEQ ID NO: 66614 - DNA, 420 bp, Glycine max
ggcacaagtgagtttgttgatcgagataactagaaacagtgtgatgaaaatgaaggtccttgttttcttcgttgctacaattttggtagcatggcaatgccatgcgtacgatatgttccctctccgaatgaacactggctatggtgcccgtactccggaggtgaaatgcgcaagttggaggcttgctgtggaagcacacaacatctttggctttgagaccattcctgaagagtgcgttgaagcaacaaaggaatacatccatggcgaacaatatagatcagactccaaaacagttaaccaacaagcttacttttatgccagagacctcgaagtccatcccaaggacacatttgtgttcagtatagatggcaccgtactctctaatattccatactacaaaaaacatggatatggggtgga

SEQ ID NO: 66615 - DNA, 421 bp, Glycine max
  unsure (1)..(421): unsure at all n locations
tgcacaagtgagtttgttgatcgagataactagaaacagggtgatgaaaatgaaggtccttgttttcttcgttgctacaattttggtagcatggcaatgccatgcgtacgatatgttccctctccgaatgaacactggctatggtgcccgtactccggaggtgaaatgcgcaagttggaggcttgctgtggaagcacacaacatctttggctttgagaccattcctgaagagtgcgttgaagcaacaaaggaatacatccatggcgaacaatatagatcagactccaaaacagttaaccaacaagcttacttttatgccagagacctcgaagtccatcccaaggacacatttgtgttcagtatagatggcaccgtactctctaatattccatactacaaaaaacatggatatggngtggag

SEQ ID NO: 66616 - DNA, 406 bp, Glycine max
acagaagggggcacaagtgagtttgttgatcgagataactagaaacagtgtgatgaaaatgaaggtccttgttttcttcgttgctacaattttggtagcatggcaatgccatgcgtacgatatgttccctctccgaatgaacactggctatggtgcccgtactccggaggtgaaatgcgcaagttggaggcttgctgtggaagcacacaacatctttggctttgagaccattcctgaagagtgcgttgaagcaacaaaggaatacatccatggcgaacaatatagatcagactccaaaacagttaaccaacaagcttacttttatgccagagacctcgaagtccatcccaaggacacatttgtgttcagtatagatggcaccgtaccctctaatattccatactac

SEQ ID NO: 66617 - DNA, 93 bp, Glycine max
gaatggtccggtgaagtgttcggattgcggcgacgtgagcggttcgctgcccgcgacgttgtgagaagtctactgaaccttatcatttagagc

SEQ ID NO: 66618 - DNA, 403 bp, Glycine max
gatctggcagcagaagaacaagtagttgagaactaagaaggagaagcaaatggcttcctcaatgatctcttccccagctgttaccactgtcaaccgtgccggtgccggcatggttgctccattcactggcctcaagtccatggccggcttccccaccagaaagaccaacaatgacattacctccattgctagcaacggtggaagagtgcaatgcatgcaggtgtggccaccagttggcaagaagaagtttgagactctttcctacctgccagaccttgatgatgcacaattggcaaaggaagtagaataccttcttaggaagggatggattccttgcttggaattcgagttggagcacggtttcgtgtaccgtgagcacaacaagtcaccaagatactacgat

SEQ ID NO: 66619 - DNA, 410 bp, Glycine max
ggcacaagtgagtttgttgatcgagataactggaaacagtgtgatgaaaatgaaggtccttggtttcttcgttgctacaattttggtagcatggcaatgccatgcgtacgatatgttccctctccgaatgaacactggctatggtgcccgatactccggaggttaaatgcgcaagttgaaggcttgctgtggaagcacacaacatctttggctttgagaccattcctgaacagtgcgttgaatcaacaaaggaatacatccatggcgaacaatatagatcagactccaaaacggttaaccaactagcttacttttatgccagagacctcgaagtccatcccaaggacacatttgtgttcagtatagatggcaccgtactctctaatattccatactacaaaaaacatgga

SEQ ID NO: 66620 - DNA, 339 bp, Glycine max
aggtgtgcgaacaggtgtgagaggacgacggatgggtacggttgcgatactactactgaaggggagacatagtgtcacgcgagtgtacgcgctgagtttaggagtgaacaacaataaacatctccgattcttacaatatgaatgatacaagcttatgtacgactgcatacgacgtcttattttacgtatatcgtgacctaaggtatatgcaatggcctactgaatacaacctcttaactgtaaaaacggttattgttcccgacgtaactgcctttgaaatcatgcaaatttatgcagttgctgtagtaacgaaaatgaccgcatcgatagctgttatca

SEQ ID NO: 66621 - DNA, 471 bp, Glycine max
  unsure (1)..(471): unsure at all n locations
gggatcttggcagcaggaagaacagagtgagttgagaggcgtaagaagggntngaagcaaatgggcttcctttcaatgagtnnntcttccccagcttggttaccacttggtcaaccgttgccggttgccgtgcatggttggcttccattcaactggcnnctcaagtccaaatggctgnngcttccccaaccannggaagactcanacatatggaccattnaacctccatttgctaagcaacccgggggaaagaagtgcannnatgcattgcaaggtgtgggccactcaaagtttggcaagaaagaaaagtttgaagaactcttttccttaacctggccagaaaccttgatgaaatgcacaannttggcaaaggannagtagaataccccttcttaggaaggggatnnggattccttgctttggaaaattcgagttggagcacggggttnncgtgtacccgttgagcacaac

SEQ ID NO: 66622 - DNA, 397 bp, Glycine max
ggcacaagtgagtttgttgatcgagataactagggacagtgtgatgaaaatgaaggtccttgttttcttcgttgctacaattttggtagcatggcaatgccatgcgtacgatatgttccctctccgaatgaacactggctatggtgcccgtactccggaggtgaaatgcgcaagttggaggcttgctgtggaagcacacaacatctttggctttgagaccattcctgaagagtgcgttgaagcaacaaaggaatacatccatggcgaacaatatagatcagactccaaaacagttaaccaacaagcttacttttatgccagagacctcgaagtccatcccaaggacacatttgtgttcagtatagatggcaccgtactctctaatattccatactac

SEQ ID NO: 66623 - DNA, 418 bp, Glycine max
gataccaaaaacaaaacacaagccaagtgaaagggagaaaaaataaaaatcaaagagcataatgtcagggatcattcacaagattggggagacccttcatgtgggagggcacaagaaggaggaggagcataagggtgagcaccatgctggagaatacaaaggggagcaccatggtgaacacagtagtgagtacaaaggagagcatcatggtgaacacaaagctggagagtaccatggtgagcacaagccagagcacaaagaggggttcctagacaaagtcaaggacaagatccatggtgagggcggcgccgccgagggcgagaagaagaagaaggagaagaagaagaaggagcatggccatgagcatggccatgacagcagcagcagcagtgacagtgattaaactgctgcatcacct

SEQ ID NO: 66624 - DNA, 404 bp, Glycine max
gcacaagtgagtgtgttgatcgagataactagaaacagtgtgatgaaaatgaaggtccttgttttcttcgttgctacaattttggtagcatggcaatgccatgcgtacgatatgttccctctccgaatgaacactggctatggtgcccgtactccggaggttaaatgcgcaagttggaggcttgctgtggaagcacacaacatctttggctttgagaccattcctgaagagtgcgttgaagcaacaaaggaatacatccatggcgaacaatatatatcagactccaaaacagttaaccaacaagcttacttttatgccagagacctcgaagtccatcccaaggacacatttgtgttcagtatagatggcaccgtactctctaatattccatactacaaaaaaca

SEQ ID NO: 66625 - DNA, 414 bp, Glycine max
gatctggcagcagaagaacaagtagttgagaactaagaaggagaagcaaatggcttcctcaatgatctcttccccagctgttaccactgtcaaccgtgccggtgccggcatggttgctccattcactggcctcaagtccatggctggcttccccaccaggaagaccaacaatgacattacctccattgctagcaacggtggaagagtgcaatgcatgcaggtgtggccaccagttggcaagaagaagtttgagactctttcctacctgccagaccttgatgatgcacaattggcaaaggaagtagaataccttcttaggaagggatggattccttgcttggaattcgagttggagcacggtttcgtgtaccgtgagcacaacaggtcaccaggatactacgatggacgctactg

SEQ ID NO: 66626 - DNA, 407 bp, Glycine max
ggcacaagtgagtttgttgatcgagatggctagaaggagtgtgatgaaaatgaaggtccttgttttcttcgttgctacaattttggtagcatggcaatgccatgcgtacgatatgttccctctccgaatgaacactggctatggtgcccgtactccggaggtgaaatgcgcaagttggaggcttgctgtggaagcacacaacatctttggctttgagaccattcctgaagagtgcgttgaagcaacaaaggaatacatccatggcgaacaatatagatcagactccaaaacagttaaccaacaagcttacttttatgccagagacctcgaagtccatcccaaggacacatttgtgttcagtatagatggcaccgtactctctaatattccatactacaaaaaacatg

SEQ ID NO: 66627 - DNA, 271 bp, Glycine max
gcgcacagcctgtccgcagatgacaaaacggcaccatggggaactacagaatgacctgaccacccgtcattgggaaaaccctgatctgaatcatattttctaatcacatcccaacattggaacatgcattgaccacaatcttttgataccttctgatgcaatccttattggagaaccttatgacaccgatagccacgatttaagattcaacgatactagtctaacaccaaatctactaaatacttaaactgcttcctatacttatgactct

SEQ ID NO: 66628 - DNA, 412 bp, Glycine max
ggcacaagtgagtttgttgatcgagataacgagaaacagtgtgatgaaaatgaaggtccttgttttcttcgttgctacaattttggtagcatggcaatgccatgcgtacgatatgttccctctccgaatgaacactggctatggtgcccgtactccggaggtgaaatgcgcaagttggaggcttgctgtggaagcacacaacatctttggctttgagaccattcctgaagagtgcgttgaagcaacaaaggaatacatccatggcgaacaatatagatcagactccaaaacagttaaccaacaagcttacttttatgccagagacctcgaagtccatcccaaggacacatttgtgttcagtatagatggcaccgtactctctaatattccatactacaaaaaacatggatat

SEQ ID NO: 66629 - DNA, 124 bp, Glycine max
ggacacttatcagtaaaaacgggaaaaaaaaaaaaaaaaaagcggccgccgtactagatccaccattacgaactcctccatgctacgacgtaattcttctatatatggcacctactttcaataa

SEQ ID NO: 66630 - DNA, 116 bp, Glycine max
gaggcaaaaaaaaaacaaaaaaaaaaaaaaaaaaagcggccgttctagaggatccaaacttaagtacacgtgcatgccacgtgatagctattctatagcgtcacctaaatgcaatt

SEQ ID NO: 66631 - DNA, 418 bp, Glycine max
gatctggcagcagaagaacaagtagttgagaactgggaaggagaagcaaatggcttcctcaatgatctcttccccagctgttaccactgtcaaccgtgccggtgccggcatggttgctccattcactggcctcaagtccatggctggcttccccaccagaaagaccaacaatgacattacctccattgctagcaacggtggaagagtgcaatgcatgcaggtgtggccaccagttggcaagaagaagtttgagactctttcctacctgccagaccttgatgatgcacaattggcaaaggaagtagaataccttcttaggaagggatggattccttgcttggaattcgagttggagcacggtttcgtgtaccgtgagcacaacaggtcaccaggatactacgatggacgctactggacc

SEQ ID NO: 66632 - DNA, 359 bp, Glycine max
ggtaagagcaacatcgattaacatacatttagggagagaaggagtcatcaaccaaccatgtcggatattgccatgttggtagccgactaatatgagagaaggacaaagcattataggacgggtggtgctggcgctgttcaagagaggaatatgaacgtggtcaattgtgctaattcttatttggctctgaaggagaacattgacgtgcaaaagaaggagcttgtcaagttggttttggaacccaaaacccactttgcaatagctgcttctaacagcttattctatgcttgatcgaacatgttcagctttctgattgcaatatatatgggctgttggcaccatattgtgtgcttattttt

SEQ ID NO: 66633 - DNA, 118 bp, Glycine max
cttctgctacaagacgactacagaataccggggcgggtagactacaacaggagtataccactatcataatcctacataactagtctaatcacaaatagtctcttaattcattccatct

SEQ ID NO: 66634 - DNA, 317 bp, Glycine max
ggcacacgtgagtttgttgatcgagatagcgagaaacagtgtgatgaatatgaaggtccttgttttcttcgttgctacaattttggtagcatggcaatgccatgcgtacgatatgttccctctccgaatgaacactggctatggtgcccgtactacggaggtgaaatgcgcaagttggaggcttgctgtggaagcacacaacatctttggctttgagaccattcctgaagagtgcgttgtagcaacaaaggaatacatccatggcgaacaatatatatcagacttcaaaacagctaaccaacaagcttacttttatg

SEQ ID NO: 66635 - DNA, 196 bp, Glycine max
ttggttaccacattccaaaacacaaacacgtgcctgatactatcactattggctcggaatttgttcttttgagttatggcaagcttaaatgttgcatgtgtggttttgatatgcatggctgttatgagtgcaccaatgatggtccaagccgtgtcatgctatgatatttatgttaacctagcaccgttcctatctt

SEQ ID NO: 66636 - DNA, 229 bp, Glycine max
ttgggtcacaagtgagtttgttgatcgagagaacgggaatcagtgtgatgaaaatgaaggtccttgttttcttcgttgctacaattttggtagcatggcaatgccatgcgtacgatatgttccctctccgaatgaacactggctatggtgcccgttctccggaggtgaaatgcgcaagttgtgtgcttgctgaggaagcactcaacatctttggctttgagaccattcc

SEQ ID NO: 66637 - DNA, 101 bp, Glycine max
ttgttctagtgtatgtgattgttgtgactcggtcgtcttcgtcgatatcttcttcttctgttgtttgtgtgtttgctttttctctcacctgaaaatttctt

SEQ ID NO: 66638 - DNA, 313 bp, Glycine max
agataccgttacgatacgactacacaacgactagatagggaaacttctacaataggactacaaattaaaaaacactctctctagactatacaagcttacgtacgctatcatactacttaatattacagctatactcataccacagatcatttcaattaccaatcatttacaaaattatgactatgataactctctacaaacatactttaatctcttaatactacatcactctatgcctagttaatgcaacatcaaagatattactatcaattgatatttctaacattttcttagctttaactgcacatgctta

SEQ ID NO: 66639 - DNA, 407 bp, Glycine max
ggcacaagtgagtttgttgagcgagataactagaaacagtgtgatgaaaatgaaggtccttgttttcttcgttgctacaattttggtagcatggcaatgccatgcgtacgatatgttccctctccgaatgaacactggctgtggtgcccgtactccggaggtgaaatgcgcaagttggaggcttgctgtggaagcacacaacatctttggctttgagaccattcctgaagagtgcgttgaagcaacaaaggaatacatccatggcgaacaatatagatcagactccaaaacagttaaccaacaagcttacttttatgccagagacctcgaagtccatcccaaggacacatttgtgttcagtatagatggcaccgtactctctaatttccatactacaaaaacatgga

SEQ ID NO: 66640 - DNA, 407 bp, Glycine max
ggcacaagtgagtttgttgatcgagataaggagaaacagtgtgatgaaaatgaaggtccttgttttcttcgttgctacaattttggtagcatggcaatgccatgcgtacgatatgttccctctccgaatgaacactggctatggtgcccgtactccggaggtggaatgcgcaagttggaggcttgctgtggaagcacacaacatctttggctttgagaccattcctgaagagtgcgttgaagcaacaaaggaatacatccatggcgaacaatatagatcagacttcaaaacagttaaccaacaagcttacttttatgccagagacctcgaagtccatcccaaggacacatttgggttcagtataaattgcaccgtactctctaatattccatactaccaaaaacatg

SEQ ID NO: 66641 - DNA, 239 bp, Glycine max
gaccgacggaagtcgttaggacaaacgaagaagtatcactcatatgctgctctctatcattccattgcgataatcatccatagctacttactaaaatggctaccatccatgctgctatcacaaccacatcgatctatcgcgcaactcttgttcatacacaagccttatctaccgttcttgctttgccagcaatcggtaaggtaggaagagtgagttgctccatggatgaagcaccttac

SEQ ID NO: 66642 - DNA, 78 bp, Glycine max
gccgctctagattatcctttcttacatacgcctgcattccaggtcaggtctcttttatagtgtggcctaaattcaatt

SEQ ID NO: 66643 - DNA, 392 bp, Glycine max
cgcttctacaagaccacagtttggtattaatacaactatctaataatgtgtatgattaataaaaaagtgtggatcgcatctaaatttattaaatctattgtcctagagtagttccctacacaaaatataagtaagttcacaaacaatattcaagaataagattctctgatcaaaagagaaaaatatgtctcatgatccccttggtataacgaattaaataagggatcatttgtttcttgaacaattcttttaaaaaaattttctatcggatttttgaatcataagggattttatgatttatgacttggaagatttttaagaattcaatagaataactacattgacttcatccattttccctaaatattaatagactcattaattatttttta

SEQ ID NO: 66644 - DNA, 368 bp, Glycine max
tacataaacgaacattaaaaaatggcctgcttaaattaaaatactggctcgcatacttcataataaaaactataaacctaaattacttccctacacaaaattacttttaatatcacaaacactattcaaaaataaaattctctaataaaaaaacaacaaacattttataagatcccactttacatactcattcatacaacttattatctcttttattaacacacctaatttcaaaatactttccctcattttacaaccatattactattaaaaccctatcacttcccaacttaatcacctttcaacacattcccctttttccaactctcctaatacccaaaaaacccataccaatctccctttccaac

SEQ ID NO: 66645 - DNA, 125 bp, Glycine max
tgggatgggggttaaggagcacacgtgtaagagcacacaggacagtgctgcatagcatagtgcatcttcatccatcagcatgacataaaaactggaaaaaaatccgacccgtgtagaaagccaat

SEQ ID NO: 66646 - DNA, 395 bp, Glycine max
tccaaaagtttccgagattttggggacttgggaaaatttgaccctttgggagttctcatataattgtaacgcctccctattaaaaaaatgtccaagatgatgtaattttcaagaacctcaaagaggaaggaataacattgtacgggagacataaccggggaaagctagggtaagcaaagtcaatgatatctagaaatggttccctatttattgagcatttgtaaattttatttataagaaaatccgatttgggtcatcaagttaagaagaaagtttagaattaagtggaagaaaaaaatgaatgggatgaggaaaccctttctttttaattttcttctttatttttgtattattatttttaataaggttaaatattaatttagttctctgttttt

SEQ ID NO: 66647 - DNA, 419 bp, Glycine max
gaaggtgcaagagtttgttgtgagctataggctggtttatcgtgaggagaatatgaagttgtttgttttctttgttgctgcagtagttttggtggcataggcatgccatggcgcaggctaccaaaggttccctctccgaatgaaaactggctatggtgagcgttcttcgggggtaaaatgcgcaagttttaggcttgctgtggaagcacacaacatccgagcctttaaaaccattcctgaagagtgcgttgaaccaacaaaggactacattaatggcgaacaatttagatcagactctaaaacagttaaccaacaagctttcttttatgctagtgaacgcgaagtccatcacaacgacatatttatattcggcatagataacaccgtactctctaatatcccatactatgaaaaacatg

SEQ ID NO: 66648 - DNA, 425 bp, Glycine max
ggtgcacaagtgagtttgttgatcgagatggctagaaacagtgtgatgaaaatgaaggtccttgttttcttcgttgctacaattttggtagcatggcaatgccatgcgtacgatatgttccctctccgaatgaacactggctatggtgcccgtactccggaggtgaaatgcgcaagttggaggcttgctgtggaagcacacaacatctttggctttgagaccattcctgaagagtgcgttgaagcaacaaaggaatacatccatggcgaacaatatagatcagactccaaaacagttaaccaacaagcttacttttatgccagagacctcgaagtccatcccaaggacacatttgtgttcagtatagatggcaccgtactctcttatattccatactacaaaaaacatggatatgggggtgagaa

SEQ ID NO: 66649 - DNA, 256 bp, Glycine max
ggcacaagtgagtttgttgatcgagatagctggaaacattgtgatgaaaatgaacgtccttgttttcttcgttgctacaattttggtagcatggcaatgccatgcgtacgatatgttccctctccgaatgaacactggctatggtgcccgtactccggaggtgaaatgcgcaagttggaggcttgctgtggaagcacacaacatctttggctttgagaccattcctgaagagtgcgttgaagcaacaaaggaatac

SEQ ID NO: 66650 - DNA, 164 bp, Glycine max
acacaaagttttatccaaacacatagctttatcaataaggcagcattcttcacataaatccttcacaaaacatcatcatcatcatcatcatcaccgataacacaacaacatccctctcacaaacatcaccatcctaaaaccatcacatcctactcacccctaca

SEQ ID NO: 66651 - DNA, 304 bp, Glycine max
gaatcatgccactgtatgctatgtgacatatccacatgcgtattcaaaacgtggtcccctactcatccatatcttctgttcaaaactcctttcttttatctcaatttctctaaatgttcccacattatatctttttatatcagttgcattaaactgtgtttctacaactaatgaatttaaaaaacctcaatgttatcagcctgcaacttatactatccaagcgatcatacacttccatacgatcacttaactcttatatagggacacctaaattcaaatcactgtccgtcatattacaacctat

SEQ ID NO: 66652 - DNA, 334 bp, Glycine max
gagagccatgcatcttcttctcctatcacaattccatcaaaatccccttctatgtccatgtcatccttctagtctcctccaaaatcaattatacacaacatttccaattcatcgttcataatcccttattgaaatcaatgcttgttctcatataactattgttctccatactaacattaaaatttaaatatctattccttactactttatattactttaatcttcaattaactacacacttcaatatttgaacttcaccacctgcattacttgattaaattctttaattacaatcttttttccccctttataaacatcattttcatttttaaaa

SEQ ID NO: 66653 - DNA, 99 bp, Glycine max
atttatttcttacactataattcattaaattatataatatatgtttacctattcctatatctctgataaattaaaattttatttataaaatcctttcaa

SEQ ID NO: 66654 - DNA, 246 bp, Glycine max
agaagcgtggacaattcactcttgtagttggaggtttgttggtcatagcatatgctgttcctatggcacaatactatgcctatgtatccaaaaaataagataatataaatagatctggatgtcaaattctcactgatcaaattcacatgcataatgtgcagttgtaaccatgctcatgttacaatagagtttgagaaagctgaagaagaatacgatgacagtgtttgcttgtagaataatggcaaa

SEQ ID NO: 66655 - DNA, 300 bp, Glycine max
gatactcaacaatctcaaaaccaaatctcgtcgacaaaatgcttggtattgtaaaggctctaaagtcctcgtgaaagggctgttccaaataccacaagaaggatgcgcgtgtcgacatgataggaatctcacaccattccaaacgcatgtaaaccagaatacaaaccgagaccagtattagtgtcttcatctacgaacacaccaggagacatattacaatattgtagtagaacatgattctcaatactcagacacacactgatcacgctacgatgaataacgttactgttaaggatattg

SEQ ID NO: 66656 - DNA, 326 bp, Glycine max
taccggtttgaattcccgggtcgacccacgctcgccacctcgtacgcagagcacagagggtccgtttacttatgtcgctgatgacaattcttatttgggattattttacacatattattaaattataatggatttacctatgcctaattcgataataaaatttattgataacccttcattgtaccatatttatacaatattcacacttcgagaaaaagcatcactattacaaatggagcactaatctaagaattatcgaacttaagattatataagcttccactgaatgatcctatatcgagtatatcttatacttagcctatcac

SEQ ID NO: 66657 - DNA, 386 bp, Glycine max
gaaggtgcaagagtttgttgtgagctataggctagtttatcgtgaggagaatatgaagttgtttgttttctttgttgctgcagtagttttggtggcatggccatgccatggcgcaggctaccaaaggttccctctccgaatgaaaactggctatggtgagcgttcttcggaggtaaaatgcgcaagttttaggcttgctgtggaagcacacaacatccgagcctttaaaaccattcctgaagagtgcgttgaaccaacaaaggactacattaatggcgaacaatttagatcagactctaaaacagttaaccaacaagctttcttttatgctagtgaacgcgaagtccatcacaacgacatatttatattcggcatagataacaccg

SEQ ID NO: 66658 - DNA, 153 bp, Glycine max
tagttatatatgaactaaccatgtccatatatattatataaaagaactcatattttatatctaaaattgccccgctactactgtaaatttcgatattgattaaaaaacaaaacctttccgtttcatctctaattgtgaatataatattcaatg

SEQ ID NO: 66659 - DNA, 221 bp, Glycine max
gggtaccattaccagaagccagcagaactagtctaagcagaaatggcctcttcagggatggcatctagaggatctcaaacttggtactcttactggcgagaagttctcagttagatgccttcacttaatttcaaggaactgctcttcattcaaagacgtggccactggtagcacgatgatcaagactgacttaccttattggattaatattggcatgtctt

SEQ ID NO: 66660 - DNA, 322 bp, Glycine max
  unsure (1)..(322): unsure at all n locations
ggaacttcccgggtacgacaccacgcgtatcgaccgctcgtncgtcaactcgtacgtactgctgcaatgtgcccacagccgggcatcgtgggtgattgtaaggacctcgaagtctcactaacgctcagtgagccgtgatctctgataaaagcgattcctatattgagggtgcatgaccgtgtggattcgctaacactaactcgtcaatatgcgatccaatgcggcatcttacgatgcatcggtagctgatcctggaacgctatagtatggattcgtacctatacatcagataggggcatctatggattacatcgctctggct

SEQ ID NO: 66661 - DNA, 76 bp, Glycine max
gacgaatggggggccttcactctgaccaaataccatagtcttctctttggccgtgacaaacaagttccacataaaa

SEQ ID NO: 66662 - DNA, 314 bp, Glycine max
ggcacaagtgagtttgttgatcgagataacgagaaacagtgtgatgaaaatgaaggtccttgttttcttcgttgctacaattttggtagcatggcaatgccatgcgtacgatatgttccctctccgaatgaacactggctatggtgcccgtactccggaggtgaaatgcgcaagttggaggcttgctgtggaagcacacaacatctttggctttgagaccattcctgaagagtgcgttggaaccaacaagggattcattcatggcgaacaatatagatcagacttcaaaacagtttacccacaagcttactttt

SEQ ID NO: 66663 - DNA, 357 bp, Glycine max
gatctggcaccagaagaacaggtagttgagaactaagaaggagaagcaaatggcttcctcaatgatctcttccccagctgttaccactgtcaaccgtgccggtgccggcatggttgctccattcactggcctcaagtccatggctggcttccccaccaggaagaccaacaatgacattacctccattgctagcaacggtggaagagtgcaatgcatgcaggtgtggccaccagttggcaagaagaagtttgagactctttcctacctgccagaccttgatgatgcacaattggcaaacgaagtaaaataccttcttatgaagggatggattccttgcttggaattcgagtttgagca

SEQ ID NO: 66664 - DNA, 83 bp, Glycine max
  unsure (1)..(83): unsure at all n locations
cggtggcaaaagaccaacgaaggggaaaacctaaggtaaggcggggctacccgctgagtttaagcatatcaataagcgcaana

SEQ ID NO: 66665 - DNA, 318 bp, Glycine max
ggcacaagtgagtttgttgatcgagataactagaggcagtgtgatgaaaatgaaggtccttgttttcttcgttgctacaattttggtagcatggcaatgccatgcgtacgatatgttccctctccgaatgaacactggctatggtgcccgtactccggaggtgaaatgcgcaagttggaggcttgctgtggaagcacacaacatctttggctttgagaccattcctgaagagtgcgttgaagcaacaaaggaatacatccatggcgaacaatatagatcagactccaaaacagtttaccaacaagcttacttttatgc

SEQ ID NO: 66666 - DNA, 377 bp, Glycine max
ggggcagcagaagaacaagtagttgagaacggagaaggagaagcaaatggcttccccaatgatctcttccccagctgttaccactgtcaaccgtgccggtgccggcatggttgctccattcactgacctcaagtccatggctggcttccccaccagaaagaccaacaatgacattacctccattgctagcaacggtggaagagtgcaatgcatgcaggtgtggccaccagttggcaagaagaagtttgagactctttcctacctgccagaccttgatgatgcacaattggcaaaggaagtagaataccttcttaggaagggatggattccttgcctggaattcgagttggagcacggtttcgtgtaccgtgagcaca

SEQ ID NO: 66667 - DNA, 89 bp, Glycine max
ccacgcgttcgtaccccagaaaacctccttatggggaaccaaatctttatgcccaggcgggttagtccaaacaaaggctcccccccaat

SEQ ID NO: 66668 - DNA, 75 bp, Glycine max
cttctatcgtatttcattgctccaaataaatacaaggctcccccaccttcatccaagcctgcctattctttctgt

SEQ ID NO: 66669 - DNA, 83 bp, Glycine max
tccggttccaaaagaccaccaaaagggtccggttgcaaaaaaccaccaaaagggtccgggggcaaaaaaacaacagaagggtc

SEQ ID NO: 66670 - DNA, 355 bp, Glycine max
ggcacaagtgagttgggggatcgagataactagaaacagtgtgatgaaaatgaaggtccttgttttcttcgttgctacaattttggtagcatggcaatgccatgcgtacgatatgttccctctccgaatgaacactggctatggtgcccgtactccggaggtggaatgcgcaagttggaggcttgctgtggaagcacacaacatctttggctttgagaccattcctgaagagtgcgttgaagcaacaaaggaatacatccatggcgaacaatatagatcagactccaaaacagttaaccaacaagcttacttttatgccagagacctcgaagtccatcccaaagacacatttgtg

SEQ ID NO: 66671 - DNA, 280 bp, Glycine max
  unsure (1)..(280): unsure at all n locations
gccggaattcccgccgacccactcatccttccactcttcctaacctcatnattttttccacaaaaaccccacacntaaattccagactctttataactataaacagccttaccaacatcaacttccttctcttcttcatttatacaatttttctaccatcttatttccatgcgtacgacatattccctcttctaatgaacactacctatcttacccattctccgcatattaaatactcaattttaacactttctattcaatcactcaacatctttctctt

SEQ ID NO: 66672 - DNA, 326 bp, Glycine max
aataaaaaggagggtccttgtttttttcgttgctccaattttggtacaatggtattgccatgcttccaatttgttccctctccgaatgaacactggctttggggcccgtactccggaggtgaaatgcgcaagttggaggctcgctgtggaagcacacaacatctttggctatgagaccattcctgaagagtgcgttgaagcaacaaaggaatacatccatggcgaacaatatagatcagactgcaaaacagttaaccaacaagcttacttttatgccagagacctcgaagtgcatgccaaggacacatttgtgttcagtatagatg

SEQ ID NO: 66673 - DNA, 298 bp, Glycine max
ctgcgtgaagactaccgacgggtgcggctgcaagaagactacataatggtacgggggggagacgacgacaggagggtgcggctgcttgattacttcataagtgcactgctgctagaatacgactgacaggtacagctgctataagactatccgaatggtacactgtgctatgaagaccacaaatgggtacgtgtagtacacaactacaaaacggggcctcattttctagcttacatacccttacacttctcttcctgttagatcatgacctatccattaaggaaattctccgaacatg

SEQ ID NO: 66674 - DNA, 330 bp, Glycine max
ggactcaccactcaactcgctgcttcaaacttaaaagtaaacccaactctatttccttctctcaggtctcagagtggcaaactgtaaagttttgatgcagaatggctgcaaccagggctcgagttagtagcttctctcgcaatgtatcaactgtgacttctcagaatcatggacttaagcatggccctaatgggacaatgttcatttcatctgggattccagatctggacaagattttaggtggcggtttttctctgggtagccctgtcatggttatggaagatcctgaagcacctcatcatatgcttctattgagaaattttatgtctc

SEQ ID NO: 66675 - DNA, 82 bp, Glycine max
gaaaatcaaagtaagcgatttatccatccatggggtgatttgaccaaaagtgagggctaaccaactaattcctctggatttt

SEQ ID NO: 66676 - DNA, 333 bp, Glycine max
caaaaaaccaccaaaggggggtccaaggggtgaatggttggtggtggtaggtggtctttattatttggtggtactgggttagggttggttttttctctcacctgaaaatgtctggctgcggtggtaactgtggttgcggaagctcctgcaagtgcggcaacggctgcggaggctgcaagatgtacccagacttgagctacactgagtcaaccaccaccgagaccttgttcatgggagtggcacctggtaatgctcaatttgagggtgctgaaatgggtgtgcccgctgagaacgatcgcttgaaatgtggaccaaactgctcctgccacccct

SEQ ID NO: 66677 - DNA, 255 bp, Glycine max
ttccaaaaaccaccgaagggtcctccccattggcaaaccctaactccaagggattgtcttaaaaacaggggcctctatcatatacggaactcactctacttcattcgctctcacgattcatgatcctcaacctaccttcttgatcctgatactctaccctacttagattaacccatccccacaaatcttatagattctggtgctccatagataataatccttcaagcagctcagacctacagattaatgcatgct

SEQ ID NO: 66678 - DNA, 326 bp, Glycine max
cgtacgcccgctcttccttacggttgcaaaaagacaccaaaggggcggttttttaccgatttcgggtatgtacgtggacaatttggagaaaacgtccctgagctgcaaactttcaatgagtgctggaaatcatgattgggtttccaagtatgccaccctcatgaaaaagagaattgaaatagagaatcggctcgttcaaaagcttggacgcttttgaaacatctaacctgctgtttctctctgaattcttacattgagttggctgtgaaatgtgaataaaataaagtgaatcagagaagattaaaccgtttataaaaaagcatatt

SEQ ID NO: 66679 - DNA, 335 bp, Glycine max
tcccgggtcgacccacagccttcgtgccggttgcaaaaaaccaacaaaaggggttagccttctctttgtctgagaaaaggggtgcccccaaaaataaaatgaacaaggttctctcctttgtgctgctgattcttccgatccactacaacaacgttgtcaacgccaacaacaaaaactgtgtcacagaggattgcctcatcggcaacaatgatttggaatcagaattctacttcggttcccatgtggccagaatgctctacgatgtgagccaatctgtgtctggccaaacatgcaattcatacaacatagctgttaattgtccacaaagcaatggc

SEQ ID NO: 66680 - DNA, 155 bp, Glycine max
tcatctggcagcagaagaacaagtagttgcgggggaagaatgacaaccaaatggcttcctcaatgatctcttccccaactgttaccactgtcaaccatgccggttccggcatggatgctccattcactgtcctcatgtccatggcttggcttccc

SEQ ID NO: 66681 - DNA, 116 bp, Glycine max
gatcccactctgttaacaactcattaacccttgtcatttctcatcttctcaccttattcaatcactgctcattcctatggttccgtatttgacccttccataatgatcataaacgc

SEQ ID NO: 66682 - DNA, 142 bp, Glycine max
gggcagacgcagacgccgtgactagacgggggtcttactcgcgcccatctaagggtttctccttttgtttcccaacatggttgccgcttagaaaactaaaaagacccatggaagcatcaacaacaggctcgctcttgtcatg

SEQ ID NO: 66683 - DNA, 300 bp, Glycine max
agggatagccactagttgcttgcacttccgagtggaggactcttatggattgcacattctctacccatgacccttatatgagagcgaaaatgacaaccaccttcgcgaccgtcgcaagactcggtggcgcattactgtcatccacctcatctcgtctcacctcagggtttgtgaaatccccggtgattgataggaatcccttgaggcaagctgtggcaatgggaaatgggaagattacatgctttgagaagaattggcttggggcagattacagtgtgattgggtttgggttgattgggt

SEQ ID NO: 66684 - DNA, 82 bp, Glycine max
ccgtccttccttcttcggttcagctctctctccttctccctcccgtggcttcccttcggcgctgttccctgcccctcgtctc

SEQ ID NO: 66685 - DNA, 148 bp, Glycine max
tactaataagtgctagtggtatgattgaaaatgcatgtattttcttgtaatttctaatatacggtgatttattggtattcaacctagttatggctattttgggacgagtaagttattgttatgacttgttttaacttcttgtatttcc

SEQ ID NO: 66686 - DNA, 54 bp, Glycine max
  unsure (1)..(54): unsure at all n locations
gagacctcaggtcangcggggctacccgctgagtttaagcaaaaaaaaaaggag

SEQ ID NO: 66687 - DNA, 54 bp, Glycine max
gactagatgtgaatgtgattcatattcatagacgacaaacacaccccctccccc

SEQ ID NO: 66688 - DNA, 122 bp, Glycine max
tggggggaggaagaataattgtgctgcgagggtaacgtctcgttgtgttgcgtcgtgtcgttcgctgttcctctgtttctcgtttgtgtgttcagaccgaaccctacctccgcatctcaatc

SEQ ID NO: 66689 - DNA, 297 bp, Glycine max
gccagaagctagtcaaagatttaagctgattaatgggcattcagctagaagaacacatcaattcagagcatcaagtacaacaaatgaaacacttggacgcaacacctagagaagctaaagtagacaaacacttgacgcaacaattgaaatggaaactcacattggaagtgatctaattgttgcaaaatctcggtcattggcttcacatactgatccccccagatctggagtattacatggtaatccattaaatagacacttggagggaaatcaacattctacatccacatctgatac

SEQ ID NO: 66690 - DNA, 243 bp, Glycine max
  unsure (1)..(243): unsure at all n locations
tacggctgcggaggctgcaagatgtacccagacttgagctacactgagtcaaccaccaccgagaccttggtcatgggagtggcacctgttaaggctcaatttgagggtgctgaaatgggtgtgcccgctgagaacgatggctgcaaatgtggaccaaactgctcctgcaacccctgcacttgcaagtgacgtgttgggagagcanacttcaagcagagatacccttaattaagaatatgataa

SEQ ID NO: 66691 - DNA, 315 bp, Glycine max
aaaaggccaccggaagggagcacaagtcagtttgctgatgtagactttgctctgcagtatactcaaacttcacgtctctgttcgctcccgctgcatccttcatggtagcatggtgatgcaacacgtccaacaatcatcccgctcagagtcgattcacgcacaatagttggcgtaatcaggaggagtcctctccatattggacgcctcctgcggaattaaacatcatgttttcgcgttatcaacattcttcgatcactcagtgtacaatgctaggtttacatcaatggagaataatctggtatagacactcctaca

SEQ ID NO: 66692 - DNA, 148 bp, Glycine max
ggtgagttgagaggatcgtgagaggggcagtagccgagattccgtgagttgcaaaaatgaagacgattctttccaccgagaccatgaacatcccggacggcgtgagcatcaaagttcatgccaaggtcatcgaagttgagggcccccg

SEQ ID NO: 66693 - DNA, 308 bp, Glycine max
ggagcagaagaacaagtagttgagaactaagaaggagaagcaaatggcttcctcaatgatctcttccccagctgttaccactgtcaaccgtgccggtgccggcatggttgctccattcactggcctcaagtccatggctggcttccccaccaggaagaccaacaatgacattacctccattgctagcaacggtggaagagtgcaatgcatgcaggtgtggccaccagttggcaagaacaagtttgagactcttccctacctgccagaccttgatgatgcacaattggcaacggaactcgaataccttc

SEQ ID NO: 66694 - DNA, 448 bp, Glycine max
ggtgcacaagtgagtttgttgatcgagataactagaaacagtgtgatgaaaatgaaggtccttgttttcttcgttgctacaattttggtagcatggcaatgccatgcgtacgatatgttccctctccgaatgaacactggctatggtgcccgtactccggaggtgaaatgcgcaagttggaggcttgctgtggaagcacacaacatctttggctttgagaccattcctgaagagtgcgttgaagcaacaaaggaatacatccatggcgaacaatatagattagactccaaaacagttaaccaacaagcttacttttatgccagagacctcgaagttcaacccaaggacacatttgtgttcagtatagatggcaccgtactctctaatatttcatactacaaaaaacatggatatggggtggagaaatttaactcgaccttgtatgatg

SEQ ID NO: 66695 - DNA, 421 bp, Glycine max
tggcacaagtgagtttgttgatcgagataactagaaacagtgtgatgaaaatgaacgtccttgttttcttcgttgctacaattttggtagcatggcaatgccatgcgtacgatatgttccctctccgaatgaacactggctatggtgcccgtactccggacgtgaaatgcgcaagttggaggcttgctgtggaagcacacaacatctttggctttgagaccattcctgaagagtgcgttgaagcaacaaatgaatacatccatggcgaatcatatagatcagacccaaaacagttaaccaacaagcttacctttaagccaaaaaccttcaaattcaacccaatggaaaaattggtgtcagtatagatgggaccgttatccccatatatccatactacaaaaaacatggatatggggtggag

SEQ ID NO: 66696 - DNA, 66 bp, Glycine max
  unsure (1)..(66): unsure at all n locations
caacgcgagacctcaagtcangcagggctacccgctgagtttaagcataaaaaaaaaagcggccgc

SEQ ID NO: 66697 - DNA, 277 bp, Glycine max
gcgacagaatggggcaacatccattcttgttctcttctttcttacaatcagggtttcccctcctctcagggatcgtttcgttctcgaataatctatctatgggaatggggcacgggtatcacatggatcagtgatcgcgatagggctcaggctagaactggtgctatctgcaatcacaaatatgatggattgattcctgaacagcttatggaacaagatgcacaggttgctcatgatataagtctcatattatgcggaacacggtccatgatgtaac

SEQ ID NO: 66698 - DNA, 401 bp, Glycine max
  unsure (1)..(401): unsure at all n locations
ggcacaagtgagtttgttgatcgagataactagaaacagtgtgatgaaaatgaaggtccttgttttcttcgttgctacaattttggtagcatggcaatgccatgcgtacgatatgttccctctccgaatgaacactggctatggtgcccgtactccggaggtgaaatgcgcaagttggaggcttgctgtggaagcacacaacatctttggctttgagaccattcctgaagagtgcgttgaagcaacaaaggaatacatccatggcgaacaatatagattagactccanaacagttaaccaacaagcttacttttaggccaaaaacctcgaattccatcccaaggacacatttgtgttcagtataaatggcaccgtactctctaaaattccatactacaaaa

SEQ ID NO: 66699 - DNA, 375 bp, Glycine max
ggggcacagatgggtctggagttcgtaaatactagagtcactgtcataatggtgacaggccttgatttcatcgtagctattttataggaaacatagcatagcctatgcgtacgatttgttccctcttatttagaacaatgatgaatgtgcacgtacacctttagttttatgatttttttaggagcttactatatgttctttagtgaatcttttagctttcataacttatccttatgtgcgtttagtagtgtccaaagatggtatcaatgggtatccatgaatttcacatacacctgtctataacatttgtctgatcataatactgcagagcatgtcatcaatttaatcgacacatttgtgttcagtatagatggc

SEQ ID NO: 66700 - DNA, 156 bp, Glycine max
gtggctgtcttgtaggtgacagtccttgatttcatcttagctatactatagctcgaggtggtggaagtatacgtgcgctttgttcccacgccctaagacctctgacgagtgtctacgcatacgttaagtgttatcatttttttaggtctgtactgt

SEQ ID NO: 66701 - DNA, 224 bp, Glycine max
gggacagggacaacacataataaagatgagttttaaaaaaaaaaatagcggtcgcacaagtggatttgatcgcacctattccttcatgcggtgtcagatgtcttcaatgaagtcaccttccttcaaattaatgactgctccatttcagagtcatgactggtatcaccctgatgctactcatcttacacgtcttgcagcacaacgccctttcaacagctggcgta

SEQ ID NO: 66702 - DNA, 201 bp, Glycine max
gacagctgcaccattacaaccacactaaaatggcttcatttgaatccttccaaatgctgcttcttgcaacctcatacacctcatgactcacagccttgttatgttactgacactctattttacaagctaccactgtacatcactcgagtgtatattccaccaatgtacaaaccattcgattattgtctaaaaggattcatt

SEQ ID NO: 66703 - DNA, 186 bp, Glycine max
acaaggtaagggtactgcagcgcgataacaagagaaagggttagtagtcaatcacactacggcctctctagcagatcttgcgatgcatgttcagccacgcgtggatgaatagccttgtcggaagttccctcgctgcaactaacctctcatttacaccctcacggcactgtgtcaaatcgaagaact

SEQ ID NO: 66704 - DNA, 162 bp, Glycine max
  unsure (1)..(162): unsure at all n locations
ggagaggcncccagnngatnnctctttcagggagaaanagagagtgctgtagagagagagcacaacatattattttcattttcatctttttttgagtatcaagaaatggcaaccacggtgatgaccagtctccccgaattcagtggtcttagaccccaattc

SEQ ID NO: 66705 - DNA, 120 bp, Glycine max
taacggtactgctcctagaggactacattatggtacagttgcgacattccgacatattggtcctgttgacacactacgacaccacggtattgctgccataacatgacaccctggtacggc

SEQ ID NO: 66706 - DNA, 148 bp, Glycine max
  unsure (1)..(148): unsure at all n locations
ggagtgatnanagatgaagaaaatgttggcttgtgcatgctctcaacccccatttctgaaagggacatggtcattccaccaccccttctctccaagcacagttccgcggtgactcagacccactgggccccaccgagtttcctgcctc

SEQ ID NO: 66707 - DNA, 79 bp, Glycine max
caacatacgtgatcgaaaggatctcgaagacccaccaacgcacaaaagccgggatctttcagaaaatggattcctattc

SEQ ID NO: 66708 - DNA, 153 bp, Glycine max
ggtcgccatcccctttcacattttatcttgtgcattgagcatctgatgcggctcgcgccatggtggctaccatcatcaccacatgcgagccgtcactcgttgtcggtcttctgtcagtttcacgtttgctgcgtgttgcgtctgatacccttc

SEQ ID NO: 66709 - DNA, 156 bp, Glycine max
gataccagcatcagacaaagcagtgaagtcacaggcttacgttcattgggtggggtttgcattcttccacagaacgatacatgtctaagacatgcatgaagtgctactgcgctgacaagactaactgcagtacgggaaataggtatggtgttattg

SEQ ID NO: 66710 - DNA, 208 bp, Glycine max
ggattcggagctgggtttgttttcggccattgatcttcgagtctctctctttttctctcgcgacgaacgtatcagcaatgtgtggagagtcagccagcggtattcacaagggtcgggtcgatctcttagacttcattgactggtctggggttgaatgcctcaatcacagctccacgcactcgtctcccaacgctatgagacaggggtt

SEQ ID NO: 66711 - DNA, 161 bp, Glycine max
ggcacaagtgagtttgttgatcgagataactagaaacagtgttgagtgaaaatgaacgtccttgttttcttcgttgctacaattttagtagcatggcaatgccatgcgtacgatatgttccctctccgaatgaagactggctatggtgcccgtagtccgga

SEQ ID NO: 66712 - DNA, 164 bp, Glycine max
gaatctctgaaaccacaattcacaaccgaaacagtttgcatctctctcacataatgagaacaatatcaaatgtgctcccttctcttcgtcttcgtcttagtctcaagcagcagcatagcttccaacctctcaacccccagcaactgaggcaagtcctcctgcag

SEQ ID NO: 66713 - DNA, 151 bp, Glycine max
gaagtgagtttgttgatcgagataactagaaagagtgtgatgaaaatgaaggtccttgttttcttcgttactacaattgtggtagcatggcaatgccatgcgtacgatatgttccctctccgaatgaggactggctatggtgcccgtagtc

SEQ ID NO: 66714 - DNA, 174 bp, Glycine max
  unsure (1)..(174): unsure at all n locations
tgcgagacgacagaagggngggtgcgacgannatatccccgtttccctcgggcctcgtgactattgagccatatagtggcgcattcgcgcgtgcgtccttcggctcttagcttcgcgtgacttgagnaaaagaggaatgtagggtcacggaggggtttcagtcctgctggcatc

SEQ ID NO: 66715 - DNA, 158 bp, Glycine max
gacaagtgagtttgttgatcgagataactagagacagtgtgatcaacatgaatgtccttgttttcttcgatgctacaattttgttagcatggcaatgccatgcgtactatacgttccctctccgaatgaacactggctagggtgcccgtactccggag

SEQ ID NO: 66716 - DNA, 151 bp, Glycine max
gtgcggctgcgacatgacgatacagcggcaaaattccaactgaaggggagacctcacgtcaggccgcgctacccgctgcacttaaggatatcaacttacgtaggagtgccggggacggcatagctcttccaaaatcggccggtcgatacga

SEQ ID NO: 66717 - DNA, 150 bp, Glycine max
  unsure (1)..(150): unsure at all n locations
gggtantggcantgagttccccttgcngttgcgcttgcgcttctacgagttggngtgttgggtatgggtatggaagtggtggcgtgctttcaaattcaaaagtaacaacgaggagggcaggagaaatatgcatggcacattcagtttgtt

SEQ ID NO: 66718 - DNA, 181 bp, Glycine max
gggcctggccattctgtgtcacagatctgctccttccgttctccctcagttgatgagcatgggtcttggagttagcagtggtggtggtctgtattcagtgggttacctttttggcatttgaggggcccctgtcctcatccagcaccttttattgctccagcccatcctgatgtgcaggctg

SEQ ID NO: 66719 - DNA, 365 bp, Glycine max
ggcacaagtgagtttgttgatcgagataactagaaacagtgtgatgaaaatgaacgtccttgttttcttcgttgctacaattttggtagcatggcaatgccatgcgtacgatatgttccctctccgaatgaacactggctatggtgcccgtactccggatgtgaaatgcgcaagttggaggcttgctgtggaaacacacaacatctttggctttgagaccattcctgaagagtgcctttaaacaacaagcgaatacatccatggcgaagaatattacatagactccaaaacagttaaccaacaaacttaactttatgccagagacctcaaattcaacccaaggacacaattgtgttcagtaaaaa

SEQ ID NO: 66720 - DNA, 152 bp, Glycine max
ggttgggccaacgtggcagggcaatggccctttctgtagcgcggagcgcacgcaggtggctctcgcgtcttcacgagaatccctcatcagcatcatcacccgtcgaccttttgcccaaatccctctttccttgtggaagttccctgaaactg

SEQ ID NO: 66721 - DNA, 124 bp, Glycine max
agaatatgaaaaggaaaaaaaaagattcgaaagaaatataactaatattctttagaataatcagaaggagtattaaattcaaataaattttagatagaaaaaagagttaaaaaggaggatttga

SEQ ID NO: 66722 - DNA, 183 bp, Glycine max
  unsure (1)..(183): unsure at all n locations
gatatgttccctctccgaatgaacactggctatggtgcccgtactccggaggtganatgcgcaaattggaggcttgctgtggaagcacgcaacatctttggctttgagaccattcctgaagagtgcgttgaagcaacacaggaatacatccatggcgaacaatatagatcagactccaaaaca

SEQ ID NO: 66723 - DNA, 363 bp, Glycine max
ggcacaagtgagtttgttgatcgagataactagaaacagtgtgatgaaaatgaaggtccttgttttcttcgttgctacaattttggtagcatggcaatgccatgcgtacgatatgttccctctccgaatgaacactggctatggtgcccgtactccggaggtgaaatgcgcaagttggaggcttgctgtggaagcacacaacatctttggctttgagaccattcctgaagagtgcgttgaagcaacaaaggaatacatccatggcgaacaatatagatcagactccaaaacagttaaccaacaagcttacctttatgccaaagacctcgaaatccatcccaatgacacatttgtgtccaatat

SEQ ID NO: 66724 - DNA, 198 bp, Glycine max
ggcacaagtgagtttgttgatcgagataactacgaacagtgcgatgaaaatgagggtccttgttttcgtcgttgctacaattttggtagcatgggaatgccatgcgtacgatatgttccctctccgaatgaacactggctatggtgcccgtactccggaggtgaaatgcgcaagttggaggcttgctgtggaagcaca

SEQ ID NO: 66725 - DNA, 363 bp, Glycine max
tgggtatcgggtatagtttagtggtaaaagtgccattcgggtccatggacccctaaatacttaagggatcccccgtttgatgcatattccgatcaaaaacttgatttcttacttaaagggaatcctttagaccctcaatgaatgatttgcggtataagatacgttatcgtaatgtgtggacaagaggagacaattcgagagtgagagcgtaggttcgggggtggtgacacataggtgtttgcgggttggctctaggatccgaagttgtgtgtgtaagacgaaaggatctatggagagatatacgtaaagtttctttctaatcgtaactaaatcttccattttttgtatagtagagattgaagc

SEQ ID NO: 66726 - DNA, 65 bp, Glycine max
ccaaaggaaagaggtctttaagatgaaaacaaaaaatgcaaatgtaggttcctttttttgaacgc

SEQ ID NO: 66727 - DNA, 302 bp, Glycine max
ggttctagtgtgtgattgtttgttgttgtaactcgttcttcttcttttgttgttctgtgtttgtgtttgttttttctctcacctgaaaatgtcttgctgcggtggtaactgtggttgcggaagctcctgcaagtgcggcaacggctgcggaggctgcaagatgtacccagacttgagctacactgagtcaaccaccaccgagaccttggtcatgggagtggcacctgttaaggctcaatttgagggtgctgaaatgggtgtgcccgctgagaacgatggctgcaaatgtggaccaaactgct

SEQ ID NO: 66728 - DNA, 284 bp, Glycine max
tggagatgcactaataactgactttgctacagatgcaaaaagacaatttccgggaatagtcgatcataaacgatcgtccgattctgctgttcttccactacagttcagtattactgttatcaaacgaaaactggctatgtgaccgagttgcacattggagtgtaccgctgaccaaaaacatctgaaatttatggatacaaaagtaccacagtcagggttagctatcagggaaaactcaatggtaggactgttttcaaatcagggtttggtacagattatccaat

SEQ ID NO: 66729 - DNA, 176 bp, Glycine max
gagacctcacgtcaagctgagtcactcgctgtgttgatccatatcaatacgcgtattttattatgaatgagtggcaataacagcggccgcactagtagatctaagcttacctctgtgtgcatgccacatctcacctcatccatcctgaccatggcattcaattaactggccgtcct

SEQ ID NO: 66730 - DNA, 303 bp, Glycine max
gggcagcagaaaaacaagtagttgagaactaagaagaaggaaatggcttcctcaatgatctcctccccagctgttaccaccgtcaaccgtgccggtgccggcatggttgctccattcaccggcctcaaatccatggctggcttccccacgaggaagaccaacaatgacattacctccattgctagcaacggtggaagagtacaatgcatgcaggtgtggccaccaattggcaagaagaagttcgagactctttcctacttgccagacctcgatgatgcccaattggcaaatgaagtcgaatac

SEQ ID NO: 66731 - DNA, 409 bp, Glycine max
gagtgcacaagtgagtttgttgatcgagataactagaaacagtgtgatgaaaatgaaggtccttgttttcttcgttgctacaattttggtagcatggcaatgccatgcgtacgatatgttccctctccgaatgaacactggctatggtgcccgtactccggaggtgaaatgcgcaagttggaggcttgctgtggaagcacacaacatctttggctttgagaccattcctgaagagtgcgttgaagcaacaaaggaatacatccatggcgaacaatatagatcagactccaaaacagttaaccaacaagcttacttttatgccagagaacgcgaagtccatcccaaggacacatttgtgttcagtatagatgggcacgtactccccaataatccatactacaaaaaacat

SEQ ID NO: 66732 - DNA, 439 bp, Glycine max
  unsure (1)..(439): unsure at all n locations
aagaagacgacagaagggggttctagtgtgtgattgtttgttgttgtaactcgttcttcttcttttgttgttctgtgtttgtgtttgttttttctctcacctgaaaatgtcttgctgcggtggtaactgtggttgcggaaactcctgcaagtgcggcaacggctgcggaggctgcaagatgtacccagacttgagctacactgagtcaaccaccaccgagaccttggtcatgggagtggcacctgttaaggctcaatttgagggtgctgaaatgggtgtgcccgctgagaacgatggctgcaaatgtggaccaaactgctcctgcaacccctgcacttgcaagtgaggtgttgggagagcaagcttcaagcagagatagcccttaattaggaataatgataaactattaatgtgtagctaanaacttatgtattatgtc

SEQ ID NO: 66733 - DNA, 255 bp, Glycine max
ggggatcaaggggatgacttgaagttggtgcaactcgttcttcttcagttgttgtacaaggcggctcgctgcatgatctccccgtaggtgttcttgcatgccacatcaaactgttcttcatggaaagcgatcaatcattcaatggccgtcattttgcgtattctgtaccgagacgtgatttccgttggttaacttactcaccttatcttgaatacccctttgagcacattacgtgctaattatgaggctcacact

SEQ ID NO: 66734 - DNA, 194 bp, Glycine max
ggatctggcagcagaagaacaagtagttgagaactaagaaggagaagcaaatggcttcctcaatgatctcttccccagctgttaccactgtcaaccgtgccggtgccggcatggttgctccattcactggcctcaagtccatggctggcttccccaccaggaagaccaacaatgacattacctccattgctagc

SEQ ID NO: 66735 - DNA, 396 bp, Glycine max
ggcacaagtgagtgtgccgatcgagataactagaaacagtgtgatgaaaatgaaggtccttgttttcttcgttgctacaattttggtagcatggcaatgccatgcgtacgatatgttccctctccgaatgaacactggctatggtgcccgtactccggaggtgaaatgcgcaagttggaggcttgctgtggaagcacacaacatctttggctttgagaccattcctgaagagtgcgttgaagcaacaaaggaatacatccatggcgaacagtatacattagactccaaaacagttaaccaacaggcttacttttatgccagagacctcgaagtccatcccaaggacacatttgtgttcagtatagatggcaacgtactctctaatattccatacta

SEQ ID NO: 66736 - DNA, 279 bp, Glycine max
aagaaggaagctgaagtcatagaagagaagaaggaagtggaagtgacggaagagaagaaggaaattgaagtaacagaagagaagaaggaagctgaagtcatagaagagaagaaggaagtggaagtgacggaagagaagaaggaaattgaagtaacagaagagaagaaggaagcagaagtgaaagaagagaagaaggaaggggaagtgacggaagagaagaaggaagttgaagtgacggaagagaagaaggaagcggaagtgacaaaaaaaaaacaaaaa

SEQ ID NO: 66737 - DNA, 413 bp, Glycine max
ggttctagtgtgtgattgtttgttgttgtaactcgttcttcttcttttgttgttctgtgtttgtgtttgttttttctctcacctgaaaatgtcttgctgcggtggtaactgtggttgcggaagctcctgcaagtgcggcaacggctgcggaggctgcaagatgtacccagacttgagctacactgagtcaaccaccaccgagaccttggtcatgggagtggcacctgttaaggctcaatttgagggtgctgaaatgggtgtgcccgctgagaacgatggctgcaaatgtggaccaaactgctcctgcaacccctgcacttgcaagtgaggtgttgggagagcaagcttcaagcagagatagcccttaattaggaataatgataaactattaatgtgtagctaaaaacttatgt

SEQ ID NO: 66738 - DNA, 393 bp, Glycine max
caagcctccgatacggtgccaagacgacagaagggggcacaagtgagtttgttgatcgagataactagaaacagtgtgatgaaaatgaaggtccttgtcttcctcgttgctacaattttggtagcatggcaatgccatgcgtacgatatgttccctctccgaatgaacactggctatggtgcccgtactccggaggtgaaatgcgcaagttggaggcttgctgtggaagcacacaacatctttggctttgagaccattcctgaagagtgcgttgaagcaacaaaggaatacatccatggcgaacaatatagatcagactccacaacagtttaacaacaagcttacatttatgccagagacctcgaagtccatcccaaagacacatttgtgttc

SEQ ID NO: 66739 - DNA, 367 bp, Glycine max
gaaggtgcaagagtttgttgtgagctataagctagtttatcgtgaggagaatatgaagttgtttgttttctttgttgctgcagtagttttggtagcatggccatgccatggcgcaggctaccaaaggttccccctccgaatgaaaactggctatggtgagcgttcttcggaggtaaaatgcgcaagttttaggcttgctgtggaagcacacaacatccgagcctttaaaaccattcctgaagagtgcgttgaaccaacaaaggactacattaatggcgaacaatttagatcagactctaaaacagttaaccaacaagctttcttttatgctagtgaacgcgaagtccatcacaacgacatatttata

SEQ ID NO: 66740 - DNA, 274 bp, Glycine max
gggcagcagaaaaacaagtagttgagaactaagaagaaggaaatggcttcctcaatgatctcctccccagctgttaccaccgtcaaccgtgccggtgccggcatggttgctccattcaccggcctcaaatccatggctggcttccccacgaggaagaccaacaatgacattacctccattgctagcaacggtggaagagtacaatgcatgcaggtgtggccaccaattggcaagaagaagttcgagactctttcctacttgccagacctccatg

SEQ ID NO: 66741 - DNA, 417 bp, Glycine max
gaaggtgcaagagtttgttgtgagctataagctagtttatcgtgaggagaatatgaagttgtttgttttctttgttgctgcagtagttttggtagcatggccatgccatggcgcaggctaccaaaggttccctctccgaatgaaaactggctatggtgagcgctcttcggaggtaaaatgcgcaagttttaggcttgctgtggaagcacacaacatccgagcctttaaaaccattcctgaagagtgcgttgaaccaacaaaggactacattaatggcgaacaatttagatcagactctaaaacagttaaccaacaagctttcttttatgctagtgaacgcgaagtccatcacaacgacatatttatattcggcatagataacaccgtactctctaatatcccatactatgaaaaaca

SEQ ID NO: 66742 - DNA, 444 bp, Glycine max
gaagacgacagaagggggcacaagtgagtttgttgatcgagataactagaaacagtgtgatgaaaatgaaggtccttgttttcttcgttgctacaattttggtagcatggcaatgccatgcgtacgatatgttccctctccgaatgaacactggctatggtgcccgtactccggaggtgaaatgcgcaagttggaggcttgctgtggaagcacacaacatctttggctttgagaccattcctgaagagtgcgttgaagcaacaaaggaatacatccatggcgaacaatatagatcagactccaaaacagttaaccaacaagcttacttttatgccagagacctcgaagtccatcccaaggacacatttgtgttcagtatagatggcaccgtactctctaatattccatactacaaaaaacatggatatggggtggagaaattta

SEQ ID NO: 66743 - DNA, 197 bp, Glycine max
ggggggtgctagaagcagctgtatagatagagacctttgcttacttcacttccttcccttcccttccctctcttattatctctaccattttccatcttctctctaagctaagctaaagagatatggggaattgccaagctgtggatgctgcagtgcttgtgatccaacacccttgtgggaagatagagaggttgtat

SEQ ID NO: 66744 - DNA, 53 bp, Glycine max
gaggcctcaggtcaggcggggctacccgctgagtttaagcatatcaataagcc

SEQ ID NO: 66745 - DNA, 404 bp, Glycine max
ggcacaagtgagtttgttgatcgagataactagaaacagtgtgatgaaaatgaaggtccttgttttcttcgttgctacaattttggtagcatggcaatgccatgcgtacgatatgttccctctccgaatgaacactggctatggtgcccgtactccggaggtgaaatgcgcaagttggaggcttgctgtggaagcacacaacatctttggctttgagaccattcctgaagagtgcgttgaagcaacaaaggaatacatccatggcgaacaatatagatcagactccaaaacagttaaccaacaagcttacttttatgccagagacctcgaagtcatctcgaagacacaattgtgttcagtataaatggcaccgtactctctaatattccaaactacaaaaacat

SEQ ID NO: 66746 - DNA, 317 bp, Glycine max
gaaggtgcaagagtttgttgtgagctataagctagtttatcgtgaggagaatatgaagttgtttgttttctttgttgctgcagtagttttggtagcatggccatgccatggtgcaggctaccaaaggttccctctctgaatgaaaactggctatggtgagcgttcttcggaggtaaaatgcgcaagttttatgcttgctgtggaagcacacaacatccgagcctttaaaaccattcctgaagagtgcgttgaaccaacaaaggactacattaatggcgaacaatttagatcagactctaaaacagttaaccaacaag

SEQ ID NO: 66747 - DNA, 423 bp, Glycine max
  unsure (1)..(423): unsure at all n locations
ggctccactgtttcccacgctcctctgcaaaacccatttcgagaaactccttcacttgcgctctcacacattcacccactcacaagtacgtgtaccccgacccagttcccgaattcgcagagcacgtgagagacccagaagttcaaatttgaactcttttggaagctttcggaggagggcgtggacgagtttggggacgaccttcattcggtcgtagatgtttgcgcgcagatatttagtgagtttttgcacaaggagtatggaggtcctgggacattgttggtggagccattcacggatatgatggttgctctaaagaagaagaaactaccaggagcagctctggctgcaagagagtcactattatggttacaaaattttgttgataaggattgggaagtttgggactcanaacttaaatga

SEQ ID NO: 66748 - DNA, 94 bp, Glycine max
gaagaaagctgctagcagagggaagttctacacttttttgtttggattgatcgagtgtactttttcttttcgagattggcttggtgtgcagtgg

SEQ ID NO: 66749 - DNA, 312 bp, Glycine max
gatctggcagcagaaaaacaagtagttgagaactaagaagaaggaaatggcttcctcaatgatctcctccccagctgttaccaccgtcaaccgtgccggtgccggcatggttgctccattcaccggcctcaaatccatggctggcttccccacgaggaagaccaacaatgacattacctccattgctagcaacggtggaagagtacaatgcatgcaggtgtggccaccaattggcaagaagaagttcgagactctttcctacttgccagacctcgatgatgcccaattggcaaaggaagtcgaataccttct

SEQ ID NO: 66750 - DNA, 397 bp, Glycine max
ggcacaagtgagtttgttgatcgagataactagaaacagtgtgatgaaaatgaaggtccttgttttcttcgttgctacaattttggtagcatggcaatgccatgcgcacgatatgttccctctccgaatgaacactggctatggtgcccgtactccggaggtgaaatgcgcaagttggaggcttgctgtggaagcacacaacatctttggctttgagaccattcctgaagagtgcgttgaagcaacaaaggaatacatccatggcgaacaatatagatcagactccaaaacagttaaccaacaagcttacttttatgccagagacctcgaagtccatcccaaggacacatttgtgttcagtatagatggcaccgtactctctaatattccatactac

SEQ ID NO: 66751 - DNA, 121 bp, Glycine max
aactcttataacatgagttcaaagagccgactgttaagcggtcgctcaataggatctctccttgcttacgcgtcaatgtcatgtcctcactcgtctacacagtcacctccattcaattcag

SEQ ID NO: 66752 - DNA, 396 bp, Glycine max
ggcacaagtgagtttgttgatcgagataactagaaacagtgtgatgaaaatgaaggtccttgttttcttcgttgctacaattttggtagcatggcaatgccatgcgtacgatatgttccctctccgaatgaacactggctatggtgcccgtactccggaggtgaaatgcgcaagttggaggcttgctgtggaagcacacaacatctttggctttgagaccattcctgaagagtgcgttgaagcaacaaaggaatacatccatggcgaacaatatagatcagactccaaaacagttaaccaacaagcttacttttatgccagagacctcgaagtccatcccaaggacacatttgtgttcagtatagatgggaacgtactctctaatattccatacta

SEQ ID NO: 66753 - DNA, 414 bp, Glycine max
gaaggtgcaagagtttgttgtgagctataagctagtttatcgtgaggagaatatgaagttgtttgttttctttgttgctgcagtagttttggtagcatggccatgccatggcgcaggctaccaaaggttccctctccgaatgaaaactggctatggtgagcgttcttcggaggtaaaatgcgcaagttttaggcttgctgtggaagcacacaacatccgagcctttaaaaccattcctgaagagtgcgttgaaccaacaaaggactacattaatggcgaacaatttagattagactctaaaacagtttaacaacaagctttcttttatgctagtgaacgccaagttcatcacaacgacatatttatattccgcatagattacaccggtatctctaatatcccatactatgaaaa

SEQ ID NO: 66754 - DNA, 411 bp, Glycine max
  unsure (1)..(411): unsure at all n locations
ggtgcacaagtgagtttgttgatcgagataactagaaacagtgtgatgaaaatgaaggtccttgttttcttcgttgctacaattttggtagcatggcaatgccatgcgtacgatatgttccctctccgaatgaacactggctatggtgcccgtactccggaggtgaaatgcgcaagttggaggcttgctgtggaagcacacaacatctttggctttgagaccattcctgaagagtgcgttgaagcaacaaaggaatacatccatggcgaacaatatagatcagactccanaacagttaaccaacaagcttacttttatgccagagacctcgaagtccatcccaaggacacatttgtgttcagtatagatggcaccgtactctctaatatttcatactacaaaaaacatgga

SEQ ID NO: 66755 - DNA, 386 bp, Glycine max
gaaggtgcaagagtttgttgtgagctgtaagctagtttatcgtgaggagaatatgaagttgtttgttttctttgttgctgcagtagttttggtagcatggccatgccatggcgcaggctaccaaaggttccctctccgaatgaaaactggctatggtgagcgttcttcggaggtaaaatgcgcaagttttaggcttgctgtggaagcacacaacatccgagcctttaaaaccattcctgaagagtgcgttgaaccaacaaaggactacattaatggcgaacaatttagatcagactctaaaacagttaaccaacaagctttcttttatgctagtgaacgcgaagtccatcacaacgacatatttatattcggcatagataacaccg

SEQ ID NO: 66756 - DNA, 286 bp, Glycine max
tggtactgctccgtcaacacgatacgacaatgtggttgcgatcctcctagacactggtatggctgctacaggacgacagatggcgttgaacggcctcaattctgctgcggtcgctctcaggggtctaaacttcagtatgcgtgcatcacacgttgtaacttgtcgaatctgtaacccctattcgattcacaggtcgtcgatgtacactaccatcatcgttagcatgctgtggtatcgcagcataatcccgcgtgcaacacccttccttatcgagtgcgattattca

SEQ ID NO: 66757 - DNA, 395 bp, Glycine max
ggtgcacaagtgagtttgttgatcgagataactagaaacagtgtgatgaaaatgaaggtccttgttttcttcgttgctacaattttggtaacatggcaatgccatacgtacgatatgttccctctccgaatgaacactggctatggtgcccgtactccggaggtgaaatgcgcaagttggaagcttgctgtggaagcacacaacatctttggctttgagaccattcctgaagagtgcgttgaagcaacaaaggaatacatccatggcgaacaatatagatcagactccaaaacagttaaccaacaagcttacttttatgccagagacctcgaagtccatcccaaggacacatttgtgttcagtatagatggcaccgtactctctaatattccata

SEQ ID NO: 66758 - DNA, 81 bp, Glycine max
gagcttcaatgggtcggtatcacgggcttcggaataatctcacaacagtcctctcagcgtagcagtccactatgcgatact

SEQ ID NO: 66759 - DNA, 321 bp, Glycine max
cggggttctagtgtgtgattgtttgttgttgtaactcgttcttcttcttttgttgttctgtgtttgtgtttgttttttccctcacctgaaaatgtcttgctgcggtggtaactgtggttgcggaagctcctgcaagtgcggcaacggctgcggaggctgcaagatgtacccagacttgagctacactgagtcaaccaccaccgagaccttggtcatgggagtggcacctgttaaggctcaatttgagggtgctgaaatgggtgtgcccgctgagaacgatggctgcaaatgtggaccacactgctcctgcaacccctgcac

SEQ ID NO: 66760 - DNA, 406 bp, Glycine max
ggcacaagtgagtttgttgatcgagataactagaaacagtgtgatgaaaatgaaggtccttgttttcttcgttgctacaatttttggtagcatggcaatgccatgcgtacgatatgttccctctccgaatgaacactggctatggtgcccgtactccggaggtgaaatgcgcaagttggaggcttgctgtggaagcacacaacatctttggctttgagaccattcctgaagagtgcgttgaagcaacaaaggaatacatccatggcgaacaatatagatcagactccaaaacagttaaccaacaagcttacttctatgccagagacctcgaagtccatcccaaggacacatttgtgttcagtatagatggcaccgtactctctaatattccatactacaaaaaaca

SEQ ID NO: 66761 - DNA, 221 bp, Glycine max
gaccaattgaacaaatatacccaaagccctatacaccaaaaccctaaaaaacacccatttgattcatttccaatggcaaccctcaaggttgcatttttggctgcattcccctgcatggttttgttaattcaaccaatggaaaatgcacctaccacttccgggaaggtgacaattacccggcccaattgcaccggttacctcaaaaaggaaggaaccccttc

SEQ ID NO: 66762 - DNA, 281 bp, Glycine max
caacggtatcgttgctacagcacgacataaaggtcaggctgcgataataccacagaatggggaccatatcaagtagcagtgacactagatctgtattcagattatattgcaaaactggcatcattcagcatgacagtatctatcattgcctgcacatctgtcaccagactgtccgcaatatctgctcagtggagattattcgtggtgagtgctaccagatttcaacgggataccgtcatttcttacatctatgaaacctctggaatgaagaacttgatgtt

SEQ ID NO: 66763 - DNA, 345 bp, Glycine max
gagcgaaacagagagtgatttcagtgagcgatcggtgttcacttgatctcatcataatcgtcagcgtcaattgaagaagatgccgatcagaaacatcgccgtcggaaggcctgaagaggcgactcaccccgacacgttgaaggcggctttggctgagttcatctcaaccttcatcttcgtgttcgccggctcaggctccggcatcgcctacaacaagctcaccgacaacggcgctgccacccctgccggcctcatctccgcccccatcgcccatgcattcgccctcttcgtcgccgtctccgtcggcgccaacatctccggcggccaagtcaaccccgccggtca

SEQ ID NO: 66764 - DNA, 407 bp, Glycine max
gaaggtgcaagagtttgttgtgagctataagctagtttatcgtgaggagaatatgaagttgtttgttttctttgttgctgcagtagttttggtagcatggccatgccatggcgcaggctaccaaaggttccctctccgaatgaaaactggctatggtgagcgttcttcggaggtaaaatgcgcaagttttaggcttgctgtggaagcacacaacatccgagcctttaaaaccattcctgaagagtgcgttgaaccaacaaaggactacattaatggcgaacaatttagatcagactctaaaacagttaaccaacaagctttcttttatgctagtgaacgcgaagtccatcacaacgacatatttatattcggcatagataacaccgtactctctaatgtcccatact

SEQ ID NO: 66765 - DNA, 414 bp, Glycine max
gaaggtgcaagagtttgttgtgagctataagctagtttatcgtgaggagaatatgaagttgtttgttttctttgttgctgcagtagttttggtagcatggccatgccatggcgcaggctaccaaaggttccctctccgaatgaaaactggctatggtgagcgttcttcggaggtaaaatgcgcaagttttaggcttgctgtggaagcacacaacatccgagcctttaaaaccattcctgaagagtgcgttgaaccaacaaaggactacattaatggcgaacaatttagattagactctaaaacagttaaccaacaagctttcttttatgctagtgaacgcgaagtccttcacaacgacatatttatattcggcatagataacaccgtactccctaatatcccatactatgaaaa

SEQ ID NO: 66766 - DNA, 394 bp, Glycine max
ggcacaagtgagtttgttgatcgagataactagaaacagtgtgatgaaaatgaaggtccttgttttcttcgttgctacaattttggtagcatggcaatgccatgcgtacgatatgttccctctccgaatgaacactggctatggtgcccgtactccggaggtgaaatgcgcaagttggaggcttgctgtggaagcacacaacatctttggctttgagaccattcctgaagagtgcgttgaagcaacaaaggaatacatccatggcgaacaatatagatcagactccaaaacagttaaccaacaagcttacttttatgccagagacctcgaagtccatcccaaggacacatttgtgttcagtatagatggcaccgtactctctaatattcatact

SEQ ID NO: 66767 - DNA, 350 bp, Glycine max
tcagtacagcacaaaaaggggagtgtggtacagatccaacaagacaacagtttgaggttgaggatttgggattggtaaagcgatgcaatgcgctgcgtctcgtcatcatctctttcgagtcatccctcagtcatattctgccaatccagcattctcatccttccattcatacatacacacatctgatcgcgtatcatttctcccatggagtcttagcgcatcctcaaggatcctcatcgacctgctccatgacctaccgatttcttgcatggctagtctagtcgctgatgacatgttgcattagcaaccaatgattttgggtcctgctcacattccctaggctagatgtg

SEQ ID NO: 66768 - DNA, 406 bp, Glycine max
  unsure (1)..(406): unsure at all n locations
ggcacaagtgagtttgttgatcgagataactagaaacagtgtgatgaaaatgaaggtccttgttttcttcgttgctacaattttggtagcatggcaatgccatgcgtacgatatgttccctctccgaatgaacactggctatggtgcccgtactccggaggtgaaatgcgcaagttggaggcttgctgtggaagcacacaacatctttggctttgagaccattcctgaagagtgcgttgaagcaacaaaggaatacatccatggcgaacaatatagatcagactccanaacagtttaacaacaagcttacttttatgccagagaactcgaagtccatcccaaagacacatttgtgttcagtatagatggcaccgtactctctaatattccatactacaaaaaacat

SEQ ID NO: 66769 - DNA, 130 bp, Glycine max
ggcacaagtgagtttgttgatcgagataactagaaacagtgtgatgaaaatgaaggtccttgttttcttcgttgctacaattttggtagcatggcaatgccatgcttccaaaagttccctcccccaattg

SEQ ID NO: 66770 - DNA, 406 bp, Glycine max
ggactgagcagccacccacccacccttcagcgaagagatggaggcacaatcttgtgatgctaggccacatttgaaggccacatttcgtcttggctcagaatcatattctgttcaggcaaacaaaggttccttatcagaacaattggtttcactgaaagaggagagcatgaccatattgaaggatttcataacaaagcataatgttcctcatgatgtcccagacgagccattagaagcttcttcagatgatgatgatattcccgagaagcctcaagggaagtctaagaaaaccaagttgacttagctttgacatgtggtttgatcggtctgaatcatttgatgtatgtattgtatgattgaacttttagttagtttattgaaaaatttacgaaagtagcagtttggc

SEQ ID NO: 66771 - DNA, 162 bp, Glycine max
cgttcatgctcgacaggtggacaactccttttaacagcctcttttaatggtattgttttgatgacacccctgatgtcatttttgataaccacattgagttttagggcattgatcatggccattatcgatagcatgttagatgtcaactttatatttgtgtcc

SEQ ID NO: 66772 - DNA, 109 bp, Glycine max
gacacaactgaacgggatcagctatctatagcagccaggagggtgagcagtaccttgttcgccctctttgcgaggtgtgtgccctcagctcgtagcgtaccttcagcca

SEQ ID NO: 66773 - DNA, 390 bp, Glycine max
aggcgtcagcaaaaaaaagacagaagagtgtacacatatgaatttgatgatgtagattgctaaactcactgtgacaattctgaacggccatggtcactccattaccattctttcgatacacagttcagccgatacgtacaataagtgcgctctaccgagtttcatggcgcatggcagtcgttgaccgacaagtgaagtgagaatgttgtgcgccagcagtgacaacacagtggaactttaggttttacagcagtcctgacaactacattacagcaagcgcggaatgcatccatggagatcacatacacatcaagcccgataacagtttcacagtcagctatatctttataccaccagacctcgaggtccatcacaaagacaaatgtgttt

SEQ ID NO: 66774 - DNA, 352 bp, Glycine max
gagtgcacaagtgagtttgttgatcgagataactagaaacagtgtgatgaaaatgaaggtccttgttttcttcgttgctacaattttggtagcatggcaatgccatgcgtacgatatgttccctctccgaatgaacactggctatggtgcccgtactccggaggtgaaatgcgcaagttggaggcttgctgtggaagcacacaacatctttggctttgagaccattcctgaagagtgcgttgaagcaacaaaggaatacatccatggcgaacaatatagatcagactccaaaacagttaaccaacaagcttacttttatgccagaaacctcgaagtccatcccaaggacaca

SEQ ID NO: 66775 - DNA, 360 bp, Glycine max
aaactcaggcctccaagaaggttcagttatctctttgatgaatgagggcgacgagatgtacatccgatcgtgaacgggttccattattgattgctaacatagtgtacattcagtgtaccattgatgatatgtagcttgttttgttgaaacagacttttgttttggcgacaactgaaatttcagggaaatacagtcaccactagatggtccagttttacatgcacatttatgagaagtcaaaccacatcgacattgtcacctaacttcatttcaatgatcgacgctttagacagttctcatagtgaaacctattccattaccaattttcatcactatgcataatatacccctttctccaac

SEQ ID NO: 66776 - DNA, 306 bp, Glycine max
gggaaacggaaatatgattccgaatccttatcctgtttgcttcagtgcaaatggtttccgcctcgagcatcaatcccaacgatctcatgtatcgtacatcccgtctacctgatggtggtcgatatctcccattaaaggagggacctcttagaaacatcccactggtacccagattactggctccgcgagagattccatgatccacagtagcagtacgaccacgtttgccacatccaatttgacctagatgttcatgcttaacatgaatttcaaaggaaagaaggcaaataggtggtgtccttgagc

SEQ ID NO: 66777 - DNA, 228 bp, Glycine max
ggcacaaggcatttggttgatcaatatacgtagaaccagagcgaggaagatcaacgccctgcaatactgccatccacaaaattcgcgggcagaaccatgctatggatcgcacatgatcccgcgacgggtttggactagctacagtacgcgtaggcctttcatcaaatacgccggtatgttgagtgatctagcatcatacaggatcataggttttctgcaccagtcttc

SEQ ID NO: 66778 - DNA, 418 bp, Glycine max
gaaggtgcaagagtttgttgtgagctataagctagtttatcgtgaggagaatatgaagttgtttgttttctttgttgctgcagtagttttggtagcatggccatgccatggcgcaggctaccaaaggttccctctccgaatgaaaactggctatggtgagcgttcttcggaggtaaaatgcgcaagttttaggcttgctgtggaagcacacaacatccgagcctttaaaaccattcctgaagagtgcgttgaaccaacaaaggactacattaatggcgaacaatttagatcagactctaaaacagttaaccaacaagctttcttttatgctagtgaacgcgaagtccatcacaacgacatatttatattcggcatagataacaccgtactctctaatatcccatactatgaaaaacat

SEQ ID NO: 66779 - DNA, 412 bp, Glycine max
  unsure (1)..(412): unsure at all n locations
gatctggcagcagaagaacaagtagttgagaactaagaaggagaagcaaatggcttcctcaatgatctcttccccagctgttaccactgtcaaccgtgccggtgccggcatggttgctccattcactggcctcaagtccatggctggcttccccaccagaaagaccaacaatgacattacctccattgctagcaacggtggaagagtgcaatgcatgcaggtgtggccaccagttggcaagaagaagtttgagactctttcctacctgccagaccttgatgatgcacaattggcaaaggaagtagaataccttcttangaagggatggattccttgcttggaattcgagttggagcacggtttcgtgntacgtgagcacaacaggtcaccaggataccacgatggacgctac

SEQ ID NO: 66780 - DNA, 412 bp, Glycine max
ggcacaagtgagtttgttgatcgagataactagaaacagtgtgatgaaaatgaaggtccttgttttcttcgttgctacaattttggtagcatggcaatgccatgcgtacgatatgttccctctccgaatgaacactggctatggtgcccgtactccggaggtgaaatgcgcaagttggaggcttgctgtggaagcacacaacatctttggctttgagaccattcctgaagagtgcgttgaagcaacaaaggaatacatccatggcgaacaatatagatcagactccaaaacagttaaccaacaagcttacttttatgccagagacctcgaagtccatcccaaggacacatttgtgttcagtatagatggcaccgtactctctaatattccatactacaaaaaacatggatat

SEQ ID NO: 66781 - DNA, 369 bp, Glycine max
gaaggtgcaagagtttgttgtgagctataagctagtttatcgtgaggagaatatgaggttgtttgttttctttgttgctgcagtagttttggtagcatggccatgccatggcgcaggctaccaaaggttccctctccgaatgaaaactggctatggtgagcgttcttcggaggtaaaatgcgcaagttttaggcttgctgtggaagcacacaacatccgagcctttaaaaccattcctgaagagtgcgttgaaccaacaaaggactacattaatggcgaacaatttagattagactccaaaacagtttgccaacaagctttcttttaagccagtgaacgcgaagttcaacacaacgacatatttatatt

SEQ ID NO: 66782 - DNA, 378 bp, Glycine max
gacagatatcagcttcctgttgttggagataacctctggcttccggaacatcggcagactttcaggtccatatgtccaagcgttcacaccatcgcccgcagacttcagttatggtgcaagatattcaggtacacgcgactgaatccgtatcttccaccatcaatagctacaaactaattcatgaaaacattcagcgccacctcaatgctattgtttcatcctctggtgagtatcaagtcagcatcgttgactacatcgctgatcccacctaggtatcacacggtcgtgcctctcctatctggcccagtccatatttgggacatcgacatcagcactgtagccatcaggcctagatcctttaaattcagcatcttcgca

SEQ ID NO: 66783 - DNA, 400 bp, Glycine max
ggcacaagtgagtttgttgatcgagataactagaaacagtgtgatgaaaatgaaggtccttggtttcttcgttgctacaattttggtagcatggcaatgccatgcgtacgatatgttccctctccgaatgaacactggctatggtgcccgtactccggaggtgaaatgcgcaagttggaggcttgctgtggaagcacacaacatctttggctttgagaccattcctgaagagtgcgttgaagcaacaaaggaatacatccatggcgaacaatatagatcagactccaaaacagttaaccaacaagcttacttttatgccagagacctcgaagtccatcccaaggacacatttgtgttcagtatagatggcaccgtactctctaatattccatactacaaa

SEQ ID NO: 66784 - DNA, 152 bp, Glycine max
cggagacgctttcccgaatacaccccctggcaccgggcgccctttacgataaatgcggacttaaccatgcaggccacgtcataacccttctccaatgtcatctcaatccaattcactgaccgtcgtttccccgcgtcctgacaggtaaaacc

SEQ ID NO: 66785 - DNA, 210 bp, Glycine max
agggtggggaaatttggccctggagatcgcgatcgtgtttgcctcgaagattgcagggactttactaatcttcgtcttgggcatccaaataaccactgatgacatgactccggaaatacccacgagcgttatcggagcattcgaacccaacgtcatcaatattaagaaggatatccttgtaaaatctcccacccttcttttcaccattga

SEQ ID NO: 66786 - DNA, 299 bp, Glycine max
tggtacggctgcgaggacgcccacagaaggtgtaaggcttacgagaacactacatgcaaggtacagctcgcatcaagacgagtacaacggtattcgaattcaatgggacgtcattttggtacggctgcaataagacaacactagggtaacgctgcttaatcaccatacaacggtaccgccgttagacaactacagataggatcaataggtcgtcaccgatgcccttcccaacaattgcgcaaactcaatggccaatgggatgcaccctgtagcagcccattaagcgacgtcggagttct

SEQ ID NO: 66787 - DNA, 282 bp, Glycine max
agagttcccgggtccatccatacgtccgtccagatgtcagtacaggtgatattgggacacttaaattgagaacatgtgaatctagaatataggactgttctcatcaactcatctcatcttatctcttctcacagtgggcactggttctatcctgaatatttatgttatcgatgatgccttttccattggacgtgttcgatatctgtggatcaatccttcaaatgtctccactgctcattatgctttcagtgtgcaattcattccaggttataccccaaattt

SEQ ID NO: 66788 - DNA, 136 bp, Glycine max
tatggctgtgacagacgacagaaaggggttctagtgtgtgattgtccgttgttacgactctttcatcttgcgtcggtgttctgtgtgcatgtttgttcaatcactcagctgaaaacgacttgctgctgtcgcaact

SEQ ID NO: 66789 - DNA, 189 bp, Glycine max
gtgtgtttgtggatgttcaaggccttcaactaaggaggactaagtcagatacagtatgttgtgagtacttttttcgtttgtgatgttttctataacattgttaacatagctagtaaaattgaacgtttgtcataagaaataagagatgaatcagtttaggcttatctgaatcatagcaacttctttcac

SEQ ID NO: 66790 - DNA, 318 bp, Glycine max
aacaggcgtcagcccacacgtccggccacgcgtccgacagatgacaaaaagataacagtgcgggaagacgacaaaagggcatggccatgagcatggccatgacagcatcagcagcagtgacagtgattaaactgctgcatcacctatatatttaaaaggtttatgggaccatagtagcgagggctgtgccttaatttctcacactctctctctctctctctctctctctctctttttcctttttccctatcgtgtgaatcatttatgagtgcgaaaaacaaaactgacaaattattcctgtttctggattccaattcc

SEQ ID NO: 66791 - DNA, 361 bp, Glycine max
gaaggtgcaagagtttgttgcgagctataagctagtttatcgtgaggagaatatgaagttgtttgttttctttgttgctgcagtagttttggtggcatggccatgccatggcgcaggctaccaaaggttccctctccgaatgaaaactggctatggtgagcgttcttcggaggtaaaatgcgcaagttttaggcttgctgtggaagcacacaacatccgagcctttaaaaccattcctgaagagtgcgttgaaccaacaaaggactacattaatggcgaacaatttagatcagactctaaaacagttaaccaacaagctttcttttatgctagtgaacgcgaagttcatcacaacgacata

SEQ ID NO: 66792 - DNA, 58 bp, Glycine max
gagacctcaggtcacgcggggctacccgctgagtttaagcctatcaataagccggacc

SEQ ID NO: 66793 - DNA, 131 bp, Glycine max
tgatattacttatacaagggtgagattaaaccaacaacttctgatcattttccttcttttgtttttttgctggaaattaacgcacatgtaaaatgtctccactgtgttttttttcaatcagtgggctgaca

SEQ ID NO: 66794 - DNA, 131 bp, Glycine max
ggcacaagtgagtttgttgatcgagataactaaaaacagtgtgatgaaaatgaaaggccttgttttcctcgttgccacaattttgggagcatgggaaagccaagcgtacgaaatgtttcctccccgaatga

SEQ ID NO: 66795 - DNA, 283 bp, Glycine max
ggcagcagaagaacaagtagttgagaactaagaaggagaagcaaatggcttcctcaatgatctcttccccagctgttaccactgtcaaccgtgccggtgccggcatggttgctccattcactggcctcaagtccatggctggcttccccaccaggaagaccaacaatgacattacctccattgctagcaacggtggaagagtgcaatgcatgcaggtgtggccaccagttggcaagaagaagtttgagactctttcctacctgccagaccttgatgatgcaca

SEQ ID NO: 66796 - DNA, 104 bp, Glycine max
cgtagtaagcgatgaaatgcttcggggagttgaaaataagcgtagatccggggattcccgatataggtcaacctttcgaactgctgctgaatccacgggcagac

SEQ ID NO: 66797 - DNA, 99 bp, Glycine max
gtgtattgagtaggaaaagtggtgtctgtgagttatgtgaacgtttgttctgttcttgttttatcatcaagcgaaaaaatatgtgattgttttattgac

SEQ ID NO: 66798 - DNA, 294 bp, Glycine max
ggctcttcgttggcgcctctcctcagacgagttgcttcagttggaggatgcagcaaatgaatcacctcgcaggatgatccaaaacattttccaaaccaggtatacatgtaacactaaaaaggcaaaccaaataaagagatacggaggatgcaatcatccaagtgttttacatgacttggcattcataacagataaaaccagtggcgggaccttcgcactcggttcgaaggaatgcatagtttactcaatggaggtcactggtttatatcatctggtatcattaaaggcagagag

SEQ ID NO: 66799 - DNA, 74 bp, Glycine max
gtagttaagttgacaatggaaatgtagtatttaaatatagcatatttttttttgtgtgtgatggcaacaccaat

SEQ ID NO: 66800 - DNA, 290 bp, Glycine max
ggcacaagtgagtttgttgatcgagataactagaaacagtgtgatgaaaatgaaggtccttgttttcttcgttgctacaattttggtagcatggcaatgccatgcgtacgatatgttccctctccgaatgaacactggctatggtgcccgtactccggaggtgaaatgcgcaagttggaggcttgctgtggaagcacacaacatctttggctttgagaccattcctgaagagtgcgttgaagcaacaaaggaatacatccatggggaacaatatagatcagactccaaaa

SEQ ID NO: 66801 - DNA, 187 bp, Glycine max
ggtgtcggcaaaaccaactcctgcacttgtggttaatggcatcctaatcgcgttgcagaaccatgagcacactcactcgcttaccttctctcactctcactgccgcacaaacatctttgctcactttgaatcataaccgcacatgcaccaccgcacacactcggcgtcccaattgctccatcctctc

SEQ ID NO: 66802 - DNA, 328 bp, Glycine max
gagtaagagcaggttgtaatttctaatggaccgtaagggttgtgaaacaagcaggaaaaagccatggtgcacgtttctttcaaggagattgatgagaacaccatcaaggatcttcggcggcactagcatcatgtatctatgcgtaccttcttcacttcggctcctcactagcatcgtcctctccatagggaattattaagtgtccaataaaccccttcgcatcatctgtagaactcctataggacaattgcaccgtgtttcacaaaacctgcaccgattcttctgcggtgacgctcttcacctatgaatgattcgtctcggtatcttc

SEQ ID NO: 66803 - DNA, 296 bp, Glycine max
aagggtggcaaaaaaacaaaaaaggggagactatttagagacttgccatggacgtttcattgggagtgtattgtcctctgcttggtcttcacgacaatatggcacttactgttgctcatgcccaattcttcccgttcagatgggcacccaagtcgaaacttgcctccgtcgttggaagtcaatgcgcctcctccccttttggtgtgaaaaaccctaattgtaatcgacctgaaacttttgatcttcatccgaatacgctcgcttatcacattcatgcgttccaatttaggaaacat

SEQ ID NO: 66804 - DNA, 340 bp, Glycine max
ggcacaagtgagtttgttgatcgagataactagaaacagtgtgatgaaaatgaaggtccttgttttcttcgttgctacaattttggtagcatggcaatgccatgcgtacgatatgttccctctccgaatgaacactggctatggtgcccgtactccggaggtgaaatgcgcaagttggaggcttgctgtggaagcacacaacatctttggctttgagaccattcctgaagagtgcgttgaagcaacaaaggaatacatccatggcgaacaatatagattagactccaaaacagttaaccaacaagcttacttttatgccagagacctcgaagtccatccc

SEQ ID NO: 66805 - DNA, 132 bp, Glycine max
ggcaggtgcaacaccaaaaaattgcgtaaggtcaacccaaaccggaaacaacaatggggattgatttcaaagccgggggttaaagcaaaaaaaccaaaagaacagcaccccagtccaatgatatctatctta

SEQ ID NO: 66806 - DNA, 105 bp, Glycine max
gacaacacagaacaaaaacaaagaaaaaaaaaacccttagccaacacaaccatcatggccacctctgctattcagcaatcagcattcactggtcaaactgctctg

SEQ ID NO: 66807 - DNA, 288 bp, Glycine max
gatagcaacagcatatcatgcattgtggtcaacaacttaaattcactccctgtgtggtgcttacgtccacaaaaccaaacatgtcaaacacatgggacaactgcgactgcgctgacaagactagctgcaccaagggaaacagctctcgtgttaatgtaaacaatgagaacagttacatcgacgactgttgtcatcgatgttcgaccagctgatcatgataggaagtgtcagtgtagcactaactgcacgtgcacagactgcacctgtggacattaatgaatatgtatg

SEQ ID NO: 66808 - DNA, 172 bp, Glycine max
aaaaggggcacaagttagtttgttgattgagataactagaaacactgtgatgaaaatgaaagtccttgttttcctccttgccacaattttggtagcacggcaatgccatgcgtacgaaatgttccctcccccaattaacactggctatggtgcccgtactcccgaagtgaaa

SEQ ID NO: 66809 - DNA, 82 bp, Glycine max
gcacaagtgagtttgttgattgagataactagaaacagtgtgatgaaaattaaaggccttgttttcttccttgccacaattt

SEQ ID NO: 66810 - DNA, 150 bp, Glycine max
caatggtactgctgcaacaagacaacaggagggtacagcagcataaagaccatagaatggtacggctgagattaacactactgaacggtaccgtcgtcatcagaccacagcatggtccagctgttagacgactacatatgggtcaggctg

SEQ ID NO: 66811 - DNA, 345 bp, Glycine max
gcacaagtgagtttgttgatcgagataactagaaacagtgtgatgaaaatgaaggtccttgttttcttcgttgctacaattttggtagcatggcaatgccatgcgtacgatatgttccctctccgaatgaacactggctatggtgcccgtactccggaggtgaaatgcgcaagttggaggcttgctgtggaagcatacaacatctttggctttgagaccattcctgaagagtgcgttgaagcaacaaaggaatacatccatggcgaacaatatagattagaatccaaaacagttaaccaacaagcttacttttatgccaaagacctcgaaatccatcccaaagac

SEQ ID NO: 66812 - DNA, 270 bp, Glycine max
gggcagcagaagaacaagtagttgagaactaagaaggagaagcaaatggcttcctcaatgatctcttccccagctgttaccactgtcgaccgtgccggtgccggcatggttgctccattcactggcctcaagtccatggctggcttccccaccagaaagaccaacaatgacattacctccattgctagcaacggtggaagagtgcaatgcatgcaagtgtggccaccagttggcaagcagaagtttgagactctttcccaactgccagac

SEQ ID NO: 66813 - DNA, 235 bp, Glycine max
caaccagccatggggatacaagaagcagaaagaggtgcactcgcaaaagcgtgaacaagcagtccatgcagaaacgggctcttcactgatggcatttgtagcacgctggggtgtcacgttcactgtccacatgtcgtcagttatatgcgtcctctcgctctcaaggaactcctcatcacacatagttgtggctagtggtggcatgaaggtcctcacagacaggcgttattgaatt

SEQ ID NO: 66814 - DNA, 252 bp, Glycine max
gatatctggcagcagaagaacaagtagttgagaactaagaaggagaagcaaatggcttcctcaatgatctcttccccagctgttaccactgtcaaccgtgccggtgccggcatggttgctccattcactggcctcaagtccatggctggccttcccagcaggaagaccaacaatgacattacctccagtgctagcaacggtggaatagttcaatgcatgcaagtgtgggcaccagttggcaagaagaagttt

SEQ ID NO: 66815 - DNA, 191 bp, Glycine max
ccgggtctactcacaaatccgaaccgctgcgaccagtggacagaacgggaatcccaatctcatcttccatttccaccatcaatactatttgcttgacgttttcaaccttctctaaccattgcagagttggatagagcgtctcagatccattccatagccatgtctggtgtcagcccgctttctcaagcttg

SEQ ID NO: 66816 - DNA, 293 bp, Glycine max
ggttctagtgtatgtgattgttgtgactcgttcttcttcgtcgttatcttcttcttttgttgtttgtgtgtttgttttttctctcacctgaaaatgtcttgctgcggtggtaactgtggttgcggaagcgcctgcaagtgcggcaacggctgcggaggctgcaagatgtacccacacttgagctacaccgagtcaaccaccaccgagaccttggtcatgggagtggcaccagttaaggctcaattcgagagtgctgacatgggtgttcccgctgagaaacactgctgcaaatg

SEQ ID NO: 66817 - DNA, 159 bp, Glycine max
aggaacgccgtcgtcgggatgctgcaacggagtgaagagcctcaatgccgccgccaacaccaccgccgaccgccagacggcgtgcaactgcctcaagtcggccgccagccaagtctcccgcttcaccgccaacaacgccgcctcgctccccggcacctg

SEQ ID NO: 66818 - DNA, 214 bp, Glycine max
ggcacaagtgagtttgttgatcgagataactagaaacagtgtgatgaaaatgaaggtccttgttttcttcgttgctacaagtttggtagcatggcaatgccatgcgtacgatatgttccctctccgaatgatcactggctatggtgcccgtagctccggatgtgaaatcgccacgttggaggcttgctgtggaagcacacaacatctttggctt

SEQ ID NO: 66819 - DNA, 194 bp, Glycine max
  unsure (1)..(194): unsure at all n locations
gacatcaaacatatacacaaaagagcactgaccaaaccattttattttatttttgaatcaagggtgagggccttccatggcttccgcttgtgcttcctctgcaattacagctgttgccatctctacgccgagttccgggcagaagaatggatcaggaggttgttttcttagtggaaggaaattganggtgaaaa

SEQ ID NO: 66820 - DNA, 279 bp, Glycine max
gaagagaggatttgggattgggaaggcgagggattgcgctgcgtctcttcctcttctctttcgattcatccctcattcataatcttccaatccaacaacctcagcctcacactcacacatacacacatctgaacgcgtatcgtccctcccatggcttcaaagcgcatcctcaaggagctcaaggacttgcagaaagacccaccaacttcttgcagcgctggtcgagtagctgaggacatgttccattggcaagcaacgattaggggtcctgcggatagt

SEQ ID NO: 66821 - DNA, 59 bp, Glycine max
acacaaggggagagacaacaggcattcttttcagctgtattaatttctctccttgtgca

SEQ ID NO: 66822 - DNA, 90 bp, Glycine max
cgagggggtcatagtagtatcactcattctcatctttctctcttctctctccaccacaaacccgtaactccggaccccgttcccctctcg

SEQ ID NO: 66823 - DNA, 216 bp, Glycine max
gaagaagaagaaggagcatggccatgagcatggccatgacagcagcagcagcagtgacagtgattaaactgctgcatcacctatatatttaaaaggtttatgggaccatagtagcgagggctgtgccttaatttctctctctctctctctctctctctctctctctttttcctttttccctatcttgtgatccatttatgagtgagaaaaacacaa

SEQ ID NO: 66824 - DNA, 165 bp, Glycine max
tcccgggacgcgtcagaactgcgaacagctgccaacagcggggggataggggtgatgtcaaagaactacgacactcggggtcgctcaccagactctcgaagtgatcgccgtgatctcccgtgccttcgttttgaggccagatggcgtagcagacacggatgggaa

SEQ ID NO: 66825 - DNA, 269 bp, Glycine max
ggcacaagtgagtttgttgatcgagataactagaaacagtgtgatgaaaatgaaggtccttgttttcttcgttgctacaattttggtagcatggcaatgccatgcgtacgatatgttccctctccgaatgaacactggctatggtgcccgtactccggaggtgaaatgcgcaagttggacgcttgctgtggcaatacaaaacatctttggctttgagatcattcctgaagaatgcgttgactcaacacaggaatacatccatggtgaac

SEQ ID NO: 66826 - DNA, 400 bp, Glycine max
ggcacaagtgagtttgttgatcgagataactagaaacagtgtgatgaaaatgaaggtccttgttttcttcgttgctacaattttggtagcatggcaatgccatgcgtacgatatgttccctctccgaatgaacactggctatggtgcccgtactccggaggtgaaatgcgcaagttggaggcttgctgtggaagcacacaacatctttggctttgagaccattcctgaagagtgcgttgaagcaacaaaggaatacatccatggcgaacaatatagatcagactccaaaacagtttaccaacaagctttactttatgccaaagaactccaagtccaacccaagggcacatttgtgttcaatatagattgcaacgttctctccaataatccatactacaaa

SEQ ID NO: 66827 - DNA, 210 bp, Glycine max
gaaaacgcagacaatgggatccttcgtccagcttgcaccacattcaccggaagcttccaacgcactggcttcccttgcatcatagacggcagcatgcttcccctgggatgttaccaatgcttgtgaaccctatcaaggtcactagtgcaagactgccatctccatctgcgtctacaccagcctcattcaccacagtggcatctttccgcc

SEQ ID NO: 66828 - DNA, 407 bp, Glycine max
ggcacaagtgagtttgttgatcgagataactagaaacagtgtgatgaaaatgaaggtccttgttttcttcgttgctacaattttggtagcatggcaatgccatgcgtacgatatgttccctctccgaatgaacactggctatggtgcccgtactccggaggtgaaatgcgcaagttggaggcttgctgtggaagcacacaacatctttggctttgagaccattcctgaagagtgcgttgaagcaacaaaggaatacatccatgggggaacaatataggatcagactccaaaaaagttaaccaacaagcttacttttatgccaaaggactcgaagtccatcccaacgacacatttgtgttcagtatagaatggaccgtactctctaatattccatacgacaaaaaaca

SEQ ID NO: 66829 - DNA, 74 bp, Glycine max
ggtgtgagtaagatcataagcaaaagcaacggtgaactgaagatgccggttctcaccctttctactaacgttag

SEQ ID NO: 66830 - DNA, 263 bp, Glycine max
gatctggcagcagaagaacaagtagttgagaactaagaaggagaagcaaatggcttcctcaatgatctcttccccagctgttaccactgtcaaccgtgccggtgccggcatggttgctccattcactggcctcaagtccatggctggcttccccaccaggaagaccaacaatgacattacctccattgctagcaacggtggaagagtgcaatgcatgcacgtgtggccaccagttggcaataagaagtttgagactctttccc

SEQ ID NO: 66831 - DNA, 236 bp, Glycine max
gtatcttggatttgtgcctaatttagtgtcatttttacaatattttggcttgtagatccgatcttagtttacattaacataacgtgatcttaatgcaaaccatgtcaaccaaacaaacgtagaaaagcggaccctctaaaggatccaaactcacatacgcatacatacgacgacatagatcttccaaacagtcacccaaattcagatcactagacggcgcttaacaacttcaaaac

SEQ ID NO: 66832 - DNA, 196 bp, Glycine max
gattaatcatcttcttcacatcccataatatgatgggttctgcaccagcacagcagcagatgtcatactatgatcacgttcagacgcgccatcaggagaagggaagcctctattcttgtttgtctagactctgttgctgcttttgctgctatcatggttgcacctgccgcctgggatgcacctgtcgttgctgtcc

SEQ ID NO: 66833 - DNA, 252 bp, Glycine max
gaatcttggcagtctaatcagtgacaatgcaacacatgggtttgggtagcattcatcggcatagctctcacatggaatctttcagaaattggcatcagtaggggcatcgaattctccgaggtggcagattgcatacgacggtgaacataggtctgtagcaacaattggagtggttaagtaacctgatcaataatgaccctgcacacgttgctcatcgtgagattagtaggtatcagaagagcactgaggtcc

SEQ ID NO: 66834 - DNA, 221 bp, Glycine max
ggcacaccaacaccaaaacaaacccactaagatggcttcctttgtatccttcctagtgctgcttcttgcagcccttatcctcatgcctcaagggcttgctacttactacaaaccaattaagaagccaccagtgtacaagcctccagtgtacaagccaccagtgtacaaaccaccggtttataagccaaaaccaccggtttacaagccgaaaccaccggttt

SEQ ID NO: 66835 - DNA, 167 bp, Glycine max
cacggggtcaaccgacatagcacagataacaggcattctcttatagcaactacacatttctcagtgttcccaatgtctcactgcccacgcgaactcgacatccctggttggcctcccaagcttcatccctcaacaggcaccgttttgctcccaagtctaactttccc

SEQ ID NO: 66836 - DNA, 272 bp, Glycine max
  unsure (1)..(272): unsure at all n locations
caaatggcttcctcaatgatctcttccccagctgttaccactgtcaaccgtgccggtgccggcatggttgctccattcactggcctcaagtccatggctggcttccccaccaggaagaccaacaatgacattacctccattgctagcaacggtggaagagtgcaatgcatgcangtgtggccaccagttggcaagaagaagtttgagactctttcctacctgccagaccttgatgatgcacaattggcaaaggaagtagaataccttcttag

SEQ ID NO: 66837 - DNA, 271 bp, Glycine max
gatcacagcacgctctatcatctctctcagtgatggcaatcacattcacgtttttccgaccaaccatgatccgggcctccgctggttctccgggcaggtgcgacccgagcaacaggaagcccgtttcctccaattggtgggctccgctgtacggatggcccgcggatccggactacatcggcccatcgcagaatacaagttatcaatccgatctgaatcgggacgtgggcccgggccggaccaaatccaaattctcagcggggtgcttcac

SEQ ID NO: 66838 - DNA, 103 bp, Glycine max
ggtcaccatcacaggccatagtgcatagcgtttttcactgtgcattattcactggccatcacagcagctctatccggaaccatggtggagcacctccttcatg

SEQ ID NO: 66839 - DNA, 77 bp, Glycine max
ggcacaagtgagtctgttgatcgagatgactagaaacactgtgatgatcatgacggtccttgtcttcttcatcccta

SEQ ID NO: 66840 - DNA, 122 bp, Glycine max
tccgcacacgcgtccgtacagcagtcaatacagcagagagaggggtacacaagtgaatttgttgatctacatacatatgaccagtatcatgcaattcatagacattatcttcttcgatgaaa

SEQ ID NO: 66841 - DNA, 124 bp, Glycine max
ggaacctttgcattctattcattcaagattcagcaagtgcgttttggaagcagagaccgaaatacttcgagatggcctgtacaaagcaaactgctcgtaagtcaactggacgaaaagctcccag

SEQ ID NO: 66842 - DNA, 71 bp, Glycine max
cggacaaaaatggatgcagtgtgctttgatgatgctttgatgaatatgcagtgtgcttttttaagccagac

SEQ ID NO: 66843 - DNA, 405 bp, Glycine max
gataccaaaaacaaaacacaagccaagtgaaagtgagaaaaaataaaaatcaaagagcataatgtcagggatcattcacaagattggggagacccttcatgtgggagggcacaagaaggaggaggagcataagggtgagcaccatgctggagaatacaaaggggagcaccatggtgaacacagtagtgagtacaaaagagagcatcatggtgaacacaaagctggagagtaccatggtgagcacaagccagagcacaaagaggggttcctagacaaagtcaaggacaagatccatggtgagggcggcgccgccgacggcgagaagaagaagaaggagaagaagaagaacgagcatggccatgagcatgtgcatgacagcagcagcagcagtgacagtgattaaac

SEQ ID NO: 66844 - DNA, 124 bp, Glycine max
ggcacaagtgagtttgttgatcgagataactaaaaacagtgtgatgaaaatgaaggtccttgttttcttcgttgctacaattttgggaacatggcaatgccatgcgttcgatatgttccctctc

SEQ ID NO: 66845 - DNA, 192 bp, Glycine max
gggtgtggttgacaatgccacgctttccacgtacgcttgggacacgtttgcacatccacccaccctttttcttccacaatcattctcttatcttcggcctcgggggtcaacacatatagtgtctagcgaaccatacatctaaacaacatggcattgcaagcagcacctagccttcacaccgtcactggcaat

SEQ ID NO: 66846 - DNA, 165 bp, Glycine max
accggggatacacgcacagcagagacacacagttactagtacagaagatcatggtctctctagcaatcttggctgctgttcaaccagctccgatgacgggccttgctggaagttccctctctgggcagaagctctccttcacgccctctcgccacagtgtcatct

SEQ ID NO: 66847 - DNA, 119 bp, Glycine max
gaagggggaaacgaaattaatagtgatttatgaagaatactaagaaagcgtgagtcatgtaggatggatgcctccaccgtcattcgttgaccggcgcgtagccagttcaaaatcgtttg

SEQ ID NO: 66848 - DNA, 307 bp, Glycine max
ggttctagtgtgtgattgtttgttgttgtaactcgttcttcttcttttgttgttctgtgtttgtgtttgttttttctctcacctgaaaatgtcttgctgcggtggtaactgtggttgcggaagctcctgcaagtgcggcaacggctgctgatgctgcaagatgtacccagacttgagctacactgagtcaaccaccatcgagaccttggtcatgggagtggcacctgttaatgctcaatttgatggtgctgaaatgggtgtgcccgctgagaaacatggctgcaaatgttggccaaactgctcctgc

SEQ ID NO: 66849 - DNA, 153 bp, Glycine max
  unsure (1)..(153): unsure at all n locations
ggatgcagatagagatgcatagcaattcccangtcctaaatgtttaaaactaatttcgaattcgtccatcgtccaattcttctcgtcttgaaaatcaatttctccgggaaaactttgatcggtataacaattggccttgaggtggattctccg

SEQ ID NO: 66850 - DNA, 356 bp, Glycine max
ggcacaagtgagtttgttgatcgagataactagaaacagtgtgatgaaaatgaaggtccttgttttcttcgttgctacaattttggtagcatggcaatgccatgcgtacgatatgttccctctccgaatgaacactggctatggtgcccgtactccggaggtgaaatgcgcaagttggaggcttgctgtggaagcacacaacatctttggctttgacaccattcctgaagagtgcgttgaagcaacaaaggaatacatccatggcgaacaatatagatcagactccaaaacagttaagcaacaagcttacttttaatgccagagagctcgaagtccatcccaaggacacatttgtg

SEQ ID NO: 66851 - DNA, 134 bp, Glycine max
gctacgacaccctgcacacacacttcgccctcctcgcattgtgtggccgccaattcgagtaccgacggatagcggctggggaagccatcccaaccagctccggacgtccaccctccctcagcccctctcacttc

SEQ ID NO: 66852 - DNA, 54 bp, Glycine max
tacagctgcaatatgacttcagtacggtacagttcagagaatacgataaaatgt

SEQ ID NO: 66853 - DNA, 309 bp, Glycine max
gcacaagtgagtttgttgatcgagataactagaaacagtgtgatgaaaatgaaggtccttgttttcttcgttgctacaattttggtagcatggcaatgccatgcgtacgatatgttccctctccgaatgaacactggctatggtgcccgtactccggaggtgaaatgcgcaagttggacgcttgctgtggaagcacacaacatctttggctttgagaccactcctgacgagtgcgttgaagcaacagaggaatacatccatggcgaacaatatacatcagactccacaacagttaaccaacaagcttac

SEQ ID NO: 66854 - DNA, 313 bp, Glycine max
tgcggaatggaagttctgaatctatctcatcaatttgtgttgaatctgattgcagaagtgaagtggaaggtgttcaaattttgcaatattgtgaaatgtcggattaaaggttatacaaatatttattactcctactgcttctatcagttaaatgccatgctaaatatttttctgttgtgttgtactgtatctcactctggttacacttgagtgtggaccatgtattgttatattagatacactggtttttataccaaagtttggtaaattaagagtgtgtttccagtgaataaattagatgaagttgcaaaaa

SEQ ID NO: 66855 - DNA, 251 bp, Glycine max
agacgacataagtgggcacaagtgagtttgttgatcgagataactagaggcagtgtgatgaaaatgaacgtccttgttttcttcgttgctacaattttggtagcatggcaatgccatgcgtacgatatgttccctctccgaatgaacactggctatggtgcccgtactccggaggtgaaatgcgcaagttggaggcttgctgtggaagcacacaacatctttggctttgatagcattcctgaagactgcgt

SEQ ID NO: 66856 - DNA, 378 bp, Glycine max
gatctggcagcagaagaacaagtagttgagaactaagaaggagaagcaaatggcttcctcaatgatctcttccccagctgttaccactgtcaaccgtgccggtgccggcatggttgctccattcactggcctcaagtccatggctggcttccccaccagaaagaccaacaatgacattacctccattgctagcaacggtggaagagtgcaatgcatgcaggtgtggccaccagttggcaagaagaagtttgagactctttcctagctgccagaccttgatgatgcacaattggcaaaggaagtagaataccgttcttacgaagggatcgactccttgcttggaattcgagttggagcacggtttcgttaccgcgagca

SEQ ID NO: 66857 - DNA, 197 bp, Glycine max
cacaagggggtgtgagtgaacaagcagatggaataacgggattacatctgcagatcttcagttaaaactctgaaaggtaatactaaaatcctcttcgtcgagacaattgaaacaatccaaactgtcattgcaacgattccaaacactgaatgacttacgtccgatcactaaccttcacatacctccgtcaatctgtt

SEQ ID NO: 66858 - DNA, 158 bp, Glycine max
gatgccacaatggttgtccctcttaggcaccttcgtgttttctctctcaccctcatatcgatcagcctccacatccatggagcgttctctgagtaatcaacactccaatttacccacagtccacggagcggtagagaacctgagtcacttgccttttt

SEQ ID NO: 66859 - DNA, 396 bp, Glycine max
gcacaagtgagtttgttgatcgagataactagaaacagtgtgatgaaaatgaaggtccttgttttcttcgttgctacaattttggtagcatggcaatgccatgcgtacgatatgttccctctccgaatgaacactggctatggtgcccgtactccggaggtgaaatgcgcaagttggaggcttgctgtggaagcacacaacatctttggctttgagaccattcctgaagagtgcgttgaagcaacaaaggaatacatccatggcgaacaatatagatcagactccaaaacagttaaccaacaagcttacttttatgccagagacctcgaagtccatcgcaaggacacatttgtgttcagtatagatggcaccgtactctctaatattccatactac

SEQ ID NO: 66860 - DNA, 309 bp, Glycine max
gacacctcaagtcaagctgggctacactctgcatttaacctaaagtttcaaacctaagaagttggaagtcatggcaccaacaatgatggcagcatacaataagttctgagtacacttaatgcatctcctttccttggacatagcattcggtgcaaatgccattgctcttaaggatgttgtctccataaaaactgggatttacaccatgagcagtgatttgtcatatgcaccatacacaatgtggtatttgggacacttctcagctcacaatccttcatacttgaaatgagaaatccctgaggattatgg

SEQ ID NO: 66861 - DNA, 231 bp, Glycine max
tagtaatatcttggatcagatgcacaaaagagaaaactacaaggtactgatgaggttgattatgaggatggtcctgaagaggaaacacatgatggtgagctgtcagaggaaattgaacgtgatgaggatggcagtgatgttgatgccaatgagaattataacaatgtgacagatgctaataattctgaaggacttgaaaaaccctccaagtccaggactattgattaaaaa

SEQ ID NO: 66862 - DNA, 343 bp, Glycine max
gatattccagttagtgcagtcaatggtaaacccgaggttggcgtcaaacctgatgcaaatgaagctaaacagaagaagatagcagatccaagaaagagggatgcaaatggtgaagatgacgattcatccgaatctgattctgatgatgattcaagtgaagataagcccacagcgaatggcgacatacaaagtagtgaacgtgatgatgatagcgatgatgatgaggaggaggagggggatgatgaatctgatgaggagacagccaagaagattgaagcaagcaataagaggggtattgagtcttctaagaaaacacctgttcctgttaagaagacaaagtttg

SEQ ID NO: 66863 - DNA, 98 bp, Glycine max
gacggtgcaacctagcagcctcaaaatccaatggcttcacagaagaaactttcgattccactgagggagataaaagtgcaggcgctcgtcctcaatat

SEQ ID NO: 66864 - DNA, 272 bp, Glycine max
gagtgcacaagtgagtttgttgatcgagataactagaaacagtgtgatgaaaatgaaggtccttgttttcttcgttgctacaattttggtagcatggcaatgccatgcgtacgatatgttccctctccgaatgaacactggctatggtgcccgtactccggaggtgaaatgcgcaagttggaggcttgctgtggaagcacacaacatctttggctttgagaccattcctgaagactgcgttgaagcaacaaaggaatacatccatgggcaac

SEQ ID NO: 66865 - DNA, 203 bp, Glycine max
ggttctagtgtgtgattgtttgttgttgtaactcgttcttcttcttttgttgttctgtgtttgtgtttgttttttctctcacctgaaaatgtcttgctgcggtggtaactgtggttgcggaagctcctgcaagtgcggcaaccgctgcggaggctgcaacatgtacccagacttgagctacactgagtcaaccaccaccgaga

SEQ ID NO: 66866 - DNA, 104 bp, Glycine max
acgcgtcggtacagctgcacgaagaggagaaggcggtgcggatgctatcctcagatttctgggcagcgaggcactctctctctatcacgctacggctctcagtt

SEQ ID NO: 66867 - DNA, 83 bp, Glycine max
tcggtactgctgcgatcagactacatacgggagcacacatcaaccttaaggttacggggcacgatgggaatgacgtttttttc

SEQ ID NO: 66868 - DNA, 329 bp, Glycine max
gacaactccataacacaaggcagaaagcaagctcatcctagagttttaaaaatggcagcagcctcctccatggctctctcttccccatccttggctggcaaggccgtgaagctgggcccatcagcccccgaagtcgggagggtcagcatgaggaagaccgtcaccaagcaggcctcctccggaagcccatggtacggcccagaccgcgtcaagtacttgggcccattctctggcgagcccccgtcctacctcactggcgagttcccaggtgactacggctgggacactgctgggctttcgggctgaccagaaaccttcgccagaaaccg

SEQ ID NO: 66869 - DNA, 66 bp, Glycine max
ggtgtgagtaagatcataagcaaaagcaacggtgaactgaagatgccggttctcaccctttctact

SEQ ID NO: 66870 - DNA, 176 bp, Glycine max
gaccaacacaaacaatagtgcataacgtttttcaatgggcaataatcaattggcaacacaagaactccaatcgggaacaatgttaacaactgcgttaatgaggaaccaacttatgacaacaagaagcttaaggacattcccaaaggttctttttggcctgaaaggtggacaaggtg

SEQ ID NO: 66871 - DNA, 54 bp, Glycine max
  unsure (1)..(54): unsure at all n locations
tgccaattctagcagattccaaacaaannaaaaaagaaaaaaagcgggcgctct

SEQ ID NO: 66872 - DNA, 304 bp, Glycine max
agatccaatccaattgaattctccagagagaagaagaaacttaatcgatcatcacttcacttcactaatacatcatggcagacgagacccagaacaagtatgagagctctgaggttgaggtccaggatcgtggtgtttttgactttctcggtaagaaaaaggatgaagaagacaagcctcatcctcaggaggaggtcatcgccaccgagtttcaaaaagtcactgtctcagaccaaggagagaacaagcacagcctcttagaaaagcttcaccgatctgacagcagctctagctcttcaagtga

SEQ ID NO: 66873 - DNA, 137 bp, Glycine max
cgggacaactcagcacaataagctatccatagcagccaaaggattgaaaagtaacgcggccgccctcgagggtccatgcttacgtacgcgctgcatgagacttcatcaatcttcgatgatgtcgcctacactcaatt

SEQ ID NO: 66874 - DNA, 175 bp, Glycine max
atcatcagattccgcaaagacgtcctttcttgtccaaacacagacccactgacaccatcatcatcataatcaccaatgtcctcatcgagaccacaattgtccttgtcctctcctccaccattccccatccccaattttctcgatctcatctcccaccaccataaaaaaaaagaaa

SEQ ID NO: 66875 - DNA, 416 bp, Glycine max
gaaggtgcaagagtttgttgtgagctataagctagtttatcgtgaggagaatatgaagttgtttgttttctttgttgctgcagtagtgtttgggagcatggccatgccatggcgcaggctaccaaaggttccctctccgaatgaaaactggctatggtgagcgttcttcggaggtaaaatgcgcaagttttaggcttgctgtggaagcaacaacatccgagcctttaaaaccattcctgaagagtgcgtcgaaccaacaaaggactacattaatggcgaacaatttagatcagactctaaaacagttaaccaacaagctttcttttatgctagtgaacgcgaagttcatcacaacgacatatttatattcggcatagattacaccgtactctctaatatcccatactatgaaaaac

SEQ ID NO: 66876 - DNA, 343 bp, Glycine max
gatctggcagcagaagaacaagtagttgagaactaagaaggagaagcaaatggcttcctcaatgatctcttccccagctgttaccactgtcaaccgtgccggtgccggcatggttgctccattcactggcctcaagtccatggctggcttccccaccaggaagaccaacaatgacattacctccattgctagcaacggtggaagagtgcaatgcatgcaggtgtggccaccagttggcaagaagaagtttgagactctttcctacctgccagaccttgatgatgcacaattggcaaaggaagtagaataccttcttaggaagggatggattccttgcttggaa

SEQ ID NO: 66877 - DNA, 119 bp, Glycine max
gttatgagtcctaactatatagctattttccattatatttttgggtagcgataaatgtgtaaaagaaagagtatattgataaagatattttttccaaaatcaaaagagcgattaggtcg

SEQ ID NO: 66878 - DNA, 287 bp, Glycine max
gatctggcagcagaagaacaagtagttgagaactaagaaggagaagcaaatggcttcctcaatgatctcttccccagctgttaccactgtcaaccgtgccggtgccggcatggttgctccattcactggcctcaagtccatggctggcttccccaccaggaagaccaacaatgacattacctccattgctagcaacggtggaagagtgcaatgcatgcaggtgtggccaccagttggcaagaagaagtttgagactctttccttactgccagaccttgatgatgcac

SEQ ID NO: 66879 - DNA, 146 bp, Glycine max
gaaggtgcaagagtttgttgtgagctataagctagtttatcgtgaggagaatatgaagttgtttgttttctttggtgctgcagtagttttggtagcatggccatgccatggcgcaagctaacaaaagttccctctccgaatgaaaa

SEQ ID NO: 66880 - DNA, 221 bp, Glycine max
agggggacaagtgagtttgttgatctaaaaaaccaaaaacagtgtgatgaaaataaaaggccctgttttcctccctgccacaaattttggaacaaagggaaaccacacctaacaaaaatttcccccccccaaaaaaaaaagggatagtggcccctctcccgagggggaaaactccaaatttgggggttttgtggaaaaacacaacaaaatttgggttttga

SEQ ID NO: 66881 - DNA, 135 bp, Glycine max
aggggcacaagtgagtttgttgatcgagataactagaaacagtgtgatgaaaatgaaggtccttgttttcttcgttgctacaattttggtagcatggcaatgccatgcgtacgatatgttccctctccgaatgaa

SEQ ID NO: 66882 - DNA, 195 bp, Glycine max
ggggggaacgtgcaagagtttgttgtgagctataagctagtttatcgtgaggagaataagaagttgtttgttttctttgttgctgcagtcattttggtaacatggccatgccatggcgcaggccaccaaaagttccctcccccaatgaaaactggctatggtgagcgttcctccgaagttaaatgccccagtttt

SEQ ID NO: 66883 - DNA, 105 bp, Glycine max
tagacggtcgcaccatacgatccaatctaagctacgccataacgctacgacatagccctccaaaatcatcacacagatccacttcacagaacgtcgttatagaaa

SEQ ID NO: 66884 - DNA, 150 bp, Glycine max
ggcacaagtgagtttgttgatcgagataactagaaacagtgtgatgaaaatgaaggtccttgttttcttcgttgctacaattttggtagcatggcaatgccatgcgtacgatatgttccctctccgaatgaacactggctatggtgcccg

SEQ ID NO: 66885 - DNA, 264 bp, Glycine max
ggacaacacaacaaaaagcgatgctggagcaaacacacatgtttgtcacaaattttctatttgaaaagccaaggctactccaagaaaactttcaggtggcgggtgattcccaaatcctaacccaaacaagtggcggcaaaacccttatggacacccccggaaaaatttccccaaaggccttcccaaggggggccccccaaaaggatcaacccttaggtccccgggaaagcaacttcaaaccccctcccaaaggcccccaaaatt

SEQ ID NO: 66886 - DNA, 75 bp, Glycine max
gaaaaaaaaaaaaaaaaaaaaaaaaaaaaaaaaatttctaattaaaaaaaaaacaaaaataatttatattttctt

SEQ ID NO: 66887 - DNA, 88 bp, Glycine max
gggcagcagaagaacaagtagttgagaactaagaaggagaagcaaatggcttcctcaatgatctcttccccagctgttaacactgtca

SEQ ID NO: 66888 - DNA, 225 bp, Glycine max
ggttctagtgtgtgattgtttgttgttgcaactcgttcttcttcttttgttgttctgtgtttgtgtttgttttttctctcacctaaaaatgtcgtgctgcggtggtaactgtggttgcggaagctcctgcaagtgcggcaactgctgcggacgctgcataatgtatccagacatgagctacactgagtcaaccaccaccgagacctttgtcatgtgagtggcacc

SEQ ID NO: 66889 - DNA, 308 bp, Glycine max
gattgagtacaacttcacattttagaagaataccccctcttttgctgcatcagaggagttgtaaattaagagcatggctgcacaagctcttgtatcatcatcttctcttaccttctcagcggaggctgcaagacaaagtcttggaccaagatcactccaatctccatttggcttctccagaaaagcctcctttcttgttaaggcagctgctaccccccctgtcaagacaagcctttgtggtttgcatcaaagcaaagtctttcttacttggatggcagccttccgggtgactatggatttgaccctct

SEQ ID NO: 66890 - DNA, 369 bp, Glycine max
ggttctagtgtgtgattgtttgttgttgtaactcgttcttcttcttttgttgttctgtgtttgtgtttgttttttctctcacctgaaaatgtcttgctgcggtggtaactgtggttgcggaagctcctgcaagtgcggcaacggctgcggaggctgcaagatgtacccagacttgagctacactgagtcaaccaccaccgagaccttggtcatgggagtggcacctgttaaggctcaatttgagggtgctgaaatgggtgtgcccgctgagaacgatggctgcaaatgtggactaaactgctcctgcaacccctgcacttgcaagtgaggtgttgggagagcaagcttcaagcagagatagcccttaat

SEQ ID NO: 66891 - DNA, 336 bp, Glycine max
gatctggcagcagaagaacaagtagttgagaactaagaaggagaagcaaatggcttcctcaatgatctcttccccagctgttaccactgtcaaccgtgccggtgccggcatggttgctccattcactggcctcaagtccatggctggcttccccaccagaaagaccaacaatgacattacctccattgctagtaacggtggaagagtgcaatgcatgcaggtgtggccaccagttggcaagaagaagtttgagactctttcctacctgccagaccttgatgatgcacaattggcaaaggaagtagaataccttcttaggaagggatggattccttg

SEQ ID NO: 66892 - DNA, 84 bp, Glycine max
  unsure (1)..(84): unsure at all n locations
gtcccttcggggacatccgataaaattggaacgatacagagaagattagcatggcccctgcgcaaggatgacacgcacaantcg

SEQ ID NO: 66893 - DNA, 333 bp, Glycine max
gatctggcagcagaaaaacaagtagttgagaactaagaagaaggaagtggcttcctcaatgatctcctccccagctgttaccaccgtcaaccgtgccggtgccggcatggttgctccattcaccggcctcaaatccatggctggcttccccacgaggaagaccaacaatgacattacctccattgctagcaacggtggaagagtacaatgcatgcaggtgtggccaccaattggcaagaagaagttcgagactctttcctacttgccagacctcgatgatgcccaattggcaaaggaagtcgaataccttctaaggaaaggatggattccttg

SEQ ID NO: 66894 - DNA, 332 bp, Glycine max
gggcagcagaagaacaagtagttgagaactaagaaggagaagcaaatggcttcctcaatgatctcttccccagctgttaccactgtcaaccgtgccggtgccggcatggttgctccattcactggcctcaagtccatggctggcttccccaccaggaagaccaacaatgacattacctccattgctagcaacggtggaagagtgcaatgcatgcaggtgtggccaccagttggcaagaagaagtttgagactctttcctacctgccagaccttgatgatgcacaattggcaaaggaagtagaataccttcttaggaagggatggattccttg

SEQ ID NO: 66895 - DNA, 258 bp, Glycine max
ggcacaagtgagtttgttgatcgaaataactaaaaaaagtgtgatgaaaatgaaggtccttgttttcttcgttgcaacaattttggtagcatggcaatgccatgcgtacaaaatgttccctccccgaatgaaaactggctatggggcccgtaccccggaggtgaaatgcccaatttggaggcttgctgtggaaaaaaaaaaaatctttggctttgagaacattcctgaaaaatgcgttgaagcaacaaaggaataaat

SEQ ID NO: 66896 - DNA, 169 bp, Glycine max
cgggaagttttcgcacactacacacagacaaaaaagagagaagatgacgcggggaaagcataatatcgaaccccacaagcggggcgcagataggaatcagaacggaaatggctctgagctccacgctagagccgttggcctcaaactcatctgccccatctgcaaggcg

SEQ ID NO: 66897 - DNA, 358 bp, Glycine max
gacaagtgagtttgttgatcgagataactagaaacagtgtgatgaaaatgaaggtccttgttttcttcgttgctacaattttggtagcatggcaatgccatgcgtacgatatgttccctctccgaatgaacactggctatggtgcccgtactccggaggtgaaatgcgcaagttggaggcttgctgtggaagcacacaacatctttggctttgagaccattcctgaagagtgcgttgaagcaacaaaggaatacatccatggcgaacaatatagatcagactccaaaacagttaaccaacaagcttaactttatgccagagacctcgaagtccaacccaaggacacatttgtgttcag

SEQ ID NO: 66898 - DNA, 54 bp, Glycine max
ggaacaacactcctcacagcatatactgatcataaatcacatagctagttgttt

SEQ ID NO: 66899 - DNA, 303 bp, Glycine max
aggtacggctgcgagaaaacaaaaaaaggggcacaagtgagtttgttgatcgagataactagaaacagtgtgatgaaaatgaaggtccttgttttcttcgttgctacaattttggtagcatggcaatgccatgcgtacgatatgttccctctccgaatgaacactggctatggtgcccgtactccggaggtgaaatgcgcaagttggaggcttgctgtggaagcacaccacatctttggctttgagaccattcctgaagagtgcgttgaagcaacaaaggaatacatccatggcgaacaatat

SEQ ID NO: 66900 - DNA, 339 bp, Glycine max
ggcacaagtgagtttgttgatcgagataactagaaacagtgtgatgaaaatgaaggtccttgttttcttcgttgctacaattttggtagcatggcaatgccatgcgtacgatatgttccctctccgaatgaacactggctatggtgcccgtactccggaggtgaaatgcgcaagttggaggcttgctgtggaagcacacaacatctttggctttgagaccattcctgaagagtgcgttgaagcaacaaaggaatacatccatggcgaacaatatagatcagactccaaaacagttaaccaacaagcttacttttatgccagagacctcgaagtccatcc

SEQ ID NO: 66901 - DNA, 379 bp, Glycine max
gatctggcagcagaagaacaagtagttgagaactaagaaggagaagcaaatggcttcctcaatgatctcttccccagctgttaccactgtcaaccgtgccggtgccggcatggttgctccattcactggcctcaagtccatggccggcttccccaccaggaagaccaacaatgacattacctccattgctagcaacggtggaagagtgcaatgcatgcaggtgtggccaccagttggcaagaagaagtttgagactctttcctacctgccagaccttgatgatgcacaattggcaaaggaagtagaataccttcttaggaagggatggattccttgcttggaattcgagttggagcacggtttcgtgtaccgtgagcac

SEQ ID NO: 66902 - DNA, 450 bp, Glycine max
gggtccagccacgcgtccgaagacgacagaagggggcacaagtgagtttgttgatcgagataactagaaacagtgtgatgaaaatgaaggtccttgttttcttcgttgctacaattttggcagcatggcaatgccatgcgtacgatatgttccctctccgaatgaacactggctatggtgcccgtactccggaggtgaaatgcgcaagttggaggcttgctgtggaagcacacaacatctttggctttgagaccattcctgaagagtgcgttgaagcaacaaaggaatacatccatggcgaacaatatagatcagactccaaaacagttaaccaacaagcttacttttatgccagagacctcgaagtccatcccaaggacacatttgtgttcagtatagatggcaccgtactctctaatattccatactacaaaaaacatggatatgggg

SEQ ID NO: 66903 - DNA, 80 bp, Glycine max
tatggctgcgaaaatactacaaaacggtactgctgctacaatactacataagggtattgctgccacaatacaacacaatg

SEQ ID NO: 66904 - DNA, 229 bp, Glycine max
gaaggtgcaagagtttgttgtgagctataagctagtttatcgtgaggagaatatgaagttgtttgttttctttgttgctgcagtagttttggtagcatggccatgccatggcgcaggctaccaaaggttccctctccgaatgaaaactggctatggtgagcgttcttcggaggtaaaatgcgcaagttttaggcttgctgtggaagcacacaacatccgagcctttaaa

SEQ ID NO: 66905 - DNA, 247 bp, Glycine max
gacgccttgcaaaataggttcatttgactctcacattccttgcagcaaaccaaacatggattccaatgaacttaacgtaatgggctgtcactatgccatatctggtgcagcatgctccgagctcactggcaaggtgatttccgtggactttgttgtaacctctaggtataagttgctcatatgatgatatgtgaagtcagatttctgaccgtcattttatctcatcgaaagagaggtgcccttgttc

SEQ ID NO: 66906 - DNA, 373 bp, Glycine max
gattgtagaactgaacaagggtttctctttctctttctctgtctgcttcttcactttctctcgtttcaatcgaaaaaaatcatgggcagaaaattcttcgtcggtggcaactggaaatgcaatgggaccactgaggaggtgaagaagattgttactactttaaatgaagctaaagtccctggagaagatgttgtagaagttgttgtgagccctccttttgtgttccttccttttgtaaaaagtttgctgcgccctgatttccatgtctcggcccaaaattgttgggttcgcaaaggtggtgcttatactggagaggttagtgctgaaatgcttgttaatttgggaattccttgggttattattggtcactctg

SEQ ID NO: 66907 - DNA, 100 bp, Glycine max
atacaatgggacacattgctcctcacatcactatttgttcaacgataatatctgattttcgcggctgttaacggtcaacggagattctatctgggggggt

SEQ ID NO: 66908 - DNA, 135 bp, Glycine max
caacggtaccgctcctagaacacgacatacaggtacagctgctatcagacgacacaacgcgtatgctgccagaatacgacatcatggtacagccaccagacgactacaccagggtacagctgcgattatacgaca

SEQ ID NO: 66909 - DNA, 358 bp, Glycine max
ggacaagtgagtttgttgatcgagataactagaaacagtgtgatgaaaatgaaggtccttgttttcttcgttgctacaattttggtagcatggcaatgccatgcgtacgatatgttccctctccgaatgaacactggctatggtgcccgtactccggaggtgaaatgcgcaagttggaggcttgctgtggaagcacacaacatctttggctttgagaccattcctgaagagtgcgttgaagcaacagacgaatacatccatggcgaacaatatggatcagactccaaaacagttaaccaacaagcgtactttgtatccagaaagctcgaagtccatcccaaggagacagttgtgttca

SEQ ID NO: 66910 - DNA, 156 bp, Glycine max
gattcagattacattgcaaaaatggcatcattcaccatgacagcttccatccttggcagcccagccgtcaccaaccggtcggcagtagcaacgcagaggagatcactcgtagtgaatgctgccaaagctgttgaagcagaaaaggtcagttatgac

SEQ ID NO: 66911 - DNA, 219 bp, Glycine max
gattatatttgagttcaaacaaatcaaagccatggccacctccaacttctctattgttctctccgtcgccctaaccttctttttggggccacttaacaagggaaaatccaacggaaccgtttcctttaacctcaaaaagtttaaaccaattcaaaccaacctttagctccaaaaagattctagtaattcaacctctgaagtgttacaactcaacaaagt

SEQ ID NO: 66912 - DNA, 114 bp, Glycine max
acgttggagcatgaggcgacgacaaagaagaagaatccgatgattactcaaagtactcaatcattcatcatcagctacctttactacatctaacatccttcctctgtctaatgt

SEQ ID NO: 66913 - DNA, 405 bp, Glycine max
gaaggtgcaagagtttgttgtgagctataagctagtttatcgtgaggagaatatgaagttgtttgttttctttgttgctgcagtagttttggtagcatggccatgccatggcgcaggctaccaaaggttccctctccgaatgaaaactggctatggtgagcgttcttcggaggtaaaatgcgcaagttttaggcttgctgtggaagcacacaacatccgagcctttaaaaccattcctgaagagtgcgttgaaccaacaaaggactacattaatggcgaacaatttagatcagactctaaaacagttaaccaacaagctttcttttatgctagtgaacgccaagtccatcacaacgacatatttagagtcggcatagattacaccgtactctctaatatcccata

SEQ ID NO: 66914 - DNA, 149 bp, Glycine max
gcgatacgacgacacaacggggagggaaatgatggagagaagccgaagaccaagacgaccgaacccaaagggctgaccgattagatcaatgacaaaggacaaggctctcagcagcatcattgggatcaggacacaactgtccctgttga

SEQ ID NO: 66915 - DNA, 323 bp, Glycine max
gactcaccacttcaaaacactcataacacaaagcacaaagcaaagctcatccttgagttaaaaaatggcagcagcttcttccatggctctctcatccccatccttggctggcaaggccgtgaagctgggcccatcagccccagaagtgggaagggtgagcatgaggaagaccgtcaccaagcaggtctcctcaggaagcccatggtacggcccagaccgagtcaagtacttgggcccattctctggcgagcccccgtcctacctaaccggtgagttcccaggcgactacggctgggacactgctgggccttccgcagacccag

SEQ ID NO: 66916 - DNA, 226 bp, Glycine max
gatctggcaacataaaaacaagtagttgagaactaagaagaaggaaatggcctcctcaatgatctcctccccaactgttatcaacgtcaatcgtgccggtgccggcatggttgctccattcaacggtctcaaatccatggctggcttccccacgaggaagaccaacaatgacattacctccattgctagcaacagtggaagagtacaatgcatgcaagtgtggcca

SEQ ID NO: 66917 - DNA, 365 bp, Glycine max
ggaacaagttgcagggatggcctccactctctctatatcctcttcatccacccttgttgatgccaagcctccaactccaagacaatgcgtcacccttcccactcttccccctccaccttttcactctcagactcgtccttggaagaccactgcttcctgtcctaaggtttcccccaattttaagggaatgggcaacaacagaaaaggaacccccacaaaagttgccgccaaaactgaactccccaatgccgaaacgccaaagaatgttaaaacgaatcaagaagcttgggaaaaaattgaagatgaatatgcagtgagttcactgggccttgccgggggtggtgcaatggtgggctcaactggga

SEQ ID NO: 66918 - DNA, 205 bp, Glycine max
ggcacaagtgagtttgttgatcgagataactagaaacagtgtgatgaaaatgaaggtccttgtttccttcgttgctacaaatttggtagcatggcaatgccgtgcgtacgatatgttccctctccgaatgaacactggctatggtgcccgtactccggaggtgaaatgcgcaagttggaggcttgctgtggaagcacacaacatc

SEQ ID NO: 66919 - DNA, 182 bp, Glycine max
gtttttaatctttatctttggtagtacaacttgattgtctaagtaactgctagttcttttctggattgtaatgcgattactataataatagttttaagaactcagtcattttgtttccgttgactgaccttgagtgccaaatgatcaaatcttacgtatgctttcatgcgacatcacaacac

SEQ ID NO: 66920 - DNA, 190 bp, Glycine max
ggcacaagtgagtttgttgatcgagataactagaaacagtgtgatgaaaatgaaggtccttgttttcttcgttgctacaattttggtagcatggcaatgccatgcgtacgatatgttcctccccgaattaacaatggccaagggtgcccttatcccgaaggtaaatgttcaaatttgaaggcttcctttg

SEQ ID NO: 66921 - DNA, 360 bp, Glycine max
gcacaagtgagtttgttgatcgagataactagaaacagtgtgatgaaaatgaaggtccttgttttcttcgttgctacaattttggtagcatggcaatgccatgcgtacgatatgttccctctccgaatgaacactggctatggtgcccgtactccggaggtgaaatgcgcaagttggaggcttgctgtggaagcacacaacatctttggctttgagaccattcctgaagagtgcgttgaagcagcaaacgaatacatccatggcgaagagtatagatcagactccaaaacagttaaccagcaagcttacttttatgccagagacctcgaagtcgatcccaaggacacatttggtgttcag

SEQ ID NO: 66922 - DNA, 312 bp, Glycine max
gaaggtgcaagagtttgttgtgagctataagctagtttatcgtgaggagaatatgaagttgtttgttttctttgttgctgcagtagttttggtagcatggccatgccatggcgcaggctaccaaaggttccctctccgaatgaaaactggctatggtgagcgttcttcggaggtagaatgcgcaagttttaggcttgctgtggaagcacacaacatccgagcctttaaaaccattcctgaagagtgcgttgaaccaacaaaggactacgttaatggcgaacaatttagatcagactctaagacagtttacca

SEQ ID NO: 66923 - DNA, 277 bp, Glycine max
aacggtccagaattcacgggtccacccacgcgtccgaccacgcgtcgcgtgcgagaatacgacatgatcggggcacaagtgagtctgttcatcaagatatctgtcatcagtgtgatcacgatgaacgtccatgtcatcatcgccgcgataattcaggtaacagggtcctactctacgggtgaaaagtcgcatcgctgaactcacactagcccgtctgtttgtgatccagatctgttccgtacgaggtagcggcatggtattttggcatgtaatatca

SEQ ID NO: 66924 - DNA, 218 bp, Glycine max
ggcacaagtgagtttgttgatcgagataactagaaacagtgtgatgaaaatgaaggtccttgttttcttcgttgctacaattttggtagcatggcaatgccatgcgtacgatatgttccctctccgaatgaacactggctatggtgcccgtactccggaggtgaaatgcgcaagttggaggcttgctgtggaagcacacaacatctttggctttgtga

SEQ ID NO: 66925 - DNA, 406 bp, Glycine max
gaaggtgcaagagtttgttgtgagctataagctagtttatcgtgaggagaatatgaagttgtttgttttctttgttgctgcagtagttttggtagcatggccatgccatggcgcatgctaccaaaggttccctctccgaatgaaaactggctatggtgagcgttcttcggaggtaaaatgcgcaagttttaggcttgctgtggaagcacacaacatccgagcctttaaaaccattcctgaagagtgcgttgaaccaacaaaggactacattaatggcgaacaatttagatcagactctagaacagttaaccaacaagctttcttttatgctagtgaacgcgaagtccatcacaacgacatatttatattcggcatagataacaccgtactcgctaatatcgcatac

SEQ ID NO: 66926 - DNA, 270 bp, Glycine max
gaaggtgcaagagtttgttgtgagctataagctagtttatcgtgaggagaatatgaagttgtttgttttctttgttgctgcagtagttttggtagcatggccatgccatggcgcaggctaccaaaggttccctctccgaatgaaaactggctatggtgagcgttcttcggaggtaaaatgcgcaagttttaggcttgctgtggaagcacacaacatccgagcctttaaaaccattcctgaagagtgcgttgaaccatcaaaggactacat

SEQ ID NO: 66927 - DNA, 66 bp, Glycine max
ctgcgataagacgagataaggggtgaatcagcaccacattcagctgagctttttgtgaagattcca

SEQ ID NO: 66928 - DNA, 244 bp, Glycine max
gacttcaattgcaatcaaattagttcattctctttgcgcagttccctacctctcctttcaagatgcagatcttcgtcaagaccctcaccggaaagaccatcacccttgaggtggaaagctctgacaccatcgacaacgtcaaggccaagatccaggacaaggaaggaattcccccggatcagcaacgtctcatcttcgccggaaagcagctcgaggacggccgtaccctcgccgactacaacat

SEQ ID NO: 66929 - DNA, 165 bp, Glycine max
gatagaagaagcagaaagagaagcattagcaaaagcaagaagaactagtctaagcagaaatggcctcttcagtgatggcatctgtggccctcaaacctgcccctttcactgttgagaagtcctcaattaaaagccttccctccctctcaagggaatcctcctcaa

SEQ ID NO: 66930 - DNA, 101 bp, Glycine max
  unsure (1)..(101): unsure at all n locations
cggcagcattggtcatcnanatggtggcgaggacccaccaacgcacgagagccgggatctttcagagggtggaggcggaggcgaacggtgcatgaccgcat

SEQ ID NO: 66931 - DNA, 286 bp, Glycine max
gggcagcagaagaacaagtagttgagaactaaggaggagaagcaaatggcttcctcaatgatctcttccccagctgttaccactgtcaaccgtgccggtgccggcatggttgctccattcactggcctcaagtccatggctggcttccccaccaggaagaccaacaatgacattacctccattgctagcaacggtggaagagtgcaatgcatgcaggtgtggccaccagttggcaagaagaagtttgagactctttcctacctgccagaccttgatgatgcacaat

SEQ ID NO: 66932 - DNA, 98 bp, Glycine max
taatgtgaaaagaaagatagagagacaagaaaaaaaaaaaaaaagaaaagaaaaaagcggccgcgcgagatgatggaggcttacgtacgcgggcatgc

SEQ ID NO: 66933 - DNA, 242 bp, Glycine max
agggacttacaggagcacaccacatgaagtatatgctccataccatcgtcaccaggaggggcgagaataatggcaatggccattggatcaactcgaggcacagtcaccgtggttgcggctagccccagtgttggcatcaggaggagtgcgaagaggaatgtgaacttcaggacgtggttcaattcgtttgcggggttgagggctcagtacaatgtgacattactatgccttcctgtgtgcac

SEQ ID NO: 66934 - DNA, 137 bp, Glycine max
ggcagcttgtaattgtaaaccgagagaacgatgttcatctccttggagatggcccctggcgggaattcgtaaataacgtatggtgcatagagatactttcggctcaggaagtggagcaaatgggcaacaatggtctt

SEQ ID NO: 66935 - DNA, 213 bp, Glycine max
ggcacaagtgagtttgttgatcgagataactagaaacagtgtgatgaaaatgaaggtccttgttttcttcgttgctacaattttggtagcatggcaatgccatgcgtacgatatgttccctctccgaatgaacactggctatggtgcccgtactccggaggtgaaatgcgcaagttggaggcttgctgtggaagcacacaacatctttggctt

SEQ ID NO: 66936 - DNA, 52 bp, Glycine max
gagacctcaggtcaggcggggctacccgctgagtttaagcatatcaataagc

SEQ ID NO: 66937 - DNA, 404 bp, Glycine max
  unsure (1)..(404): unsure at all n locations
agcgacgcgtccgtagcgagaagaccgcagaagggggagagcaagagagacatgcgagttcgactctcgttctatccatccatgttcagcagtccgtggccatgttggaactgttgatcgcagtaccgcgcaactacgagatggttgaaagtagttgcgttgactgtattgagtgagagtgggtgtagtgttccgtgtaccgcgcaganccttaataggttgtgtgggattctgtaaggaactactccgtgcttcagttggtcaaagtaaatgaaaggaaacgtgtgatatcaggcaggttgtgagataagagatcagtagcagaaatctgaagaagagagaggtaggttttttacgtggagaagggtagtggactcttgtgctagagttgcttttttttgggg

SEQ ID NO: 66938 - DNA, 141 bp, Glycine max
ggagcaatatcgtcaggtcaaaccatgtaccacaatcaaatcaacaccccaaatggcttcagcttcggtacctcatacgttagtcacatagctctgttaccaagatctgtacgccttcatcccaggccttcttgacgccac

SEQ ID NO: 66939 - DNA, 393 bp, Glycine max
  unsure (1)..(393): unsure at all n locations
ggcagaagtgagtttgttgatcgagataactagaaacagtgtgatgaaaatgaaggtccgtgttttcgtcggtgctacaattttgggancatggcaatgccatgcgtgcgatatgttccctctccgaatgaacactggctatggttcgcgtagtgcggaagtgaaatgcgcaagttgggntgttgctgtggaagcacacaggatctttggcttggagaccattcctgaagagtgcgttagagcaacaaancgatacatcgatggcnagcaatagaagatcaaactccaaaacagttaaccaacaagcttacttttatgccagagacctctaggtccatcgcaggggcacatttgtgttcagtagagatggcaccgtactctctaatattccat

SEQ ID NO: 66940 - DNA, 248 bp, Glycine max
  unsure (1)..(248): unsure at all n locations
tggaacgggacgaggcacacattgcttctgctaaccctctctgggctctccagtgaagcggagtcggaggagggaaacatttaagtaactgcaagggctgcacggtgggctgcaaggtgcggatctagaaggctaggtagcagtcggtgtgggacaatacggagcgaggagggaaaggctgcanagaatgcgggcgggaggaaagctgaacaggagaagttggagaagctgactcgcgaaggtcctca

SEQ ID NO: 66941 - DNA, 241 bp, Glycine max
ggtgcacaggtgagtttgttgatcgagataactagaaacagtgtgatgaagatgagggtcggtggtgggttcgttgctacgattttggtggcatggcaggggcatgcgtaggaggtgttcccgcggggaggggagactggggagggtggccgtaggccggaggtgaaatgcggaagttggaggcgtgggggtggggcacagaagatcgttggctttgagaccattcctgaagagtgcgttg

SEQ ID NO: 66942 - DNA, 231 bp, Glycine max
  unsure (1)..(231): unsure at all n locations
gaaacanagcacggataggaaaaaggaaaaatggaaaagtatttcggagaggcttatcgtggcaacccgggagtgccccattcggaccggggtcgcttcgggaagatatgggtcggatcgggtgccttcnggggtcgcgcatatggcagtccctacatgtgggacgtctctaaccggggaggtgggtatggcagaccagatgctatatgagcaatacgactggagacaggc

SEQ ID NO: 66943 - DNA, 89 bp, Glycine max
cgcgtccgcccacgcgtcgggacagatgtcagtacactgcagaaaggattgcgggcagaattaggaagggaccaggaccatgcattctg

SEQ ID NO: 66944 - DNA, 387 bp, Glycine max
ggcagttcaattccaatatattccattctctctgtgtatttccctacctctcccttcaagatgcagatcttcgtcaagaccctcaccggcaagaccatcacccttgaggtggaaagctctgacatcatcgacaacgtcaaggccaagatccaggacaaggaaggaatccccccggaccagcaacgtctcattttcgccggaaagcaacttgaggacggccgtacccttgctgactacaacattcagaaggagagtactcttcacctcgtcctccgtctccgtggtggcatgcagatcttcgttaagacactcaccggcaagaccataaccctagaggttgaaagctccgacaccatcgataacgtcaaggccaagatccaggacaag

SEQ ID NO: 66945 - DNA, 395 bp, Glycine max
gcacaagtgagtttgttgatcgagataactagaaacagtgtgatgaaaatgaaggtccttggtttcgtcggtgctacaattttggtagcatggcaagtgccatgcgtaggatatgttcgctctccgaatgaacactggcgatggtgcccgtactccggaggtgaaatgcgcaagttggaggcgtgctgtggaagcacacaggatctttggctttgagaccattcctgaagagtgcgttgaggcaacaaaggagtacatccatggcgaagagtatagagtagactccaaaacagttaaccaacaagcttacgtttatgccagagacctcgaggtccatcccaaggagacatttgtgttcagtatacatggcaccgtactctctaatattccatact

SEQ ID NO: 66946 - DNA, 171 bp, Glycine max
gaccaaagagaaaacacaagccaagtgaaagtgagaaaaaataaaaatcaaagagcataatgtcagggatcattcacaagattggggagagccttcatgtgggagggcacaagaaggatgaggagcataaggggtaacaacaaggggggggattccaaggggaacaacaat

SEQ ID NO: 66947 - DNA, 359 bp, Glycine max
  unsure (1)..(359): unsure at all n locations
ggttctagtgtgtgattgtttgttgttgtaactcgttcttcttcttttgttgttctgtgtttgtgtttgttttttctctcacctgaaaatgtcttgctgcggtggtaactgtggttgcggaagctcctgcaagtgcggcaacggctgcggaggctgcaagatgtacccagacttgagctacactgagtcaaccaccaccgagaccttggtcatgggagtggcacctgttaaggctcaatttgagggtgctgaaatgggtgtgcccgctgagaacgatggctgcaaatgtgggccaaactgctcctgcaacccctgcacttgcaagtgangtgttgggagagcaagcttcaagcagagat

SEQ ID NO: 66948 - DNA, 358 bp, Glycine max
ggcacaagtgagtttgttgatcgagataactagaaacagtgtgatgaaaatgaaggtccttgttttcttcgttgctacaattttggtagcatggcaatgccatgcgtacgatatgttccctctccgaatgaacactggctatggtgcccgtactccggaggtgaaatgcgcaagttggaagcttgctgtggaagcacacaacatctttggctttgagaccattcctgaagagtgcgttgaagcaacaaaggaatacatccatggcgaacaatatagatcagactccaaaacagttaagcaacaagcttacttttatgccagagacctcgaagtccatcccaaggacacaattgtgttc

SEQ ID NO: 66949 - DNA, 68 bp, Glycine max
gaagaggtcagtacagcagagaaggggagaccagaggggacagattaacgattctagacagaatttgc

SEQ ID NO: 66950 - DNA, 186 bp, Glycine max
cccgaactgttaccactgtcaaccatgccggtgacggcatggttgcgccattcactggccacaaatacatggctgagatcaccagcaagaagaccaacaatgacattaactacattgctagcaacagtggaagagtgcaatgcaggcaggtgtggccaccagatggcaagaagaagtttgagactc

SEQ ID NO: 66951 - DNA, 168 bp, Glycine max
tacggctgccaaaagaccgcggaagggaatggtgtgttttccggtttggttgttggctcagagtttgcgaataacttcatgcatggtgttgctgcattaacccttgacccaacgttcctagcactactgaaaatactgtcatgggtgtatacgatatccacctccaat

SEQ ID NO: 66952 - DNA, 421 bp, Glycine max
  unsure (1)..(421): unsure at all n locations
ggttctagtgtgtgattgtttgttgttgtaactcgttcttcttcttttgttgttctgtgtttgtgtttgttttttctctcacctgaaaatgtcttgctgcggtggtaactgtggttgcggaagctcctgcaagtgcggcaacggctgcggaggctgcaagatgtacccagacttgagctacactgagtcaaccaccaccgagaccttggtcatgggagtggcacctgttaaggctcaatttgagggtgctgaaatgggtgtgcccgctgagaacgatggctgcaaatgtggaccaaactgctcctgcanaccctgcacttgcaagtgaggtgttgggagagcaagcttcaagcagagatagcccttaattangaataatgatanactattaatgtgtagctaaaaacgtatgtattatgtc

SEQ ID NO: 66953 - DNA, 69 bp, Glycine max
gaacgcgaagtccatcacggcgacagatttatattcggcatatatagcaccgtactctctaatatcccg

SEQ ID NO: 66954 - DNA, 414 bp, Glycine max
gaaggtgcaagagtttgttgtgagctataagctagtttatcgtgaggagaatatgaagttgtttgttttctttgttgctgcagtagttctggtagcatggccatgccatggcgcaggctaccaaaggttccctctccgaatgaaaactggctatggtgagcgttcttcggaggtaaaatgcgcaagttttaggcttgctgtggaagcacacaacatccgagcctttaaaaccattcctgaagagtgcgttgaaccaacaaaggactacattaatggcgaacaatttagatcagactctaaaacagttaaccaacaagctttcttttatgctagtgaacgcgaagtccatcacaacgacatatttatattcggcatagataacaccgtactctctaatatcccatactatgaaaa

SEQ ID NO: 66955 - DNA, 236 bp, Glycine max
  unsure (1)..(236): unsure at all n locations
gaggagctgaacaagataagctatccatagcagccaaagaaatgaggggtacggtgggcggcctctttctacgttgtgcccgcacctcttagggaccttcagggacggctggtgaggtggtggggactgatgggggagcgcggttgagaatggaggcacatacttggtgttgccaacgaggggagtgggcggggggngaggataatatgccacatttggaaatgaagcttgccctg

SEQ ID NO: 66956 - DNA, 348 bp, Glycine max
ggagtttgttgatcgagataactagaaacagtgtgatgaaaatgaaggtccttgttttcttcgttgctacaattttggtagcatggcaatgccatgcgtacgatatgttccctctccgaatgaacactggctatggtgcccgtactccggaggtgaaatgcgcaagttgggggcttgctgtggaagcacacaacatctttggctttgagaccattcctgaagagtgcgttgaagcaacaaaggaatacatccatggcgaacaatatagatcagactccaaaacagtttaccaacaagcttacttttatgccagagacctcgaagtccatcccaaggacacatttgtgt

SEQ ID NO: 66957 - DNA, 69 bp, Glycine max
tagaggatcgaggcttacgtgcgcgtgcatgcgacatcatagctcgtctatagtggggcctaaattcaa

SEQ ID NO: 66958 - DNA, 381 bp, Glycine max
gatatctggcagcagaagaacaagtagttgagaactaagaaggagaagcaaatggcttcctcaatgatctcttccccagctgttaccactgtcaaccgtgccggtgccggcatggttgctccattcactgggctcaagtccatggctggcttccccaccaggaagacgaacaatgacattacctccattgctagcaacggtggaagagtgcaatgcatgcaggtgtggccaccagttgggaagaagaagtttgagactctttccgacctgccagaccttgatgatgcacaattggcaaaggaagtagaataccttcttaggaagggatggattccttgcttggaattcgagttggagcacggtttcgtgtaccgtgagcac

SEQ ID NO: 66959 - DNA, 421 bp, Glycine max
agacgacagaaggggaaggtgcaagagtttgttgtgagctataagctagtttatcgtgaggagaatatgaagttgtttgttttcgttgttgctgcagtagttttggtagcatggccatggcatggcgcagggtaccaaaggttcgctctccgagtgaaaactggctatggtgagcgttcttcggaggtaaaatgcgcaagttttaggcttgctgtggaagcacacaagatccgagccttgaaaaccattcctgaagagtgcgttgagacaacaaaggactacattaatggcgaacaatttagatgagactctaaaacagttaaccaacaagctttcttttatgctagtgaacgcgaagtccatcacaacgagagatttatattcggcatacataacaccgtactctctaatatcccatact

SEQ ID NO: 66960 - DNA, 386 bp, Glycine max
ggcacaagtgagtttgttgatcgagataactagaaacagtgtgatgaaaatgaaggtccttgttttcgtcgttgctacaattttggtagcatggcaatgcgatgcgtacgatatgttccctcgccgagtggacactggctatggtgcccgtactccggaggtgaaatgcgcaaagtggaggcttgctgtgggagcacacaagatcgttggctttgagaccattcctgaagagtgcgttgaagcgacaaagggatacatcgatggcgaagggtatagatcagactccaaaacagttaaccaacaagcttacttttatgccagagacctcgaagtcgatcccaaggacacatttgtgttcagtatagatgggaccgtactctctaata

SEQ ID NO: 66961 - DNA, 294 bp, Glycine max
gatatctggcagcagaagaacaagtagttgagaactaagaaggagaagcaaatggcttcctcaatgatctcttccccagctgttaccactgtcaaccgtgccggtgccggcatgggtgctccattcactgggctcaagtccatggctggcttccccaccaggaagacgaacaatgacattacctccattgctagcaacgggggaagagtgcaatgcatgcaggtgtggccaccagttgggaagaagaagtttgagacgctttccgacctgccagaccttgatgatgcacaattg

SEQ ID NO: 66962 - DNA, 116 bp, Glycine max
gagggccacaggtggggatgctgctcgaaagcactaggaacagtgtgaatcatataaaggccatggacatgttaaatgctacagtattggtagaacgcaatgattgcaactatatg

SEQ ID NO: 66963 - DNA, 413 bp, Glycine max
gaaggtgcaagagtttgttgtgagctataaactagggtatcgtggggagaatatgaagttgtttgttttctttgttgctgcagtaattttggtagcatggccatgccatggcgcaggctaccaaaggttccctctccgaatgaaaactggctatggtgagcgttcttcggaggtaaaatgcgcaagttttaggcttgctgtggaagcacacaacatccgagcctttaaaaccattcctgaagagtgcgttgaaccaacaaaggactacattaatggcgaacaatttatatcagactctaaaacagttaaccaacaagctttcttttatgctagtgaacgcgaagtccatcacaacgacatatttatattcggcataaataacaccgtactctctaatatcccatactatgaaa

SEQ ID NO: 66964 - DNA, 407 bp, Glycine max
ggcactagtgagtttgttgatcgagataactagaaacagtgtgatgaaaatgaaggtccttgttttcttcgttgctacaattttggtagcatggcaatgccatgcgtacgatatgttccctctccgaatgaacactggctatggtgcccgtactccggaggtgaaatgcgcaagttggaggcttgctgtggaagcacacaacatctttggctttgagaccattcctgaagagtgcgttgaagcaacaaaggaatacatccatggcgaacaatatagatcagactccaaaacagttaaccaacaagcttacttttatgccagagacctcgaagtccatcccaaggacacatttgtgttcaatattaaatggcaccggactctctaatattccatactacaaaaaacat

SEQ ID NO: 66965 - DNA, 231 bp, Glycine max
gcggttgaaaggggtcgttcgggcgtgaaactaaaaagagaaaagcgaaggtcaactcgtccgctgtgaacgatcctatcgttcgtacgcaatcatacgacgaaagaattattgaattgacttactctacataaaaaacactcagccgtgcaattacaaatgaatgcactggcaaatcactcttgattccatctaaatcaccttgcacaacatccccgtttcctcaactgg

SEQ ID NO: 66966 - DNA, 432 bp, Glycine max
ggcacaagtgagtttgttgatcgagataactagaaacagtgtgatgaaaatgaaggtccttgttttcttcgttgctacaattttggtagcatggcaatgccatgcgtacgatatgttccctctccgaatgaacactggctatggtgcccgtactccggaggtgaaatgcgcaagttggaggcttgctgtggaagcacgcaacatctttggctttgagaccattcctgaagagtgcgttgaagcaacaaaggaatacatccatggcgaacaatatagatcagactccaaaacaattaaccaacaagcttacttttatgccagagacctcgaagtccatcccaaggacacatttgtgttcagtatagatggcaccgtactctctaatattccatactacaaaaaacatggatatggggtggagaacattaactc

SEQ ID NO: 66967 - DNA, 405 bp, Glycine max
gcacaagtgagtttgttgatcgagataactggaaacagtgtgatgaaaatgaaggtccttgttttcttcgttgctacaattttgatagcatggcaatgccatgcgtacgatatgttccctctccgaatgaacactggctatggtgcccgtactccagaggtgaaatgctcaagttggaggcttgctgtggaagcacacaacatctttggctttgagaccattcctgaaaagtgcgttgaagcaacaaaggaatacatccatggcgaacaatatagatcagacttcaaaacagttaaccaacaagcttacttgtatgccagagaccttgaagtccattcgaaggacacatttgtgttcagtatagatggcaccgtactctctaatattgcatactacgaaaaacat

SEQ ID NO: 66968 - DNA, 441 bp, Glycine max
  unsure (1)..(441): unsure at all n locations
gatatctggctgcagaagaacaagtagttgagaactaagaaggagaagcaaatggcttcctcaatgatctcttccccagctgttaccactgtcaaccgtgccggtgccggcatggttgctccattcactggcctcaagtccatggctggcttccccaccagaaagaccaacaatgacattacctccattgctagcaacggtggaagagtgcaatgcatgcaggtgtggccaccagttggcaagaagaagtttgagactctttcctacctgccagaccttgatgatgcacaattggcaaaagaagtagaataccttcttaggaaggaatggattccttgcttggaattcgagttggagcacggtttcgtgtaccgtgagcacaacangtcaccaggatactacgatggacgctactggaccatgtggaagctgcctatgttt

SEQ ID NO: 66969 - DNA, 249 bp, Glycine max
gcgacagggggcgcatgtcagtacattgctcgagaatactaggcgcagtgtgatgaaaacgaaagttcttgttaattccacagattcgctttcggcagcatggaagggccaagccaacaatatgtgccttctgaacatgaacaccaactgttgggcaatgcttcaaaaagtgaaaaactcactttgtagacacactccaaagaagcacctgataaggagcttgctgactaccgatctaaactagaggct

SEQ ID NO: 66970 - DNA, 403 bp, Glycine max
gccacgcgtccgaacacgtccgaaaagacttttcatgggttcttttattagaaaacaacaaaggggtccgggttcgacaacatgacaaatgggtacacctgttacacaactactgagcggagaataccttatctatcctgaggttatcccgcgcatatattatcacgctagactacatcatgctaaagtacgtgctccacgcagagacaatacttgatattctcataacatgcatgcctggaactcttcaaaagggtcatgatgcgcggacacccttaaccttatgaatccgtttcttttatgagagactttatacctgatgcttctcattgacatatattgctagtaccaaaccactcctatctatgatggatattgctttaccccttacaagcaccctcta

SEQ ID NO: 66971 - DNA, 407 bp, Glycine max
ggaaacaagggcgcataatttactaaagccacgaaagagaaaacaacatagtgaagtctcttacatgacttgttgatcgagataactagaaacagtgtgatgaaaatgaaggtccttgttttcttcgttgctacaattttggtagcatggcaatgccatgcgtacgatatgttccctctccgaatgaacactgactatggtgcccgtactccggaggtgaaatgcgcaagttggaggcttgctgtggaagcacacaacatctttggctttgagaccattcctgaagagtgcgttgaagcaacaaaggaatacatccatggcgaacaatatagatcagactccaaaacagttaaccaacaagcttacttttatgccagaaacctcgaagtccatcccaaggacacatt

SEQ ID NO: 66972 - DNA, 435 bp, Glycine max
gaaagtgcacaagtgagtttgttgatcgagataactagaaacagtgtgatgaaaatgaaggtccttgttttcttccttgctacaattttggtagcatggcaatgccatgcgtacgatatgttccctctccgaatgaacactggctatggtgcccgtactccggaggtgaaatgcgcaagttggaggcttgctgtggaagcacacaacatctttggctttgagaccattcctgaagagtgcgttgaagcaacaaaggaatacatccatggcgaacaatatacatcagactccaaaacagttaaccaacaagcttacttttatgccagagacctcgaagtccatcccaaggacacatttgtgttcagtatagatggcaccgtactctctaacattccatactacaaaaaacatggatatggggtggagaaatttaac

SEQ ID NO: 66973 - DNA, 364 bp, Glycine max
gggactttcacacttcgcgccttaggatggaaactcttctgtgcatatactcgacaattgcttgctcactcatatccgatcgttttttacacatgctgctacaagcagtgcactgatatatatagctgcacttcaggagactaccattgtatatttgtacaccctgagactcgtactcatcgagactcctctcatcggacaatcgagcacggacacgaagattggcagcgcaactggaacactctcttatccagaacagcctggacacatactcatataaggattacacttgcgtatgcatgtgtggtctgtacggcattgcaaatgtcatagttcactgtatggcgtactagtatacctgtgt

SEQ ID NO: 66974 - DNA, 220 bp, Glycine max
ggaagtgcacaggttagttatgggttcaaggaaacgaaaaactgggactgttccatccatggcctgtcttcttcaagcgagaatagaagcgtaactggcccttcttgtttgtatccgacgtcacctgaactcttatcacacaaactttctcttcgtctatctcctaacttaacttctcctcctccttctttaacaacctacacaattggatttttgttct

SEQ ID NO: 66975 - DNA, 434 bp, Glycine max
ggttctagtgtgtgattgtttgttgttgtaactcgttcttcttcttttgttgttctgtgtttgtgtttgttttttctctcacctgaaaatgtcttgctgcggtggtaactgtggttgcggaagctcctgcaagtgcggcaacggctgcggaggctgcaagatgtacccagacttgagctacactgagtcaaccaccaccgagaccttggtcatgggagtggcacctgttaaggctcaatttgagggtgctgaaatgggtgtgcccgctgagaacgatggctgcaaatgtggaccaaactgctcctgcaacccctgcacttgcaagtgaggtgttgggagagcaagcttcaagcagagatagcccttaattaggaataatgataaaccattaatgtgtagctaaaaacttatgtattatgtctgtgatgggtttc

SEQ ID NO: 66976 - DNA, 138 bp, Glycine max
gaatatacacatttcgttacgcacattctcaaaacggtcaatggcggaagcattaacttttatctattccacgtcttctttactgatgaaacacaaaataaccggtaactagaaagcttctattagtgaataatcaaa

SEQ ID NO: 66977 - DNA, 373 bp, Glycine max
cggtccgaggaggcatcatatgggatctgatgcgaaaaaacgacagaggggcgtcgcagtgggaagacgacctatgggtcccgctggcatgagtcttccttctactgtaacaaagatcatctccgcgagaccgcgtcttacaccatccacacttacaacggcgtcgattcgaaccttatgttttctatagagccacctcttttatattctggggccgtacaattacataattttgactggctcgacgtgggcgcttctcaatttgatcggcgggcccttaatgctacctgagtcaatcagcgtgacagcgaaaagcccttggcaaccaggtgttctaacatgttgacatgcatcaattgcgcatgcaacaaat

SEQ ID NO: 66978 - DNA, 53 bp, Glycine max
gaaaagaaattaatattaatttatgaataaaactaataaaaaacgaaccatat

SEQ ID NO: 66979 - DNA, 333 bp, Glycine max
agacgtcagaagacggcggggggggcctcttatatacatagctccaataaacagtgatactgcagatattcgatcactgatatgcttgtcacttctgcccttgcttgtcgtttccaagattgtgtgccagataatggacggactattggacttgtactatatttatatgctaagagctccatggctctcttcgcaacattttcatgacaatggccctgtcctaagtagtcactcgtaggacatgattgaaatcgttgatgctctgtgaaactaatgggcagattgatggtctagactttctccgactttccgctggctgctgatgcttaatag

SEQ ID NO: 66980 - DNA, 53 bp, Glycine max
gacggatgctataagaccacacaacggaaccgctgagataagacaacaaaagg

SEQ ID NO: 66981 - DNA, 187 bp, Glycine max
acgacaaaacgacacaatgagttcatttactcacacaaatattcatagccgttttgtttgtgctcattttgaatgaccaccacaccaatctatatcctgaaccatattgagcaccttcttcatgatgaaccaacctatgacgaccaatagcctaaagacattccccaacgctctttttggtctgaaa

SEQ ID NO: 66982 - DNA, 118 bp, Glycine max
aggaagagaagagaatggagagggaaagagaaaaggagagaattcgcattggcaaggagttgctggaagcaaagaggattgaagctgacaatgagaggaaacggttgttggccttgag

SEQ ID NO: 66983 - DNA, 384 bp, Glycine max
gaagggtagggggtgtttatggaaagggacaaggaacggggaaacacagtcgagagctcgttgggagaagggacgcttggatccagcatcctatgctcacacaattaggttcggcacactgccagtggctattggcatctgcgtgatgctcctgctctaaaacatccaaggtcacaaacgctaccataggttactagagcccgagactattcgactaaacacaaacaatttgcagattattaataaccctgtgtatggagatactctagcttgtcataacttaattggcttgctagcattacgtctgaacttagcatgcgtaaaaagtaatacagcttgaaactaattctctaacattaaaatgacttgtctgaattgaaaata

SEQ ID NO: 66984 - DNA, 389 bp, Glycine max
  unsure (1)..(389): unsure at all n locations
aggcgtccgaacacgtccgagagggcctcagtagggtactctgcggcagcaccttgaaacgcgggaggttcatactatcttcgccggccttcaccggcctgcagccatgtcaacgaaaaccgttcgtgagccactggaggaaatcctggctctgataccatctgataaagatggtaaacctatcttctgtgtcgatcaactacttatctacttcaatgacacctgaattcatgtcactgaacagcttgagaaggaaactcttgtgcatatgattcgcaagatgattgttaaaggtgacatacatacttcagctgcctatcctactataactagctgacactgatgttgctgcatggatgcaaggaactgggcataactgctcttnatat

SEQ ID NO: 66985 - DNA, 373 bp, Glycine max
ggcacttgtggattcgatgctctagatcactagaaacagagagatgcaaacgaaagtcctcgggttataggttccttcaatttttgaaacatagacgatccatgcggaacatgtcagacttctgcttatgatacactgtgtatagagctcgaactcatgatgcgatatgcaccaactactagcttgctttgaagacacacaacatctttagcttgaagaccattacagaggagctcgttgtggctacaaacgagaacaataatggccaacactatatcttactctccatagcaggtaatcgacaaccttactattctgtcggactccctgaatacgatgccatggacacatttgttgtaattatagttggcgc

SEQ ID NO: 66986 - DNA, 293 bp, Glycine max
tctacagttgttataacacgacaccgtgtgccacttttcgatataaggcgatctaacagtggaactgctggtatatgacaactaattggactgatatggcttcctcaaaatcatcataccttgttgttgccactcttgacaatactgacatcggcataatttctctattcaccatccttaaattcatggcgtagcagcccactaattcttcctctgatcacattacccaatacgctagtacttgaagaatattacactctatacgcgtttttacaccacttggtaggataaaa

SEQ ID NO: 66987 - DNA, 396 bp, Glycine max
ggaagtgtatttcgtcactgacctatctttgtagggattcgagggataaaccttgatattaatcaaccccttttaatttccctttacattctacgacactgcgtgctatggcgctacaacgcacttcttgtgttcgggatgttgatgactgcgggcctcgttaacgtttcatctgatccaaagatagaacgaccaatactggaagcacaacaagaactcccgtttccccataacgatccacttatcatgagagacgctaacagaatgctaatgcacgatatggactgcggtgggtcgtgcaagacccggtgcatagcacatttaaggcccaacttgtacactacggcgtgtggcacttgcttaatgaagtacaagtctgtaccacctgccacatct

SEQ ID NO: 66988 - DNA, 61 bp, Glycine max
ttacgtttgctaaaaaacaacagaaggttatgtttgcaaaaaaacgacagaaggtgctttt

SEQ ID NO: 66989 - DNA, 417 bp, Glycine max
gaaggtgcaagagtttgttgtgagctataagctagtttatcgggaggagaatatgaagttgtttgttttctttgttgctgcagtagctttggtagcatggccatgccatggcgcaggctaccaaaggttccctctccgaatgaaaactggctatggtgagcgttcttcggaggtaaaatgcgcaagtttaggcttgctgtggaagcacacaacatccgagcctttaaaaccattcctgaagagtgcgttgaaccaacaaaggactacattaatggcgaacaatttagatcagactctaaaacagttaaccaacaagctttcttttatgctagtgaacgcgaagtccatcacaacgacatatttatattcggcatagataacaccgtactctttaatatgccatactatgaaaaacat

SEQ ID NO: 66990 - DNA, 350 bp, Glycine max
ggcacaagtgagtttgttgatccaaaataaactggggcagtgtgatgaaaatgaagggccttgttttcttcgttgctacaattttggtagcatggcaatgccatgcgtacgatatgttccctctccgaatgaacactgactatggtgcccgtactccggaggtgaaatgcgcaagttggaggcttgctgtggaagcacacaacatctttggctttgagaccattcctgaagagtgcgttgaagcaacaaaggaatacatccatggcgaacaatatagatcagactccaaaacacgtaaccaacaagcttacttttatgccagagacctcgaagtccattccaaagacaca

SEQ ID NO: 66991 - DNA, 95 bp, Glycine max
gacgccaacgacatctcaaatcaaaacaaaaggcgaagagagagcagaggaggaagaaaaaaaccttctctgcccgccaaacgcaattttccccc

SEQ ID NO: 66992 - DNA, 394 bp, Glycine max
  unsure (1)..(394): unsure at all n locations
ggcacaagtgagtttgttgatcgagatagctagaaacagtgtgatgaaaatgaaggtccttgttttcttcgctgctacaattttggtagcatggcaatgccatgcgtacgatatgttccctctgcgaatgaacactggctatggtgcccgtactccggaggtgaaatgcgcaagttggaggcttgctgtggaagcacacaatatctttggctttgagaccattcctgaagagtgcgttgaagcaacaaacgaatacatccatggcgaacaatatagatcagactccaaaacagtaacccacaagcttacttttatgccagaaaactcgaaagtcatccaaagacacaatttgtgtcagtatagatggcaccgtactctctatattncatactac

SEQ ID NO: 66993 - DNA, 59 bp, Glycine max
aaaacctacagctgcgagaaaacaacaaaagggtactgcttctataagactacagaaag

SEQ ID NO: 66994 - DNA, 372 bp, Glycine max
agaagacgacagaaggggataccaaaaacaaaacacaagccaagtgaaagtgagaaaggataaaaatcaaagagcataatgtcagggatcattcacaagattggggagacccttcatgtgggagggcacaagaaggaggaggagcataagggtgagcaccatgctggagaatacaaaggggagcaccatggtgaacacagtagtgagtacaaaggagagcatcatggtgaacacaaagctggagagtaccatggtgagcacaagccagagcacaaagaggggttcctagacaaagtcaaagacaagatccatggtgagggcggcgccgcccgaggcgagaagaagaagaaggagaagaagaagaaagagcat

SEQ ID NO: 66995 - DNA, 303 bp, Glycine max
gaaggtgcaagagtttgttgtgagctataagctagtttatcgtgaggagaatatgaagttgtttgttttctttgttgctgcagtagttttggtagcatggccatgccatggcgcaggctaccaaaggttccttctccgaatgaaaactggctatggtaagcgttcttcggaggtaaaaggcgcaagtttaaggctgctgtggaagcacacaacatccgagcctttaaaaccattcctgaagaagtgcgttgaaccaacaaaggactacattattggcgaacaattaagatcagaactctaaac

SEQ ID NO: 66996 - DNA, 347 bp, Glycine max
gagcgaaacagagagtgatttcagtgagtgatcggtgttcacttgatctcatcataatcgtcagcgtcaattgaagaagataccgatcagaaacatcgccgtcggaaggcctgaagaggcgactcaccccgacacgttgaaggcggctttggctgagttcatctcaaccttcatcttcgtgttcgccgactcaggctccggcatcgcctacaacaagctcaccgacaacggcgctgccacccctgccggcctcatctccgcctccatcgcccatgcattcgccctcttcgtcgccgtctccgtcggcgccaacatctccggcggccacgtcaaccccgccgtcacct

SEQ ID NO: 66997 - DNA, 191 bp, Glycine max
gctcgcaaccgacagaaggtgtactagaaggtctgggatcaattgacgaaatggtaagggtgggcgttccaatgcctatgtttcactgctgaaaatatcatttccgtaggggaataatagctccttactcccgcatttgagatgcaaatggtattcacatccagcggaccatttacagggtcactcctgct

SEQ ID NO: 66998 - DNA, 179 bp, Glycine max
  unsure (1)..(179): unsure at all n locations
ctgctgtcagatgacagcagacgacagactgggacgatgagtcgatttgataactaanaggagggcgattcgagatattcatccacttagacatcatctaaatacaattcataccataagcaaattcattataaatgaaagatatatcatttatatgggcttaataaccgcatctttta

SEQ ID NO: 66999 - DNA, 133 bp, Glycine max
cttttcctatttccctaaccatttaatcatccggaatgcttttatcaaacaataagctcttttttctaatccatcagattccgatcataaacatctccttcctaattgccttaaaagctgtcttacttcaaca

SEQ ID NO: 67000 - DNA, 247 bp, Glycine max
gaacctttgcattctattcattcaagattcagcaagtgcgttttggaagcagagaccgaaatacttcgagatggcccttacaaagcaaactgctcgtaagtcaactggaggaaaagctcccaggaagcagcttgcaaccaaggctgcacgtaagtctgcaccaacaactggtggtgtgaagaagcctcatcgttatcgccctggaactgttgctcttcgtgagattaggaaataccagaagaacact

SEQ ID NO: 67001 - DNA, 163 bp, Glycine max
gggagaaaaacacagagaactaaactgcggaaggcggcttactgttagggccaagcgttagtttgtggtattgagcaataagctaaaagctaaaactaatatcacatctaacattaggactacataattactatgcatatatctatgcgtgataaataacaaa

SEQ ID NO: 67002 - DNA, 72 bp, Glycine max
ccaggcgtccacagactggtgaggctgctttaagacgccagaccggtaccgctgccagagggcgacagacgg

SEQ ID NO: 67003 - DNA, 245 bp, Glycine max
aggcgtgcgaacacgtccgagaggtccacctgcgggaagaccacagactgccacggccgctacaggaccacaaactgggatggctacctcatacaacgccttgcattcaaacccttacaggaattccttgtgcatcgctgtcttccacacaaccaaacatgacctacacatgcgggaactgcgactggactgacaagactacctggacgaaagcaaacagctatggagatattggggagactggc

SEQ ID NO: 67004 - DNA, 298 bp, Glycine max
  unsure (1)..(298): unsure at all n locations
ggttctagtgtgtgattgtttgttgttggactcgttcttcttcttttgttgttctgtgtttgtgtttgttttttctctcacctgaaaatgtcttgctgcggtggtaactgtggttgcggaagctcctgcaagtgcggcaacggctgcggaggctgcaagatgtacccagacttgagctacactgagtcaaccaccaccgagaccttggtcatgggagtggcacctgttaaggttcaatttgagggtgcttgaaatgggtgtgcccgctgagaacgatggctgcanatgtggaccaaac

SEQ ID NO: 67005 - DNA, 237 bp, Glycine max
gacacacacttttttcaaggcataggattggtgaggcaaacttgaattgaagtgaagaaggagatggctgcaacctcttccttgtgctcatcgaccctccaatcccagaatcaatggattctttcttcacaaaacctttctttcccaatactccttccctaactttttcaagaaggaaaattccaaccccagggaggcctccttttgaggtcaccaggttttaaaaaagcgatttca

SEQ ID NO: 67006 - DNA, 54 bp, Glycine max
gagacctcaggtcaggcggggctacccgctgagtgtaagcatatcaataagcgc

SEQ ID NO: 67007 - DNA, 213 bp, Glycine max
gacaccaacaccaaaacaaacccactaagatggcttcctttgtatccttcctagtgctgcttcttgcagcccttatcctcatgcctcaagggcctgctacttactacaaaccaattaagaagccaccagtgtacaagcctccagtgtacaagccaccagtgtacaaaccacccggttataagccaaaaccaccggtttacaaagccgaaccac

SEQ ID NO: 67008 - DNA, 398 bp, Glycine max
ggggggcagcagaagaacaggtagttgagaactaagaaggagaagcaaatggcttcctcaatgatctcttccccagctgttaccactgtcaaccgtgccggtgccggcatggttgctccattcactggcctcaagtccatggctggcttccccaccaggaagaccaacaatgacattacctccattgctagcaacggtggaagagtgcaatgcatgcaggtgtggccaccagttggcaagaagaagtttgagactctttcctacctgccagaccttgatgatgcacaattggcaaaggaagtagaataccttcttaggaagggatggattccttgcttggaattcgagttggagcacggtttcgtgtaccgtgagcacaacacgtcaccaggatacta

SEQ ID NO: 67009 - DNA, 230 bp, Glycine max
cgtccggtcgcgcggagacgacagaagggggaccaagtgaaccaatatagcccaagccctatacaggcgaaccctaacacacacccatttgattcagattccatggctagcctcaaggatgcatttttggctgcagagctctgcatggttgcggtgagtgcacccatggcacatgcaactatcacgtgcgggcaggtgacgagtagcctggccaattgcatcggttacct

SEQ ID NO: 67010 - DNA, 409 bp, Glycine max
ggcacaagtgagtttgttgatcgagataactagaaacagtgtgatgaaaatgaaggtccttgttttcttcgttgctacaattttggtagcatggcaatgccatgcgtacgatatgttccctctccgaatgaacactggctatggtgtccgtactccggaggtgaaatgcgcaagttggaggcttgctgtggaagcacacaacatctttggctttgagaccattcctgaagagtgcgttgaagcaacaaaggagtacatccatggcgaacaatatagatcagactccaaaacagctaaccaacaagcttacttttatgccagagacctcgaagtccatcccaaagacacatttgtggtcagtatagatggcaccgtactctctaatattccatactacaaaaaacatgga

SEQ ID NO: 67011 - DNA, 247 bp, Glycine max
gtagcactggatatggtgggggcaataacgcagtcaccagcggcttgaggataatatgcaccgaatgaaataaaatataaaattgtacaattaaataaacactgaaggaaaatcacccatataatggctttgaggtgttaaaaataaatcaaaagtacttacctttatgtggtcgtctctaatgagccatccttacgtacacatccattcgacgtcataattcttttataggcgcacctaaatacat

SEQ ID NO: 67012 - DNA, 172 bp, Glycine max
ctcttaggcaacatccaggaggcccttttgacaggtttcgtagccgtacccttccgtcgacttcaatacccttaccaacatatggtgggctttctctgtctactcattcacaccgatggcatactaatgaaaaaagttaactcaaaaagatagaaaacagcggccgtttaat

SEQ ID NO: 67013 - DNA, 283 bp, Glycine max
ggcacaagtgagtttgttgatcgagataactagaaacagtgtgatgaaaatgaaggtccttgttttcttcgttgctacaattttggtagcatggcaatgccatgcgtacgatatgttccctctccgaatgaacactggctatggtgcccgtactccggaggtggaatgcgcaagttggaggcttgctgtggaagcacacaacatctttggctttgagaccattcctgaagagtgcgttgaagcaacaaaggaatacatccatggcgaacaatatagatcagac

SEQ ID NO: 67014 - DNA, 260 bp, Glycine max
gcagtaatatccacaatcaacgaggcgtgtcccaagcttccttactgcagcttccgctttggcaacggagttgactcattcctctcttcctctaccatacaccactcactcacttttttcaacatctatgaccataccactctgtaaaccaagaccagaccactcaccagttctcctgctttcatctgccgtcaggtagggccaactacatcagacagttcttcacccaaatcgatcaaggctgagattctgcacttacc

SEQ ID NO: 67015 - DNA, 119 bp, Glycine max
ttttagaggttccaggctaccttccccttccttccaacgccttactttttttttggggccccttaatttcaatccactggccggcgtttaacaccgtctggactggaaaaaccctgccg

SEQ ID NO: 67016 - DNA, 184 bp, Glycine max
gacaccaacgccaaaacaaacccactaagatggctgccttgtgatgcttcctagacgctgattgttgcgacccttattctgatgcgtcacagggctggctgctgtagctacaaagcgcgagcaccaatgctggagaatacaagcgctgagcacgatcgagtgacacacagtgtgcaaaccaccg

SEQ ID NO: 67017 - DNA, 182 bp, Glycine max
ggtttcactccctaatagctgctacaggtacagggtaacttctattctatatttctttctacccgcaagcaaatcagaagaagagaatggcagcagcagaggggctaaacagagagcagtacgtgtacttggcgaagctgtctgagcaagcggagccgtaccaggagatggtggagttcatg

SEQ ID NO: 67018 - DNA, 357 bp, Glycine max
gatctggcagcagaagaacaagtagttgagaactaagaaggagaagcaaatggcttcctcaatgatctcttccccagctgttaccactgtcaaccgtgccggtgccggcatggttgctccattcactggcctcaagtccatggctggcttccccaccaggaagaccaacaatgacattacctccattgctagcaacggtggaagagtgcaatgcatgcaggtgtggccaccacttggcaagaagaagtttgagactctttcctacctgccagaccttgatgatgcacaattggcaaaagaagtagaataccttcttaagaagggatggattccttgcttggaattcgagttggagca

SEQ ID NO: 67019 - DNA, 399 bp, Glycine max
  unsure (1)..(399): unsure at all n locations
gttctagtgtgtgattgtttggtgttgtaactcgttcttcttcttttgttgttctgtgtttgtgtttgttttttctctcacctgaaaatgtcttgctgcggtggtaactgtggttacggaagctcctgcaagtgcggcaacggctgcggaggctgcaagatgtacccagacttgagctacactgagtcaaccaccaccgagaccttggtcatgggagtggcacctgttaaggctcaatttgagggtgctgaaatgggtgtgcccgctgagaacgatggctgcaaatgtggaccaaactgctcctgcaacccctgcacttgcaagtgaggtgttgggagagcaagctncaagcagagatagcccttaattaggaataatgataaactattaatgtgtagc

SEQ ID NO: 67020 - DNA, 297 bp, Glycine max
cggacgcgtgggatacgacagatgggtcacctgtaaagaaagaggaggaagtgattgcagaggctgaagctgagaagaaggaggagggcacagacacagacacagaggctccaacagagtaaaagaatgtgaagaggggaaatgtgcatcttaagtagagtgtatgagagggtatttttttcttagttgcatcgtgtcttgatactccatgcacgtcttttctttgtgtagagcactaacaaaatgtctattctatggaagggacgactgttacgaatgccaaccacttagtacaaa

SEQ ID NO: 67021 - DNA, 140 bp, Glycine max
ttttttttctttttgacaacagccaaaattggcttgtgtcgtctttcgaatacgtacccttctgtcgtcttcactaccataccccccatctgtatggctctctctctcttctttttcacaccaattcacaaataaggctg

SEQ ID NO: 67022 - DNA, 218 bp, Glycine max
ccgtgatgggacggatgatcattaggaccaactggaacgaatggcagcgctgcgtggctttaccgacatcaccgctagcacatatcagattcgatatatataatctaccctgctctgacgctggtgaacacaacatacttgagagtgcaaactttgcgtttgggagggcgattattgccaacaaacatatggtgttctggaaccgcgtactatatcac

SEQ ID NO: 67023 - DNA, 325 bp, Glycine max
ggttctctcaccgctccttcataggggaaccctgggtgactttatccttaacaatccatcacctcaccaaatcttaccacccaaccacctcttctttcattcattgaggacgaacctatttctcaattaaacaatatgctcctataaaatggaacaccacctcatgtagaaagggctgctgatacttatcctgatgctgtgctttctccaccatgccaaactaaattaaatttatcacaaactaactctctgccgctctaaagaatacaatcttacttactacttcattaaactgaatcacacttttataccaaaacccaaattc

SEQ ID NO: 67024 - DNA, 108 bp, Glycine max
gaattctcttgcacaaaaaaaaaagggggctgggggtaaggttcaaacatacactgccaatatcctatatataaaacaccgtagaagataaagctcgaaggcccacac

SEQ ID NO: 67025 - DNA, 221 bp, Glycine max
agatgacaaagacgacgggaggagcatattgaaggggctttgacattgaatggttgccagtgccatgacctaccaacctgacctttaaccaaatgaattcagggtaatgggctggctaccaagcctttaatgtcattgaagcccgaatggacatgttgattacaatgaaccatattatatattattactgcctataatagtcaatggcttaatagatccca

SEQ ID NO: 67026 - DNA, 428 bp, Glycine max
  unsure (1)..(428): unsure at all n locations
ggcacaagtgagtttgttgatcgagataactagaaacagtgtgatgaaaatgaaggtccttgttttcttcgttgctacaattttggtagcatggcaatgccatgcgtacgatatgttccctctccgaatgaacactggctatggtgcccgtactccggaggtggaatgcgcaagttggaggcttgctgtggaagcacacaacatctttggctttgagaccattcctgaagagtgcgttgaagcaacaaaggaatacatccatggcgaacaatatagatcagactccaaaacagttaaccaacaagcttacttttatgccagagacctcgaagtccatcccaaggacacattngtgttcagtatagatggcaccgtactctctaatattccatactacaaaaaacatggatatggggtggagaaattta

SEQ ID NO: 67027 - DNA, 331 bp, Glycine max
gaatcaatatccacaatcaacgaggcatgtcccaagcctccttggtgcagcttacagattggcaacggagttaactcattgctctattcctctaccatacaccactcactcacttttttcaacatctatgaccataccactctttataccataaccaaaccactcacaagttcttctgctttcatcagttgtcatgttatgccaactacatgaaacttttcttaacccaaatggatcaaggatgagattctgcacttacccagctgaggaaatgcggtgaacatcttttatcttctgcagatggttatagcgaccctacggtcatgatgat

SEQ ID NO: 67028 - DNA, 264 bp, Glycine max
cagggaacttctacacaatacaaaacaagggactattggaaattactagtgaatgctctcactacataagaccacacactttgcctacctttaaacaccgatttagatgtcgtcttcaataataccaattatgcttacaattgcaacaacaccatctaaagtgcacactctaaatttaaacgaaatacaaatataacataaccccccttttaaaagaatccaaacttaccaacgattacatactacgcggtacatttaaaatag

SEQ ID NO: 67029 - DNA, 268 bp, Glycine max
ggccggaaaaaaaccagttgtttggaacctaaaaggagggaatgggtttcttaatggtcttcttcccaagtttttacaccctcaaaccttcccgtgcccggattgtttgttcatttaccggccctaaattcattggttgctttcccaccagggaaaaccaccattgcctttccttcatttgttgccaccgttgaagaattccatgcattccggtgttggcacccattgggaagaagaaatttgagaattttttcttctttgccgaact

SEQ ID NO: 67030 - DNA, 317 bp, Glycine max
  unsure (1)..(317): unsure at all n locations
ttttcaagtagtttggaaccgggaaagaaagggcacttattgagctaattatcaatcttcccactctaaacactttaaataaatgaacacttgctactagccagnntatataatcagaggccttaatttgactaatgttataacaagaaaacactccataaccttagattcattccttgccacggtcttcnaagcaaaatttagcccatttgagaccaaagttttaaacaatagcattagatacttttattcccaataaaactttatcattcacaactcagaaaactttttataatccttttttaccaagggatgct

SEQ ID NO: 67031 - DNA, 242 bp, Glycine max
aatttttcctttcagacatccccgggggtcatgagagaacttctcctagcatatgcgacaacccttttccaacataccattctattatccatgcatctcctaatcaaaaaccatatactaaccatcactgatcaatctcacaccaatcacttttaaaacttaaccaactgaaacatcttaataccaactaacaacctccacatccaccaaaatactcttccgttctatttgatccaccctta

SEQ ID NO: 67032 - DNA, 308 bp, Glycine max
gacctggcaaccaatcaaccttttgttagggtctgggagagagaagcaaatatgtttctttttgatctattgggcaaatggatacagtggactacgtggcgtttccagaataattggttgattatctgcactataacccatggttgggttatccatgaccaagacttacgcttactttaccttcattgctatgaacttactttgagtgccacgcatgcatgcatgcacacgatttgtgctaaaaaagctggagactgtatactacctgtcggaccttgttcatgcacaattggcaaaggaagtagaat

SEQ ID NO: 67033 - DNA, 52 bp, Glycine max
gaatcaatgactattcatgattccataattgaatgaattacatactggatcc

SEQ ID NO: 67034 - DNA, 256 bp, Glycine max
gaagactacttaagggattttaagatcggaccatggtcactgagtcctcagagtacatatcttaggaatctgaaaattcattccatcataatacccctgtccatcgtacaatagcaaacgaaattaatgctcggatcttaataaacctagcaacaattaaccttcctaacatatatcaacagagcctaccattatatcacttttcttaccttcaaaatatttcttacaactcatatttgttactttgaatatcaaa

SEQ ID NO: 67035 - DNA, 307 bp, Glycine max
ggagcaacttagcacgatatcatcacattgcaaaggaaatacacgttacattactaagtctttgttcattacgagtagtgagcaccggctatgcctgaagaggtgcatcgtgtggccagcctgagatgctgcatgacatgtgcgcggcacatgagtgctgcactccatggcacagggccgcaatcaacgtgggggcaggtatgtcggagacacgtgtccgtgctgtagttattttccaagcagaggaaaaccgtcgcaggcctgctagaacagagtgaaatcgctgaccagcgcggcgaagaccacc

SEQ ID NO: 67036 - DNA, 399 bp, Glycine max
  unsure (1)..(399): unsure at all n locations
gttctagtgtgtgattgtttgttgttgtaacgcgttcttcttcttttgttgttctgtgtttgtgtttgttttttctctcacctgaaaatgtcttgctgcggtggtaactgtggttacggaagctcctgcaagtgcggcaacggctgcggaggctgcaagatgtacccagacttgagctacactgagtcaaccaccaccgagaccttggtcatgggagtggcacctgttaaggctcaatttgagggtgctgaaatgggtgtgcccgctgagaacgatggctgcaaatgtggaccaaactgctcctgcaacccctgcacttgcaagtgaggtgttgggagagcaagcttcaagcagagataacccttaattngaataatgataaactattaatgtgtagct

SEQ ID NO: 67037 - DNA, 233 bp, Glycine max
acacacacacatcaggtgcatcatgagtcacttcttcagatgtacacctccactcttcaaatcaccccaccgttatcgtttcctacactacttaagaaacacacacccttttatacctaacttcacaccacacctaccctcatattcttctctcttccaacttgctattgctcatcccaaataataattatcatgactttctatcatgaaattagaccatatctacaaaacta

SEQ ID NO: 67038 - DNA, 179 bp, Glycine max
gatatctgtcatcagaaaaacaagttgttgagaactaagaagaaggaaatggctttctcaatgatctccttcccagctgttaccaccgttaaccgtgccggtgccggcatggttgttttattcaccggtctcaaattcatggctgtctttcccacgagaataccaacaatgacattacc

SEQ ID NO: 67039 - DNA, 278 bp, Glycine max
gatagaagaagcagaaagagaagcattagcaaaagcaagaagaactagtctaagcagaaatggcctcttcagtgatggcatctgtggccctcaaacctgcccctttcactgttgaaaagtcctcaattagaggcccttccttccttctaaggaactcctcttcattcaaaagtgggggccggggggggaagaaaaataaaaatggcaaaccttattgaattaatgggggcatggcttttaaggaaagaagttatgcatttggcaagaaaaggaaggga

SEQ ID NO: 67040 - DNA, 249 bp, Glycine max
gatcgcatttcatagcacgcaccctcattaccaacacgaaagcgtagccaaaaccttttttcgaagtctctgattttcctaatggctccggcaaaggcagagaagaagccggcggagaagaagccagcggcggagaaggcaccggcggagaagaagccgaaggcggagaagaagatctcgaaagaaggagggagcgagaagaagaagaagcgcacgaagaagagcgtggagacctacaacatctacatc

SEQ ID NO: 67041 - DNA, 138 bp, Glycine max
cgatctggcatctaaaaagcaagtcgttgagaactaacaaaagggatatggcttgctcaatgatctcctgcccagctggtagcagcgtctaccgtgcctgtacctgcatctttgaattattaaaaatcctcaaataca

SEQ ID NO: 67042 - DNA, 272 bp, Glycine max
ggccttgtgtatttcgcgccctcaatacctacacgcagggtgatgcaaatgcttgtgcttgttttcttcgttgctacaattttggtagcatggcaatgccatgcgtacgatatgttccctctccgaatgaacactggctatggtgcccgtactccggaggtgaaatgcgcaagttggaagcttgctgtggtagcacacaacatctttggctttgagaccattcctgaagagtgcggtggagcaactaaggaattcattcatggcgaacaata

SEQ ID NO: 67043 - DNA, 65 bp, Glycine max
aagaatactgatctttagaccaatcaaactatttatataaatggatattttattggcggccgctt

SEQ ID NO: 67044 - DNA, 106 bp, Glycine max
ggcggcttgaacacggtaagaagagaaaaaacccaccgccaaattgcgtgaatgacgctctcactcgagaccacgacaaaactgttccttttcgttgaaacgaaaa

SEQ ID NO: 67045 - DNA, 80 bp, Glycine max
tgcggctgctggaacaccaccgaagggtacggctgaacaaagacgacataagggtactgctgccaaaagacgacaaaaag

SEQ ID NO: 67046 - DNA, 294 bp, Glycine max
gatctggcagcagaagaacaagtagttgagaactaagaaggagaagcaaatggcttcctcaatgatctcttccccagctgttaccactgtcaaccgtgccggtgccggcatggttgctccattcactggcctcaagcccatggctggcttccccaccaggaagaccaacaatgacattacctccattgctagcaacggtggaagagtgcaatgcatgcaggtgtggccaccagttggcaagaagaagtttgagactctttcctacctgccagaccttgatgatgcacaattggc

SEQ ID NO: 67047 - DNA, 269 bp, Glycine max
gaaggtgcaagagtttgttgtgagctataagctagtttatcgtgaggagaatatgaagttgtttgttttctttgttgctgcagtagttttggtagcatggccatgtcatggcgcatgctaccaaaggttccctctccgaatgaaaactggctatggtgagtgttcttcggaggtaaaatgcgcaagttttaagcttgctttggaagcacacaacatccgagcctttaaaaccattcctgaagagtgcgttgaaccaacaaaagactaca

SEQ ID NO: 67048 - DNA, 160 bp, Glycine max
gcgcggctgagacaacacaacgggaggtgttagttttatgcaacccaagatccaaatggggtggggcgatgatacatagagtgactcgcctcacactttcatcataattaaaaaatcgtagcagcggcaagcaagtgacggtgctactcccacctatgat

SEQ ID NO: 67049 - DNA, 415 bp, Glycine max
ggcacaagtgagtttgttgatcgagataactagaaacagtgtgatgaaaatgaaggtccttgttttcttcgttgctacaattttggtagcatggcaatgccatgcgtacgatatgttccctctccgaatgaacactggctatggtgcccgtactccggaggtgaaatgcgcaagttggaggcttgctgtggaagcacacaacatctttggctttgagaccattcctgaagagtgcgttgaagcaacaaaggaatacatccatggcgaacaatatagatcagactccaaaacagttaaccaacaagcttacttttatgccagaaaccttgtagtccatcccaaggacacatttgggttcagtatatattgcaccgtactttttaatatttcatactacaaaaaaacatggtatggg

SEQ ID NO: 67050 - DNA, 252 bp, Glycine max
gtcgggtgcgaaaggacaacagaaggggacctcaaccataacaagcgtaaacggttgattaagaaagcaattgtcattgaaatgctaacaccaacaatgcgttctagcatatcatcattcattctagtacatgtgcctgttacctattgatacatgaacattgaattaagggacgctgacgcacgttacctttcataatcaaactcattgacttgccacgttgatataactactgctggccccattccactg

SEQ ID NO: 67051 - DNA, 122 bp, Glycine max
cgagtatgacgacagaaggggaggtggagatgcaagcaaaccattaaccacaacacatggcgctatggtccttactctgacttggctctcccatcaaacttactttcaagtccttcaaatat

SEQ ID NO: 67052 - DNA, 273 bp, Glycine max
ggcacaagtgagtttgttgatcgagataactagaaacggtgtgatgaaaatgaaggtccttgttttcttcgttgctacaattttggtagcatggcaatgccatgcgtacgatatgttccctctccgaatgaacactggctatggtgcccgtactccggaggtgaaatgcgcacgttggaggcttgctgtggaagcacacaacatctttggctttgagaccattcctgaagagtgcgttgaagcaacaaaggaatacatccatggcgaacaata

SEQ ID NO: 67053 - DNA, 412 bp, Glycine max
gagcagaagaacaagtagttgagaactaagaaggagaagcaaatggcttcctcaatgatctcttccccagctgttaccactgtcaaccgtgccggtgccggcatggttgctccattcactggcctcaagtccatggctggcttccccaccaggaagaccaacaatgacattacctccattgctagcaacggtggaagagtgcaatgcatgcaggtgtggccaccacttggcaagaagaagtttgagactctttcctacctgccagaccttgatgatgcacaattggcaaaagaagtagaataccttcttaggaagggatggattccttgcttggaattcgagttggaacaccgtttcgtgtaccgtgagcacaacaggtcaccatgatactactattgacgctccttgacca

SEQ ID NO: 67054 - DNA, 391 bp, Glycine max
ggttctagtgtgtgattgtttgttgttgtaactcgttcttcttcttttgttgttctgtgtttgtgtttgttttttctctcacctgaaaatgtcttgctgcggtggtaactgtggttgcggaagctcctgcaagtgcggcaactgctgcggaggctgcaagatgtacccagacttgagctacactgattcaaccaccaccgagaccttggtcatgggagtggcacctgttaaggctcaatttgagggtgctgaaatgggtgtgcccgctgagaacgatggctgctaatgtggaccaaactgctcctgcaacccctgcacttgcaagtgaggtgttgggagagcaagcttcaagcagagattgcccttaattaggaataatgataaactatta

SEQ ID NO: 67055 - DNA, 253 bp, Glycine max
ggcacatgtgagtttgttgatcgagataactagaaacagtgtgatgaaaatgaaggtccttgttttcttcgttgctacaattttggtagcatggcaatgccatgcgtacgatatgttccctctccgaatgaacactggctatggtgcccgtactccggaggtgaaatgcgcaagttggaggcttgctgtggaagcacacaacatcttttgctctgagaccattcctgaagagtgcgttgaatcaacaaatgaa

SEQ ID NO: 67056 - DNA, 165 bp, Glycine max
gagacctgaggtcatgcggggctacccgctgagtttaagcatatcaataagcgcgcaataaaaaaaaaaaattataatataaaagcgggcgctctagatgatccaaacttacgtacccgtgcatgcaacgtaatatcttttctatagtgtaacctaaattaaatt

SEQ ID NO: 67057 - DNA, 232 bp, Glycine max
gatctggcagccgaaaaacaagtcgttgagaactaagaagaaggaaatggcttcctcaatgatctcctccccagctgttaccaccgtcaaccgtgcctgtgccggcatgggtgctccattcaccggcctcaaatccatggctggcttccccacgaggaagaccaacaatgacattaccttcattgctagcaacggtggaagattacaatgcatgcaggtgtggccaccaatt

SEQ ID NO: 67058 - DNA, 318 bp, Glycine max
cgcgggtgcgatagacgacaacaagggcacaagtgagtttgtcgatcgagataactagaaacagtgcgatgaaaatgaaggtccttgttttcttcgttgctacaattttggtagcatggcaatgccatgcgtacgatatgttccctctccgaatgaacactggctatggtgcccgtactccggaggtgaaatgcgcaagttggaggcttgctgtggaagcacacaacatctttggctttgagaccattcctgaagagtgcgttgaagcaacaaaggaatacatccatggcgaacaatatagatcagactccaaaacag

SEQ ID NO: 67059 - DNA, 191 bp, Glycine max
gatagaagaagcagaaagagaagcattagcaaaagcaagaagaactagtctaagcagaaatggcctcttcagtgatggcatctgtggccctcaaacctgcccctttcactgttgagaagtcctcagttagaggccttccctccctctcaaggaactcctcttcattcagagttgtggccagtggtggcaag

SEQ ID NO: 67060 - DNA, 158 bp, Glycine max
ggttcccacctcacattggaaaccgacgagcatggcggcctgatgctacttgtacaaatatctctccttgctgctgcttgcaaagccagacgctcgtaccattatcactcgctctccactcgagaagctacgtgccaagcatcaggaccagcaccacc

SEQ ID NO: 67061 - DNA, 74 bp, Glycine max
ttttgtttcggctgctagagacgactagtggcggctgtataatacgactgaaggttctgctgctaaatacacag

SEQ ID NO: 67062 - DNA, 79 bp, Glycine max
cggtttcggattccgggccgacccacgcgtcctcccatcgtccgtactgcgagattactacataagggcgattacttca

SEQ ID NO: 67063 - DNA, 361 bp, Glycine max
gacaagtgagtttgttgatcgagataactagaaacagtgtgatgaaaatgaaggtccttgttttcttcgttgctacaattttggtagcatggtaatgccatgcgtacgatatgttccctctccgaatgaacactggctatggtgcccgtactccggaggtgaaatgcgcaagttggaggcttgctgtggaagcacacaacatctttggctttgagaccattcctgaagagtgcgttgaagcaacaaaggaatacatccatggcgaacaatatagatcagactccaaaacagttaaccaacaagcttacttttatgccagagacctcgaagtccatcccaaggacacatttgtgttcagtat

SEQ ID NO: 67064 - DNA, 205 bp, Glycine max
gggggggtgtacacgggaagaagagaaaaaacccaccgtcaaattgcgtgaatgacgctctcactcgagaccacgacaaaacttttccttttcgttgaaatgaaaaccgcttcatcgatatttcctactatacgcgtcaatgcgtgtgtaaccgacacgtcactaaacgtctcactcaatgcatccggaaaatgctattaatacc

SEQ ID NO: 67065 - DNA, 113 bp, Glycine max
tggttcggctgttataagacggggggagggttcagctgcgggaacaccacctacgggtacggatgaacaaagacaacatatgtgtactgatgacaaaaaacgacagaaaggtt

SEQ ID NO: 67066 - DNA, 192 bp, Glycine max
gacagctattcctcttaagcttgctactgagtttccacactgcataccttaggtcttccgaattcgaagttaatttgcaagatggctaaggaaaaggctcacatcaacattgtggtggttggtcatgtggaccctgaggaggcaaccaccattaacgagctgaagaagcctgttgtggagaaagaaagctca

SEQ ID NO: 67067 - DNA, 229 bp, Glycine max
gggggggttgccacctcacatcccaaaccgacggctatggcaggatcatactacgtttccaccctcttatgcttacttcttgctccagaggcacaccctcctctcatcatgactcgctttccacttcagatgcttcctgcctagcattcacgacctggaccaccactcgtgaattgagctgtcctccgtggctaacccatgccacgcgcttgcaagcactctttttttt

SEQ ID NO: 67068 - DNA, 284 bp, Glycine max
ttccggattcccgggtcgcccactctccgttcggctgctataagtactacatatgtttcataacatctatcagcataaagaggggcgtcataaaaaagataatcgcatggcttccacttcgcttttcattggctatgccatttacttatgccagccataaaagaatactgttgcctatctctgatgctttattcctcaagccactggctttacgttcttcattcttccaaggtaattttcaccatctataataccctatgtaatgtttcatttgatgtctttca

SEQ ID NO: 67069 - DNA, 176 bp, Glycine max
gatctggcagcagaagaacaagtagttgagaactaagaaggagaagcaaatggcttcctcaatgatctcttccccagctgttaccactgtcaaccgtgccggtgccggcatggttgctccattcactggcctcaagcccatggctggcttccccaccaggaagaccaacaatgaca

SEQ ID NO: 67070 - DNA, 114 bp, Glycine max
gaaggtgcaagagtttgttgtgagctataagctagtttatcgtgaggagaatatgaagttgtttgttttctttgttgctgcagtagttttggtagcatggccatgtcatggcgc

SEQ ID NO: 67071 - DNA, 174 bp, Glycine max
tgatgagacaagacaacgggttgtgtttggtcaaccaaccaattttccaaagcgcgtggctctatgatacatagtctgactctcctctcatattaatattactaaaaaattgttattatctgcaacaccagacagtgctactcccacctatgattacgatcaacacctacacta

SEQ ID NO: 67072 - DNA, 363 bp, Glycine max
ggcacaagtgagtttgttgatcgagataactagaaacagtgtgatgaaaatgaaggtccttgttttcttcgttgctacaattttggtagcatggcaatgccatgcgtacgatatgttccctctccgaatgaacactggctatggtgcccgtactccggaggtgaaatgcgcaagttggaggcttgctgtggaagcacacaacatctttggctttgagaccattcctgaagagtgcgttgaagcaacatatgaatacatccatggcgaacaatatagatcagactccaaaacagttaaccaacaagcttacttttatgccagagacctcgaagtccatcccatggacacatttgtgttcagtat

SEQ ID NO: 67073 - DNA, 119 bp, Glycine max
tgcaggtgattctagacatcttgagggtgcgggtgatcaagaacataaggggtccacatctaccgtaactggagaacacgctgggattggatcgagtgagaactaagacggtgaagaaa

SEQ ID NO: 67074 - DNA, 233 bp, Glycine max
ttaggggacttttttttcaagctagcaaaccaacaactagggggggttgtaagaaactacagaaatcaatttgctttcacttctgcatcttcaatggcttttccaataccttattctagccattaaaggttcgtgcctaactttaatgcatttttcaagccactgccactaccggcttgcaaggcattcacaactattaaaactcattgtaatgtttcaagttactgccttca

SEQ ID NO: 67075 - DNA, 250 bp, Glycine max
ttggaatttcgggggcgacgccactctttcgtacttcttcttaaaaaaccacagtattgttcctcttctctcactagtctttttatgggtgggttttttttactactagaagggtctcttctcttcttatatttattttatcccacaccctttattgtatcctatagagaatctaaatattaccaccttttttactttcaatctctacttttaatgttcttttcattattaaaaacacacatcgaatttt

SEQ ID NO: 67076 - DNA, 134 bp, Glycine max
taggttaagaagaagaaggagcatggccatgagcagggccatgacagcagcagcagcagtgacagtgattaaactgctgcatcacctatatatttaaaaggttgatgggaccatagtagcgagggctgtgcctt

SEQ ID NO: 67077 - DNA, 108 bp, Glycine max
gaaggtgcaggagtttgttgagagctataatctactttatcgtgaggagaatatgaagctgtttgttttctttgttgctgcagtagttttggttgcatggtcatgcca

SEQ ID NO: 67078 - DNA, 376 bp, Glycine max
gagcagaagaacaagtagttgagaactaagaaggagaagcaaatggcttcctcaatgatctcttccccagctgttaccactgtcaaccgtgccggtgccggcatggttgctccattcactggcctcaagtccatggctggctttcccaccaggaagaccaacaatgacattacctccattgctagcaacggtggaagagtgcaatgcatgcaggtgtggccaccacttggcaagaagaagtttgagactctttcctacctgccagaccttgatgatgcacaattggcaaaggaagtagaataccttcttaggaagggatggattccttgcttggaattcgagttggagcacgggttcgtgtaccgtgagcacaaca

SEQ ID NO: 67079 - DNA, 325 bp, Glycine max
ggttctagtgtgtgattgggtgttgttgtaactcgttcttcttcttttgttgttctgtgtttgtgtttgttttttctctcacctgaaaatgtcttgctgcggtggtaactgtggttgcggaagctcctgcaagtgcggcaacggctgcggaggctgcaagatgtacccagacttgagctacactgagtcaaccaccaccgaaaccttggtcatgggagtggcacctgttaaggctcaatttgagggtgctgaaattgggtgtcccgcttaagacgattgcttgaaatgtggaccaatctgttcctgcaacccctgcacttgcaag

SEQ ID NO: 67080 - DNA, 281 bp, Glycine max
tgttagattgagtgatacgcgtcacattgtgaggtaatataaaaatggcaggggcggctgccgtgaccgtgctactcccacctaggattccgaccaccaccaacggtacccgctgctctgctttgccttctataactactagcgcttacaacaaaaaatccattttgtcactacccttactacaacactagatgacgctcttaaccacttatgctgtgtaaaacagaactgctcaaaaggaatcgtcctcagtagatgccaatgatgcgttcacagatttg

SEQ ID NO: 67081 - DNA, 107 bp, Glycine max
ttacgtctttttaatttaacggagggcacacggaaacagtctctttgtattcaaccctacttttccttttccgtcatatcgattgaataattatgatccaatatatg

SEQ ID NO: 67082 - DNA, 313 bp, Glycine max
ggcacaagtgagtttgttgatcgagataactagaggcagggtgatgaaaatgaaggtccttgttttcttcgttgctacaattttggtagcatggcaatgccatgcgtacgatatgttccctctccgaatgaacactggctatggtgcccgtactccggaggtgaaatgcgcaagttggaggcttgctgtggaagcacacaacatctttggctttgagaccattcctgaagagtgcgttgtagcaacaaaggaatacatccatggcgaacaatttagatcggactccaaaacaattaaccaacaagcttacttt

SEQ ID NO: 67083 - DNA, 57 bp, Glycine max
gagacgctcaggtcatgcggggctacccgctgagtttaagcatatcaataagcgcat

SEQ ID NO: 67084 - DNA, 146 bp, Glycine max
  unsure (1)..(146): unsure at all n locations
gcccctccgcccgatgtcnatcaagggaaatcccttggctctcgttggagtagnaagcagatgaaagatagggattggaatcgttttctgtctgaagttaaaggggtaaggatatagtttgagcttattgctgcccggtagggaaa

SEQ ID NO: 67085 - DNA, 127 bp, Glycine max
cacttttgctagacgacaacacgcggcaactaatggggagaggttgcttattaacatacttctctccactctctactacataacaaacagagccttcttcttcaactctttccattttatagaatca

SEQ ID NO: 67086 - DNA, 401 bp, Glycine max
  unsure (1)..(401): unsure at all n locations
gcacaagtgagtgtggtgatcgagataactagaaacagtgtgatgaaaatgaaggtccttgttttcttcgttgctacaattttggtagcatggcaatgccatgcgtacgatatgttccctctccgaatgaacactggctatggtgcccgtactccggaggtgaaatgcgcaagttggaggcttgctgtggaagcacacaacatctttggctttgagaccattcctgaagagtgcgttgaagcaacaaaggaatacatccatggcgaacaatatagatcagactccaaaacagttaaccaacaagcttacttttatgccagagacctcggagtccattccaaggacacatttgtgttcagtatagatggcaccgnactctctaatatttcatactacaaaaa

SEQ ID NO: 67087 - DNA, 291 bp, Glycine max
ggtacaagtgagtttgttgatcgagataactagaaacagtgtgatgaaaatgaaggtccttgttttcttcgttgctacaattttggtagcatggcaatgccatgcgtacgatatgttccctctccgaatgaacactggctatggtgcccgtactccggaggtgaaatgcgcaagttggaggcttgctgtggaagcacacaacatctttggctttgagaccattcctgaagagtgcgttgaagcaacaaaggaatacatccatggcgaacaatatagatcagactccaaaca

SEQ ID NO: 67088 - DNA, 223 bp, Glycine max
gattatatttgagttcaaacaaatcaaagccgggggcaccttcaacttctctattgttctctccgtctccctagccttctttttggtgctacttaccaaggcacactcgaccgatacctgttctttcaccttcaacaagtttaacccagtccaaccaaactttatgctccaaaaagatgctagtatttcattctctggggttttacaacttaccaaagttgtc

SEQ ID NO: 67089 - DNA, 350 bp, Glycine max
ggttctagtgtgtgattgtttgttggtgtaactcgttcttcttcttttgttgttctgtgtttgtgtttgttttttctctcacctgaaaatgtcttgctgcggtggtaactgtggttgcggaagctcctgcaagtgcggcaacggctgcggaggctgcaagatgtacccagacttgagctacactgagtcaaccaccaccgagaccttggtcatgggagtggcacctgttaaggctcaatttgagggtgctgaaatgggtgtgcccgctgagaacgatggctgcaaatgtggaccaaactgctcctgcaacccctgcacttgcaagtgaggtgttgggagagcaagcttca

SEQ ID NO: 67090 - DNA, 320 bp, Glycine max
aggggcacaagtgagtttgttgatcgagataactagaaacagtgtgatgaaaatgaaggtccttgttttcttcgttgctacaattttggtagcatggcaatgccatgcgtacgatatgttccctctccgaatgaacactggctatggtgcccgtactccggaggtgaaatgcgcaagttggaggcttgctgtggaagcacacaacatctttggctttgagaccattcctgaagagtgcgttgaagcaacaaaggaatacatctatggcgaacaatatagatcagactccaaaacagttaaccaacaagcttacttttatg

SEQ ID NO: 67091 - DNA, 351 bp, Glycine max
  unsure (1)..(351): unsure at all n locations
ggcagcagaaaaacaagtagttgagaactaagaagaaggaaatggcttcctcaatgatctcctccccagctgttaccaccgtcaaccgtgccggtgccggcatggttgctccattcaccggcctcaaatccatggctggcttccccacgaggaagaccaacaatgacattacctccattgctagcaacggtggaagagtacaatgcatgcaggtgtggccaccagttggcaagaagaagtttgagactctttcctacctgccaaaccttgatgatgcacaattggcaaagggaagtagaataccttcttaggaagggatggattccttgctgggaantcgagttggagcac

SEQ ID NO: 67092 - DNA, 94 bp, Glycine max
agttcatcctctgttgcttatcagccacctcggggaggttttggaaacaaaaaaggattctctcttcttttcttcattaagtccaattctatta

SEQ ID NO: 67093 - DNA, 402 bp, Glycine max
ggcacaagtgagtttgttgatcgagataactagaaacagtgtgatgaaaatgaaggtccttgttttcttcgttgctacaattttggtagcatggcaatgccatgcgtacgatatgtcccctctccgaatgaacactggctatggtgcccgtactccggaggtgaaatgcgcaagttggaggcttgctgtggaagcacacaacatctttggctttgagaccattcctgaagagtgcgttgaagcaacaaaggaatacatccatggcgaacaatatagatcagactccaaaacagttaaccaacaagcttacttttatgccagagacctcgaagtccatcctaaggacacatttgtgttcagtatagatggcaccgtactctctaatattccatactacaaaaa

SEQ ID NO: 67094 - DNA, 155 bp, Glycine max
cctctcttttggttgggaagttgatggggactgattgattgttttctctagtttacggtgtagacattgataatcccgagaaatgtatcttaattattcagagttataaataataattatttatttttagcgccgttctagaagatcatgtttta

SEQ ID NO: 67095 - DNA, 145 bp, Glycine max
tatttttgtgagaagacgacagaaggatacgggggcggctttactacatatggtggcacaatgtattttgttgatcgagataacttgaaacatcttgattaaaatgaacgtacttgtttttttctttgctacaattatggtagca

SEQ ID NO: 67096 - DNA, 202 bp, Glycine max
  unsure (1)..(202): unsure at all n locations
agactacaacctgcgggagagtactttcaaaatgcagacagacttaacacttcgctgcccccaacggtgtgccagntgcacccacaaagagtgtctaccatatgaccatctttgccaccaacatcgaagcgctgcgtgcctcacctcgttactctgcgattaaggatgcaacgcgggagaccgacactttaactgttgacta

SEQ ID NO: 67097 - DNA, 113 bp, Glycine max
  unsure (1)..(113): unsure at all n locations
attactattactgatcaatcaaaatatctatcaaaagtaaaaagcgaagagaagggaaaaactttaatttttttatggtaaaaaattcaattatacctgttatttcacangag

SEQ ID NO: 67098 - DNA, 119 bp, Glycine max
gcggacggtacagaggagccaagacgacggacgcgtgcaggcgacataagaccacagaaagagagggacgtaaaaacacgacacagggcgacggttgacaacagacggacgggggaaac

SEQ ID NO: 67099 - DNA, 203 bp, Glycine max
ggttcttgtgtgagagagctcgttgttggaactcgcccttgttcttttggcggtctgcggtagggtttgttcattctctgacctgaaaatcgtttgttgcttgcggaactgaggacgcagaagctccttgccgtgcttgatcggctcgggaggctagagcatgtacccagacttgagctacactgagtcaaccaccaccgaga

SEQ ID NO: 67100 - DNA, 400 bp, Glycine max
gagtgcacaagtgagtttgttgatcgagatggctggaaacagtgtgatgaaaatgaaggtccttgttttcttcgttgctacaattttggtagcatggcaatgccatgcgtacgatatgttccctctccgaatgaacactggctatggtgcccgtactccggaggtgaaatgcgcaagttggaggcttgctgtggaagcacacaacatctttggctttgagaccattcctgaagagtgcgttgaagcaacaaaggaatacatccatggcgaacaatatagatcagactccaaaacagttaaccaacaagcttacttttatgccagagacctcgaagtccatcccaaggacacatttgtgttcagtatagatggcaccgtactctctaatattccatactac

SEQ ID NO: 67101 - DNA, 148 bp, Glycine max
tgcggctgactggagacgtcataagggggaatacgcatcatactcatcaccgatgattgaagaagatgccgagcggccgctttagaagatccaagcttacataggctgcttacgacgacatatcgtatgtatagtgggatctaaatat

SEQ ID NO: 67102 - DNA, 168 bp, Glycine max
gaccaagtgaaccaatatagcccaagccctatacaaccaaaccctaacacacacccatttgattcagtttccatggctagcctcaaggttgcatttttggctgcagtgctctgcatggttgtggtgagtgcacccatggcacatgcagctattacgtgcgggcaggtg

SEQ ID NO: 67103 - DNA, 133 bp, Glycine max
aggggaaaaccctatcaacacaagcgccgagcgtgagccattgactaagatggtgcaacgtcttacctaccggaagaggcacagatatgccaccaaattcaaccaacacaagtgtcgaaaaacccctggtggg

SEQ ID NO: 67104 - DNA, 54 bp, Glycine max
  unsure (1)..(54): unsure at all n locations
tgatcaatttataagattgaatcgtcgccnaaaaaaaatttaaaanttttaaaa

SEQ ID NO: 67105 - DNA, 244 bp, Glycine max
caaaagcccggggggagggggattagtacaggcgtagaacaaaaggaccattggtaagtgccataatacctgaagagtaacaacttattggacggaagcgttcccaacctataaacagtttaagcccctggacattttctctttcaaccttaaatacaggttagagcccgtggtcaaatcatttttttgttttttttcaggttgggcctgacctaaagcgatcttttttaatttcaaaaggccg

SEQ ID NO: 67106 - DNA, 337 bp, Glycine max
ggttctagtgtgtgattgtttgttgttgtagcgtcggcttcttcttttgttgttctgtgtttgtgtttgttttctctctcacctgaaaatgtcttgctgcggtggtaactgtggttgcggaagctcctgcaagtgcggcaacggctgcggaggctgcaagatgtacccagatttgagctacactgagtcaaccaccaccgagaccttggtcatgggagtggcacctgttaaagctcaatttgagggtgctgaaatgggtgtgcccgctgagaacgatggcttcaaatgtggaccaaactgctcctgcaacccctgcacttgcaagtgaggtgtttgg

SEQ ID NO: 67107 - DNA, 151 bp, Glycine max
  unsure (1)..(151): unsure at all n locations
cgggcatttttatagaattgtaaaaaggaaaggggaaggaagcaaagcaaggaangagagtgcatctctaccatagcagcaccagacatttataaaagctctttcccttccctgggatagctcatactctttcaaaaaacccttttttttt

SEQ ID NO: 67108 - DNA, 124 bp, Glycine max
cgtagtaagcgacgaaatgcttcggggagtggaagggttgcgtatatccggggattcccgatatacgtcaacctttcgaactgctgctgaatccacgggccggcctaataaaaaaaatatatac

SEQ ID NO: 67109 - DNA, 406 bp, Glycine max
  unsure (1)..(406): unsure at all n locations
ggcacaagtgagtttgttgatcgagataactagaaacagtgtgatgaaaatgaaggtccttgttttcttcgttgctacaattttggtagcatggcaatgccatgcgtacgatatgttccctctccgaatgaacactggctatggtgcccgtactccggaggtgaaatgcgcaagttggaggcttgctgtggaagcacacaacatctttggctttgagaccattcctgaagagtgcgttgaagcaacaaaggaatacatccatggcgaacaatatagatcagactccaaaacagttaaccaacaagcttacttttatgccagagacctcgaagtccatcccaaggacacatttgtgttcagtatagatggcaccgtactctctaatattncatactacaaaaaacat

SEQ ID NO: 67110 - DNA, 191 bp, Glycine max
acgggaagtgtgtcttttcaacctattacaccctctattattatattccgccctgagatatctcccactattttttattgtcatcacctccccctaatttaccttttttatttaaacaacttctttaaaagaatcattaaattctatcaaactctaaaatttttcttctaaaaaatcaatatctattctac

SEQ ID NO: 67111 - DNA, 248 bp, Glycine max
tacttctattaactctcctcaccaaaataaatacaatttctctatgaagcacaacaccactactccatcaattgacacattttctcaaacaccaaacaaatgtttacccaagattcctaccctttttaaacctaccattttgaaccattacccccccatcagtaaagaatcccaattgtataacctatctaccatcaacaattcttttatctacatgcctccgtcaccatctgaataaaaaagtgacc

SEQ ID NO: 67112 - DNA, 194 bp, Glycine max
aatggctcccattggtaaaatctactcttactctaacaaccccagaatttctaaggggctggttgctttcctctacaacagcctcctaatatacgtccccactgacttcaccattgtatctttcaagaacccccaatacctcaagaaatttcccacccgtaaagtcccccctttctaaggtgctgtttgttttt

SEQ ID NO: 67113 - DNA, 212 bp, Glycine max
gggcagcagaagaacaagtagttgagaactaagaaggagaagcaaatggcttcctcaatgatctcttccccagctgttaccactgtcaaccgtgccggtgccggcatggttgctccattcactggcctcaagtccatggctggcttccccaccaggaagaccaacaatgacattacctccattgctagcaacggtggaagagtgcaatgcat

SEQ ID NO: 67114 - DNA, 289 bp, Glycine max
gaaggtgcaagagtttgttgtgagctataagctagtttatcgtgaggagaatatgaagttgtttgttttctttgttgctgcagtagttttggtagcatggccatgccatggcgcaggctaccaaaggttccctctccgaatgaaaactggctatggtgagcgttcttcggaggtaaaatgcgcaagttttaggcttgctgtggaagcacacaacatccgagcctttaaaaccattcctgaagagtgcgttgaaccaacaaaggactacattattggcgaacaatttaca

SEQ ID NO: 67115 - DNA, 103 bp, Glycine max
taatactacagaaggatacattttctataagactacataagggttctgcttctgcaagactatcataatgtacggctcctataataccacataatgttactgt

SEQ ID NO: 67116 - DNA, 108 bp, Glycine max
cccaacaacatacaaatctataatactactcatttcgacactacaacccaccgtttgaactctctttaaaacatcaactcttaaaccctcctcccctaacaccaaaac

SEQ ID NO: 67117 - DNA, 213 bp, Glycine max
ggctcaagtgagtttgttgatcgagataactagagcagtgtgatgaaaatgaaggtccttgttttcttcgttgctacaattttggtagcatggctatgccatgcgtacgatatgttccctcttcgaatgaacactggctatggtgcccttactcctgaggtgaaatgcgcaagttgtaggcttgctgtggaagcacacaacatctttggcttt

SEQ ID NO: 67118 - DNA, 434 bp, Glycine max
ccgcccacccgtccggcttgtaaaaaaacaacatatggtagggaaaaattgaaccaaaaattggggagtttctttttaaaaaagccaaccgtttataatttttacttaataaatctaatttttttaaaaagtccgatccttttaatcttccagaaaatcctggtaccgctgaaaaaaaaaaaataaattgcttttaatccgttattcccaacaatcgattttttgggaaaacatattcaagggatctatacttgttcaaagccttaaaccagttacttggaaatttttttaaaaaaagggtgcattcccccctttttttggataaatattaaaaccctttattctttttttttgatagtttcaaaataattaatttatttttttttttaaaaattggatttcaaaaaaggtaaaattttgaattttttattatt

SEQ ID NO: 67119 - DNA, 405 bp, Glycine max
ggtgcacaagggagtttgttgatctacataactaggaacagggtgatgaaaatgaaggtccttgttatcttcgttgctgcaattttggtagcatggcaatgccatgcgtacgatatgttccctctccgaatgaacactggctatggtgcccgtactccggaggtgaaatgcgcaagttggaggcttgctgtggaagcacacaacatctttggctttgagaccattcctgaagagtgcgttgaagcaacaaaggaatacatccatggcgaacaatatagatcagactccaaaacagttaaccaacaaggcttacttttatgccagagaccttgaagtccattccaaggacacatttgtgttcagtatagatggcaccgtactctctaatattccatactacaaaaa

SEQ ID NO: 67120 - DNA, 210 bp, Glycine max
  unsure (1)..(210): unsure at all n locations
cgggncgacccacgcgtacgaccacgcgtactttcctataaaactacatatttttttaattgatagctccttcaattaggctgttggtcttctatatctactatgtccaattcaacgttatctttcttttagaggagtaacaagacccacaccctttttgtgagttttagtcgctctatctttcacctccataagaattattgcttttct

SEQ ID NO: 67121 - DNA, 144 bp, Glycine max
ggcacatatcagtttgctgatcaacataactacaaacggggtgatttaaaaaaaggatcaatgtttcttctttgctacaattctggtagcaaaccaattccactcataccacttgttccaatttcccaatgaacactctatatt

SEQ ID NO: 67122 - DNA, 267 bp, Glycine max
aaaaaaaaaaaaaaaaaaaaaaaaaaaaaaaaaaaaagaaaaaaaaaaaaaaaaaaaaaaaaaaaaaaaaaaaaaaaaaaaaaaaaaaaaaaaaaaaaaaaaaaaaaaaaaaagaaagaaaaaaaaaaaaaaaaaaaaaaaaaaaaaaaaaaaaaaaaaaaaaaaaaaaaaaaaaaaagaaaagaaaaaaaaaagaaaaaaaaaaaaaagaaaaaaaaaaaaaaaaaaaaggaaaaaaaaggaaaaaaaaaaaaaaaaaaaaaaaaa

SEQ ID NO: 67123 - DNA, 175 bp, Glycine max
tgttacacacatcttttcctcttaagcttgctgctgtcttttcacactgcataccttaggtctttttatattataattaattttcaatatatttattgaaatagttcataacaacatatttgtggtttttcactttcaccctaattatattaccaccattaactatcttattaat

SEQ ID NO: 67124 - DNA, 197 bp, Glycine max
ccacgcgttctaacagctgctagaagtctactatatggtactgctacaatattacgacgcagggtttctgttgaaagatgacaacatattgtgaatcacataccttatttaacactcatatccatatcctctttccttcaaaggaaaccatttctccttctatcttgtattccaactcttctatatttatctcactt

SEQ ID NO: 67125 - DNA, 206 bp, Glycine max
ggcacaagtgagtttgttgatcgagataactagaagcgagtgtgatgaaaatgaagggccttggtttcttcgttgctacaattttggtagcatggcaatgccatgcctaccatatgttcccttttccaatgaacacttgctattgtgcccgtacttcggaggtgaaatgcgcaagttggaagcttgctgtggaagcacacaacatt

SEQ ID NO: 67126 - DNA, 208 bp, Glycine max
tatgtgtctccagcacgaactatatttcataatgtttttcattgctcattatttaatggccaccacaatatctttatcctgtaccatgtctctcacttcttttatgatgaagcaactctttactaccaatatcctaaatactttctctatctcttttattttattataaaattttacaatttttttcttttattttttatctcttata

SEQ ID NO: 67127 - DNA, 93 bp, Glycine max
tgggggcagcataataacaagtgctgcggaactaataaagagaagcaaatgtcttcctcaaagatctcttccccatctgttaccactgtcaac

SEQ ID NO: 67128 - DNA, 340 bp, Glycine max
tatggtgtattctatgtaaagaaacatcctgttttcccagccaactttaatctccttccaacaccatcatcatcatccatggcatctcaaggtcatggtaacaagctcatcgcttccacatcaccaaatagtgacagtttctctcgtctgctgtggctgtgcaatgtcatcattgcccaaagggcagtgcctgtgctcaccaactacacatgaagggtcctttctgtgtctctttgcatcgtggtcctacaactctaccaacaaattgtatgaaacgcttccaaatctcaatcctgctaataagctctgttggtatcttgatttccacatgcttattaat

SEQ ID NO: 67129 - DNA, 271 bp, Glycine max
ggttctagtgtgtgattgtttgttgttgtaactcgggcttcttcttttgttgttctgtgtttgtgtttgttttttctctcacctgaaaatgtcttgctgcggtggtaactgtggttgcggaagctcctgcaagtgcggcaacggctgcggaggctgcaagatgtacccagacttgagctacactgagtcaaccaccaccgagaccttggtcatgggagtggcacctgttaaagctcaatttgagggtgcttaaaatgggtgtgccccgctg

SEQ ID NO: 67130 - DNA, 168 bp, Glycine max
gaaaaagaaaaaaaagattgtagagaaatataactaatattctttagaataatcaaaaagaatattaaattcaaataaattttagatagaaaaaagacttaaaaaggaggatttgaaatgcgagatctaaaaacatatctttccgtggcaccagtagtaagtactcta

SEQ ID NO: 67131 - DNA, 365 bp, Glycine max
ggtgcacaagtgagtttgttgatcgagataactagaaacagtgtgatgaaaatgaagggccttgttttcttcgttgctaccattttggtagcatggcaatgccatgcgtacgatatgttccctctccgaatgaacactggctatggtgcccgtactccggaggtgaaatgcgcaagttggaagcttgctgtggaagcacacaacatctttggctttgagaccattcctgaagagtgcgttgaagcaacaaaggaatacatccatggcgaacaatatagatcagactccaaaacagttaaccaacaagcttacttttatgccagagacctcgaagtccatcccaaggacacatttgtgttcagtat

SEQ ID NO: 67132 - DNA, 413 bp, Glycine max
gtgcacaagtgagtttgttgatcgagataactaggggcagtgtgatgaaaatgaacgtccttgttttcttcgttgctacaattttggtagcatggcaatgccatgcgtacgatatgttccctctccgaatgaacactggctatggtgcccgtactccggaggtgaaatgcgcaagttggaggcttgctgtggaagcacacaacatctttggctttgagaccattcctgaagagtgcgttgaagcaacaaaggaatacatccatggcgaacaatatagatcagactccaaaacagttaaccaacaagcttacttttatgccagagacctcgaagtccatcccaaggacacatttgtgttcagtatagatggcaccgtactctctaatattccatactacaaaaaacatggatat

SEQ ID NO: 67133 - DNA, 189 bp, Glycine max
actctttaaaatactacaaaaagtctatttatttacaaatcaaacaatctaaccgcgggccttatattaattattattaacaacctattttctttcgcatcatcatctgcatctctcttctcatccactcctcattcttaactttcacctactacaactttcacttccataccacacttacttacattt

SEQ ID NO: 67134 - DNA, 202 bp, Glycine max
agtttacagcagcatctgttgacgacgcaaacgggggatactatcttcgaatactttgatcgcattgcaaccatgtctacgagaaaggtcacatagccaaaggaggaaaacgagactcttggcctatctgttagagatggctgcatgtctttggcgtccctagcatatatgcctactttaatgataccttgattaatgtcac

SEQ ID NO: 67135 - DNA, 52 bp, Glycine max
tctgccacgcgttcggccacgcgttcggccacgcgttcgcccacgcgttcgg

SEQ ID NO: 67136 - DNA, 255 bp, Glycine max
cccacgcgtgcggacggctgaaggcgaacgacaggtaggggtctgaaaaggaacaagtagggtacaacttctataaaacaacagatggctacctctatgataagtccaccaactgataccactgtcaacaagactcggaccggcattatttctttaactacttgtctcttgggcatcgctggcttactcacaaggaaaaccgcccgtgacataacatccatggttagcaacccgtgaatactgcaatgtatgtat

SEQ ID NO: 67137 - DNA, 423 bp, Glycine max
ggaggggcaagagtttcgtgggagctataaactagtggatcgtgaggagaatatgaagttgtttgttttctttgttgctgcagtagttttggtaacatggccatgccatggcgcaggctaccaaaggttccctctccgaatgaaaactggctatggtgagcgttcttcggaggtaaaatgcgcaagttttaagcttgctgtggaagcacacaacatccgagcctttaaaaccattcctgaagagtgcgttgaaccaacaaaggactacattaatggcgaacaatttacatcagactctaaaacagttaaccaacaggctttcttttatgctagtgaacgcgaagtccatcacaacgacatatttatattcggcatagataacaccgtaccctctaatatcccatactatgaaaaacatggata

SEQ ID NO: 67138 - DNA, 382 bp, Glycine max
gatctggcagcagaagaacaagtagttgagaactaagaaggagaagcaaatggcttcctcaatgatctcttccccagctgttaccactgtcaaccgtgccggtgccggcatggttgctccattcactggcctcaagtccatggctggcttccccaccaggaagaccaacaatgacattacctccattgctagcaacggtggaagagtgcaatgcatgcaggtgtggccaccagttggcaagaagaagtttgagactctttcctacctgccagaccttgatgatgcacaattggcaaaggaagtggaataccttcttaggaagggatggatttccttgcttggaattcgagttggagcacggcttcgtgtaccgtgagcacaa

SEQ ID NO: 67139 - DNA, 374 bp, Glycine max
gggcagcagaagaacaagtagttgagaactgagaaggagaagcaaatggcttcctcaatgatctcttccccagctgttaccactgtcaaccgtgccggtgccggcatggttgctccattcactggcctcaagtccatggctggcttccccaccagaaagaccaacaatgacattacctccattgctagcaacggtggaagagtgcaatgcatgcaggtgtggccaccagttggcaagaagaagtttgagactctttcctacctgccagaccttgatgatgcacaattggcaaaggaagtagaataccttcttaggaagggatggatttccttgcttggaattcgagttggagcacggtttcgtgtaccgtgagc

SEQ ID NO: 67140 - DNA, 235 bp, Glycine max
  unsure (1)..(235): unsure at all n locations
cccacgcgttcgnctacgcgaacacccacgcatgcgttcggcttccttaatactacaatggggcgcgtaacattatcgcttccttgcataatagctccatccacagactccaaactgaatacacaataccacacaggcattcacataaaaaagtactttgtaaaccgtcatcactaacttagaagcaaggcacactatccttccatactaaccacataaaaatctgacaacatat

SEQ ID NO: 67141 - DNA, 295 bp, Glycine max
ctgctattaaatattatatggtctgataaacaaatatgcacaaattctaaaggggcccccgagaatccaaattccggcaaatagactgatgaagctgaagagaccactgttgacagtgcaggagctgatgggcaaatgtaaggacgggccgcctcaaagaatttgcccgaaacttaagaacgcgtatcaacaaaattgcccgaatgccgcgtatgaagcactctgtccgatagtgaaggtagtgtatcaatggtgttgccggaatgacgcataactctgcaagccacggtgggcg

SEQ ID NO: 67142 - DNA, 104 bp, Glycine max
  unsure (1)..(104): unsure at all n locations
gaattcccggggtcggacccacgcccgtccgtaccggctnnggcgagaagaacganncagaaggggacactcaacctaccaaaacaannnacccactaagaatg

SEQ ID NO: 67143 - DNA, 418 bp, Glycine max
  unsure (1)..(418): unsure at all n locations
ggcacaagggagtttggtgatcgagatgacgagaaacaaggggatgaaaatgaacgtccttgttttcttcgttgctacaattttggtagcatggcaatgccatgcgtacgatatgttccctctccgaatgaacactggctatggtgcccgtactccggaggtgaaatgcgcaagttggaagcttgctgtggaagcacacaacatctttggctttgagaccattcctgaagagtgcgttgaagcaacaaaggaatacatccatggcgaacaatatagatcagactccaaaacagttaaccaacaagctttacttttatgccagagacctcgaagtccatcccaaagacacatttgtgttcagtatagatggcaccgtactctctaatattccatactacanaaaacatggatatggggg

SEQ ID NO: 67144 - DNA, 183 bp, Glycine max
tttctccgcgtcgcagaaaaagaaaaaagcggtcagagttttactttggccttatccactttagcctttccgttctctaccctatctttcacgtatctaatccttaatttaaccaacatttctttcccttctcgttcaacttaccctttattcttatttcgtctagttttaattcttaatttt

SEQ ID NO: 67145 - DNA, 351 bp, Glycine max
gcaaggacgagaaactatccgcgagagtcggccgcgagaaaagcacagatgggtagcaaagccctgagcgcagtgggtgggtttactctcactctcagtcccatcaatgtgaaactcctacttatgccttccaatcgcctctttaaccgcacttcctgtaaattttacattttcttctgcctacgcttcaacgacgagcaacaacccctaagcctggacatacccgcactaaagtcatctttcgcgatgctcattgatgggaatcacatcatggtcagaggtgtgtacaagactctggtccgctaaatggcccaggattcttaactcgacctggtgatcgtattcccagat

SEQ ID NO: 67146 - DNA, 258 bp, Glycine max
tattactattactcatcaatctaaatatctaggcgaagttattaacgaacagaagggaccaacttttatttttttattctaaaaaattcaattatacctgctctttcacaagagaaaaaaccttaacccccatcatctgtttaatttcaaatatccaaatttaccgataagaatacgaagacttacttcacatttttaatcacaccgtataaactttttatatcaaagaagtttactgacaatttttcgaaaacgact

SEQ ID NO: 67147 - DNA, 371 bp, Glycine max
cccacgcgttcggccacgccttcgtaccggttggaaaaaccacctaaggggacccccttttggtttgggtggggctgggttaattaaacccgtggttggttctaaaaccctcttctttaaaggcggccccaaacctttgcatttcaaatccccgttggttttgcaaaaacccttggccaataactcgacttcgcaaataaagttctcctttcgtcgatcgcgtggaaatgtgatcaaagattctgatccaagcgttcatccgcgtttattgtcctctggtgttgtgggtgctttacattctcatgaaatatggcttaccatatccaaagacctcctctaaaaaaaacccgttaagaaaaatgaaaagaaac

SEQ ID NO: 67148 - DNA, 382 bp, Glycine max
ttatctcccatgcttttttcagaagacttccagctggtattcaaaagaacttatctcatattaaaaaatcgacctcttactccatttttaggaacataacaagataacaatacccttacaaagggcttatcacataaaatcgaatccatcattgcctttagatattcataaggcaaatacatcatttctcgccaatgctatgcataatccgaatatacgcacctaaaaaaaattatctttctttactatcttataaacttaaaggtgcttcaaacccccttccctatcttaaatttaaactttaaacggtaccaaaaaattccttttaacttaagtacatctatcccaaaacacacacctacctcaatattattcttttttt

SEQ ID NO: 67149 - DNA, 403 bp, Glycine max
tgttgttagctataagctattttatcgtgaggagaatatgaagttgccgcgggtctttgttgctgcagtagttttggtagcatggccatgccatggcgcaagctaccaaaggttccctctccgaatgaaaactggctatggtgagcgttcttcggaggtaaaatgcgcaagttttaagcttgctgtggaagcacacaacatccgagcctttaaaaccattcctgaagagtgcgttgaaccaacaaaggactacattaatggcgaacaatttagatcagactctaaaacagttaaccaacaagctttcttttatgctagtgaacgcgaagtccatcacaacgacatatttatattcggcatagataacaccgcactctctaatatcccatactttgaaaaacat

SEQ ID NO: 67150 - DNA, 243 bp, Glycine max
ttggtactgggtgaggatgacaacagaagggtgcggctgctataatacgacagataggtactgttgccataagacgacagattgtgattttttttgaattgaaacctaggagagactgctgctacattcatcatcatcaccttatggacggacgcgatccacaagatctaaatcagatccctgcttacatgactgcctttgtgcaaaatctttttcagcagatgcaaaatatgttccaaacaa

SEQ ID NO: 67151 - DNA, 422 bp, Glycine max
ggttctagtgtgtgattgtttgttgttgtaactcggtcttcttcttttgttgttctgtgtttgtgtttgttttttctctcacctgaaaatgtcttgctgcggtggtaaccgtggttgcggaagctcctgcaagtgcggcaacggctgcggaggctgcaagatgtacccagacttgagctacactgagtcaaccaccaccgagaccttggtcatgggagtggcacctgttaaggctcaatttgagggtgctgaaatgggtgtgcccgctgagaacgatggctgcaaatgtggaccaaactgctcctgcaacccctgcacttgcaagtgaggtgttgggagagcaagcttcaagcagagatagcccttaattaggaataatgataaactattaatgtgtagctaaaaacttatgtattatgtct

SEQ ID NO: 67152 - DNA, 53 bp, Glycine max
actcatcattgtctcaaaaaccttctctctcaacaaaacctacaacacctgat

SEQ ID NO: 67153 - DNA, 87 bp, Glycine max
aagcgtggacaattcactcttgtagttggaggtgggttggtcattgcatttgttgttcctatggcacagtactatgcctatgtgtcc

SEQ ID NO: 67154 - DNA, 416 bp, Glycine max
ggcacaagtgagtttgttgatcgagataactagaaacagtgtgatgaaaatgaaggtccttgttttcttcgttgctacaattttggtagcatggcaatgccatgcgtacgatatgttccctctccgaatgaacactggctatggtgcccgtactccggaggtgaaatgcgcaagttggaggcttgctgtggaagcacacaacatctttggctttgagaccattcctgaagagtgcgttgaagcaacaaaggaatacatccatggcgaacaatatagatcagactccaaaacagttaaccaacaagcttacttttatgccagagacctcgaagtccatcccaaggacacatttgtgttcagtataaatggcaccgtactctctaatattccatactacaaaaaacatggatatgggg

SEQ ID NO: 67155 - DNA, 423 bp, Glycine max
ggcacaagtgagtttgttgatcgagataactaggagcagggggatgaaaatgaagggccttgttttcttccttgctacaattttcgtagcatggcaatgccatgcgtacgatatgttccctctccgaatgaacactggctatggtgcccgtactccggaggtgaaatgcgcaacttggaggcttgctgtggaagcacacaacatctttggctttgagaccattcctgaagagtgcgttgaagcaacaaaggaatacattcatggcgaacaatatacatcagactccaaaacagttaaccaacaagcttacttttatgccagagacctcgaagtccatcccaaggacacatttgtgttcagtataaatggcaccgtactctctaatattccatactacaaaaaacatggatattgggtggagaa

SEQ ID NO: 67156 - DNA, 254 bp, Glycine max
caccgaggaagagataaattgccgcttcgttctaaaccattacgccttttttatactcattttttcaataaactttgcttgaaatcaacgttcagcagtataattaatttctttacagagaatgcattacttttatatcacttttcctggtttttactcaaaacccttcaattactttttatcatcaatcaaatgttaatgtcttatgtgttttttagtcctctttaaaaatataaataaatacatatttatat

SEQ ID NO: 67157 - DNA, 423 bp, Glycine max
ggttctagtgtgtgattgtttgttgttgtaactcgttcttcttcttttgttgttctgtgtttgtgtttgttttttctctcacctgaaaatgtcttgctgcggtggtaactgtggttgcggaagctcctgcaagtgcggcaacggctgcggaggctgcaagatgtacccagacttgagctacactgagtcaaccaccaccgagaccttggtcatgggagtggcacctgttaaggctcaatttgagggtgctgaaatgggtgtgcccgctgagaacgatggctgcaaatgtggaccaaactgctcctgcaacccctgcacttgcaagtgaagtgttgggagggcaagcttcaagcagagatagcccttaattaggaataatgataaactattaatgtgtagctaacaacttatgtattatgtctg

SEQ ID NO: 67158 - DNA, 202 bp, Glycine max
  unsure (1)..(202): unsure at all n locations
gaanacccgggccgacccacgcgtacggacgggagaaaaagacaacagggggattccacatcaaccactcttgactatgccctggtcagggaaattcttacacacacgcattcaatttaaaatcatcttatacccaaaaagttgcattcttgattgcacctctcttgatcagttgctctaattcacccatcccacattcact

SEQ ID NO: 67159 - DNA, 53 bp, Glycine max
ataaaacgacgacaacagagggatactgttgcaataagacgacataaggctgg

SEQ ID NO: 67160 - DNA, 80 bp, Glycine max
tactgttgcttcaagacaacagaagggttcggctcgcagaggacgactgaagggtacggctgctacaaaacaacagaacg

SEQ ID NO: 67161 - DNA, 330 bp, Glycine max
aacatgtgcgggaacacaacagaaggggataacgggggagggtaaacagagagatatctatctattaattaattcacaatggaccactagctaaccgaccaacacatctataagttcaacgtagcctttcgtctcttccacaaggaccttcacggtcatattaacaccaaaggactttatactgttatgtagccacttgggcagaacccaactgatgcatgatctggacgacatgatacaagaagatgatgctgattgtaatgtgtactattgattttccatgatgcactcaatctcatggaacgcaagatcaaagacactgattcatag

SEQ ID NO: 67162 - DNA, 377 bp, Glycine max
gacagttttaacaattaataaagatgagtttgaagaacgaacatggtggtgctaaaggtgtgtttgttgcttcttttccttgtgggggttacagctgcacgcatggaactgagcttcttcaaaagtgatcagtcatcaagttatgatgatgatgagtattcaaaaccatgctgtgatctctgcatgtgcacacgctcaatgcctcctcaatgcagctgtgaagatattaggctgaattcatgccactcagattgtaagagctgtatgtgcacacgctcacagccaggacagtgtcgttgtcttgacaccaacgacttctgctacaaaccttgcaagtgcagagatgactagaaaaactaatagctctctcaaatgga

SEQ ID NO: 67163 - DNA, 303 bp, Glycine max
tttttcacctactcgcagaaaaagaaaaaagcggtgcggtgttacacttcaacctgatccagtttaggcattaggctctctaccctatatttcacgtatcgaaaccttaaatttactatcatgtttgagcactctgctttgtaaaacctttggtcttacaaagtcaatgttttatttctgaattatacgatcaaactgctactgccttttatccttttgctgatgcaaatgcttatatactccttgcatggtcaaaagagtatgtgcacattctcatacagaagccaaatgttttgaaaagcc

SEQ ID NO: 67164 - DNA, 242 bp, Glycine max
agaagacaacacaacggaacttgttttttcaataaaaaaacactcttcattcgtcgggtttatactatcggctttctctcaattcttaaaatatccactagcaaaaactgtttgtacatacacaccactaattctacatgaaaatggaattatctgttactgatgccatgatcatcaccttatcaaaaacttacatctttctcctagactcttattggccaaccttcctatctaaacttgct

SEQ ID NO: 67165 - DNA, 285 bp, Glycine max
gggctcggatgttataaaccaacagatgggaactgatgaggggaaacaactggctggctcagttgtctcttgaccacataatgccactgttaaccgaacacgacccaacgttgctgctgcattaactcgactgaagggcattggtgacttgtgcaccatgcagaccaactatgaactgtactgatattagtaccatcacaatgatgaaagcattgaatcttaccacaggcacctaaccagaataagatatatgggactcttttttacctgccacaattatatgat

SEQ ID NO: 67166 - DNA, 110 bp, Glycine max
cggtacagctgtacgaagacgacaaaacggtacgggtgtgcgaagacgacaaaacgatacggctgttagaatacgacaaaacggcacgggtgtgagaatacgacaaaacg

SEQ ID NO: 67167 - DNA, 240 bp, Glycine max
aaattctatattatctttaaaaaatcttataccactgtctaccgagccacataccacaatatctattcattcacttacctctaatccattaattgctatccatccatgaataccaacaatgacattacctatattgatatctactcaataataggcctaatcattgcaattgttacctccaaaagattatatgaaatttctaactttttaatatctaggagaccttaatgatatacacta

SEQ ID NO: 67168 - DNA, 53 bp, Glycine max
tactgttgctttaagacgacagaagggtacggctcgcaggggactactgaagg

SEQ ID NO: 67169 - DNA, 63 bp, Glycine max
gagacctcaggtcaggcggggctacccgctgagtttaaaccaaaaaaaaaaaaaaaaataatt

SEQ ID NO: 67170 - DNA, 405 bp, Glycine max
ggcacaagtgagtttgttgatcgagatggctagaaacagtgcgatgaaaatgaaggtccttgttttcttcgttgctacaattttggtagcatggcaatgccatgcgtacgatatgttccctctccgaatgaacactggctatggtgcccgtactccggaggtgaaatgcgcaagttggaggcttgctgtggaagcacacaacatctttggctttgagaccattcctgaagagtgcgttgaagcaacaaaggaatacatccatggcgaacaatatagatcagactccaaaacagttaaccaacaagcttacttttatgccagagacctcgaagtgcatcccaaggacacatttgtgttcagtataaatggcaccgtactctttaatattccatactacaaaaaaca

SEQ ID NO: 67171 - DNA, 96 bp, Glycine max
cgcgtgcgaatacgagcgggcactctagagaaaccaagcttactttcgcctccatgcaacgtcataactggtctgtcttgtaacctaacttcaatt

SEQ ID NO: 67172 - DNA, 179 bp, Glycine max
aagggagagccacgcgtacgctgcagaagatacatataggaagaaaatttcttctcctataaatgaagtacctgtgggcatgtctattcacaagatttctaaaaacatgcccctacatttctaatggtgtactgaataacccttttacacttcctgtttctatataacaacttgatcta

SEQ ID NO: 67173 - DNA, 271 bp, Glycine max
aaatgtttcttttacacaaaacttacacaaccttcgcgtagtgtatttattaaacccccacaagcctgcaaacaaaccaaaaaaaaaataaaaaaaaataaaaactacccgctctctctaaaccatccaaacttacttacgcattcatccaacttcctctctcttttatatatatcacctacattcaattcactgccctcccttaatacaacttaattactaaaaaaactctatctttacccaacctaatttctcttcaattatatctttc

SEQ ID NO: 67174 - DNA, 407 bp, Glycine max
ggcataagtgagtttgttgatcgagataactagaggcagggtgatgaaaatgaaggtccttgttttcttcgttgctacaattttggtagcatggcaatgccatgcgtacgatatgttccctctccgaatgaacactggctatggtgcccgtactccggaggtgaaatgcgcaagttggaggcttgctgtggaagcacacaacatctttggctttgagaccattcctgaagagtgcgttgaagcaacaaaggaatacatccatggcgaacaatatagatcagactccaaaacagttaaccaacaagcttacttttatgccagagacctcgtagtccatcccaaggacacatttgtgttcagtatagatggcaccgtactctctaatattccatacttacaaaaaacat

SEQ ID NO: 67175 - DNA, 456 bp, Glycine max
  unsure (1)..(456): unsure at all n locations
ggagaagacnacagaagggggaggtgcaagagtttgttgtgagctataagctagtttatcgcggcgagaatatgaagttgtttgttttctttgttgctgcagtagttttggtagcatggccatgccgtggcgcaggctaccaaaggttccctctccgaatgaaaactggctatggtgagcgttcttcggaggtaaaatgcgcaagttttaggcttgctgtggaagcacacaacatccgagcctttaaaaccattcctgaagagtgcgttgaaccaacaaaggactacattaatggcgaacaatttagatcagactctaaaacagttaaccaacaagctttcttttatgctagtgaacgcgaagtccatcacaacgacatatttatattcggcatatataacaccgtactctctaatatcccatactatgaaaaacatggatattgggtggaggaat

SEQ ID NO: 67176 - DNA, 416 bp, Glycine max
ggatctggcagcagaagaacaagtagttgagaacggagaaggagaagcaaatggcttcctcaatgatctcttccccagctgttaccactgtcaaccgtgccggtgccggcatggttgctccattcactggcctcaagtccatggctggcttccccaccagaaagaccaacaatgacattacctccattgctagcaacggtggaagagtgcaatgcatgcacgtgtggccaccacttggcaagaagaagtttgagactctttcctacctgccagaccttgatgatgcacaattggcaaaggaagtagaataccttcttacgaagggatggattccttgcttggaattcgacttggagcacgggttcgtgtaccgtgagcacaacatgtcaccaggatactacgatggacgctactgg

SEQ ID NO: 67177 - DNA, 413 bp, Glycine max
ggcacatgtgagtttgttgatcgagataactggaagcggtgtgatgaaaatgaaggtccttgttttcttcgttgctacaattttggtagcatggcaatgtcatgcgtacgatatgttccctctccgaatgaacactggctatggtgcccgtactccggaggtgaaatgcgcaagttggaggcttgctgtggaagcacacaacatctttggctttgagaccattcctgaagagtgcgttgaagcaacaaaggaatacatccatggcgaacgatatagatcagactccaaaacagttaaccaacaagcttacttttatgccagagacctcgaagtccatcccaaagacacatttgtgttcagtatagatggcaccggactctctaatatttcatactacaaaaaaacaatgatat

SEQ ID NO: 67178 - DNA, 224 bp, Glycine max
cattttctcaaacgcctttattaattaataaacaaatggctgctgccgccgcatttactgtgcttctctcacctattattcctaccgtcaccaactttacccccttctcttctttgtcttctctttctcctctcggcaccaacactaaaaccacctttttcttatcttcccttaaccacttctcagagaccctaaaatcatttcttctttagaccataacttct

SEQ ID NO: 67179 - DNA, 320 bp, Glycine max
acgcgtccgaacacgcctgcacgcacccgttcgtacaggtccacggaggcgccagaaggggacgactgaacaagataagactgtccatagctctacaaagaaaagaatagcaccctcgtccacctcactctactttgcgcccttacctctaacctaccttaatccaccggtcgtgatgtgacaaacactgatctggataaactttaaaatggccgcacatactttgcgtggacaacatataatattaaaccagctgtggaatataatatagcaacatttgaaaaataaactttgcctcacactgttgagcaataatggcg

SEQ ID NO: 67180 - DNA, 286 bp, Glycine max
gagagacaacgtgaatggagcggtggatcctacttcatcacaatccattgaaatttctggcctcggataccaaactggggatgatacacaatacaaggacatcaatgaatggtgctcttgttgctatgactgtacacacggtctattctatttcttgaactgcaacttttcgttgaagcctctacacttaatttgagagatactacttattaccataaatatttaaacacctttctacatatgttttttcataagttttataccgatcccctttattaccataaaa

SEQ ID NO: 67181 - DNA, 61 bp, Glycine max
aggagggggattgagaaagagaacgagaaaacgacatggagaaagcaatgctggaggctgg

SEQ ID NO: 67182 - DNA, 102 bp, Glycine max
aggagttcaatttctaattataacaagaaaccgacgtggtgggtgcaatgttagaggctgtaaaaaacaacaaaatatgaacaaactttatgcggcctattt

SEQ ID NO: 67183 - DNA, 193 bp, Glycine max
gacaagtgagtttgttgatcgagataactagaaacagtgggatgaaaatgaaggtccttgttttcttcgttgctacaattttggtagcattgcaatgccatgcgtacgatatgtttcttcttcgaatgaacactggctatggtgcccgtacttcggaggtgaaatgctcaaattggatgcttgttgtgggatc

SEQ ID NO: 67184 - DNA, 285 bp, Glycine max
agtggatttttacatcatacaaagcattcaattggagtgcttaatttcattccttgtgttttcctttctttctcaaaaccaaacatgtctaacacatgctttaactgttactgtgcttacaagactatcttcactaatggaaacagctatcgtgttattgtatagactgatattagttacatttatacttttgtcattgattttccagcagctgatcattattgcaagttcaagtttgtcactaatttcactttctcggactgcacctttattcattaatgaata

SEQ ID NO: 67185 - DNA, 208 bp, Glycine max
cccacgcatgccaacataatataaaattcctcttaatgcaatacacatttgcaacttgcgagtttcaattcaaccctcacaacattcaaacccaaaaaaaaaaaaacctcttcttcctttttttcacttctacccttctatgctttaatcttcttcatctcaacatacacacacaatttttccaatatctaccaacaattccttctaa

SEQ ID NO: 67186 - DNA, 328 bp, Glycine max
gatatctggcagcagaagaacaagtacttgacagcgaagagggagaatcaaatggcttcctcaatgatcccttccccagctgttaccactgtcaaccgtgccggtgccggcatggttgctccattcactggcctcaagtccatggctggcttccccaccaggaagaccaacaatgacattacctccattgctagcaacggtggaagagtgcaatgcatgcaggtgtggccaccacttggcaagaagaagtttgagactctttcctacctgccagaccttgatgatgcacaattggcaaaggaagtagaataccttcttaggaagggat

SEQ ID NO: 67187 - DNA, 57 bp, Glycine max
  unsure (1)..(57): unsure at all n locations
gagacctcaggtcaggcggggctacccgctgagtggaagcatatcaataagcggngg

SEQ ID NO: 67188 - DNA, 246 bp, Glycine max
gtggaaaacttaaataattacatccttatgcaaaataaaaaaacattgtacatttgaaaatcgctcagaatataggatccaacattacttaatcttgcatcctacattatatcacttttataatgtatcctaaattcaataaactgaccaacaaattacaacctcccgacttagaaaacccaagcttacccaaacttaattgccatgcaatacatcttctttactgcaacttaaataaaattaaat

SEQ ID NO: 67189 - DNA, 224 bp, Glycine max
tttatccgtgttcacttcatccttcataagtcttcatcatcatcatcatcatcaccgtttattgaagaatattcccttcataaacatttccatcttaaggcctgaatatgctactcacccctacacgtttaattcgcgctttgcttatttcattttcaccttcatcttcttgttcactctttcatgatccggcatcttctacaacaagcttacctacaactttt

SEQ ID NO: 67190 - DNA, 353 bp, Glycine max
gacggctcaatgattgtatattgacacaagaagaagcacttaaaaacttttctttgggtgaacaccttttaagggactctttaacattgaaagtttggctttgttgctcaatggctgttttagtacaattcatcaagaaaatgaattgaaaaatgatattcatacactggttgggtgcctactgcctaatgtatctcctggccaagaattagagactaatttcttgaggtattgggatccaaccaagggcctgatttctcaacatatgttttttcatacacaaactcgagaatcgaactcctaatcagatgcttaatagacatgattatttattaatcataccacacaccatg

SEQ ID NO: 67191 - DNA, 252 bp, Glycine max
cgcgtccgcaccaataacgcaagaacataaaggccctactcggcgtgtatatatgatttgaataccggagcagcgtgaatgaaaaagaaaaacggcttttcctattattttttttttcctttcctctgttttccttttgtatcgctccatttcttttttttatcttttcatcgatgtatcacccaccttttcccatacatctatttttcttttccattctttcaccacagttgaaattaatttttttatttc

SEQ ID NO: 67192 - DNA, 152 bp, Glycine max
agttcatacatttaccctttctcttaaatacttcttattaaaactttacccttgcttattaacagaaaaatttaaaacaacccatataatcccactaatctatcaaaaaaaaaatctttattcctaatgctttatccatcatacaacccaac

SEQ ID NO: 67193 - DNA, 248 bp, Glycine max
caaccactcgcgatctgttccttctttcaacaactataacatcatccttctccatcctaacacaccacactatgaccacctcacccaccaaatcaaaccatcatttcaccttccaaaacgccaatttaaatcatattaatcttcttgactacaaaggaaacgtccttatcattttcaatgttacctcacaatctcccttaactaaaataaattacacttatctcaatcacttgttttttaaatacaaa

SEQ ID NO: 67194 - DNA, 196 bp, Glycine max
tttttattttttttaatttcaaacaaatcaaggccattttcaactttaacatttatattcttctctccaacatcctaaccttatttttttatgcttcttaccaattcacactttaactataccttttcttttacttttaacaattaaaacccattccaactaaacattattctccataaatattctattatttcat

SEQ ID NO: 67195 - DNA, 275 bp, Glycine max
acatttcaacatacagagcaaccactcgggtcttggttcttttttcaacaactataactacatccttctctctcctaacaaaccacactattaccacctaacactccaaatcaaaccatcatattaccttcaaatattccaattttaaatcatattaatcttcgttactaccaactaaacttccttatcatttacaatgttaacttacaatatcccattaactaaaatcaaaattacacatatacctccaatcaattttttttattataatacaa

SEQ ID NO: 67196 - DNA, 141 bp, Glycine max
tcatgattgtatacattcaatattagagccccgaactttatcaccatgataacctctgacatattgaggccctctatatagatctaacagtctaggactgaactgacgtatttcctgatgtaagcaacaacaagttacttg

SEQ ID NO: 67197 - DNA, 136 bp, Glycine max
ctgcttttacaatacgacaacagaatgctactgctgggagagggcgacataatgctactgctacaagaagacaacagaatgctgctgcttcaagaagactacagaatgcttctgctgcaagaagacaacagaatgc

SEQ ID NO: 67198 - DNA, 405 bp, Glycine max
ggcacaagtgagtttgttgatcgagataactagaaacggggtgagtaaaatgaaggtccttgttttcttccttgctacaattttggtagcatggcaatgccatgcgtacgatatgttccctctccgaatgaacactggctatggtgcccgtactccggaggtgaaatgcgcaagttggaggcttgctgtggaagcacacaacatctttggctttgagaccattcctgaagagtgcgttgaagcaacaaaggaatacatccatggcgaacaatatacatcagactccaaaacagttaaccaacaagcttacttttatgccagagacctcgaagtccatcccaaagacacatttgtgttcagtatagatggcaccgtactctctaatattccatactacaaaaaaca

SEQ ID NO: 67199 - DNA, 87 bp, Glycine max
gatatatataaagtatcacagtgagaatggtcgatacctaaaattcctaatcggaaaaaagaactttaactttggtatgaaaaagcg

SEQ ID NO: 67200 - DNA, 256 bp, Glycine max
acctaccatgttctctgcacgtttgactactcgcctcgccgctcgcaccgcttccaacgctgggaaggctggcgccttctccactggtgctggtgcccccgctgctggtgctcgcaagtctctctttgctggtgctactggtgccgctgttgctgccaccgctggtttcgcttattatcaaaccacccagagccccatccttgctgattccaagggcgttgccggtgtcaagggtactgactccgaaaaggccccc

SEQ ID NO: 67201 - DNA, 159 bp, Glycine max
ttctctaataatatgtttattcattttctaaagcctctacaaattctttattcttctcatctctgtctacattaccttcatcatccctttctccttcctcttataaccttcctatacattattttagttccaaaccccaaaaaaaaacctccccttttc

SEQ ID NO: 67202 - DNA, 263 bp, Glycine max
ggttgaccgacgcgtccgcacacttcccattcacatttactatggccaagactgcttctgcaaaggctactaaggccaggacaaaggtatgaaagacctcaaaggcttccaagaaggccgaacccgtcaagcagaaggttgaggattcctcctcttcttcttcttccgagtctgactccagcagcagcgactccgagtctgaggaagagaccaagaaggttaccaagaaggtcaccaagaaggtcaccaagaaggccgccaag

SEQ ID NO: 67203 - DNA, 325 bp, Glycine max
ggcttcacaaactcacacactttgtactctccggggttccttgttagatccacatctctctacttctcccttaaatggctccccttctacaatgttccatgcccctcctctatctttccaatcaagctctggtaccccttaccagcatctccaacccaacttcagtttccctttcaattaacgtaagaacttttccatactttacattgcatcccaaagggcttccgtttcagcttagatgtgctgcaaaaccagatacagtgaagaatgtatgtgacatattcaagaagcaattgccactgccacatgaataatctgttactgt

SEQ ID NO: 67204 - DNA, 270 bp, Glycine max
accacacattttaaattaatgccccttgttttttttcatcagattttttctctattaatatcatctcttcacaatctcttgtattatcatctactcttaccttattaactaacatctccaagacaaaatcacttaccaaaatcactccaatctcctttcttcttgtccagaaaagcatcctttcttgataatgcatatactaccccccctattaaacaaggatcatacatgcctttatctttttcatcaattcaaattctttcttacttc

SEQ ID NO: 67205 - DNA, 252 bp, Glycine max
  unsure (1)..(252): unsure at all n locations
cgtccgncgagcctgtacaatttgtggttggacaccttcgtgaacagattgttcaagtccttggtgggcctcaagacgctctgtggaagagctactggaaagatgcttcgtccatgatcaagttcttttggaacgatgtagcgacttcaatttctcgtgcgaatgctttggattccacactcttgaatgatgcttacaaagctgaagggcaatcatacgcggacattatctcattcacactgagacaagcta

SEQ ID NO: 67206 - DNA, 341 bp, Glycine max
  unsure (1)..(341): unsure at all n locations
ttttcatttacttgaacaaactttacaacccgacaagggggatttttacctcttcaanctaccaaccttctttttctttcttagtgccatcttgccataagtttaatttgcccaacaaactttactattcacatctgaatcaacaaacaagacacaccctacccagctctgtaaccaaatctccaatactcctctcatatacattctctcaccaggaccctcacaacaaggttacctctcaaaccttctccaataccaacatattaataactctccaacaaatcacaaccaaggacaacacactctatgacaacaatcaacgttacatatgcaggaacatt

SEQ ID NO: 67207 - DNA, 388 bp, Glycine max
tattcatcattttccaaacgggcatttgcgtacttttttaattcaatataacaacttaatttctgcttcaatggctttaagtcatgaagatgtcatcctttttgtgtttattgtaagcccatttcttcactatatgcatattgctctcaactttaatgcatttcaatacaaatatttttaatattattttaacaacaatatttatttgctcctcaagtataacccactttataaaatgattccatctcttccttacaattaaaagtccatatcctattcccttgttatttttgattacatctattacacatgtaaaaacaaccccatcttgccttctcatccttaccatataaccttttctcctttctttcccaatttcatttattac

SEQ ID NO: 67208 - DNA, 133 bp, Glycine max
  unsure (1)..(133): unsure at all n locations
tggctccccctgtccctttcnngaacttccgntnttctggtgctttgngagcccgttttcctctctcaccnntgcgacntgttccagattacatccaaagacccgactacgcggaaactggcattcccgtctc

SEQ ID NO: 67209 - DNA, 369 bp, Glycine max
  unsure (1)..(369): unsure at all n locations
tgggttggnacatttgttcatngaaattttttcaaagtgggtgatagaattccaacggtaaatttcatggcangatttgaaacccaaacgcctttgctgttgttcgaagaaattaatccaactatgatcgaccgtatggacactcggcaaacatttgtacgagctgaaatacaagatggngatattatctgtattcagaaaagcattctaaatgaaaaagcttcaagcaattttttttttctcccaatatttttccaaaccaaattatttaaaaattttttttttttcccggataatcacccccgcgtttttatttccccccccataattatttaaaaaccccccttttttaaattttttttttttatt

SEQ ID NO: 67210 - DNA, 275 bp, Glycine max
ataatatgttattttttctttaataaataaagaaaaaaggggatctgttggtttttaattacacttgcaccatctatttaacaatgtcctgttcatgttcattgcaaaatcaacaaggatcataccctacaacctcttttgtatttcctaaaaacaatcagagaaaaaggataacactttatcatttatttaacttctctatgactcaaagttctgcttaatcaagcaagtcctatgaaaaaattccttcttattccaaaccttactcctattaa

SEQ ID NO: 67211 - DNA, 90 bp, Glycine max
gtaagtgatgacaaatataatcccagctctatgagaccttcgcgactgcaaggtctgggattagatttgtttacagttgtctgagcagca

SEQ ID NO: 67212 - DNA, 393 bp, Glycine max
ggcacaagtgagtttgttgatcgagatagctagagacagtgtgatgaaaatgaaggtccttgttttcttcgttgctacaattttggtagcatggcaatgccatgcgtacgatatgttccctctccgaatgaacactggctatggtgcccgtactccggaggtgaaatgcgcaagttggaggcttgctgtggaagcacacaacatctttggctttgagaccattcctgaagagtgcgttgaagcaacaaaggaatacatccatggcgaacaatatagatcagactccaaaacagttaaccgacaagcttacttttatgccagagacctcgaagtccatcccaaggacacatttgtgttcagtatagatggcaccgtactctctaatattccata

SEQ ID NO: 67213 - DNA, 54 bp, Glycine max
  unsure (1)..(54): unsure at all n locations
gagacctcacgtcangcggggctacccggtgagtgtaagcatatcaataagcgg

SEQ ID NO: 67214 - DNA, 353 bp, Glycine max
  unsure (1)..(353): unsure at all n locations
gatagcaaaaggaaaacacaagccaagtgaaagtgagaaagaataaaaatcaaagagcgtaatgtcagggatcattcacaagattggggagacccttcatgtgggagggcacaagaaggaggaggagcataagggtgagcaccatgctggagaatacaaaggggagcaccatggtgaacacagtagtgagtacaaaggagagcatcatggtgaacacaaagctggagagtaccatggtgagcacaagccagagcacaaagaggggnttctagacaaaatcaaggacaagatccatggtgagggcggcgccgtcgagggcgagaagaagaagaaggagaagaagaaaaagggca

SEQ ID NO: 67215 - DNA, 413 bp, Glycine max
  unsure (1)..(413): unsure at all n locations
ggtccaatccaattgaattctccagagagaagaagggacttaggcgatcatcacttcacttcactaatacatcatggcagacgagacccagaacaagtatgagagctctgaggttgaggtccaggatcgtggtgtttttgactttctcggtaagaaaaaggacgaagaagacaagcctcatcctcaggaggaggtcatcgccaccgagtttcaaaaagtcactgtctcagaccaaggagagaacaagcacagcctcttagaaaagcttcaccgatctgacagcagctctagctcttcaagtgaggaggaaggagaagatggagagaaaaggaagaagaagaagaaggaaaagaaagggctgaaagagaagatcgaggagaaaataganggtgatcatcatcatcacaaggatg

SEQ ID NO: 67216 - DNA, 173 bp, Glycine max
aaatggtcctatcaactacgactacataaatctggcgttgggctaagacaacataacacatctcttgctacaagactttagattgaaccatttttgacttgactactcattgtgtcggcactgagaatatacagacaacaacggttgcaaaaacacgacctaatgattctgat

SEQ ID NO: 67217 - DNA, 421 bp, Glycine max
ggttctagtgtgtgattgtttgttgttgtaactcgttcttcggcttttggtgttctgtgtttgtgtttgttttttctctcacctgaaaatgtcttgctgcggtggtaactgtggttgcggaagctcctgcaagtgcggcaacggctgcggaggctgcaagatgtacccagacttgagctacactgagtcaaccaccaccgagaccttggtcatgggagtggcacctgttaaggctcaatttgagggtgctgaaatgggtgtgcccgctaagaacgatggctgcaaatgtggaccaaactgctcctgcaacccctgcacttgcaagtgaggtgttgggagagcaagcttcaggcagagatagcccttaattaggaataatgataaactattaatgtgtagcttaaaacttacgtattatgtc

SEQ ID NO: 67218 - DNA, 56 bp, Glycine max
  unsure (1)..(56): unsure at all n locations
agacctcaggtcaggcggggctacgcgctgaggttaagcatatcaataagcggnac

SEQ ID NO: 67219 - DNA, 341 bp, Glycine max
gccacacgaccacacaattggaacacaacctaaaatggttccctacaaaaagccgctgctgcgcggttggtgaaaccatctaagtctgctccatccactcaataattctaaatattgcacggccgccgctgctttttttgctagatcacaaacacttacttacaagaacatatactttgtatggaaaagctataacaaaatgagcaaaacaaagagtacaacctcataattgagaacacccatcacgctcacatcttcattagtatgatcgtcaacatcatttcgtgagttggcggaattttcataatgatcaccatctgcttcctttccatcatatacat

SEQ ID NO: 67220 - DNA, 313 bp, Glycine max
gacatgtgagtttgttgatcgaaataagtagaaagggtgttattaaaatgaacgtccttgttttcttcgttgctacaattttggtagcatggcaatgccatgcgtacgatatgttccctctccgaatgaacactgtctatggtgcccgtactccggaggtgaaatgctcaacttgtaggcttgctgtggaagcacacaacatcttttgctttgagaccattccttaagagtgcgttgaagccacaaatgaatacatccatggcgaacaatatagatcagactccaaaacagttaaccaacaaacttactttta

SEQ ID NO: 67221 - DNA, 425 bp, Glycine max
  unsure (1)..(425): unsure at all n locations
tattttggctcaagtgagtttcttcatcgatagggctgatgcaaaattatnaaaatcaacgtccttgttttcttcgttgctacaattttggtagcatggccatgccatggcgcaggctaccaaaggttccctctccgaatgaaaactggctattgtgagcgttcttcggaggtaaaatgcgcaagttttaggcttgctgtggaagcacacaacatccgagcctttaaaaccattcctgaagagtgcgttgaaccgacaaaggactacattaatggcgaacaatttacatcagactctattacagttaaccaacaagctttcttttatgctagtgaacgcgaagttcatcacaacgacatatttatattctgcataaataacaccgtactctctaatatcccatactatgaaaaacatggatattg

SEQ ID NO: 67222 - DNA, 52 bp, Glycine max
gacctcaggtcaggcggggctacgggctgagtttaagcatatcaataagcgc

SEQ ID NO: 67223 - DNA, 323 bp, Glycine max
gccagaagacgacagacggggataccaaaaacaaaacacaagccaagtgaaagtgagaaaaggaaaaatcaaagagcataatgtcagggatcattcacaagattggggagacccttcatgtgggagggcacaagaaggaggaggagcataatggtgagcaccatgctggagaatacaaaggggagcaccatggtgaacacagtagtgagtacaaaggagagcatcatggtgaacacaaagctggagagtaccatggtgagcacaagccagagcacaaagaggggttcctagacaaagtcaatgacaagatccatggtgagggc

SEQ ID NO: 67224 - DNA, 262 bp, Glycine max
  unsure (1)..(262): unsure at all n locations
caaaangccatctccccttcttacaaatcatccttctcttcaatctctctctctctcttttctctttcttcaaaccgaacatttcatctccaaatgcatcaacacgtcgaagtagaaattttgcttacattcactaatctcttcanccatcttttctctaatgatgaaattcgaattctcatccttgttctttatgctccttgtaaaaccactattctctacaagctcaaactcggatacatcctttctacacttcctacca

SEQ ID NO: 67225 - DNA, 418 bp, Glycine max
tattggggctcaagtgagtttgttgatcgagatgactagaggcagtgttatgaaaatgaaggtccttgttttcttcgttgctacaattttggtagcatggcaatgccatgcgtacgatatgttccctctccgaatgaacactggctatggtgcccgtactccggaggtgaaatgcgcaagttggaggcttgctgtggaagcacacaacatctttggctttgagaccattcctgaagagtgcgttgaagcaacaaaggaatacatccatggcgaacaatatacatcagactccaaaacagttaaccaacaagcttacttttatgccagagacctcgaagtccattccaaggacacatttgtgttcagtatagatggcaccgtactctctaatattccatactacaaaaaacatggatat

SEQ ID NO: 67226 - DNA, 211 bp, Glycine max
aaacactaaaaatttttagttccacaaaaccaaaccaaaattacaactgcctctattctcatccaccattatatcaacaccaaccttatctacaagcacaattattcaaaaacaccatcattttaagccatccaacatattctatcaaggtcttatacccatcacacatttcacaaccaaagttatcatcaccacacaaaagcttatttca

SEQ ID NO: 67227 - DNA, 424 bp, Glycine max
  unsure (1)..(424): unsure at all n locations
ggcacaagtgagtttgttgatcgagagagctagagacagtgtgatgaaaatgaaggtccttgttttcttcgttgctacaattttggtagcatggcaatgccatgcgcacgatatgttccctctccgaatgaacactggctatggtgcccgtactccggaggtgaaatgcgcaagttggaggcttgctgtggaagcacacaacatctttggctttgagaccattcctgaagagtgcgttgaagcaacaaaggaatacatccatggcgaacaatatagatcagactccaaaacagttaaccaacaagcttacttttatgccagagacctcgaagtccatcccaaggacacatttgtgttcagtatagatggcaccgtactctctaatattccatactacnnaaaaacatgatatggggtggagaaa

SEQ ID NO: 67228 - DNA, 233 bp, Glycine max
gcgtccgtacaggtgttagaacacctcagaaaggacctcataccaggacacaaaccatactttcctcctgtggataggggaacctgactgttacgatcgaagagtcaccttctctctactctaacttatctcatacatacaattaccctcaggttttaccaattacaattgaatacattgtctctttccacagcatcctattatatcccgacaatatcattaatgaaaatctg

SEQ ID NO: 67229 - DNA, 358 bp, Glycine max
  unsure (1)..(358): unsure at all n locations
gatttacaattcacaacaacacacaacaggttattgttacatatccccaaaccaaaccacttcacacanaacacatatccatnggngaattagtttcattgttgaacaatcaaggctactaaaaatcatacatgnacaaaggaaaaggttccgcatccggtattttaaaaccactcatccttatatactactcaaactaacgaatcatactgcaaataccaacataattaataactgctttaatcctctttggaatgaatagctgaatttcactctgacaaaaccattcagaatatctaactttcaacttatttataaacatctttttaatgcttattacaacattgcaaattctttc

SEQ ID NO: 67230 - DNA, 338 bp, Glycine max
ttgggggcagcagaagaacaagttgtttagagctaagaaggagaagcaaatggctttctcaatcatctcttccccagctgttaccactgtcaaccgtgccggtgccggcatggttgctccattcactggcctcaagtccatggctggcttccccaccaggaagaccaacaatgacattacctccattgctagcaacggtggaagagtgcaatgcatgcaggtgtggccaccagttggcaagaagaagtttgagactctttcctacctgccagaccttgatgatgcacaattggcaaaggaagtagaatactcttttatgaaaggatggattccttgct

SEQ ID NO: 67231 - DNA, 176 bp, Glycine max
tcctttttcactaaaaaattaatattccaaaaatcatttcctcttacttcccacacctatcaatacgcctctttttcaccaccaccacaagcaccgcattccccgttactttacccaaaccctcattactctacctctcatcacttatattactctatcatctcttacataccatc

SEQ ID NO: 67232 - DNA, 119 bp, Glycine max
tccaaaccaaaaaaaataaattaaaaaaaaatgcttccgctctataagatccaaacttacctacaccttcatactacgtcatatttcttttatattttcacctaaattcaatttacttt

SEQ ID NO: 67233 - DNA, 226 bp, Glycine max
gcgtgcgtacgggtgctaaaagacaacaaaacgttacattatatatattaatcatctattttatactatgggtacattggtgataatattctttccaattcataaccatttctacccatgtaaagctttttgttttacattcatctcaagtccaacgctcacaattactttctaacccttatgaatactacttaaatattccctaactcctttccacatgattaca
